United States Patent Application Publication US 2007/0067865 A1 - sequence listing, part 47

SEQ ID NO: 282807 - DNA, 530 bp, Zea mays
ccatgcgtccggtggcggcagagctgctgggagagaacgcgttactcctgtgcatgccggaaatcctgccggtgctgctgtggctcagcgttcgccttgacactgctgacgacaggatcaagctggtcctggacagtaatctgctccccgtagcaccacctgtagtcctcgccatgctagcgacgggcgagcccctgctctactggtacagaaaggcgttgctgtcttgtgttgtttcggcgcttcttaccttctacgtttatttcatactgtgccagtggccgggaggacaacgcgatcgcacgctcacaggttcctctttgcagcacgcggtcatccatctcaagtcttgggcaaaggttttgctcaaagcggtggctgtgctgctaatatttgtatgcattctttccaactagttctactgcaagaaccggtggtctcatcatcagccgaccaaatcttcatcgactatatgtaaaaaagatcctccagttcataatttgactgcgaaatgaatattttcactatcc

SEQ ID NO: 282808 - DNA, 534 bp, Zea mays
  unsure (1)..(534): unsure at all n locations
ggcttttgttgccaccgagcattactgttcaagaccctggcggattccatcaatctgccctgtcgcattgtgaagggatgcaagtactgcaaagctggtgctgccacttcttgcttggtgcgctttggtcatgacagggaatgcctaattgatttaattgggaacccgggattcttatctgaacctgactccctcttgaatggactatcatccatctctgtttcttcaccattgcgcccaccaaaacatgactcggctgatatttctgataatttcaagttgtttgccaagaaatatttccttgattggtcagtcgttaaatctcatgtttcagtgatccagcagctggaacggttatcgacttagatgaggctatgggatcaaatctaggtctaaactcatcacatgcaacaacagtgattgtcaagctaccttactcatctaaggctggtactcacgcantagtcaagagggagttttatatgcagaggagtcccagaggatactcatctgactagggaccccttagcgata

SEQ ID NO: 282809 - DNA, 483 bp, Zea mays
gtaaacttctaaccaaaacccctaatgtctcgaggtggcgcaccccaacaaactggctccgcctccttcctcctcccctccggcctccgccgctgccttcttttccccgtgcgcatagtcgctcgcagaggcgccgacatcacttcgtccggaccggaaacacgcacgaagtgaggaccagcaccaaacaccgcgccgcttctcctatatttgttcctctcccggagccgcatcgtgtgtaagcgtgtggcggatccatggcagcggcggcggatacctcggaggcgtccgcggcaggaatcgcgctcgcagaggccaatatcaactgggagaggttggacaagacgaggtttcatgtgattggagctatcctgttcacggcccagcaaggtgctctgcacccaacagctgttgtgaagactaggatgcatgttgctgaacgtgggcttgcacatatgtctgggtttgctggttttaggagga

SEQ ID NO: 282810 - DNA, 502 bp, Zea mays
ttatctaatattcgatggtgtacagaagagtttaccggttgtttcacccatcttgttattcactatcttgatattcaccatcctgatcagaatgtggccaccaatggccaccatcgagtttttgacatcacacctggtaggcaggcactgacctctagacatgctgccttccacagttccactcatctttctaccatccttggttgcagtccttcctccccccagttcctagagcccagaggtttggcgctgcacatcactgttccttcttcagtccactcatgtagtcatgtccatggatgaggttttttcctcttgaattcagtgggacaaccgttatgttgtgtttcttggaaaaatgtctttcgttagtgttggtcttctaaataagcgtcacttcataccactttggatctgactacttatcacaagaatgatcaggttagtgcactctcaagaatagttgcttattctaaatttcggcacacatgattctgtagat

SEQ ID NO: 282811 - DNA, 297 bp, Zea mays
gcggcagatagagtaccccaaggcccaaacccaagtgcccatcacggagctctcgctagcgacgacgacggcgcccgctcgattggtgctacaagatccctcgtgcgtccaccggtttgcggcgtggggatctcggctctgactgaccgtgcccggagccggaggcaggcgcgatggcagtggcagctccggccgcggtgagcacgggagccgggcagggcaaggagtaccccggcgggctcaccctctacgttctcctcacctgcgccgttgctgccaccggcggccttgtctgcg

SEQ ID NO: 282812 - DNA, 399 bp, Zea mays
gtcgtttcctagctcctcctcctcgctcgccaagggagacgcacccggtccattcgtcctctcctcctatcgcctccccctctcctccccggagatccccgctaccgaaggattatcccgtgcagaggcccactagtatatcagcttggagttgaggagaatggctgttggtgggactcaaccagtccttaggaagtacctaggcgccctcaaggacacgacgactgtgagcttggcaaaagtgaacagtgattataaggaattggacattgcaatcgtcaaggccacaaaccatgttgagcgcccatcgaaggagaagtacataagagaaattttccattccatttctgctgctaggccacgggacagatgtagctctattgcattcatgcccttgct

SEQ ID NO: 282813 - DNA, 362 bp, Zea mays
cgccaagaacgcactgagtccattcctcctcttcccctcctatcgcctctctctgcccctctcctccccggagattcctgctcctcccgactcccaagggttatcctattcactctgcctgctgccaaggccaactaggatatcaactaggaggagttgaggaggaatggctgttggcggaactcaaccggtcctcaggaagtacctaggtgccctcaacgacacaacgactgtgagcctggcaaaagtgaacagtgattataaggaattggatattgcaattgtcaaggccacaaaccatgttgagcgtccatcaaaggagaagtacataagagagattttccattccatttctgctgcta

SEQ ID NO: 282814 - DNA, 279 bp, Zea mays
atatcaacagaatgtctgtttgaaaatcaattggatgacctagaacccgaagaagctgtggctattatgtctgcattcgtcttccaacaacgcaatgcttcagaaccatctcttactccaaaactggctgaagcgaagaagaggctctatgatacagccataaaattagggaagctccaatccgcccttcaaggtgcctgtggaccctgaagagtatgcacgtgataatctcaagtttggccttgttgaggtctgctaccagtgggcaaaggggacgcc

SEQ ID NO: 282815 - DNA, 306 bp, Zea mays
ttcactcgtccgatgggttcctaggtcccaatcagctcaagatcaactattggaatatacagatgaggaagtgctggagaagttccaaccaaatgagactcgggagcattttatgctagttaaatatacaggcaatgtgtttcctacatggatgatgaacaaactgactccactcccataccttgtcaatctttgtttgttccacctgcataactgcagagctctccctccaattggccatttacaaaatttgcgttacttgcatattaaagatatgcccaacctcacaaatctagagatgggttt

SEQ ID NO: 282816 - DNA, 532 bp, Zea mays
ccctcttcttccgcccacgcgtccgcccgcatgcgcgaagtgaggagacgagaagggggagggatccacagttcacacacaccccgcttcccatggcgctcgcgctgcgctgccctcccgccgccacctcgtcccggagccccttcctaccgtcgacctccccagcccctgcggggaaggtcccgaggaggccgcccgccagctggaggtgcctcgcctactacggcgacggcggattccgcaagaactacgaccacatccccaagcagttccgcgaggagaacctcaaggatggactgatggataattacaagcatgttcctcaattcctttatggattaagtgctgctcagatggaaatgtttatgaatgacgataacccttataatcggcaatcccagaaagttacagaggaaagcgtttctgctgcgaggagctacgatgagtttggtatgtacaccatgtcaggcatgcatgaaggccctgcaagttacagcatgggtatgggcatggggggcagcatgagcatgag

SEQ ID NO: 282817 - DNA, 277 bp, Zea mays
tccctcgcgtccgaggatggagaaaggaagcggatggaggaaggcccatcatcatctgaatagtcgcaggagaaagccctatgtggagcgcccactgaaatcacctcttgaggcgtgacttcttcactttttggcgcatcaagacccaacgtcagccacggcactgtggtactctcatcagctagaccagcttggttaacttggtctgctgacttctgctcttccaccccaggtactctctccattgctgtgtttagagagggttttctgaagtttg

SEQ ID NO: 282818 - DNA, 819 bp, Zea mays
accggcaattgatccagtgcttggaaattattacacatacactgcaacaaacacttctttgcagaggtttgttgttttgccaaatggcacagacatctgctacatggttagagaatcttcacaagattgggagcttgtctggtaccaaccatcaaatgagtgtgaatactatgctacatgtggtccaaatgcaaaatgcactgcatcgcaagatggcaaggcaaaatgcacctgcctaaaaggttttcatccgaagttgcaggagcagtggaatgcaggaaattggagtcaaggttgcatcaggagcccacctctgggttgtgagaccaatcagtctggggatggatttcttccaatgggaaacataaagtggcctgatttctcatattgggcatctacagtgggagatgagcctggatgcagaactgtctgccttaacaactgctcatgcggtgcgtatgtttacacagctacaacagggtgcctagcctggggtaacgaactaattgacatgcatgagttgcaaacaggggcatatactctaaacctgaagcttcctgcttctgaattgcgaggacatcacccaatttggaaaatagccacgataatatcagccatagtgttatttgttttggctgcttgccttcttctgtggtggaagcatggtagaaatattaaagatgcagtgcacggaagttggagatcaaggcattcgtctacccaatcccagcagaatagtgctatgctggacatctcgcagtcaattcgttttgatgatgatgtggaggattgaaaaagtcatgaactcaaagtgtactc

SEQ ID NO: 282819 - DNA, 346 bp, Zea mays
cccacgcgtccgcccacgcgtccgcccacgcgtccgcccacgcgtccgcccacgcgtccgcccacgcgtccgatttgagtatctacctcgtggcagtccatctgaagcatgccttatgaggatatttgtggcaacggttgaagctatacttaggagaacttttccttctgaaacatcagagcaatccagaaagccaagaagtcaatctaagaaccttgctgttgctgaacttcacacaatgatacattcactctttgttgaatcctgtgcctcaatggaccttgcctcccggttgctatttgtggtgttaactgtttgtgtcagtcatcaagctttgccagggggg

SEQ ID NO: 282820 - DNA, 456 bp, Zea mays
tgccggaagttggaagttcctgcatctgaggccactatcgatgccactgcacaaggcattgcttctttgctgtgtgctcatggccctgatgctgagtggagaatatgtaccatctgggaagctgcctatggtttgctcccgctaagttcatcagctgctgatttgcctgaaattgttgtagctgccccgcttcagccacctacactgtcatggagcctgtacttaccattattaaaagtattcgagtatctacctcgtggaagtccatctgaagcatgcttgatgaggatatttgtggcaacagttgaagctatacttaggagagcttttccttctgaaacaccagagcaatccagaaagccaagaagtcaatctaagaatcttgctgttgctgaacttcacacaatgatacattcactctttgttgaatcctgtgcctcaatggaccttgcctcc

SEQ ID NO: 282821 - DNA, 786 bp, Zea mays
cattgattgtgctgagcacttgataaaaagcaagtactgctccagggaaaagctttgcattaatggcagaagcgcaggtggcttattgatgggtgctgtcctaaatatgaggcctgacttattcagggcagctgttgctggagtgccttttgttgatgttgtcacaactatgcttgatccaactatcccactgacaacagctgaatgggaggcgtggggtgatccaagaaaagaagaattctattattacatgaaatcgtattctcctgttgacaatgtgatggcgcaagagtatcccaacattcttgtcactgcaggcttaaacgatccacgcgtgatgtactctgagcctgcgaaatacgtggcgaagctgagggagctgaagagagatgacaatcttgtgctgttcaagtgcgagctgggagctggacacttctccaaatcgggaaggttcgagaaattacaggaggatgcgtttacttatgcgttcatcctaaaggcgctgggcatgactcggaagctggcatcactgtgaattcgattggtgtgaggcacctggactggatttgtatcatggcctgccctcttggttgggagatggatggattctgatggaatatgcatttagatttgaatagggacacagatgttatgcaaaagagattgtttgaaactttgaattctgatttgcatttggatatctgtcctagaaaaaaaaaaaaaaaaaaaaaaaaaaaaaaataatccaaatacaaaaaattaaaaataaatatggggccggctctt

SEQ ID NO: 282822 - DNA, 228 bp, Zea mays
agaacaagttagtagagaccatccagttcatggaaattcttaatttgaaagacacctttgagaaagacagtttttttcgtaaactccccaatatagctgaacagcttcctcgtgaaatagttctgaaaaagctgctccctgtattggcttcttctcttgaatttggttcagctgccgctccagccttaactgttttgttaaagatgggttcctggcttcctgctgacc

SEQ ID NO: 282823 - DNA, 317 bp, Zea mays
tacctccggtgaggtgagacgatctccgacaccatggcctccagcacctccctctccctctgcttgcacgcctcgtccccctcgtcctcgtctcctgggctccgccgaccctccctcgcctcctcctcgtcctccaggtccaagagaacgcgcaagatcacggccaaggcggtcagggaggactggacgcagaaatccaagcccatccctcctggcgccgcctaccctgccaacgaccactgcagccgctgtggcctctgcgacacatactacgttgcgcatgtcaagactgcccgatcctttttgggagacgtcta

SEQ ID NO: 282824 - DNA, 1266 bp, Zea mays
tccacgcgtccgctcatcgtggcccgcttccccccggccaagggatggacgcgcttcgcctacggccgtccctcctctccgtgcggcccggcgcggcccgcccgcgaggcagtggtagctgcccttttcatgaatatctatattgttggactgaaccagttattcgacattgagatagacaaggttaacaagccaactcttccattggcatctggggaatacacccctgcaactggggttgcaatagtttcggtctttgccgctatgagctttggccttggatgggctgttggatcacaacctctgttttgggctcttttcataagctttgttcttgggactgcatattcaatcaatctgccgtaccttcgatggaagagatttgctgttgttgcagcactgtgcatattagcagttcgtgcagtgattgttcagctggccttttttctccacattcagacttttgttttcaggagaccggcagtgttttctaggccattattatttgcaactggatttatgacgttcttctctgttgtaatagcactattcaaggatatacctgacatcgaaggggaccgcatattcgggatccgatccttcagcgtccggttagggcaaaagaaggtcttttggatctgcgttggcttgcttgagatggcctacagcgttgcgatactgatgggagctacctcttcctgtttgtggagcaaaacagcaaccatcgctggccattccatacttgccgcgatcctatggagctgcgcgcgatcggtggacttgacgagcaaagccgcaataacgtccttctacatgttcatctggaagctgttctacgcggagtacctgctcatccctctggtgcggtgagcgcgaggcgaggtggtggcagacggatcggcgtcggcggggcggcaaacaactccacgggagaacttgagtgccggaagtaaactcccgtttgaaagttgaagcgtgcaccaccggcaccgggcaaagagagacacggtggctggatggatacggatggcccccccaataaattcccccgtgcatggtaccccacgctgcttgatgatatcccatgtgtccgggtgagtcgtctctagaaagattggttgcacaacgtccaacatagcccgtaggtattgctaccactgctagtatgatactccttcctagtccttgccagcaccagtgacccaaacttggtcggctgagctcagcgctcagcagctttacgtgcatctgcgccttgacttgtgc

SEQ ID NO: 282825 - DNA, 625 bp, Zea mays
gtcggctcgtcgcggcccgcttcccccccggccaagggatggacgcgcttcgcctacggccgtccctcctccccgtgcggcccggcgcggcccgcccgcgagatcattttctaccaccatgttgttccatacaacgaaatggtgaaggacgaatttgcttttctcgccaaaggacccaaggtcctaccttgcatcaccatcagaaattcttcgaatggaaatcctcctattgtaggatatcacatcggtcattaaatacttctgttaatgcttcggggcaacagctgcagtctgaacctgaaacacatgattctacaaccatctggagggcaatatcatcttctctagatgcattttacagattttcccggccacatactgtcataggaacagcattaagcatagtctcagtttcccttctagctgtccagagcttgtctgatatatcacctttgttcctcactggtttgctggaggcagtggtagctgcccttttcatgaatatctatattgttggactgaaccagttattcgacattgagatagacaaggttaacaagccaactcttccattggcatctggggaatacacccctgcatctggtgttgccatagttacggtctt

SEQ ID NO: 282826 - DNA, 577 bp, Zea mays
agcgagacgttgttgctcttctttttacctcaagttcttaatttcctgtgttcggtcccacagctctttcactttgttccttgcccaagacataggttgccgaggtttgatcctggagcgggtctgttgactggtaccaaagatgggaatctggtgaacatattccttaggttatttgggaagtgctcggagaaggccctttgcataaggctccttatttttcaggctctatgttgcgtattctgcttctggctaagatacatgctcaccggatggtacaaatgatcacctgcgaaaggctctccatcttgtcgcccagctctttggaaaacccggttgcgtctgatggctattgtttcctcgacgtactttatcaggaacatgggatctgcagaggagcaattggaaggctgaaagagcagaaggttgagcgggaggagtaatctgattaattgaattttgtttgtgattaggcctattgggcctggggtttgggccgtctggccttgtaaggagggtgtacttaaaccctgaatcttctggtaattccccggaagattttaaaagaccccccccc

SEQ ID NO: 282827 - DNA, 459 bp, Zea mays
ctgcaactctcggactgcagcattccatttccaggaaggccacggcggcgagaactcactcgggcgctgccggcgatgtacggcacttccgaccccacagctgcggacgcacggctttccggcgtgcggagaaacagtacaagctttacaagacactcaacgtcaagggcaggtccaggtccaggtccaggtcaggatgcaggccgtctagcggagagggaggtggcgctgatctgtcagccgtagttgacttccatgctctgcttgccgccgacggggagcttcctgacgggattggtcggcgtgagtgccccggattcgaccgccccgtgttctgcttcttggaccggccagggttctatttcattcctggtgctttatcaactgaggaacaatgctgttggatcagggaaagcttgaaaacatttccacagccacctaataggactaatttgactg

SEQ ID NO: 282828 - DNA, 474 bp, Zea mays
tccgtctctctcagtctctctcctgccctgtccgtcccactccccgtccagcggagagagaccctgtgggctgtggccgggcagccgtttcccctccccttccctctccgctccctccagagtctactgtagcgcagtgccgtagggtttcgcgtcctatccttcctcgcatcctccatggccgatcctgacgacctcggccgccgcctcgccgcggtcgccgtatccgagtctcctaccgccgccgcggctgcgctggagagcagcaacaacaacctgttccaggtgatgcgcgccgtggaggacgcggaggccaccatccgccagcagctggaggagaacagccggttgaaggacgagctgatgctcaagacgcgggagctccacagaattaggtcagaagccacagaccaagcttcctctcatgggatccgtatccatcaggatcgcgctcttggtgcccacacagacacc

SEQ ID NO: 282829 - DNA, 334 bp, Zea mays
cccacgcgttcgtaccaacctcgaactccatagcagagtaaaagagcttgtatcagagttcttgcgataggggaacgccataggtacttatacaattgggtctggaggctcgtcggctaccggacaggaaaacagcaaggcagaagggcattgctcggtcgctgggccgatgagtggcactgtcagggagcgtgacaggggcgacaaatctagacctccacgtctgtattttttcttgtgtttatgtaataatctcgattggttattacttcacatgacatgatgttctcccccatagatacattcgtgttttgacaataaaaaaaaaaataaa

SEQ ID NO: 282830 - DNA, 468 bp, Zea mays
tgcctctgttggactcaatggaaaggcgtccactgaggaaggtgagagcgaggtcagcaaaccggcaagccgagttggccgacggcggaaatcaaatgccaacccactgattggaacagtagatgctgggctcgataacccagaccttggtccatttcttcttaaacatgcaagagacttgattgcctcagaaaacccacggcgggcattgtaatatgctctccgtgccacaaagtcgtttgagaagtgtgctggtggaaagccaagcttgaacttagtgatgagtttgcatgttagtgcagcaatctactgcaacttgggaaaatatgaagaggctgtacctgtgctgcatcgatccattgagatccctgtaatcgaggaaggccaggaacatgctctcgcaaagttctctaggtagatgcagttggtggacacctatggcatgctaggtcaaactgcacactcact

SEQ ID NO: 282831 - DNA, 398 bp, Zea mays
accggtcctgattcccggttttcccacgcgtttgtccacgcgttcgtccacgcgtccgcccacgcgtgcgtcctcgcgttctcggacgcgtgtgctgacaatgggttccaagggacaccaaggaagcttggtattaaatactgctacaacagaccatgtgctctgtatgctgctcctgatcctttcggacaagaagctgagaaatcattaactgagggcaataagggtgaaactacaactatgatcaaattaacagcaaacctgagcagtgcctttttcccacggttcagtccggatgggaagtatcttgtcttcatctcagcgcagagtgctgtagatagtggggcacacaatgccacaaattcattgcatagaatcgaatggtgtacagatggaaa

SEQ ID NO: 282832 - DNA, 378 bp, Zea mays
cagcggaacctcggtacacatatccgcctgtgatcgatgctgacccgatttccttgttcacagcagaatggtcgtagcccatgacggggaagattgcgtttatggactcaggcgatgtattccctccaggcgacttttgcgggtgaaagatgtatggcccctcgtatacacgccatccgtagtttccacccttggtgactaaatctacctcttcgtatgcgtcctgctcatgtgtcacagtgtaaggtacaagtccaaggcaaagccgttagatcagccagcgttttcagaaagagtgcagaaaacttcatggtcaaaacatgaggcttcgataatttaggctctatttgttacttatagttccgcttttactcctta

SEQ ID NO: 282833 - DNA, 543 bp, Zea mays
gttgttattttagttttctttgttgttaatccaagcatgctgttgcaatcattgcttagtgatggaaacacctaatagctatctaattcattaaccttgtacggttgtgctcagggttccaccacatggctaacttgtagctaaggggtaccattaaaagttagccatattgcattccattagtggcgatgaaattctccaggctggcatgcagcacaaagccgaccgtggcagatgttatcggtatcgatgtaggcacaccgaattcatgcatctctgtactggaatgaaaggtgtgtttttaactcgttcatcctaaaatctgtcatattttgttgtttgtaaatgggttgttgtatccatctgtagtagatttcatgcttcaatcgctgaaattagtttgggccagctgctgtatcaatatgtacttaatgtcatggtttgaaatagctacgatttgagtaaattctgtattcttttctttaaatgggttgttgtatgttatgcttgaatgctgaaatggtttgggttaaatgttgtctc

SEQ ID NO: 282834 - DNA, 458 bp, Zea mays
cccacgcgtccgcaaaaagatcccagatgtcgctaccaagaagttccaagcgcacgggcatctgtttgagcaaaacaagaacagcgcactccaatccgttcctgacctaccagagtttgcgctgtcgctgagaccggatggatacgagttgccaatcactgattcgatctgggagaatgttgatggccaacctcagattcaaagcctcaaggagcatatgatagatgacgaagatgaagtaggcacaaaatgatagttctcacttccaaatgcttcttttcattgtaccaccaaaagtagcagatttcaaaaacgcttaatccaaaatgttttggattcagcatatggctcaacttaaaaaggaatcgcgatctctgtattattgcaagtattaccatatgatatagtaaagtcttgatgtgtaatagaatcataaataatagttggtttcttgctgt

SEQ ID NO: 282835 - DNA, 1051 bp, Zea mays
gcttggcacatctgcaccaagggagactgctgcagaggcaagtaattttcgcggaactagtgtctgtttaacctccgaagtgcagtcaagcgatgagaaacccatacaactggttgaagacatccttgaagaatttgaagatgatgaggaaagggacttctcttacttgctggatatactgattgcttctggaattcatggaactgccgaggatcaaatgtacaaggtgtgtcagtctctcgaccaccctgctggtgatgacgtatttgagaagctggaaaagaagtacaacaaagttgttcagtggtcaagatcagacaggaagcttctattcgacatggccaacacaatactatcacagatccttgccccatgcttgaacatgcaaccttgggtccataccactaggaacttggccccactttggggctcagatggtctcctggagaaagtcttgcagatgctagttcagagacgggaacaccttgcacccagtgagactaagccagagaagaaaggatttgatccgaagtggccaggtttagcagactgcatcgccagggtaggaagggacattgagaggatggtaaaagatgacctgttggaagagctggtcgttgagctactgttcagttaggtttccacaattccacggccgtagtaggttttatcatagcagtacagattccttgttcttttgtttagtttttttagtcagttgtagttgttcctttggtcccctgtccctgtccctgctatcactgctatttttttttctcttcgttgttaaagcagtgggtgacagtttttttttggtctagtcgccgtgcttccggtggcactatagacgtgaattccattggattagaggatctctgtagggaaaagttcttttctacctctccaaaaaaggtaccttttgaagtgaggtttgtaagaatataaaaattcctgtcgagctttgtcggctgtgagccctcaaatctgtaaatgagggaaaattgtaatcccaattgtgttaagctttaaaggaaaaggaagatagtggcgt

SEQ ID NO: 282836 - DNA, 925 bp, Zea mays
ttcgcccccgcgcccgcgggctccaggccgagcggaagctaggcgcgatgtcgctgtcaccggcggacggcgcggcgtactggctgcggtggcaggtcctcgtctgcggcgcgctcatcgcgctgcccacggtggccgcggcggcgctgctgccgcggctgcggagcgcagcgccgcccctgcgcgcggccgacctctgggtcccttgctgggcgcgcctccacccgggctggctcctcgcctaccgcgccgtcgcgctcgccgccgccgtagcgcttctcgcgcgcctcgtcgtcgcgcgcggcatcaccgtcttctacttctacacccagtggacgtttctattagtcaccatatattttgcgtttgccacagctatatcagcccatggatgtttggtttactcaaggaaaagtttgaggaaagccgacgaatcccgtggacttcttaatgctgatgtcgaaaatcgtgatgtttccaattctgtttctggagagaggaaaacagatgagacaaatatgatgatgagctattatgaacaaatagtgaatgagagaagagctgggttctggggccggtgcatggaaatcatataccagactagcgcaggtgcaacaatgttgactgatgtcacatattggggccttcttgtgccatttttctaccgtgacaagtttgggttagcgttggtcactgatggcatgcactccctaaatgctgtttttctacttattgacacacttctcaacaacatgcccttcccctggtaccgaatggctctctttgttttctggagctgcgcctatgtaacattccagtgggtccttcatgcttgtggaggcgtatcctggtggccgtacccatttctggacctttcatcatctggagctcctctatggtacctcggcatggccatcgctcatgt

SEQ ID NO: 282837 - DNA, 590 bp, Zea mays
cccacgcgtccgcccacgcgtccgcccacgcgtgcgcccacgcgtccggagaataatgaaacaacagcaagaggaggaggaacggaagcgtcagctcaaagaaaagaagaaagagaagaaaagagaacaggcaacccaacatgaacctgaggacgttgatcctgacatcgctgccatgatgggttttggtgggtttggttcctcgaagaagtgacagctctgtgttggccgcatccctttggtgaccttctgccctgaagatattgctcaaccccataaacacctgtgccatgaaaaatcgtttttgccagaatcctgataagatttgaacgaagtgcactggatgcaaggatactacgttttggcactgggatactgaactgcgtgtatgggagttgattatcaaaaggaatatctaagggtgttttggataaacctgtttatttgctacttcgggtgttcctgccatagaaacagctgatggtcgtgattatttgttgtggcttgtgggaatgcagatgtgcgaagtggaacaaaccaaaagaattgccgtgtcattttctagaggaataaacttgtgtattgcagtt

SEQ ID NO: 282838 - DNA, 503 bp, Zea mays
cccacgcgtccggcccgtcgccggcgccgcccgagcccgccacctcctcggactcctcctcgtcttgggccagcggctcgcacaagaggcggaagcgaggcgaggccgcggctgccaacatggccatggcgctggtgcccccgccctcccagcttaaccggccggcccagccgtggttccctgccgcgccggtcgagcaggcggcgatggctccgcgcgtggagcagctcgtcgtctagccatgcgtgcaacgatggatgcgccggcgaaagcgggggagggacagggcaaggtcgtgcgctgcacttgcgtgacagctccaccggatggaatgcgaatatgcgataaagctcgtgatgccgctgttgctctccgtgcaactggcgcaagtggaagaagctgtctctgtgtgtaatcaagtgtcttgtctgcggacgaattttcggtatgtgcgtcgttgtcactgctcgggattgtgctgctgctgataagttcggaaaact

SEQ ID NO: 282839 - DNA, 693 bp, Zea mays
cagagatagtgatggagctaccagttgaacatggactcctcctggacaatctcctggaccttgctcacgctcctttcacacacacgtccacctttgccaagggctggagtgtgccaagtttggtcaagttcctgacacccgcgtctgggctccaagggtactgggacccgtacccgatcgacatggagttccggccaccgtgcatggtcctatcgaccatcggcatctccaagcccgggaagctacaagggaagagcacgaggcagtgctccacgcacctccaccagctccacgtctgcctgccctcctcccggaacaagaccaggctgctgtaccggatgtcgctggacttcgcgccgtggctcaagcacgtgccgctcatgcacctgctgtggtcgcatttcgcagagaaggtgttgaacgaggacctacggctcgttcttggccagcaagagcggatgatcgacggcgccaacgtctggaactggccggtgtcgtacgacaaactcgggatccggtaccggctgtggagggacgccgtcgagaggggcgccgacgaccggttgccgttcagcatcacccaagctgagagtttgtcgtagcgaccggaacgggacgggacctcttcctcgtcgcatttctccgcaagacgacggacggacagccagagttaatgtgacctaggcgtacgtg

SEQ ID NO: 282840 - DNA, 975 bp, Zea mays
gaagagaaagacgaagaggccaatgatggcaagatggaggcaggtcaccagcacaaagtagcgatcctgcaggcccaggtacccctctaggaactcacgcaccgtctgctccccgagccccggcaccaggatctgctccgtcctgtctgcgagctgtgagaacattagcccataaaccgtccatgccgccggatccgcccagtacacccaccgccaccacacaggcatcatctgcagcaaatttactcaactcatcagccgattcagatggggggttacctctctcccgattatgaagccagagaagacgttccaaaagatgaagatgaggaacgacagccccatggcgatctcgatgttgggggtcagggccaccgtcatcatcccgtatagagtgtagtacatgaagctcatcacctggtataggaagaaccagaagaatttgctcgctgtcacctggaacccaatcattgggtacacgattgatgagaagatcatcacttgcaccaacatgtaaggtaattccaccgacacctgcacgatagcgtatgccatggtggagtacatgcctgccgccttttcacggtagagcacaactctctccattgccacaaccggctgtaggatgctgcaattcatgaaacccaggaacaatgccgatccatatacgattccaagtatgtttaatacgtcttgctcatccttgatgcttgagccaattttccagaatacaattccaaacatgattgaaacagcaaaagtgttaatgaaccggacaacattgtgttctgagtttttccagtatgcacaactttgcttccacaaacatgccacacattgtatcgtaaagttttgccaataaccctgaggaaaatacagagcatctgtgtttggttctggttgttccaattcatcaattagaaccctgttctccctgtacagggaggaattgcaataaatttctgcatagtccac

SEQ ID NO: 282841 - DNA, 383 bp, Zea mays
tgatggcaagatggaggcaggtcaccagcacaaagtagcgatcctgcaggcccaggtacccctctaggaactctgtcaccgtgagctccccgagccccggcaccaggatctgctccgtcctgtctgcgagctgtgagaacattagcccataaaccgtccatgccgccggatccgcccagtacacccaccgccacctcacaggcatcatctctctcacgattatgaagccagagaagacgttccaaaagataaagatgaggaacgacagccccatggcgatctcgatgttgggggtcagggccaccgtcatcatcccgtatagagtgtagtacatgaagctcatcacctggtatgggaagaaccagaagaatttgctcgctgtc

SEQ ID NO: 282842 - DNA, 796 bp, Zea mays
ggtacatgagcctgatcaccgtgctcaccggcgacctggaggacgcccagattgccgtggactcactaggcatatgcatgaacataaacggatgggaggccatgatcttcatcggcctcaatgccgctatcagtgtccgagtctccaacgagcttggctccggccgtccgagggccgcgtggaacgccgtcatggtcgtcgtcggcgaggcgctggtgatcgggattctgtgcatggcactcatcctcatcttcagagacagcttctccatcattttcaccagcgacaccaccctgcagcgagccgtcgccaggatcgccggcctgctcggcctcaccatggtgctcaacagcgtgcagcccgtggtttcaggggtcgcggttgggggcggatggcagggcctcgtcgcctacatcaacctcggctgctactatatcttcggcctgcccctgggctacttgctcggatacaagttcagctttggagttggggggatttggtccggcatgctttgtggtatcacccttcagacgctcatcttgctaggtgtggtttggaggacagattggaaagcagaggccgcacaagcttcaggccgtgtgcaaaagtggggcggcaaaggcaccgatgaagtcaagcctctcctggaatagaattagtgtaggactatcacgcacgacgctcgtttcatttgaataaacaactgggcaatacgccttatccctttcagaagcacagctcatgtgcttgcccatcgaatctgatagcttccctttcccctcctccgtgtagttaa

SEQ ID NO: 282843 - DNA, 666 bp, Zea mays
ccctcgcgtccgctttcatatattcaaggagttcttgctgagatattggagttttgtgatgggtacacgtttgatccaagctgatggggagatttggcgtgttcggaggcgtgttattgctcccgcactacatcagaagtatgtgaatgcgatgatcggtctccttggagaagcttcacaacggctctgcctacaggataagagaatctatatcaaatggcaaacgacgagagccccttatttgtgacaatggaactaacatgttcaagattccgtagcaaagcacggggcactatttattattgggcagctgaactggaatgctgaaccaaccattttttccttgttatgatgaagatattggatgcaaatcagaaatggggagtctgaaccagaacaaagatgtgattctcaccatggtttcaactatgcagtattcaagacgcccaacacctacaaattgttggagctggagttattacatcgaatggatgccgggccaacatattgccgctttttcgctacggaccctttgagttgtaagacccccaatgagtatccgtttgagttgtaagactttgtgatattttctgaagatttgtataagtttgtaatttattgtgaaagtcttagcctttaaatgatgccattgatataccctttttt

SEQ ID NO: 282844 - DNA, 511 bp, Zea mays
tctgactttctgagtgtgtcttcataggtcacactggaatagcttatctagagcaaagtgtaaagtttttgtgacaatgaatatatcagaattttaaagaaatattagtaattttacaattgatgaaactgccaaagtttgatgatttagttctcttctgcctatcttaagcaggagaaactcttttcaagcaggaacaggacagaagtctctcttggcaagaagctgaagttcacttatcttccagagattgaaaagattcacaagaagaaggagaagttgctaaaaaagcaacaaagagaagccatcctccttgacagctgcttgacagtgaatggattgacatctggccgctctcgacgtgaaagaaaacatgtgacttatacttttgatgattatgagcgttcaataaatgaagccataaaaacaataaggtaagtgtattttctgttctcagtagttccattgatttatgaatttataaacagaaatttacaggaaaaatgagaat

SEQ ID NO: 282845 - DNA, 309 bp, Zea mays
caggacagaagtctctcttggcaagaagctgaagttcacttatcttccagagattgaaaagattcacaagaagaaggagaagttgctaaaaaagcaacaaagagaagccatcctccttgacagctgcttgacagtgaatggattgacatctggccgctctcgacgtgaaagaaaacatgtgacttatacttttgatgattatgagcgttcaataaatgaagccataaaaacaataaggaaaaatgagaatgctgttgaggttggcccctccccattatgcaaaggattttatggagaaactccagagaa

SEQ ID NO: 282846 - DNA, 571 bp, Zea mays
caagggatttccactcagtcaacagagggcaggatttccttcagccagcatgccgcaaactgggtaccatcctcatccagaagaattatttgttgcgtcacacttcagatatcctaaagggagtgctggtttccgccgataaaacagtctggttggcgcctgctgcattttggtaactgcgttggtggtaagacatgcggtcttcggcttattttcattgatgccatttcgttgccatgactcatgagcaaggagtatttgggtcttacctaatgtgcagagaggccagaactttgtttcatcttgagataaagcttccttcgtatataagaaaaaggaagatcctcacctcaattggaggacttgattttctttgctttttttttggggcaggatgtgatggaaaagcagtgttaccatcgagtcgcataatcagggctctgcgtgcttcagacgggggaagggtttaatacaaacatgaatgctgattttttttttgtcgatcgagtccttagctgcaagattgacgcgagacatcggcttccaatatatgtacaccaatggtttctgg

SEQ ID NO: 282847 - DNA, 719 bp, Zea mays
atcggtctaggcactacactatattgtttaatcgtaccatatcggcactatacgacactaacacattatagtgctcgtgtgcaccattttactttaagaactcaaaaatataaacgtttataccattataaagtgaatttattatgtttaaaatcataccaaattatatgcacacatcacaatctcatctatatataccattggttggtctaaacagtgcctaatcgtgccatacccatcatatatcggggtggtagcccaagcacgaaactagacccgtgtcgtaccggcgctggaactatatgattcgtgcatgtgccgtgccgaagcactacatgtcgtgtcatgcttagtgacgtcctatttagcatgtctcacttggccatctatagttgaaaaggatccttacccttttcttattggtcgatcgtcctccttcagctagaaaggtagtattatataggagctctacgctccttgtggcttcctgtcgtgttgggcttgggtatgaatgtaaatggtatgtatattattctcgtttgtattcaaattggatccgcctaaaaaggctaaggttcttaccttgtattcaagtccaggtacttagtatctaatccgtatcgatctttattcgtatttgtattctcaaagattggtatttaatattttgatatatatttaaatcttattctacaaaaaaaaaaaaaaaaaaaggccgt

SEQ ID NO: 282848 - DNA, 537 bp, Zea mays
tcatgatgtctcacatccttctgaggggcattgatgctgcatccgggcatatcttcctgactactgcagactcagacccccattccctcaagagctatcaccccctcatttatactatgacgtgccatctgcacatcatccaaatgcatgtccttcttactttgtcccatcacatccttaccctgttgagcagacaccatatgggtatgaaaagttcaggagccactgctgtggatgtccaactcatgtgtgccctggggctgagaaggacactgtgaaaatcgaggaacaaaggcctgatgtcaagcttgagagcggtgagcacaagaatgctgatagtgacagtataattcaacacccaaacaagaagtatccattcatatggctgccatcaggcaatatgaaaggcaaggagaatggagagcattatgaattgtcacctcaggttttaaatgaatgggctcctgtgagtgggaagtggttaggggatgctgaagcaacaagggcaggataatgagaaggggaaacaattccagt

SEQ ID NO: 282849 - DNA, 438 bp, Zea mays
acgaactactccaagatccacggcggcgtgctggcctactctaagatccgccggcgcgtcgtggcggctcctccgcgtcccgcctccgaggccgcgcgcggcgtcaggctgatcggggtggcgcgcggcgccgggctgcgccccatcgtattcgtgcctctcaagcctaggccatggacggggtatcatcagctccagaaatggacgaggctatctcaactgaccaatcaagcagatcaacaaaaagaagggctaaagtgtgggatcatgttgattcagagctaatagatgggaaagagaaggcggtttgcaaatactgtaaggcccacttatcttctgctgcgggtaaagagatttcatttcgaaagtgtgaagatccatcctggaaagaaatgataaattatggtcaaccatcttttcgattagtccgtcgacaga

SEQ ID NO: 282850 - DNA, 425 bp, Zea mays
aatcgttctgattttgtcgcggcccctgttcctactcactacagcgactgtaggatgcgagggtctgacgggcatgatgctcaatcctcgctggacgacttgatcacacgctgttccgacagcgcaaagcgattacatgcctccgaggaacttccgcacgagacctagacagagcatctcttccactgggagacaaagcccttgcgttgggcaatgaggacgagcgccgcatttgatgtcgcacaggcgttggaatactgcagtagcaaacggagggcactctatcatgacctgcatgcatacagggtcgtcttcgatgcggaaggtaacccaagactatcatgttttggtctgatgaagaacagccgtgatggaaagagctacagtactaatttggccttcacgcctcctgagtatcttaagac

SEQ ID NO: 282851 - DNA, 521 bp, Zea mays
gttcttaccagtcctacagttgcacaagtttcaggctatggcccacttggattgggtcctagatggattgcatattctgggaatccagttccggttccagatactggacgtgttagcccacagcttcttagtctatctccctctgttccacctcctggttcaaatggtagtgtggtggcatattatgcaaaagaatcaagcaagcaactggcagctggcattgcaacacttggtgagggttggatataataaagctgtccaagtactatgcagatttcattccaaatggtaatggtaccataaagcacagaagttctggttaccaagcacatggtgtaacaaatggccacctcattgacagtgaatatgctggaacggtacagacctcttgtacatattttcatcgttaattctgttatcctggagttggcaataaacttgattaacattgttgctagcattaccatgtcatctctgtatactagtattagtaagaactaaccaacccctaggctgtcagg

SEQ ID NO: 282852 - DNA, 655 bp, Zea mays
tcgcccactcgtccgaaacaagcaaaaggaaaagcccccatctcgaggaaagagggggcacacctcgacataaacccaaatcgaggggtggctgcactggtggagatgatctaccacttgaagaagcacaaatccaatgggtgggggtctccatctactcccaagaaggcttacacagaccaccagttcttgtctggttgtgactacctcactccccagccttcacgaaggcacaactaccatggtaccatgtcttcaccgaatcaccaattcttgtctggctgtgactacttcactcccgagtcttcacgagggcacagccatggtaccatgtcaccgaactggaattattcacccagcgccaggaagcatgggttctcgtcatcaagattcgccgcggctgccgccagcaacacccatgtccggttcgggagaaattagctggatgcacgcgcctgatattgttgttcgttttagccatagatagataccaattatctcctggggatgaactctacctgtcgtcggttcatgccctttcgatagttgtttgttctgagattattatatatgtaatcgtggttcaaactatttattatttttttttactgtcaaaaaaaaagaaaaaaaagaaaaaaaggagagaagggaagga

SEQ ID NO: 282853 - DNA, 470 bp, Zea mays
ggatgctggtaattaaccctcacctgatcacagacaaggtttacttgcacaaggcagtcaaacatgctattaaatgtggtgtcatcgaccagtgggtgctcgcgcgagaacggggcttccttcccaaagagagagcagatccgaccggcgagcagtacgaagtgaggtccatcacagagagggaataccgcacgcttcctgatgccatgcaatcagagagctcgtcaaccagtgaacttgcatatgtggagtgaaaggacaggccattggtgtctatacactggatttctctatttatttatggaaactgactggtgctgcagttggtattcagaagaattagtttaaacatgcagattttaggtttgtcgagtgtaggttaatagcccccaaaagtaagactaacatattgataacatagaggcgaggcaaatctggctgatgccaggaatttttcctacaatgcaata

SEQ ID NO: 282854 - DNA, 840 bp, Zea mays
  unsure (1)..(840): unsure at all n locations
ttgcgaattgtttgcatgtaaacaagagttagttaatcgctccatgagttctgtttcagttaagcaaagtataagtgccatccgccctaactcaaaagtagatggcaacagaattgcaccatctaaaattatgtcagttgtgaatgaaagttacaggagcacagtaggttgtggtcaggctgaggaagacgttggtattcagcaagagaaaaagcacagctgtgcaagtgagcatggaatggttaatcttcctattaactgtacatcctctcaactaggtgcaccaggaattccaaaatttgggaaagattcagtgaacctttggactacagatgcattagaactatcaactgaagggatgaccccaaagattggagctgacagtactgacaggagattacgaagtggcaaaattcttggaatgccaagtggtggactaatgaatagaggccacaagctgaaaaagatccagcaggaagcatccagtaaacagatggttaatcaaggggctacatccactgtggatctgacttctcatgaaaatgatttttcagcagctgagattgtcgttgaagaaaagctggaatcacatagttcatgccttaaaggacgaggaggaccagcgaagaggaagagggagagatagtaggattcagcgtgtctcttttcgagctggatgtgaaccgtgtttcagtttgtttctcggcttgagtagctaacttatgtagatggatcgtgtgtgccagtttcacgagcagatggtgccactaaaggtgtgtttggtttgaggtcaaagtggatgagtccgngacgacattgttctctcgactttttaggatc

SEQ ID NO: 282855 - DNA, 480 bp, Zea mays
aggaaacagcctctgaaccgcgcgaaccgaaaggattgagtggtagtagcatttttgcagacgggaaggcctcgacaactggtgatcatgcaggccgtcggacccggcacccacctggcggcgacagcagcatcttgctgggctagcgtgcatatggatattgtcctatgccgccacacgggtggttggtccgtccgtgtgcggccatgttttcctgatcaggcgatgagtcccatctcagatgatctggttcacttctggcgtgtgtatgggtttgtgtctgtgttggttgtgacatgtccaatggaacaaccctatcgctactgcgtgtggtgccgttttgttgtgtagtagtacaacggatgacatgtggtaccgtttcgttgtgtgtacgtggatatacatatgtgtgtttggttgtaaaaaaagaagaaagataagttgttaaaaacgcaacaaaaagaagcctttctccttgag

SEQ ID NO: 282856 - DNA, 531 bp, Zea mays
cggacgcgtgggcggacgcgtgggcggacgcgtgggctcgggtgaggggccgatgggcacattttcctccatcgacctcgtccatatcttgtaggccattgaagtcgacgctaaagcaggaatggagagcatgagggcccattcttcattctcccgaatctcatcgcgcctcgcactctccccgctccagccatagcggcgagggccggatcggttccggagacagcgcccatgtcttcgaagtcttggatctggtgggtctaggacgcggttatggggctggtggtgagcgccgccatgaggagcggctggacgatggtgttgggaatgggagggaccaccgatggcaagctgagtctgcgggcaggcccgaggtgttgacactgccttggtccctcttcacaaaatcaccacggtggcgcatgcgggtggccttcgcctgcagcgtatgtgggcagcgtacgaccaaggccatcaatcctcatgcctacaccgatggaactatgtttgttcagatttgtaatgcagttg

SEQ ID NO: 282857 - DNA, 252 bp, Zea mays
gctcctcaaattcccagctccggctcatcttccaccaacgcgcgctgctccagcctttagctccctggtcgccgcgcagaggagctccctcagctcgctcctcctgtgtcgcgccccagcccctggtcctgcaactcggtgcctctcccagctcgctggtcgtcgagtccttctccctagcgcatggatcaagttgttgcccccagccatgtcttcatctccatcaactgacactttctgctcggccacatg

SEQ ID NO: 282858 - DNA, 473 bp, Zea mays
aggacattcgccttgttcgggataagtttactcatgtgtctagaggttttgccttcgttcatttccattcggtggaagatgctacgaaagctctggaagctacaaacgggattacacttgagaaaaacggtcaggttttgcgtgtagcatatgctaaaagtacacatggacctgcatcagggggttctcagtcaaacagccttgctgcagctgccattgaggctgcatcatttgctcagcagtatgatgccataggttgggctccaaaagagtacaatcctgatgacaaacagaacagcaactctgaatctcaaaaagacgatggcagtggcacagcacagtcgggatttgtttgggatgaaaaatctggttactactatgattctgcatctggattctattatgacggaactactggcctttactatgacagcaactctggagtttagtattcgtacgatcaacagactcaa

SEQ ID NO: 282859 - DNA, 780 bp, Zea mays
tgtttttccaaatgattggtcaacctgagggttctgaagcaccaggtggtgcaatcttgagtggggttcagcgaagcgacaggctcgctcttgctgatgataaggatgtaaaatcagaagacagggaccctctcacatttgaagcgcatttagatggtgggatatctggtttagatcacgctactgagtttatggacttcccatatttcactaatagtgaagaccttgatatcctgaatagtgaaaatcttttgaattctccaagtgagggaatccaggaggatttagacgatactgcattagttgttcatggggttagatcaaccatgcaaaatctggttcatgctgatgaagccaatatgtcctgtgatcaaatagatcttggtgatgtgaaaaataatgtagatgcttctggtataatcttatttcctacttcattagtagtgccctgtcctggcctgtatgttgagtgcaaattgaacacagaagatactgaaattccttgcaacgacgatgtttctacaccaacagagtatcctcttgaatgctgtacttctacctttgggcagaaatctgagaatactatctattccgtctcccctgcaatcagccctccatcaattgctgaacagcccaacccatccacttcagaacaaaaagaagattcattggctcatgacgaaggtggtgtcctaggagcttaaccatcataaggggctttaacaattggaggccttttgcctggttactttgacacaaatgatgccaacacatgcatgc

SEQ ID NO: 282860 - DNA, 472 bp, Zea mays
cttttcggagagagagagagagaactagaagcatatatggcgatgccctttgcctccctgtctccggcagccgaccaccgcccctcctccctcctcccctactgccgcgccgcccctctctccgcggtgggagaggacgccgccgcgcaggcgcagcagcagcagcagcacgctatgagcggcaggtgggcagcgaggccgccggcgctcttcaccgcggcgcagtacgaggagctggagcaccaggcgctcatatacaagtacctcgtcgccggcgtgcccgtcccgccggacctcctcctccccctacgccgaggcttcgtctaccaccaacccgcccttgggtacgggccctacttcggcaagaaggtggacccggagcccggacggtgccggcgtacggacggcaagaagtggcggtgctccaaagaggccgccccggactccaagtactgagagcgccacatgcacc

SEQ ID NO: 282861 - DNA, 835 bp, Zea mays
catatatctgatggtgatcttacttctaataatactcatgtggttgcattctgaagcagctcctgttgtcgacagtgcaacccagcgtctcctggaggaaaataatcagttgcttaaccagatttctgcaaataatgaaacattcaagacagtggagaacacagatctttttctccgcacgagtaacaacatcaaaacaattttaagcagaatgagcgaaacgcctggtatcatgagtcagatgcccccattgcctttatccataaacgaagaccatataaattctcttattcaactgaacagactggttgcatcatatggtacgacaagcatttctcatcatacgaagcaagagccatgaagctagtttaccatacccagggggaaaaacgagacgaccagatggccggacctcctgcaatcctgtaaacgtgctgttgaggaaggcttacatgttgttatactgaccaagcaccagggaaaaatcactgttttccagataatgtttttgcagtgatcaccagagtatcagacactttatcctggactccgcaagtgactgtaaatatcggatgactggaggcgttccatgttttgtttactgatcgttcgtgaatgcatttcttcttttcttgctttttattgttatcccagacagggttgcattgctcccaatatgtaactatgtacaatagccactgccctaggctgctaggcgtagaacgactccattttctgactatttggacactggaacccaaacatgttgtccaggtgttctgaattcttttttatcttcacttcagaagctttggattagcacttcagatgcagc

SEQ ID NO: 282862 - DNA, 495 bp, Zea mays
cttggccgtcgagcgccccagctccttcctctccctctcgattctctgttgaccggtgccctgctcgaatttccgcccgccaagctcccagccgagctcttgcgctgggtttctctccctggtgtgctcgcccgtaccgcactcctgctcgaacagcgcccaacctgcttgccaaggctcttcccctcggcgtcgatctccctgcgcgtccccggcctcagcccctctgttcttcgttcctgctcagccgctccctcccctccttccctgctcaaccagctcggttccatggcagcgcgcagctcccctttgctcgcccagccgtcgagtttccccatgcgcaatctcctgcagcgatggcgcccggccggaatttcccgtctagttcgcgtcctgctcggtgttcctttgctcgtcgcgccggagctcccatcgccgtgcgcagcttcttctctggtggccacgcgccctttcagctcgccacggcgctcagtc

SEQ ID NO: 282863 - DNA, 555 bp, Zea mays
tggtgatgctcaacgcctacaacgtgctggccgcccggtgcgcggtggagtacctggagatgtctgagactgcggagaaggggaacctgttgttcaagatcgacgtgttcctgtcggccagcatcttccgggcctggaaggactccatcatcgtgctgcattcgacgaggccgctgcagcggtggacggacagcctcaaggtggtcaaccactgcgtcgacgccatcgcctcccgggcatccacggacccgtcggaggtcgactggtcgtacacgtacagccggaggaagctcccgtcggagaccgacggcgacgcgcgcggctggaacggcgtcaggaagcggcaggcggtgccgagggactggtgggtggaggatctctgcgacctcgaggtgtgcctgtacaggaaggtgatcctggcgatcaaggccaaggggaggacgggcggcgccgtcgtcggcgaggcgctgcgggcctaagcgtgcacgcggctggtcggggccctggaccacgccgtcagcgacgggctcgactgcaccaagcaccgcgcggctc

SEQ ID NO: 282864 - DNA, 682 bp, Zea mays
  unsure (1)..(682): unsure at all n locations
tcttgttattcggcgttgtttatgggagctattnctttccagggatggtaatgggtctggaagtcgtgggcaccccccaaatgcaaattttttgtatggctggcgataaggaataaatgttggactgtggatagacttcagaggaaaggactaccgcacccggtggtctgtccactatgtgatcaagagcaggaaactatcttgcacctcttgtgctcttgcagtttcgctagacaattttggcatgctatattttcagctttgaggatgggacatcttacgcccactagggaggcgggctcttttgtggattggtggggcaaggtgcataggagggtccccaaacatatcagaaaaggtttccatagtctcattatcctgggggcctggtgtttatggctgcatcgcaataaagcgatatttgatggtgtcaacccgtcattaagcaccattcagaggcttttcttggatgaggtggagtgctggtgtatggctggtgcgaagcagctcgagagtcttgggcttctggctgcatttgctaggggagctagggcttttcctagtgcatgaggctgcactggtttattttctatttatttttgcctgttatggcattgtactttggtccatttcggacctttctttctttcatataatgatgcgcagttcttctgcgtgttcg

SEQ ID NO: 282865 - DNA, 495 bp, Zea mays
atgatgggaaggggcttcttgagaagaagcttgtctagcactgagtcgaatgtttccagaagcaaggctgctaattttgaaaacaacgatatgacttcaactaggcagtccactaccgatgaatttcacaatgctgatgtagttcctgcggagctgataactagtgtgccacacatgcttatagaaaaacaaaagcatcatgttggtaaaggtactgcagagactattgggagtaattcaaagaatggatgtgagacaggacagcatgatggttactgctcaacttcaggtgaaattagagatcctcttggagcagctagcgggtatttatcgaggagtagcagtatcactttgtcatgtggtactgaatatgatcatgatacccatcatctggaagaaccatgtgatccctgtgatgacagaatggttaatgaacctgatccactctctgtgcacaatactagaactgatgaagcagcaacaacagatcgaaca

SEQ ID NO: 282866 - DNA, 549 bp, Zea mays
gttaattgtttattttcatttttttatcaacagacaaaatgagcagttgtacaagtatggggacacaaagtcatcccagaatatcatgcttttgtagctcaaaaaactcattaaagcgaacctgttgttctgggacaagctaaatttcccaccatttagagcttccatcaaaggtaccacaaccatctcatgttcaaacagctcctcctggaaatgcgcgccttcacctcatgccgaaacccattgaatgtcccttagaatctttttgtttgatttcgtggtggtggtgaaggtgggaaggaggaattgagttagttatcgcatgcccaagttcccggtttgtttcgagaggagaacaaatgatcgattgcctccctgcttggttaaatgtgccatctaagatttcagaattgtaatgcaggggctggatttgatcaaaattgtcatcgtataagattggccttgtacttttttaaaaacatgcaaaacttacgcatcttcgcttattatgtactctccatattttaccttttctggcgctgaattgac

SEQ ID NO: 282867 - DNA, 540 bp, Zea mays
cggacgtttgggcggacgcgtggggggactttgggcacgaatagaaaaaaggtacaacgaacaaaggggcgagtacccttgtagaatgaatcgagcccttagcagcagatgggacaagattagagcagatgttggtaagttctcaggctgttacgcaagagtgctgcgagagaaacaaagtggtttgacagacgacgataagacttccaaggcggcaactttgtttgcacatgaggagaacaaaccatttcattttatgcattgctggcataagctgaagggggaacctaaatgggagagcatttgtcaaggacctttccgaggattacatggaaaagcaattggatcttctggtggtccttttattggtgtagaagaatcagatagtgggtctgctggtttgactggtaaacggcctctctgtcgtgattcttctaaatcagagagaaagaaagctgcgtcatcaacgacgacggaatacttaagccgtcttcaagattaactgaaaaactaattcagcgcattatagaatagggtgag

SEQ ID NO: 282868 - DNA, 578 bp, Zea mays
cccacgcgtcttgcgaagccaccactcctagagagacgagcagcgtatgtcgtcgtcgtccgacctcgagcagcaggtggccaccgccctccgccgtgtgacccccgtcgccgccgcgcctgctgtagaccgtggaggcgcgccggatctggcggcggcgattcagcgccgaatggcctcgcaacgcgccaggggtgccgacgcgttctacgcgaagttcgcgtcggcccggtcgctcgccgaccagaccttctcacgccgacgagtacagctgaagggactcaaggatcagctccgggacctccagtcgcagctcagggagtctcttacacttcagtcgtgcaaggaatggaaatactggattgccacggagccgatgtcggaggccacagctacgaatgagcggctccgtagctgggttgcggatttcagggacaagaggaacaagggtgctgcaatcgtatttgagcaacttcaagctgtcgaatcacttgaggcaaacagtaatgaagatgcagagatggcggagaaggtaccaaaagctgttctctggtacaataagttccttggctttccgg

SEQ ID NO: 282869 - DNA, 664 bp, Zea mays
ctcctcctcctcctccagatccatccgcctctcctcgaaaccgtctctctgtgcgtccggagtccggggagagggtggcggcggcggagatggagagcctggcgcagcgcgcggcgctgctgcgggagtcgctgcagaagagccagcaggtcaccgacgccgtcgtctccatactcggctccttcgacagccgcctcaccgcgctcgactccgccatgcgccccatccaggtgaggacgcacgccgttcggaccgcgcacgagaacatcgaccgcacgctgcgctccgcggatgtgatcctcacccagttcgacaggacccgagaggcagagcgtgaaatacagaaggggccgcatgagaaccttcaaggtttcctagatgcagttgatcgcttgagaagtattgagcgtttctttagttcaaatcggagttaccgtagtagcgatggggtgctcaaccacgtaaacgcgctcctttctaaggcccttgtcaggatggagggtgaattccagaatcaattatcccagcgcacaagaccgatggagcctgatcgtctttttgattgtcttccaagtacacttcgaccatcgtctgaatctcagcccgaaggtgggaaaaacccatccgagaatcagcaaaacccagaggctgttgtatatagtct

SEQ ID NO: 282870 - DNA, 494 bp, Zea mays
ctcatctcgtccggatgaaatagattactctagtttgttcaagggcttagatagaactaaaattgataaaattaatgaattgattgatgctttgaatgataagaatagattgttagaaagcaagaggatcttttgtatgaagaacatgataaatttgtagaggcacaaaaatctcttgctttagaagttaaaaggaatgaaatgctttcttgtgaactgtctacttgccatgagtctatttctagcttaaagagtgtcaatgatgacttgaatgctaagctagaagtagctagtagatctacctcttgtgtagaacatgttatgatttgcaataggtgcaaagattttaatgttgatgcttgtagtgaacacctagtttccatttctaagctaaatgatgaagtggctagtcttaatgcccaacttaagactagcaagggtgaatttgataaactaaaatttgcaagggatgcctacacaattggtagacaccc

SEQ ID NO: 282871 - DNA, 483 bp, Zea mays
ttcatccacgctgccggcgagccggccactccatgatccaaatcacgacccaacccagatccagatccacctagctcagtgcagccgtggctaccggatctcacaacagaatattggtctctgagggtgcggcaccgccgctagagtcccactcgtgcattctccggtagcccgcgaatacctttcctcttcttcccattacccccagcgtgcgttctctcctctcttggcggcgactcggcgaccggcgctgccaccccatgtttggtgcccaggtcttcctggggcccttcgccggcgacgagcatcaccagcgagaagatgagggatcgagggcggcgcaggcggcgagctcgtgggcggaacagactggtgagattgaggatggatcaggagcttgagccctaggtaagccattctgaaaataggtatcgcgctgattacccgctttaggatttgggttggtggtcgttcttaatgcgc

SEQ ID NO: 282872 - DNA, 618 bp, Zea mays
  unsure (1)..(618): unsure at all n locations
cccactcttccgtgtccctccgtcctgtcctgcgtgcgacccgacccggccggaaaagtcccactaggctagacagacaagccttgctcgccggagatctcccgctcgcgcggcgcggcccctcgctccgcgaccatggcctccgggcaggactcgtcgggcaccacgctgatggatctcatcacctcggatccttcggccacgtcgactgccggggcatcgtcgcagcagcagtcctcctcgggcgtcggcagcgccggtggctcccttttggggaagcccgtggctccggcggcggatcgcaagtcgaagaaggggacgctgatgcagatccagaacgagacaatatccgctgccaaggcgcttaaccccgtcaaggtcctgccccagcgcaacagggaagaagaagccccgtctcctacgcacagctggcccggagcatccacgagctcgccgcgacgtgcgaccagaaaagttcccagaggcagctcgtacatagtgtgttccccaagcttgctgtgtacaattctgtggatccttcggtggctccatctcttctcatgctncatcagcaatgtgaggacagaaatgttctgcgctatggatactactatctgg

SEQ ID NO: 282873 - DNA, 551 bp, Zea mays
aaatcaaatttacccgcatgcacgagtccgagtcagccacaactaggacggactccggaggggaccgaggcttataaatacagctcccagacagacccaccgatcctcccaaggtcgcgttccatcgattctccacgagcggatagcggcgtacagatcttttcgtgctcgtcttcgcgtcggtgtggctggcccgtgactgtgagaagtcaaaatctcacagcatattgattgggctgattccgtgggagggaatcggggatctggcattctcgcgcccaaaaggtcgcagctttctttcgtgtcgccagccggtgcgcggtcgacgacgcagagcgtggagggtgccccgctagtagctcctcgacgacgacggtgacgggaggccgggggttgaccatggtggcggcggcggacctggaggcggcggagcgggtggtggcggagctccgcgaggcgtgcgcggcgcggctcgactaggtggcggcggccatggaggcggagatgcgccccggactgcgcgaggagggcggcagcaagatcaagatgat

SEQ ID NO: 282874 - DNA, 605 bp, Zea mays
tccccgtcgtgccctctgctccatcttcaccagccgcgcgctgtgaagcccctggcgtgtcccttgttttcccagccgcgcctgctccctgtcccacgctcgtccggtggcctgggcgcgttcgtgcggtccgcttcggtgcggtacgcggccagacggtagagccagagtctgccgctgccccgaaactgtagcacgcggttaggtcgcgtactgaccccgagctccagccatgagcgccgacgtcctatctctgtgctggatctccctcaactccgactgtgttgtctgctgcgtcgagctcggggcctgctcgcacgtccttcagctcgcgattggcccagatcgaatcttgcttcagctcgccgtctcctttccttgctgcggtagctggccgctgctgctaggctttgctgatgcgcgggatttgccggccatgtgccttcaccggtggtctcctcgacccgtgcgatggtcgccttgtgtgctcggccgcaggcgccgtcgagctatcgaatgccgcccaccctctgcctagctgctgcttgccactgccccaatgctgtggacggatctggaccctgctggcgagcttttcctcagcg

SEQ ID NO: 282875 - DNA, 520 bp, Zea mays
aattactattgcccgcttccctcagggagcagggcgaaccctagccaccagctctctctctctctctctcgactagccacggtgccctccgtcgtgcacactgccggcgacaacgcagccgccacccccttcttcctcccctcgcttgcagccctaaccgtgaacagtactcgccggtactgtagcgcgggtgctgtagcatgagtattgtagcgcccctgttctctcgctttctgccggccgcaccgagccttggcgctccagcgccgtgatcgctgtcgggctccagcacctcatccctattcccttcgccacattccccgtaggatccgcaatcctatcagaagccatcttggagaatgtttttaaaaagttgctattgcacctctatgggttcgtggagcagaatattggggtcgtaacatggaatgacaattatttaggctaaagcaatatttagtcaggaaacttaatggctataataggctgatacagtgaaaaggagtatagcatccaattg

SEQ ID NO: 282876 - DNA, 626 bp, Zea mays
gcacaatggagattggtcttagaggtccaaccaatctatttggacatccaactgacaagcagatgattgaattggatcaagcattatcacagtggaatactgactttgacaaggttccagtgacaaaaatcgcatttgggcacttcccgttgtctttctcagcattaacagagtcaggaaaaagtatcaaggatgtttttctaaagcaatcattggcagcatatttgtgtggtcatcttcatacaaggttcgggaagaacttgaaacgatactaccatcgggcagtccaggaatcatcattatcagagcattactaccaacataacatgcaccaaggagatgcattccagggtaataaggaaaactgttctgaagaagcttctcatgttgaagagttctgggaatgggagatgggtgattggagaaagagcagaagcatgaggatactagcaattgatgatggttatgtttcctataccgatatagatttcagattaggttcaaagagcataatcatactacctacctttccccttgattcaagattcatgcagagagcctctgcttttcgtgattttaaatgtcatgtcatgggggcatcatcttttgataccgtgagagctctt

SEQ ID NO: 282877 - DNA, 746 bp, Zea mays
ttgttaaaggccaaggaagaggttgagcgagccaaggcttctgcgacaacggcaggtaccaggttgcgtgcagtttcgaaggagatagaggcgtctaaagcatctgagcggctagccatagcggcagctcaagcgatgcatgagagcgaggacacaggaagcactggcgcttctcctcgagtagtaacgcttactgtaagtgagtatcatgctcttagcgagaaggttcatggagccgaagaacttgcaaacgagagggtggcggtcgcgttggcacaggtagagttggcaagagtgtctgaatcgaggagcctagagagggtgcaggaagcgtccaaggagacggagaaaaagaagagcgatcttcgcatcgcgctggagagggccgagagggcacatgaagggaagcttggcgctgagcgggagctgagaagatggagagctgaacatgtgcagcgtcggaaagcccatgaggctgcacagcatgcagttagtcctgtcagaactccacccaggatgtttgtccagcagaagggctcttatctggaaggaaacgaactcagagatccaaaggtgcacaggtcaactggcagtatggatcagtttgtttcggacaagaaatcgaggaaaaagaagtcgttcttaacccagttgtccacactttcgtctagaaaggcacatgcacaaacataagagtgattgttctgaaaaaaaaagagagtttctgtgtctttgtaaaagttaat

SEQ ID NO: 282878 - DNA, 709 bp, Zea mays
cacctcactaccctgctctctcacgagctcctccactctgttcttccccgccgctccactgcgcccttcctcccgccgggatcctaaaccctagcccctagggagcgggagaggctgctgctgctgctgctaccgcggcggcgccggaggggatgggcaccgggggagacgggagcaaggcgggcccggcgctgccgctcgaggcgctgctggcgctcggcctcgaccagcgcaccgccgagaacgcgctcgtcaacgccaaggtcaccgccaacctcgcctccgtcatagccgaggctggtataaaggaatgcgacaagtcagtcggcaatcttctgtatgcagtcgccaccaagtacccaactaatgcacttgttcaccgtcctgtccttattagctatgtcttgtcaacaaagataaagaaccccgcacagctagatgctgctctgtcatttcttactaatactggtcctgattctctagatgtggtcaagtttgaagaagcatgtggtgtaggcgtggttgtttctattgaggaaattaaatctactgttactgacattcttgaggagaatatggaagctataaaggagcagcggtatcacataaatgttggtatgctatgtggacaggttaggaagagacacccctggggtgatgctaaggcagtaaaggaggaaattgacaagaggcttgcagaaatcctagg

SEQ ID NO: 282879 - DNA, 441 bp, Zea mays
ggctttctttccttgttcctgacttcctgcctgtgcgcatccggccaccttctatccgcccgccagtccccgctggcctccgcggatcatctgcctgggatcaagatccgtcgaggccgaggcacccgcgcaccaaagatcgtttcttgatctaaatttgggtggtcgtagggatcaaagctcggttctctgcggtgcagttgagagggcaccaatattcttggcatggtggctgacacggaaagctcagattcactgcctggcagttcaaatgctgcttctgagatgcctgctaatgggtctattcaccgaaagtctcaggataagccccccaaaaaaacacataaagctggacgagagaagcttaaacgcgaacaggtgaatgacctttttgttgagctcggcagtatgctagacctggatcgacaaaacactggaaag

SEQ ID NO: 282880 - DNA, 565 bp, Zea mays
aggcattgtcagcgctcacccgtgacaaaactatggttgctacaagtgactatgtgtgacttccacaaaatgattaagcgttatatcatgacattcatgttgggtacttctggccagaaacaatttagggacacaagaaacatgatggttgacaacatgttgaacactttccatacattgttgatggatgatccaaattctcctctgaacttccgggaagttttcaagaatgaattatttcgcttatccctggttcaggctttaggcgaggatgtgagttcaatctatgtggaagagtatggaaaggttatatcaaaggaggaaatctacaaggccactgtggttgacatgatgatgtgtgcaattgaggtcgactggagggatttcttcccgtacctcagctggattccaaataggaccttcgaaacaagagtactgactaccgaagcgaggagaactaccgtgatgcaagccttgatcaagcagcaaaaggaaagaattgcacgtggggagactaggatatcctacctggacttcctgctggcagagaatacactgactgatg

SEQ ID NO: 282881 - DNA, 364 bp, Zea mays
tggtttcctttccccaagctcaagttcctatgggtcttcccccagccgcgcattcctccagctcgcggagctccctggctcgcccctccgcgcaccacttcgagctctcctccaagctgttgcgccctggacttgtctccctccctccccttctccctgctgcgcgcgtcggatcccagcttgtggagctcccttccgctcccagcttcctctgccggcgcccaagcttctagtccttcaatccgggtcgcgcccctctctgctcgcctcaccctgctccctggtgccagagcttcctttgcgcgccatggccgctgcgcccggggtcgcgtgctccaccgtgccgagctcgcccctgcgtgca

SEQ ID NO: 282882 - DNA, 490 bp, Zea mays
accctatgtttcaagtacagcctggggcggcggctcgggcaggggcagttcggcacgacgcacctgtgcgtggagcgcgccacggggaaggagctcgcgtgcaagtcgatcctgaagcgcaagctgggcagcgacgaccacgtggaggacgtgcggcgggagatccagataatgcaccacctggcgggccaccccagcgtggtcggcatccgcggcgcgtacgaggacgccgtggccgtgcacctcgtcatggagctctgcggcggcggcgagctgttcgaccggatcgtgcggaggggccactacaccgagaggaaggccgccgagctcggccgcgtcatcgtcggcgtcgtggaggcctgccactccatgggcgtcatgcaccgggacctcaagcccgagaacttcctcttcgctgaccactcggaggaggccgctctcaagaccattgacttcggactctccatcttctttcgccctggccaaatct

SEQ ID NO: 282883 - DNA, 794 bp, Zea mays
cggactcgtgggtggcgctgcgcgaggacgggccctcggtggccatcgtgggcgccacgggcgcggtgggccaggagttcctccgcgtcatcacggaccgggacttcccctaccgcggcctccgcctcctcgccagcgagcggtccgcggggaagcgcctcgcctttgaggaccgcgagtacaccgtccaggacctcgcggcccctggggcgttcgacggcgtcgacatcgcgctattcagcgccagcgggagcgtcagccggaagtatgggcccgcggccgtcgccagcggcgccggagttgtcgacaacagctccgcgttccggatggagcccgaggtgccgctcgtcatccccgaggtcaaccccgaggccatggcgaacgtccgcctcgggcagggggcgattgtggcaaatccgaattgctcgaccatcatctgcctcatggctgccacgccgctccatcgccacgctaaggtgttaaggatggttgtcagcacataccaagcagcaagtggtgctggtgctgcggcaatggaagaactcaagctgcagactcaggaggtcttggaagggaaggcgccaacatgcaacattttcaaacagcagtatgcttttaatatattctcacacaatgcaccagttcttgagaatgggtacaacgagggaaaaatgaaaatggtgaaggagaccaggaaaatttggaatgacaaggaggtgaaagtaactgcgacttgcataccgggttcctgtgatgcgtgcacatgctgaaagtgtcatctacagtttgaaagc

SEQ ID NO: 282884 - DNA, 459 bp, Zea mays
  unsure (1)..(459): unsure at all n locations
gattttcttgctagcctcgaatttagccccagtagctcatcagctgattcacaagtgcaagcatttgatgaagaggtttgcagttcaggagagcgagatggcgcgcatgctggtgctcatgtcgcgctcgcacggccaggaccaggcgctgccactgtcggcctgcctcgccggcggccagcgcggcgaggaccggcaggcgccggagcgggtgttcgtgtgcaagacgtgcaaccgcgtgttcccgtcgttccaggcgctgggcggccaccgcgccatgccacaagaagccgcggctggacggggacggcggcggcgacccctcgctcgccaagcccaagctgcacggctgctctgtctgcggcctcgagttcgccatcggccaggccctcggcggccacatgaggcgccaccgcgccatgacnggcggtgcgccggtggcggtgccgcccgcgacga

SEQ ID NO: 282885 - DNA, 715 bp, Zea mays
caggggtcctggacagagaaaaataaagccagcaagagttggtggttttatttatgacggcaatgaagttgatttagatgcttcaaaggatgcagacttctcgatggaaccatgctcaaaatcaaagaagaaatctttgaaaaagactgtaaaacccagggatgaagtggttgctgtaaatggacgaaacagcacagggaatgttaaagcatcattgtcctccaatgaacaaaacaaatctcttcctcttatcacggcaaaacagtatgcctgtcgtgctgcacatttgtcttcccttgtagtttcatggtctccagttgtgtcattaagtgatagaacttcttggttattgaggcattggtgcattcttgctggtggctctaaatctggaaatatttctttttggaaactatataagccagaatattacacaatagatgctggtgtggttaccagtgatccgatgctcatcggggtttggcatgctcatgaatcatgggtcaatgccataacttggcaagttctttctgcgggctcttcaaaatcctcgttgcttttagctactggatgctcagatggaagtgttaagatatggttagggaatattgaaggggtctaccaatgtgcaattggagaagaagtgccatttggggtagttgctgaggttgccgctatttatcagctccagtgtcgtcaatctcattgggcatacctg

SEQ ID NO: 282886 - DNA, 643 bp, Zea mays
cccactcgtccggctgtttggattgatacggcatgcttaaggaacaagtatcatgtcccgcttgtttcgtttctgggtgtcaatcatcatggtcagcttgtattgctaggctgtggattgctgtcagatgagagcgcagagagcttcttgtggctggtcaagtcatggttaacttgtatgaagggacagcctccaaatgccatagttaccgatgaatgcgtggcgataaaagccgcagttcgagaagtgtttccgaagacacgccatagaataagtgattggcatgtagtgagaagtatttcagaaaaaataggtgacttgccagaatatgaagcgatgagaaccaatttggttactgtaatatatgattctttaaacgacaatgagtttgaggcaaggtggaagaactggattgatagatttagccttcaggataatgaatggatcacctttctgtatgagaatcggcacttgtgggcccctgccttccttagggacactttctcagctgggctctgtactgttagccagcgtgaaagtccaagtacattttttgaggatgcagtcagttcagagaccacattggtgacgttccttgccagctacatgacacttttggataacaaatacaaaatggagcaac

SEQ ID NO: 282887 - DNA, 578 bp, Zea mays
ccatccatggaggctgcaaaaccaggtttcaaggaagttgacaaatggagtgaaaatgctttgtggagtgtatctgagcttcaagttggcgatgagaagcagactggttctaacaaatttgatatggaaagagtactgaaagggtttggagcttgtgatgcttttgtggcttctgggctcaacgcccctaatggacaagttggtggtattacgtttaagtcttcagacattgcccttctaatatgattgttcgtaggaaagaaagctcctctggattttgcctcaaagactagcttgcagtttgtttcattgtcaccagtcaagtggtgggtgtgcactagcttctcttgctgttgtgtatcgaaattttgccagttagaaattgtattaacattgtgtctatgttgcctgaacctataacatttccttagtttggaattgtgttctattatttctgcattttaaagatgatgcatttactgctttggcagccataagtgtacatctttttaaagtagcatgctgaaggttgcaaagctaaattgtctgttgttcaatgaaaacaacactcttcaacc

SEQ ID NO: 282888 - DNA, 700 bp, Zea mays
  unsure (1)..(700): unsure at all n locations
cccactcgttcgcccacgcgtccggtcgaaaccgctcacctgctacaacctcaggtgaccagatcacacatcaaaatgctatgcagaactccaactctgacacaacccaagggaagagggatgctcaaggtactacagagaagcatgtgaagccgtgtttgaagaaccctcagtatgagcagcactttccaggttctgacccagctcatgggtcagccaatgttagaattgccggtggaactgttggacctgctcaacgtcatgttggagttgttaattctactaggcaatttgctgcccgttcgggttctcagatgcatgcaccaagtggttcttatgcaaatattcagagggggagttttacctcagtaggggcatctgggcgttactcagctntcatgtctagaaacattcaacaaaaccagagacctgatacaatgtttcgtggaaggcccactgttagatcttttgttgcacaaaacaccaacagatatcaccagggttctactagcaaccaaaaagcagtacaccctattaaggagtggaagccaaaatcgacaaagaagtcaccgaccattgatgcagataacagtatagctgatgctacatctccttcagctagcaactgtgaaagtgccaacacactgaatgtaaacgaattgcctgaaaaaatttcacaaactaacttgcatgaggtgga

SEQ ID NO: 282889 - DNA, 374 bp, Zea mays
gcatgttcaaagtagatgctggtaattgcctgcctatatagacttaatgacttacagtgcatggtcaaccttttgtccagtcactcacccagctttgttttccttgtacataggaaacgggtttaattagttgaccgattcgttgtaggatttaggatttagacaccatagaattatagattacccaaggtaatctcaaagagatggtggaaaacatatatacttcttttgtttaaagctttgtcttttgcattgatgttgagctgggaaacgggtgaggcatcaaatagagcttttttcccctctgttaagattaagacaaatgttaacgtgctgatgttttattcaagatctggttgccatatgttcccgtg

SEQ ID NO: 282890 - DNA, 488 bp, Zea mays
tgattttcatgttgttgtaactatccagtatcgtacaactaacctgttacctagggggaaacactgcatgagtgttgttggtatccttgtctgatatgaggcggacgggcgattcttgcaggaggagagagtgattctcctagaggtggaggatgaagtggtgatagacttcaagccaactccaagtgtcgtgtcgacctctgcctccgctccctgcacacatccctcccagtcgtcttcaaggtccagacctcctccccgctcaagttcctcatcagcacgttgtgcggtgtcatgtcgccgctttccttagtgtccatacacgtcgtgcgaggcgtcccgcttcatctctaatcacctttatgtgcacatcgtccatatgtgacccccttctccatataatttcaacaaattttactcttttgggctccgtgtaatttcattagtaaaatctctactaattattaatgctgcaaagttaacctgtc

SEQ ID NO: 282891 - DNA, 342 bp, Zea mays
cttccgcccattgacgagttgacgaccaacagacccaggcctccgaccagatcgaggtgagcgaacgtgccccgcctgcgctggtgacggtgagggtgaggccgcacgccatccgccatcctcactgatggttccgtcccgccgccatcggagagtgtagaagtggaagcaagcagataaaccccagcacaagtagttcgtaacgccatccatgggatcctccttatcgaacctcaccgacgccgcttgcatcgtgcaccagtttaagatcaacggctactcggctaccaaatccatggcgaggacggactcggtcccggtcaagcggctggccgtgggagg

SEQ ID NO: 282892 - DNA, 458 bp, Zea mays
cttgctttccccatttcacacgctttccttccgcccattgacgagttgacgaccaacagacccaggcctccgaccagatcgaggtgagtgagtgagtcgaacgtgccccgcctgcgctggtgacggtgagggtgaggccgcacgccatccgccatcctcactgatggttccgtcccgccgccatcggagagtgtagaagtggaagcaagcataaacggataaaccccaggttctgtacttctgtcaactgtcctgtttttcagacgaaatcgaaacatgttagatcaatcaatggagacctctttttagtgtcgcacttgttgaaacggatccactcgagactttttcagatcgattaggcttattcttggggctggtaatgtgagcttctcactaccggattttcctgctgttttctgatgcccatgcccgtctctcgcccgtgcagcacatgtagt

SEQ ID NO: 282893 - DNA, 738 bp, Zea mays
gtttgtgttctttctattcttgttcagtagttgtagttacaaataaagattctgaacattttccttttttgctctctgttcaaaacaaccttctttttgtttcacgtataaaaatattggtagcatggttagacagttgaactgcataagatcatataattgtatatgagcattgcagttctgatggttctttgttttccctttcaatcttctaaaaaaatgcttgttttgtttttccttttggccaaccaattgtagtgtcgagtgtgtgtgactaccaattcccatttttaccatgtttcagcttggggtagtcctaggcaaaattttcatacgcaatacggtaaaattcactaaaataaaggtaaccaaacaattattcagtagcttgtcactcatatttgtttctcacattattcttcactagacaatgcaaagagtactgttgatctgacaacaatttactaaagaaccggaggctggtgaattctctattgaggtactaccaaattttagaaacatatttctttttttaggacaattattgttgaatgcaaacaaaacattgagaaatctttatatgtagcatgctcttaatattcattttattttgatcttagatatacaaacaaatgagtgcttagagaaaaatggtggctgttggcaagataaggctgctaaaatcactacaatatttgttttgtacagcctatacatacaatacttgttcggtttata

SEQ ID NO: 282894 - DNA, 596 bp, Zea mays
cgccaatccgtacatggtcgggctttattttacccgggtgaaattaggaaacccggcaaaggaattcttcgtccagattgacactgggagtgatatattgtgggtcacttgcagtccttgcactggttgcccgacatcaagtggactcaatatccagctagagtccttcaaccctgactcttcatcaacagcatccagaataacatgctctgatgacagatgtacagctggcttccaaacaggggaagcaatctgtcaaacctcaaattcccaaagcagcccttgtgggtacactttcacctatggtgatgggagtggcacatcagggtactatgtgtctgacacgatgtttttcgaaactgtcatgggaaacgagcagaccgccaattcgtctgcctctattgttttcggatgtagcaactcacagtcaggagacctgacaaaggcagatagggcagttgatggaatttttgggttcggacagcatcaactgtctgtaatttcgcaacttaactctcttggggtgtcccctaaggtgttctctcattgcctgaaaggttcggataatggtggtggcattcttgtgcttggtgaaa

SEQ ID NO: 282895 - DNA, 838 bp, Zea mays
gatactaattatgttgtggcgcaagctgatccgcaacccgaacacgtactccagcctcatcggcctcgcctggtccctcgtcgcgttccggtggcacatctccatgccggcggtcgtggccaagtccatcgccatcctctcggacgccgggctggggatggccatgtttagcctgggattgtttatggcgctgcagccgaagctcatcgcgtgcggatggcgcgccacaggcgtctccatggccgtccgcttcctcgccggccctgccgtcatggccgccgcgtccctggccatcggcctccgagggacccttttgcggatcgccattgtgcaggcggctctaccgcaagggatcgtgcccttcgtgttcgcgaaagaatacaacgtccaccctgccatcctgagcactatggtaatttttggcatgctgatagcgctgccgatcaccttgatctactacatccttcttggactgaagccagtgtagtgtagctgcttcgttcgtcctgctccacacatgatgaggcatgcatgagcgaggtcctagtagaccaccatggacgacgctgagctggttgcactcgagcgtggcccacatgcatggctggagccttgtaattttgagtcagctccagtgttccctttgtggggtgaggtgattagcagacatgcatgcggtttttgttgcttattactaatccatcttgtcgtttgaggattgcatgtagtgtcgtccatgcccatataaaccctagttaaggcttgagggccctctatcctagcgagaaatgaaccatacatgcgtgacgatatttgctcgctacattgggatttggag

SEQ ID NO: 282896 - DNA, 484 bp, Zea mays
  unsure (1)..(484): unsure at all n locations
ggtttctgtaatcaggactgcaatccaagcacttgatgttgagactgtaattttagacgatgagttatcccctggacaactacgtaacttggaaaagtcatttggtgggagtgtccgagtctgtgatcgaactgctcttattcttgatatttttaatcaaagggcagcaacacatgaagcttctttacaggttactttggcacagatggaatatcaacttcctaggttgacgaaaatgtggagtcacctggaacggcaggctggaggtcaagttaagggtatgggtgagaagcaaattgaagttgacaagcgcatcttgagaactcaaataagtgccttgaggaaagaattggaatctgtacggaaacaccgaaagttgtaccgcaaccgtcgccaatcagttcctattcctgttgtttctctggtaggatatacaaatgcntgaaaaagtacactcctgaaccgcttttctggagctgatgtg

SEQ ID NO: 282897 - DNA, 816 bp, Zea mays
attattggttgtattttggcagttctcatctggacttccacctagaccaactgcatgacatgtagaataccaaaattataaccaggttgatagatttcagaagtatgctaataacagggaagctattcaaattataagtaaaaacaagaagcaggactgcttgagcattactgtccataaatggattacattttggatacacaatgaaagcactgctaaccatttaagtattttttgtgcattgatagtattacctttataccagcatatatgagagataatttgggcagtgtaacaccaccgaatgttttttgtattaagattaacacctcaggcatgccatactttgacttcataccaaacacatccataatcttttagtattgacaacataataagaccacatgactgagaaagattgaagttaagctctgcaaccattatttatccatttactgcatcaaaataatggagaaaattcggttcaatgtaccactaggggaactcaaatgtgataaatggtctatgagaaatattttggctcaaatcatatctgttatacacctatacaaattttgaatatgcgacggttgtactaatgtgatgttttacgtgcattgtccaaaactgctgtaatgtgatgatttactatgaagcctagctgctattattcccttgttagtagtaatgcatacctcatcatactaattttcattccagacttccagttagacatgtatcatatgcatgcttgtatgagggacacatttcttggtcagttttttcagaaacatgagaggattagtttcttcttta

SEQ ID NO: 282898 - DNA, 574 bp, Zea mays
tggttcgcctgcaggtacgcgccgggccgtcctggctgggccgacccactgcgtgcgttctctcgtgcggccgaacagttgtggatgctcctgaaacagagctagcgcattggactggacatgcctactgagacattcgaacagatcatgcaggccgcaggagaatgccataaaatgggtgtgaaagaagtactagttaaacttggatcgcaaggatctgctgctttgtttgttgagggataggagccaatcagacagccgataattcctgccacagaaggtattgataccacgggggctggtgacactttcacctcagcttttgccgtaacgttggttgaggggaggcctaaggattgcatgggatttgcagttgctgccatgttcttcgatgaggctgagtaccacacaacccctacgaggtcaccctccaatcgcatgaacaggggtctcttctcagatgaagtggcgttaagtgttcatagggagcagtttatcccttctccgtgatctggtagagtggatgggttggacctcaactccagtggcgtggagttccagaaaattgcatttc

SEQ ID NO: 282899 - DNA, 605 bp, Zea mays
gggacccaaggccgaatccaccaagggctcccaagtctaatccttttggtgcctcctttggtacatctggcaataaaagttcaggcacaccatttactttgacaaccagtccaggacagcttttccggccagcgtcgctaagcattccttcagctcagccagcccaaccatctcaatcaactagttctagttctttttctaattcgttctcaagtgggcttactggatttggacagcctgcacaaattggatctggccagcagtcagcttttgggaagcctgcacagattggagctggccagcatgcaggatttgggcagactgcccaaattcgacctggttttggccagcctgcccaaattcaatctggttttggccagtcagcacaaatcggaactgggcaacagtcaggatttgggaagcctgcacaaattggggctgtccagtcaggatttgggcagcctgcacagtttgctgctcaacagacacttggatcagtgctgggttcttttggacaacctccccagttaggaggcataggttctggacgatttggtggattttcaagtgcttctacatctgctggttttagttctttatcttca

SEQ ID NO: 282900 - DNA, 409 bp, Zea mays
ttctctcgtccgcccacgcgtccgcattggccagctagagccaaccagaagagcttgcagttactgagagtgtgtgtgagagagaggatgggcggcagcggcagggctgctctgctgctggccctggtggtggtggccgcgagcctggccgtgctgatccaggccgacgccgggtacggttacggcggcgggtacaccccgactccgtcgccggccaccccgaccccgatgcccgagaagcccccccccgcggggccgtagccggacgagccgcccaaggagcacatgccgcccaaggagcacgggcccatgccggagaagccgcccaaggagcacaagccgacgccgcccacgttcaccccgagccccatacccacgccgtcgtcgtacactcccaccccgacgcccc

SEQ ID NO: 282901 - DNA, 494 bp, Zea mays
tctggacgagctcctggaggtgatcgcgtgggcgcagctgggcatccacagcaagccggtgggcctgctgaacgtggacgggtactacgacttcctgctggcgttcatcgacaaggcggtggacgacgggttcatcaagccctcccagcgccacatcttcgtcagcgcccccgacgccgcggaactcgtccagaagctggaggggtacgaggccgtgcaggacgaggacccggcgacgcccaggctgcggtgggagatcgagcaggtcggctacaacgcctcgctcctggccgagatcgcccgctgatcggccgcgcgacgatcgctgctgctgcgggagctctggtggctccagtccacgcatcgtctgccggccaggccactggcctccacctgctgctatctaccctacccctactaccccatcgatgatcgatgcgatgatcctgcgtttcagatcaacagaagcacgcattcatatgtgtgtgtttctc

SEQ ID NO: 282902 - DNA, 1354 bp, Zea mays
cccacacgtccgccaccgtccgtgatgatgggtgctttattgaaaaaatatctgattttaaagggcgatatgtcgaagaagctgacaaggatatcatcagtgctgttaaggataaaggaagacttgttagtaaagggagcattgaacactcttatccattttgttggcgatcgggtactcctcttatttatcgggctgttccaagctggtttgtcaaggttgagaagattaaagaccaattgctggaatgtaacaaggagacttactgggtgcctgactatgttaaggaaaaaagatttcacaactggcttgaaggtgctcgtgattgggccgttagcagaagtagattctggggtactccacttccactgtggatgagtcaagatggtgaagaaattgttgttatggattctatagagaagcttgaaaaattatctggagtcaaggtcactgatcttcaccgacactatgttgatgatattacaattccctctaagagaggacctgagtttggggtgctcaaacgtgttgatgatgttttcgactgctggttcgagagtgggtcaatgccatatgcctacattcactatccatttgagaatcgggaactatttgaaaagaactttcctggcaattttgtggcagagggtttagatcaaacccgtggatggttctatactctgatggttctctcaacagcactgtttgggaagcctgcatttaagaatcttatatgcaatgggcttgtcttggctgaggatggtaagaaaatgagcaagagtaaaaagaactatcctccacccaaggatctcattgatgagtttggagcggatgctctgcgactatatttggtaaactccccagttgtacgtgcagagtctctacgattcaaacgtactggtgtctttgctgttgtgaaagatgtcttcctcccatggtataacgcgtacagattctttgtccaaaatgcaaagagactggaagtcgagggtcttgcctcattttctccgatggaacaagcggtacttctgaagtcatccaatgtgttggatcactggataaactcagcaactgaaagtctagttagctttgttcaccaggagatggatgcatatcgtctttacacggttgtgccatatttggtaaaatacattgactatcttactaacatatatgtgcgcttgaaccgcaaacggttcaaaggacgtactggagaagaagactgcagaatttctctctcaacactctaccatgttctcgtaacaacttgcgtggtgatggctccatttacaccattctttactgaagttctttatcaaaatttgcggaaggtatcaagtaattctgaggagag

SEQ ID NO: 282903 - DNA, 524 bp, Zea mays
cggtctcttgggcggacgcgtgggctgccaataggatccatacggttagaaggtaccctttacaggatgttgttgctcttgatagctcaaatatcattgcaattgagggattcagcactggtgacatcaggtctgctatgcaacaacagcttggtatacccacacaatgacaccaactgcaatctattttgttattaatagaaagaaagaaacagataacagaaatatacgatacaaatacttagtttccattctattggaaatgtccgattttgcctgccagtcgtttaatgtatgtgtgccagtgtgtggtccctgcatgggttatgaatgacattcccttggatccctgcactggaaatttttggagcgaagagcatgtcaatggatacatccagctgtacagaagaaacaaatttgttcaaatgttgatagtgaaaacattttatggaagcattttcagcaacaaagcttccaatatacaaagctcacactttcacatcacttcaaagtggagcttatga

SEQ ID NO: 282904 - DNA, 481 bp, Zea mays
ccctctcttccgatgaatcttcagaagaatacggttgcttcgatatttcatacttcagatgcacaatcaagtgaatcagctggtgacacagttgtagctcgaacatacctgttccgattgaaaaatgtagaggaggctacaaaactatcgacagcaatcaaggagaatgcgccctcagactagttcttacggcatggattatcatctcgaatctctgcttttggcacgagctgtaagatctgaaggggacaccaccgatggccactgcggcaggctaaaagatgccttgcagagtttctttctttctttttttgttctcctagctgcatcaagatatcttgcttgtaacttgtaaggctgactggctggttatgtattagtactttcatgtaccatcttttgcattgacaagattatcgagcatgcttgcagcccatcatgtcaccgcaggcagcaaagcaagtggcaatggttcaagtcc

SEQ ID NO: 282905 - DNA, 1105 bp, Zea mays
ggaccgggtcaaggagaggtctctggatggatactgcagctgtgaaaatgatatagcatgtgagtggcactgtcgaccggaatacactgctgagtctcatcagagggaagggtaccaaggaagataagcttcggctagctgtgacctacctgctgtcctttgcgacaccaccatcatctgagctggagcaggttgaggccgctctgcgggaatcggaagttgacatgtctgcatttcagtatgtgaagaggataaaggcattattgaatacccaatttgcagctgcctcaggcacagcaactaagagcaacatcgtcgattgggcagagaagctgtatgggcagtccattggcgctgtgaagaatctcttgtcagatagtaggcagctggccttgacaagaacagttgaagctcttatggaagggaaaccaaacccagaggtggatgactaccttttgtttgatccacgggctcctaggtcaggaactagtgggcagtttaaaggacccttcagagaagccgttgttttcatgatcggtggtggaaattacattgagtacaagagcttgatagagctaaagcaacgctcacagccttccaaacatgttatatatggtgcaacagaaattcttagtggggccgagtttattcaccaactggcagaattggggcagaaagcagggttgggtggtggcagcagcaacataccaccaggttcagcacaataggtaggatgctcttacaagaccttttaatgttaaggagtgattcgagcttcagggactacggtaaatacgctcataccccacattttattttaaggagcgttccaggctgcatagattagtgatatcaaatttcatgaaaagtttatgccccttcgattgattagttgtcaatacatagctttgttgtttcaatttgggttttgatattgcccatgtatgactatttttacttttctgtactctatttccttgcccccctccctttattttactaagaaatttttcttggaattctgtttgcacactcaaagaaatcagttcatgaatatttgtaacagaaacctagttctgatgtttggataatttgattttggttg

SEQ ID NO: 282906 - DNA, 207 bp, Zea mays
  unsure (1)..(207): unsure at all n locations
ggatgacaaatgatcgcaagagtttcttgtggctggcgccactgtgtgtcccaggttcagggtgcttttatgttttgtgcaacagttttgggttgtagttggtgtttcttggtgcctaaacatggggctgttgtaacacttaaattttattccttattgcatgaatacgcaattacgcagaaaaaaaaaaaacaaanngaagggaaa

SEQ ID NO: 282907 - DNA, 140 bp, Zea mays
ctatgatataggtcatacaggtcaaacaaacgacacattaaatgaatcagtagtagctatatcttcctcctgggttttggtaagcactgtttcatccatgaatcctgcaatcgaataaacaatctgtaacaagttagctt

SEQ ID NO: 282908 - DNA, 817 bp, Zea mays
tcgacgtgcctgagggggtcaatgttgccgacgacccggtgcatatcatgttcgcctataccaacagcggtgctgactgctgagaatatgctgatgtccaatccaagggttctggtagtggccgagaaggccgcagaggtggccatagtggttagtggaggagcacttcggggttggagaagaaggtggttgctattgggccaatccagtggcagagattatcatcgacgagggcgcaagagtggttcattcatacgtgcaacatcaatcatttgctgcagcacatactaaatggaatattaaagtcaacaggtatgcacagcaaactgatgcggggcaagaaaccaagtgccttatcctatcaccaaaggcacttgttaatgtcaagccgaaccttcagattattgctgatgatgtgaagtgtactcatggtgccgccatcagtggtgagcttgatccaaacgagctcttctacttccaggctagaggcatcaacacggaaactgcaacagatgccctgttatacttctttggagcccatgtgataaagcgcataccgtttaagcaaataacagagaaggcattagcacagttcaaagagttgcttgcttcatccagacaaacaacggacgaggcccttcgttcgtgatattggtttcagttagtttgacacattttggtgagatgagaaacatagcaaaggttagaagtatttctgccaaacaaggggaggatctgtaatcatattttgaaatgctgtaagcaatactactatatcttgcaaatgcagtttgtttgcaaaaaaaccacgcgtccg

SEQ ID NO: 282909 - DNA, 336 bp, Zea mays
cggacgcgtggggacgacccaatccacatcatgttcgcctataccaatagcttcgctgagagtatgctgatgtcaaatccaagggttctagttgtggccgaggagtcagcagaggtggccatagtggaggagcattttggggctggagaagaaggtggttgctattgggccaatccagtggcagagattatcatcgacgagggcgccagagtggttcattcatacgtgcaacatcaatcatttgctgcagcacatactaaatggacagtcgtccagcaggatacaactagtaagtatgagtttgttgaggtcagcactggagcaaaattgaacaga

SEQ ID NO: 282910 - DNA, 344 bp, Zea mays
tttgttgggagccggctatttgctgcaaaagatcgaggagcaccggttaccccactgtagggtgaggatgagcttggagccttataccttgcagctgggctggcgctcggtggactccgagtctgtcggataccggcctgaagacactattgaggccattgctctcctcgggctaacgacctcttatggctttcaccccttggagctgcccactcatcccattggcttgttccccgctgaaaaggaggacaagccaatgtggaaggatcgagtggtgcatgccaaggatgtgtgggctctttacccacagcagactgctcacctgacggcgcgatgcatgaatg

SEQ ID NO: 282911 - DNA, 469 bp, Zea mays
ctaaactactactacacacacacacacacacacacatcctacgcatcttctcgcagccatctttgtggaagcaaggcgggcaacatcgtgtggctagccagcaagagggagagaaacaagcacaagtatggcctcaaaacctggccctctgagtcgctggccatggcaagatcttggaaactacaagtacgcgctggtggctccatgggcggtgcgcagcacgtacaggttcgtgaggagcgggagcggggagcgggacctgctcgccttcgccgtgctgccggtgctcctcctccgcctcctctacagccagctctggatcaccgtgtcccgccaccagacggcccggagcaggcacaggatcgtcaacaagagcctcgacttcgagcaggtcgacagggagaggaactgggacgaccagatcctgctgacggcgctgctctttacgcggtgaaccggcggtgccggt

SEQ ID NO: 282912 - DNA, 719 bp, Zea mays
cccgctaagatttacatttgtacgtgatattcttgcgtatttctatggtcatcttccaatcaaactaattggtaggatcctcaacctgctgggtgttagcactaagacccccttttcagaatcttttgctaaatatttagtgtcatcaaattcttcaatatgtccaccaccagaatactttgccaacctgttgctaaacctcgttaataatgttatacctcctttaagtagcaaatcgaaatcaaacccagcagacacaacacgctcgactttcaacaaacatcatgcatcttcacaacctggtggagttggtaacaccgatggccagagggcattttatcagaatcaggatcctgggtcgtatacacagcttgttttggaaacagcagctattgagattctctcacttcctgtgcctgctgctcaaatagtgtcctctttggtccaaataatagcacatgtacaagcaatacttatacagtcaaatagtggccaaggaatgtcaggtggtttggggcaaagttctgggctgccaacttctccttcaggggctgctgatcctcaggtcccaaccaagcgaacagtgctgcaactggcatcaatgccactaactttgtttctaggagtggttactcctgccaacaattgtctgttttgatgattcaagcatgtggtcttctgctggcacaactcccaccagaattccacatgcaactata

SEQ ID NO: 282913 - DNA, 1205 bp, Zea mays
gatgattggacatcttgagatcaacagtgcaaatcttgctcgcgtcttaagagagttttcacctgaggaagttacagcaaatatctatacagtggttgatgtgcttctgcatcatatccaatgcgaggtgcaaagggggcatctagcacaggatttactatccaaagcaatcacaaatctttctttttttatatggacacatgaactccttccgctggatattctattgctagctcttattgacagggatgatgatccttatgctttacgccttgtgataagtctgcttgaaaaaccagaacttcagcaaagagtcaagaatttctgtaatactcgttctccagagcattggctgaaaaatcaacatccaaaaagagctgagctccagaaagctcttggcagccatctttcatggaaggaccgctatccacccttcttcgatgacattgctgcacgtctgcttcctgttattccactgattatttataggcttattgagaatgatgcaactgacattgcagacagagttcttgcattctattcttccttgcttgccttccacccgctaagatttacatttgtacgtgatattcttgcgtatttctatggtcatcttccaatcaaactaattggtaggatcctcaacctgctgggtgttagcactaaggtaacattgttgcccttctgcattccttttttagcaatcttccacaagagtggctggaatctactcatactgtcatcaaacaccttcggccagtcaattcagttgccatgttaagaatcgccttccgcatattgggtcccttgttacctcgtctagcctttgctcgacctttgttcatgaagaccttggctttactcttcaatgttttgggtgacgtgtttggtaagaaccctcaggtctcaaatccaaatcctgtggaggcgtcagaaattgcagacataattgacttcttgcatcatgcggtgatgtatgagggccaaggcggtcctgttcagagcacgagcaaacccaagctggagatactgacattatgcgggaaagtaatagagattttgaggccagacgtgcaacatcttctctcccacctcaagattgaccccacctcttcaatctatgctgcaacgcatccaaagctcgttcaaaacccatcctaataatgttatattttacaagtgtattctaatgatgcaagatgctt

SEQ ID NO: 282914 - DNA, 924 bp, Zea mays
cctcctcaaatcgctggagctcagctgctccaatgcctacagcaaggtgctattttgtgtctgcatcccttaaggagaagttgtacataactgatggatacggcttgacggacaagtcaccaaattcatgggacatctatgacccggccacggactcgtggtgcacccacaagaacccgttgctcacccctgacatagtgaaattcgtcgcattgggcgaggagctggtgaccattcaccgagcggcgtggcacaggatgtactttgccggcgtatacgacccgctggaacgcacctggaggggcagagggaacgagatcgctctctgctactcgagcccgacggtggtcgtggacgggacgctgtacatgctggagcagtccatgggcacgaagctgatggtgtggcgggaggacgccaaggagtgggccatgctcggcaggctctccgacaaggtcacgagacccccctgcgcgctcgtggccatcggcaggaagattcatgtggtcggaagagggctgagcatggtcaccgtggatgtggacacggcggcaagggtggacgggttcctggttaccacctctgtaggcccgttggtggaggaagacctgaccccggagaggtgcgtggtgatcaccatctgaaggggtgggcgtgtccaagcttccttgacgccgggtgtattgtggtaactgtgactgactatcgtcgctggcgccgaacatttggctagctagcgtggatgatatatactgcgatgtgagtgaattcaataagaggcttggctctccatacagccaataactatagttagcatttgtatctcgtgttgtttgggctgcttttgtcgactgctggctgtaagaacaatatttgagcttcgtttgttgagtactgtgcgtcccacatggatgggattaatac

SEQ ID NO: 282915 - DNA, 647 bp, Zea mays
ttgttcgtgggtcggcgtagtctgctcttttattgggacaagggacttgattcaagaacatattgccttcagggtgtggccacttgcaggaaagtgggagatgccgaaggagaccatcaagagtccgacgaaggcggactggtcaggctgaaatacacattcaaatacggggataaatttgttgaacccgatgacgactggttgaaaaacattgaaacattaagtgacgaactgcttggggcatattcgaaggccgagaacactgcgttatcagcagccttcggatgccgaaagaagaaaagactgaaccgggtatttgacgcagtcgggtttgtctaccctgattatcactatccgatactgggtcgcaaaagaaagaatacttctcttgcaacagaagctaccacaagtgccactagtgagccagcgccgcaaaggaaaaagatgaaggtgctcacccaccgagcgcgttttattgagccggccacagtgccagaatttattgatgaagtctctttggcctctgaagctacagaaccagctccagtgccgaagatagaagagaaatctgaagcgccttcagcagagaaggcagaaaaaccgagaattgaaggacaaaaaatattggaaatcttaagtccttcagc

SEQ ID NO: 282916 - DNA, 513 bp, Zea mays
ctttttcgtccgcccacgcgtccgcccacgcgtccgcccacgcgtccgggctattcgagcatgatcttgttttgcaccagcttaaatgctgtggtgtgtttgaagttgttcggatatcaagaacatgctatccaactaggatcacccaccaacagtttgctgaaagatacagatttcttctcttgcgttccattgcatcgcaagatccacttagtgtttcaattgctgttttgcaacagttcaacattccccctgaaatgtatcaagttggctacacaaaattatttttccgtacaggacaggttgctgcactggaaaatgctaaaaggcagatgcttcttggaaccctccatattcaaacacagttccggggtttgcattctcggcggggatatcaacgactaaagaaaggggcgatgaatttgaatcatttatacgtggtgaaagaacatgaatacactttgataatcttctcaagagatggagggcagttgttctcatacagaagcacac

SEQ ID NO: 282917 - DNA, 488 bp, Zea mays
gacgaaacgagccgagcccatccctccctccgtcgccttcgccaaccctagcctagcctccttcttctcctcctcccgcggatccaacctccgcccgcccgcccgccgccgccgagagagccctatctcccccacgccgcggtctccgcgcaagcgggggcaggggacgcggatcccgcagctccccgccatctccggaacggccatggaggtggcggcggctgccgcagggaagccgctgacgccggaggaggaggcactccggcgcagcaccgactgcgtttacttcctcgcctcgccgctcacttgcaagaagggtaatgaatgcgattttcgtcacagtgagggtgctaggatgaaccctagggactgttggtactggttgaatggcagttgtttgaatcccaagtgtgtatttcgccatccgccaattgatggtctctttggtgccccaacttctggactacctccagtttctgcgcactacg

SEQ ID NO: 282918 - DNA, 463 bp, Zea mays
acttgctgttgatgacgagcgtcaaacattaggtgaaccctggaaaccttctgttacaaagccaacagaggtgggcatgcagtccaagaacaataagctcgctaatgtcgtgagcctgcttcagaagctccagcagcttagcgtgagcaaggatgaggacgcacctccggtcgaccatatggctttcctgtgcgagacagaaagcccggaccaccgttacgtgtctgagatactgctggcctcgggtcttctgatgaaagagctaggttcaggacaggcaggcctccagctccagctccactcctctggctacccgatcaaccctgacttgttccacgtgctggagcaaagaaaggcaggatgggccagcatacctgacggcatccaccagagcagcaggagcggcgccaagtctgatcccaagagagcgcaccggagctggtgtttgacaccgcgaacgagc

SEQ ID NO: 282919 - DNA, 520 bp, Zea mays
cggacgcgtgggctcctcggcctcctggcgtcccacccggtggcgccgatcgtgacgcttcaccacctcgacgtcgtgaagccgctgttcccggacgcgaggtcgcgcccctcggcggtgcggcggctgttcgacgggccggtgaagctggacacggcggggctgatgcagcagtccatctgctacgacagcgcgatccgctggacggtgtccgtggcgtgggggttcacggtgctggtggcgaggggcataatgtcgcctcgggagatggagatgccggcgcgcacgttcctcaactggtaccgccgcgccgactacacagcgtacgccttcaacacgaggccgctggcgcgcagcccgtgccagaagccggcggtgtactacctatcgtcggcgcgacgcgaggccttgcgcggcggtgagacgacggtgacgcgatacgagcggtggcgccatccgaacgagacgcggcccgcgtgcccgtgggacataaccgacccggacgctcattttgatcaca

SEQ ID NO: 282920 - DNA, 885 bp, Zea mays
tttctcgcgtccgtgccacgaggtacggcccagctcttcctcaaagcgggcgaaatccacgccgcgcggcggcggcggcagaggaggaggggggatgatggggtgcctcttcgcctgcttccgcgcgtccggcggcgatggcgaggtgaagggcaccggcggccagctcgcgcatccgtcccagccccccgcgacgacgacgacgaccagccgccaggtccaggatggcgcgggcaggagggccaggccgccgtcgaggaacgcgctctccgccgtgttccagcgagaagatgagggatcaaggacggcgcaagtggcgagctcgtgggcggacgagagtggcgagaggaaggagatggatcaggagcttgtgcatcaggccattatccaaaagagctgtggtgcgttgctgcaaactacaattacattcaaggagcgctcatcaaatatgctgattcagttcatcagaaggaaacacattcaggatgtcttcctgttgtgtctgatgatgtacatttcatggaagcgccaaaggttgagaactgtgaaactcctccaaggtctcatcagagctccactgtaccagatgcaacgagttcttcaaaaacaaatgatgagttgcgtacttccgctacttccttagaaaataacgtggaggagtcaacaaatgagaacgatactgaggcctgtgtgcagggtgaaggacaacaacaagctctggatcttgctgaggattttgaagaatgtggggtttcaaaagaagatttctttcaccctgaaaaattagaggatccaaagtgtgcaaagaatgaccatgtggtctccatggaaatttcaatatctggtgaatgttcccttttccagagctctgagggttctgtatca

SEQ ID NO: 282921 - DNA, 775 bp, Zea mays
ccctctcttccgcccacgcgtccgcggtacctcaccatggacggaacgtggtggacaagcggtcttcctgccggccgacgcatcgaggtcgggttacaagttccaaccagcccaaaccactcccgtcgtcggccgtttccccgtgctccaccacctgacctgtgccggcccatcctccccgcctggcccaagccaacgctgcccttgccgtgccgagtaccagccggatgcccggatccccctcaaagcacgaccgacaaccccacgccgccggcaccgccgcaccaccgccgctaaccctacccaaaccagatcggatccgatccccttctccttcaccaacgctcccctcgcccaattcgcttcgatccgccgggaccgagatggacgacgacgacatgccgcactcctcctccccgtcgccgccctcctcctcggcgctccctgtggacggccccgtcaccatcgccgctgcaccgccgggcgctgccatggtggtcgcgctcccgatccataggaccgcggcgtccttgtacgccagcgccgccgccgccggcggcgggggcggcgggagggaggacgcctggagcgacggcgccacctccgcgctcatcgacgcctggggtgagcggttcgtcgcgctgggccgcggcagcctccggcacccgcagtggcaggaggtcgccgacgccgtctcctcccgtgacggctacttcaaggggcccaggtccgatgtccagtgcaagaaccgcatcgacacgctcaagaagaagta

SEQ ID NO: 282922 - DNA, 1107 bp, Zea mays
tgtcgtttactcaacaatgacaccacctagacagcaacatatgcagtgtcatgtttcagtcccacaatcgccttcggtgtcacatgggagtcacccttctcttaccatccaaagtcctcttcttaatgaagggagccaaaaccaacaaagacatccctcagtgagagtctcactgagtgtaggggcaacagtcagttctccaagagctggaagaggtactggcaatgctcacattgctcaaagtactcattcacatgcaatattcaagagagcaggggctgttgctccagtctttgcaacaagaaatgctagccaattctgtccttctgctccagatgatctccttttgcagcaggcattgtctcacgcttctcagcctgttcaagttgcgcctacaaccaatgctttcactggcgcttctcaaaataaccattttcagagatctttcagtgcgccgatagcacctcaggtgcaacatggtcaacctgcggcacgttaccaggtcgccataaatggaatgcacgccgtagggccgcaacttgcacggtccacctcacttacaactcagagaacacaatgcctcccagaaccagcaataatagatgtcagcacaacaagctggcaagacatacttgctactgtggcatctaatctgggggtagcagattacaacacgagcacccctgagtctcagcatgtaacggttgactctctagccatgcatcccactgcaaaccatgggttggatcttcagcatgagcccattgcagaatcggagaacctgacatattcgcttctgcatgattcatccaatggcgcagcaggtggcagtgttcaggcagatggtcctatgcaaacaccagagaatttggaccatctgattggccagagcaatcctgttccaaatgaagctcacctggatgactttgcgggtgccccccctaatcaattaccaatagaagaagaagaagaagctcatcagcctgagatgtcaaggctggagcctacaaacattctgttcgagttcgattgggtttaagcggtgacctgtctggctgcctcatcagcatattcctaacccatgaataataaatcagtgggcatgac

SEQ ID NO: 282923 - DNA, 556 bp, Zea mays
gttgctcatggccacccgtaggaagtggtcccactgggataaaccatactagctcaaccacaccaagtctagcaactgattggttcagtggtaagagaagtgcaagtccgttgggtgcaacttcacaaactccaacaagaggtatttctccacaggccaaccttagcagtgcgggaatctcagtgcagaattcagctcctgtaccaggctacaattctcatacaccaggtgtcaatgcaatttcaacaaatttgaacgtgatgtcttcccaaccatcagtcaatgactccaaggcgttggtgccattgggtaatggattgtcgtcaaactcaacttttggtgctgaccctttctctgcaactccacgaccagaacagggttcaccttttccccccaacgttccagacaatctgctcagctgctacccctcctgcctcagctgctggacatcatctccctcctaagccaatgcaggctggtcctgtgcagagtatatcctcgctttctcctcatactagccagttgccacacaatcagccaccttcgaggcaacaac

SEQ ID NO: 282924 - DNA, 501 bp, Zea mays
cggactcttgggttcgtttcgtccttcttccgccgcagccgccgtcgccgtcgccgcagctaggggttttgcctttttggctatggacgcgacgggacagcaggagcagcatacaggaagtgtaggcggagatctctacggagtgcttctttactacaagtacgccgaggtgcctgacgccgccgcgctcgccgcgttctacgaggcgcactgccgcagccttgcgctcgtcggccgcgtccgagtcggccccgacggagtaaacgcgacgctcggagggcagatgaacgcgctggagaagcatatcgcggagatgagctccaacgacttgttcgtgggcacagatttcaagctggcgtcctgcgacgaccctgtcgacgagagggtcgcccgggagtgcggcctcacctcactctccgttcgggtcgtcaaggtgctagttacactgtgctgcaaccccgatggcacccccagagattttgagtgctgggagacacttgt

SEQ ID NO: 282925 - DNA, 750 bp, Zea mays
tggtgcgtgggagaggattcacgaacccgccgtcggactggagaggtgatccatgcttgccccaggggaactcgtggactggtgtcacctgcaaccaagatccactggcaagagtaactgggctcaacctcacaaatttcagagttggaggatcgatatctaacggcattgccaatctgactgcagtgtccagcatttggcttgtcgggaacaatttgaccggcccgattccagatctgaaccacctcctgcatgtagtctctttgcacctggaggacaacggactgacaggcccgctccctgaatcgctcggaaaccttacaagacttgaggaactgtccgtgcagaacaacagcctacaaggaacaattccaagcagcatcaggaacagagcggcggtggacccaaggtttaggttccagtacacacctgggaacaaccttagctaacaagtgcattacaggaaggcaaaaatatctgactgctgttccttacccaatttcgggtgcttcggaccattttccttcccttttttgaatcacgattttttgttgtacttcggaatgtatacttatctcttcccctgtaaagatgcatttttgtcatagaaaaaaaacgaggactatattttattgaacgagaaaacgagaaggcttattgctttagacgaattttcataagagcaatgcgtgtacaacccatccgaacaacatctttatgaacaaaaggtcaatctttgagtggttgctc

SEQ ID NO: 282926 - DNA, 510 bp, Zea mays
agatgtcgcagcctccgcgagggcgagacagctcggcggcgtggttcggggatgggcaagggcgccgaactgtgggacgactccgcgctggtggacgccttcgaccgcgccatgttcagcatgaaagaaatgcattgcaagagcaagcgagcaacgccaagcgaggatgggaagaccgaacttgctgctgctactgcagaagaggagccaattactgctggagcagcggatgtgtgcggagacgaagatgccaactgtgacagcacacactgtgatctgtcagagttacaacaacagccctatgaagacagacagacaattgagcatgctcctcttcaagaaactgatccaggcaaagagacacatgtttcagaggctaagacgctctccaccgatgcttctactaatgctggtggaaattggagctcaagccagcaaactgggcagtacaatgaattgctgagacaatactatgaacttgaggagaagagtctgaacattcttgagcaa

SEQ ID NO: 282927 - DNA, 497 bp, Zea mays
tcttgcgtccgagaagctcgctgtctgtagcagatgcaatgacggcgcagagcacacgtattgcatgcgggtaatgatggaagaggttccagatagtgagtggttgtgtgaagactgccaaactgctgtagggatctgataaaggagaatagactacaaaagtctcaggtgaaggctggcacttcaaaagagctttccttagaaggggagattaacaaacctgccattgctgcaaagggaagaagttcatctgactgtgaattgaaggctgggaatatagaaaacaaagagtcaaataccacaaatgagaggaatggcacagtcaaaaccaggacggaagaagatgctgtgacgacatcctcaactagagatattttttctgaaactggtggcttgtacatgggggctgactctagaaagagaatggaaccatcacacgagacattcgtgtctgatgctgacaaacggaaagcaacctagccatcaagtatcaactt

SEQ ID NO: 282928 - DNA, 560 bp, Zea mays
gcaattttatgtcctgatcaaacgcaatgaggtggagaatgtttaccattgggcatgtggccgcccaacatctctacatgatcgtgggagggatagcgatgacgacgacttccgagatagagattacgatgtggcagcactcactaataatatgagccaggcatttcgatttgggatatacaggaatgatgacattgaagaggcacaaggatcccacgaacgagatgatgaggatgtctactttgatgacgagtcagctgaagtagtaatatcttcattgtgtttgggggatgatcaggacagcagttcactcttcacgaattcaaactggtttacgtttgatggtgatagaggaatcaatgaccgcctagctgcctctgttcctccatcatccccggattctgaagcgatttccttaaacactgagaatactgatgaagcgctaactggtgaaaccactggcggcactgagtcactgcgggaaagtgcatcccttgaaaatggtcctgttgaggatgccaatgaactagcagaagtcgctgacgacaatgatgctgatg

SEQ ID NO: 282929 - DNA, 601 bp, Zea mays
cattctttagctaattttattccaaccacatgttgtgaaaagaaatccatgtaatgatcatttactgtctgtatactatctgaatgtaccatagttcgttttatctgttctggtcgatttatctcagggctgacacgtattttttctttattataacccaggttaacaaatgttgatgaggaaggccatctatatggggtttctggaggttctgggggctatgcagaaacaatctttcgctatgtagcacatgtaatttacaagagagaaatagagggtcctcttgacttcagaatcctccgaaattcagattttcgtgaaattacactggaggtggagggcaaacctgttttgaagtttgcactttgttatggattcaggaacctgcagaatgttgttaggaagattaagatgggaaaatgtgaataccacttcattgaagttatggcgtgcccttcaggttgtctgaacgggggaggtcaattgaagcctgttcaaggccaatctgccaaggaacttatccagcagttgaggagtgtgtacacacaagatatattaatatctgatcctttacgtaaccctatcgcgaaaaaactatatt

SEQ ID NO: 282930 - DNA, 601 bp, Zea mays
tctacgcgtccgcccacgcgtccgtggaattgtatggaatatcactggagggaacgatctaaccttgacagaggtgaatgctgcagctgaagtaatctatgatcttgttgaccctggtgcaaatctgatttttggctctgttatagatccgtcatacactggtcaagtgagcataactctaattgcaactggtttcaaacgccaggaggaaagtgagagccggtcttcacaggctggaggagacagcaaccgcggtcgctcgggctggttttctcccacttcccaggaggaaggtcatgcattgcagatcccggagttcctacagaggaaagggcgtccagggtttccacgagtctgaacacactttggttcaatgtttttcttgtcatagtttggtacgatgcaggtttggtttctgggtctcttaggtagcaaggtagagcagatgttcctgaaccgcacatactaatctgtgtgcaaacttcgccgcctgagtacattggctgggctgctttgcttctcaggaacctgcagtgaggtctcaatttgctagttagtatgattaaaagtcagcgctgagaccaaattataacgttccgtg

SEQ ID NO: 282931 - DNA, 636 bp, Zea mays
cctacgcgtccgggcagcctctgcactgcaggatctcatcccctccggctgcccgtgcccagccgtcgtggcgcgacggcggcggtcggtctggtagggctcccctcctttccaccagatcagaacagatagtcatagatcactagatcagtgtcacaccacgacccgccagccggaccgccacttgccaaccaacgcctttccctcctcctccgcctccgggcgctagcgggaatggacgccgccgagctgcccctcgtctaccacatcggtctggtgctggccgcgctctgggccgccgccgccgtcggcttccgcggctccctcctctacctcctcgccttcctctacctctacatggtaaatgctcgctgtgcagtgagactgcggaagaggatacaacatgaagagatgaaatctgcctaccaacgaaggctcctctctgatgcagaatcagcacgctggttaaaccatgcaatcgacaagatgtggcctgtctgtatggagaagatcgtttcaaaacttctacggcccatcataccatggttcttggataaagtcaaaccttggacagtcagcaaagcaagtattcaggaactctacatgggcaggaatcaccaatcttacctcatgaga

SEQ ID NO: 282932 - DNA, 441 bp, Zea mays
ttctacgcacaagcgcactctagcaatggcttgtgtggttgttcgacctagcgacgcggtgctactaaaggcacaagccgacatatgggggctcaggctgtcctacctaacgcccctgtcactgaggtgcgccggggagcttggcatccctacggggatctaccgccatggcggggctagcctcaggctctgagccgctcacggcgctgtctctgccctccactaagctgccggtcctccgccggctgctgcggctcctgcccgcgtcctgccgtgtccaccgtcgacaagcacagctcggaggaggagcggtgccgcatcagccccgagtcctacctgctgggggacggcatgcctcacgaggaccacatgaaccacaccgctcttgtgctcacctgcaccctcgcaggctacattaatgcggggatagggctggcggag

SEQ ID NO: 282933 - DNA, 371 bp, Zea mays
gcagcacatgaggtttggtactgcgaataagggtattcagtgtgaaatattaactgcggacggcatcacggcgccatgggtgtgataatggaaatgattctgcacacaccatgctaccagagcctgagagcttgaaagcaactcaagggtatggcagcaagcttgaaactccagaacccacgagggttcaaccggtttctccacataatggttcaagacaaaccaaatctgttaaaaggaaagaatcaaatgcagaggtccaatccaagaagcgtaaaaccagttctgctgtgactcgtgttcgagcgtcgccccgcttagctgcattaaatgctcatcttgatgtaagcatcgaacatgaagatgacatg

SEQ ID NO: 282934 - DNA, 602 bp, Zea mays
  unsure (1)..(602): unsure at all n locations
gaagccaaaaagaaagcgacaatggtaatgagttcaatgacctagatcatcataaaaaagatacaacatcttttgagactacttctggagtgtacccttctcctgatgatgcggatatagaggattctgttgaaggtcaaactaatgaagcaataagtcgtggtccgaacaaacttaaacatgtttggaaccttcaaaaaggaaaacgaattgtagttaactgtaacgagctcggccaacctattggagaggaggcaggagtcttaggaaaattccttggcatggttgctaggaatggctgcttatgtagcttaagcttcaaagattggagattactgataggaaagaaggacaggaacaatgaacaaaaaaacaagcaagatgtactgaagcaagtaaagatgagattcctataccctgcccgcatggaaaagtggatacttcgaactattggtgagagatggagacaacacaagtccaatctaaaatccttacattttgatgcgcataggagcanggaaaataatctaaaaaatgttcccaaaagcgtcttagatgatcaatgggtcgctcttgtgaataattggtttacaacaaatcac

SEQ ID NO: 282935 - DNA, 1040 bp, Zea mays
  unsure (1)..(1040): unsure at all n locations
gttatgccctcaaatgggcagtctaaacccttgttccagtcccaagaagcaactatactacagcccaaaaatgaagcaacgtgggtgtaccatggacgacctggtgatggaaaggttggaacatcaaacaaaagcagaccatcgaccagtattgggttcatcaataaaaatcatcaatcagtaaatgctgcaacttttgccatgaatttgaatggccagaagtattgtcagtgaccatgcaaaatcagcaggcgcaaccgctatgcctgcccaggcaaatataccaaacagaggtcttgatgctcctcggaacatattctcagcatttccagctaatgttagggagaaccagagcattccatcagctccagtggctcaatcttggatctcgtttggtgctgctacagagaacaaaccaaccattgtcagcccagctttcgttgacaataattgtggctggaaaatgccatttgctaatgtccaaccttgtgatgataccaaattaagcgttgttcctcagttctttaggcatcctgttcaggtagttagagagaactcggttcaaagcaaggggctggtaatatttccccagttggtgcagccagatttcgcgagatcacaagggcgaccacagtggctggggctggttccccacatgcaacagaacccaggcaaggatgtactccgcccggacttgaacatcgggttcccatctccacgttcaccaccagcccgacaatcgtctggcatcaatttggaagcacagcagccagaccttgctttgcagttatgagctggggatagacactacctggatttatgctataatctctaagcgagaacaattgggacatccggtacgtggatcggtgatgatcgattgggatgtaggctttacatgccacatggcatcatcgcagctcatcaactcatcgcgtcactgtacaaaagatatcagaaaatggatggatggacactgctttgaatgagatcatgtctactggnggcattctgataggagttcaaatcccagcattcgg

SEQ ID NO: 282936 - DNA, 506 bp, Zea mays
cccacgcgtccgagaggtttcaggctatggcctattcagcagctatgaaagttcctgttgccgctattgaggtatacctggatgtgaggagccaaattgaagatcaaattcggggatttagcgaaccagtatcagacaaacttcttccagatcttgctcctcaagagcagcatgtattgactctagttctggatctgaacgagactcttgtatactcagattggaagcgtgagagaggatggaggacctttaagaggccaggagtggatgcttttcttgaacatctcgggaggttttatgaaattgttgtgtattctgatcagcttagtatgtatgttgatccggttgttgataggctggatccaaagggcgatattcgacataggctatcaagagttgcaactaagtatgaaaatggaaaacattatcgggatttgtcgaagctgaacagaaatcctgctcaagttctttatatcagcgctcatgctaaagagtcaagtctgcag

SEQ ID NO: 282937 - DNA, 615 bp, Zea mays
ggcgccgtactgcaagagcagctcaaccatgcccaggtccgcggcgcggcatgctagatggagcaaagataatccttcaacagattcaagagggcggacgccgcttcatcacagcatcatgaaagggcgacatgtgtacgccaagctactgctttccaggggcgccgattctcaagccgcggatcgagatggtaggacagcgttacagtatgcaatcgacagcggaaccatagaggacgaagagatccttgttttgctagaggacccaagtagataaatcacgtaggtgtagtagtccaagtctcgagttcctgcggtggtgcattgttgtggctgccttttgcagtcacctggcacacacaggggccgagggtgccttgctagtattcagtctctgcctttgtggcaagaggaagttatagtttttctaggtctgtctgcggttttggtcgcgcttagggtaaaagtggcctgtttgtcgtggatgcagtttgcaagttgttgggtttgcctttgtttgcagatgtcgcagtgtacacttgagaagtggctgccattgttgcgactgatgtacatatagcgatgtctgatacaggttatctatgcaaggttttt

SEQ ID NO: 282938 - DNA, 467 bp, Zea mays
gcggcgtccgccctcttgaatctgtggagtttacattggcgccgtactgcaagagcagctcaaccatgcccaggtccgcggcgcggcatgctagatggagcaaagataatccttcaacataatcgtccggcccgtctatacgggcgcttgtgctggcaggagaaacagaatccccggtacaacccttctcgagtggattgcggtcaaaacatctagagcttccgttagatggagaggctgattgctcttgtaggaggagagcttttcccagagtcaaagccgaattgaatgatgtatgaccataggaaaaatctacgtcggcatttgaccccacgatcaagctgtacacccccttcttgttgttcgaacttacattgtcccacagctgttctgcaagttgaatcccatccatgctatgcctccgcacgaaatccttctcagcatacttggcatgagtacatctctcc

SEQ ID NO: 282939 - DNA, 1245 bp, Zea mays
cccacgcgtccgcccacgcgtccgctccaacagtcgcttcaccgtcggcgccgtcggagggacgctccaggtggctgcccccggcagcggaaagtttcctgcggcccctgccctctttcaccaccgcgggttctcaggcagagaaaccttacctgtgcatcatggagattgcagagctcctccaggagcttgtttcatgggcacgtcacctacgttggggccaatgagggtatccttggtatgtagcgcgagccccaaccaccataggccaaggatttcggatatatcgcgactacaaaagggggggtcctccagagggaaaggcaggtcgtaccaggataaagatgactctgagaacatcgatgaatttgatagcgatatcatgttctccaagaatgggccaccaatctctttggcaagcaattcccgtcctcaagccacatcggctcctggggaaagagagaaggagatcgtggaactctttaaaagggttcaagcacagctgcgagctagggggaaaagcagggaagacaagaagcctgaacatgcaaaagtgcagggtgaaaggggcagtgttgattcacttcttcagttgctcaggaaacactctgtggaccagagaagaaagaatggtgacgacaaagagcagaattccgatgtattgaggagaggcaacgattctggaaatagacaaggttcaaccgtctttggcacaaaaagtgacatccaggaagagaagaagaagccacctccggcacccttcataaggccagcctcaaatttcaggcgaaggtctcctgttcctggagtgaagttccagcctgttatcaatgcggatctggacactgatgacgatcgcaagtccatcggcagtaatgccgtggatgctgtacagaaagctaagacagctcttgatgagaggactgctacagatgagcctgactccatgtctccatatgaggcggattctgtaatagaaccaggaaacatttctttgaatgacctcgatgacattttagatgacgatgaagaattcgatgcggatgaaccagacgacgagtatccagaaccttctttgggtatctctgatgtcacagatacggatgagtcgcacgagaacgactccacccccacgggaagtgcggatctaagctctctgaaggttgcggagctgagagagctcgcaaagtctcgaggaatcaaagggtactcgaagaagaagaaaaacgagctggttgaagtgtt

SEQ ID NO: 282940 - DNA, 750 bp, Zea mays
ggcagagtcctcatacataagtagtatagcaaatggcagtgtggatcattcgaatacatcgaacaacatgggttcagattcttcagacgcaccccataacagtactcaagggcagaatagcattccgggtgatcagcaaaaaggtggtaacagcaaggcagataaacaatataaagttaagcaacctcggaaaaaccagtcagacaatgtatctaagccaacaaggaccgatgaagcttcagttgatggagtatctgatagttctaaaggaagcactgctaccgagccaaatcaatcccagtcttcatcatcctcattaccaagttctgatttgctatgatgggggtggagcacaggtggatgagctgaatacacaaaaaaaccagccatcttcccagtccaaaaagccgaaaaaatctactctttcccatcaaaagagtgctcctcacgacttttaccatggtaagaagcctggtgtgtcagttgagtcttcatctaaaaatggtgctcccgatgtgactagcaatggtcgtccaaagtatcagaaaccccaatcctctcatcaaccaagacagcagaacccagtgaaccatcgtcctcatggtggatctggcaattttcaatcatcaaactcacatagaagcaactcatgtccagcaccagctgggcataatggtattcctactggaccggtgcaattctggccaagcgggccaccttatcatggaccaccaatcaattatcctgata

SEQ ID NO: 282941 - DNA, 403 bp, Zea mays
gctttatttgcatagcaccatccttccctgtccactccagttagccgcgcgcgttcgcctctggcttgcgcattagtgagctgtttggctcgagctatcacgcaaaaatagtacaggtgttgttgccttccccatcacgttcgccatcgccgccgtggggctgctgtcgtggccagcgttccatgctaaggtgccagaacatcacctcgccggttggagagtgcctctgtattccgcctcagcgtcgatgaccatctacgaattctaccgccctcaacgatgtgcgtctcgggtcgttggtgagcgcctagtgacgtcaagggcctagctcaatctttgctgcgtcgtagtatttagaaagttgccacaccgctggtaaatattgttgcagtcgttgttgtcg

SEQ ID NO: 282942 - DNA, 488 bp, Zea mays
caaagagtgggcataggattgctggggcacaggaagatagccccataaaaggcaggaaaaggggcgctggggcacaggaaggtagccccatcaacggcaggaaaaggggcgctggggcacagctagatagccccggcaaaggcagaaagaggagtgcggcagcacaggagaataaccccagcaaaggcggcaagaagagccggcggtgaagctaccatcagctcaatgccggtgaaacagtgtacagcttaaccatatatcataggctggtcccttccaacgttgtttgcctgtcaaaaaagtttttgccccagtattcaaactgatgtaacaggaagggttagctgtttctgatgttgttttgtaaggagtatggacagttaggagggaaccctcattttcctgtagagattatccgagctaggctatacatgtctgcctgtgtaatgcttaatagtttacatttatatcatgtgaaccgatgcctg

SEQ ID NO: 282943 - DNA, 636 bp, Zea mays
tccacgcgtccgaaaaaaacatctccgctacctgcaacatccttttgtgaatctattccgcgcgcacggcacgatcgagcaaagcggccggcgagagcatcggcgatgagctcaccacgcgcgcgcacggcacgcagacgcagcaaccagccaaagataatatgccgtgttcccatccccatccatgccagggcaggacaggagcgcggtaggtatgttcacagcatatcccccgcgtgcgtgcggatcgaccacctcgaccggcgccaaaagatccgcccaatgatttcttggcatccttcgtctttgcctgctcttctttcgttcgttcagaccgaaaaaaaagatgttgtttccgataggaatcgcatctgaatctgcgtccgatcggtccctgttcctgctttctccaggaccttcttttttgaccgggggaatctgaatctctctctctcttcttcctcctaaagccaccccatctgtgcatgtgcattgctccctgcattcccagcccgggctaggacactccagctgctgtgttcaaacacttctctactaataacttgtaaatattattagcccacccccagttctataaaacaacccagaagaaaaaaaaaaaaaaaaatataaaaa

SEQ ID NO: 282944 - DNA, 649 bp, Zea mays
gttcaaaaccattctccactgttgctcctgtcctgttcctccgcttcctctgtctctgtctcgtcgtctcccccatctggccatctccggctagggtttgccctcccaccacgtccgaggtctagctcgtctccgccactgccggaccaaggatgtcgcaagagcaaggtatggaggagccgccgccgcaggctctaggcgaggcacaatcggccgccgatgtccccatgagcgaggccgcagcggtggaggatgaggatgaggaacccgtcatgggggaggggcagggcggtgaaagcggggccgccgatgccgttgattccgtcaaggcttcagtgaagcccgaagcagagggcgcggaggaaggggacagagccgagcttaatggtggcccgacggcggatttgactgacgaggttgtgaaattggagaaccgggatggccccgtgccggtgggtggctccgcggatgagtgcggactggagatggcggtgttgataagggcctggttggtcagaatgagcctgttgtgaaccagcttgtgctggtgcaggctgaggaggacttgcaatgtctaagatctcaaacagttccttcatgttcgataacaccactgggggtgatgactcagggactgaggaggagcagc

SEQ ID NO: 282945 - DNA, 471 bp, Zea mays
ccctctcttccgattgctttgctctcttgtgctttaacctgtcatttaggttgcttctggttcgttctgtttattatattgttttatgattttcccctgttctttttgaaaatcttgtttcttttgcttctttgccgccgtacattgattatactgctgtgctaaccaatgtctgaaacatattgttcgtgggtacagccacaacatgcaaggagattgttatacgacttattccctttttctgaacatagcttattaatagttttgggcaaggttttcatgacttaagtattatataataaagcgaagagttgtatttgtaaactaacttgttctttatcaattagccactaccgtaggcctgttaaatggtattccatagaatctgcagctaaagttttgacaagtcttgatttgaaattcatatgattgttcacgtcatatggaatatggatgatactcttgggcaaa

SEQ ID NO: 282946 - DNA, 496 bp, Zea mays
gcctttggcaccccaagaccgccggtaccatgccggtcctccgctccccgttcgccgggggcgacctccccgccggcgacgccgacccggactacctctatttccttgaacacatccgcatcgacggtgactcctacaccctcgagctcccctcccacggcgactccccgccatcactcatcaagtacgagaccccgttcgccagcccctccgacggcgagtgcgtctccgatccctcccagggccgcctcagcggcaaccgcagcgcgcaagacgagagggaaccggtggagtcgcgcgtcattggagacgggacccgccgtggtacgcattgtgctccttgacgtcggacgagagactatccgcctctttccttgcagcacacggcgccgttgatggacggccaacttggttctggagattgggggccgtcgtcgtcaactacgataacccgggtgctgtggaatcttcgggggagaaggatacacagccgggg

SEQ ID NO: 282947 - DNA, 527 bp, Zea mays
ccacgcgtccggaaaaacataatatgttcttctgtaaatcttgcccacttgagagtatcaggaacgagccttcaccagagctttgcaggggccatattattaggaattttatcaaggaatgcgggagtaaatgtggctgtaacgcgcaatgtggtaaccgtgtagttcaacgtggtataacttgcaatctgcaggtgttttcgacacgggaagggaaggggtgggggctacgcacacttgatgaacttccaaaaggagcttttgtctgtgaatatgttggagagttgctaacaaatacgaagctacatgaaatgactactcaaaacatgcacaatgctaggtactcagtgctcttagatgctggttggggtcctgatggggtgctgaaggatgaagaagctttattcctggatgcgacattttgtgggaatgttgggagattcatcaaccacagatgctatgatgcaaatttagttgagatccccgttgaaaaggagacgccagatcatcactattatcattttgca

SEQ ID NO: 282948 - DNA, 536 bp, Zea mays
ataacttgtgatattggaggttccattgaatttatcaacaagagtacatcaatagagaggcctttgttggcgcgtgatacttgtaagaattcataccatgatgatatggaaggtgccggagtggtctgcttggctgttgacattctccctacagaattctctaaagaggcctcccaacattttggaaacatactatctagacttgttgctagtttggcctcagtgaagcaaccggcagaacttccttcctacttgagaagagcttgcattgcacacgctggcacatgaactcctttgtatgaatatatccctaggatgagaaatactatgatagatttggcacccgcaaaaacaaatccattgcctgacaagaagtatagcaccctggtatctctcagtgggcacctatttgatgagttccttatcaatgaagctctggacatcattgagacagctggaggttcatttcacttggctagatgtgaaggtggacaaagcaccgatgatatgtcatacttagagcttgaagtatgagc

SEQ ID NO: 282949 - DNA, 504 bp, Zea mays
  unsure (1)..(504): unsure at all n locations
cccacgcgtccgcggacgcgtgggctgagatcagcggggatacgagagcatggaacagcttttatatgcgtcaagatactgttgttgaaaacatagcaaggaagaatggtatcagtaagagtgagttactcgatagagacgcagatgatcttgctgttcgtattgctcttggtgagacacacgtcattgcagagactaagaaatttctatcaaggtctggagttaatgttgctgcattggaagaacatgcttctaaacgaaatgagaagttcaaaagaagcaattatgtgatattagtaaagaacttgccatttaattctactgaggaagaactcgcgacactgtttcagaaacatggtagtttggataaaatcattctacctccaacgagagtgtttgccttggtagtctttggtgaagcaactgangcccaatacgcattncaaaaactactatatacacgatataaggatacttctctgtatttgagtgggcacctgaaac

SEQ ID NO: 282950 - DNA, 434 bp, Zea mays
tccacgcgtccggttctagatcgcgagcggcgccctttttttttttttttggtatcagatcaaaactccttcagtaatgacaacaagatcgacagaccaaacatacaagattaaaacatagtggtagttctgcaaaatacctccgagacccaattttaatcacacaacacagctgaaacaaaatagctccagactgagcaaaccacaaaggttatgttcaagagatggacacctgcagctgagagcagtagctccaaacctatcagaagtttttttatcttcaaagggggctacatagcacaaggggttgctggatcttctcaacggagggaacgaaatatctgctcgcacaaggtgtcagtaatcacatattgtttgtttcacatattatccaggatactaagtattcttaaaaaatattgaacaatcaacct

SEQ ID NO: 282951 - DNA, 464 bp, Zea mays
  unsure (1)..(464): unsure at all n locations
gtctttttccagcccaaatccgcctcttccgctgctgccataaagtccggactttacgaggctttcacgacgtgcgagatttctgttatcgatctccacgaacccgatagcctgccataaagtctgcacagacgcttcgcattgcttcaaccaaagatccatccaaactctgcaccccagaaagctagtacgatctcgggggggacatgaagcgcctgcagtgcttcaagcagagcagcggcggcggcaatggtggcgggccggggaagcgcctggagcggcggctgtcgctgggcgagtacaagaaggcagtgtcgtggtccaagtacctcgtagcgccgccgggcgctaggatccggagcggcggcgaggagctgtggagcgccgacctgtccaagtgggagatccggggcaagtttgcgtcaggccggcacagncgcgtctactccggcaggtacaccggc

SEQ ID NO: 282952 - DNA, 489 bp, Zea mays
tcgagctggtcatcttctccgcagtggacgaggtgttcgccagggcgagcgtgaggcccgaggagatcgacgtgctcatcgtcaactgcagcatcttcacgcccacgccggtcttcgccgacatggtcgtcaacaggtacgggctccgcgccgacgtgcagtgcctgaacctgtccgggatgggctgcggcgcggggctcgtctccatcggcctggccaagaacctcctccaggtggcgccgccgggcacgcgcgtcccgaccgtctccacggagatcctctcgtcgcagtactacgtcgggaccgagcgcgccatgctgctgcccaactgcctcttccgcatgggcgccgccgccacgatcctctccaactcccccgaccgcgcgcggttccggctcgcccgcctcgtccgcaccgtgaccgccgcgcgggacgccgactaccggtgtgtgttccaggacgacgacgacaagggcaacaccgggatcc

SEQ ID NO: 282953 - DNA, 560 bp, Zea mays
aattggccgggtcgaggagctactagtcggccgccgtcctttttttttttttttaatcaaattaattcataacatatgagccactatttctttacaacatatattcctgtttctctccgggcgcatttcagcaaaacaaatctaaaaaaaaagaaacatatcaacctatgcaacccacgaaaaaggaaagactttaatcactggatgaatccttgttgtcactgctatacaggttgaccaatttgtcatgatcctaatcctaaaaacatgctcaatcttgtatgttcatttatcggatcgaacccagttcgttatagactaattggaagacaattaccatacggaatgaggatgccgataaaacatgaaaaaaataattaacgagcaagattgaccgaactccaaatggagcttgtaaaggttgctccagcagaacttgattcctgggacgagttaagggttttggtgtttgattctgatgttcctaagatcagccacgaaccctggtttcgaaatgtgaacatctatcatgtcaatctcgagccgattcggctcgagct

SEQ ID NO: 282954 - DNA, 589 bp, Zea mays
  unsure (1)..(589): unsure at all n locations
gccctttnttttttttttttttttttaaagcaatcacttcatttacatctttttgtgtttaaactgccaacaatttcacataatcatgatacatagcttactatgctgaataacttcaagagctatacattgctaatcgggccagtgggcaaaatccacatcacaaaatgtttggacattggcattcataattgggaaaggtcaaccaatcctagtaccaaacctgcattttacaaatgtagcacttttcattctcaacctctccgacatacaatttttcgtcatcatcttcaattttaacataaggataggagccacgtgcactcgtacacctttaccttaactttcaccagaggagcttctcctgatcaaggagccacggcggttgccaccaacaatcacatctttgagccgatatatgggagcaagcaccctgctcctcgcctcatcatttatactgatttgccatttaagttgtaaagccctttcatgctgccagcgttggccaagcattacaaggcccatcacagtagctgcaatgaaaacagaccagaatgcatttgcctcttttgcatgagcatataaggag

SEQ ID NO: 282955 - DNA, 399 bp, Zea mays
catcaatagtgtgtttcaatactcatccagaagccaaaagcctcgtccattccacaaaaaaaatatgacagctataactattaacttctcactcgaaaaagcacatcaggaatgtggaccaaaacgcactaataataaaacaggtcaatcgctcaagctctttcatttttataagtttctgagaactcaagttttttaaaatagtaagaacactcccttattcttttctgattcagaaaactagcaatccagcacagtaaatcacgcttctcaagatttgggtgatagcacaagactgtgaaagcatatcgataacacatacaagaatcagcgagcaatgcatcaaatacatctatattcagccactgaaatgatgcttttagtaaagcctcaagaaaa

SEQ ID NO: 282956 - DNA, 764 bp, Zea mays
acgccactctagaacatcattatttatttatttatttatttatttatagctcttaacacatataattccctggatacaacatgtatactggtcatattcaactctagagagctttatctgatatgatcatccttaacatattcaaagatagctaaatacttaactgtataatatatcacacaaacgtagagtgacatatatagagtaaataataaatataagtttaatttatacacacaaactatgagtatataacatcgttatccaaatattcaacaagaatttactttattaccgcatcatgttaaaatgttgcgataaagtggtgaaatcctattgaatgcttgtgtcaagatgctttgtaggatcaaagtgtgtataaattaaactgtttatctatatatatatatatatcccacactttaattataagaaggcttaattaattaacaagttgcgaagggaatcccacaagaagcaacggtttttcgggcattaggagagttaacatactgcttcaagctagcgtttttgaggtagccacataagcatggtttttgctgcttcagcttcgtgcaacaagcattggaaggtttagcaccggaagtgattgctggaagacacggactcaactctgttggggtgcatgtcacagcctcagccatgggccccacctccgccagaagaagaagtgctacaaccaccactgcacacatagcagacttcatcatcattctctagctcctcacttaaatcggctcgag

SEQ ID NO: 282957 - DNA, 295 bp, Zea mays
ctttgtttttttttttgtttttttttttttttttttttttttttttttaatataagacaaccagaatttgcactataaaatccgacaaacaaaatttccaaattggctgcataattatgataaccttaactcgcaaaacaaaaaaaccaaagatttttagttctgatgggcatacaaaacaaaaatctaatacgaaaatatgaatcataaagtttactgggaaacacccagccacttagaaagagttgtcgaattctgtataatcagaatctgacaccatagggggataccatgc

SEQ ID NO: 282958 - DNA, 701 bp, Zea mays
  unsure (1)..(701): unsure at all n locations
ggataacttgatattattttattacatacatgcatagatagcctgctctcaaataagtcggcaggaacaaagatagagagattcaacgatcttcaaatttcacatttgccagaaatatataacagaaaagaggggtatgggantatgagttaagttttgatcacattcaactacactatcccaaaccgttactcttaagactttgaacttcacttgtactctaggatcatgttgttctcaggagctaatccaacacaagccctcaggatgttttccagcatagctcgctgctttgacaacgcattcaccactggtgtacccggtggaaccagaggggccttggtcaggtaactaaggatggtcgcaactgggtggaatgagtggaattttccctcattttcagctttaaactcgattcgagtgctgagctcagcaagaaggaccaagtccaagataataggagcagctaacagtgaatcctcacatgtgttgtgcaacacaattgtgttctttccacccatgaatatctcagaagtgtactcatccatggccctcttgctgtcccctacataaggcacgtacttaatgacaaccacatggtctggatgttcaccgggctcatagaggatggcgttgctgttgaccatatcgtcaacaacattgctcttggagatttccttagagaaaaaggtttgaggggc

SEQ ID NO: 282959 - DNA, 621 bp, Zea mays
aataacaataccttctttatttcgccattcaaaagtactttaaacttcaaaagatggcaaaatctcttcgttcaaaacagggaaccaaaaatggggggggggggtaatcaacataaagctaaagcaattagtagaatgccggctactgtctataaatactattacaaaagtctaggtatactactatttaatttttattatccaagggttcaatcagaaacaacagccgccacacaaacccaatttaaccaaggaagttcatgatcaccaaatgaagcaccaaattacagagaacaaaatccgcaaaagcgcgctcaggtgcaagatccttgaattccttattctctttattcacttggatcctgagacaaacagcaagaacacgcagttcctacacaagaaagtactcctgataggaaggagttaaatggaaatgatccaaccaaagccatgtaaacaacctggatgaaagcggtgaatacggcatagatgacatagagatcaatgatcttgagattagtgggggttgcagcataagcagaccaaagagcgcggaaaaggtcttgggcgtccttgctgctagaccgaggagccattctctcagatcagatctagtcttcg

SEQ ID NO: 282960 - DNA, 612 bp, Zea mays
atagggaaatggtgcgcctgcaggtaccgcgcgcgccattaattactgccgcgacgaccagcttacttgtcggccgccgtccttttttttttttaaacataagaaatcaacttttgacatggacaattctgaatacatgactgaggatcgcaaacaacaggtcctaaaccaccaaatagaagcataatgttgatcacttcacagtttgaataatggagaactatatcacacagcaggagcaaaaacaaaaaagaacgaacaataatggttcagggtaatgtaacgaagcatatacccttttaactcggaaacaattacattgataacaaaaaaaagccttcgattatcaatagtcctctccttcctcatcatcttccgctccttcagctccaacctcctcatagtccttctcaagagcagcaaggtcctcacgagcctcagaaaactccccttcttccataccctcaccaacataccagtgaacaaaagccctcttggcatacatcagatcaaacttgtggtcaatgcgagagaacacctcagcaactgcggtgttgttgctgatcatgcatacagcacgctgaaccttagcaaggtcaccaccaggaacaa

SEQ ID NO: 282961 - DNA, 731 bp, Zea mays
aataagatagatagagagttaataagaagaggaaacatatgattagatacagatacttctctgaattataaatacagccttttgcaacaactaattaattaacgttacgtaagatgagatagagcacaccatggaactgaaatggaatgacatgaaaccaaagcatcacatatccattaggactagtattctcactaacattaaaacatatatagagcacgttaaaccacaccatatatgtatatatatatatatatatatatgataacacctatatatatacatttctttcacttctactggtctctggccagaacacatggatagatatcaagatgcataatcaggcagagaaattaaaaccaccttcaaatttagtaacacccttagcaccttgggaaggggagttccacaaagtgttagcaacctctccctgcattaggagagtcaacaaacttcttgagattggggttcttgagatattggcaaaggcatggtttctgttccttgatcttggagcagcataggtttgatggaggggttgaagaggttattgcactcacacatgcactcagctgcactgggctgcaggtcactgcctttgacacttgaacttcagccacaaaaagaagcaccaccaaagtgaacaaagcaatgcgtgatgccttcattttcaccttagttaggattttgtgttttgagtgagaatgagaggagaatatgttaattgc

SEQ ID NO: 282962 - DNA, 598 bp, Zea mays
gatcaaaccaaatcctccttagcacaaccacattcattatattacagagagttggcatgcacaattgcaccataagtgcaagaggctgtctaatgccatacatacagagagaggcaatgtatctgtgcctgtgcctccccagagttttaattattattattattattaaattgggccaggagtatgtatcttagcaggagaatacataaagcttaaggtttctcccaatcatgagatatacattataatacaagattaagctggaacagcttccggcactttgccattgcttgagagtactaagctatcatagtattcaaccagtaccttccaaccaccagggcacataaatccatcaggagggctttctttgttccttgccagtgtgcgcatctttgtgcctgatatgaacaggaagtcctgaggccttgaagggtcaaagaatgccattttaccctgagtcttgtcatatgcagcaaccctgaaaggaagaatgtttagacgctctagtcccggtgccatgctcaatactttcttcccatggtcagcatcatacagatctcttttctcaactggatggctcatgcctgcggggtca

SEQ ID NO: 282963 - DNA, 551 bp, Zea mays
ctgctaaagcgttgaagtagtctcaactaggggcaaatgaaactaagtggtttgaatcagagctcattatcaatttaccttgttcataaaaaatcatataatcaaaaccctccctctgtgctaattattcaaaaagaatttcactctagctaactatggcacacacccaacgtatgatacaagtctattctttcttaatgtttcccaatctcggaatcgaaagcttagagtaatcagagtatccatttcttttttaccttgagcttattaaggatttgttttccacaggaaatgcctagatgagacctgtatatggattgtatgattgaacaggcatacctgagccatagggatggacagcggcggctccataaggatttccaaaaggatttacagattgttgttgggggggcatcatcatttgttcgtgctggtgatgttgaaacatgaaagtttgctgttggttggacatggcagccatctgaacagaaggtggagcggcaactgtattagaggcaaaaaacggatcgagcattgtcggttgcatcatg

SEQ ID NO: 282964 - DNA, 407 bp, Zea mays
aatgcacaacaccaatgtaaaggtgtgcacctccaatgttgatctaatataaataacaaccgctaagaaacaataatttccatgaacagtgtaataaaaagatggaaaagatgacaaagcataaattatgtcaatataagcaatttcacctgcagtaaaaacccaaaatgagagataaacctttgggtcaaaactcaattgtaatagcgtgaaccagtgtcatagacacggccaccaggatatggacctctaggttcaaaatccttgatctctaccacccccaagaaatcgagctctctctcggtaaggatcagggtgatcggcagaatagcctcgttgcacttcacctgtacctgaagcattcacatttgttgtaaccatgaagggtctcccggtgccatgccacc

SEQ ID NO: 282965 - DNA, 648 bp, Zea mays
agcaacaaatgtaaatttatattatatcccacaggtaaaaatacaacgattttatgaaatatgcatgatctatgaatacacgacggctagaaagacaccacatcaatcctcttcatttatagttttctacattctatgaaaccagaggacttaaactgagattttattccactttttaacacatgctaactttaggtcttaggacaaacatgaatcacaaaacaatggccgggtgtttatagatatcaagttgcaacaaatgaatgatacagaagacacttggtttaattctcacatatcaaccaagtccaaatgggtggtgcctaaaaaagtatgaccaccagcgcccagatgggataaaccaacagaagtattatgccaatggaatttgatatgccgtgagctttagtgaaggagtttctgaaaccaccagaagcccgaatgtgttcttgcagcaaataacatgcaatgatgaggcacactaccaccccaacaatgttgtctctaaaggtgcttgcaattagagaaggagctacatcgataagaagaatcagagcaccaggcaattccagccaatcagggaagtgtcttggaagaaaaaggcgtaatacaacagcaactgcagcaaaccaatttccaagctctccc

SEQ ID NO: 282966 - DNA, 525 bp, Zea mays
tcgcgatctagaactagcttactcagcagcagcaagctatggtttgaactccaatgttgagttggtgcgttcttggtccaaagttcctcagtttctgagagcttcaccgccaaagcaacaaccccataatcagttgcatttcaccaacaacgcacccttttggaacgcgaattctgagcctgctattaaggattctcgatccagcttcatcccttctttgcatccgacccttctccacatcaaatttcgatgtacaatcaaagaatatatctgaagttagagattccggttggtgtggtaaagaaaagtggaagtgaggcagcacccaaaaggcccaggaacgaaaccccatcacctttgccagcttttaaggtgagaaaagagaagatgggggacagaatcactgcactccaacaattggtttcacctttcggaaagactgatacagcgtcagtgctttctgaagccattgaatatatcaaattcctccatatacggggtactaagcacagtcacttgttcatg

SEQ ID NO: 282967 - DNA, 530 bp, Zea mays
gagtggaatacacaccaattcactcatatacattcacttgatattgtcaattgtttacaggattttcactttgcaatgggagcatcgcagtgttattggtagtatgtgaaatacacaacagcaatgaacacacgtacaaaagtgcacctagcaggattcgcttccttatagaaaattggattgatgatccacttgtagctagcaggatatataatcatatcttgattccaggcagaatctcacaacttagatatagcatagtccaaggcatccacaacaaaatctgcatcatcttttggtgaaacacattgggggctttgatcctaaaaacatttccatgcagccctccttttcccactagaataccgagctctctgaatctttcgtgcaatgctgttgtttcagcctttgcaggtgtcttctcttttctatcggtgacaaattctatccccaccattaagcctcttcctcttacatctccaatgatgtcatgtatttgcatcagggatcttaaacgctgaatcaagtga

SEQ ID NO: 282968 - DNA, 506 bp, Zea mays
tccacgcgtccgcccacgcgtccgcggacgcgtgggtcgccgctgggcgctggctcaccccactggctttctcaagtttcaagcccctgctgcatcttggccagttgaagatgagcagggcatcaatcaaaatcatcccagagtgctacagactagtgatggatcttgattctaatttcttcaagaggaaggatgctaggggtagcatgttgcttgcttactccgtgtcaacagcaagcagatcgagagttgttcctgtggatgctacaagcaacacttttggatgcatgctactttgctttgcattttgtagcagaggataaagttgcaagtgaactaggttcctgaacccaaaacatgtggttgcaccagtagacatttgatctatgagagctttgacaagccaaacttgttgttgcctccttattacgatttgaaaggtgacaagtagactcattattgtgcccgattattggcgctaatggaaatgtgacctacgttttgct

SEQ ID NO: 282969 - DNA, 833 bp, Zea mays
ctcgagccgcatcatcgtcgtctcactaccgcaatcgaagaaagggccgggctcaaccgagccctcaaatcgccgcatcgcgcccctagctctctccgtctccctcatcctgacctcgattcgagctagtttcgggaagcaaaggtaccggatcaacccccttgatcacccatggtgcccagggatagggcgcacagcgccgttgctgccaccgcgcccccgacggagaagcccgttcaagggcctatccagaacaacaagtgcgaaaagaaggctccaaagaaggtgcataaatctgagagagagaaacgtaagcgggacaagcagaatgatctctttggcgagctgggaaacatgctagaacctgatagacagaacaatggaaaggcatgcatattaagtgacactacacgaatacttaaagatctactttcacaagtagaatctcttcgaaaggagaacaacacgctgaagaatgagtctcattatgtcgctttggagagaaatgaactactggatgaaaccaatatgatccgtggcgaaatatcagaccttcaaaacgagatgaggatgcggctagaagacaactctatctggagtcatgacacttctagaccaaatcttacagctccccatccagcgaccacagtatttacattgcagcattcaccacatccacaagtcattgcaacaatgacacttcctctgcaacagccagcagtcgttgagcaatcttacgctgccccacggcgggagctacagctattccctgaagctgcacccactgaagatactgagccaccacaaaacgaggggacctctaatcatgtgat

SEQ ID NO: 282970 - DNA, 453 bp, Zea mays
gattcatccatctagttggcagcagctacagcaagatggtgcacccgatcgcggaggccgacgagcggagccccttcggccgcctgacgccggacgagttctacgcgcgccacggcgtgacccactccgcctcgtccttcgtcaacccgcgggggctccgcatcttcacccagcgctgggtgcccagtggcgacgcccccgtgctgggcgccgtcgccgtcgtgcacggcttcaccggagagtctagctggacaatccagctcaccgccgtccacctcgccgccgcgggcttcgccgtcgccgcgctcgaccaccagggccacggcttctccgagggcctccagggccacctgcccgacatcaaccccgtgctcgacgactgcgacgccgccttcgcgccctttcgagccgactacccatcgtcgcttccctgctttctctacggggagtcgc

SEQ ID NO: 282971 - DNA, 498 bp, Zea mays
tggcggcgccggcgccggcgtgcacccggaaccactccgtcccgggttttctcttctccaacggcggcttctccggcaacctgtaccacgactacacggacgtgttggtgccgctgttcatcagcacgcaccagttccggggccgggtgcagttcctgctgagcgggatgaagccgtggtgggtggccaagttcacgcccttcttccggcagctgacccggtacgacgtcatcgacgtggacaacgaccaggaggtgcactgcttcccccggatcgtggtcggcgccaccttccacaaggacatgggcgtggacccgcggcggtcgccgggccacgtctccgtggtggacttcaagcgcgcgctgcgccgcgccttcggccttccgcgcgaggccgcctcccgcggcggcgccacggggcgcggcaagccccggctgctgatcatctcgcgccgcggctccgtgcggttcctgaacgagcgggagatggcgcgcgccg

SEQ ID NO: 282972 - DNA, 453 bp, Zea mays
gaacgctcctccctctaaggctccgacctccgtgcctcgcgcgccctcgccctcgccctcgcccttgccctcgccctcccccaccaacccaaaacccgatccgttgctcgctgctcagggtccactactgatccgctccacgcgagctcccttgtccccgcgtcacactcgcgcccaagcaagcggttgctgcaaaggaagcctcccctgatggctctcgtgacctcgggctcgggtgccgaccaggtgatcgccgaggtggcgatgaacggcggcgccgacccaagtgcaaccaccgtgcgtgctactgtcgtgcaggcgtccaccatcttccacgacacgcccgccactcttgataaagcagagagattgatagcagaggctgctgggtatggttcacagttagttgtctttccagaagcctttattggaggctatcctcgtggatccaca

SEQ ID NO: 282973 - DNA, 638 bp, Zea mays
tcggtagtgccccccacaaacctttccttgcattccactgaaatcttcctatctgcacccatgcagttgctcaattctggcctcagctgaggcccaaccatccattgttatataagtcgctgcagcctttgcaatttcccactccttcagccaccatcggtcattgaaggagcttcgtgccaccagagaaggtggtcgccgtgcataatcccaggctatatacattccacaggcctgtaaagctctgtgaatttggagctcccacaggttctgcattggcgttgagatggggaggcattcttgctgctacaagcaaaagttgagaaaggggctctggtcccccgaggaggatgagaaactcatgaaccacataacaaagcatggccatggctgctggagttctattcccaaactcgctgggctccaaaggtgcggaaagagttgtaggctgaggtggataaactatctgaggccagacctcaagagaggggcattctcccaagacgaagaagacctcatcattgagctgcacgctgtccttggaaacaggtggtctcaaattgcagctcagctgccagggaggactgataatgagatcaagaatctatggaactcgtgcatcaagaagaagctcaggc

SEQ ID NO: 282974 - DNA, 401 bp, Zea mays
tttgcccctagcctttccttgctttccactgaaatctcctatctgcagccatgcagttgctcaatcctggcctcagatgaagcccaaccattcattggtatataagtcgctacaacctttgcaatttcccactccttcagaacatcgtcgaagaagctctgtgctaccggagaaggtgttcgtcgtcgtgcataattatacattccgcagacctgtaagctctgtgagtttggttggagctcccaggttctgcattgcgttgagatggggaggcattcttgctgctacaagcagaagctgagaaaggggctctggtcccctgaggaggatgagaaactcatgaatcacataacaaagcatggccatggctgctggagctctgttcccaactcgctgggctt

SEQ ID NO: 282975 - DNA, 440 bp, Zea mays
ttcacttcgtccgcgcagtccagccaaccccgtcgcccaccccaatctccacgcgtcgccgccgcttgccggcgagtctattcccctccgtcacgccgccgaggctacccggaccccgcagcggttcggataagactgccgcccgccgtccgccacctgccacccgccctcctttgactcccactactctcggccccgggaccgcttcggcctggatctagggttgtgtggggaggggttctggaagccttggccgcgatgggcgagtcagacgatgacgcccgcaccttcaaggccgttttcaccaccaccggagaggagcagttccgggagctcgtgagggagaagctgcgcggattcaggaggggtctggacgacaccctcgtggattatgttaccatcatgctcaagaatggaaaaagtaaggatcatgccagtga

SEQ ID NO: 282976 - DNA, 911 bp, Zea mays
gtggttccatttctcgccggcgtggcttggtttccgggataccacatagttggcggcgcgcgcggagttcgctgcggaggaaggtttgttctatgaggacgacaggagggcgccggccggcggccgcgcagcggcggaggggctcgagattgccaagctcgggatctcgtccaagatcgtcgaaaggctcgccagcaagggcatcaccaagctgttccctatccagagggctgtccttgagccagtaatgcaaggaagggacatggttggtcgtgccaaaacggggactggtaaaactttggcatttggaatccccataatggatgcaattattcgtcacaacgagaagtacaagcctggtaagtttccattggctattgtcttggcgccaacaagagaacttgcaaaacaggttgagagggagttccttgattcctcccctttggaaacgctgtgtgtatatggagggactccaattatgcagcaaataaggaaacttaattatggcgttgatgtggtcattgggacacctggacgtgtgattgatctgctaaaaagaggttctcttagtttggcagagatccgttttgttgttcttgatgaagcagaccagatgttgtctgttgggtttgatctagatgttgagacaattttggagagggtgcctccgcaacgtcagacattgatgttctctgcaacaatgccaacatggatacggaagctcacacagaagtacctcaacaatcctgtcacagttgaccttgttggtgaggatgaccagaagcttgctgaaggaattagtcttctcgctgtctcttcggagaaccgggaaaaaccagctgttcttggggaattgattaaagaacatgccaaaggtggtaagtgcattgttttacacaaacaaaaaggga

SEQ ID NO: 282977 - DNA, 314 bp, Zea mays
cgtggcagcgtcaacgccagccatggcggcggctcagtcctccaccgattcgatggctccgcacctccgccgccgccctcgccgcctcgtcttcgaccgccgctacggctggatctttgacgaatggacgcgccccgccgaccaagccctctccggcggacgcggaatgttctgtgcgctgacgatggcgcggccgctggtgagcgctgcggcgtgctcgattaactatgctgccagttcaatcagcagagttctggaacgccccaaaagactccacaggaagcagcatgcctggtttccgtgaacttgaatgc

SEQ ID NO: 282978 - DNA, 781 bp, Zea mays
atatacttgggatggtggtattgtgggatttgcaatggcatgctcaaatacctttggattggtgactggtgcttttcttcttggttttgggttaagcgaaattccaagaaacatttggaaaaatgcagactggtctcaccgccaaaaagtactttctcatagagttgccaagatggctgtaaagcttgataatgcccatcaagagtattcaaatgcgattgttgttgctcaagctacatcaaatcaaatgtcaaaacgtgacattttgaggccttacatggatattattgataacatgctgtctcaaatgctgcgggaggatccagccttcaaaccttctggtggtagattcggggaaaatgatatggactatgataccgatgataaatcgatggccacacttcgtcgccaactcaggagggctcatgaggagtactataggtgcaaaagtgagtatatgacttgtgtcatggaagccctcaaactagaggacacaataaaaaattatgaacgccgtgatgctaatggatggaaatatgtatcaagttttagtgaaagtcgctcgggcacacttggatcaattttggacactatcgagttcatttggtgctgtatactgagaaagcagcttcaaaaagcatttgctgttatccttggctgcatgtcagctgctatactgctggctgaagctactttacttccaagtggtgttgatctatctctctttttattcttataaaaagcggaggaaaccagagggtttagttcaggttgctgcttt

SEQ ID NO: 282979 - DNA, 279 bp, Zea mays
tattacaataaatacagaacaattatacttaagacaacatgaacctctcaatttagagcaaactatattataatatgaagaatacagattattgttgcaatgggatgtattcttccattttgtttattacatacaattttaaaaaaaatacatgctatctcctcaaaatgctgcccatcagctttgtttggtcatcccatcaatttgctaggaatagttgtttgtcttcagtaatattcagtttaggatacatgacatattacttacattcagtaattt

SEQ ID NO: 282980 - DNA, 546 bp, Zea mays
tgttttctcgtctcctcgacctccccgaaaccccacttctcggatcgagactagggttagggtttcgtcactcccgccccgattcgaaccaatccgcctaggcccccgccgcgccatggccgccggttccattgtggtggacttcccctccatgggcgccgccctctgcttccccaacctcgaatcactcctccgagactccgcctcgggtttcctctccgccgtctccgccgccccggcccccggcgccgccgacctcaccaacttccaccgcgtcttctcgcgcgtcctcagcacctactcagacccgccgctcgaggtcgtctggttcttctccgcgctctccttccacgaaccgccctgacgaccctgcgctcactgctccagctcctctcccccttcgccgcttcctcgcctggggccgtcaagccgctcgcccttctcgcccccgtcgtctccgagcttttccactcagataagccgcgcagggagaccgaggccgtcgtcgaggctgttctcagctacatcagcatctgcagcagtcgg

SEQ ID NO: 282981 - DNA, 535 bp, Zea mays
aaattggaacggtgcctttgtcgacacattatccactgtccagtgccaattgccattacaatatcatgacccaacgtgaggttgtgtgcaccaacggacctacagggttacataaacatatcactcttcactatcttcatcgtcgtcgtcatcatcgtccggaatggcagtgtcgtcaccaataccttgcagaagggcacccacatcttcgccgagctctgccagccttgtgctcagcttctcaaccttagtttgttcctgaccgaggcagacaagcagatcgttcagctccgcctcactgtccttctcagcctcttccttggcttgcgcctttattgcctccacgtcaggatacggcacactgcctccctgccgcaaggtttttacctcggcatccaggcggtagttggcctgctctatgctgttgtaagcttctgacaagctcttgagatcggactccagttttactgcaaggtttcgttggttgttagcttcggcttcgatctgggacttgtcagtttcgagtgcctctatc

SEQ ID NO: 282982 - DNA, 517 bp, Zea mays
  unsure (1)..(517): unsure at all n locations
cactgggttcatcgtgcaggtcctcgtaaggagatatattacgaacctgaagaagtaaaggctgccattgttacctgtggagggctctgtcctggtctaaatgatgtcattagacagatagtatttactctggagacttatggggtgaagaatattgtcggaatcccatttggttatcgtggtttttttgagaaaggcttaaaagaaatgccgctctcgcgtgacgtggtggaaaacataaatctttctggaggaagtttcctaggagtctctcgtggaggagctaaaactagtgagattgtagatagtatacaagccagaagaattgacatgctatttgtaattggtggaaatggtagccatgcaggagctaatgctattcatgaggagtgtcgaaagagaaaactgaaagtttcagttgtagcagttccaaagacaattgataatgatatactctttatggataagacgtttggttntgatacagctgtagaagaagctcagcgtgctatcaatt

SEQ ID NO: 282983 - DNA, 497 bp, Zea mays
aagctattgaagagacaccaccaccaccttcggcatcaaaggcaccagatgtagagagcgctacagctaccgaagctgcaccttctgaagccacgattaccgaagctgcaacggccaaggatgcaaacttagaaagcacattccctgatatagataaaatacttctggatatggccgcagaagaagctgctgcagccactgaagagaccatggccacagtgcctgggaaagagaaggatatagccaaagatacttcagaagaagaaaacttcaattttcaaaacttaattggacaagaattgtcaatggctgagaaagaagaattaagagactatgccatatcctgcgggtatcagtcagaggcaatgctcttcggcggtattgacgatgaaagcttaggttgtcttcgataccggactgcagcgaaggtcgtcggtactctgtcgaagagtattgggtttccgaagcttgagaccgatatcagccgctaccgacga

SEQ ID NO: 282984 - DNA, 620 bp, Zea mays
ttttatatatcccaagctctttctcaaatcttctgtcattgagtgatattaatctggcatataataatataagaggtgcaatcccacaacatctacttcaggtggcccaatacaactatgcaggcaaccacttgaattgtggccaaaatttatctgcatgtgaacgaggcagcacattgacaggtggatccaaaaatttcaagctaaacgtggttattggaagcattgctggagcagtcacattttctgtaactgtagttctagttttgctatggtggcaaagaatgcgttaccggcctgaaatcttcattgacgtgtcaggtcagaatgatcatatgcttgagtttgggcaaataaagcggttctcatggcgggagcttcagattgcaaccagcaatttcagtgaacagaatgttcttggcaagggtggttttggtaaggtgtataaaggagttcttccaggtccaaacagtataaagattgcagtgaaacgactactgaacgtggacagtcgtgatggggaaatggctttcctcagagaagttgaattgataagcattgctgtacacaagaacatattaaggttgataggattctgtacaacaccaacagagaggctt

SEQ ID NO: 282985 - DNA, 494 bp, Zea mays
tcctcgcgtccgcaggacggtggatgaacttgggcttccaagatccgttatacaaggtaaattgagtaccttttgtgacctcttctgtatttctaggcctttgtataacagctgtggacaaaacctgtaaacatgttggatgaactggagcagctattgaaaggtaactctatggtgaaagagctaacgcctaggacaaatgactaccttgtttcatttcgagaatgtatgtccaccaggattttatctgttaatttgaacaaaattcatatcaaagcacgacaggtacttcttgatatttccttgattcgcacagtgattgagttgagcttttaagggtacgaatgtagcagcctagaataattctatatctacttactactttaaagagcgggagccaaatttagctatacaattgatgtatttttagcatattcatacaatgctcaagatacttaattaatcgcctacctattgttaggctatatttccat

SEQ ID NO: 282986 - DNA, 561 bp, Zea mays
atgatctaaaagagaaacaaaggacacataataagacacttgttctagtcaaaagttattgggagcgactcatagcagatctgggtatagtttctgtttgcaaaaatgaatcttcacgttcaagctgcagtacagggaacaacaatatacgaaaggactttttaaatggacttttggaggctggtgccacagaaagttcaggttctcccaattgccaactaggaaatgacgtctcttcagaacaatcaacaacaattgatattctgcagaagctattccttccatcaagtggtccatggcatgcgaataacgagtttgtttctgctgctctcatgaagttgccagaaaatgaacacagcaggcaattgcacagtgctaccagcgatgtgttatccaagcttcacgtggtgatgcgtgcagtagataatcttcacttgaaacacaggcagttagcagcgaactatcaaaaacaaagagattcgagtgcctggaacagagctgaacagaaacgtctgaaagaggagttgactagtgttgtcgccacgtcggaaggaagcaaac

SEQ ID NO: 282987 - DNA, 723 bp, Zea mays
  unsure (1)..(723): unsure at all n locations
ccctttctttcgcccacgcgtccggtgtcgtcgccgggattcatcaggaagcacacgccggtggacgaggtcccggtcgggcggttcatggtgccgaagttcaagttcacgttcgagtttgaggcgtctcacgatatccagaagctgggagtcaaccgagcctttcaaagcggtgacttctccggcatggtctccggtggaaacgggctcatcatctcaggagtgtaccacaaagccaccgtagaggtggacgaggccggcaccgttgccgccgcggccacggccgagttcatgtttatgtgtgcaagaatgcatccaccgccggtggatttcgtggcggaccggccgtttttgttcgccatcgtggagagaagtggcgtcgcgctgtttcttgggcatgtggtgaaccctctagttgggtgatgatatcagtgacagtgttggagacctttctcttccgaatatccttaaaaatatgattaattatctgtttttagtataatatggattactatagagagattcggcttcagaatataagttttgtttcatagcaaaggtatacaagatgaagatatagcctgaggatgataagaatgaacgctgaagttatagtcgaagagtaacaatttcggtttaaaatgatgatgaagaccaagcatgatgctgacctgaagagaanaggactaattagttcctaatgatttatattatagttatgga

SEQ ID NO: 282988 - DNA, 607 bp, Zea mays
gagaactccgacttcttcactcacacacacatggcgctgatgagccttggcgccgccgggtacaccacggccaccgcgccgcctcgtccccgaagatgcaccctgccgtttcgcgccgccgcctcccctgcggcactggaccgccggcgacggccgcataatgtggctggcgacttcttcgtcgaccaccgctgcatcgactgccagacctgccgatggatggcgccggaggtgttcaagagggtggatggcaaggccgccgtagcggcgcagcccagctccgaggaggagaggaccaaggccctgcaggcgctgctatcctgtccaacatcctcaattcacactgagaaacctccaaaagacattcttaaagtgcaaaacatgtttcctctaccaatcgacgtctagctactcccaggtggttatctctgtgggtataattctgaagactcatatggggcaacatcgtacctggtaattcatccacaaggaaacatactgattgacagcccaaggtatactccaaagctggccaacaatattgacaagcttggtggagcgcgctacatgtttttgacccacattgatgacgtaacagatcacagga

SEQ ID NO: 282989 - DNA, 556 bp, Zea mays
caggctcacagccgccgcagggtgccagggcgttagggccttagggcaaagcatagcaacggcggctgcgcagcaagcagttcagctcagcacctcgccggatcgccggctcacccatccggccatcccctgccggccgactctccctggtccccagcgcagccagcagttcaccggagccggcgcagcaagtagtcaggttgattaacaaggtttgggtttgggagcacttcacaaggtatgaggtagaggttcaggaagctgatggttctattgttaagcaaaagtgggctaaatgcctaagatgttcacataaagctaaggcatatagttataatggcacaaaggcttttagtaaccatttaaggatgaagcatcaagttttgaaaggtcaacaaatgcttagtcagagtggggatgccatagcaacatataaatatgatgagaatgctagtgtgagacttttatattatgccattatcatgcatgagtatccgtttagtattgctcaacataggtactttgtgaaatcatcaaatcataagaccatcatttc

SEQ ID NO: 282990 - DNA, 477 bp, Zea mays
ggcatgttaagctcttcaaagaactcgaagcttgtggccgtatacctccaagcaaagacattgtgcggaaagtcgaagatgcgtacgaaacgcttggattactagaagataaaaaggcgttgcttgataaatacaaggatttatacaacaaaccgtctcgggacgattggaagaaaggctccagatccaaaaagatcgaggctgataaaccatctgatggtgacagtaaggaaagcaagatggaaacatctgagacccttgaagcccgctgtttccctgtggatgcgaaatcagatgcctctgcttaggctcatcactgaaccaccgacgtcgccataagatttggccaaaacccggtgctgtcagcattagcgatcagcgtgctctcagtacacgtttgctcccctaaccagcctccggctatgtataatactgtgcgacgttcattactggcaccaatatacacaccccttgttc

SEQ ID NO: 282991 - DNA, 488 bp, Zea mays
tcttttacgcgtgggtttttttttttttcttgcgtatcttgaattctttgatctgccaggcttacatatatcgttttacatcacatctcatgaccaccaccaagcaaccatgtacaaagattcagggctgccatttttggagcacctgatgagtcgctacaccagttcaagagaaaacacaactttacatggcctaatttccatctgtggcgtgctcccacttttttgagcagcaatattacgacagtgaaggcagcgtatcatcatcttgagcatatcattgtacaaaatatcttccctccagacccaggggaaggaaaaagaatgtttagtccaaggagagctggccaacccaacgaaagagagcacaattcttctttgtgaaaaaataaaattgcttcaaaatcgtgctacttttggtgctaccaagtttcttttgctgagctcactgataacaccacatcttgagcgcttcctgagatgacctt

SEQ ID NO: 282992 - DNA, 457 bp, Zea mays
gcggcgggaagggccagcagaccaagggaggcggcggcggaggaggaggatgcaatggcgggagagacgcgaacatggtgctgccgcagccgacaccacagcagatgcagcagcagatgcagatgaagggcatgacgctgcctcctgagctcctcatgggcatgggcggcagcaagatgccgccgttcccgacgcccgcgcctgcgcccggcccgccgccgccggcgcacagaggaccccaagcccgccaagtccagctaccctgaggacgacaagttctgagccgaaggcagcgagtgccacgaccagttcaagaactgccactatgaggacgacttctaggacaacagcttgaacactcacgacctgagctgggaccccaagatgatggcacagcccgtggacatgccgacggccgccggcaagaaaggcagtaacggtgtcaagaatggcggtt

SEQ ID NO: 282993 - DNA, 521 bp, Zea mays
tttcttgtcttggatatggagccaagctgtatctggtggacatgagaatggttttttctctccttaacagctaactcctagtgacttttgcacttgcagagtggtagagagcgtgggcgaaggagtagaaggcctcgccccaggagaccacgtcgttccgatcttcaccggggagtgcgagaaatgcgtgtactgcaagtccgacaagacaaacctgtgtggaacctaccgtgtggatcctttgaagagcagcatggtctacgacgacggcacgaggttctccgtggtggaccaggcgtcaggccagcggcggccggtgtaccacttcctcaacacctccaccttcaccgagtacaccgtgcttgacgcggcatgcgccggcaagatcaaccctgaggccccgctgcagaggatgtgcctcctcagctgcggcatctccacaggagtgggagctgcgtggaacactgcaaacgtttctgctcggtccaccgttgcagtggttggactcggcgctgttggtc

SEQ ID NO: 282994 - DNA, 893 bp, Zea mays
cggctcgagggacgcaattcccgcaggaagcagacaagtatattgatcagcttgcatcagtcagttccgatcgccaatggaactgtcaggactgcacttgacactgggtgcggggtggctagctggggagcttatttgttgaagaggaatgtcttggccatgtcgtttgccccgagagattcacacgaggcacaagtgcagtttgctctggagagaggtgtccctgctgttattggcgtccttggtacaataaaacttccctatccatcgagggcctttgacatggcccattgttccaggtgcttgattccatggggagcaaatgatggaatgtacatgatggaagttgatagggttctaaggcctggtggctactgggtgctgtctggccctccaattaactggaaggtgaactacaagggctggcaacgcacaaagaaggatcttgaggcagagcagaacagaatagaggaaattgctgaccttctatgctgggaaaaagtctcagagaagggcgagatggcgatatggaggaaaagggtgaataccgagtcttgcccttctaggcaagaaggatcagctgtgcagatgtgtgaatcaacaaacccagatgatgtctggtacaagaagatgaaggcctgtgtgacaccccttccagatgtaaaagatgaaaacgacgtagctggaggtgcaatcaaacccttcccagccaggctcaacgcagttcctccaagaatcgctaatggtttggtcccaggcgtttcatcccaggccttccagaaagacaataaaatgtggaagaagcatgtgaagtcttacagcagtgtgaacaagtatctgcttactggtagatacaggaacattatggacatgaatgcacagtacgggggatt

SEQ ID NO: 282995 - DNA, 533 bp, Zea mays
ctaggaaaaaaatcccaccgctgttgctcctgtccgtgcccggcctggcccgggcgacatcatccttggccgattcgctccatcagtcgcgagctcggcaccctgctgcgggcggcgtagtcgtactccagccaccggacaccactagccctgcttgtctccgtcgcggcccagaagcccagccgcccctgctactcgtccttgtgcctacaccctgccgcatccgctcaagccactggacgccggcgtcgcgttcggtctggtcgcgctcgtccttgcctctacatctaccagcgttcagcgtcctacaactgctcacctgctccccatcgcattcaacaccgccacagcctcaagcggcactcgctgaacaacatcctcctcgtcgcgcttggaatccgccacctgactcatttttccttgctctggggcgtcgtctcatggagctgctgaacgccgacgtcaccctgagctcattccacaccagaatacgttatccgtggatcaatcgctgggtgaaacaattttctgga

SEQ ID NO: 282996 - DNA, 461 bp, Zea mays
gtcaacagcagcggcgcggagacgacaccgacacgcgccatggcggcggtgaggcaccggcagctggaggccaacggcatcacgatgcacgtcgcggaggccggccccgtgaacgcctccgcgccggcggtgctgttcgtgcacggcttcccggagctctggtactcgtggcgccaccagatgggctacctcgccgcgcgcggctaccgctgcgtggcacccgacctccgaggctacggcggcaccaccgcgccgccggaaccgacctcctacaccgtcttccatatcgtcggcgacatcgtcgcgctcctcgacgccctccacctcccgcacgtgttcgttgtcggccacgactggggcgccatcgtgtcgtggaacctctgcctgctgcggccggatcgggtgcgcgcgctcgtcaacctcagcgttgccttcatgccccggaggcccggcgtcaagcc

SEQ ID NO: 282997 - DNA, 613 bp, Zea mays
ttttggcccagcaagctcgtactccatcctcgattgatttttcacgagcctgatgaaacatactatatcattgatatgatctgttggcgaggctattcactatatgactgcaccgccgagttcaggtttttctgggtcaactctaagatcgcagaaacttctgctggtgatcctccatcaacgtaccacagatatagattcagtgcactccctgtatatgagtgcactcttgagggtctccaagcagcatactcaggcagcatgccttatgtcaaagatggttctggtgttctacaacaagcatgcacattatcaagctggaatcacacctcttgccctagtatggaaagatgagacctgtagccagtatgttatcgatacgaacaacaagggtgaaataccaagcgaacaacatcttgtgctggagctgctagaagatggaaaggtggttacttcagatgatcctcatgttgtgtttggtagcttggacagcgcattcatacagacgtcaaatctgcgaccagggaaccttctccgctttgctgttagagatggaagtgtgaaactcgtggatggaaagatgcatatagatcagctgcaatttgttggaaag

SEQ ID NO: 282998 - DNA, 814 bp, Zea mays
gcacattcttcattcatcgttaaccatctgttttgacgatgaatgaagaatgtgcttgtgtaaccctgctttaacagctgcatgtgcatagcaacagttgttcacagaagcttttcgtagatttgtcaaaacagatggttaacgatcttgagaattcagggcggtcattttcaggcccatcacatggttgggaagctggcattagtctcccggaggatctcgcagatttgtttgaagcaatagctggcgcaatttacgtggacagcgggaacgacaaagaggttgtctggagtgccatcaggcggctactggaacctcttgccacccccgagaccatggagcctgaccccgtgtcggaactgaaggaattatgcgagcacaaacactaccctaagccatcgtactctccaactcgtgacagtgtagctggagtgacaagggtggttgcacaggtgacggctgcggggactgtgtactccgggactggaacaggccgcaaccaggatgtggcagaggttctcgctgcaaaggctctgctcaaaaagataaaggccgcagcaagaggatgaagcttggacttgacttggaccgggcgggcatttgatatttgggagtttgcgcacatgatagctgttctcgcagaggtatcaaaacaaactactgtagtatataaatgttgtgtatatgaatcaaggacagttgaactaccccttggtttcgatagctgcaaaaaaacaaaacaaaaaactcgaatctactatgcacagtggcttcatgtggtggacccttaatgaaatgatgaattctacgtggc

SEQ ID NO: 282999 - DNA, 792 bp, Zea mays
tttctgcgtccgcggtcgctcgacctctccatcaatgacctcgccggcgagatacccgccagcttcgccgctctcaccaacctcaagctgctcaacctcttccggaaccacctccgcggcgagataccggccttcctcggcgacttccctttcctcgaggtgctgcaggtgtgggacaacaacctcacaggccccctcccgcccgcgctcggcaggaacggccgcctcaagacgctggacgtcaccagtaaccacctcaccggcaccataccgccggacctctgcgccggacggaacctgcagctgctcgtgctcatggataacggcttcttcggcagcatccccgagtcgctcggcgactgcaagacgctcacgcgcgtccgcctcggcaagaacttcctgaccggccccgtcccggccgggctcttcgatcttccccaggcgaacatgctcgagctcaccgacaacatgctcaccggcgagctcccggacgtgatcgccggagacaagatcggcatgctcatgctggggaacaatcgcatcggagggcgcatccccgccgccatcggcaaccttcccgcgctgcagacgctgtccctggagtcgaacaacttctctggcccgctgcctccggagatcggcaggctcaggaacctcaccaggctcaacgccagcggcaacgcgctcacgggaggcatcccgagggagctcatgggctgcgcctccctgggcgccgtcgacctcagccggaacggcctcaccggcgagttaccggacaccgtgacgtcgctc

SEQ ID NO: 283000 - DNA, 441 bp, Zea mays
cgcctccgcttcctcgaggccgcgtttcgccggctgcctgccggcggtccaccataacatgggcggcgggcggaagcggcggcggcgcgacggctcggagatgccgtcgatgcacccgcggaaccgctacgcagccgccgcgccagatttcgccgcgctggcggagctctacccgtcctttcgccccttcgtcttcatctccggcagcgggcgcgcgtccgttgacttcaccgacttctcctccaccagggagctcacgcgcgtgctcctcctccacgaccatggcgttaactggtggattccagatggacagctctgcccgactgttccaaacaggtccaactacattcactggatcgaggatcttctctcctcggatctgattccaccaatatccagctcgagtgagagagtgaagggcttcgacattggacaggtgcc

SEQ ID NO: 283001 - DNA, 432 bp, Zea mays
cccacgcgtccggaagagtacttggaacttggaggatggtcgagaaacctgtacaatcaagcatactggttagtttctggacttatttgaaccatgcagtgcactatgctgaagctgttcagctttatgcttggattggtgaggctgatattcagatgggaggccactctttttcctgaaaacgaaggagagctgtgtttctttgtattcaaatgtcgaggctgtgataaccattgcagatgaatctcacgttggtaaaggtattaacactcttttctggaccgataaatggctgcttggttcctctatcggagatgtggcgccagctgttcttgctatggtaccagcaaacataattacaacaagggctgtggctgacgcactctcagacacagttaggtatcagatattaacggaggactgtccatgatt

SEQ ID NO: 283002 - DNA, 760 bp, Zea mays
ggtatttttcgttcaagtcaaagggcaacctgaagcttgtttatcttatatgatgtgaggctcgtttcgggcaaatttggtgtgatattgttagcattcttcttgcttctgcctcttcccaagtaatgcttaatggtaaaccaggtaggagaattattcatagacgaggtcttcggtagggggaccctctctcccccatgttgttcatactggttatggatgtgctaggctatttaattaaggaggctgctaatgatggtttgatggtgcctctgatagaaagttcagttcataaccgtatttctatttatgctgatgatgtggtgattttcctccacccggtggctcttgatttagtaatcaccatggacattatcaggatttttggggaggcagctgggctcaaagtgaatatggcaaagagcagcattttccccatccactgtactgctgaaaatctggataccattcataatctgctgccatgcgttgctgccaactttccctgcaaatatttgggggtgcctctatccttaaagaagctcgacagacaacactttcagccattcattgataaaattgcagatcgtcttccctgctggaaagctgatctgttgactagagctggaagactgattattgtccagactgtcctgtcttcaatgaatatctacttaatgatggccatggaccttccttcttgggttttcaaagcaattgacaagatcagaaggaatttcctgtggagagggaggaaaga

SEQ ID NO: 283003 - DNA, 592 bp, Zea mays
tttatctcctccttcgctgctaccagcaccgcatcctttttcccgtttcggactctcactcgctccctcgttcgccgccccgctccccacctcctctcctctgcctccgccgccgccgccaccgccgtggaactcgacaccaatggagacggtagtgcgggaggtggtgccggtgtggtgaggccgcagtggaaggccgcgattgatttcaactggatccgagacaaccgggatgccgtcgccgacaacatccggacccggaactctaccgccaatctggacctcgtcttcgagctctacgatcagtacctcacactgcagaagatggcaggaggttgaaaggctccgagctgaaagaaatgcggttgccaacaagatgaaagggaaactagacccatctgttcgccaagcccttgttgaagaaggtaagaacctgaaagagggacttatagcactcgaggaggatcttgttcagctgacagataagcttcaacttgaagctcaaagtattcctaacactacccatccagatgttcctgttgggggtgaggaaagctctgtcctcaggaaagaggtaggcagtcagaggagc

SEQ ID NO: 283004 - DNA, 515 bp, Zea mays
cggacgcgtggcgagacgcgtgggtcagaagctccagtacatctacctgttcgagaatgccctctctggcgagctcacgcgcagatgacggcgttaaacttactccggatcgacttgtcaacgaatcagctcaccggagatatacctgacgatttcggcaatctcaagaacctcacaatactgtttctgtacaacaaccagctcagcggcaccatcccggcaagcatcgggctgctaccacagctcaaggatatccgcttgttccaaaaccagctgtccggagagctcccgccggagctgggcaagcactcgccgttgggcaacctcgaggtgtccatcaacaacctctccggcccgctgcgagagtcgctctgcgccaacgggaagctcttcgacatcgtcgccttcaacaacagcttctcaggcgagctccccgcggaactcggggactgcatcactataaacaacctgatgctacacaacaacaacttctcaggcgacttcccggagaagat

SEQ ID NO: 283005 - DNA, 599 bp, Zea mays
aaagaggctgagttgatggagccattggcggcgctgaagcctggggaggaggtcaaacctgaaaagctagatggggagaaggaagagctggatgaggagcccgagagcatcggaagaggaccccgaggaggtggaagagttgaaggaggagggcgacggtattgcggaggaaggcttggtggatgggtcggaggcgagcgatgataaagatgctgatcaattgagcagcgggagtgatagtggtggaagcagaagtcgtggtatgcagaactctgaacttgctggaggtcttgaaatatttgttgatgacttgcctcaagattgtgtcgaggaagacattgctatggccttttctcaatcaggggaggtcaaatctgttaggataattaaaaattcatcaactggaaagaaccaagacattgcatttgtttgttacacaagtattgaagctgcaaagaaggttcttgctgaatttaaggagggaattgaggtaaaaggaaaaatggtcagggtatctgcttgtcaagataataataccctttacctggggaacatttgcaagggttggaccagagatcaggtggtgaacaccctaaaaa

SEQ ID NO: 283006 - DNA, 835 bp, Zea mays
gagccttttggataaacatgaactacatgggtctttcggcactacatcactatgcacataaggatggtccatatagcggcagggcaaaggaattgtatgacaagctaagatcaaaccttatccggaatatagtgcagaattacgatgcaacaggtttcttctgggaaaactatgaccagaaggacaaaggaaagggaaagggtgcacggtcatttactggatggacttcactcattgttctgatcatggcggagtcctacccaacattgcacaggtgagatatagatcgcgaacaaccacagcagaagatagctatggcaattggaatggaggggctggcagctggcgcttgtttagcccggtttgcaaccagaacactgggatagtttgattcgtagcatctgctgccttaatcatgaaaattttgacaacacctcctggtcaatctgttcagcatcatttatagagtgttagtggtcatccctgttcactctcatactgtaaactagctcctcgaagaactgattttggggggccaaaaccaccccaggaaagcatgagcatatggaaaacatgttcttgaaagctgacactacgtggagctgttacttgctattgagtgtaatctactgctactcttactatgcttggccatttgcacccccaatgatccccgaagaaacctgctggtccgagcatgtgacctatacctttgcatttacttgctagagaatcagttcaacacaatgcaagttgcaaggcacgtgttttgaaatggaaagcgggccatgtctatgctgtgcccgtctctaaaaaaaaaaagaaaaaaggccgt

SEQ ID NO: 283007 - DNA, 729 bp, Zea mays
cgatcctcgccctctcgagaccaccgaccgctcgtcctcatcccgtcatccgtgcccgcatctccgcagtcgtcgccagtcgccaccgctatccgagctcccccccccccccccccccaacccttgcaacggacacacgtcctcatcctcgaaatgcctcgcagtcatcgttccaccgcaatagagcgcaatggctgtgcccgacgcaactccatgccgcactatggctcttgcctcgaatccgcccactccccacatcgagaacagccatcgacgccgcaagaggagacgcacccaagagagaggaggcgaccatgagggccaaggtcccgaacggcaggcttggtggggaggaagggaactaacgatagccatcgccatggccaccgacgacgactgataggactgcctcttcttatcgatgtggtaacgacagaaatcaagtaatggggacggggctctccaggccatgcgggtcaaacgactggaacacgtccccttagcctccgaacgggaaccccgggctggagctctacagcgagaagaccaagcttgctgaagggccgcagcttggaacatctagattttgttttgctaaggggagcgctatgtgtgagtacaactagctactcatttcgtaggacatgctaggaaggggaatgtttgaactcacatctttttgcaggagggtgggcaggttgctcaggtcaagtgggttcacggctgcga

SEQ ID NO: 283008 - DNA, 522 bp, Zea mays
tcgcggtggagttcatgggaggaggtggaagagggtgtgaggcgctgcagaactcctgtggatcggcgagccgagggcgatatggggatgttcttcagcaaggcggaaccgccgccgcccatggtgctggtgccgctcgctcttcgactaccctcccatcgctgcccgcaccaggatggcggcgccagcatatgagctaatgtttgggaaagtctccctgcacaatcgtgtttgaggactactttgatcaagctgggaatatgacctcaaggatcatgttgaagccgcttgaagatcctcacgttgatttgattgctactgtgtctgctgctgctgatagaaacagtggaacagaagtaaaaggggatgctttatttcgctggcagagagagctggatgacccccatacctttgtggaccttcttgtgtcaacttcaaatcccttgctgcagctgagattatgtgcatatcatcctaagtatcgtattggtgcctttggaacattacctttgctaatgggga

SEQ ID NO: 283009 - DNA, 805 bp, Zea mays
aaacatccggttgtggccaaatgggtatcgaaatattgtgcctaatcttcatcttcctcctcctcatccgcgtgctcaccaggagctacgccgcctccccatcgccgcccgccatgtccgcggcggcggcactccggctgccaccggggccatggcagctgccgctgatcggcagcctgcaccacctcctgctgtcacggttcagcgacctgcctcaccgggcgctgcgcgagatgtccggaacatacggtccgctcatgctgctccgcctcggctccgtgcccacgctggtggcctcctccgccgaggccgcgagggaggtgatgcgcatccacgacgtggccttctgcagccgctacctgagcgccagcctggacatccgctgccgccgccgcagccgcgtgctcttctccccctacaacgaccgctggcgcgagctccgcaaggtgtgcatgctggagctcttcaacccgcggcgcgtgctctcgttccggagcgtccgggaggaggaggtggcgcgcctcctgcgctccatctcggaccagtgtggcggtggcggcaggcacgccgccgccgtcgtcaacctcagcgaggccatctgccgcatggtgaacgacgtcgtcgtgcggaccgccatcggcgacaggtgcaagcaccgcgacgagttcctgcgcgagctcgacgaggcggtgcggctcaccggcgggttcagcctcgctgacctgtacccgtcgtcgcgcctcgtgcgctggttcagcgctttcgccagagacatgggaaggtgccagaagaacgtgtacggcat

SEQ ID NO: 283010 - DNA, 631 bp, Zea mays
ctttgttccattttctaattattcacctccgtcttccttatctgctgcattccaatcccatttaaattttaaccttcaacaatttcgtcttctcggtttctgacttattccggagcattttttttttcttgtttcgagcctgtgagtctgattccattttgacccgcggcggcggcggcggttcatgagccggaggtgatccgcgacaaggcggcgatgcgcgcgtggtcgcgccgccgccgcgcggagggaaaggccgtcgctttagtccccacgatgggcttcctccacgagggacacctctcgctcatctccgcggccgtggcggcctccgccggccccatcgccgtcgtcgtctccatctacgtcaaccccagccagttcgcccccaccgaggacctcgccacctacccctccgacttcgccggcgacctccgcaagctggccgccaccggggtcgtcgccgcagtattttgtcccccagacctctacgtccgcggcagcgctgatcgcccctccgccgccggcgcgtccgggggcgcggtgtcttgcctggaggatgcaggtgggcatgcgcacgagacgtggattcgggtggagcggctggagaaggggctgtgcgggagcagca

SEQ ID NO: 283011 - DNA, 556 bp, Zea mays
cccactcgtccgcccacgcgtccgaacccacctctttgtctgatgatgggacgagcacccggcccagcccggcccgcttttttcgctttgctctagtcgtctgctccgcccctgggtgctcgacagtttaacaacctgcatttcttgagttagtatcgcccgccttgcgaagacgcgcagagaatcatgccggcgacggtggccatcacgttggacctgggatgctgccgctgcaaaaccaagatccacaagatcctctgctgcctccaacaacggtgcgggttcgtcttcacaaggtggtgtgcgccgacgcctgggtgctggtttcggggaccttcgacgccatggacctcgtctgcaagctccgctgcaaggccggacatttcgcaaccaaaatcgagattgtgcccccgcccccgccgccgccgcagcagaaaaaggatccaccaccagcacaaacggcgcctgcagctgccgtggggagcccccaacagcccgtagtaacgagcaacaggcccgatccgccaccaacgtgcacaaaagcgctcatcccgta

SEQ ID NO: 283012 - DNA, 574 bp, Zea mays
tcgatccagaggaatggtttagagggaactgatagatagttttctaaagatggcactaccaggaacaagttctggtttgcacattgtccacatagcagcagagatggctcctgtcgcaaaggttggtggtctggcagatgtgatctctggtcttgggaaggcacttcaaaaaaaggggcaccttgtagagattattcttcccaaatatgattgcatgcagcataaccaaataaataatcttaaggttctagatgttgtggtgaagtcttactttgaaggaaatatgtttgccaacaagatatggactggaactgttgaaggtcttccggtctacggtattgaaccgcaacatccaggtaagttcttctggagggcacaatactaccgagagcacgatgacttcaaacgtttttcgtactttagccgtgttgcactggaattgctttaccaatctgggaagaaagttgacataattcactgccatgactggcagactgcatttgttgcacctctttactgggatgtatatgcaaacctggtgcttaactcagctagaattttgtttacctgtcac

SEQ ID NO: 283013 - DNA, 578 bp, Zea mays
  unsure (1)..(578): unsure at all n locations
cgctttatctatcttagttaggttgcttctggttcattctgggtagtgtctcattttatgattttccccgattctttttgaaaattttgtttcttttgcttattgctgccctacattgattacactgcgtcttcgctaatcaatgtctgaaacatattgttcgtgggtacatcctcagcatgcaaggggattgttatatgtgttcttccctgtttctgaacataactcattaatggttttggccgaggttcacaactggagtatataataaagcgaagaaacatatttgtaaactaacttgttatttatcaattagccactgctaggctcgttaaatggttttgtacagaaactgcatctaaagttttgacaagtattgatttgaaattcatatgatcgtttacatcatatggaatatggatgatactattttgggaaaaaaccagagagtccttgttccacttgttctattcagtggttattgtttatttgtttttccacatagagccaattagtgtcattagcttgccaggaggactgcatactatcctggagagcangngtgtactgttaatatc

SEQ ID NO: 283014 - DNA, 695 bp, Zea mays
gggagagtgagtgagaaaaaggaaaaaaaaaacgcggcgcagaagccagaagaaccagcgagccaactcccaacctctcgcccgatctcgatctcgatctcacgggcgccgccgccgccagcgacgatggatccagagatgctgcggctggcgcaggagcagatgcgccgcatgtccccggacgacatcgcccggatgcagcagcagctgatgtctaaccctaacctaatgaggatggcgtctgagagtatgaagaacatgaagcctgaggacttaaggcgagctgcagagcaactgaatcaaacaggaccggaggatatgcgtgatatgaccgagaaaatcgccaacactactccggaggagtttgctgctatgaaggcgcaagcagatgctcaaatgtcctatgcgatgtctggtgctaagatgttaaagaagcagggaaacggacttcataaccagggaaagtattcagatgctgctagtaaatataagctggctaaggataacttaaaaagcataccatcgtctacggcgcatactctgcagttgcaatgtacacttaatttaatggcttgttacttgaagacaggccagtttgatgaatgcataagtgaaggtacagaggttctaagttatgattcaaacaatgtcgaagcatattatcggaggggtcaggcatataaaggactcgggag

SEQ ID NO: 283015 - DNA, 717 bp, Zea mays
gtgttctcgaagctatcaggatcagctgtgctggatatcccacaagaaaaacattttatgaatttgtcaatcgttttggtgtccttgctcctgaagttttagaagggagcaatgatgataagattgcgtgccaaaagattttggaaaaaatgggtctggagaattaccagattggaaaaacaaaggtgtttcggggagctggacagatggctgatttggatgctcgtagagctgaagtattaggaagagcagcaagaatcatacagaggcaaatacgtacatatattgcaaggaaacagtttgctgagcttaaaagatcagcaacacagctgcaatcttttgtcagaggaaccttggctcgtaagttgtatgagtgcatgaggcaggaagcagcagcagtgaaaatacaaaagaatatgcgacgccacaaagcacgggaatcttatttacaattgcaagcagctgcaatcacattgcagacaggtttaagggcaatgtctgctcgcaaagaattcaggttcagaaaggaaacaaaagctgctgtccacatccaagctcaatggcgccgccacagagactactcacattacaagaatctgcaaggagcagctcttacttaccagtgtgcctggaggcaaaggctcgccagaagggagctcaggaagctcaagatggcggcatgagaaacaggagccctaaaagaggccaaggataaac

SEQ ID NO: 283016 - DNA, 576 bp, Zea mays
cccacgcgtccgcccacgcgtccgcaacaccgcatcgacagcacgcgcgcagccactgccaagcgcagttgtctctgatgtctggtcacgcctgacgccgccgctatcacgcgccaccctcctgccgacgaacgcggcctcctcctcattgccgagcgcagcccctcacttctctcctggctgcgccaccatgatgccgccacggaatgcgcagagccgccgaagagagcagagtcccagcgagaaacgcaggagctcttccttccacctctggcgaacctccaaggaaactcgacgcccagacctgctcgcgcacagggagcatctttgctccggcggctgctcgccggcctccctgtctcctccccagttcttcctctcacagccgtgcagcgccctcttctctacagtggccgctgctcctctctgaagctatgcgcaggagctctccaggacgccgcgcctcctccctgctacacgccccggtcgacgacgaacttcccgtggtctgggaggccgcgcccgcccagatccgccggaaggagcgaatggagcctcgccgccgctgtcatcaca

SEQ ID NO: 283017 - DNA, 590 bp, Zea mays
ctccctgctcggtgctcgcacacgctggcgcggcttgcccccaagctgcgctcccaccaccaccactatataatccccgatcgcctcacgcacacgcaccgacccaccggccgacgaggggcgaccgccgcaacacaaatccacacgcccgccgccaccgccgccatacggacccactcctcctttgccctggtgcgagcaggcttcggcagcaaaccccgcagactgctcccggacgagggagaacgcgcggggctgggctagccgctacccgctagccaggggaccggggcggaggcagcgaggaggtacgtatggacaagtacgaggcggtgcgggacatcgggtcggggaacttcggggtggcgcggctgatgcgcaaccgcgagactcgagagctcgtcgccgtcaagtgcatcgagcgtggccaccggattgacgagaatgtgtacagggagatcatcaaccaccgctcgctgcgccatcccaacattattcgcttcaaggaggtgatacttacaccaacacatcttatgattgtgatggagtttgcagcaggtggagagctctttgatcggatctgtgatcgt

SEQ ID NO: 283018 - DNA, 531 bp, Zea mays
  unsure (1)..(531): unsure at all n locations
ccctctcttccgcccacgcgtccgccggcgcaaaaatatggcgtcgtcaccgtccctgcgccccacggacagactccgctggcctccggcctctcccgcgttctgctccttttcggctgtctccctgcgcggcctcgtctcgctctccagcgcctctagggttctctccgtctccttccggcagcgcctgctgacggctgtgcggagctccagagaccctggagaggtgattgatgtggctagtggtgaaggaactgagctacctggaggctccactggtccaagaaaagatggaaaagagactgccaaaagtttctcaactaaagaattgctagaaaaactaaagagatatggtgttgctggggttctgtcatatggactacttaacactgtctactatgtgactgcatttttgttagtctggttntatgttgcgcctgcacctggtaggatgggttatggtgcagctgttgagaggtttgttaaactaatggcaatggtctgggctggcagtcaagttactaagatttt

SEQ ID NO: 283019 - DNA, 525 bp, Zea mays
gcgtccttgcgcaccgccactcccgcgtggccgccaccgttgtctacaacgagtacatcgccgaccggcaccacgtacacatgaactctacgcggtgggccacgctcaccgagttcgtcaagctcctggggcgcgaagggtactgcaaggttgaggacacgcccaaggggtggttcatgacctacatcgaccgtgactcggagcaggccgtcaaggaccgcctcaagcgcaagaggatcaagtcagacatggctgaggacgagcgccaggagcgcatgattgcccgccagattgagcgtgcgcacaagtccttagctaaacccaatggtggtggtgctgccgagggcgagcctgagtctggcagtgaaggagagtattcaggttcggatgatgatgagcaggagccggaggatgtctcgaaagaggcagataaggcaacaggtaagattgcgattgcgcttcagaaggctgtgccggggcccaaggttaatccttttgacgataagccgaagatgaaatttggtt

SEQ ID NO: 283020 - DNA, 518 bp, Zea mays
gattgcatatgatacatgtccgtccagacccccacgccgccgctcgcccaacctccgcgcgtgctgcgcccgccagcacccgccaccgctcctcgcgcgcaggctcggccggttcatcctccagcattccgcctccgcccggaacaaatcagattcgcaggcatgcagcagatgcatagcgctaccagtccgtccaagcccccaacccgccgctgcccacctccgcgccgctgcgtccgccaagacgccaccgctcctcccgcgcagagcggccggtcctcctccagcttccgcctccgcctccgcctcggctgagttcccaggatccgttccagacagcgctcagatggcgccccgacggcggcggcgccggagcgtggccggcatcgaccaggacgaactcctcgatcccgaggccctcgcggaccccgacagcggcttctacgagatcaacggcgtgaggctgcaccacaaggtctgcagccacgaggatgaggactcgtccagcgaccagtcca

SEQ ID NO: 283021 - DNA, 570 bp, Zea mays
gaaaggttcatcattgtataactcactgattgttgccaggccatctgttgcttcagaaattaatcgctttggtcttctggctgaatcaatgccatctcttgatgacttagtggcaaggcagaatattcatattgagggcttgcctgctacaccatctaaaccgcccgcgcctgcgcgagacgacaatgctgatcctcgatcaccaaagagaccatgcaatgaatctaggagcacagtagtagaacacaatttgcagacacctccacccaagcaatgccacatggtgttgactagtttgacagcaaaatgccatccactccagtccacatttgcaagtccaactgtcagtaatcctgttggtgggaacgaaaaatgtgctgacgtgacaattcagatattcttttccaaaattctgaagttagctgctattagaataagaaacttgtgtgaaaggattcaatatatggaacagacagagcgtgtctataatgtcttcaagcagattcttgatcaacagacaacattattttttaatagacacatcgatcaacttattctttgctgctttat

SEQ ID NO: 283022 - DNA, 519 bp, Zea mays
  unsure (1)..(519): unsure at all n locations
cctactcgtccgcatttctattctcctccccagccgccaggaagcaccggcgcctggccaacgccgcgcctcccttttcccttctctgtcttctgttttcgttctgtcagccgcgcagaacttcagccgccagggaactctggttcctggccgaccgagcccttcaactgggctgtgcgccacagagcccgagctaaccttttgttgtctctctctcttttttttcgaaatctgttccgatttctgttcgtgatctgatcggttgtagtgatttctgccgagctcttagggataaaatccctttcattatttcactggttttttaaaattacgaactcggttcatcagggcttctggaactcgattcgagttgggggtttctgtcctaactcctactccgagatcctctttttgtttggaactacaggagaaaacgacccccttcctccaatcgtatagagtttcttgatatttttttataccaccgaacagatcgagcctnggatttgttaaacccga

SEQ ID NO: 283023 - DNA, 350 bp, Zea mays
tccatgcgtccgcccacgcggccgcccacgcgtgcgttagcttttgagaagcagccgggctcacccgcgctgaaaaagcacccatcttcctattgcgcctttcttgtagagtcaagtcagctcacttttctcgtttcgatccagatcccgtattcccgttggattcggttatcccgcgtcccgcaagcaatatcagatccttagcctctgtggttctgcacttattcagcgtctctccagcttggaccccttaaagtgttctccaggtacagctacttgaatcggcagaaatggccactgacgccagcggaggtggtaagcctagtcttcttctgagtacttcccagcaa

SEQ ID NO: 283024 - DNA, 716 bp, Zea mays
ggaagacttcaagaagcttccttccatttgatatgtcaggacaggaaccacctttctgtactcaggagcaagtagataaatgtagctttggcactctagctgatgatgaaatgggatatgataacaaacccatggaaaagtcatctaatttagaaaggcaaacagaattatcatgcgtcatatgctggacagatttttcttctacaaggggcatcttaccatgtggacatcgattctgttattcatgcattcaaggatggtcggattgtctggcttctaggggtaaagtctcaacatgtcccctttgcaaagccagtttcacatggatcagtaaggtggacgaggcaagcaccttagatcagaaagtatactcgcagaccattccttgtgaagcttctaccgatgtttttgtgctgggcagtgaaggctacgatttctctggaccaacgtctgggcaaggagcatgctaccagtgtcacttccgtgagcccgatgagcttcttctaagctgccacgtctgcagatcacagtgggtacactcgtactgccttgatcctccgctgactccttggacatgcatgcactgcagagacctgcgtatgctgtttcaccggtatcgttagccccagttatggtactcatgtcaaaccttaattgttggaggaaattgtatcagaaggcatgaacaccataaaataaaaaaaaaaaaacaaaag

SEQ ID NO: 283025 - DNA, 607 bp, Zea mays
ggagttttagccctccaaatctgttcaagcccccgaaagataatgtgataccaagtaaaacaagtttctcaaatgatcatctcttaagagccgcagctagatcgatgtctgcccagaaagagttattggctgaagcctctgttgaatatggctacactgatccaaaggaagttgccgagtccacaagtttaggtgtgaccgagacttctgcaatccaggctcaggagtcttctccacggtctgcattgccaacatcgccacattttgctgattctagattccttgaggaacctgttgcttttgaagtatactctccagaccggctggctggagaattgatcttcatggacagcactttggttttcacagctgaggatctgtcacgtgcaccggcggaagttcttggaaggagcagccatggaacaacgtataaagctgttctacaaagcgggcatgtcctaatagtgaaatggctgcgtgtcggtcttgtgaagcataaaaaggagttcacaaaggagataaagaggatcggcactatcaggcatccaaatatagttccatggagagcttctattggggcctaaggagcagagagttaattattctg

SEQ ID NO: 283026 - DNA, 740 bp, Zea mays
  unsure (1)..(740): unsure at all n locations
ctctatgtctatcacgttggagatgaatctgttaagagagttgttttccgcacgcctgtatcagattatttttcagacatggttcagcattttcagaagcagtgcattgacttggataagttggttgcacgctcctcacgaaagggaaattcttctgtgccaatatcttctattgaagatgcaattgtgcaaatggaagacacactgtattattgcagtgactgctatgtcttctggtattcctgatcttgaaaggctcatcactgaaaatatctcgcgagttctggtatttcgattctcactcccgtcactgcagaggcagagcacagatttggacttaagtgtcactacatccatgtatctactttggtggatactacacatttttaagaataaggatatggcaagtactgtagctgctgccctttttcatcaacctgatggccctgatgataggaagcaaaggacacctaatggatatacatctgagcatgatagttgcaaatctgagaatcattgcaccactgcctctggtatcgagcaatcaagtgaggagcccaaattccttgcttctgttagttggaaacacttgcccaacaattcatcgcgaagtgattgctgccaggaaacacaccagggaacacttgcttgcctatatcacagatgagatgattcactgctnntggtcattgtgcttatcgctacattatgcagacgaagaactgatgatcatgctgatg

SEQ ID NO: 283027 - DNA, 536 bp, Zea mays
cccacgcgttctgattccctgagatcccaagcacccgcccggcctcgtccctgatctccccggggcgcgcgcgggcgacacgccacgcggccggcgagacggaggagatggctgccgccgactcggccacggcctcttcctcctcccccccggagtgtcccgctgccccttccattccgacggaccctgacttcctcagctgcgtcctgcagccaccgacctcctcctcgtcccgccccgacgccgattacgctaccctccgccgcctccttctccgccgcaagcccccctccgcccttcagcaccgaatggagtggcggtgcaatgacaacggctatgtcgcctaccgcaactttctcctccggcgcatcgacggcggcagcgcccagagcacgcccagcaacagtggaaggtgggctccctctccggtacatgctatactctccgaggcagacagctggaattatatgcgggacttgagaagtaacagcggagtgttaaaccaggccataagtatgggctcaaagcagagcgat

SEQ ID NO: 283028 - DNA, 453 bp, Zea mays
gtttgatcaaacacaacagcaaggttatactgcccggagtcctcccagcattagaacggaacacgaaaggccattggaatcaggcagtgcagagcctgagtctaaatgtccgtaaaatattcatggactacgacccagcactgttcgaggagtgtcgcgagaagtttgaggaagaggaagctcaagaagccggcatgaggtcaagatgtgaggctagatggaagcgcctagaagaaattgcctcgtcaaaggaggtgaagtagctcgtcttgccgactgcccaggctgtagctcgtcagcagagttcctctagctatctagccttgctggctgcatacgagcagctagctctttctggcaggatcaagtagatgctgatgtaactgcccatggatggctgcttgcctcgtgttacttgctttaccgaacaatttacaggctgacatgtaaata

SEQ ID NO: 283029 - DNA, 808 bp, Zea mays
cgcttgcggcagccctttgccttgtttggatactcgaggatttttcctaattcacatgtgttgagatatattggggtgtaaattagtttaatttatactctaataaacctcaacacacgtggattgcggtgaatactagagtatccaaataaggcctaaggggtattaaccccctcccccccaaaaaaagtcctgggaatctatttactgatttcacttatataggtgtagtgttaggaaacattttagcgtcggaaaacaagattttgaagcaattaagtgattttgtattttgtgctctttgagggtgtggaaaacaagactcgaagtggttgaagtgattctgaccagacctactgcattatgttttgagcatatctggtcgtgtagtgggtttatggcaggggggattcaccgctatcgttttcactcattagcgcatttgattgtaaacaaatacatccttgaaagtgtttatgacacattctccggagaacctcatcttcaggtgaggcaaagagaggggagattaactctcccagcaaatttataatcctgacatggtttcttgaacttttttattgtagctagatggaacaagatactggatgaagtaccaagaatcagattgttttgttctagaagactctactgaccaccttcacatgctatagtatattgctggcctatcattatccctgttattgcagatataaagatacaaaagctgaaatttacagagaacctcatccaagcgaacataatgccttatgactgacctgctgatgaccatttctggtctattgca

SEQ ID NO: 283030 - DNA, 529 bp, Zea mays
ctcttttttccctgatgcttcccaaggtcgacaggcccgtggaactaaacaatggtggctgtgttccttctacaaaccaagtttggttcggtgcagcttctcgagagccttcgcacagtggatcttctactgctatgaccacttattcagctgggttcgaaatgtgcgatgagctaccacctgcagggcaagcgatgtctatttgtgagagctccagaaaaaacgctgcaaatggaacaaccatcggcagatcgaaaggcaaagaatacagagagagggtacaacaggataatttgaaagatgagagaaagatgagctcaactaatacttctggagcatcgaaagctgataatggagatcctatgataaagcgcagggttgagcgctcccgcaaaatggcagaagcgaaggaaagaagctctacaccagtaatacccgccgacatgcaggtcgttcttaagcgctgcgaaaccttatagaaggaggttccggccgctaagcttaatttgcctttatgaacaggaaagat

SEQ ID NO: 283031 - DNA, 522 bp, Zea mays
ttcttgcgtccgcccacgcgtccgagaccatggggcagaccaagaacacctacggcgacgacccggaggaggacatgtccagggaggcgcgcgagatgaaggacatcatcgaagagatcatcccgctcgttggtgcggccaacctgtggaactacgtgcccctgctgcggtggctcggcccctgcggcgccaagaggaagctcgcggacgtggttaaccgaagggacttgatcttcgacaacctgatcggtgcagagcggcagaagctgaggcagctggaacgcaagaaaggcgaggcccatgccagcgaatcggataagatgggcatgatcggcgtcatgttatcgctgcagaaaacagagcctgatgtctacacggacacctttatcaacgctctcgtgtcaaatctgctggccgccggcacggagacgacctcgacgactctggaatgggcaatgtcgctcttgcttaaccacccagacgtgctgaaaagggcgcaagaagagatcgaatcgaacgtcg

SEQ ID NO: 283032 - DNA, 628 bp, Zea mays
ttgtcgcgtgggcggacgcgtgggcggacgcgtgggtcggtgtcatcgtctcctctcgtctcgttctcttctcctcacctccttcgtttcgcggagcagagcgagcagccggcaccggacctccaaggagcgcaccgcggaggccagcgaagatgcccgggctcacggcaccgtccgactacgcggaggagccgccgcgtcacccggccctcaagatcaactccaaggagccattcaatgctgagcctcaccgatcagagctagtcgcatcttacatcaccccagtggatttcttctacaagaggaatcatggacccatccctaaagtcgaggacctctcaagatacgctgtttccatttctggtctcgtcaacaagtccattcagctatcgatggctgacatttggtctcttccaaagtacaatgtcacagcaactttacagtgtgcaggaaacaggaggactgcgatgagtaacgtacggaaagtgagaggtgttgggtgggacatatctgctcttggaactgcaacttggggaggtgccaaactatctgatgtccttgagctagttggaataccaaaactcagttcagtcacgtttctaggagggaaacacgttgaggttgtagc

SEQ ID NO: 283033 - DNA, 740 bp, Zea mays
ttttaaaattgcagcccacaagctgaatatgaactgcaggattccaaaaggagtaggtattcatctaatgatctgaggtcacatgtggctctccacaaaagaacatctggtggaaccaagaatcgaagaacaagtgtatcccttgccaggattaagaaattcgggagcaaatcagtatgctattctggcagtgacaaagacaatgctgtgctagcccatgaagtgaatgctaggagatacagtggaagactcagctcaaattctccatgctgtgtttgtgggatctcagacctggagccttgcaatcgattaatagagtgcagcaagtgctatatcaaagtgcaccaagcctgctatggtgtactaaaagttcctaggggtcaatggttttgcagaccgtgcaagaataataccatggatacagtctgtgtgctgtgtggttatggaggtggagctatgacaagggcactgaaaaccaagaatattttgaaaagtttgctccaaggtttgatgaatttagaaaggtcagaatattatgttgattccttaggaaatgcaagcagtgagtgtacaagcttgcaaaatccagtagacagtgcacatggggataacattatgaatgcgaagaacatcaccagcaattcctggacctctggaaaatactattcgagtttacttggaccacaaccaatgcagtgggttcacatggtctgtgggctgtggacacctggcacaaaatg

SEQ ID NO: 283034 - DNA, 473 bp, Zea mays
ctttatgatgatgctgacaatggaaatgtgaaatacctggaagtactggagtgtatgccacaggcatctgcaagaaaacatggagctagtactactgataagtcagaaaccagtaagattgcagatgtacatagcaaaccagtttatggcaatcatgataggattcagacagggccaagtccctcaaatctgaacacttctattagagatgatggcaaggaggcaaagtaccgacacattcgttattgcgagaatggtgaaatggggcaatcattgagagtaagagacatgtccccgaagtctccaatcaatcacatttcagacaataatcggagtgagtaccacttgaagcagaggtacagctattctactaaggaatgccctggtgaaagaaacttggatggtccaagcaaagtcaggggacttgagaaagaccgcgctgagatcttgaggatgcttgatgagttgagaga

SEQ ID NO: 283035 - DNA, 369 bp, Zea mays
ttttgacccttcctttccatctgtgttttctgtgggggcacaacttctctccgtgagagctctctccccctcgttctctgttgccaggagttcggcgcttccattctcccccaccgcacagtcaaggatggccgcctccaggacgtcaagtcgtcaaccatcgatcccatcggcaagaggtgtccccttttgatacggcacctccgttccccgctgccacacaggagcatccctgcctccaggacgggaatccgctgatccctcgcgacaaagggggtctatccttccatccctgctgctaggaaggagatgaagatggatgacacgaaggacagacaggagtggagaggccccctcctattctgctct

SEQ ID NO: 283036 - DNA, 518 bp, Zea mays
gcaaagtgttttttatctgaaatctgaggcaaagttcttggttcgacaactgtcggaattgcaagagtcacggcagtcgttgcaagcagagattgtcaagctgattgcagagaactcttcactctctagcaaagtttacagatccagagagaaagagacgtcatttgatgaggatttcagcacacttgtcgatgaagcgatcaggacagatattcttggtgtcatttttagaagcctttatgaagagaggacatcacaattgcagcgtttgcatgaggattttgggtctctacatgcagcaggcaatgagctgtatcaggaaatcaagctgatgaacaagaagctcggagacctacagcttgagaacaactatcttgagaaggaactcactagaacgctaagcatctgtgatggctctggtacagaaatttcctccggaagaaggcgtgctatgaggagggacacgaagctattaaaatctggcaggaaaagccaagagggtggccagaacatggaac

SEQ ID NO: 283037 - DNA, 468 bp, Zea mays
cgaaccctttcttccaccacgtaactccttggaattaccgaaatgccactcttcttctccaaattcgcaccattggtcccccgcgtccgccgcctttccatcgccgcggcgacagccgccggcgagtgaccctaagctgtctcgaatcgcggatgagctcctcgccctatcccccgccgagctggacgactacgcggcgctcctgcgcctcaagctccgcctgtcgctcacctccagcgcagctgctggagcctctccggccggggccggggacgccgcggctgcagccgtggaggccgccgcggcggtgaagacggcgttcgacttgaagatcgagaagtacgaggccgcggcgaagattaagatcatcaaggaggtgcgcgcgatgacggacctgggtctgaaggaggcaaaggagctcgtggagaaggcgcccgtagtggtgcgcgcggggttgcctaaagagga

SEQ ID NO: 283038 - DNA, 432 bp, Zea mays
cacacatctagtcgagagttagttgctttgcctggttcattggaatctgttgccgtattattattgcttgcatgcacggctggttggattggatccatctgcgctcctagctggacggtggttggcagatgtgatgagacgagaacgagactacgacagtgagaagagagatcctagccaaatgcaaatgttacaactgccgccgccgccggataggcttccaatttcatccgttgcatacatacgagtgctctcatcccatccttgttttttttcctacaataattaattactccttcccgtcttgcgcgtgcgtgcgctctctcactcagtcactctgctccggcgctgacgagatgaaatgacatgaggagggagcggtcgagaccgcgattgacgacgcaccgtacgccatcggatctgtcctctact

SEQ ID NO: 283039 - DNA, 406 bp, Zea mays
cccacgcgttcttccacgcgtccgcccacgcgtccgcccacgcgtccgcaattctctcccgctctcccctctgctgccagtctgcaaccgcagcagcacgtccatttcacgtcccctttcctccctccctttcccctgcccccacgccacctccgttcgccgccgcccgccgcgccggcgatcgcgatgaccgaagggcttctgcctattacgcggacctacctcgcgcgctactacgacaagtacccgctgcccccgctgcccgacgccactacggacctcgccgcccggctccgtgctctccccgccgacctcgctgccgttgctcccatcgccccagatgaggagctcttggaacaagaagcagctggcatacctgcccacaaaattgatgagaatttgtgga

SEQ ID NO: 283040 - DNA, 1052 bp, Zea mays
gtgaagatggctttgcgtcagaaactgaaactgccacactgcgagcatcatttaagcaggaggttgctgtctggcatgagctcaaccatccgaatgttacaaagtttgttggtgcatcaatgggtactacagaccttaagattccagccaatagttctaacagtggtgggcgcactgagctgccgccaagagcatgttgtgttgtggtcgaatatctcgctggaggatcactgaagcagtatttaataaagaacaggcgaaggaagcttgcatacaaggttgttgttcagatagcactggatcttgccagaggattgaactatctacattcaagaaagatagtacatcgggatgtaaaaactgaaaatatgctgctcgatacacagcgaaaccttaagattgctgattttggtgttgctcgtgttgaggctcagaatccaaaggacatgacaggcgcgactgggacacttggctacatggccccagaggtgcttgaaggcaagccatacaacagaaagtgtgatgtctacagttttggcatatgcttatgggaaatatactgctgtgacatgccatatccagacctcagttttgcagacgtctcgtccgccgtcgttcaccagaacctgcggcctgacatccctcgctgctgcccaagcccaatggcgaacatcatgcggaagtgctgggacgcaaacccggataagcgccctgacatggacgacgtggtgcggttcctggaggccctcgacacgagcaagggcggtggcatgataccagaaggccaggcaggcgggtgcttgtgtttcttcagagcccgtggtccttagaaccaaccaaccctttccagccatcctctacttgtctctgccctactacagtattggagccagatgtaggcctttgttgttcatcggataggggattgcagataacttgatgacaatctttgtgattggttgacacttgttatacgttctatagtgatgtgaataccagtgaggagtccataatacagagttatttcaaccagttcatggttgcatgctctt

SEQ ID NO: 283041 - DNA, 376 bp, Zea mays
  unsure (1)..(376): unsure at all n locations
ctgctcgagctcncgtctcgctctgcaccactcaaacctcttcttcctttccggaaaccacaacagcagtcgccgcacgctgcagcttccccggccgccgcgcccaagccccagctgcctcgatcgctcgagagccacaaccaccactccaccagcagggcaaagctggaggatggccgcagtcgcagcgatgaaggctctcgcggtcgccgactcgccggtgtcggcacggcagccccgtcggtacgtcgcaggtggcgctagccggcggctgcagtcgccgttccacggcgtgtcggcgcagtgctcctgggcgaccgtagtgggcgacgccccggcgggggccgcaggtggcggtggcggcggttgcgatccg

SEQ ID NO: 283042 - DNA, 580 bp, Zea mays
acggagagttcattaggtttcatcgggaagcactggaatcggattatgcgggggagaatctgaatcattggagggatcttatttttggatataagcagagaggaaaggcagctgaagatgccgacaatgtcttctatcactacacatatgaaggcaatgttgacatagacgcagtatcagatcctaccatgaaggcttcaatactagcacaaatcaaccattttggtcagacccccaaacagttattccagaaaccacatccacagaggcggactgacaggaaagtccctcctcatcctctacggtactgtgcctatctaacacagcaggagattcgcaagacagcatcttcggtgtcccagattgtctcctacaatgataagatcctaattgctgcagttaactgcttgctcaagccgctaacttataatgaatacatttcctggggattccctgaccgaagcttgagaatattaacatatgatcaggatagacctttgtctactcatgaaaaccttcactgtggtagtcatatgcagtgcactggagtgagccatgatggcaacattcctcatcactg

SEQ ID NO: 283043 - DNA, 453 bp, Zea mays
tggagagaaaccgcagggccgccgccgccttccctgatcgaccgctcccgcgtgcggattcaggcgccgggctttccagccatggttcagtgagccgggaggaatccttgcgctgccggagaaggatcatattcgtcggtggacaggaggtccctgcgtgcatcgatcgtctcccgggtttccgagagcaccctccgcccccggattcactgcttcgattgattcgtcaagcaagcacagggatatcttcacgagaagtgtcatcatcaagattgacagccttcttcgtggatggcgaatggtaacaatgaagtgatgggtatatctcagcgcaaatcttgccccaaggttcacagctcaatgtgtagtgagctgacaatgatgttggataaggtgtcttctattcttccatcaatagaggctgcacgaccaggttgtaaagcaggcatacag

SEQ ID NO: 283044 - DNA, 662 bp, Zea mays
  unsure (1)..(662): unsure at all n locations
atgctaactctcctaggtcaggcaccaatatgatgaatacgccttccccccagcaacatctaacaccacaacaacagaggcaaaaactgatgcaacattctcaaccgcttcaccagccggtgaggccatcagctgctgggatgctagcacagagcgcacttcctcaactacaagatttacaggggcaggctcaacaaaaactacaggtccctggtcaacagcaaatgcaatacaaccaagcattgtcacaacagtttcataacagacagatgcaacctggacgtatgcaaccaggcatggctcagagtcaattgaatcaaggaactcagctacgaagtcatttaggccagtttactggagctgcaaataatgcgatgttcaatgctgcacaggcatcatcaaactcacaaatgatggcaaatatgcatggatcacagtcgcttatgccacaaatgcagtatgggatggctggtgggcatccacataggagccatccccaaatgctgactgaccaaatggtcgggatgggagccacatatagcagcatgatgggaatgcagcagcagcagcaagggctatactggaacatgcaggcaggtgcacagaacgtgccacangggatggggggccttcagaaccagacccagaatcccaacttcact

SEQ ID NO: 283045 - DNA, 355 bp, Zea mays
gtggggcaaagcgggcgacgccaacaagggcggggtggagccagagcaccactcggacgatctgaagaagacgtcatcagcgcggtcggatcccaattcgacggccggcgtcggcagtggcatcgccgagcccctcctggcgggcggcgatccaacggagaagtagatgggattttgctgctcttcaagtgttctgtgcgtgcgcgcccggtgttttcagggtcggtatgctagtgctactgtaacagtgccgtcccagttttgtcatgtacactagtggcagcttcaaatgactccgtgctgccgatgtgtatcatccgcacaattttgttaaacaaaaaaaaaaaaaaaagga

SEQ ID NO: 283046 - DNA, 616 bp, Zea mays
cccacgcgtccgggaaccatagcattgagatggggcaagctgatgtgtcagccaagatggctgaagactcctgcttggagcatccagaggctgttacgagcaaaagctctgtgaagaaacacaggaagaaaaagaggaaagataaagaggttgaaactattggccagaagcagatactcgatgctgatgaaaatgttgggtcagaagatacgaagaggaacagcagagaaagggaacatgataggaagtcaaagaagcacaaacgaaagcatcaggatgacgagactgcctcaaatggttcttctggtaatcaaattgttttaggggaagataagaggacggaaaaagagtatttagttaccttggatttggaagaggacaataaatctgatatgtcaaagattgggaagaagacagatagcaagaagaagaggagaaaagagagaaatgatggtgttgacctaagacaaaatacactagttggagagggcaagaatggtaagaataacaaagagaaaaaaatgtgtgaggatgagaatggtggcggtgaaagagagaaagaaaacatgggaaagcagaaggacaagtgtagaaagtgagttcactgatcatgtga

SEQ ID NO: 283047 - DNA, 650 bp, Zea mays
atcattctggggacgtgtctggaatttgttcagggatgataaaggtgataaaagatttgcttcaatcagtgtgcaacctattatcccaggatggaattcttgccgaggaactgatacggctgtccccttgctattaaaaggattcctcatgaccgcaatattcttatttgtaatcagaagtaaactcaggtacactgggaagcgcattgaccgtccaactcaagctaaaatacctgctgagccagagtgaatttatgtcgtcttcatttctgaacgtttgcggcatcacagttttggtgatgatcataaatacgtaactttgccgcgcaaagcttcgtcctgggaaaagaattcggctttgcttgcagtgtatggtatccagacgcagcagtacaggttaacagaatatgggttgcttctcatcagtcatttcttgattcattattccaatatgtagaagacacctgcagcaattccgagttttgacgaaagccacatgaaagacatgaagaaacatggccgtaggctaatgtacactgtatgtatcttgtctccacaaagttttgtaaccatcccggcttgatatcgtttaacgattttgttgcaacaaaataaaaaataaaaaattatttaattaggatgctttcttc

SEQ ID NO: 283048 - DNA, 622 bp, Zea mays
ctcgagccgctttcctctacgaaaaaaccattttttcagtataaaatttcgtttttctcctctcagtctccgacgccgccgcactcatccccccagacgaccaccctcctcctcctcccccacccacctcgccggaaccctagcgccgaccgcctgccgtgcccatcgacggcgatcgcattgctgcgccccgatggcgacccgcgcctccaagaattgcctctgcgcgggcagctcttcgttcgatgaccccgacgtggtcgaggtgtctccggcaaccgccgcggctgcggggctgggcctccggccaccacaagaggaagcggagccaggttgtaccgcaagaagtgattgaaatcgatgatgatgatcctgatggagtcatacttattggtgataaagcacaggtggaaaagaataagcaaactgctgtatgtcccatggattgctcaaagcatgccaagagtggctgggttcaggacatccctggccccagcacatatgcttccaaatatatcgaacctgtgttgactgaaagtggttcaagatgagcagttacactatctgatgactgcctatgcggattgagctaatgatatgagatgagttgagtgatgtagat

SEQ ID NO: 283049 - DNA, 601 bp, Zea mays
ataatttctggttctttggctgttgctgatgttgcgatgataactgaagactttgaggaggtgcaggtgcagagctgatggtttgggatccttgacgtggggtaccgctcataggaggaggcttgggctgcttgtggcagcaacgtgtgtgcccaagaccataaataaagggaagagctggatgcacgacaaggctgtcgccaccaacctctactccgtcaagcaacgacgacgtgttgcttcggggtcttggctgaacgatcagacatcctatgtatatctgtgtacaacaaacgacatctgctactactactaccataaaagattgccgactgtgcttgcgttctctcatctgtaacacaaatgagtgtaaagagacatgtgctatttccttggaacttgaaaactttgtaaactcatgtcttcatacgtcgtgcttcatgtgcgaaaacgcttaggtctcttccactcctccacctctcccttgcttcacctaccaatgagtaatcacaatgcctgatctatcatttaaaattctatattgattctttagaaataatttatacaataatataatgtttgtttgataccacttcattct

SEQ ID NO: 283050 - DNA, 499 bp, Zea mays
gtcggcctcaccaacaacctgggcctcttcgagtcggacgcggcgctgctgaccaacgcaaccatgaaggcgctggtcgactccttcgtgcgcagcgaggccacgtggaagaccaagttcgccaactccatgctcaagatggggcggatcgaggtgctcacggggacgcagggcgagatcaggcgcaactgcagggtcatcaaccctgctaatgccgccgccgacgtcgtccttgcccgtcagccaggttcatcaggatccactggagtggctacaagctaaccatatctcggtgtgtctgcagtgtgtttggtgggggatgtgatatagtatattgcaataatctagaaaactgaagaagaagcaggtgatgaccacactctgtagtgcatcacgcggtgcgtgttcatttaaccgtggcgtttgattgtgaggatgaaataaaacacatgtatgaccacatctgattattagtgatacaaaaaaaacttgattgccc

SEQ ID NO: 283051 - DNA, 337 bp, Zea mays
gaacgtaagacataaagaaggcattagctgatctgaaaccgaagttctgaccgggcatggcgaaggtccctccttcacggtttcctgatgctgctgccgctctggatcgacagacttcagcttgagagtagtttagccagctgcttagcgccgtggacgtggggatggacacgtcgcattgcgcgcttagtggctggttttgtgcgttgtttggctaagtttttttttttttggttagaataaaagggagaagagaacacccctccagttgcgcagcaccaaaaccggttcccccctctcttgtcatttgttttgtttgttctcatcggggcgtgcc

SEQ ID NO: 283052 - DNA, 789 bp, Zea mays
ttctccgctccactccagtcggtcctactagtcctgccctccccgcctccccggcatgccttcgccatagcagcaccagacagcagagcaccaaacccacacttctttcacctcccctgccccctcctccattctccatcgcaatccgccgccgccgatggcgaggccgacgcgcgcgctcctgctcccgctcctcctgctcctggtgctggcccgcgcgtcgggcgacgtgccggcggcggcgtccctcggctgggacctccgcgtggtgggcgcgggagaggacgaggagttcggcttccctggcggggactccgtggcgtgccgggtgctgcagggcggcggctacctcagctacggcgcgctgcgcagggacaacgtgccctgctccgtccggggagcctcctactacaactgccgccccggcgggcaggctaacccctactcgcgcggctgctccgccatcacacgctgccgcggctgatctcggcgtccgccaataggaagagaaggttcatatccgtttatcctgcgccgttgttggctgatacggagaaaatcattcatctccctccctgcccctttaatcgattattggtacatgtacgctactctctctctctctctcttgttgattgattttgtttctcttgttgattgattttaacaagaatgattgtgttggttgtgggttatgactggagtatctctctctcgctccggtcctgtaaattccatgattttcgagcagctggtgtataaactacaaactgatgatgacgatttccc

SEQ ID NO: 283053 - DNA, 640 bp, Zea mays
tgacatcatacctcaaaaatgaattcagtgacacaatgccaatgcgtgttctattatattaccatgtcgcgtcgaaccggactgagaaggcaaaataaccatctgtagatcgtttttggcgtttcatttcttccatcatggagactgaaagcaataatccgtgcacactcactaaaacagcatcgcgtcttccactttttttgttggaatctatcctagatctttattatgcgtatggtggtaacctcatgtcaccatcgtatctgtatataataagcctaaatcagctgacgttctgtatgtaaattagtaaatgtaatgactaattggtgcccccctttctgcactaccagatctacttcttttctcgtaatatttagtattaaaacaatcacaccacacattctacttctgcctggtgatgatgttatataacatttggtagctatcacgagcggaatctaagcatgtctgtaatctgatatgtagatctgtgatgccctcctcacttcgtttgattttgaatataaggattcgtttggatgcaattttgagttttatgagagtactattcttttgtaaaatacattggttttggagcatcatgaattgtttggatggaataaacgttatagttttg

SEQ ID NO: 283054 - DNA, 453 bp, Zea mays
gagaaaatggaacatgcctgtgcataaatggattgttcgtcatatatattttccttgcatgcgaaatggtatatcaaaggaagttgctgtttttatatcgttctttgtttctgctgtacttcatgagttatgtgttgctgttccctgccacatactcaagttctgggctttttttaggaatcatgcttcagattcccctcatcatattgacatcatacctcaaaaataaattcagtgacacaatggttggcaatatgatcttttggttttttttctgcatatacgggcagccaatgtgtgttctattgtattaccatgatgtgatgaaccggactgagaaggcaaaataaccatcttgagatcttttttggtgtttcatttcttccatcatggaaactgaaagcaataatctgtgcacacaggaaaccagcatccgtgtcttcagtttttttt

SEQ ID NO: 283055 - DNA, 456 bp, Zea mays
cctttgtttcaagcgaaggcgagcgcgagagaaagctcaagccacttcccaacccgctcccccctcgccgcgatttcctcacatggcagcgctgcgtctccgcgagtcactcgagaggaacagcccctcctcctgcttctccgacccctgtccctgcgccgccaacacgcgccgcccccgtcccgatctcgccgcccccgccgccgggcccttctcgtccctccgcgtccatcgcccctgctcctggtccggctctcttcttcctcccttctcgcgccgtagattgcagccgcggctctgattctgctcccgccgtttgtctcgcggtcgcgggttcctgggagcttctgggttctggctccgtccctaaccggtgttgccatggggaagagcaagaagagcaaggcccgcggcggcggggacgacctgatcgacagcagcgacgccgacagcgtc

SEQ ID NO: 283056 - DNA, 405 bp, Zea mays
cctcgccgtcgacggggccaggcggccgaacacatccttgacgaccgacgccgccctactcgcagcttcctgggtttcatcggatcctctgctagcgacgagcaccccctacaccaggccgttacttgggcgccggtgccatgcccggcgggtcttcgggtccagatggtgaagtggatgcaggatttgcgaactccagggagaggatttcgagtattacatgcaaacgtactccatcatgctgggacgcaacagcaagaaatcaacagtggatgtggatctctcgagcctcggaaggggtatgaacatctcccgccaccacgcccggatattctacgacttccaacgccgcaggttcgcgctcgatgtcattggcaagaacgggtgccttgtcgagggcgtcct

SEQ ID NO: 283057 - DNA, 427 bp, Zea mays
ggaatcaagagttcttagtttagaggaattgaattttgctacaaggaatttcagcaatggcaaccttattggacaagggacgttcggagaggtatataagggtttgctccaggatggcacaatagtagctgttaaaagacggcattctcctcctagccaggaattcattcaagaggttaattatctagcatctctctgtcattggaaccttgtaaaacttttggggtactgtcaggaggatggcatgcagatgcttgtttatgagtatatctccaatggcagcgtatcaacacatttacatggtaacagccatgctctacgttcaaggctagaattccagaagagactttctattgctcatggcacagctaaaggcctgagtcacctgcattcgctgacaccccctgcggtccatatgaatttcaaa

SEQ ID NO: 283058 - DNA, 588 bp, Zea mays
tcgcccatgcgtccggttcgtggcggcctccgcccctccctcccaggctctcaccaccgtctgctggtggttgccgcggcgccgctcctccctcgtggtggcggtggaggactacggtcggggatcgacggcttcttcgtccgttggttggcaggcgaggcgatacatcaaccaaccaaaagaaatgtcagctggcaggcaagcatactggtgttaccagtgccgacagagggtgaggccacggggccgggagatggtttgtccctactgcgattctgggtttgtggctgaaatggatgatgtagatgctctcatgagccacttcgttgggacggatcctgatttccatcgcgacccacggttcgggatcatggaggcgatctccgccgtgatgcggcatggtatggcagggatgaaccgggaggttgatgtcagagggaggccggacttcttttcagacctggagatggagctcggttcagggccatggctgctcttccgtggccagctccccggccacctcaccgaggacaacggtttcgatgttttcgtcaatggacgacgtggcggcggcggcggcggcggcgc

SEQ ID NO: 283059 - DNA, 377 bp, Zea mays
ggtctacaagatccagtacatctagaaaacaaaacaagggagagaagcactctagtccagatcatgcacgtgatagagatggcgcttcacaaaataaaaacaaaatctcagcagctactagaagaaaaaaccttgtcagtaaaaaagaggggtcaactatggatgaaaaacaagctaatactcctagacgcttgactccaaagaaggatatggtcacactttcatctggctctgatgctccaccgggaaacagcctttcgagggcccatgaagataaccatgaagagggctcacttagcactgtccaagagaaagaaggctcaccaaactaagactaaaaaaacaaaggatgctggaacaaaaactggtgcagacca

SEQ ID NO: 283060 - DNA, 342 bp, Zea mays
tcgcttatcgcgtacgcggacgcgtgggcccaggagagccgtcggacaagacgaactccagctcgagcgccgctccgttctaagaaacggtgtattgagatggactgtcgtgacagcaactgcggatcggctaaatcacactccgatagcaaaattctgaggtggaaaggcttataatgctaaaattccaattgcggtgttcgggatacctattttcagaagcccagtgttggtgataccttggttccaaaaagctccagctgcagtacggtggccagggctccttcgtattgccgccaccgtcgcaatcttcatatcaacatttggtatgagtcaaagccg

SEQ ID NO: 283061 - DNA, 504 bp, Zea mays
ttgacgtttgggcggacgcgtgggcggacgcgtgggcggacgcgtgggacaaatttgaaatattgggagtgctggtgtgatatagaggtctaggaggagatatgaggtactacttgcgtcaggtccagcgtttggttggagatatggaaggaggagctctcttgtttatagacgacctcaactccaagtgacaaagcgaacagctgttgaacgtttcccttctatttctgtttctttttgccggatttggagatggagatgaattcctctggcgaggaaactgtggtaaaggtaagaaagccgtacacaataacgaagcagcgggagcggtggacagaggctgaacacaaacggttccttgaagccttgaaactttatggcagagcatggcagcgcatagaagagcatgttgggacaaagacagccgtgcagatcagaagtcacgctcaaaagttcttcactaagttggaaaaggaagctatgaacaatggtacttttccgggg

SEQ ID NO: 283062 - DNA, 550 bp, Zea mays
cgtgtatcgtgtcagcttggatggggagttcttgcaagctgctttgtctagaacaaagcaggttgatgaatttacttcaaggctgctagaaattcatgataagatgatgtctataaatatgaaagaggatatacgcttaggattgcaccggtctgactatatgctggattctgaaaccaattcactacttcaaattgagctcaatactatcgcatcatcctttcctggccttggctcccttgtcagtgaacttcacaggaccttactcaaacagtatggaaaagtattaggcctagatcctaaaaggattccacagaattgggcagccactcaatttgctgaagcattgggcagagcatgggccgagtataacaatgacagtgctgttgttttgatggttgtccaacctgaagaaagaaatatgtacgaccagtactgtcttgtcaatcatctgaaggaatcatatggtgtggcaactataaggaaaacattggcacaagtagaggctcaagggcaggttcttacagatggaacacttgtggtagatggt

SEQ ID NO: 283063 - DNA, 107 bp, Zea mays
cacatgtctatcgctgttaagactgtcttcggatcgtgtaaaatagagaatgcggtactctaatttatactgtttgacactgtttccagagtgaagtttgttatgtt

SEQ ID NO: 283064 - DNA, 603 bp, Zea mays
gtctctcttggtaggagttcagagcatacaaataaatcaatagatagatcatatcaccaggcaggaatctctacaccttcaattccaccaatggattctggggttttgaattatgctgaagaatatgatcttgaatctgtcctgatgaatttcctaggtgaaatatatagttgtcacgatgaatgcccacacagtgattgcaagaataagaatgaattgtgtccttcactgaagtccctaatccataaaaaggtcaatgaattgaataatcttcctcgcaatattggctgcgcgcaatctcaagagggtaatgatgctaagctatctgaccagaataatatttctaacaccatggcagcccgatccaaacaattcaaggatgcattggaaatactgggttcaaacaatgaacttttcatgaagctgcttcagaagccaaaccaacatatagttgacagtatccaaaagcatgaaaacagtaaggtggccgccggattagagcccaataaaattcatggacagaccaattttctggtaggaagaggaggctcaagacagcatcctttggctacataggagcaggctaaagagagaaaatatatg

SEQ ID NO: 283065 - DNA, 758 bp, Zea mays
cgcacgaggccaccaccacgaccacgagcgcgcgctggccacggcagaccaccccgcccagcggccagcttgctcgccacgaccacgatgggcttccccgtggggtactcggagtcggagatgctgctcccgcgcgtgctgctgcaggtgctcctcctcctcggccacttccaccgcttcctcctctgggccttccacgccgtggggctcggcgacctgatcgacctcggctgcaactacccgccgccctccgcgtccacggcgcaggagatgatggagcaccaggggcgcgaccacgtggcctccccgctgcagcaccagcggacggagttcaggcccgtcgcggcggcgctcatcgaggaggcgctccccgtggtgcggttcgacgagctgggcggcgcggcgtgcgggagcggcgactgcgcggtgtgcctgggcggcatcggcggcggcgacaaggtgcggcggctcggcaactgccgccacgccttccaccgggcctgcctggaccgctggatggcgcacgaccagcgcacctgcccgctctgccgcgcgccgctcatcccctgggccgccgacgccgacgccgacgcggccgactacgacatgtcctatccgtctcccctgccgcccacgcagctgcggcgggctcacgagctgctgctgctgcttaccggcctgggcggcttccaatgatgcgcctgctcgtgcgtgcgttgctggcacttgagcaggccggccacgcgattccgatccgt

SEQ ID NO: 283066 - DNA, 518 bp, Zea mays
agcgaagaggctaaggatggatgttggcacgttcgatatcaagtatctcgatgatgaccatgagtgggtaaagttggcgtgcaatgcagacttggaagaatgcatggagatctcgcggctttctggcagccatgtcattaggctactggttagcgatattgcagcacactttggcagttcttgtggaagctctggttgatatgcgtgtcagccttttgctttgatcaatgtagactcgaaagttcagttccacttggtagttttgttgctagttagctttagctgtttcattgtgtttgataaatgtatcattgtattttacccccaaaaaaatacatgtaattgtgcagaacgcacttgtagtcaactttgtatatatcatgtgctggaaattctatttcaagttataaaaactgaatttgttattgtctagaaaaaaaaaaaaaaaaaaaaaaaaaaaaaataaaaaaaaaaaaaaaaaaaaaaaaataaaaaataaaagggcggccgctcgcgat

SEQ ID NO: 283067 - DNA, 545 bp, Zea mays
aattatatctagacaacaggtgtccgatccatgacattcaatcctgacggaagatctctgttatgtgggctgcacgaaagcttaaaggttttctcctgggagccaataagatgccatgatactgtggacgtgggatggtctagacttgccgatttgaatgtccacgagggaaaacttcttggttgttctttcaatcaaagttgtgttggaatttgggctgttgatctgacgcgtcttgagccatatgcaacgggtacttcaacaaaagtaaatggtcattctgaattgaagactctttctagcggcactatgcctttacaaaatgatagtggttcaagggctaacatagggcgatcatcagtcttgcaaaatacagagaacaaccttaaaacttcttcaggaagactgtcagcttcacagaactcagattctgcacccaaagaaactaactcggcaccttcaagcgggttgatgccaagcacaccacatagggctggagttgggtcccataatagatctgttggaaattagcttttcaatctggg

SEQ ID NO: 283068 - DNA, 484 bp, Zea mays
tttttcgcgtccgccaccgtatacataatcgaggatatcatgagaaatgatttcgcgttatttatctcctccatctgtacacttttttttgcttcgtcgctggaaaagtgtgcccaattctaggaccctgtctctgatatctatgaactatttcatccattcatcaatccagagatccaacacttggacaccgacattcgcattcctaggaacatcgaccgggggggagcaaggaaagctgtgccggtgcaggaagcaaaaaaaatcagatcccgtctagctctgttcatctccatcattatttcttctggtgggaacttcatgtgtatatatatataatatatataatagttcatcaggagccacaggccaagcggcgagacgaggcggtcgagctcccgcccgtgttcacggatctcctgcgacgccatgcgaggggcaaggttgtggagtggccgccgcgggagaaagtgctcgcgcaccc

SEQ ID NO: 283069 - DNA, 414 bp, Zea mays
cgtttgtaggcttgcttgatgcagtgtgcaagacaaaaggtgtggatgaaggcgagaatcttgtgaggagcttccaggacagaaacttcgctattgatgagaggtcaatctgggatcactctggacaagaaaggcccattctcaccagtagtgtgggaggtgatctttggcaagagaaaatcagaccgaccattctaatctctaccagaaagtagtatgtgcacactctcatcattttgttagccttgtagttattatttctcaagagtttgcttgctttcatggttaaacaaatggctaccatgtcttcttttatggaatctataattatggcgatctgtatgcacttttgtcatatgcaattcacctccatctattccactgccccaattagggactacctgctgcattcac

SEQ ID NO: 283070 - DNA, 487 bp, Zea mays
gtttagtcgaatgaattattatcgctggctctgggtggctctgtcttctctctgtgaaggcgagcagcatggatgtccaaggatgttgagtggttatccgcagactcacagtttggagagcatgctgcatgctctgcatggctaaaccatgctcataatcccgtgcttttgagtcactcaggggtgccacataccaagatgtacggtgcgcacaatatatatgatggtcattcagaaaaaacagaagccacggctttcaaacgtgctggaacaatggctgctgctctcatatttaaagttggggaaaccagaagatacagtgacagggatagggtcacgacttatgcagaggcatctaatggacaaatgccaaacttggaccttatgaatgcggtgcactattaggctggtcacagacaaggttttcgtgtgaacatcgctgcatgaagttctttgttgagctcttcatggctcacggttattgctg

SEQ ID NO: 283071 - DNA, 513 bp, Zea mays
tcctacgcgtccgcccacgcgtccgcccacgggtgcgtccactcgtccgagggcgcgttcggccagccggcgccatgccgggacctgctgctgggttctaccaaggtggcggtggtgcagccggcggcggcatgccgtccgggccagagatgctgcaggcggccgggaaccccatggccatggcggcgcacagcagcagcagcagtacatggcgatgatgcagcaacagcagatgatgaatggtcacggcgccggcggccccggcgggtacccggcgatggggtacgggtacggccggccggcgatgcagtacccgccgtcgtcgccgtactactaccacccgatgccgcagcggcacccgcacgacaacatgttcagcgacgagaaccccaacagctgcacggtgatgtgatcatgtccctgtcatgcatgcgaggaggcaaaggtcgttgcggcctgtcgaagcttttttctcctgctgcctgctattcttccggggtgggagagacccgt

SEQ ID NO: 283072 - DNA, 521 bp, Zea mays
ttgtcgcgtgggcggacgcgtggggttgattttgggcatatggaaactgtctcgttgatatctgcaccaaagtatcctgagaagcaggttgggtatattgtgacatcttgcttactgaatgagaataatgattccttaagaatggtaataaatacagtaaggaatgacataatcggacgaaatgagaccttccagtgcttagcattgacaatgctttctgaaacagattcgctgtcaaaaatctggaatcccaaccaaagaggtaggtaacattggtgggaaagaattttctgagtcactagccccagatgtccagaaacttcttatttcaagcagttgccgtcctgttgtcagaaagaaggctgctctatgccttctgcggctttataggaagaatcctgatgttgtgaatattgatggctgggctgaccgaatggcacaacttctagatgagcgtgatctaggtgtgctgacatctgtcatgagtctttttgtttcactagtatccaacaattctgaag

SEQ ID NO: 283073 - DNA, 775 bp, Zea mays
tgtttgactattaaggcctggcggatattgggtgctgtcaggcccgcccattggctggaagatttattatgaggggtggcaacgttctaaggaagatcttcaaaatgagcaaagaaaaatagaacaattggcacaacttctttgttggaagaagatatctgagaaggatggtattgccatatggagaaagagattaaatgacaagtcttgctccatgaaacaatataatccaaaaggtgtaaaatgtggtttgacaagtgacagtgatgtatggtacaagaagatggaagtttgtatagaccccctacccaatgttaatagtgtatataaggttgccggtggtcaattagagcctttttccaagaggctgtatgcaggacctcctcgtataacccttggctctgagcctggtttctcagttcagccatatgaagaggacaataaactttggcagaaatatgttgaggctcacaagaataccaataatttgcttgatactcgaagatatcgcaatataatggacatgaatgctggtctcggcagctttgcgctgcactagagtccccaaagctatgggtcatgaatgttgttccaacaattgcaaatacttccactttaggtgtaatctatgagcgtggattaataggaatgtatcatgactggtatgtactattaacctatttgttatattgctctcctgtatttctcgaatttttcaatttacatattatgtttgatttactatgcaaaattccgaaatcatttttcagcatag

SEQ ID NO: 283074 - DNA, 934 bp, Zea mays
tttatccctccgagcttaggagattggccctgaggaaggacgagatccacagcagccttcgtggtggctcctaccaccagatgaggaacggttccagggagttcatgagcaccctcgccaattacaagatccctatcgctgtggtcaccacacgcccacggaaggttattgaggaagccattgaagctgtaggcgtgcgcagcttcttcgatgcggttgtgacagcagaagacgtgtaccggggcaagcctgacccagaaatgttcctgtacgctgctcagcttctcagtttcatcccggagaggtgcatcgtgtttgggaactccaattcggcggtggaagctgcacatgacgcacgtatgaagtgtgtcgcggtcgcaagcaagcacaagatctacgagcttagcgctgcagaccttgtggtgaagcaactagacgagctatccgtcattgacttgaagaaccttgctgatattgagtccccggagtttggcatggaacctgaaccagagatggaggaggagggggaagtgcccccaccatcgacgtctgtgggtatagatgatctattctggtaagagaccagattgtacatttgattgattcctctccagaacacagatgtattgttgtcaactgtcatagtgatcagaaagaagggcttatcatccttctgtaatcagtagaatgtgatatgtaaaaaatgttgtctagagctcacacacctgtatatatatactcagaaagaaagctgggaacctgaatatatgaatcagaacatttgaatctgcagttcctgaaacaatgtaaccccacaaggtttctgtcgccgaatcagtattctggatgctgattatattgttctctgcagtcttcttgccaaatattgtgattgaaattgcacttggtggaaataattagagtttgaatcacc

SEQ ID NO: 283075 - DNA, 557 bp, Zea mays
  unsure (1)..(557): unsure at all n locations
ttttcgcgtccgccactactcaggactaaagcagtagtgtactcgtacaattgagccgcaagaaaagcatcgcatccatcgtcttctccatcagtccatcccgattcccgagtaccattcgattctatattccgccattgttgatcggctcgctcgccttccttggttcatcactagtaacggcaggaaaggagccgagccattccaatccaagattgattcagtgctggccatggagaaggagactccgccgccgctgcatacggaccaggagactagtgtttcatccgagcaacaacgtccacggccgcatctctccatcgacatcccggcagcatcaagcctgccggcagatcacctgctcccgatggctacggcgacgcaggccggcaccagcatcaccccgccttccaccaggagggggcaacagacaagcagcaacatcctcagcacgcccgctccttcctccagctctagcangccaagcagcaggccgcctctgcgctcgccgtccttcatgctgaggcagacggtgaagagcctgctgccgtggggag

SEQ ID NO: 283076 - DNA, 510 bp, Zea mays
cggtcttttgggcgacggaatctcacctgctctgctcctcagccccagcccaggccttcgctctcgctgccctgagccctccgcgttccccgcccgccacgcgatgccggcgtgggccgaagcggcgctcgtgctcgcctcaccatcccccgccaccgcctcctcgaccacgtcatcatgtggcgccaggccgcgcgccgccgtggggtccgtcaggctcttctgcaagggattcccttgtagcattcgttccaaagctggattccagattcataattaccgtacaaggatgtttaagattaaagcaaaagcagaatctggtgatggctacacacggcctgctccacttagatttgaatctccaagtggccagcttctgattcaaatactacaatcacaccctcagcttatccctgcacagttgatcagcaacttgaaaatcttcaatcagagaaatctgcccaaagtgaagaagcctcaaaggtcctcaggacctcctctacaagagaa

SEQ ID NO: 283077 - DNA, 487 bp, Zea mays
ggcgttacttttgtctgatcaccttcagatcctacctatacagcacgacatcatgcaaaacggcatttacatcatggatgaaggcagggcctgaacttggccacctttgcgacaatctaaagctggacaaataggccatcttcatgtgacgtgattatgtagttgtgtcacttccttggacacattcacccagagtttcaaaaaggaaggagactaaaagaacgggtagagaggaagcagtggttatgggagttgtggacaatggaagagcagcttaggctgttggaaagtagggcattgtactatacttgtcggtgttaattgacaccagcaagcatgtatatattgtcaggcgtattatagatgaacatattagatatttctattgtagtattttctcaaattttaaaagaactcatctcatgcagttcaaacaagaggtaggtttctccaactgtcatgggcaaagagaagatggtaaactgag

SEQ ID NO: 283078 - DNA, 549 bp, Zea mays
cctttttgtacgggatgacatagctggtttcgacagtggaggctgctatgagtcctgaatttctaacccggtctatataacacagttatgatatccagaaggcagacaattgattcgttccgatgacttggcggattgcacttgatgttctataatgggaatggataaaactactcaaggtcttgagttaggtggcggtatcaactctccgaagccatattgctattggagcacaactcaagacactactgtgcacaaagatagtacaccagaggcatattccaccttttctatttccaactcaaaagcgtcaaaaaggaagcaaggtgccatgtctggagcaaaaggtggaaaccctttactcactgtgggtctaggctgctcaccaagttcatcgtataacagcaagctaaggtctggcactgcttgcataacatcatcatctctatctaaggagattgatgaagagtcttcaatagatcttggccttaaccttgggttgtatattggaaatgatattggacactgccaacagaaatcccatgctgg

SEQ ID NO: 283079 - DNA, 519 bp, Zea mays
ataagtataatgtcatcatgaccggtgttatcactgtcaaaaaaaatctagctatatattagagctacatattaaagtaaaaccatcttgcctgattctctttgtcatttctgtagtgttaaaataatcataattgatttaatttaagactctacatagcacttatcatcgtaacatttcaaacaaactcttgagcgcattttgtatagctcactcattctattttataacagttgcttcaaactcacaccgataaaggtaaaaaaaggttgtgcctcttcttcagtctcctccaaaaaaagggttaaacaaggatcactgcacatcaacaattctaccaactaaaaggatttatcaatctgactatagcccttcagccataatactacccgctatataacttttgtgcaaatgcttccattaatctcgaaatatgtcctacatatattagcatatgttagtgttttgtaacttgggatagtgcatgaatatatagttagggagtgtttgttcaggtat

SEQ ID NO: 283080 - DNA, 557 bp, Zea mays
  unsure (1)..(557): unsure at all n locations
cccacgcgtcctcccacgcgtccgagaaaactgatgcactgtcattccttcggactccccaaatgagttcgcttcttcagctaagagatatcactttatctggtggaattgatctgaacaagtcagttccaagagcagttcgcacatcagtccgatcattgaactcatctagggctgtttcccctttctctcgcaagcctagtccaccacgctcaaccacaccagtcccaacaactcatggccggtcgcgtgctaaaactgctgctgatagtcttgcaaaaactaatgagatgttaagtcaagaggttgaaaggctccgtgcacaggttgacaatctaaggcgccgttgcgagcttcaagaacttgagttgcagaaatcagcaaagaaagtacaagaagccatgtcaatggtttcagaggaatccgcaaaatctaaagctgctaaggaagtaataaagtccttaacatcacagctcaaggatatggctgaaagactacctccagatcagggagcctatgatggtagcgaagcanaacangcacatgttccaaatggc

SEQ ID NO: 283081 - DNA, 571 bp, Zea mays
gtcccgttccagaacactcgcgctctcgcacgacggcacgagcgcgctactgccatagtgccatggcgagcggcggcggtgctgcggcgcggatggacccggaggtagcaacagagctggtcgcggaagggtgccaccctcctcctcctcgatgtcccccagcgcaccctcttcggaatcgatacccagatgttctctgttggacccaagttcaaagggatgaagatggtgccaccgggagcccatttcgtctactactgctccccaaacaggcatgggaatgagtttgcacctactgtcgggttctttcttactacacaccaatctgaggtgattgttcgaaagtgggatgtgcaagaggaacgattaatcaaattatcagaagaagaggatatcagatactcagaagctgtaagacattttgaaattgatgatcaacttggaccatacaatttagattcttatggagattggaaacaactttcggactacttgtcaccgaatgtcattgagcgtcttgaaccaatttgaggagaaatcacaattgcgtgggagtcatcatggatggata

SEQ ID NO: 283082 - DNA, 661 bp, Zea mays
tatgatatttctcactttgtttctgtctctgctcgagcaatcgttaagtcattccaaggttcctggagccagaacaatcgtgcaaaatctgttttgcggcagcgtatcacatgtaacaaggtgctcgtcatgtggaaaggaatctgcagcatcttcaaaaatggaggacttttatgagctggaattgaatatcaaaggtttaaataatttggaagaaagtctgaatgaatactttagcgaggaagcactggatggggagaatcaatacttttgtgagtcatgtcaaaaaagggtagatgccactcgttgtataaaacttcgatcacttcctccagttgtcaattttcaactgaagcgttatgtattcctcccgaagacaacaacaaagaaaaaaatttcttcaacattcagtttcccaggacaacttgatttgggaaaccgattatcagagccttcatctagttgcacttatgccctgtctgctattttaattcacaagggtactggtgctaacagtggacactatgtggcacatataaaagatgaaagcaatgggcaatggtgggagtttgatgatgagactgtatccaaactttggttgcatccttcttgtgaaaaaccaggaaaggcatcaaacaaagatgatcagaagtcccaaaat

SEQ ID NO: 283083 - DNA, 537 bp, Zea mays
cggactcgtggtccgcacgctggtcctgcccgtctcccgcccccgccggccgccggcgactggccgccgccatgggctccgaccgcgccgagctcgcgcgcctctgcagcgcccgcaactggtccaaggctatccgcctcctcgactccatcctggcccgatccccctcctccatccacgacctctgcaaccgggccttctgctactcccagctcgagctccacaagcacgtcgtcaaggattgcgaccgcgcactgctgctcgaccccgccctgctgcaggcctacatcctcaaaggcaaggcactgtcttcattagataaaaaagaggatgctctagctgcttggaagcaaggatatgaaattgctgtccgtgacacaacagacttgaaacaattgcttgatctggaagaattggtttcttctgttaaaatttgcgggacaacccagtctgcggaccatgtcatggatgcatcaacttgtgataccaaagttgttatctcagaagatcgtgttgctgacacgtcgttcgctgcaa

SEQ ID NO: 283084 - DNA, 478 bp, Zea mays
ggatgttcatgtttggtgatagactggacacggacatactatttggccagaacaccggctgcaagaccctccttgttttgtctggttgcactgccttaccagaagtgcaggatgctcgtaacaatatccatccagatctctacacgaacagcgtgtatgatctagttgggttactgcagaagtaattctccttggtcgcattgcagcgcaatctcagcgcgctttggataacctgtgcttacatgaagcccttgtgcttgaaacaacaattttcaactttctttggggtaacctgtttgacagtaacaaaatctttcaagtggattcctacaaattagaccaatttgacacccttgtaagcgtgattgtaaagctttaaatctggcaacttgattccgttgccggaaaatatattggttggagtatggaattgtacagaatcgaattgtaataaagcaacgtgttatactttgttgct

SEQ ID NO: 283085 - DNA, 600 bp, Zea mays
ctcgagcgttcctcaagaaagttgagaaatctagtgtaatcgataatgtcctctcatgggctgatttcaaacttagcaaagaattaaagaagactgatggaagcaagaagtcaagaatttctggcatccctaagcttgaggatgcaaatgaagctggtgggaaggactctcacaagtgcaccttgattctgactgagggtgactctgcaaaagctcttgctatgtcgggcatagctgttgtagggagagattactatggtgtatttcctctcaggggaaaactattgaatgtcagagaggcaaaccacaagcagataatggacaacgctgaaattcagcacataaagcaaatccttggtttgcagcatggaaagcagtatgagagcaccaaaggtttgagatatggtcatctcatgataatgacagatcaggatcatgatggctcccacattaaagggttgctgatcaacttcatccactcattctggccgtctcttcttaaagtccatcttttttggttgagttcattactccaatcatcaaggcaaccagaggtcaaactacgaaatcattttacacaatgccagagtattgagaatg

SEQ ID NO: 283086 - DNA, 554 bp, Zea mays
  unsure (1)..(554): unsure at all n locations
cccacgcgtcttcccaaaacaaatgccactatgcggctgctagaccgtcgtctcctttcctcccccaatccgccatttggcttcgctggcggcggcggcggctggggaaggcaggaatcccggcctttgcttgcgcgccactccgggcaccggctgcagctcgcagaaatggttagccagtagtatgtatgtgcattctgtatatatacaagagagcaatcatttctttggaaaatggcacttccactctgattgttaaatagggtgccttaccctgtggaaaggggttgaactgtatctgtaatctgacactccacatctccagctgaacaaaatggcctccaatggtaatggaaatctcaaagctgatattcaacaagtagagtcaacagcttcggacaatgttcaaggcgcaacaggcgtcaacactcttgccactcagggtgtttcacgacatgaaaagccgtggagcgggtttagggatttctggaatcgccttggtactggccccaagttaaagaagctnggtccctccacttcgtcaagttcaacag

SEQ ID NO: 283087 - DNA, 687 bp, Zea mays
gaaatttcgcgaatctgcaaaagtagatgccaggcactgggagcagataaatgagcggcggtataatcttgatttggttcgtgatgtgatgtctacagagctaagagcaattcgtcaagacaaatacggttggatattgcacggagaaagtgagtggcaaagccagctccaagaacttgtccatgagagaggtatttttcctatgcggcaaccatccacagaacctgagtggcagctgtgtggtgttgaaggaccatatagaatgaggaagaaacttgagcactccaaatttaagatagatactattcagaatgttctaaccagcaaccttggatcaaatggtggtaagattatcaataaagaggatggagaattgttgttgacatctgggtcagacacaatgtcaggcttgaatcttttgacctatgacactgagcagagggatcttgatgctgtcgagttttcgtcattcaaagatgatgatgacatattcaaaggaggaagcacaatttcaggtccaattggctggactgatgataaaagcagcgttaatgagcagagccttcattctgcgacggaatttggagcaaaatcaagtttcctttcttttcacatgactgagagtcaccagggtaaatctgaacttagttcaccaaggagggcaccttcagtcaaaggtactgatgc

SEQ ID NO: 283088 - DNA, 662 bp, Zea mays
  unsure (1)..(662): unsure at all n locations
catctgcctgccccccctcggccgccggcggcggcgattcgcgtggtagccgccccaaccggccgaggttgcatagaggtgctggtatcttactctgcttctggttatgctatctgcctatgaccccagcttcccaaacttctccctgcttcttgcccctggttggtaaaaatctgtaacaactgctgccctgactgcaaaagacgcaactatgcgtctttcttcttctcttcaagatttgccgaccttcaccagaattgatgctttggaaaggggttctagcgtaggcagtgatctgagctcagggcgcccaaaacctgtccgcatgcttcaaagagatggtgctgtcgcaagcttttcaaaagaaagaacacccccctcatcgccgacaaatagaaagaaatgcatgagagcagccggatgtgctattgcattgatcttactggtgttctttgcgtatggttcatggagatattttcatgtgttcctctctgaaggaagatctgaatactatgttgctcttgattgtggcagcactggtacgagagtttatgtctatgaatggcatattaatcataatgacgcanatgcatttcctattggttttgaacctttagggaatgctcccaagagaaatctggtaaataacccgacatatcagc

SEQ ID NO: 283089 - DNA, 633 bp, Zea mays
tgtgtgtgctgtttgccttccttatgctggacgagcacaagtacagatctgggcataacaagatctcatcgccgctggtccccgtgctgctgtcgtgggcgctgggttatatagttgcgaagcttttcttcgcagtggtggaggtgtcgatcgacacaatggtcctgtcattctgccaggactcggaagagcatcaggggaacgcgcggtatgctcccccgctgctgatggagacattggacgaggagagcgagttgcgaaggctgacacaggggccatgatcgatcttccaaatacgagacactgaactgaatggctgtgatgttggctgcatgtcttttttatatgaatcatccctggggttgatggatggagctataggtgcaagcatgtctttttatatggatcagctaaatacgagtaatagaatagaatagggcttagtgctggaattgaaaccccccgtctgtaatgtatgttcggctttatttaaccatgtcttttttgtttatatattgttaaactgtgtgtggcccggcaccactgttgggctgccgcctattagggttaaagttgtgagtctatatattgtatcctatctcctatcaatatatcaaccccttttcatgattg

SEQ ID NO: 283090 - DNA, 845 bp, Zea mays
cccacttcgtccgcccacgcgtccggccgtctggccgggctcaacccctgcccatcttcctggtcgcgaccgcccagctccctgctcggcgccccaagctcccctgtgcgcgctcagcttgaagcctgtcctcggcgcccagctttccccaagtccggccatcgcctcactggtcgcgcgtccgaaatccctgccgagcaactcacttcagcccccagctcggatccgctgtgagctcggtccggccctttgctgcagctcactctttctttgtttgccgtgcgcagcgtgtcgagctcccgcatcgccggctggttgtctataaaattcgcctagccacggcctcgacaaactgcgaaactccctcgccgtgggctctggcatcggctaccgccgattctgccattaagttcgcgaccacaccttgttctgttcgtctcgctgttggtgatttctctacacttcaaatccgtgccgggccgggccgggccgggccgggccgggccgtggctcgtggctcgtggctcgtggtagatcggaccttggtccgaatattcctttcaaacggttgcgcattttgcctggagcgatgaccgtcataataaccgtccgtttcacgttattatggctagtaacggacgtcattactgtcgtcagtttccagttctaatgcgcgaccgtttctgtccgttggtcttctccctccttctgaccgcctataagaatggagagggagggctcttccagacacgcgaattgcctcacgcgaattgcaagcaacacattcccgtcccaccttctgcgagcacaaaaagagtgggagagcaggccttcgaaatcaccga

SEQ ID NO: 283091 - DNA, 419 bp, Zea mays
cccacgcgtccgcccacgcgtccgcttgagtggaagactgcatgcttgttgctcgctgcatcaagagcatccagacatatcgatcgagcgcctactcctggcggtggcgggaaatgtaacattggatactatacgcccacagacacagtttcttggtagaaagatcggcagatcatggcagtcaaggagttcggaagagaagtagtaatgagcatggacaaggtgaagaggggtggagaagcgctcacggccgacggagccggagatgaagagaaagatgacgcggtgctccctgggttccggttccacccgaccgacgaggagctcgtcacgttctaccttcgccggaaggtggccaggaagccgctcagcatggagatcatcaaggagatggacatctacaagcatgatccatggga

SEQ ID NO: 283092 - DNA, 502 bp, Zea mays
cccacgcttccgaaagggtagcagtgatgctctttatgagaatctttgaggaagagagatgaccccctaacacatcaaatccaaacttatttttgaactattatttataagataatctcatttgtcccagttttaccgagcaaaacttcaaacaagtacttaaaagggactttcctgtttatagatgccactttgataactgatgctgtctcaatattattgtggccttctggtgcttcaccattagttttatttccaaccatatgataggcattgaaaggacaccagctggcttagcctttcggtgactctaaacaccacggcactttcaggtgacacttccacattataaacattgttgtgagaaactaggagtgcacatcagtagccggcggtaggaatgtaaatttttaaattcgcaagtaactagtagtttgtaatgaagttttctttatacctatttgtggatttgaagatgtttgtaacacaagcttttgtgctt

SEQ ID NO: 283093 - DNA, 664 bp, Zea mays
  unsure (1)..(664): unsure at all n locations
ttcttttttgttggatggcatnatggcccttaggaatttttggcattgttgcctctggcataccaaatggcgggcaatggaggcttcttttgattttttcagtcagtttattttggactggagctgttcttagcaatacagtccatgtcattgtctcagggatggttttcctcgttctcattcatggtggtccagctgctgcaacaatgcccccaaagcctcttctgaaatctcttcagtatgctgtgacaacttcatttggaagcatttgctatggatcactttttaccgctgctattaggactttgcgatgggagatatcgtggaattcgttctaaaattggcagcaatgagtgcttgctatgctgcattgattttttgtttcatattgtggagacccttgctcgcttcttcaacaaatatgcatatgtacagatagcagttaatggacagaggttcaatcgctcagctagggatgcttgggagctgtttcaatccacaggcatcgaatcacttgttgcttatgactgttcaggtgctatccttctaatgagcaccattttaggtggattgattactggaacccgcatgggcgtttggacatatttcaaacaaagtgataaagctgttatggttgggtcaacatccatgctgatgggtatga

SEQ ID NO: 283094 - DNA, 440 bp, Zea mays
acaccccctctactgctccttccgtttactccctcctgcaaacctcacatccctccctctcctctcctctccctcttcctctctacgccccaaacaaacaaagctaaggaagaaaccgagaaatctccctcctgttgtcttggcggtgaggcaaggtccaacggtgaggatcatgtctgcggcgtgggaaggcgggaaggagaaaggcgcggccacccccgcccccgggggcgcgtgcgagctgtgcggcgccatggccagggtgtactgcggtgccgacgaggccacgctctgctggggctgcgacgcgcaggtgcacggcgccaacttcctggtggcgcgccacgcgcgcgcgctggtgtgccggggctgcgcgcgccccactttgtggcgcgccgcgggcccgcgcctcggcccctctgcctccctctgcgaccgct

SEQ ID NO: 283095 - DNA, 442 bp, Zea mays
ctagattttaaagaaaaacgaaaaagaaactcatgatgctcaagaagaagctaagcgagccgaagaagctgccgagcgcgcaaggcgtataggtattatttttgaattttagcttcggtgtttgttttctagcttcggactaacgatttgtttactacagctgaactctcactgctacccgagccatacgacccccaggccgatcccgttatgaaagaggcgctggatgtgatgagtgttaccaataccatcggcgacgaagtcatcgattgactgctgaatgaggccactgagaaaattctcaaagaagactaggcttttgatgtaatgatacaatgtaacatttgtgtatgaaacaattatcaaacatgtatattggtggtaatatatttctttgcgatgcatggaatttacccacattccaattttgaggccttcggcg

SEQ ID NO: 283096 - DNA, 657 bp, Zea mays
cttggtctgattcctcttcttccgcgccgcctgtccggccggcagcggcagccatggcctcgaacaggagcagcagcacggttgtgggcgagatgcagagcagattggaccgggtgcggcgccagctctcctccacctccacccgccacctcctccagggccctctcttgaagcggtccgacacgctaagaaagtggaatgagcgctgggtcatccttgatccagcaactggaaagatagaatacaaggtcaataggagtgacaaagatgttaggggagtagtcgtgttcgattcaacaagcacagtgactttgtcgcctacgaactttcatggactggcaaaatacgatggatgctgtttctatattggaactccacagaaaaaggaatactttctttgtgcagaaactcccagcgctgcaagagcatgggtatccactttacatgcgactcagttggtgctacaggctcataaggaggccgtgaattcattgggtgagaatggtcctgcaaaattgggaacagttgcaactgttgtggctgtagccaatgccactgcaattgaagcaacaaaggaggtagaagccgcaatgaagatttccctacgggcagctttgggctcaactacacataaacttaccaaaggtcaattagatg

SEQ ID NO: 283097 - DNA, 526 bp, Zea mays
aggttgactggagcgaaccggtcgatgctgaacgccgcgtttgtggcgaggagggagcacatatacggtgaagcgcctggcgtggaagttcaggggaaatcagacgattctcgtcgacggcttgcctgtggaggtgttctgggacgttcccagctggctctttggatcaacggcgagcaacgcggtgttcatgtttcagacatgccaggcgcctgagaagtcgctgccatggtcgtactcgcagatttttagggagtcccagttgcaaggtcttggtttctcgctgatcctgcatgcgtggaagcttgaatagggctctttttttttttgcaggatcacaatttgcttctgcacctgcccccttttctttagtgctagcagaaaacgttttgttgagtctgagtgcctgttcatcagaatgctatggaggctctccaatatatgttctttcgtttcattttgtttttgctttgccatctcttataaacactttgtttggataaaaaaaaaaaaagaaggaaaaagt

SEQ ID NO: 283098 - DNA, 458 bp, Zea mays
aaggatccgtgtctcgagatacgagtcgataagaagcccgtgatgcaggtgaagcgcctggcgtggaagttcaggggaaaccaggcgattctcgtggatggcttgcccgtggaggtgttctgggatgttcacagttggctctttgggtcaacggcaagcaacgcggtgttcatgttccagacacgccaggcccctgagaagtcgctgccatggtcctcctactcgcagaattttagggagtcccagctgcaaggccttggtttctcccttatcctgcatgcgtggaaggttgaatagtctgttcttcttcttcttcttttgcaggatcacaatttgcttctgcacctgcctcatttttctttgctttgctgctaaccaaaaaaaaagacgttttgttgagtgtctgttcatcagaatgctatggcggctctccaatatatgtcgttctggtttgtttt

SEQ ID NO: 283099 - DNA, 474 bp, Zea mays
ggtcaatgctcaagttcatcctttagcaaaatatcccacttttctgagtcatcagttgtaacggaggccaaaaaacagatttcagtgcgatggtcaatggtgacatgcaatgacatgagtcaagtgcaactgtcgagaagaaaatgcacgttaggtgagatgctctccattaaggaagcaaaggaagacgaggccaccactgggatgttttatgtttccagcaaccagtcatgtcccctggagaatgaaccgactgacacgttctacaaatgtaactacttctagaaaaaatggtgacaatggggagaggatcttcgaatttgccaagatcaaaatctgttccagtgatttcatccacgtctgataacatgacggtgaacatgcaagcttcaaatcctgagagctgcaaacttaaagtggctggtgtgtcaaataaaagaaaatcagctttcaagggaagaagtttaaaatttt

SEQ ID NO: 283100 - DNA, 401 bp, Zea mays
cttgaggttgctcggctgctgcatagacgaggacgagaggatgctcctgttcgagtacatgcacaaccagagcctcgacacgttcatattcgatgaaggcaagcggaggctgctagggtggcagaaacgcttcaatatcactctgggggtcgcgcggggtctgcactacctgcacgaggattcgaggttcaggatcgtccacagggatctcaaggcgagcaacgtgttgctggacacgaacatggtccccaaaatttcggacttcggcattcgcaaggatgttcggaggtgaccagaccacggcatacacattgaaggtcattgggacataccgctacatgtccccggagtatgcgatggacggcgtgttttccatgaagtccgacgtctacagcttcggc

SEQ ID NO: 283101 - DNA, 404 bp, Zea mays
aacacaagaacgggaagcgtgcatgcacacgcacgagcacgaacctgagctgtagcgccctctcgctcgctccccgcgcgcaatggccagcgtaccccaggtcccatgcaaaccagccatgcctcacggcggccgatccctacagctacaggccccgtgcccgtggccgtgcttctcgccgccgccgccgtcggcctcctcgcgctgctgccgtcgctggccgaggccgtgtgggaggtgccgcacctcttcctcctcggcgccgtcatctccttcggtgtcttcacgcagaggaacagcgacgccgacggccgcgccaaggacagctcacaggcgtggagcgcgcggagccaccccgatgcccccctcgtcgtgatcgcggatcacacggtgctcagcgacga

SEQ ID NO: 283102 - DNA, 768 bp, Zea mays
caatatgctgttaaatcaaatgcgatctgaggatggggatccagaaaagctcctccggcattcattttatcaatttcaggctgaccgttctcttcctgatcttgagaagcaaatcaaggaactggaatcagagagaaattccatggtaattgaggaagcggagagcttgaaggattattacgatctcttacagcagcacaggagtttaaagaaggatgtccatgatattgttctctctcccaaacatgtgctgcctttcttgcaacctggaaggcttgtccgcattgaatctagtacatatgagccaactaacttttccattgatgaaaatgtcacatggggaattataattaacttcgaaaaagtgaagtcacatggtgaagataagaggcctgaggattctgattacacggttgatgtccttaccagatgttctgtaactaaggacaacagtggtaagaaaacaatgaaggttgttcctctgaaagcgcgtggagaaccagttgtagtttcgttgtcactttcacagattgatggactaagcagcatacgaatgtacatacctaaggatcttatacctgtagaagttcgagaaaacaccttgaggaaagttgaagaagtccttttaaggtttgctaaagatggtgtggctttattgggaccagaagaagatatgaaagttcaatcgaaatcatttcggaaagctaccagacgaatagaagctctgagagcttgtggaggaggacgatattcgtaactcttcacata

SEQ ID NO: 283103 - DNA, 793 bp, Zea mays
gcagcagcaggcagccccagaaatcgagcaaacacaagctgctccatggcctcaccaacccgaacaccatcgcctccgccggcggtcgagcccatcgcgccttctctctcttcagaacatccgcctgtcaacccctcctgtgacggatccttctcgccggagaacccagcgccactccacctcctccccctgctactccgcatcctcatactcccggcgatagctctccttcctcaactccgcatccctcggcgccacagcctcttccatctccgcctcctcatactcccgacgatagctctccttcctcaactccgcatccctcggcgccacagcccccaccatctccgcctccgccgagcgctgatgcttctcctcccctttcgcgacagggcgaaacgtcaccgccgcgcccatcgccccctccctcacccgctccagtatccccgcctactccagcgccgggcgtcctcggaagccaagtcggagcaggaggaggcggaatcggctagcgaatcggggagcatgacgctagccatcgttctagccaaaactgaagatgcaacgccgccgaaggcctcctcggccgaggcgtccccaaccagatcgccgcagaaggaatcggccgtcaccatcgcgaactcctctccgccgaagacctcgcggcgatggaggctaaggccacgccggacaaggttacacctccgagcgacgctgggtccctcgccgccgccgttactaccgttgggggagtcagtggcggcgtggggtccaagaggtggctcctaggcgg

SEQ ID NO: 283104 - DNA, 763 bp, Zea mays
ttctacgcgtccgggggaagcttcatcggccggagcaccccgcaggagcacggcagcaagaagcacaacctgccccagcagcagcagcaggcgccccccgcgcctgcgacgctggtgacggtcgacggcgacggcgagctcgagatggagacgctgctcaaggcgtcggcctacatcctcggcgccacgggttccagcatcgtgtacaaggccgtgctcggcgacggcaccgcgctggccgtccggcgcatcggcgagagcggcggcgccgaaaagctcaaggacttcgaggcgcaggtgcgcgccgtcgcccggttccgccatcccaacatcctccggctgcgcggcttctactggggcgccgacgagaagctcctcatccacgactacgcccccaacggcagccttgccaacatcgcattcagcaggcgcttcgggtcgtcgtcgccgctgcacctgagcctggaggcgcggctgcggatcgcgcgcggcgtggcgcgcgggctggcgtacatccccgagaagaagggcgtgcacgggaacctgaagccgagcaacatccttctgggcggcgacatggagccatggatcggggacctgggcctggaccggctggcgtcgggcgaggcggcgccgcactaccgcgcgggcgcgtcggcgcggctgttcgggagcaagcggtcgatgcactcgacgagcagcctgccggacctgtcacagatgcccgggccgggcgcgagcccgtgaaggacggcgtccgcga

SEQ ID NO: 283105 - DNA, 431 bp, Zea mays
cttccaaggtgttcagattatgatgatgttcctgtgaagggcgtcccatctaaagtacctatcttttcagacatgctgaaaagaggtacctcattcaattggtctgagacagggcaacaaagctttagaattatgaagaagaaactgcaagaagctacttggcagtaaagatgggtcttgctaaggaaactctgcttggtttgcagttttttttatatatacaacagcagtgagctgtactcaatcagcaggggaagagcaccccgcgggcattgtttgagaagaccccccccccctcttgccctccacacacacacacaaagtaaacagtgcagaccctatagcatcacacccctaaccctggtcactacccacaagtaggtctgcactgcttgtgcaggttgactggcacctatcacggattggctggc

SEQ ID NO: 283106 - DNA, 538 bp, Zea mays
  unsure (1)..(538): unsure at all n locations
ctggtctatatctatgtgaccatatcgaccagactcgtacagggcgcgagcaattcactagtaccatttcaaccaccgtcaaccagcaggcgctccactccttgtcctcccattggcgcctcgtagactgctgctctggtaattggatcttggatccatctccatgggtgcctccagtacttgcccttgccaccacttcagctcgtcttccatcctcaccaagcgggccatcgccttcgtgctctacgccctcgtccccctcgccctcctccactacctcctatctcttcctccccgtctcccctctcctcccaccaccggcgccgccacctccccgtcacggccgcagcaggcggaggaggctccggcagcgcggtgcgattactcggacggggagtgggctgcggaccgcggcaggtcctcggtacaacgggtcgagctgcggcaagacgatcaaggccggccagaactgcgaggcgcacgggcggccggacacggggtacatctactgctngtggcgcccgcgcgggtgcgcgct

SEQ ID NO: 283107 - DNA, 470 bp, Zea mays
gggtttgtccatggcggcgagccgccgcctcctccatctcctgccgcggctggagctgtgcctgcggtcccgtgcgcttagcatcccctcgtcttcgcgggcacaggggatggctcgttgccggcgcgagcctccgcgtcggaagcttgtgacctgccgacaaggtgtttttgaggaggggaatgcagcgagggataaggccgtgccgattccagataaagtgctccgtcattgcaagtacgccaatggcagggccctagacctagagcccattgaaaagaacttcgccaacgagtctatgcaattttctttcgaagaggagagtgacgatatggtgggcgaaattagcgaaagcgtggtgcgggatgtggagaaggctgcaattgaattgcttgctgccagagctttcactgtctctgagcttaggaagaaactacgaagtaagaagtatccttttgatacaattgatg

SEQ ID NO: 283108 - DNA, 793 bp, Zea mays
attcaacatgtgcaatggcggtcaagacaatcctttcaactttggcatttatgagcaagcactggtctctaaaatacttagtccaggaaatttcatctcaaaattatgttattgcttctggtggggattgcaaaatctaagtacacttggtcaagggcttttgacaagcacataccctggagaagtcctgttctctatagcaatatgtgtccttggactaattctttttgctctcctcattggtaacatgcagagctacctacaatctgttgctatacgccttgaagagatgagagttaagaaacgcgatgctgagcagtggatgcatcaccgttcactgccactggacatcagacatagggtgaggaagtatgaacgttatcggtggttggaaaccaggggagtagacgaagaaactttggttcaaactcttccaaaagatcttaggagggatatcaagcggcatctttgtttgggcttagtgaaaagggtgcctttgtttgaaaatatggatgaacgattgttggatgcaatatgggagcggttaagacctgcactctacacagaaaatgagttcattttgagggaaggtgacccggtggatgagatgcactttattcttcatggttgtttggagagtgtaaccactgatggtggacggagtgggttctttaacacggttcagctaaaggaagggtcgttctgtggcgatgagttgctcacttgggacattggatcccaagtcagctgctaatttttcaagttcgagcaggactgttcaggcacttaccga

SEQ ID NO: 283109 - DNA, 277 bp, Zea mays
cagaaactgatgggtttgcagctccacttcttaggttcaggacttcacatttaggttgttctgtgaattgggttcctgcacttggctgttgaaatatgcattctagctgttgtaggttcacaagattggctgtcatcattatatgttctacttcagagcgtgttatgcctgccatcttaatttccatttccattcgacagtacacttggtcaagggcttttgacaagcacataccctggagaagtcctgttctctatagcaatatgtgtcttggact

SEQ ID NO: 283110 - DNA, 484 bp, Zea mays
  unsure (1)..(484): unsure at all n locations
gtttccttcatctttacatagtcaagtttccacaggaactattgatgagaataacagcagtttcaattttggtgatagtgccattggatccatgaaaaggaaaaccgcagtagttgccggaaaccatcacattcttcatggatttgctggctcaagttcatctgttcatgtccctcagaatcctgtgcatgggccatggaatccttcatctcaatcaaattgtttacccagttctgcagcttcaaacctaccagaataccacaatagtaatgggtggccgctcttagaagaatcttctgcaaatgcttcaaacagtttcacttcagtggatgcttgtccagagttggtacctcatggtaacaatttatatccagcttgtcacataatacagtgcaatacatgggttccacagactgcangtcatggaataccacaggggggatatggtaatgtcatggtcaattctccaggaaccgtagacatg

SEQ ID NO: 283111 - DNA, 565 bp, Zea mays
gctgtgggtcgccgcaatgcgcacggcagccctcttcctcgggaagatttcaaatccccgcggcctcttccatctacagctcggcacggcactccggctgcccgaaaaatttcgcacatcccagattcccgcccgctctggttcgcgccctcgtctggttcccttgccaacccggtcattcaacgtcgcagccaccccgcgcggctagggctgggactcgaggcctagggtttggctgtaagtttggtaacacgatggcgggggccgcgggggagagcagcggcgagcggcaggggacggtggagcggcggatgctgcggtcgcggtaccacgccgtgaagaacatcatcagcgatgagcgggatgagatgtcgagggcggattcggacaggttcacagccatcatccagcaggtggattgcctacacgagctcgtgcagaggcctagggagcaaatagcggatgcagaagctctgcttggcattacaaacactttgggtacttcggtgaggtcccactcaagtgaaggaatcagcccttctgatttcataaccagcttactcaa

SEQ ID NO: 283112 - DNA, 599 bp, Zea mays
ggtttttgctcagggagcagcagatgcatagtttgtataatataattagcatagctaaatcatgatcgtttgggatttaaagctgagttgaagatctgatttaagtactattcgttgaaaggtttaacgcatgaacctaggacgcgcaatgacaagcctgatagcctgaaagctaaaaggaatggtctctgcaccatttataaggtccatcccatcttgtttacaggccgcagatgctttattcctgcctatgctagactgtgaggcacctagaatgctcaggagtcgccaactgatggccttccgctttctccatcggtacaattgcgagctaatgctttggattaaactaatcacggtggtttgttcggggtatttgtgcgcctggctgtagttaatcatggactaaaagcctgtgctgtgcacctctgcccgcccccagatcgacactttgggggtatggctacatgtatagtcctaccagatcgtcggcatattgtgttctctttttgctgtatactagtactttgtaacatgcaagcggaggctacttattcagcgccgttcgctaattgtgtttatgaaatgttttgagctgt

SEQ ID NO: 283113 - DNA, 491 bp, Zea mays
gtttgtcacctgtggcgaaggatgtggacttgagatgctcttgcaagtacacgctttgtggctggaatagtggacttctttaagatattttttaagaagcagaagcagctctcagagcgctggggtgcccatggaagacaagaactagccgactttcttcccaatcatccaccatgatattgccaacgaggtcccagcaaacgctcagaagttgcagtatcttgcgtttgcgagctggcttggtattgtgctttgcctcttttggaattttattgctgtcatagtctgttggatcagagggggagattctaaactatttttcctggctaccatctatggtatgcttggcatccctttgtcctacttgatgtggtatagacctctgtaccgagcaatgagaactgacagtgctttcagctttggatggtttttcctttgttacctgctccatattggtttttgcatatttgctgccattgctcctgcagttg

SEQ ID NO: 283114 - DNA, 453 bp, Zea mays
  unsure (1)..(453): unsure at all n locations
cccacgcgttttcttacgcgtgggttttaatataaatgataaacaaaatgacttatctaaatgtcttctaaagacttacagctccagctccacggttttctggagcacttaatgacctgctccaccaactccaccaaattttctggagctggagctgtcccaaatagggtcttagagagccggatagattggcgagttggatggctagtctgttagagagatattttgctattaagtagctaaaatttagcttgacaagtcatttggctagtctcttagagatgctctaactggattactttttgcacaccgccttttattttcatgttattgtgtgtggaatacctgacatttttttaaatttatccccttttttttactttgactgtcttaggtgatgagctgtaaatgcccnaaaaaaaaaaaaaaaaaaaaaaaaaaaaaaaaaaagaa

SEQ ID NO: 283115 - DNA, 940 bp, Zea mays
gtcgctgctgccctgttgctgcgacgactccgtgattccctagtcctacccagatcggcgcccgacgcaaggccgagcaggcgatggccgcagcggcgtcaatggggcacccttacgcgccagccgagctggaccttccgggtttcgtgccgctgaagctgtcccaggtcgagatcctcgtgtcctacctcggcgcctccgtcttcgttttcctcgccgtctggctcgtctccggaagatgtgtcagattatccaagaccgaccgtctgctcatgtgctggtgggcattcacagggttgacccacataatgatcgaggggccctttgtcttcactcctgatttcttcaagaaggagaaccccaatttctttgatgaagtttggaaagagtatagtaagggagactctaggtatgttgctagggacactgcaactgttacggttgaagggatcaccgctgtattggaaggccctgcatcactacttgttgtctacgccattgcatccaggaagtccttcagccacattctccagttcgccgtctgtctgggccagctctacggatgcctggtttacttcatcaccgcgtacttggacggcttcaacttctgggtcggcccgttctacttctgggcgtatttcattggcgcaaacagcttctggatctggataccgatgctcatcgccgtaaggtcctggaagaaaacctgcgccgcgtttcaagctgagaaggtgaagaagaccaaataaaagctgtctttagctaccgttttattggaactaaaggttgtgctgtggagaccgtcattttgatggctcaaattcttgtgttagttggtactggaaactgcatgatgtactctttgctcaacaaatgaagacccggttacatattcaaggaaaaaaaaaaaaaaaaaaaaaaaggccgccgtttagagatc

SEQ ID NO: 283116 - DNA, 542 bp, Zea mays
tcccatgcgtccgcccacgcgttcgtggacgcgtgggttggcacaggaagcatagtatgggtggtgaagtgtgaggaaacacaggggattgatcagtattaccagttcattagattcatgctcttgcacaaggcttatcttatgaacagttctgctcaaatatgttagttctgctatttacgacatactctctatcttatttgctatctgaaactattttgtgttccctattttacactacactggagacagtcttgagtgatggaattgaaatctgaggagcatgacttgtttgggtttggacaccagggttggcgctaactcaaatggtggccaatttgcgagtaatgtactgttcttgacagtttctgacctcgatctgtctattgtaactgaataggctgaattgatgctgatagatacattttgcctgctacaacactgacattctgatttttaagttcctcgtttgagaaactaataatattgatgcaaaaaaaaaaaaaaaaaaaaaaaaaaaaagggcggcccggacgcgtggg

SEQ ID NO: 283117 - DNA, 572 bp, Zea mays
cggtgtgcacgagcggatcatcctgccggagtcccctacctcaccgaccagaacggagatatctatctcgaggtcgacaacgaggacgcgctgctggagagcatcatgggggaggacaagatcgcgcacgttatcatcggattggacaacacacaggtcttcgccgacttggatctcgtctcggcctccggcacagagtttgcgcaagaagacgacaacggcgatgaggacgatgacggctccgacgatgatgaggaaagcgactttgacgaggacttcaacgacgtggagggtgtgttttcggttgatgaggacgacgaagatgacggagaggaagaggaggaggaggacgacgacgacgacgaggacctaccaagctggtccaaccttgagaccgtgaattcctgccatccactgtactttgcaaggatgatcgtagagactgcaaccaagtctagcatagactggctggaccggccacctgcaagccttgtcgtcgagggccagctgaggcctgcctttgctgaggagagcaccatggttgccaagcatatatcaagtgacgcgccaag

SEQ ID NO: 283118 - DNA, 622 bp, Zea mays
acgggtcattattcggtggggaaagccattaaagaatctccagcttcattggcagtcatggcatattgtttcatttgcttctggttcgtcggtggtctcactgggttccactcttatcttattgtgacaaacaagacaacatatgagaatatcaagtacaagtacagcaaccaaccaaatgtgtatgaccatggttgtgtgctcaactgccatgaggttttgtgcaaaaaaaggaaaccttctaagatcaacctaagagctattgtccaagaagaacaagaggtagcacggccacagaccagctcttccaatatacgagaagatgaggcaccccaccgtccacgagccaaggttgaggatgatctagaaatgggtcttgacatcctcaagaccacagggcgcaggacggataaattcagcgatgaggaattggagcctgcaactggaagcaatggtattgaatatcgcacgccagattcagagactgagattcctgttaccagaactaagacagagatctttaatgaagttagggatctggacttatcggttagtaatggtgcacaatcttcatctcctgaacaagaacagcacccagacaaactttgctgatggaacaaat

SEQ ID NO: 283119 - DNA, 687 bp, Zea mays
ctcaggcagttgtttttattcccgtggccggggaagaaaaggcggaagggaaggcaaccgtccggaggagaatgagagctccaatggacgaggctctggctttggtggtaaaagaggaggctggaatcagggcaatccggctgaggaaaactggaaccctaatggtcaacaaggctttggccgtggtggcagaagagggggctggaatcagggtggcccagcgaaggaagacggtaactctagtggcaggcaagaaagctttggccgcggagcaagacggggcagcatgaaccatgaccaatcagccgaggataatgaaggccataataatcccgcacaagactttactcgaggaccagctcctcgtggtggccatggaaggggaggtggccggaaccatcacaggagagatcgggcaatgaagaagcatatgcaaggattgacagggctttagctgctggtagccttatgcttttgatgtgccgtactgtaaatggcatttttggaggcactcctacttgcccatccaaatttttgtgcttgttctgtttttaaatcaaataacgccatgaagtaacccacatatgttctcgtaacatttgtgattgccctaaaaagggtaatagtgtatgtagttctaaacatgcttgtaactcgttaaatacataattaactctctagcgactg

SEQ ID NO: 283120 - DNA, 711 bp, Zea mays
cggacgcttgtgcgaacgattcctggaattgatctggaagatgattatgcacaggtgtctgccatcagaaatacaggagaatgtctagaatctgcaagtgatacctcgcacgaatacacggataatgttctacaagaacatatgtgttctcaagactagcaaacctcaagttttggtgacaatcctaagactaacacacaagcagcttcttcttcaactgtcaccagattttcaaaactggtgtactggaaatgatgctgtgaaggcacaggtgattcccatttctcagtgatgatgtgttgtatattggattcaacaatatgccattagaacttgtgaatgtctgggacctgccatcctctgagcttgggaaatccttgtgagctctggcaccctgttgtctgtgcattcagatcctaacacaccggaccatgggaggtctgcaccggaccgatcgctggagctagttagtcgactggtcgttgttatgtacggagtatgttgtgcaatagtagtttcttttggattcctagtgctccctctcttttttttttccagagcttttcattgacaagtcggtttagtgacacttctgccttcccgagatatagctgcgatgtcagtatgtctcagtacctgaatatgtcatgtatttttttaactagaaatgatttgatgggcgttttgtgctgcgcctgcttcagagccccc

SEQ ID NO: 283121 - DNA, 586 bp, Zea mays
cccacgcgttttgttccgtcctaggttcttgctaacctttgccttcttggtggcgcagctgctgagtcatccgactctagttccataccttactgttgtatgtggtctttccgcgtctccttacattttatggtgtttgcagaatgccactctgattgttgtatatgccaactgggcatttgctgctattaagggcattggatggggctgggccggtgtcaaatggctctacatcattgtcttctacttcctgctgcgcatcatcaatttcctcatcctgctatacgctgagtaggagggcatggaacctcgtccttatgtatatactaggtgtgtgcccgtacgttgcaacgggagtatgttaggatgagcatcgacacatatttgatcggatattatattttttgggatctggagaaagtttgctcggaagccaaacatgttaagacctgagcatgtgtatgatatgcaaaggctggggctcgaacgcgcttgtatgagtcttgttaatttgcatgtctcgtgcatagtctctcaccatctattcactataataaaaaaaaaaaaaaaaaaaggacggccactc

SEQ ID NO: 283122 - DNA, 574 bp, Zea mays
ggcattcacctcctgtatcctacgatgcattccacatgattatgtatgaactgtggctgcggcataatgtaataaagtactaagcttctcagcctctgagttttgatttctaacctaaatgactgatccatcggaaagatactacaaagtctgatagcctgctgttactgccttgaaaatgggcttctggttctttgttctttgaatcaccagatggatgattattgaatataatgttagctatgcatggtgcaatggagagcatttccatcgaagagttgaccgttgttcagcatatatggcaaaactgtagtcctggttaattgatggattacttgattcttttaacaatagttagctttcccatattgcaatctttccctctagatattacttatattccgtggatctgcttggttgattgcatgtattttctcgcgtaatttttttctgttcaatggtttcaggcatgtaagtaatgtacaatattattgatgtgaaacatagtccattttcttctgacagaacatgtaactgtgagttgtgacaaaaaacaatcatttgattttcggtc

SEQ ID NO: 283123 - DNA, 834 bp, Zea mays
ctctctctctctctctctcgctgcccccgcatactctctgtctctggtggcggcgagtagcatactctctgtcttgggcgctctgtctctggtggcgacgactcggcgtcgccgacgacgcgataggccacacctcctggtcgccatttccggatacttaccgacgacgcgcacccaccaccccatgtttgtccgttcctgctgtgcgacacacaaaccctagctgtatcgggtgggctgtgaaatggaccaagctgcagattgctctgaactgcttcgtcgcatccaggagcttcagcgcgcacaggctgaaaaacagaattctttggaactattgttaagacggattgacgggctacactatgaaatggatgaaaaagtagatcttgttgaagtgctaactcgccaaggtggacatctgcagcgagagcgtgatgagctcagaaaagatattgagcacttatgtatgcaacaagctgcgcctggctatgtttctgttgcaactcgaatgcttactcagaggacagcagctttggaacaggatattgagaacctccagaaaaagttaggtggttgcttaagagagaatcaaaatttgcaagaggagcttgctgaagcttatcgaattaagagccagcttgctgagttacatggtgctgcactatcaaagaacaaggatcttgaaaagcaagtaagatttttccagagcagtgtcgctcaagcgtttgctgaacgggacagttcattaatggagtgtgagaaagcaaaagagcgggaagaagcagtgtcaaaaaaagttgctgattttgaggaaaagatgagagaatatcaatc

SEQ ID NO: 283124 - DNA, 498 bp, Zea mays
cccactcttccgcgcaacccctcccctgaaccctacccacttctacccggccaccaccccacaacatggccctctcccgccgcctcctcccgctcttcctccgccgcggcgcccccatccccgcccgcgctctctccacggctgtcgcacctgcggcggtggcctcggaggaggacgaggcggccgtcaccgtcaagggcgtgcgcatctcgggccgcccgctctacatggacatgcaggcgacgacccccgtcgacccgcgtgtcctcgacgccatgctccccttctacctctctcgctacgggaaccctcactcccgtacccacctctacggctgggagtccgacgccgccgtagaggacgctcgcgcccgcgtcgcctccctcgtcggcgccgacccgcgcgagatcttcttcacctcgggcgccaccgagtgcaacaacatcgccgtaagggcgtcatgcgcttctaccgcgagcgccgtcgccacgtcatcac

SEQ ID NO: 283125 - DNA, 453 bp, Zea mays
ttttctcttgggcggacgcgtgggcggacgcgtgggcggtcgcgtgggcgccatggcagcgtcgccgcagcagcaaggccagggcggccctggcagcggcgggtggactcccgagcagttctggtcgctgctggacaaggcggaccgccggttcgcccgggtgcgagacctgccctccttcggccgccaggagcccgacgagttcgccaaggccttccgcgcctacacccagctctggcggatgcagcaggagcaccgtcaccgtcttctcgacgcgggcctccgccgctggcaggtcggcgagatcgccgcccgcatcgcccacctctactacgcccagtaccagcgcaccgccgacaccgcgcttctctccgaggcgttcgtcttctaccacgccgtcctcgaccgcgcctacttccaggacgccgaccaccacctcggccccgccaaaca

SEQ ID NO: 283126 - DNA, 382 bp, Zea mays
gctcattcctcctcaccacgctgctcgttactaaccaagcaatcaatttcctcctctttccattctcccagccacaaatcgatcggaaacgcacgcccctttctcttcgccttttcgcgtcgtccagatctcagtcgttcttcgctccatgagctaggaatccgaggtgtcctctaggctaagcgaagttggccggcggcggctaggatggggttgatatccgggatgatgatgggggtcattgttggcgtcgccatcatggccggctggagccgcgtcatgcgccgacgcagcacgaagcgcatcgccaaggctgcggatatcaaggtgcttgggtctcttagcagggacgacctcaggaagctgtgcggtgataactttc

SEQ ID NO: 283127 - DNA, 630 bp, Zea mays
ccgggtgcgacccatcgcgtccttgttttcagcaacgcaaaaggttgaacggttacactactactgcccagactcgtcatcggactcgccgtcctcgcggtcgtcctccccgtcctcctgctgctggtgatggtgatgatggtgcccgtgcgcgtgctgcatctggccgccgccggcgcggcagcacccacctggtggtagaactggctgatcgactgcgcggcgagcacgccgatgtggccgtcctgcgatagcccgagctcgagccccggcatggcggcggcgtgtccagcgaacatgggcgcaaagccgatgtggccgccggcgccgagggtggctccggcggcggaggctcccggcagctcgaagcccgcggggatccccatccgctgcatgataccggcggcatcgcccgtgcccgcggcggcagagttcaggaaggagggcgaggagaagccggcggacggcgcccacatgtggtggtgcggcctggcgagcccggaggtgggcgacgggagcgagggcgcgacggaggcgagcgcggacgccggtatggtgcccgtgccggtggcgccgacgatggccggctcggcctgctgcagcagccactggacggtctcgccgtcggac

SEQ ID NO: 283128 - DNA, 505 bp, Zea mays
  unsure (1)..(505): unsure at all n locations
agcgggtgcaagcgctgcagcagtcggtcgcggagaccctcgcgtcgtcagggtccccgtgcctgcctgtgcctgcaggtcgtgctcctccgcctggcgacgacgccgctccagactgctcggggacgatggcggcggcggttgcgaagcttgtcgctcttgaaagcttggtgcatgaggctgacggtctgcggaggcagactcttgagcagatgcagcgcgtgctgaccacccgccagtccgcgcgggcgctgcttgtgatcagtgactacctttcccggctacgcgctctgagttctctctggatcgcacgaccacgggaatgaattcatctcggcttatgtatcttgtttgacccggtggagaaaaataacaatcgaagatgccttcgctccttccatcatcactgcatgtaattgtaatctgaacatcaatataaacatccggaattatttttttgttctaaaaaacaaaaaaaaaaaaaaaaaaaaaaaaaaaaaanaaa

SEQ ID NO: 283129 - DNA, 458 bp, Zea mays
aactactcctagagtgatttgaactgagtagctaagattcactgatttgggagtacctgccacggtgatgatggctgccccgaatagcattatcaggagggttcaagcgcttgtttctaatggcttcccctgaaatagaaacgcccgaattggtggcttcctgcttccttgattcttcccaatagcttttactcgagggccctgctatgtcattgctatacacgctgagattctgactagtcctccatgtagtaccccagtctgagctctgatgattgatgcttgagaacctataactctggtgccctcgtctactgatgatgttgacataccatttggtattgatgggacctgctcaggcagcagcatcctatctgcagcaacactcaagtttgcatgattcatattttcctccccaagcattgaccctctttgaaaaaaatcactattaacatggg

SEQ ID NO: 283130 - DNA, 441 bp, Zea mays
tttagggacaaggggtaacaggcgtattgccatgaccaacaatggtgcagagaagaaaaacaagaggagcagcaacgggcgatgcgctaaggtgggggcaattgaacaatctgaatgaagcaggctcatttttattgaccagaagtatccagcctttttgaacacaaattgcatgagctcttactttcaattagagtataaaggcagaaggctgaatgaatttcgtaccacctgtacacaacttttctgaaacttatgttaagtttttcatatgaaatgaaccttgtgctggtggggcaaacaagagactccactgcagaaactgcatctggtgtcctttgtttgtttgcatgtataaagaattatgaggttaaatgtgcgataatgtgtttttaaaaataccagagatgtatcaccatatttcttatattttgctcgtct

SEQ ID NO: 283131 - DNA, 446 bp, Zea mays
aattttcacgaggaaaatctcttttgcgtttttgtttctcgaggttggagcgccgctcgagattgtcggtcggctttctgccctcgctgatgacgtcgaaacgaattcagacggcagacaagaagaacaaccagcagacccagagctcgatcagttcatggagatctactgtcacatgttggtaaggtacagacaggagctcacaaggccaatccaggaagcggacgaattcttcaaaagcatggaggcccagatcgactcattttcattagatgacaatggctatgaagaaggaggcggttcctccgacgaagatgagcaagaaaccgtcgacttgggcggccttccggtccctgagaccggcagcccgtccggagagggcaaggagctgaagaaccaccttctgaacaagtacagcggctacctgagcagcctctggagggagc

SEQ ID NO: 283132 - DNA, 440 bp, Zea mays
ttcttatcgcgtccgggcctaaagaaaacacaaatcaagaaacgggcacctcaaatcagcttgaatacgagtctaatccttccgatgctgagcgcgaccagagagacatgatcggcgctccaggctgtgccctagatgccagtcaatcatcgactcgggaagaatgttttcacgtcctataaaaactaacctgaaggttgctgagtcgtctgcatttctagcatatgttaagtcaagcaccccagccaccagctcatttgatagcggactacaaagaggtgacagccggttagattctttggataaccatggtaattgctctagtgcaacagatagatgtgacaccggtgctgatgtaaattttccgaataaagaagcttttgagatgcctgtgcagtatcctatggtatgcttttcatcctctagcatgcatatggagc

SEQ ID NO: 283133 - DNA, 653 bp, Zea mays
cccacgcgtccggtagagcaagagaactacatgatgaaaagcaggccgaatggccatcgaaagtcaatcgacctctatcctgcatgccatgccatcatgaacaattggctattcagcttgactgaaggtctcgggtctatatctcctttgtttatcttgtccagtcctaccatccctatccttattctcttccatcagctctggcagctttctgcacaagtgacctcggtctcaccgtcagtgctggcatgatgcaggtctgaatctacatcgatattaacaaaatactgccattaacatacagtgttctccatttccttcccccttctgtgcccatagcatactgtgtttgggcttgttcagacaatgccggctgcagcggctgatggtcttgattccatgtgtcgcaatttaatttagtaaaacattaaatccttgacagcatattcagaattccacaatctagattgatacttaatcctaatcaaaattttaccttttcaagatttgagggtatgattttattaaagtcgaacccatgtgtgcaaggtcatcctctgacaaatcatctagatcgccttatgccggctcagtctttgacaacctttctatgacaattgacaggagatttatttcctttttaaaaaaacaaa

SEQ ID NO: 283134 - DNA, 434 bp, Zea mays
cgccgcgggttgcccacaatcaacactgcggcgatcacagctttggtcgacaggtggcggccggagactcacactttccatcttccttgcggcgagatgaccgtgacactgcgagacagccagaagcagcttggtctcagtattcgtgggcgtccagtgaccggtcaggcagcacccggtggctggagacagagagtcgaggcctttcttggaagggaggttcccacagacacaccaggtagccacacatctggggtttctctcgcctggcttaggcaggtcgttcggggaagtgtccagctgcagcagatgaccagacagttagctactactgccgagcttgggtcctgcatttgtttggctccgtcctttttccagacgcgacgggtgatagcgcgtcctggatgtccttccttgcctcactgactgggaca

SEQ ID NO: 283135 - DNA, 1172 bp, Zea mays
  unsure (1)..(1172): unsure at all n locations
gacgaggtgccgattgggttagggagaaaggttgaggagaagaagttgaagggagttgatactcgggttcagaagacagatgactcagatgacgatgataagccattgggtctcaagatcaactcatccagaatgtcttccaacagagtgaataagcctgttctgcagagaactgtaccaaaggttgagcagcctgatgaagattcagatgatgataaaccattggcaagcaggttgcccagtaatgccggtccaaaaagtggaggtgatgtctctgaggattcagaggatgagaagccactggctgccagattttcaaaagttgctggtagtggaaacccaaaaatagcttcttccagcaaagggttaaccagtgatacaaatggccaacaaagtttgggtaaaaggcctctagacaatagtaatcaaacaagttcagctcttaagaaggctaaaccttcaaacgtttcagcttctgcaatcgttagaagagaaatcaagacagatgacaacacacctcttgcacaaaggctgaaaatgggagagtcttcgaaaggcaagtcatctgcaaagagtgtctttaagaagagtcctgtttctgtgaagaaggacatcaagaaaatgaaagggaaagggaaattaaagaagaacatgaaaaattctcagttctcaaagataatgaaggtcccccctggatctggtggaggaaagaaatggactaccttggagcacaatggtgttattttccctcccccatacaagcctcatggtgtcaaaatgctttacaatgggaaacctgtcgatctgacaccagaacaagaggaggttgcaacaatgtttgctgttatgaaagacacagactatgcggccaagccaacattcattgataactttttcactgattggagaaaagttcttggtaaaaatcatattattaagaactttgagctttgtgatttcacaccaatatatgaatggcacctcagagagaaggagaggaagaagcagatgacaacagaggagaaaaaaacattgcgggaagacaaattgaaacaagaggagaagtacatgtgggctgttgtagatggtgttaaagaaaaggtcggaaatttcagagtagaaccgcctggcttgttcaggggacgtggagaacatccanagatggggaaact

SEQ ID NO: 283136 - DNA, 885 bp, Zea mays
tttggtgaggcgaggttggagtttgcgtctacaaagactaatggtccaggatggttgctttgtggaatggagggacatggtagctgatgcggctagaaagggttttgctggtggagtttcccttgaatggaattcatataaaatattgagtgagcagatgcggcatgattggttggagaatcttcagaaaaggcgatcaatgccaaggccaagaggtaatagacgagcaccaaaaactcctgagcagaggagaaaaattgcagaagccattgctgcaaagtggttggatcaagaatatcgtgaacgagtttgtagtggaattgctagctatcatggatcatcttctgcaactaaaacaccgagaaagccaagacctgctggagaaccaggtgtaaagaaacagatcgacaaggaaaaaacctatgcaagccaaacctgtaattttagaggatgctcatggcaaatgtgcagctcttaagagaaagaaaagtgcaactccctacaaagatccgatggcagttgaaaaattggagatgatatcaaagattcgagctcaaaggacagcacaggaaatagaaaagaaagaagctattaggagggccaggacactgattgcagaagcagaaaaggctgctgatgctctggaaactgctgcagcgatgaacccttttgcccaagcatcacttatagaggctagaaagcttgttacagaggcaagagtatcacttgaatgtgttgatgatgaagagcctcaagaaactgcttccaatgatgtgtcagggagctcagtgttactgaacttgcacgatcaccgtcatggactggagatgcagaatggaagtaatttgttgaagcaagagaataaacctgcccatgggatggaat

SEQ ID NO: 283137 - DNA, 465 bp, Zea mays
gccagcataaaacaagcgaagagccaccctaaaccacctactagagcaaatactctcaagtcccaactaaccaaaactcgggaggaagagaaaagctgcagacacggtctctctctcacccttcaccgcttcacgtagcagcaagaaaaagaaagaaaataaaaagagagagagagacagagatggcttgcaccttgaaactccaaaacccaccatgaaaaaagagcttctctggcccctgaccctgagagagagttgctgttgctgccattcggtcggtgcctccttttcggtacgccgctggtatggggtatcactggtatggctgttctcccatcccaaggcgacgagggaataggaagctagaaagttcgtctgcagtctgcacctttgcccatggcctaggcgcctagctcaggccgtagctcagcgtccgtccatgggccagggagtctgaaaccttgc

SEQ ID NO: 283138 - DNA, 528 bp, Zea mays
ctgtctcgtgggcggacgcgtgggctagctaagctggtcgttactgccaatgtcagagcgcgccgccggtctccaccggggccaagaacagtgctactagccaagaaagctggggaacaggctgcttcctgggacgaggagcaggacgacaagggatctggagccggagcccacgatggcggcgacgggaacctcgcgggcggccgcggtgacgatgctcgcggcggcggcggccatcttcatcaccttcgtcatctgcttctacctcttcctgtgcgcgaagcggtaccgtggggccgccccgaccatcggcggcgacagggcccggccccgcttcgtgttcgcgggcggcgcggggtgccacggcggcctcgacgaggccgccatcgtggcgctgccaagggaggaggcggccacagcgggcggggactgcgccgtgtgcatctgagagctggccacgggtgaggccgggcgggagctgtccctctggggccacgcgttacacatggagtgcgtcgacatgtggct

SEQ ID NO: 283139 - DNA, 403 bp, Zea mays
ggaagccatctaggaagctggggtggaggaagaattggtttgatgatttatgatgtcataagcggcctgaaattcatgttccagtctatccaacctgagtatgaatcatcttcatatgctgaagatggtccagaatacgcagaaagttacacaaaccaagaggactcaacatactatgaaacatcagaggaaaagcaggaagaatcaaaatggtttggtttgttctgaaactgcgaaccgaattgttctgtcttgtacttaggggcgaagctaggtagtagctggagtgttgcaccccctgaaaatgtgaaaacagtgctttccactgaaatttcaccatatatgtatccacaaggcaagcgtactcactaattaagaagctgcatttgatccaattctcctg

SEQ ID NO: 283140 - DNA, 426 bp, Zea mays
ccttttctttcgcccacgcgtccgagagcacatcaggttcaggcagttcacgctttggatggttggtgcagaagacaatggggcttgtttcaaaatctcaccgccaggcaaagctaggggaacagaacaagttctactatgacgagaagctgaagcggtgggttgaagaaggtgctgagatccctgccgaggagcccccacttcccccacctccaacaaaagtgccattccagaacagcgttccagatcccaactccaatgctcctcccactggtggaggttattcctcaaatcctcccgagcctagttccgggatgccaccgatgccacccacccagaaccagttctcagcacgtggaaggatgggtgttagatcaagatatgtggatacttttaacaagggtggcggtggtggtggcgcaaatg

SEQ ID NO: 283141 - DNA, 869 bp, Zea mays
ccggatccggctccgggtcctcggctcccgtcgtaacgccgttggctccaacctccttctccttctcctcgtcctcgtcctcgaaagtgggcatacaagttgcgataaagcctgaattccgcattaccccacctcctcaattgccaccagagatggtagagattcctcgcagcaccttcaactttgattttgagtatgagagaatgattcttgctgaggcagagaaggagaaccccaactggactaaatttgtggtagaaagacaggctgcacctcttgtgccacagcaggctagaccagcatcgtcagggtcaggggatccagttgttgacaagtatgtctcaatggggcttgggcgtcaagccgtctcatttgcggtgttgaattatggagataatccaacaaaggtgaaagagttcgtgaaatcctacagcatcctccacgagatgggcttcacatcgccaaacgtccccgagctgctagccatccacgacaacgatcccgacaaagtcatccagcgactgctatcctcgccatcctgatcctagaagaacaagacgcctcgcatttgtgtgccgcatccatgtacagccctgcccctacgctggcaaccatcacagatgatgtatacgcgttgcctgccgttagttctgtgaaccgagtaacacgctttgtatgttgtacttgtataccgtcacccgtttggtgtttttccttaaaaaatgttttcgcgtcgttttattcacgtttgaattttttgtgagcctatacagtacaacatgattgggttaaaaaaaaaaaaaaaaaaaaaaaaaaaaaaaaaaaaaaaaaaaaaaaaaagggcggccgctcgcgatcccacgaaacaa

SEQ ID NO: 283142 - DNA, 631 bp, Zea mays
ggaaattgtggtggggacgtcagcaatccagctgctgaggatctcatagttgcgatattgactgcattggactgtcttccgatccagcaatgagcacatcagtctcctgtggggttatgcctactgttggtcacctgctggctcacagaattgccgtgatcaaccaaaaggcaagagcactctgtcacaagtggggcggtgtaccaaaacatggtacaaatggagagcattttcatacagaggagtcaagccacactgaccagcttaagtctccagatgccggccacaagacagaaactaagagaaagtgtgtagtggacgaaggagagcctgatgaagaatcgaaacctgaggtgacaactcactcagatgcacctttgtccgacccttctctgactaatgataatgcagatgcaacagagcaaccagcagggctaacttcaccaaatccatcaaacggaaatgcaacattaggggatgtgaacaacttggtcagggcttctacatctgcaggtcatgtgggttcagaagatgggcagtccaccgccaatgaaatttcttgaatgatgctgaactgcccattaatggcatactcaggtcaaactctactaatgcaaaaagtggtactgga

SEQ ID NO: 283143 - DNA, 563 bp, Zea mays
cgcgtgcccgcgagcgtgccacgcaagggcgagggagcccgcgaggcggaatgcccctcgagatctcctctgcgcggctcgcgggccagaccatcagaacgcgcaagtcgcattagtaaattcaatcatcgtccccgcctgctaaagatctgccgtggcctcctcgtgtacctattgctggttctcaaatcgcacgccctcactgctagtgctaggctccccttcgcgcgcgcgcgcagttattaccccgtccacggccgcgtgttcgcaagcatccagatccggcttcccacctccggcgaccaccgcgcagagaacaattccgtccaacgggaaaccccgcgataaatcgccgcgcccatcgtttggcgtccccccacaccaccgaattcaccagggctggaggaagcgtctgaaagactcagcaacgcttcatgtgactgattggttggctgcgccggctctctagcaccgagttcagggagcacttcgtgagcttacacgacttcttcgttcgtcttgaggcgctggagctctgtcacgttgtggtagttgagagggat

SEQ ID NO: 283144 - DNA, 497 bp, Zea mays
ggatcggtggccacaaacttgcagcagcaagcatgagggttctttctggtcaatcatttcctgcaaatgctggtgaatcagtgagaaatgcgcatgtcttggcagtatttaaagagggtagagactgtacatcttcacttacacttagggagtatcataacaggccagtgtcaatgattgataatggagctaacatgaagctggatctggaaaacatagacaattctcatatgttgatgtcatcaccagacttcaatgcaactgtatgtcattcttacaaggatcaaacattcttaacactggaaactaatacctctgtgatgactgagaaagatagcagtcaggcccgtaatgcaagccagcagtttgtcagtactgctttaagaacacaaaatgtgtcttaggaaccattgtgtaccgcgattgctccaaagcaactcatagatcctcaagttcagaaaaaatcatatgagtgtttttggttctggcagtgccca

SEQ ID NO: 283145 - DNA, 557 bp, Zea mays
cctcactcgagcgcccacgcgtccgtgatactcctagtgtgcctgtatcttacactacggtcacggtgtcaaagtttcaggtgcctgtggaggttctttttaatttgttattgtctgatggtgcttttggctttttggatgatttccacaaaaaatagtggtgacaaagaatttagttgctccaaatggcgtacagatgaacaagggggacttgtaagggatgtctcatttttgcacccaataaaaatttatcttggtgcaaaatttgggacttgtcaagaggtccagaaacttcgtctttacaaaaacaggcgtctagtcattcaaacctctcagtcaataggtgatgccccatatggggaccatttcactgtagagggcatctgggatgttgaacaagatagcctagatgagaactgttgttacctcaggatatatattaatgtagccttctcaaagaaaacaatatttagagggaaaatagagcagtccacaaaagatgaatgccgggaagttttcagtctctggattaagctcggtcatgatcttttgaagca

SEQ ID NO: 283146 - DNA, 516 bp, Zea mays
gtttggctctgtgcacattgctaaacgctcccgccgtctcgcgagccgccgccgggtccttacgcaagtccgcgacgtgcatcgcctggagaggctcccgtctcgccgccctggggatcccatctcatctgtgcagccgcgcgtggcccaagggagccagaagctaagagttagagaggcgcgtgatgtcttcagaggaggcgagggcaagcttttcggagttggtggttggttcgccaacccggacagagggcgaaacttattcttcaggtgatatgtcgtctgaggagggtgcacacgtcacttgtttcacagaggatcttcacgatgtaacacttcactttcagatagtgaggttttctaaacagatatacgtgtgggttggatgcaacacagcaaagtttggccatttatatgctgctgcaaccactagaccggataacagagtgagtgttacctctgtactaggaggaacttctgataacaccggatcaacttttagtaccagaaaggctg

SEQ ID NO: 283147 - DNA, 325 bp, Zea mays
cagctacagtgcacattgctaaacgctcccgcagtcccgccgtctcgcaagccgccgccgggtccttacgcaagtccgcgacgtgcatcgcctggagaggctcccgtctcgccgccctgcggatctcatctcatctgtgcagccgcgcgtggcccaacggagccagaagcaaagaggacgaaccttattcttcaggtgatatgtcgtctgaggagggtgcgcaggtcacttgtttcacagaggatcttcacgatgtaacacttcactttcagatagtgagggtgtctaaacagatatacgtgtgggttggatgcaacacagcaaa

SEQ ID NO: 283148 - DNA, 272 bp, Zea mays
gtaggatgcccctttagggcttgataaaaggagatgatcatgttactcacatatctgaagatgtaacttcatctcgtttcagggtttagagggatgtcttcagaggagctgagggcgagcttttcagatttggcggtgggttcgccaacccagacagagggcaaaacgtatccttcaggtgatttgtcgtctgaggaggtcatgcaagtcacttgtttcacagaggatcttcatgatgtagtacttcactttcagatagtgaggttttctaa

SEQ ID NO: 283149 - DNA, 587 bp, Zea mays
ggtcgactctagtggatcgccactagaatttcagaacccggttccactgcttggcgggcatagaggtcttcgtctaggatagggacgctgtatttttgctgtaaataatccgtaaccgtactttttcccgtagcaatgcccccggtcaaaccaatcaatcgttgtcgagggggcttggtgtccatggataaagtatggtcaacggaaatttctacggattgattgctccatgttagaggtgttaaacccccaaatagttataccgaattaaccaaacaccgtttggggttgttgctccgccaagaatttttcgtggacaatgccccggaaagtatccaagtcggattgccacgcttcaatgtactgtttggccacgctgacccgttcctggggattgggattattcaagctgtaattgaagttacccgcaaataacaacgcactcactgcctggcgatcgggaatctgcaaagttgcctggttaactttgaggttaaattgacagccttccaaaagataggtgaattccaccgccgcttgtaaagggaccttgcccaaatcttgccaggcaccggatgccagcaaag

SEQ ID NO: 283150 - DNA, 756 bp, Zea mays
gtcgactttgaggatcaaactaatgggcaattactgcgactggaatcgtaaatccactgactaaagttccagcaataatctaatttcttccccaaaaactatccgctctcccaaacgctgacttgcagcaattttaggagagcggtctagggggtcagcttggttgaaacctgactgccggaaggaactttaaacgtagctaattcggatttttgggaatagttactctaaagaacggccccggcccacagccggctaacttcaaccaaacgacccaggcacatactactctctaccatgggcatcacctcctgtattccttaacggtactgacttaaagggtggatgcttcccaaggtaactcaactttttttgaaaggcaagacaagcggctcggaatttttccacggtggaaatttgactgccccaatggaggtggagataggaagcctgaacagaccctacacaccatccatccgttgtgttttggtctatggccagtagtccccgttggcggtagagagcttggttagggagtttcgtcatctgggaacggtgaaattcatggcctcgtagggattctgtttgccataaccaactgtgggaattaaccacctgggcttggcggtatcccaaactgagttttccccccatggtgacggcggtgggtaacatttccagcatgggaaaaatttgtccctcaaagttagaaagaatttggcttaggtacattaaaccgccacactctccgtaggt

SEQ ID NO: 283151 - DNA, 809 bp, Zea mays
ggaccaacccctaattccttcagcttggccggtaggcgatcggccctttgttgtttttcgttagcccgttgcttttctttgaccatttctcgatcaagctccaccgtggtaagaaacttgcgtccgtcaggataataaatctgcagggtatcgggagtgaggaaaaagcgaatgcccaggagggggctagtccaatcttctatggtctcaatcacctctaatgcgttctctccccgctgcagtccggttaattcggtgtcatcggggtcataaacgtaatactcattcaccccgtagcgttcataaaactgtaatttgcgaatcatttccttagcacgattgcccggagagaggatttcaaagaccacctggggagcaatattgtcttcctcccattggcggtaggaaccgcgtttccccctgggccgccctagggccaccatggcatcgggagctacacggatttcaggatgcccttccacgggataccagagtaggtccccggctacgaaaacattgtcgtcctgggcaaaaagacactccagattttccttgagtaaaacaatccactggaattgttcagtattatctgccatgggttgaccgtcgctgtcggggtagataatagtgcgatggggggcgataaccatttgctttgcttaagtttcctaaaatgggcaactttgcttatatcttatcggcttaaactctcaactgagtgatggcaatgttgccgcaaaagcatgcgtcaatgtcggagccgggttgccgtggtcgctggcgatattccccccgataaaagaaattcg

SEQ ID NO: 283152 - DNA, 576 bp, Zea mays
caggttgctctgaggaccacccgtaatggcggtgttaggtgcgttaaaggagttggtgaacgtctttgtatcaccggatggtgaaatcgtggttggctgtgttcaggacattacctcgtttatcagaaatcgagacaaacttacccaagcggaataccttctacgtttggcgggagaaaaggccagcctaggaggttggcgtatcgaactagatcctccggttatcacttggacgtcggagaccgcggtgattcatggtatgccccccgattactccccccccgatgtgggcacggcagttcagttttatgcgcccgaatttcgtgaattcatcatggaagtttttgaacgttgtgttcagcagggcgagccttttgatgttatctgccaacttcaagtgcctgacggacgcagaccttggatacgggccattggcgaggccgaacgggacgcccaaggtaaggtaattgttgtccagggggcgtttcaggatatttcaaccctacgggaggcccaagagcgtttccagttaatatccaaagccgccaatgatgtgatccccgggtaccgagctcg

SEQ ID NO: 283153 - DNA, 561 bp, Zea mays
caggtttgctctagaggaccagccagtcaatgaatatctcattgctcctggtctattaattccttttgtatttctctttgctttaccaatagtcataaatgtagctaataataattcgcagaaatatgtcgtcgaacaatatcaacaatcctgtagggaatcggtacaggaacctaactgtcagttgttttatgtgtttaatcgaccctactcggcggaattttattcttctggtaaagcaaaaaaagtggaaatgcacgaaatagccgctgttctcaacaataataaccgcaattattttgttattcgcactgatgcgattaaagagtttcctccagaaattgcatcaaaattaaatcaagtgactcaatacagtgcctatacccttttttcccagactaattgactggaaaaacctcatccgccatcacaactcgattacggccggcggccttggcttgatagagagccctatctgcggcttggataatgttgaccatggtttctccatggttgggataacaggctacccctagggaaacggtcaatgtgcccaattcc

SEQ ID NO: 283154 - DNA, 583 bp, Zea mays
agaggaccggccgattgataaattaacggactatggcccgtaacctaaaatctcttttcattggtcgccgagtggaaagtcccgccgaactggcccaacggctgggaagttacaacggcaatgtctatcatctggatatgagtttggaccaaatgatgttcctccggcctctaccggaaattgccaactaccaaacccccatcaaaaatctttacttaacaggggcgggtacccatcccggtggctccatatcaggtatgcccggtagaaattgcgctcgggtctttttaaaacaacaacgtcgtttttggtaaagcagaaagcctaaatcaacatactaaaaaatgcctatggttcatcatcggggtgtatggcaagtgaagctcaaaatgataaatggtttaccatgttaggcctaagcacgccctgttcttagcattctattggtatttctctttgcttaccatggccagcgccaccattgccagtgcagacctctacgaaaaaattaaaaatttctacgacgactccagcggtctctgggaagacgtttggggtgagcatatgcaccacggctactacg

SEQ ID NO: 283155 - DNA, 804 bp, Zea mays
attctttgcacctccggcaacctagccattacccaggcggtgttccatcagattgaccgagatatccagcgggatgacggggaccatctccacaacattgccactatgcacgaagtggccacttacatcggcggtaaggtgcgggaaatgcaggaaaaagaccgaccatggctagaaaaagatggcattgattttcagtgcaatttcctcttgggagggcaaattaagggggaaccgcaccaggaattgtacttgatttatccccagggtaatttcatccaagccaccaaggagactcccttcctacaaattggcgaaactaagtatggcaagccgttgctggaccgcaccatcacctatgacacccccctggaagccatggccaaatgcgccttgctttccattgactccactatgaagtcaaatatttccgttgggccccccattaatctgaccatggtggaggccaatcatttttccgtgcgccatacactacaactacgcttgggagatccctacctggctaaaatgcgtagcctgtgggaatcctatgtacgtcaagctttcgagtccatgcccaatgtggaatgggaagccagccaaagcgattccggggaagatgtcttgattgattgaactacaacagtgttacaatgcccgactctagattgtagtaagcgcccataatcaataacctttcttcagctatcaattgacttagcaccggggattgtatgagtactgccatttggtgttcaacgatggctttcgtggccatgaccacactggcggcattactgctgt

SEQ ID NO: 283156 - DNA, 604 bp, Zea mays
tgccgtggcccggttttggtttgatcaagattttgaatggccccactttatcttcgcctccctatccggttaccgtttaaccgatagcattaccctttatcaccgaatccaaaatcaatttattgcctgggcggaacgcaccgggggcagtgtggtggagttacacgcctattgctacaaagaaaaagagttccccacccagggggatttgttagccacctttgagcaggaattgtacgaaattgtcccctcgttagctacggcaaaactcctacaccgggaattggttaaccagaaaaatttctccggttttccccccaacagctacggcgatcgcccggagacggaaactccggtggccaatcttttgttcgctggggattgggtgaaaatgccctttccctgcggtttgatggagcgggccatcagcagtgggctattatcagccaacgccatttgtcatcaagagggtttgcaacggcgggaatcgttaacggtgatgcccgagggaattttgcaaatttagccctagtttagccttcggtctagaacagtgctggactatttatggtgggaaatcattgttattcagatgaaagcagga

SEQ ID NO: 283157 - DNA, 511 bp, Zea mays
tcgactttgtggatcgccgcggcgttccagattgccacaatcagggctgttaagggaacacaggctttcctgggagaattaattttacggcgtacaaagcgaaaaagggatgacttttctgcctccgtacgcgaggaatgtgtccgattaacaggactcctctcacccacatttagtttagacaatatcgaattagacattttgtactttaatctacattgttctacgaaagtccgcccccacccatttctcccaaattattaagccagctctgtgatagtgccctgccatagatttggtcgaagaatagaagaaactagactttttcggacatcaaaccattagagtattcaatttttacatgattggtttctgtatgatttactacttttcaaatggaaaattcggtgtaaacctgtgaactctagtggctcccctgcttttacccatggggttaatcgtctttttgtactatcagccccttggtgtctggatttcttcaacaaagtcg

SEQ ID NO: 283158 - DNA, 495 bp, Zea mays
ggatccacggtcttaccccttagaaaactagaaaggttactgtttcgagcctggtgtttttggctctgctaccctgccatgtttcccggtgctgatcagcggaatcaacaacagtttcaacaggtggtgaatcaagtggaaaaagcattggaaaaattacctggcccgtatttcttaccagaatttagcactgctgacatcggctttgttccctacgtggagcgcatgaatgcgagcttgttttattacaaaggttattccctaagggaggatcatccccgcttaaaagactggtttgcggcgctggaaacccggatgacctataggggtacccagagtgatttccatacccatgcccatgatttgccgccccaaatgggtggttgctactccaacggtagtgtccaggcccagcagaatcaacagcgggtggacaacggcccttggtttggtttacccgatgccacctgcgcggagccggaaaatgttaagcaa

SEQ ID NO: 283159 - DNA, 641 bp, Zea mays
gaggaccaagctaccattgaaggggagcattttcggcaactggtggaaagtttcatctatctcaaaaacagcctgctctagccggtaagtagccccctatctgtgcaatgtccgatcctcgtacaatctattttcaacccagaaaaccggaaaactcccccaagggcggtaaattttggggtgcattactatggcttagtttgctcagtatgatgccggtgcagggttgtgcccctgctgaccaaggtttatccccggaagggcaaaactcccctgccattgccaccccgtcttcttcccctagttctttaatttcccaatcccccatgcttccccaggcgatcgccgacaaaattattgctgaccttgctcaacgtaccggcgaaccggccagtgcgtttgcagtccagtcctcagaaaacaaaacctggcccgatagttgcctcggcttggcccaggaagggcaaatgtgtgcccaggtgatgaccccaggctggcaagtgacggtgcaatcggggcaaaaaaattgggtttaccgcactaaccaaaatggccgcactattttattggaatcctagctcccagcagggattttctttaactcggtcaacactaatgatttaacaaaccggggcttaggt

SEQ ID NO: 283160 - DNA, 797 bp, Zea mays
ggtcgacttgtggatctcccgcacccgtttgaaataggccaaatccccagggcggactcccccctcctcttgtagaggttcgaggaaaatggctgccactcgactattaccttcatctaaatcagccactttattttccaaagagcgaatatcgttatagggtacgtagtcaaagccgggcaccagagggtcaaaatattgctgatatttaggctggcccgtggcggtgatggtggctagggtacggccgtggaaactagctttggcggtgagaataacgggctgttcgaggaaatccaggacagtgtgggcatattttcgcactaatttaatcgccgcttcattggcctctgccccagagttgcaaaagaaaacccggtccgcacaggaatgctccacaatccatttagccaactccccttgttcgggaatatagtacaagtttgagacgtggtggagcctttgaatttggtcagaaaccgccctaaccaaggccggatgggcgtggccaagggtacaggtggcaatgccagcgacaaaatcaagataactcttgccctcggtatcccataaagtactgccctgacccctggcgatcgcaatgggaaatcgcccataggtgttcatcacataggtatcaaaatctgcggttttaaactcggcggcaggggataggtcggttacggcaaaagcttgggcttcgacggattcaacaacaggggaataggtcacggggggatcctaacgcgttagactggccaaatttggatatggtctgcaggggtagggtcgcccct

SEQ ID NO: 283161 - DNA, 660 bp, Zea mays
ggtcgactctagtggatcgaccgcccgcaacaactcgtagcgttgactggcttcattaaagcgaatgctcgcatagtgccccgtggcaattttatcgataccgagggactgctgagcatattgcagcatagggccaaatttgaccgccttattgcattgggaacagggtaatggggtcacgccctcgccgtagccctgcaccagataatcaatgatgtgattttggaataaatctctggtgtccacaatttcgtggggcacccccaactgctcacaaatggaagcggcatccactagcccttccgaacagcattgacccttacccttcattaaccagagggtaactcccaccacggcataaccttgacggtgcaacagggccgccgccaccgaactatctactccgccggatagtcccaccactactttttgcgtcattgctggtttactctgcgctccaaattgacaggggttgctttaacaaataggccctaacccagcttaacctagaaaaactaccgccagaaaatgagcatgaataaaaccttgattcaataattttcctgatattcaaagcgggtgtggggagtgaagtctgctaaaccatcacaggcaataaagccctgggtcgtcaaaccttttgctggataaggatggtaa

SEQ ID NO: 283162 - DNA, 675 bp, Zea mays
caggtttgctgtagaggaccctcgggcgtagccaagagcatggaaattgctattttgtcccaatctttccttcaatttggctaatactggcgggaaaggttcaaaggcataaacttcgtagccagtctgtaacaatctggcggagacatcgccccggttggcgcccacatcgatcgtccgtcggtggggaagataagagtagagataaaccatcaactcaatgtcgatcgcctggaaatagctgggatcggtgactactttgaatttttgatcatggacatcagcggcaatctgagctagggtttctcgtaagaaaacgtcttgctgttggctgttttcctgtaaatccaagaacttatcaattaaaatttcttggtagtgctgcagattacccaaaacagcctggaactcttggtggagcagttgatacctttgctgggattcgctcctgatattttgaaactcttgatgaatataaccgttactcctctctgattcttccctaattctttgaaattcttgatggatagcattaatcatctgttcgacaataatttgtctttgctgtccactttcaactaaatatttaatggttctagctgtatcgagggcagacttaattagaaatatttgattttccaaaatctgattaatatttctatttttttgctctaa

SEQ ID NO: 283163 - DNA, 310 bp, Zea mays
caggttactgtgaggacccgccaccggagcactggccgtctcagaactgcccctggtaaatgaatgccttcacatcccccacactggcccagggttgcacttccttagactgggttgttacgttagccaccacctcaccaatggcttccaggggaagaaggtcaggttgggccaggtattgttccaaggcagatttatattgcaaggcgtagcgctgttgtcgttgtaagcgggcagtcagttcagcaagttgttgttcaaagcgggccacctctgagttgtggcaagtgatccccgggtaccgagctcg

SEQ ID NO: 283164 - DNA, 683 bp, Zea mays
ccgggtttgcttggtaattaatccttgcacctcggtgatgcggactatgcctcctagccggagaaaggcttggagataggcgttaacggttttgccgccgtggcagtggccctggggcaccaacaaatccgccgccaatgccgtccgggctaagttggggttcaatggcgatcgccgttaaacggtccacccattgaggccgaattaaacaatggtcattctgcttagctagggcctgggcatcatcctcaggacggagatagagtaatagctctaactctcgatattccgtttctccccccaactcctggctcaaatgggtccaacgatagcgactttcatggcccaattgccgctgtagaggagtggccccagcccaatagataatgccaccatagctcagggccgtggcgttgataggctgacgatgtttttcgagtaatagtactcgttgcccttggttttgcaattcataggcgatcgccgctccggtaatgccggccccgaccacaatggcatcgaaattttcccttaaccctgattaacaatttggcccaaggcggcaaaacccggcactttccccgctgaggcggcaccatctttctccgaaacaatgaccgcactaatctgatcgctcataatggccacctttttctccgtctgcttttcacaggtgagttcca

SEQ ID NO: 283165 - DNA, 943 bp, Zea mays
ggtcgctttgtggatcgccgccatcaaaaacctgttaaccctggtggaacgtcaacaattttttcattcattggggaaaaagggcattgccattgctaagttggccagcctagtctgtgccgacgtgaaaatcgccgaaggggaattacaacggttgaaatattcccgccacgaactgcgctctggtgcaggcaattttgcagggctatccccagttaagttgtttagaaaatagccccacggtgcgacaactgtactttttctttgtcgagttgggtaaatatctaccccattttgtcctctatgccctggcccactgtccccataattaccacagttttatctttgaactgttgactcattatctgaattcgggcgatcgcctagcccatccccaacccttaattaccggcaaggatttaatcgacaagttgcacattaaacctagtcctttgatcggccaactgctaacggaaatcaacattgcccacatcgaaggaaaaattagtaatgagcaggaagctttttgcctatgctcaagaactgggaaaatcttgaaccggggcaaatttgaaggatattttcccctaacggaaagcatcttgatccaagaccattacttggtcaaagcggggaggtcgagaaaatagataaccttgaccatagtcacaaccgagggattgcaaaatctccaattgtgcttgggtttcaatgccttccgccaccactgtcatgcccagggcgtgggagagttgcaaaatggcagagcaaatactttcactgttttgattggtgcccaagccatccacaaaggatttatcaatttttacccggtcaattttgtactcattcagatattgcaagctagaataacccgtaccaaaatcgtccaacactaacgcaaagccttgggaacgacagttttcaatccagggggcggaac

SEQ ID NO: 283166 - DNA, 484 bp, Zea mays
ggtcgactctatgtggatcgccgtttgccaaggttctgtcagagcggaaactggtaaatcaatcagagcgttattttgggcatcgataaaagtcaagttgccctgtgctgtacccactactcccaatttttgccagggtaaggactgaccagctaaatagttttcccaggcaggctgatgttccggtgccaccgctaccgcaatgcgactggcggattccccaaacagcaagttatccaatctttggtcggaatcaggtagattaatttccgctcccaactgactggcgatcgccatttctgccagggctaccgataaacccccttccgcacagtcatgggccgcgttcacccaaccttgggcaataccatggcgacaggctttttgcactgctttttccaaatcgaaatccacctggggcggctgaccagcaacggtgtgatggacaacggctaaatattccgatccccgggtaccgagctcg

SEQ ID NO: 283167 - DNA, 809 bp, Zea mays
ggctttttgataatactcatggggcagaggctccaagttaaggtttttttgaagttttctagattttctaatctgttccaatctttagcaatttggcaacggtttaaacgaaattgcccgatcaaactcagatcggtgggaagacaggaattacaaaggaccggaaatgccttgtttgcggatcatcaggaagtgcaacaacagcaacacggcgatcgcccagggaagcacgaaggtgtggaggctgtagaagcgggtcaaggtagcctgaccaacgcttttactacctcgcatgagggtcaccaattgatccccaaccacgggaatagcggccggtacaccggaaacgatttttaccgcccagtaacccacctggtcccagggaagggagtaccccgtttcaccaaaggtgacagtggtgacggctagcattacacccacaacccaggtcaattcccggggcttcttgaaaccaccggtgaggtaaacccgaaaaacgtggagaatcatcatcagcaccatcatgctggcggaccaacggtgaatggagcgaatcagccaaccaaagttgacttcattcatgatgtattggacagaggcgaaggcttccgtgaccgtgggtttgtagtagaaggtcatggcgaacccagtggcaaactggatcaggaagcaggtcagggtcaggccccccagacagtaaaaaatattgacgtggggaggaacgtatttgctggcaatgtcatcggagatggcttgcacttccagacgatcattgaaccattgaaaaacttttgattcggtgacttctt

SEQ ID NO: 283168 - DNA, 510 bp, Zea mays
gatcgccgtgaccgtggtagtaatttgggcggcaaagggatgggacgcatcgactatgtctgcaatgctatggcgtttttgaaatttcggtatttcctgtggggttaaagctccaacgtgaaccgtcaaacattgatgaatcggatataaatgcttggcctccgatgtggtgactgtcaccagacaatttattccctgggcaatcaaccctccggctacggcacgactatccaccgttccaccaattaaccaaacgggtgccaggctatccaccatgatttaagtgcttacaactggaatttttcacccaagtaatattgccgcaccaaaggattttccgataactccccggcactaccggaagccaaaatttgcccgtcccgcataatgtaaccccggttggtaatggctagggtttcccgcacattatggtcggtgattaaaatgcccatatttcgttcccgcaactgggcaatgatagtttgaatttccgccacggcaatggggtca

SEQ ID NO: 283169 - DNA, 226 bp, Zea mays
ggatccgcccgcaaaaattgccgccattctgcctagtcccatccgctaaaaataggccattccagacccagggagagtcctgaatttgggtttggctggttaaggtgtcaaaaaactgacgaattagcagtcccggtactatgggtattcccagaataaatagccacaatatggtatccaaccaataaagtttctgggcatagcggatccccgggtaccgagctcg

SEQ ID NO: 283170 - DNA, 484 bp, Zea mays
gcccaatttgttggggttggatagcggctttttgcaccacttcctgcttgtctgttttcgtatcccgccagatttccagggcatcgtgctccacccagccagccttgggatagaactgggttaactctttgtaagcttgcccgacaatattgccttcgtaatcaaacaaaatagctcgattgccggtggtgcccaaatccagggccattacatactgattatgttttgctgtcatagacggtaacctccgaaaaattaatcaaaaaaaatccttgctctggttggccctagcattccttcttcgagcgactgttgcgcaaaatcacaccctggccatcccgcatctcaaacacccgtaacgaatccgccgtggaatccacattcacccccaggggtggcgatcgccacttcccattcctgcaaattcagttgtaaccagtcccccatggtaacaatggcaggatccccgggtaccgagctcgaa

SEQ ID NO: 283171 - DNA, 978 bp, Zea mays
gcaggttgactctagaggatttccctttgagtcgtttgatcgtcagatgcttaactgtctctccctttctttttcaatgaaagcaggttttggaagcgtaaagatgtcagtaactggattcgttttatggatatttacgaatcaaagcggagcaaataatttcagctctgtggaaaaggaaagcttgagaaagatgcatttttgggagaaggttaattcactgtcctgggtcgtcgatcttgaaacgaactcaatagctaaacacaaagggctgccaatcattcttgattcagtctttaatgtaaaggcatttgaggattctctgaagcttgacgaatactaacaaccgagctgcaccggaacgccataagctgtttggttgggttacaaaggttatctgcgtctggtgagcttagtcgttaggccccatacaaaatttaagacctacccaccagaacttctttgtcaccagattcttactgtaagcgcctccgtgcttttgcaatcgtccatggcgatcgccagcaacgttatggtcgccagatagcagaaaaaattgttgccccaattggctaatgatattagttgattaaaactgataagccgttgctgtaaatcacaattgagccaggaaaaataagtgggataaactggaaaccttggttgcaataaatagccattttcttctagcaattgacttagttgattcaccgattggtgatgataatcagggttaacttcatcaatgggtacaatgccacctaaatccctaactccagcagctaaacaagctagtagatcactgaaatttggcactaaattaggcggtatttgtagggtaatttctgcgggtaatattgcccttgctaaggtaataacttgcaccaatttttgtgggctgtaggcggaaatattatctgtttgtttttgcccagggctatggggttgcaaaatcacctcttgaatgtggccgtattc

SEQ ID NO: 283172 - DNA, 982 bp, Zea mays
caggttgactctgaggatccgcactacgaaaaacgtattggggtttacgccatttttgaccagcatcagtatctacaatacgtaggctattcccgtaatttagccattagcctgctgcaacatttggtgcgtcaaccagagcattgccatgggctcaaagtacacatcatcgaccgccccgatcgccaattattagttcaaattcaaaaccattggttggtggggcaaaatcctcctggcaatggtgaaagtcagaaaatttgggctgaatcgattaatgtgcaggattattggactccagaagaggccgccaccgttgctaaatgtgaaccaggggacacgcccaaacttttgaaaaaaattgcccgtaggctagaggcagaagtgttggcaaaactggaagccaggggagtggcacaacaaattcgcttcaatcccaagctgaaagaacaagggctgttggacatcacctaggattcgcccatagctgtccattaaaatataaggggatccaagatgaccctgactgaaaaaaatggacattcgagagtttcaagaaagtaatgagaggcgccagttgcgtagtagttctatgttaccattgaccctaaattcggcaaatattgccatggtgatatcaaccatgtgggctgacctggagacaactttcgtggggcgatgaaatctagcaaaccaatgacggttatctgagttgtttctctcaattcctactgtttctcttttgctaatcccatgaaacgcatcgggatgttcatccagcagttgttgatagggcctccagtcatcggtgcagtacaccgtcactttccactttgccagtctctccagcaaacgactcagggtttgactatcacgatttcccagttcccagttcccagtcgatgagtctcccagtaacacgctcatatgccttatcattatctatttgaaactctccattattgatttacagagctttcct

SEQ ID NO: 283173 - DNA, 806 bp, Zea mays
caggttgactctagaggaccatctggtgcgggcctattttcacacctacggcttgcccactttaatttctttttgttccaacaattatggcccctaccaatttcccgaaaagttaattcccctcatgtgcctcaacattctgcgtggggaaaagttgccggtgtatggtgacggtcaaaatgtgcgggattggctttatgtcacagaccactgccaagctctggacttagttttgcaccaagccttgccaggggcaacctacaacattggcggcaacaatgaagttaaaaatattgaattggtagaaattttatgcgacttgatggacgaattagctcctgatttaccagttaagccggcacgacaactgattagctatgtgaccgatcgccctgggcatgatcgccgctacgccattgatgccagcaagattaaacgggagttgggctgggaaccaaaagtaacagtggaacggggcttaagacaaacagtgcaatggtatttagaccatgaagcctggtggaggcccctgttgggttagtgaatatcaaccaaaggcgatcgcctagtccattgggtaacagggattgcagagattgacaaaatcctattgctggggtggattttcccgctccatctcaatgcggaggggagcatcaggtttttccgttaatcccaagctattgagaacctgcaccacgccaaaggccaccactacccccagcaccagtcctcccaccaccaaaatgacaaaccagttgcgggctattttcagagcctcttcccgacgagctcccgtgatgtcg

SEQ ID NO: 283174 - DNA, 637 bp, Zea mays
cgcaggttgactctagaggacccacttcgccggggctcaggtagcgggcttctgcatcagcattcactattgttttcgtgacgatactcatggatggattcctccgtaaagatttaaaacgttaaaaaaaggctttaagctgattttatcaaccgaggcgcagtcacgaactggacaatgccgttaaccagcggactccagcgagcaacctgcccaaaccattctcaggcattgcgttcctgattacactgcccccgtaacagtttgtaatatttcttgacgatcgccagcagaatttactttaatcccttggcatttttgggggaggctgtaagattagaggggaaagtaatggttaaatccagatttccccgaatttagacttccactcctccgcctcccttcgtattttcggctgtgttgcagcgattccaataatgaagaagcgatctctgttctcccttttaactgtctccctgctgatgttcagcggtggatgtggatttctccccgacggtggcagtggtgaagaaaccgatgtttccgtcgagaatcaagaaacagctcccccggaagtgccccaaaccgccgttcggcccctgcccccggtggatatcgccgccctggggttgattcc

SEQ ID NO: 283175 - DNA, 608 bp, Zea mays
gctgcaggttgactgtagaggaccatcgagggcttccagtacctggggggcagcggttaacagaacggtttttcttttttcataggtcatgcgaccaacgtagtaaacgattttttctccatcttcggcaaatttgcggcgaaaattacggtaatcaaagtctggacgacggtgctttttttccggacgaatgccgctatagataacgtcaattttgtcccagggggtgccaaaggctctttccagttcatggcgcatgtagttgctgcaaacaattacccgccaaccggtgtagattaaaattccttctttgccggcaatgtagcgttgagtatcgttgtaaagaccgttatagcggccgtattccgtggcgtggatagtcaccaccaggggaatcttaccgtggtgcttaaggttaatggccacatctcccaccagccaatcgtgggcgtggataacatcaaattttttctgttcctggaatagggcttgccctctctgttccatggcacggttcatgttatctacccattggaaaaagtcattgctggggggcactggcactcggtaaatgtggatgccatcgaccatttcctgggacggacttt

SEQ ID NO: 283176 - DNA, 530 bp, Zea mays
gatcaccattgcggtcccttttcctggcatcgatatcacctcgattgtccctccttgaatctccacatagcgtttaacaatgctcaatcccaaaccagtaccgggaatatcccctacgttgctggcacgatggaaagcttcaaacagtttttcctggtcctggaggggaataccaatgccttcgtcccgtacttggaaaagtaaatgctcttcatccttactaatatctagggtgatagtgctacccggggccgaatatttaatggcattacttaaaatattttccaaaatatggcggagtagtctcacatccaccagggagtgttcgtccggctcgagatggtagttaagctcaaaattatgttcactgcccaggccacagctaaaattctcgattaaatcgttagctaagttccttaggttaatgttacctagctcaatttctatcttattggcatcatagcgactaatggaaagcacatcatcaattagttgtttcagccgttggctagaattttggatattgttaa

SEQ ID NO: 283177 - DNA, 514 bp, Zea mays
gatcccgcaatccttgcttaaaaatgctgctggtcaaatccacattggtgtactgggcggtgagcaggtcttggtcccgaaaatccgtttccgccaacaccatattttcgaaagctgaagctcccccggttacggaagaagaactagcggcgatcgccggggcagaccaaatcaaacaagccacggtgagcacaacaaggaaggactgacgaaacactttcagcattggggaagcgatgacctgaattcaatgtggcatagacaccaactagattatcagtaatcaaggcgcgggcatacccccaatggcagggagaggttatgttccactgatttcctcggcggcaagaattggtaatcgactccggaagtaactcattcaaccaaagatttgtccgggtaaattaagtctgaccttgctatgatcagggatgtcttttatcttctttcattaaatatgtactatttgccccagcctccctattttttaattgcggaagggctttttgttggg

SEQ ID NO: 283178 - DNA, 731 bp, Zea mays
ggtcgactctatgtggatcgcctcaccccagctgcccccgcctctcccatgtgctcactacctcacggcttctcctaactctaagttgaacctgtccgcaccaccgagcccttacccggatagcccttggattcttcagaagcgtacgtctcgagtcctttggaggtctgagtccatcggaccccctggttggctccgtagttgctcttacaccaatcactctaggtatggcccgtatgtccctgcttacttttcgttggagccggagcttgaccccctcggatttttatgtccgcgatggaagggttattcttcttttccttaccttgctggggttagtgctgtcccacagtgggggaactatgccccgacaaacccactcttgtccctgccatgcttaaggctgcgcccagagcctcattatccttggtttgtcagtaatccactacagatgtgacgtttgtggtctctatcgggacttaggttgctctcttgtttgtgtgattctgctgttgcttggtcttcgtcgtcgttccttaactttccttcttctctgggtatgcttcctggtagtgccccccctttgctcctatgtcctctaccccttctttatttgtttctgtgacagaattggcccaggaagccggtgtgagcgttcgcactgtccagacctgggctaaggctggttaattctctaagcaaggctccaacgcctatgacatccttggtta

SEQ ID NO: 283179 - DNA, 674 bp, Zea mays
ctgcaggttgactctagaggatcgccgtgggattttctccggtaaaaatggcggcggcgtcggggttatgttgattttaacagctaatttatgtctgtttctactggcggcgaggttattgcaaaacaaacaatggttgaaccggttagtaaccgttgttttactggtagggctattggtggggagttacggtctgcgacaacaggtggacggggtagaacagttagccacttggaatgaccccacctctaccttggcccaggccactagggtatatagctttttaggtaatcccaatctcttggcggcttacctggtgcccatgacgggtttgagcttgagtgccctggtggtatggcgacggtggtggcccaaactgctgggagcaaccatggtgattgttaacctactctgtctcttttttacccagagccggggcggttggctagcagtgctggccctgggagctaccttcctggccctttgttacttctggtggttaccccaattacccaaattttggcaacggtggtctttgcccctggcgatcgccgtggcggttatattaggtgggggagcgttgattgcggtggaaccgattcgactcagggccataagcatttttgctgggcgggaagacagcagtaataatttccgcatcaatgtttggaagg

SEQ ID NO: 283180 - DNA, 709 bp, Zea mays
gcaggtttgactctagaggaccttcgtttacgggtgggggtacgtcaagggggctgttctggcatgttctctcgatggactttgaagaaccgaaccgggcaacggaacatgatgaagtgtttgattatgaaggttttcagattatctgcgaccggaaaagtttgctatatctctatggtttaatgctggactacagcaatgccctcattggtggagggttccagtttaccaatcctaatgctaatcaaacctgtggttgtggtaaatcctttggggtttaaattttcattctagttttggcgatcgaacggtaaaaacaccagaaaaaattagggtaggagtggtggctcctgctctttttttttgctattttagggaattttttcccgtactgggactaactttttcgtagttgagcaaggcaatgctaaacgtaactaggcataccccgaaaatttggatattggtgaggctttcttgaatagctaatcctgctagcaccaccgtcaaagcgggattggttgccccaataatagccgctcgactagcaccgattaaatggataccccagttattgagcacatggcccgccaaagtaaataaagcggacaacagggaaccaatggtgatggcaagccagggtaaattaccttcatggggttgccaaatgattaaacaaagaatggacagaattaacgtggaggcaaaa

SEQ ID NO: 283181 - DNA, 773 bp, Zea mays
ccctggcactgctccccccgaccaactcacttccttacaacttctgctgggggaaatttacctcagtcaaaatcgccccgaccaggcgatcgccatttatgaagccgctagcaaagtcaacggcaatgattttcgtcccgtcctagcccaggcccaggtcatggcccaaactggcaaagttaaggaggccgacccttttttccagcaggcaattatgctggctccagtgcagtataaggacccgataaaaaacattgccctccaggtgaccaaccaggctttggccaatcagaatggagcccccgaaaccagtatcccttcccccgcccccatcctcaagtcagaataaaaggaagtcttagggggccctggccaactggtaggatagaaaaattaacaaaatttagtaacaatccagggagggaaccctcagtgatgtcctttttgaaaaatcagttgtcacggctgttggccttaattttggtggtggcgatcggtctgacggcctgcgacagcggcacaggactcaccggcaactatagccaagataccctgacggtcattgccaccctgcgggaggccatcgatctaccccaggatgcccccaatcgccaagaggtgcaggacaccgcccggggccagattaatgactatatttcccgttaccgtcgcaaaggtgatgccggtgggctgaaatcctttaccaccatgcaaacggccctcaactccctggctggatacatacacttcctacggtgcccgtcccattcccg

SEQ ID NO: 283182 - DNA, 883 bp, Zea mays
gtcgactctatgtggatctatcgatccaggccctgcctaactgtgcaagcattaggcagccaattgttttttattcatccacagcgctgacagccagggactcatcttcctcatcatcggtgtcatcaacggaagtggggggctcatagggaatgccctgggcttccgctaaacgtttttgccggaaaatttccgccatttcgtccgccatttcgttgactaaatcccggtcttttagcatggcaccgggttctggctccaattgcttggtggaaagggaaatacgaccccgttccgcatccaggtcaataatcatcaccttgatttcatcattgacattgaagacgctgtggggagtatcaatgtggtcgtgggaaatctcagaaatgtgcaacagaccgctgacacccccgatatcgatgaaagcaccgtagggtttgatgccccggacggaacccaccactacctgggccacttctaaaccgttcatcttccgctctaccagagcccgacggtggctgagcacgaggcgatttcgctcttcgtccacttccaaaaacttcaggggcagatcctcccctactagatcctctttcgcttcccgagcgctgatgtgggagccgggaataaagccccgcagtccttcaattctgactaaggcaccaccacggtttgtggcaaaaacattggagcgcaccgtggcatcttctgcctggagttgtctgacccgttcccaagcccgcatatattcaatccggcggatggagagggtgagctgaccatcttcgttttcatcggtcagaatgaaaaattcccgggtttcattgggctggagcacctcttcagggtcatccacacggttgatccccgggtaccgagctcg

SEQ ID NO: 283183 - DNA, 929 bp, Zea mays
caggtcgactctgaggaccgccaaccccacctgggccagggtgaaccaaaaaccacgccgacgcttggattgggtcaagttaacactaaaaactaacaattaaatatcctccttggaatttggctcccgtcactcccttaccccgtagattccccggtaagtcaatgttgcgccgctgatcccccgcttcaatggttaactccggcccggactgggttaatttcacctgacgtttatcaaaaccgggcaaaaataccttcacctggcgggcgttaacgtcaatttccaatggtcggggagccgaccccatggcctggggattagggagcgcatccatcaggggttgccagttaccttggttgtaacttggtagagccgcaatgagcaacggatcaaataaatttgcatctaaactgccattacccaagggagtttgaatcacgccctttactgttactccgacttgctgggccccaccccaatagctctgggctgctttttgcgccagggaatcagtgctagtaaccaaataggcggcaaaccgattggggtcggcgatcgccgctttaccttgttgcaataaattttgggggccatcgggatggttgagcatttggtctggactccagttcacactcagcaccgcactggccacgggttgcacaaagggggaaagggtctgcaccacttccgaatccgccaatactttctggaaacgccgccaataccaactggcaatttcgggaatgcccaacattctcagagtggagaggttaccggggccgtcgtaaatcagcacgtcatagcgaccactgagttcgtattcccgcagggcattgagcaccaacacttcgtccatgcccggcagaactcctaattcttccccatagatatttttcagcgccggcgatcctcgggtaccgagctcg

SEQ ID NO: 283184 - DNA, 585 bp, Zea mays
tttttatgtgccgcaggtttgcttagaggatcgccgacgatgagctcgtactgcaaaatacccacagcattaaatgtcgttttgttacagaaaacttgccgtagaaccgttccggggccatataggcgggagaaccagtgtaacccttgctgaaattaggattgcccgttttagctgttaggcgagcaatgccaaaatctgatacttttacctgccatccctctgcccggggtattaacaggatattttccggtttaaggtcacagtggacaatgtcatgctgatgggcttgggccaaacccagcaatatttgtcttaataaatctatttttcccgccaaacataaatctccgtccccatcaataatgtcccgcagagttcccccctcacagtaatccatcaccaaatagcggcccccaggatggtactccaaaccatggcaagccacaatgttgggatggcgcacggtcaacagataggacagttcccgcagaaatttattagtgggaaatacccgatgttctaaatcctacagggcatacattttgcccgtagtccggtgaatagcacagtagacccgcccga

SEQ ID NO: 283185 - DNA, 483 bp, Zea mays
gatcagctcacaacatcggcaatgggcatgatgctaccatccccccgcacggtttcctttgcaatgcctggaggtttgggaatgggcccttcaatttgcttgataacaatttcttcttcccctaatacctggtctatctggagggctaacaggttaccagaactcccccggtcaatgatgacccgcaccacatcttcctcttgcttgcccccatacacactaccccggcttaattgccggttatggttgagcaaacctttgaggggatagagcggtaaaagcagggcttccttgccgtatttaacgcacttttgaccatcctcatcggtaacaatgtctttgggcaaatagtccctggtatcttccaccccgtccatgggaaaggcgatgcgagcccgatcgctcaggcaacaaagggctttgcaaatgctcagggtaaggggcaaacgaatggtaaaagtggtgcccttgcccacagtggat

SEQ ID NO: 283186 - DNA, 626 bp, Zea mays
ccccgtagaaaagttttccaaagagagctgatggccatatttttttttcattaccaaaatagtcaccgtgaacaagatggatgtaatagttccccccattctcgttttcacaaacatggtaaaaaatagtaataaaacaattgaccaaaacagattgcggtaatgccagttatcaagatttttctgtcgatatttgccaaacataaatccctggctccgtggccatcaagcatctaatcaacattgatgcagacggcgggccatttgtaaggctaataaaccggctttccaagcgatggtggggagataattgggccaataccggctacctttgcaaacgagcctggacttgccccttggcccccaccaaaaaaacttccctttgtttggccaacgcatctttgagcatggtttcgatcgccagtagggcagtgacgcccaagcggggtaccgtggccaaatcgaggatgagcacatcgtaattttccacaatggctaacctgcgggcaatggatttcgccgccccaaaactcatgggcccactgagatggaacataaaaatgcgaccattggctgcccaaaaaaattgttgttcttcctctagtagccagtcctccccatcggcc

SEQ ID NO: 283187 - DNA, 386 bp, Zea mays
caggtttgctcagaggaccgccgagttagaccatttagccaaggaaaatcctgatcgtttaaccctagtgccgttggatatcactgaagagtgccagattgcacaatttagccagcaattaggcaaaactgaagtcaattggctaattaattgtgtgggcattctccatgtagaagataacccaccggaaaaaagtctgcgccatttacaaccatcccaattacagcaatattttgccgttaacagcattggcccagtgttgttagccaaacattttttaccccatttgcgccatgcttcccccagtgtttttgccaccatttccgctaaagggggcagtattggggatacccagttgggaggatggtacggttatcgagcttcta

SEQ ID NO: 283188 - DNA, 880 bp, Zea mays
caggtttgactctagaggaccagccgccaatactctggtgtccctggcccaactggggggtacgggtttttttgcctgcaaagtgggtaaggatgaagcgggagccttttacctccaggatttgaacgattgcggcctcgataccaatccccaccatgaaaccgctggcgaaggcattacgggcaaatgcttagtgtttgtcacccccgatgctgaccgcaccatgaatgcttttttgggcattagtggcagtttgtccgtaaccgaaatggattggtctgctttaaaacagtcccaatacctttacctggaaggctatctggtcacttcccccagtgccaaagcggcctgcattgaagccaaggcgatcgccgaacaatccggggtgaaaacctgtctatccctatccgatcccaacatggccaaattttttcaagacggtttaaaggaaatgctggggtcaggggtagatctactattcgccaatgaagcggaagccctggaaatggccggtacttcagacctcaaccaggcgatcgcctactgtaaaagtattgccaaaaactttgccctgaccaggggcggagcaggctcactaatttttgatggtgagaatttattgaccattggcacccccaaagtccaacccatcgatacggtgggagcgggggatatgtacgctgggggatttttatatggcctaacccatggcatggactatgaaaaagctgggcaattggcttcggaaacagccgccaaagtagttacctgttatggtccccgcctagacacagaaattctgcaagagattttacagtctgttcaagcagtttagaacaaaaagctacttttctcccaaatcataggagggactaagcca

SEQ ID NO: 283189 - DNA, 550 bp, Zea mays
caggttgactctagaggacctgccatgctgaagggaaaggacaaagacaacccccgtgcagttccctggttaaatttccagttccaatttccaggtgatgtcatggctaatttgttcaactggcttcccctcctcagtggccgccaagcggatgggatcaaagccaaagtggaaatatatacttggcaaacttgccctttttgcatccgggcgaaacttttactgtggtggaagggagttaagtttatcgagtacaaaattgacggcgatgaccaagccagacaggccatggcggcaagggcagaaggaagacgcactgtgccccaaatttttgtcaatgaccagggcattggtggctgtgaccaactgtatggcctggacagccgcggccagttagaccccctgttggccactcctcctaacccagcctaggtattatttgtccctgtcctgttttcccctgtgcccgtgaattccccagccccctggcaaaccattgcccaacaaatcagtcagaccactggtcgacccttccgtatacaggaacggc

SEQ ID NO: 283190 - DNA, 603 bp, Zea mays
gcaggtcgactctagaggatcatgccccgacgacggttcaaatcgccgattacatcccccatatggttttcttgggtgaacacatccaccgccataatcggttccaaaatttggggtttggctttgggcaagctttgacggtaaccagctttggccgcaatttcaaaggcgatcgccgaagagtctacagggtggaagccaccgtcggtgagggtaactttcaagtccaccacaggatagccagccaaaacgcctttaaccacactctggtcaaaacctttttgtactgcgggccaatattcccggggcacgttaccaccggttactttggactcgaactggaagccagaaccgggttccccaggctccacgatgtagtcaattttggcatactgaccagaaccaccggactgcttcttgtgtacataggtatccgatacctgctgggtaatggattcccggtaggccacctggggtttacccatttccacttctacaccatgggtacgcttgagaatatccattttgatatacaagtgcaattcccccatccccttaatgatggtttcaccgctttcttggtcggtttccacatgaaggaag

SEQ ID NO: 283191 - DNA, 345 bp, Zea mays
cggtcgactctataggatccccctgtccccaaatagccaacaggggcgcttgtaatttagccaggagtttatcctccatttccccctggggagatttaaacaccgaggcaaacacctgggccgcccccccatcacaggaaggacgataaatttcttccaccaggcgatcggtcactgctgtttgatctacgtaaactttttgtaaggtcttccgaatggtgggtttgcgccgcaaatattgaaacagtaagtaactgggtaggggctggagcatcaagctttgaattgctttttgcacaaaattaataccgcgctcactattttgatccccgggtaccgagctcg

SEQ ID NO: 283192 - DNA, 582 bp, Zea mays
ggtcgctttgtggatcttgccagcaccagagcaaactccagaatcaaaattacaagaaattgttcatctgcgctagtcagtggatttataaacacctgattagaaaagaaattcttaatccctcagtgccagagaaagagtatgtctctggtgaaggatttccttatttagggagaaactatcgcctacaagtcattgcagatgatgctagtcaagaaaaacttaaatattaccgaggacgatttcagctacaacaatcatcgcaacaccaaggtcgagaattatttattgaatggtataaaagtcatcttaaagcccatcttcagagtaaagtggagcagtttaagcatcgagttgaagtcaatcccaactcaattcagatcagagagcttgggaatcgctggggttcatgtagcacacaaggagatctatattttcactggcgagtcgcaatgcttccaagcaacataggaaattatggagttggtcatgaaatggctcatcttaaagaacgccgccacaatcaaactctttgggaaactattgaatgtatattgcctgattacccagactcaaaacaat

SEQ ID NO: 283193 - DNA, 549 bp, Zea mays
aaagttagcggaataaagatactagaaattactgttggcgttttctattatttcattcattcgattactaacagaggaaagataaatatctgttaggttagatgctaaatctcgataagtttctatcatatccaagatttgaattgtgtggtcataacaatcccgtaaaaatactcgcacctcatcagaaattaaatcactgccatcccgaagtaaagaattaattgcatcccgttggggccaaatagcccgtctcataattaataaatcctgttgtaattgatgaatcttggccaatgatttattcgttggacaagaaataatctcactttgtaaagattgaactagttcaccatagacttccatcacaggaaaaaagccatcgataatagcatcaattaaagcataaaataaataatcagcattcttttgtcgaattgccccttttttagtgcgaattctttccctaacggaaaataaacaatcatattttggttcatcttggatggtcaacaaataatgtttatcaaaataaaactaatttgtcac

SEQ ID NO: 283194 - DNA, 788 bp, Zea mays
caggtttgctgtagaggaccccccgagggtattgccgtcattactacccagtaagtaaatgccattccccttattgcgccaaccttggccaacaactttattgatgttttccacccgtcccaccatgccaataaccggcgtgggataaatgggttggggtctaccgttggagtccaacgtttcgttatacaggctgacattgccccccgtcactggggtgtttaactgccgacaaccctccgcaatgccttcacaggccagggccaactgccaatagcccactggattttcagggctaccaaagtttaaattatccgttaccgccaggggttctgctcccacacaactgagatttcgagccgcttctgccactccggccttggccccttccaagggatttaagtaaacgtaacgggcattacaatctgtggtggccgccaccccgatcacacattcctctggtttggcatccaggggacgcacccgcaccaccgccgcatcggccccaccgggcactatgaccgtattgttttgtacttgatggtcgtattgacggtaaacccaatgcttagaggcaatggtgggactgtccaacagggttaataacacttcattccagctttgcttttgccctgcaatttcaatgccggcgatcgccgctggagataaatcactttcctgccattgccaagcttgttgggcatagtcgggtgcttggtctagcaactaacgatggtaaatgggagtgttatcggccagggctgtagcgggaatttcggccgcaatcc

SEQ ID NO: 283195 - DNA, 507 bp, Zea mays
ggtcgactttagaggatcggtacggaaatccatggacaccacatcatctgctgtgtagcccaaaattcctttatgttccccctcggcggcggttttcatggcagcacaaatttcttcgtaactcgtggctttttccgttttaaaagttagatccaccacagacacgttgggggtggggacccggaaggccatgccggttaatttaccttttaactgcggtagcactaaagccgctgccttagccgctccggtggatgagggaataatgttttgggctgcccccctacctccccgaaaatcttttttgctcgggccatcgacggtgggctgggtggcggtcatggcgtggactgtggtcatcaatccttccacaatgccgaaattatcgtctaatattttggcgatcggagccaggcaattggtggtgcaactggcattggaaacaattttgtcagtgtcggcgttgtagttgagatggttcaccctcaccacagaggtgggaatttt

SEQ ID NO: 283196 - DNA, 501 bp, Zea mays
caggtcgactttagaggatcaaactaagtggttcctccgccagtttgcccataaatggtcgtagctactctgttgggccaaatagcgttcactgtccccttccccaaaattgaccttttaatttatgaaccacggtatccataataatttttctctaaattctctttaatttaaaattgccttgaattgtaaagtttattttgtctgctcatgcaaaagttgtccaagtacaatcattgcttgctgaatctcttctgtaaaaggcaaaccaaaattaagtcgaaaacagttacgataaccgccagatgaagaaaacatactacctggagcaatggcaatattatgacgtaatgcatcctcgtatagctgaagagtatcaactatttctggcatttcaatccagagaatatagcctccttttggcctagatactctggtcattttaggaaagtaattacaaatcgcctgagtcatatccatcatttgcgcctggtaggtgcg

SEQ ID NO: 283197 - DNA, 742 bp, Zea mays
cctgcaggttgactctgaggatcgccccggcctggttccggtctggatggggcaaatagacaattccggttgtagaactatcaacagcaatatcgctaggacgaacaggatttactacggtatcaggggttaaggcaatccattccccggtaccatcggcgttaaatttcgccccatagagcgttccggcagtaaataaacgggaattgcctttatcggtgggggatttgacagtatctgctgacacaaatttgtagagatgcccactagtgcgatcacagcccgaatacaccgccaagggttgattcgctgttgcccgcaccgccacagcttcatggcgaaagcgtccaagggccgtatgtttgacgccgtaatcgttggcattggccgggtcaatttctaccatccagccatatttattgcccgccaagccaaacacattgccttggccactcaacccgttggtacttattttaagcggacattgggccggatctacggcggagccatcggcatagactgcttctggaacctggctttggaaattttcctctgcgcttaacactgtcccccagggggttgttcccccagcacagttgccaaacgtgccaatgattttttcgcccagtccgtcgtcatagccttgtttggtcgggttggtaaatatggcgatcgccggcccggttgctgttaaataatgggaatcagttaacccagaaagtccggtaatgagccgatcgcc

SEQ ID NO: 283198 - DNA, 721 bp, Zea mays
gtcgactctagaggatcaccagaggcaatttgctctcctaatcgagatagttgtgccataacgtctccttgttgtccaggattcatcaaatctcctaatgccatttttccttcgaatatatccttttccatctggctgattctattgagtaggtgttgtcgttcttcatagtcagctttaatcgactgcaatgcttgactctgagcatcttggcccgttgtttctaggtattcgctgcggccactccaagcttcagtttgctgatgggtgctcagattattttgatgccaagcattgattgcatctgggtcaattaatcctccggtgaggatgttgatgtagcctcccttttcgggatcatagacaagggtggtgtgccgtccatcgggataggcatatccaatgtcttggggaaacgttgctgcaccaggagtggtggaaataacaccagagcttgccatggaagctgagggaatttgtaaaccccctaaaatccatccgagccaaattgccaaaccagctaaaccactatttaaaatagcttggtcagttcctccacattgaatccaagtttgcaggctctgaccacattcagcccaaccgccgtcatcggcccagaccggttccatttgccctaatgtcaaactccccgcagtgaagataataaatagggagagagcagaagttgttaccgctttccgctaaagaattacacaacgta

SEQ ID NO: 283199 - DNA, 605 bp, Zea mays
ggtcgactctagaggatcgccgcccaataatccagcggggatggtgggtgctgaactttaataagggcttataaatcttttggctaatgcgagctaaccaagtttcatcactgggcaaacggcagggggctaataggagggcacagagggctggggaaagggtcatggccactagggtcgaagccaaaatggacaataaataggccacccccataggcgcaaaaatccgcccttctacccccgtcagactaaaaatcggggcaaagacaacaacgatgatgactgtggaaaaaatcacactggtacgaacttccacagaggtgtcgtaaaccacctgaaacggatgcttgggattacccaaagcttgatttttgcggagaccccggtagcaattttccatatccacaatggaagtcgtccaccacagaacctgatcgccaccgctaatccccctagggtcatggcgttaataccttgaccgaaccaacctaaaatcatcatgccaatgagaatggagaggggaaagtatctgccggtgataatcgcagtgcgccaattaataaaaaacaccaccatcaccacagcgacgatgataatgccatccc

SEQ ID NO: 283200 - DNA, 682 bp, Zea mays
caggtcgactctagaggatcgccctgggacgattttccatcagttcccattggttagtggtctttggtgccctggtgggcctagttggccaaagctggtcaatgggttaatggcctagccatgaatttaaccgagaaaataatgcaaaaacttaagcccctgacggcctaaatatgtagttttattgcaggggtaagggctcccttgacttgcgttcactcggaaataatgataggtaggagaactaaaatggcttgcccaagccccttaactataaactgccgttgggagaaccttttaaatgcgagacgcggttaccactttaataaaaaactatgatttgaccggtcgctatctagaccggaacgccatggacgagctcaaagcttattttgagtccggttcggctaggattgccgccgccgccatgattaacgccaattcggccaccatcgtcaaacgggccgctgcccaactgtttgaagagattcctgagctaatccgccccagtggtaatgcctacactacccgtcgtttttccgcttgtttgcgggatatggactattatctgcgctatgccagctatgccctgattgccgcagacaacaacgtgctcgatgagcgggttctgcagggactacgggaaacctacaattccctgggcgtacccattgggcccacg

SEQ ID NO: 283201 - DNA, 672 bp, Zea mays
caggtcgactctagaggatctccatagtctgaacggagttgattgagccatagcccaagggcttgatttcgggaggattacaacttcctcccttaaattgggactgccaacggacttttatccaagtggaaagggcggcacagtcactcagtggacacctgaaaatttacccaggcggaacgggaagaatagggttctacccaagctaactgctcgccgctattgagggcattgcgaggcccgctccaaggctcgaggcacagataatctttcccagccacagtccacaacaccagagtttggtacagttcgctgaagctaacttctatctttaaattccggtctgggtcaataaaatgggcccttggctgggaaatttgggtaaaggctaaatccaattccggggaagttagattcagttgcccgtcatagccatggcaatcgccagttttttggtctaggtaatcattggcaggaattgctaacgtaatccctaacttctctcggcagaaaaaatagggatggaaaccgagggaaaagggcatccgctgatcgccaaggttggcaatacgttgttcaatgcggaggctatggccctggagttgatagctgaaaaccaactcaaatgcaaaagggaaagcttcgagggtggcatcattgtaatcaaccgta

SEQ ID NO: 283202 - DNA, 959 bp, Zea mays
  unsure (1)..(959): unsure at all n locations
catgcgctgagctttttgggcatcgcttccctgttccgaaagttcctgcacaaaggcttcccggcccgcttgttgacggttgccccagctccaatgcaccccagaatccttaaatttgtcatcggccaccaccatggccacccgttcccctgccaattcttggctgacatagcctttggtaacgtttttctggaaccagggaaaaatggtgcggaacaaggaatagtgattgcggaataggggagtatcggctacacagcccggatagagagaattaaaaacgatgcccgtttcttggtggaagcgacggtgcaactccctggtggtgagcatattgcagagcttactatctttatacgctttgcccgatttgaattttttgttattaatcatggcaatgggtttcttaaagcccgcttcaaacccttcaaagttgcccaaatccggcggngcggngatgggaattttaccctctagttctttgctgttggccgtaacagtgcccaaaatgattaaacgcttatctgcatcgggacaggcttttaaatcttccaacaacagattgcaaagcaaaaagtgccccaggtggttggtcgccacagaaagttcatagtcatccgctgaccagaggggttcgtccagcaaaggaaaataaaccgccgcattacaaaccagagctttgaggggacgacccaattcccgaaactgggcgacaaagcggcgcacactgtccagatagcccaaatccaatttgatgatggtgtaggaatccttgggaaaacccaattcatcggctactttctgggttttatccaaattgcggcaggccataatcacgtgccaacctttgtcaattaaagctttagctccgtataatcccaccccggaggaggctccggtgatgatcaccgtgggtttcatcggttgttccatggatttataaatttttaattaattgt

SEQ ID NO: 283203 - DNA, 806 bp, Zea mays
ggtcgactctagaggatctttctagtctgaaccgctcccatctgcccacttagaaagtttttttcctcacttataaaagaaaaaaggaatacagctcgatggccgcattccaagatagttaatttgtgatctggtatttctctccctggggatcagtcaaagttaattactgaccaatcatgggtcaaaaattactagttgtcccagtattaaacttttttcagggagccgaaggtgcggtagccatgttcggggtcatataaatgacattgcccactaatttgttgcattaattgccagttaaaggtgcgctcgtaaagaaaaggtccccagttttcttttaaacttccgtgggctagtcgtaggttataggaagggatggcaacggagaggtggtggggaatttggacgttgatgtcatggcagagcacttccacccaacggggataatcgcagtgaacagtaccatttaactgggcttcggcggcactccaatcggcggcgggacggaaacgaatttcgggaatggtgtggtgcacaatggtaaaagtgctcatccaaaagtgatacaccaaccagggcattagccaaaatttgacgaaaccccacacccctgtggtgataattagggcaggaaaggcgatcgccgcaaacaggaagacaacggcaatggataatttgactttattgcggtccctttgggcaaagttggaaagtttgaagtgcattaagctccaatggaaaatggaaccagtccaccagaagggaccccggatggcccgataaaaaagccggacgatcgccgg

SEQ ID NO: 283204 - DNA, 524 bp, Zea mays
ggtcgactctagaggatcgcaaattgttggacaaaagttaaactatgattgaccaatgctgacacgctggtggggtttaaatccaaatccattctgcccgcttcaattttagaaaggtcaagaatatcattaattaatgaaagtaagtgtcggccactattttctactatttctaacgactggacttgtttaccgttgaggggaccataaacttggttttgtagagtctctatcatgcccaaaatggagttgaggggagtgcgtaattcgtggctcatattggccagaaattcgtctttgagttgagtggctttggctaaaattttgttggaaagttttagttgttcttctgcttttttaatctccgtaatatcggcgatcgtaccgataattttcacaaatgcctccccttgttcctgatggatttgcccccgcaacaaacaatgataaatttccccattggccgcttccaaacggagttctgtggatagttccatggtgggatcttccaagctttgctcaat

SEQ ID NO: 283205 - DNA, 870 bp, Zea mays
tcgactctagaggatcgccgcttcgataatcggttggggggctttgccatcggggttgcccatgcccatttcaattaaatccaggccctgttccctggccttggctttcaactcatcgaggcgggcaaaaacataggggggtaaggcttgtaggcgatcggcgcgactaatccaattcagactcattaccaaggcaatttggggacgtaaccttttattgtctcattgaccggcactggcttgatctcgcctcagcaaaattttgactggaacctatggcaaccatggcctaggctgcattgcggattttgatggctggattgggctgactttccaaagccagggcccattgccggattaccctggcgatcgccttttgcagtagtccttccgccacctgttgacccatcccgacgggaagtgggattaacaataatttgactcaacaccggcacaaacttgagggggtcaaaaccgggggtctctttaagaatttgccaaagattttgtaaatgctgccaagtttcctcctgttgagcgatggcgggttgaggcacaactttgatcgttttggtttgatgggctttaccgttgccattacctaagtcacccagaaaactaattctttcctggatattgtggctgacctgttgccaagtgttgcgccccagttgatcaatactgttgactaattccgccaccaggcgatcgcgaatgaattgtccccggtctgaaagtaaaaattctgttgcttcattaagcacataatcaaaatcaaagccaggggaatttttggcattacgcaataaattttccaaacgattccatcggaaactcccctctttaaatagtaattctttcagggaagtg

SEQ ID NO: 283206 - DNA, 535 bp, Zea mays
caggtcgactctagaggatcttcgacgatgcccattatctggaagtcaaatttcggctttggctcaaaaaactgaaggacgtgggggttcccatgctgttggcggccactaatcccccccgcactgacttgtttatctatgtgcctcgcattgaactcaagcccctggcggaataccagatccgagacttgatggaaaaagaggccatttccctggggtcgggactaaagccaaaccagattgccaaactgcaaagccgagctgggggtaatcccatgttggctaagcgggccatcgaggaaggttttttgggcatccaaaacgaagcgggcgaccacggcagatactttgacatcaccccgttattgctcctggtgggcattgtctttatttgctatcggttcattggtttgggcaccggcaatcaatccctctatatcttggctggcattggtggggccatattcctaggggtggcaagactttcctattacctaccgaaggaaatcacgaggatccctcggtaccgagctcg

SEQ ID NO: 283207 - DNA, 645 bp, Zea mays
  unsure (1)..(645): unsure at all n locations
gaccacctgtttcccgtcaaaaatagccgtatcagggtaaaaaacgccgtaaacgtagagaaatcgccctggggttaaccaagtccgcatagtgccggtggcatcgggataaccttcatcaaagttttggatcactttggcgtaggccatgggactaagtttgacctgaaactcttggccgtcggtggttttcagaccaaaaatatccgcttcttggtcgtaacttgtcacataacctgcaatcagatcggaaaaaggaaagttaattttgggactcatatgttgatgccacgggaaggacggaaaggtttttaagcttcgatttgctcaacaaaagttttgacaaattcttcaatcatgcctggatgtttgccggtaattagatcgccgtcaattaccaactcggcggtctgatcctcttcatacaccacatccgctccagcattttccacgtcacaaataatgttgtgggcgcaggtgacttttttatctttaagcagatcgggatcggcgcaaaatagccataaactatggcaaatggttcccagctttaacccttcagtggccgctgctttacggagaaaaataactgcggnggcttgatttttttcaccttttttgacggtggctttgtaccgcaagcga

SEQ ID NO: 283208 - DNA, 914 bp, Zea mays
cccgacgctatgcaccaccgttgacccggcaaaatcccgaaagcttatattttctaaccagccccctgtagtttctatgcctgccactgttgctaagccattccaagcccaatctccaaagaggggataaatgagcccagaagctagccccgccaccaataagtaggcagaaaactttaaccgttccgccgccgctccggaaataattgtagtagcggtgccgcagaacatagcctgaaacaggaaaaacaccgctagggtgggttctccccctacgtcaacaaagctataacctgtgccccaccagcctccctgggacagtccaaacataatgctgaagccaaaggaccaaaaaagagccacagaaatgccaaagtcagcaaaatttttaatggcaacgttaatgctgtttttagaacgggttagccccgactccaaacacataaaaccggcttgcataaaaaatactaagccagcacagagcaacagccagagtgtatcgatggaggtcatggggttagggcggcctcttgccaacgggctttgagttgtttgcgcttgaactggtactgttcagcaaagcggggaatttccgagcggtgaccaatgacaatgatggtgtcgttctcgttcaagatttgcgaagggtggggatggagaatagtactgccatccgctcggcgtagggcaatgacaataaaggctcccttactgcgaacttccatttccataatggtgcgacccatggcgggggaatccggtgccacaattagttcatccatttgtacttccacgctggccaacaggtcatttaaaaaaccccgttcatcggggcgattgagaaaatcccgccggttcgattgggtgattaaatccgccatctgaactgcccccaccgtcaggggtaaaatcac

SEQ ID NO: 283209 - DNA, 670 bp, Zea mays
ggtcgactctagaggatcgccgaggagtgaaagtcaacgattatttgcaaactaccagcccgcaaatttattttgccggggatatttgtatggactggaaattcacccatgccgccgatgccgccgcccgcattgtgattaaaaatactctcttttctcccttcggtttaggacgcagtaaactaagcagtttaaccatgccttgggtaacctacaccgacccagaaattgcccatgtaggattaaatgaaactatggctgaggccttagacataggctataaaattattaaaattcccttttcccaggttgaccgggcgatcgccgctgacgagacagagggatttttgaaaattatccacgtagccaacagtgatgaaattttaggtgctaccattgttgcctcccatgccggggaaatgatttctgaaattaccacggctattgttaataaaattggcttaagcaaattagccggggtgatccatccctatcccacccaggccgaagcgattaaaaaagccgccgatacttaccgccgtactttgctcactaataatacgaaaaatttactaaaacttctaactaaatttcccagtaaattattctagaaaacatggttgaaaaccctaaaattgtactcaatttaagactggccacaacaggtttc

SEQ ID NO: 283210 - DNA, 744 bp, Zea mays
ggtcgactctagaggatctgttgtaagctaattttagatgtctgaagttattcgtcttgataaagtttctttgtaccgtcgaacccaggaggaattttcctacgacctgaagcgcaccgtactatctttcattgagggtaagtatcgtaagccctcccgtaagctaatcctagacaatatagattttacggtggtgacgggggagaaagttggcattattggttccaatggttcggggaaatccaccctgctcaaggtaatttgcggtattttggaaccctctgctgggagtttgcgggtgaggggggaaatagcaccattgatcgagctgggggctggctttgacccggatttgtgtgtgcgggataatattattctctacggtgtgatgtgtgggattttcccgccaggaaatgttggagcgggtggattctatcctggattttgctgagttacaaacgttgggggatatgccggtgaagtccctttcttcggggatgtcagcccggtatgggttttgccattgccaccgatgtggaacccgatattctaattttggatgaagttttatctgtgggggatgaaagtttcaagcacaaatcccaagcccgaatggataagctctggggacacaatacgacgattctcgtggtttcccatagcctgggctttattcaagatgcctgtcccaccactatctggttagaccggggggtggtgcgttatatgggcaaaacctccgag

SEQ ID NO: 283211 - DNA, 815 bp, Zea mays
gttaatggtttttgacgggtggtttcccgctcaaaggctaagcctgggggattttcccctgccgttgctaataattgaccgtttaagtccaaaaaccggacataatagcccggctgttgggttgcgttgagaatatgcctccgttgaggcgacctagggcaagctactgtacctaagcaaagattaggcaaaatttgtttaaccgagggctctaactgccccggttgttgtaatagtggttccagtccatcatggagggttcctgctaaagaggttaattcttgatccagcgatcgccaatgatcctgggaagtcatttcatagaccgctaggccacaaagacccaaaataagtcccatgaccccagcgtaataactggctaaacgccaacgggatagattgaataatctattgttctgcatgggttggatggggctgaaaacgataccctaagccatacacagtttcaatgagattgccatggctatactcccctaattttcgccggagcaaacgcacctgggccgctacaacattactggtggattccgccgacagcgcccacagttgatttttaatttgttcactactgagaatttgttggggatgcttcataaaatattctaaaagctgaaattctttagccgttagggaaatttgctgtttatctggcgttactaccacaaaagttccataatctaatcgccagtcccccacctgtaactgctggggttgcaattctggcgatcgccgttgcaaagaacgtaaacgggctaatagttccgccatgccgaagggcttaattaaataatcat

SEQ ID NO: 283212 - DNA, 652 bp, Zea mays
caggtcgactctagaggatcgcctggccatagcgaccaccaggttgactgacaaaacccaccatggactttttggcatctacccccaccattacatccaggttttcaaaaggcccaggggaagattgttcgtctctgcgctctaccatcccttggtctgtttccacacagggtaaacctcccctctggccacaaccggctaatactagagccaacaaagagaacaaaatccagcttttcacgcaaaaacccagaaagacaataatggaaatgattcatcagagcgggagttcgcccattagcctaatgcactgctctgaaaaaatcaagcgcctgcgggtgagcccaagtcatttcgattctaagcgagagttccttgagttattccctaaagctttaatagtcacggcgccaatattaaagtgaccccatcccttatccattgccattacacaggttcaaacaacttaaactgttttgtattgttactaacagattaaatttttactgaccggggacgcttagaatctccccaagctgatagccctgctaactaattaagcacagacagaaagcacccggtttgaattgcctccaggataacacagataaaatgggaacttaatcacccttttgcctaaatctgtgaaaac

SEQ ID NO: 283213 - DNA, 414 bp, Zea mays
gtaatccacggtgccatcaaatatagaccccacagaatgcctggctttagctgggcggactttgcctgccatcagtagccagcaagaacttttggcgatcgcccggaaaatttgggtatgttcgataatctgtgcaaatttctagctgatatcattttccgaagactatgccgcctggttgttgggacgaccaatcaaattgaccaagctcagtccgacggaattatccctggaaccaattcgcgctgactccctgattttggagcaatcggaagacttggttttacatctggaattccaaacggaacctgaccccaccatgggttttcggatgttggattatcgggtaagggtttaccgccgtttcccccagaagacaatgcaccaattcgtgatccccgggtaccgagctcg

SEQ ID NO: 283214 - DNA, 553 bp, Zea mays
ggtcgactctagaggatcactttgctagggggcttaatccttgggtaggtctaactaatttctcaggccatatttaaaatccatattgccttcatagccagtgagctctgccaattcccggagagttttgaccccagggtttagttctccgtcaatgccccaggtggggaaggattgaataccgacatccacacaggtttgggtctggggatttttcccggccgggtcgcactcaatatagctaattttttcaaatgcttctttgccgaaaagtagtttttggtcatagcagtggggacaccagaaggcaccatagttgagtacccctttggcagtgaggtattccgccaactcaatttccgctggtcccgactgagtggtgatgggccaaccactggggggtctgggttgaccggcaatggcaggaatgggaattgtgccatcggctccggctttaggcccttcagcagtggcatagagacccagggtgccgacaatggttaccatggccaccacgacggtggtaaaaaatacttgactcactttttcccac

SEQ ID NO: 283215 - DNA, 735 bp, Zea mays
gaaattgctgaagttgagcaagtcctctgacaaaggttggacagtcattttcggagtttatcccttcccaacttttgatgactaagctccgttttcctgaaccaaccaatgatttaagttaactagtttggagagggagcacttttgttagccatattggagcagaggctggaggtggcactgctcctttttgccatccccccaaaaaatggtttataatcggggtgtatatcaaggggccgcaatggtttcgacaggttggcgaaagcttgcccgtgatacaggtcgagagtgagtctcctctcgcaaatcaaaggctcaaaacaaagtagctgcgaataacatcgtcagcttcaaacgggtagccatagcagcctagtctgtaaaagctacattttcttgtcaaagaccgtttacttcttttctgactccgttaaggattagaggttaaccccaacggatgctttgtttggctcttctctagttagcttagcaatcaagactcagactagagcatcccaccatcagggataatcgatggtccccgtcctagggctagaaggactaaacctgtgaatgagcggaaagttaatacccagtttggacagcagttcaattctgctcggctccatttatttaaagattattcgaccatacttacaagacctttacgggggcgcagcggacaggaataccgatcgccccacttatttttttggccaaattttgtagggt

SEQ ID NO: 283216 - DNA, 951 bp, Zea mays
gcaggtcgactctgaggatcgccgctggagcagtccatgtgtattcccagaccagtagccagccctttggtatagtggctacctatactgggcctaatattcctgccgccaatggagtaggggcaaactatttggccggagcggccatttccctaggggactttacagatttagacggggatggccatcaggatttagcaatttctgccttgggagttaatggcagtgcgggggcggtttatgcacttagcggcagtaaatttaccccttccagttctctccaagccctcaatgaagcaggtaatttaatcattaatggcggcattgctgggggtcgggccggcatgaccattatgaccccaggggatgtgaacggcgatggttatcaggactttttaattactgccccccaagcaggcaacggcacagggcaaagttatttactgtttggccccttggatttatcaaccgaaatagtaccgatcattgaattaaatgcgatcgccaatgacagtaaacaagtttttgtattgaatggcagtttgcccaatcaactagcaggaacagcagtagttagtttagggaatatcacgggcacacaagggccgaacaacagacccattgatagctttttaatcagtgcccccaatgcccagcaattttatgtggttttcggtcagccttggttggccgccgatggcagtcttaatttggcggatgttgcttccgataacggttttgtcattgatggcaatttaattggtaatcctcccaccacgtttgaaactacatcccagtatattgacaccaccccggcaattcttatcaatggctccaacctttacctagcctataaaggtttcggtggcaataaccaaatttatttcaccgtcagcactaataatggtcaaagttggaactcggaagtacagttacctcaatctgcccaaa

SEQ ID NO: 283217 - DNA, 669 bp, Zea mays
caggtcgactctagaggatcatcgtcggggaacgccacgtagccccccaggggaatagcccggatggaatatttcgtttcggcaccttggtatttcaacagcggtggcccaaatcctaaggcaaagcgagtgacatggatgccctgtaaacgggcggccgcaaagtggcccaactcatgcacagcaattagtactgcaagtactccgatcgccgccaacgccgctaaaactgacataaatttctcaaataggaaaaaactggggacgaaatcccgccgaacgtgtaattcccccgattttaacccaacggccgccagaccgtgttccctggcccatgcaaacccctaagtttctgttaacctgaagaaggtgagggtatctgacaaaaattccagattacacagttatcaatatcaactctatccgttagtcaatggcggctctcagaattatatgggcgatgagcaccaagatattggcaaggtaatagcaaaactggaaacttcaaaggaagtcgttgctaacctaaaactccagacctttcttcgttctgcttttctctcagaggcatcacatattaacagtggtgaggatgtcggcaaatttctagaggctatccttcaagaaggggaagaaatgtttaattgccttgccaaccacaccccggtt

SEQ ID NO: 283218 - DNA, 907 bp, Zea mays
cacatttggttgtcccctaccttggtgaaacgacaggccaccacgatcgccaaggagttggcggaattggacccggataatcgcgaccagtatgaggctaatttagctgcatttttagcggaactagagcggttaaatcaagaattaggacaaatattgcaacctttaccccaaaggaaatttattgttttccatccttcttgggcttactttgctcgggattacaacttggtacaaattcccatcgaagtggaagggcaagaacccagcgcccaggaattgaaacagttaattgatacggccaaggaaaataatctaaccatggtgtttggggaaacccagttcagtaccaaaagttccgaggcgatcgccgctgaaatcggagcgggggtgggagttacttcgatcctttagccgctgattggtctagcaatctcaaagccgttgcccaaaaaatcgccaatgctaacagtgcccagccctaatgccaacgtccccatggttgattccctactctcccaaccagtaattgccgttgaaaatttattcgctggttatggcgcgacgccagtgctagaaaatattaatctgcggctggaggaaagggattttctgggcttaattggccctaacggcgggggaaaaaccactctgctcaaagtactgttgggattaattcaaccccagcaaggtacggtacaaattctcgggcggtcagtggaacaggggcggcgttgcgtgggctatgtaccccaatggttagagtttgaccgggcgtttccagcgcggctgttggacgtggtcacgatgggccgtttggggcggggtgaattatttcgccgttatcaccagcaggatgaagccattgtacgccgttgcttagagcaggtggcatgaagatttaggc

SEQ ID NO: 283219 - DNA, 606 bp, Zea mays
caggtcgactctagaggatctgcctacgaaaacaggtagtgtttgtttcccaagatgcttttttcttccatcgttccattattgttcattttccgtttaagctcaccagatattactttggagcaagttatatcagcttgccaaatcgcccaagcccatgaatttgttagtcaatttccagagcaatatgaaacaattctcggtgcggtggcggcaaatatttccggaggacaaaaacaacgcttggcgatcgccagggcaattgtaaacgatccagcggttttgattctagatgagtcaacagctaatcttgatccggtgacggaagctgaagtactcaatagtttgctgaccaagcgccaaggaaaaacaacgattttaattagccatcgtcctaaggttatcaattgtgcagattggattatatttttagaatcgggaaaggttaaatttagcaatacaataaaaaaatttcgttctgaatttggaaatgcctctgattttttatccccttaaacaagatataaaagcattatcaattctactttacgagattttatttgctatcaaaatagtataaaatcagaaaattccacatatcgcaag

SEQ ID NO: 283220 - DNA, 571 bp, Zea mays
cccccaaccgccgctcaaataaaagattgctgacggagaaggcttcattattttcaaacaagtcaaaatctgccagggttttatctagctttgctaacagtttctggctagcggtaataggcaactcaggaaaacgactgggagtacccgccgcccaactgcctcccaaaatttttgccaagggtttgagttgatatttttccaccgcttccccactggccaggagcaaagctgccgccccatcggtaatctgactacagttgcccgctgttaacactccgtccttggcaaaggccgagcgcaatttgcctagactttccacggtggtgtcactgcgaataccttcatcactggctaacacctgggttcctttccgactggtgatttcaatcggggcaatttctgagtcaaaataaccagattccgtggcgtgggccgccctttgttgcgataagcaggccacttcgtccaattctatccggctgaaaccatgctctgacggccaatttttccgtctgttcccccatgccctccccattggtgctgtccgtcaaaccatcatggagcagga

SEQ ID NO: 283221 - DNA, 539 bp, Zea mays
gactctagaggatctcaactctgataaaaacaataaaaactgacctttgcaataccgtcgttttggctcgcaccaatctgaatttatctgttttttccctgggcaccatgcggggcttaggcaatcgccagcaatttgtggctacggtggaaaaggctctagccgggggcattaaccacatcgaaacagcggcggcctacggagaaagcgaagtttatttgggggagttactgaaggaatataatcgctccgatatttacctcaccagtaaagtttgtcccacggagaactcagcacaatttatccagggccttgaccgttctctgcaacgactccaggtggattatttagactgctttgctatccatggcattaatacctccgagcattggcaatggttacagcaattgtggccggcgatagaaagagcccaacaacagggaaaatttaaacatcttggcttttctacccacggtagtttgcccctagtacaagaggtcgttgcttcgggaaaatttgcctttgttaacctgcattat

SEQ ID NO: 283222 - DNA, 744 bp, Zea mays
aggatctttttcccggtttagcggacatgctcggagaagccccctccagtggaagtggtttttagatgacttggatgccttgttgagtgacaccagctcccccggtgccgatgctgtaatctcaacttccctagacgattttgacttcggcccggacgaccatgacccctagactttttcccctaaatttccggtaacaaattgaccttaaagcggataaacccaactaactttactgggcttatccgtttttttgatgtcggaaagaatgagttaatcgactaattcactattgaattcgttataggtacgctgtttcagttccatggactcggaacggggcaataaatcaaataaatcccggagaacatcatccactacttcaaacttaagtgctccctggggcgtcgaagaatttttttgccgcttttgtctagaattaccggtctggggtacccccccgctgtagtaatagccaggctcatcgcgacggaaacgctcttggtcgggaatgctgtcaacggaaacgggaataatgctagcaacccgaccgtaaaattcctgcatacgggaaacgatgaaagcatactgtttgcaatctttactgtcatcgaggtaataaaccaaaataaccggcaatttgcgttcaaaggattctcttaggtttaagcggggcggcaccaaggaaccattgccggcatatacaacaaaaatattgccatcgtaacggtcatcttccaaagc

SEQ ID NO: 283223 - DNA, 323 bp, Zea mays
gctttaccccccttacgtcgggcagggcgggaactaatctgtaactcgctattttcaggaatgggggtaaccgtcaggaagaaatctaaaaagtccggttcttcgtaaatcaaactccggtaggctcgacgggcagtgcaggccaactcctccataatccggttccagggctcaatgaaatcaaaactacttttaagtaaactagcttggatgaccgccgtggttaaagtttccaggttgtagagggccaactctggcagggaatatttagaagctaacacttccccttgttcggtaattttgatccccgggtaccgagctcg

SEQ ID NO: 283224 - DNA, 945 bp, Zea mays
cagttatgggaaatatttaactgaccccccacaaaccatttcgcaaagggaggttgccaatccaaaacctggtcccattttttaaaccaatgtaattcctgctccgccagctcaccccaaaacttctccggattgctggcacgcccggctgtacagttgctcatactcccgcccactacgcacgtaagcccgctcactaaattctgtagggggatcaaacagtcgctcttcctgcaggatggattcaatggtatctgacatggttctccgtcaaagtctttaatggcttgggcccaacgttgatgattgtcgcaaaaatttttcccctttccccagatttgtaaccttttgtatttctttgcctctgctgtttaccctgggggcgatctaggatagaagaaggaaactagtattggtccgggttaattggacagtggggaaaagatcaagaaaacatcggaccctttacacgcagcccatagcccattcactcggaggataaatctatgaaacggaactatctactgacggcgatcgccacccttgggattttggccagtctagcccccaacgccaacgcccaatttcgtaactacaatcgctacaacaactacaataaccctggcgatcgtattggcactcctggttttagccaaccgatctttatgcctaatcgcagcgatacctatcctaatagttactacagaggccacaaccgtaattaccggggcaaggacgaattaaccatcatcaatggcggtagtaattgcatcaactgtagggtggacggttgggagcgtcgggatagggataataattggcaccatcaacgttatcgccaggagtatttttattactaatattgccctagttaatagcaacaaaaatccccgctgaacttaatgaagtcaacagggaaacggttgcttatgagaaaccttagtg

SEQ ID NO: 283225 - DNA, 328 bp, Zea mays
ccactcattgaagtgaccagagaaattcttacccacattatcgctaccattagccgcatcaacttctggaacaatcctgttgcccagaataatctcaaaacttggattgtaaattatttggatgatcaagatattgtctcctttgaacaacaagaggcgatcgccgatcaattggtgcaacttgctaaaaagcgtcatcaatggttagtacgatgaacatcattgcttataaagatttaaccctagaagttcgtcgtagcagtagacgacgcacagtgggcatcaccgtcgaacgagatggtagcctgatccccgggtaccgagctcg

SEQ ID NO: 283226 - DNA, 531 bp, Zea mays
caggtcgtctctagaggatcatcctctgaccgttcctgaaaccagcccacggtggtgtcgttgtcgtgtgtgccggtataaaccaccgcgttgccattgctgtagttgaagggcagaaagggattaccccggtcggagtcaaaggcgaaatggagcactttcatgccgggaaagttaaattcatcccgtagcgcttccacttccggagtaattacccccaaatcttcggccacaatgggtaaattatcacccagggctttccctagggcttggaaaaattccttgccgggggctggataccattcgccattttcagcagttttttccccttggggcactccccaataggactcgaagccccggaaatggtcaatgcggacaatgtctagatattgcagattggctttaaaacgcttaatccaccaggcaaagcccgtagctttgagggtttcccagtcgtacacaggattaccccagagttgccctgtggcactgaaatagtccggtggtaccccggccagcatggccgct

SEQ ID NO: 283227 - DNA, 760 bp, Zea mays
gcaggtcgactctagaggatcaaccccgccccttgacccgccaattcaaaagctaaaagtgctaatcctatctatgtcagggcatcccccagcaaactaatggcttgggctaggtatagctgagcaaatagacggttccgcaagcagtgaaagataggcggtagtttgcccattgtgggggtttggggtagaaaattgatctctattctatgcccccaggggggatattgatgagggccttgagaaacgtcctgtccccgcaatagtacttggtactgaatcgaatattaattagcttggtcaagttcttctgctaatagtttttgataaattttgggtaaagaagcggtcattctattgtcttcaatgccgtaacccaaacttgtccaagtgccagaaagttttttcaacacttgttcgatatttccctgttgtaattgggtggaaaagtccatgccccagtggtgtttatcggtcaaccatcgataggttactaaatcctgaaattcaggctcaaagttatagtgtgattttcccaaatgacgttgagggtgatacaaagccgctttttcctgccaagtcttagtcaaaaattgataacgtcctgccgctgtggagcaatgcccttggttaacatctgttttgatggcaatacaagcattgggatggcgacttaaatcatgggtatgttgaccgccatagagtaaaacgtagggatttttagcattagattcactggctgaaattgtccgcattaaag

SEQ ID NO: 283228 - DNA, 385 bp, Zea mays
ccatcagcgggccattttgcccgtttcactaaccggccccaggcttggttcatgcccgtgatggtttccctcagttggcccagctcgcaattcctaacggtcagggtcaggaaaatgaaccggtgcttagggtaagcctcgactatctggggaagtattttgaaagctttagcacgccacataagagacctccgccactggcagaccggacaatgccttactctacagaaccgggctgatttgagccttaatttactttccccggtttcttgtatctcaaatccaaactctaatcttccactacaggcacttattctgcccgctaaggagtcgtaacgagtcccccgatataattcccttacctgatccccgggtaccgagctcg

SEQ ID NO: 283229 - DNA, 995 bp, Zea mays
gtcgactttagaggatcaggttcaacacttcatcagcaaaacccaatttatcggaatccaattccgccatttttttctttttcgccgccgctcgaatggcatcatcggcccgtttttccagagcatctttaatatccgcttccgaaatttgcccttttttagaaagcctggccgccgctgttaaaatttcattgcggttgggggtaatgcaaacgtagaaagtcactcgcatattggcccgcatataatcctgggtccgcacagccaaattccctgcccgcaccacatcgatagaaatttcccttagggagaccctggtaatttcatggaaaccgggaatgacaatgcagcctccgtggagaatcaccatttgctcttttttaaaaacgccgccagttctgactaaagcttcgttattgggggcaatgacgtaaaagcgggtataaagaaaaatggtcactaaaatcagaaaaatgaccgcaataattaccaccggaaaaaataacagtggcgacaaacctcccaaggcagaattattattatccaaagtctgattgggggcttgggcaatgattaactctcctgaagtttcacctggactagcctgtatggccattacgggaacagtgtcccctggcagggtgggcaaggtctggagaaattcaaaccaaaatttactttgcatggtgtgcctccggaggataaaagttgtagttgcgaaaccttaagcgttggttaaccaaaatttggcaatgtagcccaaagctttaaccccatctcgccaattgattttctttccttccgcaaaggtacggccataataggccacccccacttcataaattcgccatcgcttcggcgatcgggttaccttcattgtaaattcaacttcgaaaccgaaatcattacaggttaaacgtaaatcctccaacactatcccgtcgaaacattttgtaacaaacttcaatgtcagtgaggttaatatgacagaccaa

SEQ ID NO: 283230 - DNA, 784 bp, Zea mays
ctagaggatatcggaaaaccatggcctagtttcgccaaagtgtgggccgtgaggggagcattcaggaaaatatccgcccattcccccaggtcaatatggaggggacggtgatgtatgggctgccaaaaatctgcgtcgccgtaagcgggatggcgagccagggtggtaaaggtcaagggagtaacaaatttttcggcttcggcagtgaggattacccgcacctccgccccttgctggaatagttgggacaccacctcacagattttataggccgcaatgccgccacccaccccgattaggatgcgtttcccctttaccatgggcgattaaatttaagcttcgtcataggtctcattatccagcaggtaaagatagggttccgccaagtcttcccgctgaaaggcgatcgcccgtaggagatgccaatccctcagcccttcaaaagcatcggtgtaatcatcgttttccagccgttgggccaattgggccacatcctcggcagtgagtgcagctacatcttgtttgctcaggttttggacggacatggacaatactcctgaagttgacaaccgtcggcaactcacattttatagtctctgcgttggttgcaaccaagagaatagagcaaaccggggctaaactgggccaacctaagccagcaaagaagtggaagaagaggcttcctgcccttggagcgatcgccaaaattgatgtagttgaaatgcggttatctctggatgctcaaactgaaaaaagtatgttccttcaggacaaaaccaaaggc

SEQ ID NO: 283231 - DNA, 555 bp, Zea mays
caggtcgactctagaggatcgggtgtttgtgaaagtaagccccgctgaagaaaaaaccgctggggggattttgttgcctgataacgccaaagaaaaaccccaaattggtgaagttgtccaagtgggccccggcaaacgcaacgacgacggtacctactcccctgtggaagtcaaagtgggcgataaggttctctattccaagtatgccggcaccgatatcaaacttggtggcgacgactatgttctgttaactgaaaaagatattttggcctccgttgcctaggtcgattaatttttaccgatcctgacctgtgttaaaacttgcaggatttttacccattcatctattgcattaatttgcccacgaggttttacttttatggctaaatccatcatttacaatgacgaagctcgccgtgccctagagcggggcatggacattctggcggaagccgttgccgttaccctcggccctaaaggtcgtaacgtggtgctcgagaagaaatttggctctccccaaattattaacgacgggatcctcgggtactgagctcg

SEQ ID NO: 283232 - DNA, 988 bp, Zea mays
caggtcgactctagaggatcaatatctaaattgcctgtctcctttaaggcatgacgacatttacttactttttcgcaaagacacttgcatccttcaagataagattcataacgtttctgttctggaggaaattggctgttatgacggcggtatgtattcaataaaaatcctagagagattggtttaatcgctaggggtacaatatccctttggttaatcgctttcagaaagtcatcggaagaaaaaccttcagcttccacagcgttgattacgtctatacggcgaagtggagctagttcataaattgcaaagttactttcttcccaaagagcttttagagcttcttctaaaatggatggaaacgccaaagttcgacaagttaaacggagatgaagacgattaatatgacttcgatatttaggtttcttaaactcatcaaccaatcctatcgccaaggatttgacgttcaagagtccttcatcaagactgtccaaaaacaaatggaggtgataatgaccctctaaccagtcggaaaaagttttatccctaaacaaatcctcttttaaattagtaaaggttcgaagattcaagcccaggactttactatattcgcagattgtttcttcggtaaatcgttgtagcttttctagttcgtgggttttgccaacgccaggctcccccaataaaacaaggcaaggaatctcagcaatatcttctaaactcaccagatctgggttacatgctttgccccattttgtatttggatcgtctaagtaaccgccatctctcagacttatgttacctgagcgaggacaccagaaccgcttccaattatagttttgttgcgacatgctcagccgaacggggaaattttttaactcaaggataaatttctctgaaactctattaattataatctatctgcccctagcatcagagattaaagcaagaacaccatttggttaatgtagggagtcacagggcgatc

SEQ ID NO: 283233 - DNA, 563 bp, Zea mays
ggtcgacttttttagaggatcacttcagggcgttcaatggcactgggagcaatggtttgcaaatctcggatggctttacggctggtggtttggggcacaccgtcaatcaaaaccaaaacgttacgtcctcgcaaagcctggccaaattgactggcactcccggtgctgggggctaagcctggcactagttgacccaaaatatccgccaaggaagagtaaacctgggtttgttgctcaatttctgcccgttcaattaccgttaccgaccggggaatgttagcgatttcctcctctgtacgggtggcggaaaccacaatttgtagggcctcactttcctctatctcggcggttgtcccggcaacccctggtcgaatcagcaattgtaacccttgcgagttaggctttacttcggcttccggtggcccatttacccccgtgatagctaagcgcacttggttatcggtcatttgggtaacactgacaaacgcaatgtccgcagtggggctcacattcttcaaacccctggcccccaggtaaggccatcaaagtatgggaggatcctc

SEQ ID NO: 283234 - DNA, 689 bp, Zea mays
caggtcgactctagaggatcgtcgaagggctacggcaaagggaagttggctttaaggtgctagcgggagttggggcagaaatcgataccagcaccgccaatggaagactattcttcgccgagttcgccgccctagcggaatacgaggcagagttaatctcagaacggaccagagcaggactacaggcagcgagggcgaggggaaggatgggaggtagaccaaggaagatggatagggtaatgctccagatgttaatggaagcgatgaagaacccagaagcctgtgccaaggcagtagcccagaagctcaatatcagcaccgccaccctctactcctacgtcaatggggacggcaccccgaaagaagccggactaaggttattgagaaaagcccatggggaacagcaagaatcagagggaccccgataatctcattgtctggctccccttccccccgactgcaaagtagggatagggaaacatcgccctctgctctgaaagggagcattagcatttcacagggtatgggggaatagtgccagcatgatgagattaccctgtggagtatattcctctgctcaccccctcaaggctcaatctcgatgcgagggaagagagccctcatcaccttagcaaaggaactagttcctcttaagcttctgcgaagcttattctagtgtagtacaaaca

SEQ ID NO: 283235 - DNA, 518 bp, Zea mays
caggtcgactctagaggatcgccagagagcttccctctgcctcacctgctgtagggtctggtcaagcaccaagcgacataaattagcgttgttggtaatcatttccagggaataaccccgcagatatacatccgtcaaagctcgaatttggtaggtttcccgttgatgggcactaaaatctaagcccacaaaactaccgggttgggcccaacccatcagcaccttatcgcctcccaaggtccattgactgacctgtaaaatcccccggtaaatttgccaacacccctggtctttgggcggaacaacgtcacccctttcatagaattggaggggctgggagtctaagcctactaaggcacttaaaccatcggcgatcggggaactgttcacaaacataaaatcaggcaaccctcaaaaatcaatccaggcgatcgggcttagttcccattggtcaagcatcttgtttgcattacccaagcatgactcccattgggccagatcctcgggtaccgagctcg

SEQ ID NO: 283236 - DNA, 646 bp, Zea mays
gatttccgtcgtctgtggattacccgcatcatcgctgccgctcgccaagaaggtatgagctacagcaggctgtcttgacaattgaaaaaagccaatattgaaatcaaccgtaaaatgttggcccagttggctgttttagaccccgccgcttttagtgaagtggtaaaagttgccgccgccgcaaagtagaaagctttattttccctttgggcaaggctgaccgatttagataattgaaccaagaaaaagaaactccccaccctaggtaactgggatggggtttttcgttgcaggtattaaacttttttcagttttttgagggtgtcgtacatttccggtaaacgcttatagatggcagaggctttgagataaagcttgtggggcatatggggactgccacaaactacttctttgggccccactttgccatggattcccgtttgagccgaggcgatcgccccgtcaccgatctgggatttgtccgctactcccacctgaccagcgaggattacccggttgccgatggtaactccccccgctaaacccacttggccggctagagcactagcctaacccccccgacaaccatgggccacatgcaccataatgtcgagtttagtatttttcccgatgcgggtttccccca

SEQ ID NO: 283237 - DNA, 368 bp, Zea mays
cgggatttccgtcgtctgtggattacccgcatcatcgctgccgctcgccaagaaggtatgagctacagcatgctgtccggacaattgaaaaaagccaatattgaaatcaaccgtaaaatgttggtccagtaagctgttatgacgataaaacagcgtgacagcgaccgatctaatccgttacaactctggctatagtccaagattccaacacaaaaaagcttttcaggagggaattaagattgctgcagtaaaaaacgtatgacagttaaatgacgctaaaaaacttacatacatacaataacccgttccaaattgtcagcgcactttgctgaattaattcccattattttggcggaggtaggggcatt

SEQ ID NO: 283238 - DNA, 695 bp, Zea mays
cggttggctattgagtaatttcctcaaacgggccagctttctttcgtaagatgtcagtaatctggtggtgctagcgggggtgtggggagtatttggtgcggcccaagcatccctgagtgaatcgggcttaatggccaccgtagccatgggcatttacctcaactcctctgccctgcctgataaccgacttttgcgacgattcaaaggtaaattaaccctgctttgtgtctcggtgctatttattctgctggcggcggaattatccctgagtagctttggggctttgggctggggcagtgtgctcactgtggcggtgttaatgctagtcattcgtcccattagtatcgctatttgtacttggactagcgcttttaactggcgacagaaactttttgtggcttggattgcccctcggggtattgtttctgcatccgttgcctccctattttccctactgttgactgaacggggcattaacggtggcgatgcgatcaaatcgattgtgtttctcaccattatgatgacggtgttcattcagggcttaacggcgaagcccttggctaaactgctacgtatcaccgacacccacaccaccggcgcagtaattatcggttgtactcccctgggacaactggtggcccgtttatttacagcccaaggggaatcggtggtattgattgacagtgacccggaag

SEQ ID NO: 283239 - DNA, 468 bp, Zea mays
ccgattcatccaacactcggaaaaattgcacatccgggtgccaaacttgtttctcttcttcactggcttgaatggtgaccccaaatagtcgcttagccaaggcaaataatccttccagtacctggggtagggggaaatagggccgcagagcctccgcatcaaaatcaaattcctgttcccgttgccgttctgaccaataggccgtatcccaatggtgtagctcttccaccccagcaaatttctgtagatcggcaaattcctgctccgccgccttataactgggaacccgtaactcctccaacagtttttccactgcggccacattgggggccattttgcgggacaaacttaactctgcataggtttcaaaacctagcaactgggctttttccaaccgtagcgccaaaattctctcaattaagggatggttatcccactgcccatccgctgcccgacgaataagcgccc

SEQ ID NO: 283240 - DNA, 771 bp, Zea mays
acttaaaaatctccatagtaatggtttgccaagcattagcgaaaagtgaatttcaacagaaagggaaggagtttgttcaaagaattgattattaataatataaacttgttctatttcattttttattattagtttaccattaatttttatcggtaaaataacttgaggtttgtctattcgaaaagaggattttgtttcaccggatgggatggtatattgacctataaaagtatgaaattttcgttcaccttcataacaaatatttgtacgctcgctttcactaggaacattgattgaaatctgatttgctaattgaaaagtgattaaatcaagaaactgtccatagagaggaaattcctgagattgcttttcttgccaaatcttgctaaattctgagtgactaatatcgggtaaggaaaaatgagactctaaagaaagacgaaaattagataggcaattgtattgactaattagaacgaaattatattcgcaattattttggacgatttccttcagtctaggaacaagtattacacttgaaactatattttctactattgtgagaggtaattctgcttttaaatatagatttgtattatcgacatttgagaagtcaatcagaagcgaaactatttcttgattaggattacttattagacaattttttataatgttaaaaacattaattttttttaaatattgagtgagataagaactttcaataccaacaaagttagggtcagatgcaataacgtattgagctaaaatttc

SEQ ID NO: 283241 - DNA, 443 bp, Zea mays
  unsure (1)..(443): unsure at all n locations
atctagggaaggattttgattgaaataggcacagagagattccgtttctgcctcgccccaggtttgctcgaataactccattaaccaatcgggaaaactatattgctcccccaaactgactgtttcctggtctaaaatgttctttccctgttcctccgcccgttggtagcgacgcaacataccgttgacaactttacttaatccctttaagccattggccttggccaaatccacaccggtattgaccgccgctgaagccggtacctggtctaggtaacgcagttgatatagtcccagttgcacaatccgtcttaaatccggaggttgcttaccaatggggcgatcgccaagttgttcaattaaacagtctagggttctttgtctgcgtaccactccgtacaccaattccgtacaaaaacggcgatccccnggtaccgagctcg

SEQ ID NO: 283242 - DNA, 204 bp, Zea mays
ccaaatctcctgactaaggcttcggcaatgctaggaaactttcactcagttttcctccatatttggggagtcaggggggcttgcaaaacaggctcttaattagcggactgatcaattatttgtcattggttaatcaagtggtttatatttaattgatttattcagaccggttcaatatcttttgatccccgggtaccgagctcg

SEQ ID NO: 283243 - DNA, 533 bp, Zea mays
gggtttgagttcaatcctgcggacatagataaataggtttttgttgtggggattagtggccgccaacagaatgggaacatcaacgtccttaagctttttgagccaaagccggaacttcacttccagataatgggcatcgtcgaagatcagcaccgcccggttaacgctgaaccattggatcaattcctgctttaagacttccaccgttttgctcctgccctccaggtttttgctgtccaccccggccatggcggcgatcgccatcagcagagttttgggggtagctggttcaaagtattggcacgtcaccccgtccgctaacagcctttcccacacctgccgcaccaagtaggttttgcccatgccttcccccgacgtgaccaacaccgaccgagccgcataaagggaatggagtagcccatccatctccggttgccgataacaggtttccccggccggtggggccagctcccattcatctcctaggccgccagttgaccatggttctggttgctctggtaagccttcgcctt

SEQ ID NO: 283244 - DNA, 445 bp, Zea mays
ccggaaaagagggcaaagaacacaccaaaaaagaggaatgggcgggtttccttcatcagtaaaaaggaggtacccaaaacccgaaagccatcgctaatggtgtttaacttactttcggagccagaagggcgagattggtataacactggttcttcggcaaagggcagacgtagttctagggtgtggatagttaattccgtttcaatttcaaatccgttggaaatagctgggaagcatttaacaaaacggcgggaaaaaattctgtagcccgacaacatatcgtccaaccgagccccaaattgtaattccacaatgccctttaatagttggttaccactgcggtggccaaaacggtaggcctccttgtccttaacctccgatcgccgagcccccaccaccatatccaattgctcattaatcaggcgatcccccggtaccgagctcg

SEQ ID NO: 283245 - DNA, 792 bp, Zea mays
aggatctttcgaagactcttgactaagtcaaaaacaatttcttgggcttcaggttgtttttctgcaatatcttgctgaatggtgtcgagattcattggctaaaccctgaattctgctcaaaaagcctgccgtaacaataagaccagatttattttcttcccacatattctagctattcctttgggacgctggggctggggtgtgggattcgatttcggggctaggctcggggttggtggatttgggtgccaaaagccttccactgatagttttgaccacaatgtataaaactggcactacaaataggctgaggaaagtggccaccaacatcccgccaaataccgctgtacccaatgcttgccgactaccggcccccgcaccagtggcgatcgccaagggaaaaataccaaatagagtggaaagggcggtcattaaaatggggcggagacgatcctttgatgcttccagggcagctttagcaatgggataaccctccgcccgtaactggttagcaaactccacaattaaaatggcgtttttactggaaagaccaatcaacatcaccaaaccaatttggcagtacacgtcattggggaaaccccgtaaactttgggccgttaaagctcccaaaatagccagggggacgctgagcagaataatcaccgggtcaatgtagttttcatactgagccgccagtaccaaaaatacaaacagcaaacctaagccaaaaattaggggagcctggccctgggaacccatttcctccaaagaaatacccgaccatggaaatca

SEQ ID NO: 283246 - DNA, 358 bp, Zea mays
gaggatcacatcgaagaattattaattgacgatcaattgggccaacctgccgctgcccccttcaatgccggggaggaaacctttattgcagaagaagaagctaacgtcccgggggggaaaaaatttaatccgggggaatctgtgattgacccctggtaacccaaaaaccattgctttgttcggctcatagaacacagaacagccaagactagataaacccggtgaagcagaaatcccaagcccttgaacgagggaactctcaattcttagtggatggcaaaggctggaaaaaaattctgcccatccacagcaaacacaccaggaaataaccggtggtgatccccgggtaccgagctcg

SEQ ID NO: 283247 - DNA, 532 bp, Zea mays
ttgaaaaatttatttctgcataatcactaccattaaagattgcggttatgccatccctggaattgaaaatttatcaagaattgcttttaattcagattttgccttttgcctaatcctaataaaaaaatgtccttgttttgtttttagaacagagttttttaaattgaatttttgcaaaatacttaatgataaaaagttaacatcatcctcggaaaaactcataggatataagctcaaaccactcgaagaacaaccatcgtcgtaaaaccaaatacagaaagcaaattcagtcaaatatttttcaacaaattttctaggtaataatttcttttctaaataccaaatacaatgtaaatcggttaatataggatgaacccctgtccttatccaccaaccttgatattgttttcctgatttaacatgaggtgaagataaacactcttgaaaggtacagtacaaataatcttttaaaaaattaaatttacaaaaaatgtactccttattagctccgcccggatgcataacgagcgtt

SEQ ID NO: 283248 - DNA, 628 bp, Zea mays
acaactaactttcacttccgaagtggaaatcatttcaatgttgactccacatcggccaaagttttgaacattttggcggcgatgccaggacgaccgatcataccggctccggcaatggcaattttagcgatgcctttttcgacaataatttccgcttcctgatccgcttcggggtaactgcgtagggccggggcaatggcgctggtaacggcttccgctgtattgagtaaatctttgacaacagtgaaagcaatgtcattactgttgccgtcatggatggattgaataattaaatcaatgtccacctgttgttgggcaatatcccgaaataattttgatgccaccccagggcgatcgggcactcgcaacagagcgactttggcttgatcggcgtcgtattccaccccatccactgccttggcaatttcaagccctaccagggaacggttttgcaccgggggagccactacttttgtgcccggttcatcactccaactggaacgcaccaccaagggaatgccataattgcgggcaatttccaccgcccggggatggagtactttcgccaccagactggctaattccaacatctcgtcacaggtgatttccgccatcagttgggcttccg

SEQ ID NO: 283249 - DNA, 454 bp, Zea mays
aaagacttcctgggctttgggaataattccttgggtggcctgggcatcgctcaaatcggcggagtaggtaaaagctttcctacccaatgcttccacttcttgctgaacctctagggctccggtctgggaattaccgtagtgaataaagacgttacaaccggcttccgccagggccataactagggcccgaccaacccttatgcctcccccggtgaccagggctgtttttccagttaattccatcgtagttagttaaattcctgagccttgggcgattacaaacttagtcgggtggagatacaataaaacaaaattaccattttttatggcgatgtagtcgaaatcattgcccataattacaaataaattcaggcttcaacctttacaccccgccaaaaagcgatgtagcccttaatattttccgccctgggtttgggatcccccggtaccgagc

SEQ ID NO: 283250 - DNA, 681 bp, Zea mays
tcctggaataaaaaccagctcagactgaataacttttttgtttttctttgcgggagaagttcttagtataagctctcggcaggagtgaatgtttttttcttataaaaacaattgaattttcgtttttccaccctagccggagcctcgacggtcccacagatctcggtttcgtctgccgtattcttagaccaagctaagaacgtatgcaggattcctgtggccaaaaataggaaatgtaaccggtgaaaagccaatagtttgctcccatttgcggtccaggggagaacggcgacataaatgcccggcaggatttctgcccacttggggcaagccattatgatggaagccggcccttctccatcatcattcggaggacaatatgtcagcaatagcggcccaggaactggaatcacaaatgccggatgccactatgcttttgagtgatgaaccggagatggaaaggtcagtgcattatttgcaactgctcttgctagttactagtctggagtgggcctggcgtcagagggatgatttttttattggtgccaacctaaccatctacttcagtcgacaacaactcaaacaccgtgattttcgaggccctgattttttcctggtcaagaataccaccagacacccccgcaattcctgggtcgtgtggaggaagacgggcgcaacccc

SEQ ID NO: 283251 - DNA, 729 bp, Zea mays
gtttcttcggcataaacttgattcagcctctgcaaaatttctcttcttctatacttctccaagtgggccttcagcgcatttgtataaagctcactacgggacaaacccaattgctgagcgagggcctctgcctcatgaaaaaccgaatctggaagggaaattgctgtttttatttgcatttagccaatctgacagggcactctacactctagttataccttagtcagaccgtaatcctgccaggggacataattaggcaatcagttaacagcctgtttaaaagcccccctgaccccccaaatttggggggaaactgagtgaaagtccccaacaacaagtcaacattcttgtgccaggattagggaatgtctccctagcgtcccactttgtcacggggaaagaacttttggcatcaaaaccccgccgttacctaaccatccatggaatttgaccccgattccctcgtttttaatgccaggtatgacctgtttcagcttttggtgaatcactttaacgtcattgcctgcctgtatccccgtttgtttgccgtatccgtcgcccgcatttcctctcaacgaccaaacaaaaagaaagtcaaaatttttaccctacaaagcgaagccctaacctactttgaacaacagccagagccattggtggtggtcatttgccaacggttagaggatggttccggtttagacctgctgaaacaactcaaagcccatgccc

SEQ ID NO: 283252 - DNA, 660 bp, Zea mays
caaccaggatatgctccgtgccgcttttgggtattagttccttcgtcggttgatagtttattcgctgagcgtctttcaccttagggaaatacagcttgatggaagtaccttcaccgagttcagaataaatttttatgtgtccacctgattgtttcgtaaaaccaaagaccatgcttaagccaaggccactacctttgcctactggtttggtagtaaaaaagggctcaaaagcatggcttaccgtatctgcgctcatgccaatgccagtatccgaaacgcaaatcattacatagtcacccggtatcacttcacagtggagagcggcgtaatcattgtccagcacagcagaggaagtctcaatgattaatttgccaccatcttgcatggcatcacgggcattgactaccagatttagcaatgctgtttccaattcattagcatcgacctcggcaatacccagatcggggtcaggggcaaattcaagctcaatattttccggcagggttcggcgaataagtccccacatcgcctccactaaatgattaatattcttcggtttggggtcaaggggttggcggcgcgcaaaggccagcaaatggcgggttagttcagcaccacgtttagcggctgataatgtcatttcagccatactctgtaggt

SEQ ID NO: 283253 - DNA, 576 bp, Zea mays
tttcgccggatttgagtttttcccgtatatccaaacatcgctgactacggacaatatgttcacgccaagtttcagttggtagagcaaattcgtctgatgctgattgattccaatcttgccgctgagaaacatcattaattcctgctgcaatttctagcggtaaatctacatcaacaccttttagaaccgcatcataaatatatcgatttgggttttctttcagtagcgaccaaatttccccatcggcacgaaaagtgacctcacattccttcttcgtcgcatcaaatagaaaaggaataattgtatttttactaatgtattctgtaatatcttccttcgtatagtaagcccccatttgcttctggttaatatacttctcaaagatataacctagaatatcaggattaatttcattctgattcttagtaatacgattatctaaatgccaatcccagttaccaaaaaagacaaataattgttcaaaagcatcatcaggaatttggatattttcatatttaatctctaactgatgaacatcaaaaaaaccaccattgagatagggaatattaccaagta

SEQ ID NO: 283254 - DNA, 502 bp, Zea mays
gaggaaaaaacggcgttggcaactcccaaatcaatggatttttgctgacgcacctttgttttcaccatcaagtcatcccccaccaactgggttttggtgcccagggaagtggttaaacccttccaactttcccaatcgtcttcgtgcaaaccgtcttcaatggagacaatgggatattgactcactagcttggcctgatagtcgatgaattcctggggagaatgggaaccaccgtcgtattcatactgaccatttttgaaaaattcactggcggcaatgtccatggccaaggcaatttgactaccgggtttgtaaccagcttgttcaatcgcctcgatgagaatatctagggcctgttgattcgaggtcaaattgggagcataacccccttcgtcccccaccccaccggagagcagttttcgttctttcaacactttgcccaacacagcgaaaacttccgccccccagcgcagagcttctttaaggtttctgccaccccggc

SEQ ID NO: 283255 - DNA, 577 bp, Zea mays
aggataccccctcgctccggcgatcgccgctgaccaggcctgttgcacctctcctttttgttaactacagattgccccttacccgaagaagacatgaccggcttgaccacattgggaaaaccaatggcctggcttacctcctctaactcggccaaactggtggcgtaattgtaacgggcagtacgtacccccaactgttgggcggccaactcccgaatccggtcccggttcatggtcagattggtggcttgggcggtgggaatgacccgatagcccccggcttccagctccaacaatttttccgtgcggatggcctccacttctggcacaatccaatccggctgatatttttttaccactgcttccagggcattcccatccaacatagaaatgacttcggcaacctgggccacctgcatggctggcgcatccggataacggtccaccgcaatgacccgattgcccaatctctgggcggcaatggtaaattccttgcccaattccccagagccgagtaacagaaaagtttggggcaaagtgacaggattggccatggttaaatgttagagggtggggg

SEQ ID NO: 283256 - DNA, 977 bp, Zea mays
agttagaagacaatctagcccgttgggaaaaacaatacgaaatcctatctcattccccgccccccccactggggaggatttcgagtggttccccatcgcatcgaattttggcaaggccgccctagtcgtctccatgaccgtttgcaatttaatttgcttgatggtcaatggcacagacagaggttggcgccgtagaagttaaactagcccccattccattgcagtcttaaagttttgacgttttagtccataaagttgatcagagttgcgtatttataaacatttgaactttttatcgtcctttctctacacaaatttgaatcaagtattctccttagtgtgttttctgtcttagtcaaaattggtcttactgccgaattttcatcttccaacggcagccttctttgaagatttaggatagaatcataggattgttttgccgtcatagcccctaagataaatacgtgcgtctagaaatttcatcgcctcaaacaaagcttccttaccccaaaactgaagaattaccatttaccctccaagagctcagaaacgctattccagcggattgttttgagccatcggtagtccggtccttgggctacttttttttggatgttggtttaattgccgggttttatgctctagcggcctaccttgattcctggttcttctatccgattttttggttaattcagggaaccctattctggtccctgtttgtggtgggccatgattgtggccatggctccttttccaaatccaaaacccttaataattggattggtcatctcagccacacgccaattttggtgccttaccatggctggcgtattagtcatcgtactcaccatgccaacacgggcaatatcgacaccgacgaaagttggtatccagtgtcggagcaaaaatataaccaaatggcctggtatgaaaaacttctacgtttttacttgcctctgatcgcctaccccatttat

SEQ ID NO: 283257 - DNA, 570 bp, Zea mays
ccacccaggtgacattgggttgataggtaacggtcagggtttcaattcctccgctaatgcgcccatgccattcctgggccaaaggagcaagacgggctaaacccctcgcccgacggcggactaccctagtgcccatttccaccaactgctggtcccagagagacaaagaagctgtcgactcttcccccaaagctagtcccgtttcccattgttgtcgtaggctttttagtagagcatttctttgcttaacaatgtgctggtactgccccaacagatgggcatagaggggttctagctgggttaacaaagtatctagccattgacggcgacaatcgggcgctccccggactaaatccaaatctaaacaggaaaattccaccgcatttaaacagcctaaaaaatccaactgacgacgacattgattttggttaatgcgtaggttgcgccgccccgatcgccgtaggtcaatttctaactccgccacactgtattgcctttccagtagggctttaatttgcccattgggccgcccgtctagcaccaattcctgatcccccggtaccgagctcg

SEQ ID NO: 283258 - DNA, 691 bp, Zea mays
  unsure (1)..(691): unsure at all n locations
tcgaaaattcggcggcaaagtggtttgtggtctaggcttagtttcaatcgtctgncccgagctggtcttgatatagtctttacggactaatgttctgttttcctgcactagcaaaattagaatgtgtttgaaaagttttgctcaatcccttgctgagcaaacatttgagtatgttttgataataaacgctgaaaaccctatttagtagggcttagagcctaattttcaaacaagctgtcactcaactacccctctttcctgaatctcggaaagaatatttttcagtactacacaaaaagtcttactgtggaggcatttcaagattttcaagactcgataaccatgggcgctagtattttatgaagtacacaatctaaatacattgttgttaatgggctttgagggtttgcaaaaaatcaacttgcccagtctgacaaaagagaagtaaaaaaaataagaaactttttatgcattgctagattgaaaaacgctacaaacgtagaaagatgtttctttattcgcttaatcctctttattctatttttttgttactttaaccgcctccagcaaacctgctaacaagctaatgtcaattactcttgaggctgaaaataaatacgtggaacagaaccgcaataatcacaatctggtggtggcatcaaatgttcaaaaataacagtggtgggtaaat

SEQ ID NO: 283259 - DNA, 519 bp, Zea mays
tgtggaatatgggagtcagaattgacttttttaccctgccctttttttgaaacttggtgtacctaaacattttaagtttgcctattacggtgatttggttagtgggtttggccaacgcccattaactggattgacggcttggatggtttagcagcgggggtctgtggcattgccgcagtggtgctatttgtcctctgtttgtttatggaacaatcggaggcggccttgattgcagcagccctggccgggggggccctgggttttttgcgctataacttcaatcctgcccagattttcatgggggatgggggagcctactttatgggttttaccttgggggccgtagcagtaattggcctggtgaaagtggcagccatggccacggtggcggtgacggcggttttattgccctatctggtgctggcggtgccaattttagatatgtcggtggtgattctctcccgggttattaagggaaaatccccctttaaggcggataagggtcacctgcaccatcgt

SEQ ID NO: 283260 - DNA, 703 bp, Zea mays
atccaaattgccctgggaaaatagacggtcaatgatttcttctattggtgggtcagatacgcttaaatccgatactggcaactccgctaacagtttggcgatcgccgtggtgaggctttcccgttttagcaaaaagcgcaccagtagaccctccacactctccacttcgccatagagctgtaatttttccaaaggtatgggggcagataattccaccgccacttgtcggtaaggggaaaatcgttccaccagagcttccagatcaccgtcatacatcaaactgtccttggtgaatcaatagcactcgctcacaaagggtggtgatatctgccatgtaatgactagtcaataacactgtggcttggtaacgccgattgtactcctgcaaaaaccgccgcaccgccacttgggcattaacatccagtcccaaggtgggttcatccaaaaataaaacggtggggtggtggagcagagcggctaacaaattccgccttcatcctttgccccagggaaagtttacgcaccggttgttttaattctgtggttaaatcgagcatttcgctcaattctcccagccgttgttcaaagacttggtcgggaatttcgtaaatcgccccattgatgcgcagggaatccagggtgggcaaatcccagattaactgttgtttttgccccattactaaactagtgcgccttagaaaag

SEQ ID NO: 283261 - DNA, 262 bp, Zea mays
ttcgcactgggtgtctctgcgacggtgtaggctgcagatggagcctgtgcaccatccggaccggtaagggtgatggtgagtccaggttcacccgtgaaggtgaggacaggattgccattgctagtaatcaagtcatctgcgccggtatcggtgttgtcagtgatgtcaagctcattaaccgctggtgcaaccgtatcaacagtgatgttgcgagtagcaggggtagcgggattcccagcgagatccccgggtaccgagctcg

SEQ ID NO: 283262 - DNA, 459 bp, Zea mays
taattttttgactatggccaacgcaaaatcttcttcccttttttgtgtgtaaaaccccagtggcaaaaccttactaatcctgctctgggcattggctttagccctgatggccctgttgagtagctgggcggatatgccatggttgagcaatggaaaattactgattgcccttggttttacggccttggttacagctctcattggtatggcggtggtaccaatgctagtaaacctgaaagctagtcaggtgattcagtccgacggaccccaaagtcatttgaaaaaggccgggactcctaccatgggggggattttctttgtgccggtggcggtggcgatcgccgtggtgggaacccagtttaatcccgatgtcatagtggtgggtttggtgactttgggctatatggcgatcggttgggtggatgactggcagattttaaaatacaaatccaataaggg

SEQ ID NO: 283263 - DNA, 708 bp, Zea mays
cgatcgcctcttacatatggcatcggtaccgatcagaccagtggggccgtgctgttccgtagaaccaatgggtaaaataatgccgctggaagtctgtagataattttcgacttcgggccaggtggagaggtgcaattgcatggtgggcttgggctaaatgggctaactagttccatctaccttaaaacaggttcagagaaaatagttttaccattcttggttacccgtaactgttgccggtccacccaataggtataggctccattggtggcgtagtaggtgccgctgtcggtgattagcacatccatcacattaatctggtcgccattgtttttattaacgccccggtagaaaatttgtccgtcgtaggtttggcaaatataggctagataagttttggtttcataggcttccaccacttccgccctgggacaacctcgaataatttccgctagtaacaattgggatggtaatgtttgtaacccagttagcggagaggcgatcgccgttgcactaccagcttttaatgggatgggggccagcaaagtcgttgctactgtcaaagccccaagccatcgacaacagtgcccaaggtttgcccagaccataactatttcctcaactgcacaacaactgagtccaggcgatcaaaaaaaaccttgccaatccggttcacacctagtttcccaaggcaatgaccaaatggcg

SEQ ID NO: 283264 - DNA, 625 bp, Zea mays
cctggcctttacgggaacaataccaacaacaaaattggtttacggttgtttacattgatacccagttaagccgaggctttggttttgatttttataaacccctcaaaaccatggtgctccgctttaatcaggatttttctgagcggtatattgacgaaagtttccgccatgaaaccttcaaaaagtttgacactgttcagcagttatccacttggttagggcaacaacagctccagcctactgaaaaggaacagttacaacgggcaattaagcaatggcaagcccaagggaagcaagaaccaacccatagttatttccgcatggactatcgcgaccaggacaataacgtcatcatgcgtctgcgagcttggggacccaatgtggaggtgttatttcccctggatttacggcaacggatggcgtccgatgtgcaggccatggcagccctttactcccattagcaaaattagtattaatgaattttatgaatttatcccatcctactcccctcactccacgctttggcgatgctctagtattagctaaccagttacatgctcagcaatttcgcaagggttccacagtgccctacattagccatttgctgggggtaacggctttagtg

SEQ ID NO: 283265 - DNA, 613 bp, Zea mays
tgcccgctagcaaaaccattgattgcctgttagtagatggaccgctcgcctaccgagaagacattcaatattcccggtttcctgcagtgccttttttccaaccgcaattggcaccccacagcaccatcattttggatgacattaaccgtaggggagaacaggaaattttagcccgttggcaaacattgctcaatgttagttttgatagctccattggcaatgtggcgatcgcccatctgtcggcctagggtaaattttaaaaatcccctgatccaccagtttcagggaaagccgggtaaaaatctgccagtgttgggatattggatattgagggaacgagctagaaccctactatctgtcagcctagcaaaccaaatgctttacatcgtcagactagttcaggaaaattaagtttgacccatagattaatcctaatcttttgctatgaaatccccccaggctcaacaaatcctagaccaggcccgccgtttgctctacgaaaaagccatggtcaaaatcaatgggcaatacgtggggacggtggcggccattccccaatcggatcaccatgatttgaactatacggaagttttcattcgggacaatgtgccgg

SEQ ID NO: 283266 - DNA, 756 bp, Zea mays
aaggaatcactgaagtaatttacctgcctttgattcttgctaaaactggaggaaacactgagattttagggattattgtggccatcggaggagtggggggtattgttggaggaactatttgtagtatttggggaggcttcaaaagaagaacaactggtatttttattggctttataatcaatggattcagtcgattggccatgggactgattgcccaaccaaaattttggctactagctaacgttggtgcatcactaccaagtcccttaatcaccagttcatatacagcaatttggtatgagaaagttgcacgggaaatacaaggccgagtattggctgcagattatttgatcggcactgttatcagtagtttatctggattggccgcaggaattttagctaatcagatatcggtaatgctgactcacttgagtaactttttaatcctacctatcaatgaaatttttggacctcccccaggcagcggcatggcattcttaatggtgaactgtggagtgctcgcatttctattggggctatggggtctattgatttatcaacgtggggatgattagcaagtaataccatctcctatgggacattgaactctcatcgttattgagataatccacaaggttgtcccaatcgccacagcacatttttccaacaaatatactgcactggtattttgcccgttagggctttgctcaataaattaaacccatcaaatatttaggaataatttgcattaggagt

SEQ ID NO: 283267 - DNA, 182 bp, Zea mays
gggggtctagcaatttccaagacgacagccggggcattgtggtttttcaaatttggttttagcctttgctagccggaggtctcaactttatggggggagcatgttagtgacggtagtcagttcctaggtaaaaatgatttagccattggcaatgatgtgcagatccccgggtaccgagctcg

SEQ ID NO: 283268 - DNA, 556 bp, Zea mays
aaatcaatgccagaacaccactagcccctcgaggccttttggtataacgtttcattaaaccgtcactaactcggtcgtcattacggcgctggagcgcttcagcataaagcaaatgttgggcgggggcatcccctaaaaggggagtgacattgaggcgggttagttggacgtctacacaactttgccgacattcttgcaagtgattcattttgccatcggtcttgccggaacaagactccatatctagtgtgcggggagtctcattgtaggggcaaaacactaaatatggtagcgtctaaaaaggtaaaattctggcgatttatgccctctgacggcatagagctcgatttgtttctgcggaacctaatcttagtccacgttttcgccctggcgatcgcgtgatggaagtatcagtgcaaggaaatgttaacggtgatgccaagccttgataatttgtggttctaggtccgcaatttgcccggagttgtccaacaccacatccgctagaactaccttttccgccaagggcatttgactagtaatgcgagctaaagcc

SEQ ID NO: 283269 - DNA, 448 bp, Zea mays
  unsure (1)..(448): unsure at all n locations
atcaaggatgggataaaggtaaagggtcgaagaaaaactgactttttgccaatgggattgcctgtggggaaaattaatgtttagcaagcgctccacctcacaccggactagtagcaatctaacagtactgatggcaaccattatactcgatcgcctgggaggcctgaatgtgctggccgctaccataaccctgaggaatcctttgcttaaccattgaccgctttgagaattactgcacactccacatgggctgtttggggaaagaaatcacaaccctgaacccaggtaattccatagaagccctcggcacagagaaatttcaagtccctcgctagggtggggggctggcaactaatgtaggcaattttttcggggcgctgtcggataatttccctgagcacttctggtgcacaacccttacggngaggatccccgggtaccgagctcg

SEQ ID NO: 283270 - DNA, 507 bp, Zea mays
  unsure (1)..(507): unsure at all n locations
ccctgggggaaattggtgccgtggatgcagtagatgcgatttttttcnttgtatcccatgaggactggttaattcgccaaagattagtggaggccctgggaaatttgccctgcgaccagagtcgttctgctttgactttcatggtcaaggatgagcacccccaggtgtcccaggcggcccagttgtccttgcaaaaattagacctgcttagctaggttttctgtttcttttccccttgtctaatcaaaatctgcaaccggagaaaaacaatttcccccagttctcttctgtgattattccggctggagaagcttggaaatttccctttgggatgggtattcttggcggtattgcacagcggcatggcgagcatcggtgatgagccagtccaacgccgctgcctgcacatcgatcgccgctccggttttatctacacagtatcgcccatgcaccatcttatccactaagcgagcccccggacctaaacgggaatactcaaaattacac

SEQ ID NO: 283271 - DNA, 533 bp, Zea mays
gggtaatgcccacctgtaataactggctagagtttttcccctgtttgtgtatccactaggacaatgacctgttctcccaacaggcggacaatttccccttcggtgcggggaggactgctggtcaaactcagggccggattactgaaaatttgctcattttgcaccccctgggcggccaggatttgtaggcaacgggaaaggcgatcgagctgaaattcgtcgaaactacccacccccgtcagcggccgaaaagtaacagtagggtcacaaacagcgctgtagcggggattaatgttgggtaaaatctggctcaaactgccgtcaatggtcaggcgcacatcaatccgttcaatttggttcaggctgtcgtcgggatattcattggtttcctgggagcgcatgcgggccgactggggcaagtctgacacaatagtacgcatagcaatgttcaagctgggattaattaactcctcgttgggagaaaacgtaatcgtgttgggggccccgcgatccccgggtaccgagctcgaatt

SEQ ID NO: 283272 - DNA, 884 bp, Zea mays
gtttcttatttgccgggaaatgagggtatggcgtaatttatttaatctttagtttcttcctgttccagcagagaaatcaattgttgtcgttgggcttggtcaatgagggggactgccctagggaagccttggctaggcccgttgtggttgcctaaggagttgttgtcaggggccatattcccaaccctagtgggcaaaagtttttccgttgtattggcggaagatgaagacatcgaccctaggcgatcggttaaatttcccccatcaccattggtgaggtcggacttgagtgaattttccaccaaacgtaccgctgggaaatgcaaaataaacgtgctcccctcccccagccgactggaaagacttatttctccccctaataatgcagtcaagcgcctagtaatggtcaagcccaaacctgtgcccccatatttgcgagtgctctggccctgactttgggtgaaaacatcaaaaatcttcgcttggtcttctggagcaatgccgatgcccgtgtcagtgacttcaatggctagagaaatataggtgccctgggaacggacttgaatgccttccacgccaatgtaaataaaaacctgtccctcctccgtaaatttaagagcattacccactaaattaaataaaatttgtcgcagacgtaccgcatcaaaataaatagcttggtttaaggtttcatctatttggatagttaacaacaaactcttgctttcagctttgtaatcaaaaatttgtttgatttccctaattattacccttaaatctactggctctagatggatgactaatttgcctgcttcaattttagaaatatctaaaatgtcatcgataagtgccaacaaaatcttactactagaaccaatggcatt

SEQ ID NO: 283273 - DNA, 562 bp, Zea mays
ccatgctttcgcccacgcgtccgcgtcgctgggcttggctttaccagtggtgggttcccacacgggggctagacgccgccaccgctgaccccgtctacaccgaatcccccgcgcgatttaacccctcgcctcgctcgccgcctccgcttccatacaaccgcgcactccaaacgcgcacgcgctgttcgttcctcggccgctctctccacccccgtccttctccgcccccaacagatctccgccggccgtgcggttccctaattcgccttctccggggctgtcggatctccgcggcggctgaggatgggcaactgctgcgtgacgccgaaagcagccgacgacgccggcggcggctaagaagcccaaggagccgaagcagaagaagggtaagaagccggaccccttttcgatcgattacaaccgctcggggcaggcgagcgcgccaaagctggtggtgctgcgggatcccacggggcgggacatcgcggcgcggtacgagctcggcgcggagtcgggcgcggcgagttcggggttacctacctctgcacagaccgcgcctcag

SEQ ID NO: 283274 - DNA, 492 bp, Zea mays
gagcctcatttgttggaaggtgatgccgatgatgttgatacatccaccataggggcaaatcatgaccagccaggagaaaattctgaaaagagcatatcaaacttagtagtgagcactgaacagaaacaagatggttcacattccaatgcagctaaggatactgaattggatgaagcttccaatgaaacacaaccagaaacaggttctccattaagaaaaagtataacaagcacatatgcagatgctgatcaacatggattggaacctagattttgctcagtccagggtacgaatgaagaaccttctggtggagtgaccctgacagagatgcatgcaaacaattccaggtcaactgaggtcagcacaatcacagaatcattagttcacagggaaaaagaaaaacaagggctgtatgacagaatgaatgagtttgatcctatcaagcagcaccggacgttctgcccttggactttccctgattaccgataaccc

SEQ ID NO: 283275 - DNA, 547 bp, Zea mays
ttccttgcgtccgctccccatcatcgggcacctgcacctgatgggggacatcccctacgtgtccctcgtcgcgctcgccaccagggacggcccggacctgatgctgctccggctcggcgccgtgccgaccgtggtggtctcgtcgccgcgcgtcgccgaggccgtgctccgcacctacgaccacgtcttctcctcccgcccgcgctccctggtgtccgacatcatcatgtacggcgccaccgactcgtgcttcgcgccctacggcgaccacttccgcaaggcgcggaagctggtcaccgtgcacctgctcaacgccagcaaggtgcggtcgcagcggcccgcgcgggaggaggaggtgcgcggcgcgctcgacagggtgcgccgcgccgccgccgcgcgggtggccctggacatgagcgagctcctgcactccttcgtcaacaacctcctctgccgcgccggctcgggcaagttctgcatggaagaaggcctcaacaggctgttcagggagcttaccgacatcaaagcgggccttctcggagggttt

SEQ ID NO: 283276 - DNA, 381 bp, Zea mays
ctcattcgtccgcgatcgtcagctaatataggggcggttatatactccgatcccagaattgacgctccgacccatccgtcgaccacctatggctgccgctgcagctcgctcctccacttccgtcgtcgctgctctcgcggcgagcggcttcctcggcatgaagctcgtcaccagcatcatcatcaggaataagaagaacgggtacgactccctgcatggcgccaccaccaccaccagcgtcagagccatggcggtgaacaaggagacggagcacgacaggtggaggggcctggccttggacacctcggacgaccagcaggacatcaccagagggaagggccgcgtggacccgctgttccaggcgcccatgggggacggcac

SEQ ID NO: 283277 - DNA, 386 bp, Zea mays
ctgtcgcgtgggcggacgcgtgggcggacgcgtggggttcgccgcattttgtactccccggctcttgtgctcatccatccctaacctcaccttccccactcttagcttgcagcgcgtcccttccccgctcccggcgccatggactgcgcaaaggggagggcggtggcggacctctacgacgaggtgatggtggagatcctctcgcgcgtgcccgtcaaagacctccgccgttgcacgtgcgtgtgcaaatcttggcgcaacctcatcaccgaccccctcaaccgcaagaagctgccccagaccctggaaggcttcttccacggcgtcgtcggagggcctcacagctaccgccaattcaccagcctgtcggggagcggagaacgcgt

SEQ ID NO: 283278 - DNA, 689 bp, Zea mays
cctactcgtccggacgtcacaatatatagggtagcccaccagctagcctccggtcgtggcacgccggccggccggccattgttcgttggcagcgagagttggagcgacgggcaagccaatccagcatgggcggcggcggcggcgtgcatcggcgagcggcggcgctgctcttcgtggtggtgctagccgcggtggatcaggccggcaaaagcgtctgcgaggcgcatctccggcgcgggtactacgccggcgtgtgccccgacgtggagtccatcgtccgcggcgtggtggccaggaaggtccagcagacggcagccacagtcggcgccaccgtgcgcctcttcttccacgactgctttgtcgagggctgcgacgcgtcggtgatggtggcgtcgacggcgaacaacacggcggagaaggaccacgtcatcaaccagtccctggccggcgatggcttcgacacggtgatcagagccagggcggccgtggacgccgtgccggggtgccgcggcaaggtgtcctgcgccgacgtgctcgccatggccaccagggacgccatcgcgctggtacacgaacaccgcctgcagtgcagtacttaattactatagcaagcgaattactagaatattggaaggtgaacgaatgcgcgcaggccggcgggccgtcgtacgctgtggagcttggtcggc

SEQ ID NO: 283279 - DNA, 529 bp, Zea mays
gctttgatgggattctcaagagagcaggtgagagcaaccgtgcggaggctgactgaaaacgggcagaacgtggacctgaatgtggtgctcgacaagctgatgaacggatgataagttgagcaatactgtcatttcacagtcccgcacagtactatggaaacttggaaagtgtcagctcatcagctgaaacgatttttctgtctgcaacgttgcatacctgattgtgcctggagaacaataatggccgaacagccgctcatcctgattgccggtcacggttgcttcatctggaatggaaacagctcagtgtgccttcagtgaattacagtatcacaatctgaatacgttgtccattttatgtatatgtggcgatgagacattctaaaacatatactgtggtttcttgtgatatgttaataagcagctttactctgtttttaggcagtgtttccccctgctggaaagaactttcgctacataaaagcgaaacatcccccaaactcaacaaagtgtcctttcccaataaggc

SEQ ID NO: 283280 - DNA, 664 bp, Zea mays
  unsure (1)..(664): unsure at all n locations
cngtcgtacgatgacgacgctttcttctctcatgccacaattaatagctactataaagcttttgttaaggctgttttgacaagaaaaaacacaatcacaaatgtcgcctacatggatgaccctacgattcttgcctgggagctgattaatgagccacgctgccattccgatccatcaggcgacacattgcaggcatggatagaagagatggcgtcttatgtgaaggatatagaccctgtgcaccttttagagatcggtgttgaagggttttatggtccgtcgactccagaacttctgcacgtgaacccagatgcttattctggaactattggaacagattttatcaggaaccatcatgcactgggaattgatttggcttctgttcatatttattctgacaattggttgactcactctgaagaggtcagtcacctccattttgtgaaaacctggatgcaacagcatattgatgatgcagcccaacttgcttgggatgccaattctgatcggggagtttggggtatcgcttaaggatggaaagtttggccataagtttcgtgaagctttcatggatacagtctacaacattgttatatgctcttggaagactggggtgattggaggaggctgccttgtttggcagcttttccctgaaagcgctgag

SEQ ID NO: 283281 - DNA, 686 bp, Zea mays
cggacgcgtgggcggacgcgtgggcggacgcgtgggctctaccagatttactccctaccagccacaaggcattggtagctgaagagttcccacaactggacatcatcaacgacctgctggatgaggagcagagtgacaggagaagggttcttcagcctggtttcgtccagcaattctctgtgcataacggcgtcaggacgcctgattatggcttgttcagtgagccgtacctgttcgaccggtccgagcagtactttgacgaggagcctccaaggttctacagtccattgagcagcgctcctcggaggatgagggaccggagctactcgcacttcgatctcccttcatactccaggagcagccagcttgatggtctattgatgagccagtggccgccatacagccgcgccgacctcgccatgcctggttttgggtcagacacaggtggctactcctatcagccgcagggtttcccgagtccagcgagtgcagcaagcagatacccgtcgtatcgccctgccaatgggcattgagagttttagcgattgcaattggtaataatgtgtggtggagtccatgctgctcgcttctgagctgagtgtaattgtaatagtccccccatagcagtgatataaagaatggttcctctgttttattcaatccatagttatatcaaaagggaggcc

SEQ ID NO: 283282 - DNA, 622 bp, Zea mays
ggcatactattttttcttatggttttatgccatatgcccgttcagttcttgtgatacacaatatagcacatcagggccgtggcccgatagatgatttcaggtacctggatttgcctggtcattacatggatcagttcaaactttatgatccattcggaggtgatcatctaaacatttttgcagctggtattagagctgctgatcgtttgcttaccgttagtcatggttatgcatgggagctcaaaacacctgatggcggctggggccttcatagtatcattaatgaaaacgattggaaattccagggtattgtaaatggtattgatactgctgattggaatcctaggcatgatgtccatctacaatctgatgggtacaccaactattctctagaaaccgttcagactggtaaagcacagtgcaaggaagcactacagaaagagcttggactccctgttcgtggcgatgttccggtcattgcttttattggacggctggaccatcaaaaaggtgtagatctgatagcagaggcaatgccgtggattgctggtcaggatgtacaataaattatgttgggtactggaagacaagaccttgaagatacattgaggaggcttgagag

SEQ ID NO: 283283 - DNA, 561 bp, Zea mays
cccggaatgtctcaaaggcattgatggttttcttgaagaagatgatggtggactcttcccaccactagcagctatagaggaaggggatatctgtggctgacaagggcccgccgccgcaactgtggtggcagagaaggtggtggctcagttagggcagccacaagaccccatcatctgggcgaggcggtagcatcatacttgtcatcatcctgtcacatagctttggatttgaagcatgaggagaagcattgtgggggagaagcttcagtgcaacattgttgttgtatagggattaacatcctcaagatcacttggaaaactttcacaaaaaactcgtaatgcaagcatatgttttattggaaaagttttccaagctgaatttctgaaagccctcctactgctttagttatgctgaattggaatttgcagctaggggtttctcacaagtaaatttcttagctaaaggtggattttggtctgttcattgacgtgtcctttctgatggtggcgttgtttgttagctacaaaatcatcaatcaaagattgtaattatattgcgtc

SEQ ID NO: 283284 - DNA, 425 bp, Zea mays
acaacaaaagaggctcgtccaatagcagagatgatgctaacccccttgtgcatgcaaagtatcaaaaaggagaccagacacatgttgatgaaacatctaaaaaggtcctggaatctgaatgcacaaatgtggagaccttatagaaaagggcacaagcacacatgcatcttgctgatcttgatttggcggaggcagacatcaagaaagctctagataagctacagatccagacatgttaatcatatgtactactgaagttggcttaatgaaatcttttgagaataacttgcctatttaacttgtgtcctttttgatggtggcgttgtttgttagctacaaaatcatcaatcaaagattgtaattatatcatatcactgttttctattaatttttaagctgccgtagcaaggcacgggcatcctact

SEQ ID NO: 283285 - DNA, 690 bp, Zea mays
  unsure (1)..(690): unsure at all n locations
tcttcgcgtccggctttctggacctgaaaaaccatctaaatattgatttcatcattttggaccttcgactagagacctccccaacagcaaccaaatagaaacaattgctggtttacaaatgccattaaaccctggttagagaagtgcaaatatagttctaatgcagtcttagacatacttcatgcgagtgtgaaatgtaacgttatatacttgtatactgaccttgttacttaatcattgtgatgttttataattttttttgttatgatttcatgtttaatagctctgtacagcatgtgtgatgataacattgttacttcctgtgatgttatatcctctctatgtgagtggtgatggcctcatggtaagtctacttctagttctatgtgtttacattattttaattttggcaatcttcacaatctaaaagtctgtcagaacaggtcatggaagtccctgacatatctcctatgtcagaatacttgtccactcatgatgttattctttctgtggatggtctgaaaataaccagaactgatgattggatcaagattctgaaccaaggtactacagcgaaatctagggatcctgaattccttgaaggctctcatagatatgttgccactagttctaccaagggttattgcgtgcccgattcatggatagatgcacgccanaatctctggcaga

SEQ ID NO: 283286 - DNA, 562 bp, Zea mays
catgttcctgccaactatgcctcctcatatgccatcgccggcgtctcgtgctcatcctcttcagcagcagcagcaccagttcactgactacgcgctcttgcaagaccttttcccttccacaatgcccaacaacccataactaactgctacacaattagctagcctagctagaatcgacatgagagatgctgtccaagtactctgcgccatatgtgatcaccctgatggccttgcgctttgggcttggtctaatggggagggaactgcagttattattgattgattaatctgctagctttcatcttaaacattggtttacagttcttacccttccatttgtcaactctccgctgcgcggattgcatgggaggtactagagatggaaccgagtactttttatagctatcactataacggcaactaatttatgtacggcgcctctagacttcttgtacgtgtacatatcatgtgttcctcattgaatcatttgggagaaaaaaactggaagaggagtatttcattttataagaaaaatggatccagacaactataaccctacttg

SEQ ID NO: 283287 - DNA, 528 bp, Zea mays
ctagctttgaagggaacatttgcaaaggacaagaatgagctgcttgctaaacaattccaaataaactatgacgacgaactggctatgttccgcggaggatctagtgtttaccgcgagaaggtccacacaactgtgaagattgatgactatggggagcccataaaaagaccaagattgaaagttacagtggcacatgttgataccattgggactgcgttttgggaaaaccatccacacattcttcgagaaggaaaatttatgcacgggtttgtaaagaaatttggcctcaatcacatattttcaccttgaaattggatcaatgttcgcactattgatcgccaaattgaccaattctcaacaattcattcatttgacaagccaaatgatgagactgcactaaggctgatgaatgaatctgcatcttcgatgatggagcaataccctgacattgtctacggctatggttttagcaaagagtatagattagtgttccaagagaagagtgaactataccagagacgggaaagc

SEQ ID NO: 283288 - DNA, 508 bp, Zea mays
ctcgtgtttcacggccagaacacacctcctcacgtccacctgacctcttgctcctccccaataatgcccagtgcggcagtgcctgccaccgtctaagcccaccccaagtctccgccgtcaacccgtcctcccccatggccgccgccgccgccatctctctatccttccactttcgtttccgcccgccctttccatctccacgtacccccacgcgccacgctcccttttccttgttctccccttcccttcttgccccctgccgcctccgcgtcgctcccggccgcccctcactcgtccccgtggcgccccgacgtgcgggcgcgcgctggaagcaccatcggggcgccgcctgcgcttgtgcgcccaggcggagccgtggagacggaccgccttccctccgacgtgcgggaccgggccatggaggcggtcgaccacttcggcggtcgcgtcaccataggagacgtcgcttctcgcgctgggctgcagctcgcgcaggcggagcgcgcgc

SEQ ID NO: 283289 - DNA, 584 bp, Zea mays
atttgttttataacatgatgactaggcaagtgtttctttgtaagaaacatgtgcattaagtggtgagaataatccacattgtcttctagaacaattgacaccctatttgtaccaagtagatttttttcatgaacagacaaatttttcaaacaatgttgaatccgcatgttattatttgtgagatattgaggtcgaatctatatatatatagttcgtttttatgtaatcgttgtagaccaacatttttgtcaaatattttcgtatcgaacaatatactcaccattgaagattactcactcccaactctttcaagtacattcttctgaaactcaggccatgattggaatgagttgatcttgagcttggcaaagtagcagcaaacatgcacaattgaaaaacattttttctatattaaggaataaacattccggtgggcctggacttttcattggcgcatgaataattagtgtcatttacagtgtcattcagagtttttcatggattgtattgcgctttaagttttcaaccctttatggtgggattagctgcatgaggggttctcacataaactttgagattaatta

SEQ ID NO: 283290 - DNA, 476 bp, Zea mays
gcattgtaccctatgttcatgccaccatggaagggcttcgtattggagcaccgattatgcaggtttatcatgagaaatcttttatcttacctgatgtttcaagggtgcttgcttgcctttatgagaaggatgtcaagtttgagactcacacagcctcatacaggagcctactcggattgcaggcatcatctcatgctccagttccattctatgaaggccctacttttctagaagaatccagagaaatctgccgttatatagcagaaaagtatgaaaatcaaggatatccgttcctccttggaaaggatgcccttgagagggcttcaattgaacaatggctccacaacgaggagcatgctttcaaccctccgtgccgggccttgttctttcatttggcctttcccctgggtgaaggagaagatgatgatattgatgttcatacaaggaagctagaagaggttctggaagtttatgag

SEQ ID NO: 283291 - DNA, 766 bp, Zea mays
tcctcgcgtccgcccacgcgtccggccgcttcggcatgcgcggcaggctgtggggcctgtgggtggtgcagaccatcgggggcgtcctctgcgtcgtgctcggcgccgtcgactactccttcgccgcgtccgtggccgtcatgatactcttctccatgttcgtgcaggcggcctgcgggctcacctttggcatcgtcccgttcgtctcccgaaggtcgctggggctcatctccggcatgaccggcggcggcggcaacgtgggcgccgtgctcacgcagctcatcttcttccacggatccaagtacaagacggagacggggatcaagtacatggggttcatgatcatcgcctgcacgttgcccatcacgctcatctacttcccgcagtggggcggcatgttcctggggccgcggcccggggcgacggcggaggactactacaaccgggagtggacagcgcacgagtgcgacaagggtttcaacaccgcgagcgtacgctttgcggagaacagcgtgcgggaagggggacgctcgggcagccagtccaagcacactactgtgcccgtcgagtcctcgccggccgacgtgtgaaacacacacaagcatacggtactgcccgtataatcagcggtccctcccgtgtcagcaaatcatatgtagtgttcctaagtcgtgatgactccgtacgtgtggtaatttctgtgtgaaggaaaaaccgggggtgaatttcagcgaggagtgacattataagcagggctcgtttgcat

SEQ ID NO: 283292 - DNA, 310 bp, Zea mays
ttcttctcgtacgctcactcatctgactacgcgtgcacactgtcccgcggtcgctagcggagtgctgcctctagtgatgcttagctccctgggaacaaccggtagccgagctggtatgctcagctcgcgcaacggagtcgcgaccatggagactccgcttctgtcactgactggtgaggtgaccgatgcaagccttgtgcatgatcgtctgacaaggtattcacgaagatgagcttctcttaccatgggttgtggcaaagatggatatcgttgcatcaaatctcaggtcggatccgtgcaacgaggagga

SEQ ID NO: 283293 - DNA, 487 bp, Zea mays
tgctgagcagggagttcctgtgcgacgagaaccgcgtcgcgggaagcggcaccccgtcgctcggccacttcgtcatccgcggggctggggccggggccggcgatgccttctgctccgcccaggaggacggctcgtcgggtgagaagacgcggccgccgccgcagccgcaagtaaaattttacttgtccgctgtccgtctatcttgccacggagacggagacggagacggcattagccgccagcgacctcgcccttcttcctggcgagtggatctttaccgctctcctcacccacctgttaattaattttttttctcttgcatatacatatcgtttgttatctttgtttctgggggcaagaactgtaagacctaccctggtaatatgattgtctgcatcacaaaaaaaaatgaaaaagagaaagaaaaggagaagtgatgtagcaacaaccctgaaagtatatatactagctaggagctttacacatc

SEQ ID NO: 283294 - DNA, 259 bp, Zea mays
cttgaaggttccttcaaaaaattttggttcaccttttctgatatatggggaaagatatgagagggcgtacagcttttttcctgaaacttacagaacccctctgtaccatgttcagtatacttcactcgtgagtagatttagttctaattgacggtaataaactgattctttttgactgggagtaaatctcacctgtatcttaatgatctcatgtgatgcgcattgagcttcatgcagctatattttttttaatagtgtt

SEQ ID NO: 283295 - DNA, 696 bp, Zea mays
ttgtggtgcaaattactgaggtgccaggcagttcttccaagcaaaacaaaacacatcatacatcaacagttggtcacggtgttgaagcacaggtagaactgcatgtcgctgttcaagcttgtcagccttcaaatgagatgaaagatggcggtgaagccccaccaaatgcaacaggtccatcagatgcacaactggtggaagcaaggatgggtgtcaacggcaacaacaatggctcaaagaggaaaccgacaggagctggccgtggtcgaaagaagctgagagtgtctcaagccccacagcaaaggcggcctgagcgagtacgggtgcaaccgctagtctgcaccatttgcaacgcgatttgtgatacaagagctgtatttgacatccatctggttggtaaaaagcatcaatcacgactcaagcgttctcaaggcccagacgtgttgttcggtcctttggttgggcatattcctccaaaccagtccgcagctcacatgacaggagcccctgagccactgtattttggctttaagagtatgggagcttctttggttgagcaggaggcatatctggctggcgcgatgcagcacgtgttgcccgttcttccacaagctggtccaaccatcatggctgctgattatcctgcacaaccggtggctagcaatctgtgctgctagcaatggaagacctgtaact

SEQ ID NO: 283296 - DNA, 843 bp, Zea mays
cttctgttgatgctcgatgagttgagggaccaggtacagagatcctacgagattgctgacaagtcaagtgtgaatgcttcaacaaatagaatggtggatcctgcaagctcctacaatcctcatgagcgtctgagtcgattgcggtatggttcacctcagttgcagcgtaatggttctcagcgctcaccttctttgaatggacaggcacctgttgttcctcctgcttatccttcagtatctgtacagcaagatctccatggatacggacaatctgttgcacatatgggagctcctatttacccagccgccccttatccatggagaaacttcgataactatttccatggacagtatgatcctgaccctctgatctcttatcaccatgacggcttctaccatcagcctgcttgctcttgcttacattgttaccatcgtgaattattacctgttcatggggctccactgggtttcaaccatcgcagggcaccatatcttatgaacaaccctgtagaaggcccggtggtgtttggtgcacagaactacaatccaagaggtattaatggtctgatgcgacacaatcatctgagggacaccctgagtaaaaaacctgcacagacttgtgaaccaattgccaatggtgccccttttaccatatgctacaattgctatgaagtactgcatcttcccaagaattctctcatgctgggaaaagatgagtacaagctgcgctgtgggtcatgttcacatgcaattgtggtcagacttgatggaaacaggcttgatgtttcagcacctacaccagtttcacacttatcacctggaagtaaaaattactccaacaat

SEQ ID NO: 283297 - DNA, 535 bp, Zea mays
tctccttgcgtccgggcattttgagatgcttaagcttcttgaatcacattttttcatgagtgaggtttcaccaattgatgctgatgaaaatcatggtggtgtagtagatcctgatcctagtcaggatgctgatggtaacagtgaagcttcagttgttatgagttcagaaaaaagaagaaaatcacgcaagtatgacctgaggcaccagcctaatctcgatgactatgcggcaatagataaccataacattggcttgatgtacttacgtcgcaacctaatggaagaattgattggcgacgttgacacttttgatgagaaagttgttggatcgtttgtgaggataagaattcctggtacagggcaaaggcaggacatttatagacttgtacaaattgttggcactggaagatctgcagaaaaatataaatatgggaaaaggactactgatataactctagagatactaaacttagacaagcgggaggcagtaactattgacataaatttaaaccaagagttcactgaggaggaatgc

SEQ ID NO: 283298 - DNA, 699 bp, Zea mays
atactgctaagcttgcttgcaacttcctctttattgcttgaacgatatctcaggcaaataaatgaagggttgtcaataggattcacatcagtcttgattattgtgggctcaattattgagcttagaagatcatatcaagcgtacaatgtgatgccagcactgagcaaagttttgaggagatatggtgcttaagagtatgtaagctgatacgttggtgatgatggcaccatccactagctcgtggtgttgcaaggtcgattggtctttagaaacagcatggatatgatgagaagtttaccgctcaagcttctgttagattaaaaggtggaaggaacatggctttacaatcacatcggactttatcgacaaggtgaactgaggaagcaacaaacatgcccaacaacatggctgtgtgtatttgttggaagtgatctaaaatcttccatgtcctaatcgccatactggatcacatagctaatctgttgggttctataaattctccaccgttcaaatgctccgaaaggaagggcctttggataagtttctcttttttttccctttttttgtttgggtgtgcacacattgttggacgggctgtagttgaatgagtagagtgtacgccccgggctgaagatgagtcggattcaacgacgaacatttttgttgtgcccgcgaatggccaatatttcccccccctgt

SEQ ID NO: 283299 - DNA, 510 bp, Zea mays
tccctcgcgtccggcccaccgagctccctccatcttgctccccatggccgagcgccctcccgtcctccaactcgccagcgcttggcttcctgcttgccaagtccatctccctccctagcgctgtcccacctcctgctcctccacggcgctcagttccagctcgccggctgtgcaactcgcccatggcgcccatctctctggccgcgacctccctgctcctcctttccccagccgcggtcttccctgctctagcccagccgagctcgtccctgcgcgcgtgttctcctgcgtccagccgagcgcgcgaaacttctctgctcacggcactccctgtctgctcggccatggtgaaaccctccttaccatggatgccggagttcctctgctcgttctcatggccgccgtcgagcttccggcgcgcgcccatctcctctgctcccccgcgcgcgttctgggactctccatcgcgccgatctgtgcccggccgtggccgtcgaactcgcccagctc

SEQ ID NO: 283300 - DNA, 690 bp, Zea mays
gttttcaatttcacttatttgactgtgcatggtcttcgaaacaagttttagtttttaagtttgaccaaatcttgtcataaacaacaagttttttttaaacaacggaagtcgattagtatttaaaatcagcaagtatcatccattagtgttttaggtctttagatttaaaaattgtggacttgccaaaactctatgttatttgataaggctctacttgttaaattaagtggtgtggtgcttgatttagtcgatgtgctatgcccgataatctagattagtaactctaaaatctagttaaagtatttctattcgtcactttaagttataggtatccatggctgttgcgtctaagtatctgatttctgagctctgcccctgctgtttaggatagcatatggagttctttatgttccacaagcacaattgatcttatggaatggaaatagtagaacattccttggtgagagcacacaaataccttatacaaagcaggtattgagtcaaactgttgtgtacccatctgtggtctggatacactggtttggtgaaaatgaaatatgcccaaagcaacaaaacccagttcacatgaactgctatcctgtatttacgaatcttgactagtctagtaatgtatgtatgtggaaatatgaaggtttctttatttctcttcttaaacagcaagagaagaag

SEQ ID NO: 283301 - DNA, 601 bp, Zea mays
aaagccccacagctcgagcgctccgttgctagcctgcgcccccgaaaccacgagcgtaaaccctcctagtccggcggtgatggccggcgtcggtggcagcggcggtggaggtggggacgacgcggagatgggcggttggacggggcttctccactcctccacgaagctcctcgagcaggcggcgccaaccccgcacttccctccccttcagaggaatctggaccagctcgaggcgctctccaccaagctcaaggccaagaccatccgctctgaggctccgtcacagtcgctctccgccaccagattgttagcacgcgaggggatcaatgctgagcagctcgccagggacctcaagtcattcgaactcaagactacctttgaggatgtttttccatctgaagcaactactgttgaggagtacttgcagcagcttcatgaaatggccattgtttcatccatccaagaagctcagaaggacaatttgaagagttttaacaactatatgatgcatgttcttgaggatgactggcagaaagagaagagagacttcttgcagagtctaagccggctttctacattacccaagagatacactaatctc

SEQ ID NO: 283302 - DNA, 532 bp, Zea mays
cccacgcgtttcgattagaacagataaaattggtgattattctggttcatcgaagtggggaaagaaacctgttagtctagatgacgaccgcaggagtacatatgatcagcactattcacgtaatagctctctgtttgctgccctggatgatgagaggaaactactggtgccagtaggggttcagcagccacatgcatatgctaggagcttggcacgatttgcatcaaaattgggcccagttggctgggatgtggcagcaaatcgtatcagaagggcactcccccctgggacaagtttcggcccaggatgggttgtagatggtgaaccacctcaaaactctcagtgggctcctgcagcatcgactaatccctcctctgagcccactgctccacccaatatgccatccaagaatgatgtactcgatcacaagtctggaccgtcttctaatggggatgttactggtgaggagcatttaactagaactcacacagtggcttttacatcaacaagctttgataagagctctgacatt

SEQ ID NO: 283303 - DNA, 513 bp, Zea mays
ttatagcctctcgcccttgagctcctacaaatttctctgtcggcgctctgctctgttctccccactcgacgcccagcccctctgctcgctcgtcgtcgttgcagccgagctccactttggctgctgcccggccgagcttctccccgagctccctgccctggtgccgcgccccttcctgttcggccgctatttcctctctgctactcgcagattccttttctcccatgctgcagcacatctccatggctgccgtcgaccatctccccaagttgagcaccgcagtccactcctatggcgagatcgccttccctgccccaagcttgcctccatcgtgtccctgaccctctgctcgagctcgcccttgcgcgcaagttctcctgtgtcccaccctggtgcgcgctgctctctgtctctcttctagccacgctcgcccagcccagcgtcgcgcctagctccgtgcgccgaggagcttgttcctgtgcgcgccggccaccggatcatcttcaaactccg

SEQ ID NO: 283304 - DNA, 678 bp, Zea mays
aatgtgtctttttgatgagtattctgaggcaggtctccggaccctggcacttgcatattgtgaacttactgaagaacaatatgttgtatggaatcaggattactcgtctgccaagaattctgtacatactgatcatgttgcagctgttgagaaggtgtcagaagacattgagaaggatttggttcgtttgggtgctactgctgtagaggatagattgcaaaatggggtccctgagtgtatttataaacttgcacaagctggaattaagatctggattttaactggagacaagttggagacagctgtaaacataggttacgcttgtaacctactgaggaaagagatggaggaaatttttatcacactggagaactcaagtacaagtgcttcagaggggtccagtggagaaggaaacaaaattgccacatttgaggaaattgatagaaaattaaaagatgctagaggaaagattcccaaaaaggaacttcaacttcatttgctcttatcattgacggcaatgctctgacacaggctcccacgggaagccttaaaaattcattccggattcaagcagccaccgggcaaccggtttaaggtggcggggttccacaaaaccaaagggccctggccaccaaatgggtaaaactagggccaggtaaaccaccttaaccaatgggg

SEQ ID NO: 283305 - DNA, 486 bp, Zea mays
  unsure (1)..(486): unsure at all n locations
cggacgcgtttgctttcgcgtggaagctagttcctccagtttttcggccttgacagaataatgcaccagccgtccagcccccaccccaggacacgggctgctaatgttaatttgtctgcttggttcccttgtactgcatcacttctccctgctagagagctggaatccccacataattttaggctaccagttctgtttcttccatttgtcatagtacgatctacaaagtatcaaccaaagaacatgtgaaaaataagatggaatccctttaatcagattgtttgtccgaagtggcatggcgatgaaaaggaaaacatcagtataaagaactagttactcataattctttgttctgtaaagagtcctttctaaataatgctgtgtgcatgatgatgatgatgtgatgtgatttctaccatgacttcaaagaactcaatatttgcaccttnnaaaaaaaaaatnatatataaaaaaaaattttttttt

SEQ ID NO: 283306 - DNA, 293 bp, Zea mays
catggaaacggcagcgagccgcgagcttcccgtgcgcgcagtgtttgatgattgatcaccaatcctgcaccgctgcgcggccgatcgaggctgagccttgcaggcgtccatgttctcgtcagcaaggcaggtaagcatgctgtccctcaaggattgatttttttttttaatgagcaacgctgcatgctgtttgtccagcgtcttcttcacatgtctgaggtctgagcaattgcgggtggacatcgatggatgagcattgccgctgcaagggaagatcgtccggctcacacttg

SEQ ID NO: 283307 - DNA, 548 bp, Zea mays
cgcggagggtatgttttggaccatggccgagatccccaccgggtatccgccggcgctgtttgtgcatatgcccaaggacaccgaaagggcgcggttggttgcggaaagcatgtacaaactcaaggagaagcacgtcgacgtgcgggagatccagtgcgatgacttcgccgtgagcgcggatttcctggcagagagggtgccggggctgacctgggccttcgccaacgcgctggtggacatgcttcggcggaagggattcgaggatgagaaggggatgctgaagaaggacgggaggagaacgccgtggaaggaggcggctgaggaggccaaggtgctgcctgagcggttcggtctggagaggcatgtcaccgtaggagctcaatgttgcctatgcgtaccatgagttcaccagcctgaagaatactgaagtcttccaatggtttgagtcccatatgaatcattaggactgatgcccaactagcttgcataccacagtgaaccgagtaatcttctgattgtttgaagaccacttttgaccatgatctaca

SEQ ID NO: 283308 - DNA, 167 bp, Zea mays
gtccatcaggtgttctctacattcgctcagagcttagtccatggatttcaaacatttgaggaggtttgggaagatctctgtgctgacataagagatggtgtcctctcagagaaagttacagtgccatcggttcgtgaagccgtgacaaaaatcctcaagcccaatcc

SEQ ID NO: 283309 - DNA, 612 bp, Zea mays
gaggctatgactcctgttctagttggatgtcttcattggagatggtgaagaaacttcccatggaacggcagcacaaattacttatttgcttgcaatcttgttctgcgttttgtgctctatgcaatgatgcgccagaagatcctgttgtcactctatgtggtcatgttttttgcaaccagtgcatactggagcaactcactggtgacgacagtgtatgcccagtgtctaattgcagagtccgactaaacacatcctcactcttctccagaggcactcttgaatgctctctgagtaaattagcctctgatttcaagtctgatgatacatgtatggaaatgatacatgctgaaaagcgccctgggatggattcatcctacgcatcttcaaaagtgagagctgcattagatattcttctctcattgcctaaaatagatcccactattgatagcaaatgttcaatcgggattgaatctgagaagtttgatggaaagggtatttcagaacaaactgacaccaagttgacagagaaggccattgttttctctcaatggactagaatgctagacttgcttgaagtccatttgaaagcttctcatgtgacatatcgaaggc

SEQ ID NO: 283310 - DNA, 783 bp, Zea mays
ccctcgcgtccggcccgacgaccaccacgagtccacgacggcgcgcccgcctcgctgtcgcccccgtcgtgcgacgccgccggctgggcatcgccccggaactcctcctgaaggcccctcatcacgctcttgcaggctctggacggacgtgggaggccccgcggcgcccgtacgtatatctagcggcgagacggcaagctcccgccccatctccgccgcctccgctccccgtcgtccggctgcgctgttgctgctcatacggatcaagctcggctacacccgtttctgcgagcagatcagaggacgccatcgtcgggtcgggagggatgggacctgttcactccgatcaaaaggcgaagaaattggcgattatttgcgaacaaagagttataattccaaacgggcatggggagaagcttgttggtttattacatcgaacaagttcaaagaatctggtgatcctttgtcatggattccaagccacaaaggatgacagcatcttggttgaccttgctgatgccatcacaaaggaaggaattagtgcttttcggtttgatttttctggaaatggggaaagtgatggtgaattccagtatggaagctacagaaaagaggcagctgatttgcgctctgtagtattacatttctcagaacagaaatatgacataattgctcttatcgggcatagcaaaggaggaaatgctgttcttctttatgcttccaagtaccatgatgtccctgccattgtgaacatttctggccgctttgcattagagcgaggta

SEQ ID NO: 283311 - DNA, 500 bp, Zea mays
ccctcgtttccgcccacgcgtccgcaattttaaaagagtgatggtacttctttgtttgtatagaaatatcataaaagactcggatggatctagaatcttgtcatgttctagaccaagtatacttgaatttattatcttttcctttcttatgtttttagattcattcgctctgagaatttttcataaatatatttcaacttatcgattaagatatgcctctaattgccatcttgatcttagatgggttaggttgtcatatgttttagaaatattagctaacatagaaaaaaaaggaatacaaatataattgtcagccaaaaaatgtttcgatagcctgttaatggtctttatttcatacgaatttaaccttccaacagttttgattgatattatgtacctctacagatggcagtagtggaaattctatgtgtgcaactagaaccaagttaccgaccgttgattagtgcctatggagctcaataggatattacattttattt

SEQ ID NO: 283312 - DNA, 268 bp, Zea mays
cttggatcattgtaccagtacaatggatgcacactgttctaataatggccttctactcttttggattggaacatcaaaccttgcagtatcatctactttccatgttgcaggtgccttagttggtgtggactgcatactgaactgtgacagcacgtcgtagctacctgctagttcatcagaaaattcttaccttgagctatctattgtgggctcaaaggatgaccgattttcattgatgagaaactttccaaaagcagttgattttgta

SEQ ID NO: 283313 - DNA, 298 bp, Zea mays
aatcttatgtgggagctagtcatatgaaggtcttacctcgtatacttccatggaaaagaaaaatagatctgccagaactttagaggcaggtattcttcgttgctgaatacaagctctataggaataatgagaaaattattgcaaacaaggaagagaagtactatttacactgtctctactgatggattctctcttcggaaatctggagtgttaagtataggcgggtcaagtttgaaatggtcaaggtccctcgagaaacattctcgaaaggaagctacacaggcagttgctgaagttg

SEQ ID NO: 283314 - DNA, 466 bp, Zea mays
ctaacgaggactcggtccctgctctcattctttgctacatccagcgacgagttgatgaggactccatcctttctaatgcaacgtcccagggtttcaggcttgtggacaaatggataaatggagttcacgagagtaacggtaccatcagttcttggttctctggtaatgatgtctgcagtgctttccggcatacagtactttcagtattgtacttcgagctgtgaatgctgctatgcatgtgcaaggttactgtgtaacctgaaggatttttgtagcagctgtatcaagcaacggcaaaccaactttgaatctttaggccttgtttaatgatttcaattttacgtgtatcggactgtactggaatggattgacatggattttgacttctatggatttaaattgacttagtgccatccaatccatatggaccaacggtgttaaaaataaccccctactgtgttttttt

SEQ ID NO: 283315 - DNA, 658 bp, Zea mays
cgtaaatagtcacatgtcaaatatattagcagcattccttttgttgtacaattagggtaaatgccacagatattttaatagctttcttatcataaaaaactgcatggattcatacatcgtgaatatcaacgcggcgttagtgcatggaacttcgatatcgaggatctcaaggctcaagcatcattaattcatgatgacgagcctcctgaaataaaagaagacgaggacatggcaagaaacattgaggttgaaaaggacttgtcttcacggaaccatttgggaaagtcatttgcaaatgagtgcaattccaggcagcgagcctttgtcaccactttaaaatcggatggaaacagccccaccacgaatgaagcttttgattttgattttgattttagcgaggctgccactacaagaagggctgatggacatgaaagaaacataagagagaatgattcattgccctctacagcaaagcgagatccagagtcgaatcattggacaaatgacgttgggcagagacaactgtcttctggtgggagcaatagctcaacagctgaaaggggctatggttttgagagggatgcagttgtgcaaacaatacctgacaaacaaagaagtgaggcgagaaaaacagcaagccttagtggtccactttcac

SEQ ID NO: 283316 - DNA, 487 bp, Zea mays
ggggagcagtgggaggatggatctgaacctttacctgggtcccccccgcgccccgcgcccgcgccgctctgacctcggctccgatctcgccctcagcaccccgatgccttcctctccttcgtcctccgcagcgtccgtcgacgcaccgccgccgccgcctgagtccatgcacccgccgtacacccactcccgcgccgacctctcccctccgccgcttccgctggaggtgtacttcccctacaaccccgaagactcgcctgttccggatgcgcatatgtcgtacatgcagcctccggagctgcttatccccgggccgcggaacatgccgcctccggattcgcttatctcggggctccgagagggaattcgggaacttcggtacgcctcccatccgccgccaccgcccccgcccccgcccccgctggtgcgggccaacgaactgatgggctgggaagagcgtcttcctcgtcaacggactcttcatctt

SEQ ID NO: 283317 - DNA, 331 bp, Zea mays
cccactcgtccgcccatctccgcgccgcacccgcaacgcgtctctcttcctctcctggtcctcctgccactccgcctcaacttgctcggctattcccggattgcggctcggggttggtcattggccgtgagggcctttcaagaacgggcggcggcgctttacctgacgcaaattgcgccggtctcctgccttgctgcgcgcttgggggttgggctcaggaatgggggtagagcaggggctgcgtcgcctggctcgattcccatctctctgaacttagatggatgcatctgtaaacaccaagaagaaggatagtttctgtgggaacactggc

SEQ ID NO: 283318 - DNA, 984 bp, Zea mays
cccttcgtccgccttgctttcggagttttgaatttccctttgtcagctgtgagcttgtaaactccagcgatctcccagaatatagtcctcttggcattcgagagttgatgaggacatccttgaacttccctaccccagtaagattgtagggctcccctactagggatgggagccctgatgctgtgctaaagaatgctgccaaaagattcatgtgcaccccgtccataatgaaaaaaaggcacagagatcttttatctccagttcctgatataagaactgacaagaaaccaaatactgaaagggattttatgagctcaggcatatcctctacaagagttgggaaatcttgcatggatagcgttgatgattcagctgatttagtttcaccgaaagagagtgcatttcaaaagaagctgaagctttgtcacgaaaacaaagaaaatttgaatgaaattgctgatcaaggagaaaatgaagccaatgcaaagcattcttcagggattcttactccgagcagtgttgacaaccataatacacataagaatggtccaaattttcgaattccggagctaaataccactgtacaggctttgtctaactctaaagacataatattttctagatcaaagccatcagaacatgttgaaaaatctgcagcctgcattgatgcagattacgagtatttgaacatattggctgatactccaggtattaaaagaggcttagaatctccttctgccgggaagtctcctgtgttcacaccattccaggatgcatacttcatgagcccagcaagcagagcttttgatgccttaggattggtgaagcagattaatgagcagagtgcttctgctgtggaggaagcacatgaagttctggcaaatggaagcccatggaaacaacataacaaggaaaactctgacaaagaaaatatagaaaatacagctttgaagcatgagcatgtcacaagcaaacctccatcga

SEQ ID NO: 283319 - DNA, 520 bp, Zea mays
agccctatagtcagaacaatgaaagaatgtgggagtctatgcatgaaaccaatggtgtagcctagaaggcgatgcaggaagagtacataaaagaatccatcaaacaatgcatgtctttggttaaagaatgtggtgcacctacaggaagtgcagagcacttcaatgctagtaaactatttgttaagactgaacattgagaggtttctctcaccatagaagaaagtgcacaaatgctagcttggttaaagaggtggtgccaggataagaaaatctattagttttgtgtgttcagtttgtcacggtctacagacatgaactagtgtcaagatctacatacttgaactagtgtcagttgcttgttcagtgtgtcactatcaagaataatgaacttctgtcatgtgcatctgttatgtggagtggtactcagttgttatgaaatttttgtgcaattgtgttagttgttatatgcactattatgtaaaaaaagataaagtttgcctctcagtgtttgcttttgttc

SEQ ID NO: 283320 - DNA, 347 bp, Zea mays
cctacgcgtccgacgtcctatatccccatcactccgcagatattacaagcaggtttggttctgttggcagttcccattcatcaagagacaagagatcaaggtcggggaagggaaaacataacattcgtttctctcaactaccatctgatactggtagccagaatggtgacagcggaggtataaagtttagatccaagtacatgtcatctgaagagatcgaatcaatcttaagaatgcagcattctgcaagccacagcagcgatccttatattgttgattactatcatcaagcttgtatggcaaaaaggggtgccacttctaagcaaaagaccaatttctccccaaca

SEQ ID NO: 283321 - DNA, 530 bp, Zea mays
ctgcgagtcggggtaaggaggctcatgagacaactaaataacatgccgtcttcggttatctcaagccacagcatgcatcttggagtcctagcaactgcatctcatgccatctccactggaactctcttttctgttttctacaaacccagaacaagtagatctgaatttgtcgttagtgtaaacaagtacctcgaagctaagaatcacaagatgtctgttggtatgaggtttaaaatgagatttgagggtgatgaatcccctgaaagaagattcagtgggacaattattggtatgggatgcatgccagctaactccacatctccatgggctaactctgattggagatctttgaaggtccaatgggacgagccttctgctattctgcgtccagatagagtttcaccatgggaactagaaccccttgatgcaactaattcacaaccaccttaaccttatttacgggataaggcgtgcacgaccccctgctttactttctattgcttcaggaccttcttaagtttttggttttt

SEQ ID NO: 283322 - DNA, 537 bp, Zea mays
taatcaatgagatcattgatggcagcatggttaatactgttgaagggctcaaggtttatgaaggattactaaatgtaaccgaggcaaataagatcctttccttagtcaatgaaacaagagcctcttaccggcgaggggggcttgaagctagacagaaggttattattgctaaaagaccaatgaagggtcatggacgggaaattgttcagctgggtgttcctattattgatggccctcctgatgatgaaaatctaagagagacaagggtggaggcgattcctgggctgctgaatgatctgtttgatcgcttgtctcagcaggaaattatacccttcaagccagattattgtgtcattgacatcttcaatgagggagactattctcatcctcaccaatccccttcttggtatggtagacctctttgtaccctctgcttaacagattgtgatatggtgtttggccgttatatatcaggagataaaggcgatcatagaggtcctctgaagctctcgctcgcaactgggtaaaacttcccta

SEQ ID NO: 283323 - DNA, 442 bp, Zea mays
ttctaagttgcggtgagcaattccaaggcgatgagcttgaggtacatgagccgtgtgggagcgcgggtggtgcgggagatcacggccaggtcggtcaaggcgcaggcgcaggcggcgtccatggcgaggagcggcggcagcagggcgccggccgccgggtcggtggagtcggggagagcgagcgccgtggcggcggcggcggcggccaggaggaaggcggaggaggagaagcggcggcgcgccgagcaggcgctgcgcaccgtcatgttcctctccgtctggggccccaacacctaggcctagtaggaatcaaggagtgttagcatcatcgtgtgtagcgttctgtgcacgtttgtttgcttgtttgtttgtttgtttgaggttcagaaaacacagtgtaaattacttacagtggtataatctttgaagacatcacatccct

SEQ ID NO: 283324 - DNA, 1039 bp, Zea mays
cctacgcgtccgattgcactttggtaaggtttatggatttttcaatcattctaaaatgtaaacaatcattggacaaaactgtggaaaagttgcctcattagtttatggcttccttttaagctcctccgacaagtgtttgcaacaccaggggtccttataaccgctttcttgctccatttcatatctagaatcaaaatctgcagtttcttcatttcctttctggtttctgaaaacttctctggaaatgctttcaaagaaactgggaactctcagtttcatagtcatttttggtaaacttagcatcaatgttttaattgaatttttgtttttggagccaacaacttgtttgctctgtttcacgcacatgtatagggttttgctctagaatgtattccatgacaactttttttttatggttttgagctgtgaatttgatcatttagctgtaattcattttatttgattacttaattatgaaattggttctagaataaaatattttcagtagttttatacagttcaatgcaatgatgtaaaattttacctagttaagggtatttaaacatcagacaagaaatttttcatggggaggggtggggagtaactcttggcagttgtgttgtcctaaactaaggaaataacaatcatttctgtggcacagaaggtctacaactcttcacagtctctctttttaagcgatctttataccttttggggcttagatggaatacatttcaaatggaaaattatatagggttcaggcatatgtatgctcgctggtaatttagttcaatcttttggactttcattggaaagccattttactatgtgcatggttggtacaaccaattaatgacaaggcatctctgggaacacaaatatgcgtaaacaggtaattatggctgcacctgtatgtggcccaggttctctatttcctagtacttttttgtcgtcagcaagaaatttcttgagaagagcaaattgcttctaacgaaggtagtaaatgggtgggctgttctctcattccacagatttgcat

SEQ ID NO: 283325 - DNA, 644 bp, Zea mays
tggatattggtgatactagtacagagggcacggagcactacggtgagggaggtgtttctactgccgtctcggtggtgaccgtggacgatgttgcagagacagtttccagtaggagtccagcagtctcagtcatcggcgatgacatgactagtgtcaagagtaggccagatgctgacagctccgatcaaacaactggctacgacgcgctaaggagcaaggaatttcgggagaaagagtgtgtgaaaacagaggagagcaaaaccgtggacgacaaggtgcctacagagagcacgccaccaccacggatcattcaagtttctagatcgccagcgccagacggtcagagcagggtagaagacgaagcagccgtggggacggtgctggaaggagcggcgagtgacaccgacgatcttgccacacgcgcggtggtggttgctttgcaatcgagcatttctgctggtgaaagcgagccgccgtcagcgagtgaccgtgttgagcacaagccggcgaacgaaggatttaggaagatcgcgatagctgaggacacggacaactacacggaggaacagatgagggagcagcttgatgccctaagaacaataaccgggctacgtcccacgccgtctttgactctggaagccgag

SEQ ID NO: 283326 - DNA, 541 bp, Zea mays
ctcactcgtccggtccaggatggacattatgattcaatgtcacaggccactgatagcttgcgtgttgaacctatatatgagtcgattctatgcccgcttaccaaacaggttatgcgggaccctgtatctattgacagcggtgttacatttgaacgcaatgccattttgaattattttaatgaatgtcttagcaccggaaggaggcttgtctgccctgaaactaagatggagctcagcaacactgagttaaatccaagcatagctctgaggaacactattgatgaatggatgaatcgcaacgaggcggccaaacttgacgtcgctcgtaagtcattgacttctgacagcacagaaagtgatatcctacaagcactccagtatgctgatgagatatgtcagagcagtcgtatccaataggcaggctgtgagaagagatgggttgataatcatgattgctgacttgttgaagaatagcagtacgaaagtacggcaagcggcactagggactctttgctccattgcaaaagatgacaatgacaat

SEQ ID NO: 283327 - DNA, 373 bp, Zea mays
tgcaggttgactctagaggatctccatggggcgacgacgtttttcagtcggcgaggacgttgcggacattgttctcgttatcagctacaaattcttccactggggcgcggctgatattaacaccggggtcttccacccgttcggcggtcataatggcggtgactcccagttcccggagggcagaggccaagcggaataggtcactgcgcacctgggcacatgtcactgaggtgactaataattgcccccagggaatcgagggaaatgcgactggctttatatttacggacagcgtgttcaatgcgggctatcaaggcccctaggtcatattcaccgttgacaatggggcgatccccgggtaccgagcttgaat

SEQ ID NO: 283328 - DNA, 568 bp, Zea mays
  unsure (1)..(568): unsure at all n locations
ggtcgactctagaggatctgcgntggcttgacattgtgctcacagcatttattccgtagccagtgtgtaaaagttgcatcctttaagttaattggtgaaaggttcaaagcgtatttcagttgatttctaaggttacataggggcaagttggccaatgcgtaatcataaacttgccgggtcagcgcatcaattagccctttttgctcagcgaaacagataaactgatctggaggtatcatgctaccgtccggttgaggccagcgagctagacattcgaatcccaccagtccaccagtcaggcaggaaattttgggctgaaagtgagcaacaaaagcttctgcttttagcgcatcgccgatttgcctatcggaaacaggagaaattggggagctctggattgaaagagtttcatgggtatcctttgccaacaactctaaaagttcagcacgggagaatggtttggacagtgtacccagaagctgaagtccgttttcaccagcagctctggcagaagatctaatatgcgccctcctaaacctgacattatgatcccccggtaccgagctcg

SEQ ID NO: 283329 - DNA, 689 bp, Zea mays
ccaggcccacaggctccaaacttgcaataaacgactcaaaaaacgccgtccgcagctccatcaaacccttcgactccggcaactggttcaacatcggcgaatgcaaccaccaccactcgtcaaacgccccatagagccttgcctcctgggtcttcacccccgcatcattcgccacaaaatccttaatttgcgacttctcagtaatctccggcaaaaaatcaaaatattgcattaccaaaatctccctaagccttttccactaaaattcgcagcgggtcaaacccatgactgcccatcaaattccgttgtgcttctatctcatcgaaaggaatcccccccaacaaatgagccgtcacatcctgcggttccggtggtggcgcattatccgcataacgccgaatattgcaattaaaatcattctcctcagcagccaaaatttcccgactgaccaccgccgcataacctggaatatccacaaatgcctcaaacgcattcacaattttttcgatatgctccggcttcaaataattctgggcccgaccggcatagaactccgcatccgcattgataaatagcaccttgccccgacgttccggtagtttttccccagcccgacgcatcaccaaaatacaagccgggataccagtgccatagaacaaattcggcggtaaaccaataattgcttcaat

SEQ ID NO: 283330 - DNA, 778 bp, Zea mays
cctgcaggtcgattcagaggatcgcctcggagggggcagtggctaaaccttggaaatccagggagttagtggttctgataaaccaacatcaccccgattaaaggaaacaacaaggccgtgttggggacaaacaaataacgcaacccaatccaactgctggcggcctggcgggggtaaataattaataaaaaggaagataaacccaccacctctaaacagacgtataaactgattaaatccgtagataaaaaagcagcattgagactaacgtggagtaccattaattggacataaaaaaaggttgtccttggggaagcccaacagtaaagtaacaccgctagggtaactaaaccattggtaagcagaaagtaactccctaaattgtccaactgcaagagaatgccaaacctatccattaactgccattgctgggcattggggagggcaaaacccaccgctgccaagagaatggtgcccagggtcatcagtagggccgagggccgcaccaggggacgaaacagatagcccccaaaggctcccatcagtgccaagaccaggagggcgacgatggcaattaataaattgttaggggcgatcgccgtgggaaaattcatggaaaaaatgggtttaaaagcctgatgttaaacaataaattaacttcgattaagaccaatattccctttcgatggcgccaatttctaaagtggggtcttccttggctaacttcatggcaatgacaaacattaaaatttgggtagagaagccaataacaatggct

SEQ ID NO: 283331 - DNA, 662 bp, Zea mays
ggtcgactctagaggatcagggtgggtgccttgggctgaatatgttctttgaccaccgccagcaggtttttgatgccttcatactccacttgctccggggcgtccaccacttccggcaggttaaacttgagcccttggtaatacttttcccgttggggcgtatccccttccactggttgaactttggtgccactacaacaaatcaccgccgttaccctggccatcaatgctggagttaaactttctcgaatagttaaatcaccgccaaaaaattccaggcgatcgggtagcctacccccaaaccaagcttgaaaaagttttttggccctgggcacatcccgcaccaacacccgcacctcttggcctccgtcaatgagcaatttaactacccttttgcccacgccgccggtggcgcccacaactaaaatcacagtatttttcccttggttgacagcactgtttctaatctaatcttcctagggtctttgcgcttggcaacccagtttagcttgcagtacggtgggatatttcctcaggccgtggccaaagattttcagaaagagcttttaagttttgaagttttttaggactttttgttgcgcctaatggagcataaaatttttagttaactaccttttttgcaccagtcggtcccacttttc

SEQ ID NO: 283332 - DNA, 478 bp, Zea mays
ggtcgactcttgaggatctatgggggcattactcccctgttgctcaaaaaagttgcccaatttagcctgcagtgccgccaatggctcagaaaactctcgccatgattagagccaataaaaccaattatccctaaacgatgaaggttaaagtaatcctcaaaatcttagaccgggatggttggtacgtagctcgaatacggggaagtcatcggcaattgaagcacccccacaaggcaggtttggtaactgtactgggcaaacccagtgacgaattagcccctgggacactagccagtattctcaagcaatcttctcaagcaatcaggtattactttatgaagtatttagtcatcattgaaacgacaacaacgggattttccgcctattctcccgatttaccaggatgtgtggcaacaggaaaaacgaagcaagaagttgaacaaaatatgtcggaggcgatccccgggtaccgagctcg

SEQ ID NO: 283333 - DNA, 545 bp, Zea mays
cccaacgcataaaccggcttccagttcttttctggtgtagccgagcatttttaagaggcaatcattagcttcagtaatttggccattgatattggcaaacatcatgccgacaacagcggactcaaacactttacgaaagcgagattcactatcctgaagggcggtttcgacacttttttgctcagtaacatccatggccaccccatggagaccaatcatttctcccgccccattgaccagagcttcaatttttgcccagagccagccctgactgccgtcctggcggaaaaaacggtaaaccaaatcctgggaattttggctttccagaaccgattgcaccacttcgtcatggcgttggcgatcgccggggtgaatggatgcggttaattcttcatagctggggggatgttccagaccaaacatgcgtaaaatctcttccgaccactgaatttccccgcagcccgacaaaaatttccacccgcccaatttggctaagctttgggcttacgaaggttctgcattcccgttgccgtagttgctcctct

SEQ ID NO: 283334 - DNA, 925 bp, Zea mays
gagatttaattcgaggtagaaattaacctggaattaagcctttcccttaatccctagcaattttcccgcagtcagtacaaccaagattggctcgcttgggttaggcagggcattattgacgaagtggtggagcaggtttacggatctactacggcggaagtgcaacaaaccgttgccaattctggtattcatactgcctcccgttacgtgcccgtgggcattggcctctacaccggcattaaagctaaaccatttaatttgcaagccgtccaaaaccaggttaaggctgtgaaagagcaaaatctaggtcattctctttttgtctgggaatttttagtgttgagaacaatcaacgcccatctcaatgttctgtaagggttctataaaaattgtgagaaactcccctgggcaaaggagccatagctagtgttagactccagccttttttttcccaagctttccttcgttatttttttctctttagtccctaaatttcccctggattgaggggaatcatggcccaggtgacataggtgccaatggggctccaaagcaaaaacggtactaagaaaccaaaagcagtggtggaaacttgactaacggcgatcaccagggcgagccccacaaagaaacctgtcgcaccaataatactgcccacccttaaactccggagtttacacatcacgggggtgtaggccatgacagtcaattccagcagaagatagccgaccattaatccccagcgatgtcccgggtccgccgtggcattccaggctagggtagcggaaatggctccagcaatgaaaatggcaatccagatgaaggggatggcccactcaaaagttagccaagaagggcgacgcaggcgattgaaccaacgcaaatccctgggggataaacggttacacacaaaggctagggcaaa

SEQ ID NO: 283335 - DNA, 622 bp, Zea mays
aggatctggcaaggttgacccaaaccgccgatgttacccactataaaaacaccgtcgttgaaatttatagtcagttaatttaccgggggttatggtacagccccctcaaagaagccctggatgcttttattgtcaaaacccaggaacgggttacgggcatggtgcgggtgaaattcttcaagggcaatgccaacgttgccggtcgtaaatccgattactccatctatgatgcggaattggccacctacggcatggaagaccaattcgaccataaggcggcggaaggctttatctatatttggggcttacccaccaaagtttgggcccagaaaatgcgcggttaagtcctcactgccctagtttttcctccattactcggaaattctagttctttgaacaattgccaactagttagaccccgatcgccagggatatgaactttggactgtcggggtttttgctgtggctaatatggtgcagaagctcgggactgtggaacaaattacggttaaaatttggactgttgctttttctttcttccccatgctgagactcattaccgactgtgatggcccgattatggatgtaactgatcggtactatcaggtctatcagtactgtc

SEQ ID NO: 283336 - DNA, 516 bp, Zea mays
aggatcgcccagccggttcgggaggaacaacggtcaaggctagaggcctgtgggtttgtcctggcaagtagaaaaacaatgctgccccggtgaagaaaccatgactataatccaaatgattggttcttacggttagttcatcggcataaatgcgataggaaatggcaatattttcttcctctccacaggcaatggcccaatgggccttacccaacttttggtgctctaaatattcgccgttgctgagaccttgagcttggaagtcctgcaaatggcgctcatattcccttaccagataggaccctggtgtccagacgggaaatttcagttctagtacagaagcagtgaagccttgaatatgcaaatccacggtgaagtagtgggtctggggcgttggcatcgccacttggtagtccacatgggggagagtagggagcatggtggctggagaagtttgccttagtaactgtctcctttttgtacccgatttaccccgttgatggcagggatccccgg

SEQ ID NO: 283337 - DNA, 435 bp, Zea mays
aggatcagcgtttgacttttacggtcaactgcaccgctggtgtttagatttggtgcttcggggtaaatttgtgccgggactggagcaaaggggggaagacggtgattactatagcccaatggattcctatcctcgatagcatccaagaccaaacccatttagcccaatttagccagagagtacctgcctgcgccctggccaacctgactgactcccaggagccccaaatgttggtggtggattctactacaaaaattattgcaagcccaaattggtgccgtcagtcccagccttgccaacgttaaacaagtctggttgaatgattggctccggggattaacccatggggggcacacctccctcgggacaggcaaagctctacaacgattagccacatccttagaccattggtatttaccagtccagaattatttg

SEQ ID NO: 283338 - DNA, 569 bp, Zea mays
actctccattgtgttaaaaataaccaatttataagtttcggctcttttctattgctatttcttccgacttgagttacactctttgtcaagtagaaacagactttggtttgttaattgaattaacaagggtctggtttctgtctctcaaactatttctttgtctaggttcggggcgctttcgagtcgctttcgctctcaaccgcgcatttatcaatatacggaataccgcaagaaaagtcaacaccttttcacataatatctttcaaaatccctgaatcacagtcatagtaacggcttcaaccatagaaaaaaacttcgctcgacaccggtaactacaaattctgagcttcaggggcttcttttgggcttcctgatgggttaggccgggtgcgtgaattacgaattcagtgcagtgtgtccaatagaaattggaattctccctagaaagacaaaaagcgctgtcctgatggggtcaagacaacgctgagggttatatcactggataaaggggaaaagaggatatattccttgaggatgctgttgcggttagggtgacgcagtttccgcag

SEQ ID NO: 283339 - DNA, 735 bp, Zea mays
attacttaattagccagccaaatacttctcccaaatttaaatcaatggcctgggcaaagcttggcatcagtaactttgactccgtttcgtcgaaaatttctggcgatcggccgggttgataaacaaagatagattgctctttcggattaatcaaccaacccattttagtgccattattcaagcaaaataaaatattttttactattttttttgactttgctcaggagacaatatttcaatcatccaattaggcgggaggtaaaagttgtcggcaatttctccatcttgatcacagggaatattttcccaagtaaaaaccgcaatatcaggaacaatagaccgattttcaaaactgcaacgcaactctgtgaatgcccaagcaattttttcctttttcaaggccatgttaatggcaaatgacaatgcagtttgtaaagtactgtgttttccttttggcataggtttggcactaacttgcccatctcgatactctaggggcggcttctcttccggtaaggctagaaactcagtcagggttaggtttgtgtttcctactttcagcattttagattcgcctcgacactccacctatttgccgttgaaacccattctaacccttttattaagtgctcaaaaactagccagaattaccccttattgtattttttataaagttcaataatagtctcaaccacctcggcaatggtgaggttatcggtaataatttccactgca

SEQ ID NO: 283340 - DNA, 725 bp, Zea mays
cactttcccctttgggcaaaccggggccatgaaccatctagtggatatggtgccagctatgcgacaaagggattaccgctggcatataatcatctatcgcatctgggggcagcacgaggtcagttattactgcaactcggactattccttagaaaattcttggggcaatgttttcttctttcaggattacgaaatctttagccaggctttaaaatggtgcaattcagttatgcccgccacctattttgcggcgtagcttgtccctaaatactaaatggagcaaaaaaattcgtcagtagtcataatcaacaaagttcacctggagttccacatcatcccccatgctatcacttcaagacaactacttgtatctctctaagctaggtgaatttaagcaattgcaggggggaattgccggttttttcttggaacaaagtgcggctctctgggatgctttgctaagttttcaaaatacccatggtatccatggcaatatgctggaaattggagtttacaaaggtctgtcagctttgatgtcctcccttcaccttaaagaaacagaaaaatttgttctaatcgattgcacgcgctatattgaggacgcagaagccaaccttgctcccattttgggcaccagaggccattatattcagcaaccgtctcatcaagtaacactccactcccttaataaattgcgttctagtagccgttggcttcatattgat

SEQ ID NO: 283341 - DNA, 641 bp, Zea mays
cgccgctggctaccaattatcaactttggacctgggtgggcaacgggtatggtcttggtctagtctccaaaccctggccaagcggaatattaccagcctacaaacccaagttaggggagttcattgccgagtcggcgatcgggtaattttggccagttccctcgaagctttatcccaagtgttggaccaaaccagtccttccttggctgatcaaccagaatttcaacaggcattgtccactttgcccgatgacagttacgtttaccttgattggcaaaggggagaaccattttttagccagcaattacccgtgctcagggtattggagttatcgctcaaacctctgtttaaaaatttacgatccctaaccattaatcaagagtctagctccacttccattagcaacagcactatttacctgaatctgggggttgattagcttggggaagtgctctcgccatctgaattgggagcaaaggtttagagcctgttttaaaagcccccttgggccccccaattttggggaaaagtgagtgaaattcccccagtattccggtccatttaggggacgcaatccaactgtctaaaaacgttcttagggaaaaataatttgctttgatcggattagcgttgttccacac

SEQ ID NO: 283342 - DNA, 822 bp, Zea mays
aggatcgccgattggaactgatggcatcattttgttcttggagcatcatgtcatagatcttggcccggagaatttgcatcgcccgttcacggttttggagttgggaacgttcttcggtgcaaaaaatccgaatacctgtgggtttatggaacagatccaccgccgtttccaccttgttaacgttctgtccaccggctccaccggagcgagccgtactcatttcaatgtctttgggatcaatttttacttccacatcatccacttccggcatgatggccaccgtagccgtggaggtatgcacccgacccccagcctccgtcaccggcacccgttgcacccgatgcacccctgcttcaaatttcaactggctgtaaacccggtcccctttaacttccagaatggcttccttaaagcctcccatatctgctaaggactcactcagcagactcactttccaaccctgactttcggcatacctggtgtacatacgtactaaatctccagcccagatactagcctcatctcccccggtgccggcgcggatttccaacataatatttttctcatcgttggggtccttgggcagaaggaggatagttaggcgcttttccaactccccaatggcattttccagttcctccacttccaactgggccatttcccgcatttctgggtcattgccagattctttgacaatttgtcgggccccttttaaatcttcctggcttcttttccaagtctcgtaggtatcaactgtttcttccaaggacgagcgggctttggctacccgttgcaattcatcggggttggtggcaatgtccg

SEQ ID NO: 283343 - DNA, 576 bp, Zea mays
aggatcgccgccgcattgttgtcccaaccggatgtgctgttgatggacgaacccactaaccatttggatgctttttcggtggaatggctacaaagttacctgcaacggttccggggagcattgttattaattacccacgaccgctattttttggaccgggtgacgaaccgtattttggaaattgaccaaggagaactgtatagctacaacggtaactatggttattatctgaccaaaaaagcggaagcagaggaatcggaacagagcagtcagaaaaaacaccggggagtgttgcggcgggaattggaatggttaaaaagagggcctaaagcccggagcactaagcaaaaagcccgcattgaccgcatccaggatatgcaggagaccagctttaaaacggggacgggaaaagtagatattagtacggctgggcggcgcattggcaaaaaagtggtagagctggaaaacattagcaagggctttgaaaacaaacaattaattaaagatttttcctatattttcacccccggcgatcgggtgggaattgtgggcaaaaatggcgtgggcgaatccact

SEQ ID NO: 283344 - DNA, 573 bp, Zea mays
aggatcattctgtcttccctttcttactccggagttgacggggctttttcttggtggtagtcgccagtgctaccgattaattgccggtgtgattgagttatgtccagaattggaattaatattaaaggaaatgaggcgcttgggatggactgaagaacgggggagaggttatttgcaggaaaattttcgcaagcgttctagatatgagttaacaattgaggaatgtcaactgtttttattttacccacaaaatttgctgtaattatttaaccttgctagtgagtttttcctgaatgattgtttgcttattgagcaaatcatttcgctaggcattggtaacatctctacaactgcagttttttgatcgtaggcgatcgccaaaggtacaggttaattggttaacaaaaactttctggttctaaataacaggaaatactttgtaataaatcatcacaacaatagtcaagatattaatcccgtagttaaataaaaggggccacatataagcatcagttcttgcctgctcataaagaacaaacaccagcgcaaggacttccccgaaaaaccacgatc

SEQ ID NO: 283345 - DNA, 518 bp, Zea mays
ttttgatctcttcttgccaacgtttgagggcggttataatttttccctgttcgtattcattcaaaccaatattgttgagggccggccagaactgctcttctgctttcaatgctttttggtaggcagtgaccgcatcgggatatttgaccaacttgaggtaggcattccccaaatcaaacaaagcggcgggggtatcggggcgctgggccaaacctgctagcaacacctccacagcttggtcatactgacctttttggaaataggcattacccaaagtaaacttaatgcctgcttcctctggagccaaggcctcggcttttttcagcactgtgatgcccggctccacttcctcctgctgtagataaagagtgccgagaatgaaccaggtttgaaactgttccggggccagttgggttgccagtttagcccggggaaaggccaggtcgtactgctgaaagcgcaccaattgcaccacatcttctgtgagcgccaggccctgatccccgggtaccgagctc

SEQ ID NO: 283346 - DNA, 680 bp, Zea mays
aggatccaccgtcaaatagttatcgggggcggggctaaaaagttatgcaaattcagtttaatattttttctctcccattgaatgagccctagataagtgaaatattaatgtccaaagctttgatagggtaaggatttcagcccagtaaattaatagtgaaatattaatgtccaaagctttgatagggtaaggatttcagcccagtaaattaattttgttgaggtacattgaataacttttcccccatgggccgataactctacagttctgccaaagacgaggaatatcacaatgagtgcaattcaacctgttattcaagttttatcgcaattaacggtctatcaaacgccacctatttttagccctagtcaaggaattctttcttcacaaattcatttccctacccttaacgaggactgaacttgactgaaaaaagtggacaaatccaaagagtcgaaaatcaaggagaatgtccaaatgagccaaaaacgaagacgaacatttacagatgaacagaaatcggagacagtaaaaattgtcgaagattcaggaaagcctataagccaaatagcaagggaaataggtttgacgaaaagtgccctaaaaaaatagataaaacgaacaaaaattgacactaaagaaggaggtcaaggacaattaacatcttctattttggaggg

SEQ ID NO: 283347 - DNA, 568 bp, Zea mays
gaggatcttcgggtctccaatcccattttctatcattaaattcctacctcttctctttttaagtttttaatttcagaattgatttctagttgtaatatggtgtctacctaggttgtagaagtttatgttcgcttaatggtaacttggctattgattagtaagaacatggcgtgtattaccaagcgacgacccgttgaaatgcctcttggtaatactgcaaagtttccttatcagcacaaataaaagccacagagccgatcgccatgttggagaggagaaaattactaacggtttctagcgcaatgcgggccgctatttccgggggaaaacccatggccccacaggcgatcgccggaaaagccagactacgaatgctctgggaaaccgctaattgcaaacagttttggtaacaactaaccagtaattcttcttccccttggtttcctcctttccacttaggcgcaacggtgtgaataacccaattagcccggagattaaaaccaggcgtcagtttggctcctcccaccgcccatccctgtaaatcctggcaagcctaaaacaattctgg

SEQ ID NO: 283348 - DNA, 522 bp, Zea mays
ccatcctatggccctgagattttgatttgctggttcttgttgcatcgatgcttttttttcgctggtttaacaatgtggaacgattatctgaatttatccaaatcctatttgctctaaaagttaattaaccttcccatttagccatttttaaccatttgttgactttctcagactttttggagccatgggagattattgtcagttttttgttttagggtcaataaatttcctccattttcttgtcctggcctaggttaagccgttgggcattggccacttctccacaactgcggggggtaggaaaaagcttaccaggattagctaagttatcaggattaaaacattgtctgacccattgcattgtttctaaatctacttcgttgaacatattgggcataaagcaatttttatcaatgccaatgccgtgttctccggataaacttccccccaatatccacacagcgtttaaggatttctccccccaattcttccactttttcccaggctcctggtactttttga

SEQ ID NO: 283349 - DNA, 568 bp, Zea mays
accctctaaaggtttttctggggaatggagccaatccccagagtttctttaaatttgccctgccctagacccaccggcgggggagatccagagccactttttaccctgatcagcgcccctattggatgttaatccggaactggaggtcattaaagtccatatctcccccccagaagccatcctcaaattggaaggtatcccccaaaacccgaatgtgatctgcctgatcagggttagcccccagataggagaagtaattaaagacattgccgtcggactgactgacggtgaggtaaggagcaaacaagctccccccggttagctccaatgcctgggtcgtggtactgggggtaacagtaaattgggcggcagtattttgcagcgccacggcttgatagttgccatcaccagggtttagcagttggcccgtcagggggtccgcaatggcaccaaactgattttccacccgataaaaaccaacggagagcccaaaggaagcatcaccggtgatttaattgatgccaagatttacggagccactgagggaacgcaggtccaagaattcccg

SEQ ID NO: 283350 - DNA, 710 bp, Zea mays
gcgggaaaaatttagctaaatcgtgcagtagtccttcctgttccgctttgattgggtcaactttatggaggggagcccattgcaccgccgtgtgttcgactcccaaaatatggtctaaccgttggggggaaacattttattggagccaatggattacccgactccggtctaactcaaccatggcaaggaaaatttactactagccccagtctccaaaaaccccagacaacaaacggcgggccgaaacccaccgatcgccgttttttatgcaaagttttagccacccttacgagcgctaaaaatagattaaacgtcgctggcggcaccgttattgctggagccattggagtcaccttgttgactttggccaccggaatagcggcggttttgggtgcgactggcggagcgaaactgacgggcataagcacgattacgttcagctttttccttctttaaattaagacgttttgccattgtttgttcctcataaatatagtttacagaccactgctgagtccgtttgcggtcgtcgtgctaagggaagtttgcacaggaaatattcggccgtggaggcgcatcccaaacttcatcctaacacggctcctggtgccccgatgacgggccctaataggccggtgctaacaatccgagggcatctcgcaccctaacataaatttgttgggcagtttgactggcttttgcgttacccg

SEQ ID NO: 283351 - DNA, 739 bp, Zea mays
ccgcgccaccgccgccgatgggggtattcgcgcagtgggggtaattaccaccaacctatctgaggaagcccgccaacgccatcgcctttgctacgttgccaccgcggccctcggccgcaccatggccgccgggttactgctggcttctagcatgaagcaggaaaaatcccgggtaaatatccgcatccgtggtaatggccccctcgggggtctgttggtagatgccggtttagacggtaccgtgcgggggtacgtacaaaatccttcggtggaactcgctcccaatgcccaagggaagttggacgtggggggcgcagtgggccaggatggctttctctatgtggtgcgggatgtgggctttggctatccctactccagcacagtggagttagtttccggggaaattggtgaggatgtcacccattatttagtcacctccgaacagactccctccgccctgttgttgggggtctttgtgggcaaagatggggtaactgctgccggggggctacttttacaggtaatgcccaaggctgcccgggacgaagcattggttgccgctttggaatcccgattggggcacttgaccggcttcacgccccttttgcgttcaggcaaatccctcaaagatatctttcaagaattattgggggattttggtctggccattctgccggaagtgcaacttttacgctttgaaagtcactgttcctttccccgggttttgggagccctaaaa

SEQ ID NO: 283352 - DNA, 558 bp, Zea mays
aggatcgccagtggaggcaaattttgcaggatttgacggcagtagaaatgtagttactggaatttattttttgatgaccaaggacaacgtttccgctttccacaggattaaatccgatgaaatgtggcatttctatgccggtgatagcttggaaatttactggttttctccccagggagagctggaggtgatcagcctgggcttggatttggaaaaaggagaagtgccccaagcggtggttctcaaggatggttggtttgcttctcgggttaaaaacggcggagattatgccctagtgggttgcaccgttgcccctggattcgattttcaggattttgagttggccaatcgggaagatttgctcaagctctacccccgctccgccgagattattaaccagttaactaggcaatagttggggaggctggacttaattgttgtcgggcttcgctggaaaaatccttgcaatacggcccgacgctgattttgaacaaaggtctgtttgaccactgcggtcaatttttgccaatcccagtggggttcactgaggtcgggatc

SEQ ID NO: 283353 - DNA, 635 bp, Zea mays
catcccgaaaccaaaccaaaaccgtgggggggacgtgtttaaaagcccccctgctctcccaagtttgaggggaagttaagtaaaagtcctctagttttggaggatttagacggcaaaataaaacttttcaaacaaattccaagagctatggacatcgatagttaaaaacacataagcaaaaggattgaaagcttggaaaggtcttaatcctgggacagtaggccttgcaactcttctaatctttcctgggcttccggtagggtaggttctaaagttaaagccttttcatagctgggaatagcctcttgtttgcgctccatagcttagagcagtaaaccccggcttaaccaaacctgagcatcgacgggattttgtgctaaagcttcatcaaaattagccaaggcctcttctatctgtacccataactcccaacgcactaccccgattttgccaggcggaagtcatctggggatctaaactgatcgcctccccccaactggcgatcgccgtttccagttctcctctctgggcctgctgtatgccaaggtttacccaatcttcggcagtacggggttcttggttattttcaaattgggaaaagatgatggtaaccgggtcaacaagaggccacaact

SEQ ID NO: 283354 - DNA, 541 bp, Zea mays
ccgccgcaccacgtgggcattgatgaagttggcctccgaaaattggccctggcaataaatgcttcaatcagctctgcttcctgtaggttagctttagtcaagtgggcccgactcaggtcggcactgttcatgcgggtgaagctcaaatgggaccccgtgagattggtccgattcaggttgacatgggtcataatggccccctggcaattcactgccgtcatttctgcctcagaaatcttcgctcgcatcgaattggcattttgtaaatcggcaccatttatctttgcccccgccatgttagcgccaggtagcagggccccttttaagggggcgtagctcaggtctgccttacgcaaatccacatctcgcagattagcctccttcaagttagcgtagcttatatctgcccggcttaaatctacccccttcatgttggccccctggaggtctgcccgcccgaggataccggcctgcagattggtgtagtagccctttttttaaaacagcatattagctccccgcaaacaggccccggtgaggg

SEQ ID NO: 283355 - DNA, 520 bp, Zea mays
cccctaaagaagtggcagaaattgagctcaaacttcaaactctctggcgttctttgatttaactaataatctcgcaacaatggcggggcaaaatagaatatgggtagtccgccgttgcgtttcagtctaaatgggggaaactgtcatgcgtctcaatgctaaagcaaagtcatttttaaccaaggaaattaatcgggaagcggaatccctcggctttgaggtgcaaaaggatatcgtcctcaaacgcttaaatcaattagcccaggaaaaaggtaaacccctgggtaaagaagatttggccgagcaggtgacggatatgttccccaccatggccgaccaaaccctaactaaggcggcgaagttaaatacggcccagcaatggcggctctggctaatgaccgggggagttatggggcgctggtctagtgggttttatgggcttaattcggttggtgaccctgccctatcctatggtgcggcggtcggtgaaccgggtggaccccatgttgcaactgcccag

SEQ ID NO: 283356 - DNA, 247 bp, Zea mays
ccgaacaaacccccgccagttacaagtgactaccctggattattccgattatttgggacggattattattggccgcatccacaacggtgcggttaaagccggacaacaggccgccttggtgaaagaggatggttcgatcgccaaaggaaaagttagataaactcttgggttttgaagggttgaatcgcatcgaactgccagaagccagtgccggctacattgtggcgatccccgggtaccgagctcg

SEQ ID NO: 283357 - DNA, 543 bp, Zea mays
cgccagaacgtcagcaaacccaaacttatttgcagaagtcagaaaaatctgtcctagtcgttgcaacatcggcagtggatgtaggtgttgattttaaaattcatgtactcatttgtgaaagtagtgattccgcaacggttattcaaagattagggcgtttaggtcgtcatggaggctttcaacagtatcaagcttatgtcttaattccatcccaaacccaatgggtaatagctagtcttaaagaggaattagaagaggactcttcaattgatagattggaattaagcacagtcattgaaacagcatttaatgcaccacaggaatttaaacagtatcaaaaaatatggggagaattacaagcacagggaatgttataccaaatggtttatggcggttctagaagtgagtctaaagataatttagctgttactcaagatttgcgcgatcgcatgattgaaagtctagaaaaaattcatcaaaaacaaattaatggttttggtaaatggtggggtttaagtaatgacgctgtaggtaaagctactc

SEQ ID NO: 283358 - DNA, 762 bp, Zea mays
gaggatcaattaaataataaaaaacccaccgagctcgaacaagatgggtcatggcaaatcttctattctcaaagcgctggcataaaccagacctattccgccgctgggacgccatccaataaaccatggcgatcgagcactgcctgtaactgagactcctcatcctgggaaagggaagttctcagcactttaccgccgtatttgctcacatcggccaaaaccttatcgggggtaacttttttgactaggacaaatagggccgaactaccggggcacatggtttcccccagttcccgcataaaattgtcatctacaccaatgtcactgagggcaccggccaaggcaccactggcagctcccaccgcagctcccaacaggggattgaaaaataaaataccgatcaataaaccccaaaagccgccactaacggcgccggaactggtgagattaatggcttgcttgagcttgactttgcccttttcgtctttgaccacaacggcggcatcttccatttcgatcaaatgctctacttgtagcttggccagggcaaggcgtacttcctctgccttgtattcatcatcgtagccgataacaattaagtcactcataaaactttactgaaaataattggtgattactaggctccatggtagcagttgggttcaatcttgaaagttggggtaaccgtcaatacaacattggctcaatgactggtcaatccattacaatttgggttattcggtgacgccccgaacctccaca

SEQ ID NO: 283359 - DNA, 722 bp, Zea mays
ttacaaattcattccaaggtaaataattttctgcttttttttacttgatttttcttccccgtaattgcaattcatttggacgaccaaaagttaagacattggctcggtctaacactttatcggataaggattgagtggtttcatcttcattcatggtgccaataaacaggaattcttcgggaatcagaatatctcgttgtttctcaggaagttttaaactacctacgtccaatgataaataggttggcttactacgtcgtgtttcgagtttagaaaggaaatcactaaaataatactcaacccgagctagattcatctcatcaagtagcgccatgatgattctgccatgcatttttctatcctgctgatattgatagagataatgcattaattgagttggcttatactttttttcaatataattatacaatccctgtaaatcttgggaagaatcccaacggggttgtaccggcaacatgacgagtggagcaccaatgaaatccgcatatttttggggtaattcactttttcctgtaccgctaattccggctaaaattactaatgccgaaatatcttgtacttttagagaagtatgaaaggctttagcgatacgttcatgaaagtctaagccctttacttttagggaataactaaactggttaaggaaatcatcttcgttaaaacctagcctttgaaccggaattagatccttgatgggctct

SEQ ID NO: 283360 - DNA, 474 bp, Zea mays
  unsure (1)..(474): unsure at all n locations
tttttgaggggatgtatttgtcgaagaaataaaagaaatattcatgattttagaaactctttggcttgttgttctaattctgggtaagtaaaatctccccgtccattttttgttcctccctttccttcctgtttctttttttccaaaaatcggccaaattccttgcgttggacttttgacatcttaaattgcttggcgacatcattaacttgtttaatttcatctttcatcgatgattgagttgtgtggaggcaaccttgaaccttcgagctaaaggggatgttacttaatgcacattttgtcagtttattctattgcatgtcggcgatcgcctggcgggccatggaggcaataccttggtcagtggctttggggagttgataatatttgcccccggctttttgggccaatttctttaccgaagccagtggaaacaaattttttctcggtgttgatccncgggtaccgagctcg

SEQ ID NO: 283361 - DNA, 588 bp, Zea mays
aggtggcttccagtctgccttgccgccagcggtgagaattcctttacgttcatcgcccacaaaatcaccgcagacaaaacccaactccttctttacccctagtttgaatggaatagtctgaccatctttagtggccattccctccagtaaaattgagtaaccttgggctgggccttctgtggccaagggcatttgccaagataaagcgttaaatttccccgctggagccggagtttcccccactaaaaccgtttctgcatcttttcccgtcattgctaagtccaccactgtaggtcctggcatggcgatcgccacggcggtttccggcaatgaagcatccgtgctggcatcaaaggccgaccctacctggtaagcattaatgtccgccagggaaacataaacgtgattaaagtccagaacccagccatccttggtggtcagaccttcccgggcccgttcttctccgttggctcgcaccgttaaagtgccttgatttgccgagggagaggcgttcatttccggggaggaaagatattaaccaccacagcccgatagcaatacgaatagcaatgatactaaagaccaccc

SEQ ID NO: 283362 - DNA, 505 bp, Zea mays
attggtaattaggcggggcaggggattatcgccgctggtttgttgcactcagtttgatgccggcccccagttgggtgctgttgcctttggccagtaaggtcagccatttcaaggccagcaaacggttcaagcaggggtctagggcaccaatgacagttttcaccgccccgctggactcagacttagtcaggggttgcaaagggtttcccccctcggtaaagaggctatagcgatgggcttccagtctgccaaacacacagtctgcactaccttccccggcattaatcactgtttccacggcggcgatcgccccaaaggcactggtggcatccacccgctcaatgcgttccaggtcatgggctagggccactgttaaagcgaggtttttagggatagctcggtatatttcccgcagggcactgcccaccagcatttcctttttgcatttccccgccattggcttccgttgaggatgtcgctgactcggccttggtcgatgaagttt

SEQ ID NO: 283363 - DNA, 468 bp, Zea mays
cctttgcacctggattgcttgactaggattgttgggattagcagtgatgcgataggtggacgtactatttactgccctagttctagcggtcttgaggacgctctgcaggcggtctgggctattcttgagcggattttcgtaccatggcttagcgttgaccacaatcccagacagaatgccaatcaccaccacgactactaccaactccatgagggtgtatccagaaacaggggcagtcctttggtcgttcctagccaaaagcagaattgagcggagcttgaaaaatggagacttgtacatggtcgattggggtttttgggaagtcagcaaagaccgtggggaagtcttttattggtttttctgggtcaaatttcaggttaatagctaagtgcttaaagctcaaataaagggattttaaatttctcttaaaggcaaacacaggggttcaagtcacagggaatagatggg

SEQ ID NO: 283364 - DNA, 529 bp, Zea mays
  unsure (1)..(529): unsure at all n locations
aggatcgtcaaagattaaagaaggtgcccaacccaccgacaccgtccgctccattttgaccaaagcccaggttttcgaacagctaaaagcttagtgccggttttttccgtggtgtttaccaacgtctgccccctgtgactaccctaaactacgttgaattggtcaagtttcttgcccgtccctttttggaaaagcccgatgatctgaaggtggactgtgaggtgtttcgacaaaatagccgggtttggattcgggtagccctaggggacgaagaccgggaaaggctccttagccggggagggaggtagtttgcaaaccattcgcaccctacttaccaccgccgctgaccagatggaacagtcagccttcctagagatatacctcaccgattccgttgggaaatcgacccccctacgccgtcgtcgctcctctgctggccccgcccctgtccgtcgttcccgcagtcggngagagtccgttaatcgctactaggggcaacggttttctcagacaacataacttggaaagt

SEQ ID NO: 283365 - DNA, 601 bp, Zea mays
  unsure (1)..(601): unsure at all n locations
aggatcatcggctttactgctaaaaaaagcgattttcatgacgattatgggaagtagtttagaacgtgtttggaaagttttattccgccccctaaatcccccaataatggggtactttcacccagcttcaccccaaatttgggggccaggggggcttgttaaacaggctcttagagcactatttagtcaagggtattttttccaatcttaaaagaaattttctgattcttcctgcatttgtattatttaatactcccctagctctggcgattgccgtagcggtagatattgactcacactggggcaactgtagggtttggcctccaactcctgtgtttggctgtgatgcattttcagcttccctttagctagccctttctttcctaaaccttgggatactgccccacccaatatccatctcaagaatgaccgatggggtcagaagaccacactctgccaccggtcagcgttgggtagttcgccccatcttccttcgttctcagtagtaccatcaggntggtcaattccgcggccatgttccagaaacccggttaatctgggttttcggtgagcaaaaaaatgaagaatagttacaagcaaa

SEQ ID NO: 283366 - DNA, 238 bp, Zea mays
tcttgttacgcttactaccgccagcacccgggggcggggttcgatcgcccgaaggcgtgacccatccctaggtgtgttacttgcaagcactacatacaacatgcaaatggccgatcgcagatcagccttattgttaaggaccttgatcgcaatgaggtgttattctgcttactgtggccagaccagtggtggactcggtggaactaccaataaaaccgttaaggtgccgaaaaacttc

SEQ ID NO: 283367 - DNA, 459 bp, Zea mays
tttattagaaaaaggtgaacgccatccccatcggcgacggcgagaaccgtgctcgcaaaagcctccccctctcaaacgtcgacgcgcggtggatctgcagtctgtgtgggggcgcggtcggtgaggagctggggcgcgcgtccccgcctagctcccccgtcgtggcactggaccgccacgcctgcgtccaccaagagacgtccgcgccaccatcgtccgtgagcagctccaacgacctcatcgccgcattgtgccggctcctgcgccgcaggctccagttaccgtcggtgcccacaccgaggaaggtgtaatccacgccaagccacccgaggcgcgacgccacctcagatgtcgcacacgtgtccgagagcattgaggaggcttgggtcgcttggcgattagcgagtccggtgtcgaatacgatttccagtgtgcaagatgatcctttttcacatgggc

SEQ ID NO: 283368 - DNA, 537 bp, Zea mays
cagacgcgtgggttttaatatttttttttttttttttttttttttttgccagcaaaaaacaaaagatcaaagcaactgagcaaccaaacgaacagagttcaatacagaagtgagaatacatcatgagcttcagcaactcaatgaaccgaagcataaatgtcctatccattatttgtcgatgcgacacgccaaaattaaaatttcaagcaaagaaagtgctgcacatgagaccaaccgaaggcagcctcatcccaactctgaaatatgaaggctagtgggactccatcttatcaggacagtaagaccaccgcatcccacgcattcaaggtcatcatcaggctttgatggtcacgctgcacaggcaagaacccgtcggcttcagctttgacgtgcaccactccgaccccattggagctgcagggtcatacatcagcgtctggtacccgggctcttcctccagagggaagagcagcagctggtcctcgtgcaccacgagggagaaacgagtgcttgagctgccggtgagcggcacgggga

SEQ ID NO: 283369 - DNA, 402 bp, Zea mays
gtttaaagtatcttccaatgtggcatacctggtgttatggttgaacaaaaactgcaggaaactgtcagtaaatctgttgagcttctcccagaactttggaagcaagctggggcctatcaagaagcacttgcttcataccgccgtgctcttctaagtcaatggaatcttgatgatgaatgctgcacaaggattcagaagaggtttgctgttttcttgttgtacggtggtgtagaggcggcccctccaagcttggcttcacaaactgaaggttcatttgttcctaggaataacttagaagaggcaatcctactgctcatgatactattgaagaagtggttccttgggaagacagactgggatccatctgttatggagcatttaacctttgcattgtcactgtgt

SEQ ID NO: 283370 - DNA, 272 bp, Zea mays
tttcacgcgtgcgcatactccttgtagaggagtgttcggtcacaataaagctggggcaggaagagatcccacacctggcgggcttacggctgtactggccgcgtggagccttccacgacaggcagcgagtacaccgagccacactgggtgactacaccgtgcaggctgggcgaatcctacgcttgttgcgcagaataagaggagccatgcaaatgttacgccagaccatgactgacaagacattctcggtcaaggttgcgggcctagacaca

SEQ ID NO: 283371 - DNA, 501 bp, Zea mays
gcttcgcctcgcggtcgcccagtcgcagcagcgacgccgcccccggcctcgctgggcagccccctccctccaccgcctcctccacgccctagcgctccggcccccgccccgagctcgtcgtggccggctgcgctgcggtgcccgcacctgtgggggcgtgcgggccggtggtgaaacgacccgcgacctcggtgcctctcgacgtctgcccgcttcctcgccggcgccattttgttcggctaaatcccctgtgataagcaccactgctcgtgatgcattcttcggaaaataaactgggttggaatgagacctctatggggttggttcctgtaccaaaaagaccagctagacctgatgcttcccaccaatgcaaatctgattcctttatgaagcgatcaccaaggaaagttagaaatgctactctggcaaaaagcataaagagcaaataccactttaggcccctcaaacagcggaagggttcagattcttgtcctgggaaaa

SEQ ID NO: 283372 - DNA, 565 bp, Zea mays
ttggcattcacgggacagggcagcgaaagtgaacgccgccagtcccttgccatggcagcctccgtctctctccatccccaatctcggggcctcctgacactggttactgggtagcttctgcttggtactccatgcgaggacgacaacaatggcgatcgccgccgtccccgcctccctccccttcggcttcctccctccgcggctgttccgcgggagggcggtgaggtggtcgcgcccgattagggcttcggcgtcgagcaacgccagtgacgttgcaggcggagagcggaagtttggggctctggtgagcagggtgggagatctgagggcgctcgtcgcctccgtgcctcctgctgttgcttcgatgcagaaaaacattggcccaaattttgttgctggtttctgtgttagcatggcatttgtggctgctgctgcaagacagatctccttaagaagtcgagagcatgttagtaaaggttctgttgctgatcttgtaaggcgtggacagttaaaatcagggcaacgagggattgcaaagctccgtacatacgatgatcctttcaat

SEQ ID NO: 283373 - DNA, 482 bp, Zea mays
gtgttgtcgcccggccgctgtgcgtgcgtgcgtgcgtgctgtgctgcctttctttctcgctttaatttctttccatccatccgctttccccccctcccaatcccaatccctccaaaaatccgctccgcgcgcgcatagcgcggccggcctttatcgatccctcccggcctctagcgctgctccggcggcggagtccggccccaggaaacaaaggccgcgcgcgccgaccggacggaccgaccggggccgtccagttccagttccagttccagttccagttccaggccgcacaagcacatgagatcatgagctcggaggactcgctcaagtcgctgtcgctggactacctgaacctgctcatcaacgggcaggccttcagcgacgtggccttcagcgtggagggccggctggtgcacgcgcaccgctgcgtgctggccgcgcgcagcctcttcttccgcaagctcttctgcggcctggacccg

SEQ ID NO: 283374 - DNA, 438 bp, Zea mays
gttatgcaaactggcttgataagctgtatgatgtgagctttcggcagacagtggcttatggaggctggagcctgagcttgaactatctataccattctactcaggtcattggagtggtgattggaggcctagcaatcatgtctgggaagttaactgctgagcagttgacaaaattcacactctatgctgaatggctaattttgtccacatggtggattggggacaactggtcctccctgatgcagtctgtcggagcaagtgaaaaagtttttcgtttaatggatctccttcctagcaagcagcttagctctgaaggccttaagttagagaagttgaaagggcaaattcagtatgctgatgtatcattttcatatccatcaagacctacggtaccaattttgggaggcttggatttaacactgaatccaaacgaagtag

SEQ ID NO: 283375 - DNA, 282 bp, Zea mays
gcatctggctgccatgtccacccaatgggtataaagcccttggctatgtggttactaaaggaccaaagaagccctcactggaagcagttcggtgtgtgcgagatgacctaacggacacgcgcgaaaatttccattcaattgcaaatatggacaacgcatgccagatttggaagacaaggcctagccaccgaggagtgggagggcgcggtctacggcttgctacatgctcctgcgaaaccgattcaacagatagtgatgaatcaagcactccctgcctgaaaa

SEQ ID NO: 283376 - DNA, 328 bp, Zea mays
tttacgcgtgggttcagcttggccttatgtcagggcgtgcgggcagtgtccacggcttgctttctctccgttgctggctgctggctgcacaggctccagccgttcccagcgtcatccacagtaggccattgggaagaaggtgctagcgttggcgctggggcagcgggacccaaccgccgtggacaaggtgctgtccgcgcagcacccgcatttcctggccggaacgggctccatgctgcaggccattgcccctgctccagctccgttccaactctcccttgtgctcgctggtccgaccatggaactcgtatctgctcctccgttcagg

SEQ ID NO: 283377 - DNA, 383 bp, Zea mays
aaaaatgtcggcgacatcgtgaagcatagcgaagatcctgtagcatcagcaccaggacatcccatatgcgatcctcatgctgatccaccactggtgggagactgctggtacaattgcacccttgaggacatagctgggaaagtcaacatgcaacgtctccgtaaggcgctggggcttaacagtagagtgggttagaaaagctctagctgttgaacctgtcaaggggaacctacggctcagtgggtactcagcttgtggtcaggatggaggtgtacaactacctcatgcgtatgttgaagatggggttgctaatgctgatttagccctcttagtaacaactaggccaacaacagggaacacccttgcatgggctgtggcctgtg

SEQ ID NO: 283378 - DNA, 321 bp, Zea mays
tcgcttacgcgtccgccagcgagcacaagggggcctggatactgaacatgccctactgcgcggcgacgacagaggatttcggcattccagacgcgtcggttctaccaatgttccggccatttgtcgagaccttcaagagatgcaaagtcatcgctgctcgtagcagcttcgagttggaaccggagtccctgcctctcatgacaaagatcctcgggaagccggtcatccccgtgggcctacttcctccggcgcccgccggaggcaacacgcagtgcgacgacagcgcagccctgtcttggctcgacgagcagccgtccaagt

SEQ ID NO: 283379 - DNA, 400 bp, Zea mays
ctttagtgaggagctcacgaatttcagggcgtgggagattgatgtcgtggagggggctagtgaggttttgcttccatcagacgtcgcggtggacgaggtaagtgctgatgaggaagagcttttgggtttctggggatcctttgctgcctttatggagaagatgtggaaagtatcgagggagctggtgaatctggacaccacggcactggtcgctatagtgtcagggatcagcaatggcggggtagggaagctgatggctgcacctgaggcagagaccagagcaaggttcaagtgcaactacaagttcgtcatggatcaggcacaatacgaactgcagttttcaatactcatagacgtaccgaaagcattggaggggaagcaatgtatcatatgtgaaact

SEQ ID NO: 283380 - DNA, 685 bp, Zea mays
gatggatccgcccccgcccctctcgcggccgtaaaaatcgtcttgccttccatccttactctatcccctctcaaccttatcttggcggcggcgcaggcgcaggcgagcggccgtccagtcgcgcgggcagcagggggcggccgtccgtccaggcgcaggcgagcgaccgtctgtccagcgcaggctagcggccatccgtccagcgaactgcgagcaggcgtccgtccaggcttccatccagacgagcggcagaacttttctacgcacaacacattccaagaaccgaaaatggagagtgaaggagctggtgagcactttgtggaacaagctgatggtagtggccatgttgtgtggacttctgcaatgtccgcttacatgctcagtaacctagcaagccttgtggctgaagggatcaggacatcaacaggcttcaagaaagttcaccttaacatgtgtgctaaggctctaaatgactatttcaagatgaagctcactggagaacaagtgaagaaccatttgaggacatggaagagaagatatgcgaagataaacagacttaggaagttaagtgctgcttcttggaacgaagataactacatgatcactcttgatcatgaacattatgcagactatgtgcaggatcacaaatctgatgctgagtttttaaacaagcctttggagacta

SEQ ID NO: 283381 - DNA, 527 bp, Zea mays
  unsure (1)..(527): unsure at all n locations
tctaaataagaagcgctgtctctgttcgggggctccgacacctcccaataaaaacgttcctccccgtcccactcgccggagcctggccgacgggatgcctcgagattcgcgcccagccgggatgcgcctcttcggcgtcaccatcgcgccggcgccggaggcggatccaccggtacgggatccgagccccaacccgcccgtggcggccagggaggacgtgatgcgtaagtgcaagagcatgggcaacctcgccgcccttggcgctgtcgcggacggtggaggaggtggtgcggacggcggaggcgccggcgacggctacctctccgatggcgggctgatgcagtcgtccgggaagcggcggagggcgcaggagaggaagaaagctgttccttggactgaagaagagcataggacatttcttgctggtcttgaaaagctagggaagggagactggaggggcatagncaaaaattttgttaccaccagaacaccaactcangttgcaagtcatgctcagaaatattttc

SEQ ID NO: 283382 - DNA, 331 bp, Zea mays
gcgcttccttccgcctctcctccccaatcccatcgacacctgtaacgcaagtgcacatgggggacggcggcggcggtatcggcaggaggccctcgacctcgaggcgatgacgcgcgcgcgcgcgaggggtctctgggcgctgctgctcgttgcgctggtggcggcggcggtggcgcccggggcgctggtgctggcgcagggagggaccctgacgtcgcggtcggatctcgtggggctggacgcgctgcggggctcgctcggcctgagggcgcgggactggccgcggcgtgcggacccgtgcgcggcgtgggcgggcgtggtctgccgtgcc

SEQ ID NO: 283383 - DNA, 588 bp, Zea mays
ctacaaccaagaagccatctacgactgcagctacaacaaccaagagccttctgacttcggtttcaggcttggcagtggtgctcaacctgcttcggagaaccaagagttaccttccgaggagctgcctgaggacgagaagcagccattattcagcaacccccaagcggatctcgaggagccgccgaagcaggacgtcgtcgaggaaggggctgcacagggaggcgtgctggccgacccgacatcgtcgaccgccgccgacgatcagctccagggtgcatatgcggagaagtacagcttccctcctggctggtgcgacgttccgagcatcccggcgcaaggctggggcgactgatcgtcagacctgcgatcgccattggtagggggggtcattggcagaataattgaggccgatgaccttgtgaacccagcaccctcatcggtgtgtccctttcgttccgtcaagccttcgttcatttctcactgctggacagtttgttgcagcgagtgaactgtggcgtccatgtgtttaggacaggccatcgtgtgtgactgatgctggcaacacgaaacgtacgtgcaatgtggcgt

SEQ ID NO: 283384 - DNA, 133 bp, Zea mays
gctttgtttgttaattctgcgtttggtgctgagcattgggcagcctggaaatgttgaggctttggtttcatggagaagaataaacccttgtgctctccccctggcgttgtggtgagcagtgagctcttctttt

SEQ ID NO: 283385 - DNA, 513 bp, Zea mays
aaggaatctcggatagcaatatcaaggaaatacctcagtcagctggtgctcaagtctccaatatcactggttttgggaggagtttggataatagtctgccggaggcatcatgtagagaggaccttactgtaaatgatactgttgtaggtagaggagaccatcaactgtgttctggtgaacaaaaggactttaatatggaggttcgtttaccactacctgatcagcattgttttggcaggattaacactgagtctggttctgttcgacatgaaagtaagaacattgaagttcgccaaggtagtggaactgctcagcggctgggcatgttatttaaaaaagaaaaatctcaccttagaatccttaatcaagatattcagaaccatgttaatcaagttgtcaattttcctttgaaaggaggtaaacaaaaggtctgccctacttcagtaaaatctgaatcgttgaaaatgaaagcaaagttagtgaggttcaatgttgaaactggagtgcaacatg

SEQ ID NO: 283386 - DNA, 627 bp, Zea mays
ggcctcacttcactggcaactttagaattggaatataatatggcactaactacacttccatcagaagaggtgtttcaacatttgacaaagcttgacacgttggttgtaacaggttgtttgtgtctcaaatcaatggggggcttacgtgctgctccatctctttcctttttttactgttcggattgtccttttttagagctagcacgtggagcagaactaatgccgttgaaccttgatggagacctccacatccgtggctgcattcttgcagctgattcgttcattaatggcttgccacatctgaaacatctttcctttgatgtctgcagaagctccccatccttatcgattggccacctgacctcccttgaatcattacgtctaaatggtctccctgatctttactctgttgaaggcttgtctgccctgcaccttaagtacctaactctacaagatgttgcaaacctcactgtcaagtgcatctcacagttttcgtgtccaggaatcgctcacggttagtacctccgtattgctcaaccacatgctcatggctgaaggatttacagtcccaccgaatcttgatccttcatattgcaaagaaccgcggttttatttgagagcctgcaa

SEQ ID NO: 283387 - DNA, 775 bp, Zea mays
tctcaacgtaaagacaggcagggcgggcacgaagcgaagggaccagccagcgagcggctcgccggcgacgaccctctccccgccccaccccgcccacggaagcacggagaagatgtccgccgcataccctcgtctcctcctctgtctcctgaccctagccccggctctcgcaggggccgccgcgggcaagatctcggccccccgcaccccgatctcgcgcgacatctaccactccagtgactctcttctgcgtgaaatcaaggctttggttgctcggcattccagcaaattgagcatggacactatcaaaacaagcaacaaaggctattctgcagagctgtttgtagttacatttaatcacgtgaaggagcgcatggataatggctcaaaagttcatatccttctgaaaggttcattgtcttccagagctttggacagcatggcagagaacttatcacctccgaagttgcattacgtcttctctatgttttaacggagaagcctaagatcgctggtgtggatctttcatcctttgagaaactgctggagaaccttgtgatcaaagtcgtgccgatggaaaatatgaatggtcgcaaacgtgtcgaagaaggggagctttgtgataggagaaatggaagaggagttgatctcaacagaaattggagtgttgactggggaaagacagctccatcatacgacccatacgaggagaatagaggtattgctccttttagcgaacctgaggcccagatcatgagggaattatcaaggtcgt

SEQ ID NO: 283388 - DNA, 876 bp, Zea mays
gtgcccgtcatttggccaaggcactggaggttcctttagtaaatgatttaggatacacaaaacgatatgttcgctgccttcagattgccgaggttgtaaactgtatgaaggatttgattgatcacagcaggcagactggatcaggacccattgatagcctgcataactttccacggaggacaccttcaggggccagtactattcaaccacagcagcagcaaactgaggagaagcaggccattccccagaattcaaaccagagtggtcagaattctgctcctatggctggtgtgcagccttctgcctctgccaatggtgatgtgacatcaaatgtttctctcagttgtgcaccttctacatctgcgccttcaccatcagttgttgggctcttgcaaaattcaatgaattctagacaagaccatgcagtgagcagcagcatcggtggtccatatagtggaggcaatgtggctattccgaaggtgaactctacaagctcgctgcactcaaacccacctacctctttcccttccccagcaccgacaacgtccaataatagcatgatgcccgctcctcaaaatacaaatcaactaagctccccaacgacatcaccaagcatacctccgatgcagccacctgctgctcggcctcaggaggccgagccaagtgactcgcaaagctcggttcagaagatcttgcaagacctgatgtcgtcgcagatgaatggtgttggccactcggggaatgacacgaagacaccgaacggactaacccatggtgctaatggggttaactgcttactcggcaatgctgccgcgaataactcggggataggagggatgggatttggcgccatgaagcggttccgtcatgggatga

SEQ ID NO: 283389 - DNA, 479 bp, Zea mays
gttctagaatcgcgagcagccgctccgatctagaactagtccgccgtcgccggcctcctcccccgcctccgccgccgccgctctccaccatgaacactccactcctcgtcgcctcgcgtccgtctccttgaccaacgtgctccccccttctcctacctgtaattcccctcctgcttgtgcggcaggggcctctcccgcgcgatggggaagcacgagttcctgacgccgaagcatcgcaaaccggatcaaggcgaaggggctgcagaagctgcggtggtactgccagatgtgtcagaagcagtgccgcgacgagaacgggttcaagtgccactgcatgtcggagtcgcaccagcggcagatgcaggtgttcggcatggcccccgaccgcgtcgtcgagggcttctccgaggagttcctcgagtccttcctctccctcatccgccgcgcgcaccgccactcccgcgtcgccgccaccgtcg

SEQ ID NO: 283390 - DNA, 1031 bp, Zea mays
atcatgggcagttttggagctgattatacatgatggtgcagcgttccacatgggatgaggtgtgaagttgagctgaaaataaaagtacgaggacagaaacacactttgatagttcatgaatgattttttgaaacttttttgaaccgggaaaacagcaagatttcaatgtcagttaccaatttgtgctggtgctcttcactctcgttcgatctgaacgtgctggacccggtggttgatgggatgaacgtgcgttgcgtcactctgctacacctctagcagcaaacgtgaaccgaccgcaaacactcccccaaactggtactataggatcatccgcgctttcatgtggccgatccgatggagtagtgtgtagccggacccgcccaaactgctgctatcgtgttgctatctatctccatagaaactggttattactcttgacatggggctccttgttgctgcaacttaatatcgaggagagtttgaagagagactaaataaacttatgaagcaacttaagccaaatgaagacataattatctttaggcaaataatgcttataaggtgaggaactgcccttgtcatcattctgcaggacaagtgttagtgaatgggaggccctgaaaagcattggcatggatactgaggtgtgtgtagagcctgttcagctagccacattttgttcatcattgttcataatataatttggtgaatgataaatgatatatgtataccacaacaccccatcacatgcatttgtttatgacataagatgagcaacattaattgctttgtttggctattgggactgaagctaagaaaaaaaactggctggattggagatggcagtagtggtagtctatgtgtgcaactagaactaagttatagacccctgattagtgcctgtggagctcaacaggatgttacatttacacattgctatatattgtctgaattagtacattgtggggttgttgtttgcagcccgtttgcgtgtgtaagcttggttaatgttatgggtaaccttgcattgc

SEQ ID NO: 283391 - DNA, 498 bp, Zea mays
  unsure (1)..(498): unsure at all n locations
ggaagcacgacgacagcgcatatttcgagatacagagcaatatgatccatcttcttatgaggagtatctgcgctggtactcaggagcaacacggcggtaccttgtcccagcaaccagtgacgacggtgaagcgggaccttcagctccaactgacgatttctcagatcttcagtaccaagccaaatctccaataatccgcaaagcagttgataaactggaaagcatggttaagaaagccaagagagccatgacaaccacagctgatacaaccactcaagccttggttgctgagtttctgcttggctttgaggatgtgttacaagatcttggcgagatccagaataatagtggttcaactgttccaccttttcacttggatagtccacattttgatgcagccgcaagtcaacagacacctcaacttttgcttgaagctgaggaaaatntagataccaacaaccaagaagcacaactagaggaagatgaagaactaacaca

SEQ ID NO: 283392 - DNA, 606 bp, Zea mays
cccacgcgtccgcccacgcgtccgcccacgcgtccggtgaaggtaggatgccaaacacaccggattggctggaagttaacaaggacatgttgcgagtactctcctggtgcttctagaaagaagcaagagaagtatgagcaacagccacagaacgtcgatcttccagaattacaaccaaaaaacaaaaagaaacccttccctgttccgattaaaaagatgctgcaagcttctcggcgagagaagagacttgcacaaatgcatatagagaagcctcttgaacccccaaagaacggtttgcttgtgccagagtttgttccagtggcacatgaagtccttgataactggaaagtgctaatcagagggctctctcaacttctgaatgttgttttcagtttatggttgcagaaagtgtcctcaagtccatgttggtccagttggccaccagatccaagactgctacggttctggaagccagcgtcggaacagtcatcactcttgggctagaggttccatcaatgatgttctcatcccaattgagtcttaccatctttttgacccatttggtcggagagtgaaagcatgataccaggtttgattatgatagga

SEQ ID NO: 283393 - DNA, 453 bp, Zea mays
cccttcgcgatttccacctcctcccccacccccacccccgtaacccacttccgggtgggccccccacgtcgccgccggggccacgcacctcccctccctgcctcccccgctacccgccgccacgtcctcgcccccggccatgacgacctcgccgccgcccgccgagcaggaacagcaggaggaagaggaggtgctggtgccgcatggcccgcacctggagctgcccaatggagcgcagccaatggaagttgtgcctgctgagccagctgctaccgtggagaaccaacagatagaggatccaccaatctcgagatttacttggaccattgagaatttatcaagagttagcacacagaagctctactctgaaatttttggtgttggaggctacaagtggcgaattttgattttccctcggggggataatgttgaattcttatctatgcatttgga

SEQ ID NO: 283394 - DNA, 518 bp, Zea mays
gaggatgcacagggaacctatgtagaaggaataaaagaagaagtagttctgtcaccaggacacgctctttcatttattgcagccggtgaagaacatcggcatgttggctctaacaacttcaacttatttagcagccgaagtcatactattttcacattgatgattgaaagcagcgcccgtggtgatgagtatgatggggccatgtattcacagcttaatttgattgatctagctggttctgagagctccaagacagagactacagggttaagaagaagggaagggtcatatattaataagagcctcttaactcttggaacagtcattggaaagctcagtgaagggagggcaacacatataccctatcgtgattctaagttgacccgtctactacagtcatcattgagtggccatggtcatgtctcactaatttgcacaattactccagcatcaagtaacatggaagaaacacataatacattgaagtttgcaagcagagcaaaacgtgttgaaattta

SEQ ID NO: 283395 - DNA, 559 bp, Zea mays
ggcttactttgaggggacaaggtacggtcatctaacagcaaacatcgcggagtcgctgaattcctggatactggatgcctctggccttcctatagttcagatgatggaatgcatccgtcgccagctgatgacttggttcaacgagcgacgcgaagcaagcatgcagtggaacacaatcctcgtgcctgcagccgagcgtcgtgttcaggaggccattgagcgtgcacggggttaccaggtggcccgggccaacgaggcggaattcgaggtcatctcagctcacgagggaacaaacgttgtggacatccgcaacaggtgctgtctgtgccgggggtggcagctctatggcgtgccgtgtgctcatggtgtggcagctctcctctcctgcaggcagaacgttcaccgctacactgagagctgcttcaccgtggcatcataccgcatgacttattcgcagaccatacacccattccctgacaggaccctctgggatgaaacagcagatcaaggccaggtcaaggtggagatgatcattaatccaccgaagttactgaggccc

SEQ ID NO: 283396 - DNA, 729 bp, Zea mays
  unsure (1)..(729): unsure at all n locations
attttctggaggtcgtctttggacatgtacaaacaatctcaacctatgttgaaagtttttattcaattagtgctatccctatcctataacatatgtcatcattctggactcgatcccatcttgtatggacataaatccaacgcaagatacacaattttgcaacacttatatattgaacatgttgtcttttttgtaggccaacattttgcaccatacaacatagcaagctaatcgctatcctataaaattcgtcttttagtttatgtggtatcctcttgtcatatagaatgtcaggtacttgacgtcacttcatccaccctgctttaattctatgcctaacatcttcatcaatattcttgtctctctgtagcattgatcctaaatacctaaagtgtccttcctaggcattacttgaccttccaaatgtgtagtagtgccgaaatcacatttcatatattcggttttaattctaccgagtctaacatccaaaataattttaataggtctatgagaggtcaatgaagatggatagtcgagctttcggcagtacatgaaatgagagctgagctcgcacaagttcgtatggacattcaaaaccttggtgcaatgaggcaagaactcatgggccaagctcagggattaacacaggatttggctcagtcggcagaagatttgcataagtgtctgcatttagggctgggnaaaaaacacgagcgtnttttttttttt

SEQ ID NO: 283397 - DNA, 423 bp, Zea mays
agcattgcctatatataaacccggtcgcccctaggctgtggctcgccgtctcagttctcatgtccgggtgaagaaaagaaaaatcctcctgttccctgactatcgctacccctccacatccagtggccatggtgaagaagcccaacgacgttgccaaggccgcggcgacctccgccgacgcggcagccaggccatccaaggcgaatccgtccacccctcagtcggtcaagacctcgaagtttaagaagcggaaggtcaaggccaaccgccagaagccagcggtcgctgccgcagctgttgacgatgtcgccccggtaggcgcaggcactggggatggcgatgcatctgcatccgcggttttaccgcagccatccaatgttgctgaggcatcgcctgtggtgcaaacgccaaagtcgaccactt

SEQ ID NO: 283398 - DNA, 496 bp, Zea mays
catccggatgccaagatatgttgattggagcaatcagaaatcaggttctgaatgagttcgctgcagttgaaccatctcttccatgcaagcggctagcagatggttccaaacgggttcaactccctcagttcctaaagcagcagccgtcgaaggacaacaaattaattgaattgagccagacccagtgcactgtgcatcttggttcataataacaccaccagagccagttaacggagcattgtacacaccgaattatgtgaatcatgcaccacataacattatcaattcgttgtatacttctgtattgcatcagaacctgtagtgattgttgtataagctgctaattgctgcatggacatgtctgaatccatcatggatttcttgcgaccgttagtctgttctaggaaacattatataggaataattcgtaaccatgacccgtattctctagggaaaaaaaataatgatcctaggtcactcattttggttggtgttg

SEQ ID NO: 283399 - DNA, 729 bp, Zea mays
attcgacagtgagaacgccttctgtttctaatatgcctgcattttgtgatatgttgtcttgtagacggattggatacccataagttggcatattcatttacactagatgcctccaacaaaattaacctttagattttgatactgtcactcctaatttattccttggttgagcaacttccaatagattcatgttaatcaatggctagtaattattgaagaaatattcttgtttgcttgacatttataataaatggggtaagaagaattaaaggtcgtccataagagctttattttcatgctcccttgattttggttttagattattcttttagtgtccagaagagttttctcaatttgatccatgtaatttttgaagtgaggttccttaaatttgatgttacatcctttcttttctagactagcacctgcatgacttttcactttgggttcacatctgcagattgcaacataacaaattcactttgggttcacaaattcctctacaggatgtacttttcacttgaactgttatgtagatgtaggaacaaggaatggttcagtttttaggaataatgtgcatattttatttcagaacattttctagttggttgagtttcagatttttttgtaccaagctgaaggattaaaaaggatccgtacatgtttgcaaattattttagaaattgttctcttaggtttctctgatgtaaacaatggtagctgattaag

SEQ ID NO: 283400 - DNA, 541 bp, Zea mays
ctcgtcgcgccgccgatcccgccctgcgaggacaagttcttcatcaagtccccatgctacgacttcctctggagcgacggcgggagcgcccgcatcaggggcctcgtcgacgccatccggaggaacaaccccggccgacccatagcacccgaaaaggttttaggttttaggactccagatgatgttgatgcttggttgtttcaaaacccaatgcgttgccctggggctttacattttcaagatataaatgccactcagataaagtatggtattcagacaaactctactccggtagcacggagaggaacatatgaagaccctaccttcaagttccagataccactccaagttgcagctgagagggaaatggcaaggcttctgattggagacccaaattttagctggactgttggatttaaagaatttgctcacccagccacggagaccttctctaccattgctcaagcagggccaactttttttcttgccattgctatgttcggatttgttttccaaatcagtgcattggtggcagagaaag

SEQ ID NO: 283401 - DNA, 728 bp, Zea mays
cgttgatttaatatatttgctcatatcttgatatggcggctgcagggagaatatgttgatgaatctgccaaagatgcagctgctctgaagggcagtgcattccagtccttgctcccagctgttaaggacaaaattatagagagttttactccagaggctcgtgacatgtttgaaagagaatttgatttctttgacaaagtcacatctatttctggtgttcttttccctctccccaaggacgagcggagagcgggtataagaagggaactggagaagatttctattccaggtgatgacctctacctacctactgcaacaaacaagctagtacggggtatacagctggacagcggtattcctctccagtctgctgcaaaagttccaataatgattacttttaacgttgttgaccgtgacggggacccacatgatgtaaaaccacaggcttgtatttttaaggttggtgatgactgtagacaagatgtgctggcgctgcaagtgattgctctattaagggatgtatttcaagctgtcggattaaacctgtatctttttccatatggtgttttgcctactggaccaggccgaggcataattgaggtggtcccagatactcgaagtagaaatcaaatgggtgaaacaactgatggtggtttattagagatatttcagcaagattatggtcctgtaggttcaccttcttttgaaactgctcgagagatgttatg

SEQ ID NO: 283402 - DNA, 709 bp, Zea mays
gccatggttagcataaatcatgtggaccaggtacagactatagaagagagcgccattgatcaggcacacaaaagccaatcgggctctgttgatgagatacatggtaatctggaaagcactttcagtcagttacagttgagccaagcagacactgctaatggaatgcaggctatgcaggaaaacactaccattcattcacaaccaagccaattggatactctgaatcctacacacagaagccaggagaatagtggcaatcagttacaatcggtgctcacagattcttcgattccaaaacgaaccacacaggaatgcactatagacgagccaagccagccaggcataaatcatatacacacagatcaggagttcactgggaatcaatttcggtcgaacctaccagatgacactgttatttcattaagggatattgaagaatgcacagcccactcaaagccaagcaataccgacagtactggacaaattcaggccaatgaggaaaacactgccaatcaagtacagtcgagcctaacagacacagttattccagtaccggttattcaggaatatgctactggttattcacagctgagcaaagctaacacctcaaataaaaaacaggccaatcaggaatacatagctgatcaagtacaatcgagcctaacagacactgtcattccagtacaagttattaaggaatacacaactg

SEQ ID NO: 283403 - DNA, 557 bp, Zea mays
tcgcccacgcgtccgcgaatgatgatgacgcgtccagtacaaccacggaggccatgttcatcatctcaccgaatggcaagttcaagcggaagattaagtcatggatgcgtggtgctcttctgggaagcggctcatttgggatggtgtacgaggggatcagtgatgagggtgcttttttcgctgtgaaggaagtatctttgcttgaccaaggaagcaacgcacaacaatctattgttgcacttgagcaggaaattgcactcctcggtcagtttgaacatgaaaatatagtccagtattatggaactgacaaggaagaatccaaactctatatttttattgagcttgtcacacaagggtctctttcatccctctatcaaaagtataaactacgagaatcacaagtctctgcatacacaaggcagattcttaatggattggtttatctccatgagagaaatgtggtccacagagatatcaaatgcgccaatatattggtccatgcaaatggatctgtaaagcttgcagattttggattggcaaaggagatgtcaaaaatt

SEQ ID NO: 283404 - DNA, 492 bp, Zea mays
ctgaaagagaaacaggagaaaagccgcatttggaatgagacgtggctagcaggtttcttttacaagccgtgtaattacgaactatttgtcaagcaatcactaaacatggaaatggctattattatggcaagggatgctggaatggattggatcattcacctcgatactgatgagttgattcatccagctggtgcccgagagtactccctgaggcgattgcttttagatgttcctgacaatgttgacatggttatcttccccaattatgagagcagcattgaacgtgatgacattaaggatccttttactgaggtttccatgtttaagaaaaattatgaccatcttccaaaggatacatactttggcctgtacaaagaagcaacacgtggtaatccaaactacttccttacttatggtaatgggaaatcagctgcaagggttcaggagcatttgcgtccgaacggtgctcatagatggcataattacatgaaa

SEQ ID NO: 283405 - DNA, 655 bp, Zea mays
  unsure (1)..(655): unsure at all n locations
cccaaccgaagtaactctatgcctcactatcagtttcactgtcttttcttttacgtccgtctaatctctgtgtaacgacatgcgcctttattacactctatgatttttaggaacaatcggcacatattagtacttagattatgctctatgaatttttgcagtgttacgcctgtttagaactttagatcttcaagtatgaacagaacaaatatatgctagaactgtaccataacttcaactggcgagaataacaagatctgaattttttagctgtccgttttccaagaataaagtttttgtttttttaaaaaagggaagaaaacagaattcttagctgtcacaagagtataaatgtgtttgtctttcttctgctagaaaagaagctgatgagctgtaacacgctcaaaacatctccacatgcatgtgctggtgttccgctcctttggcataacttatgggtccgcaaccgcaacatttttgtttgccagcaaagaatcctcagctgttatttccaatcacctttgtatctttgcgagtgattgcatggcatgtgcgctacaaaacaatctagacagaattatattaggagtgaagagaaacctgaatgctagcaacggttccggtctttaaccatcgnctgattcagttgagctgt

SEQ ID NO: 283406 - DNA, 632 bp, Zea mays
atggcgcccgagatgtggtatatggagctggccgtgggcgggagcaaggtgcacgccggctgcaacggcaagctcgtctggcgccacaccccctggctcggcgcgcactccgccaagggacccgtgcgcccgctccgccgcgctctgcagggcctggacccgctgacggcggcgagcatgttcgccggcgcgcggtgcatcggcgagaggaaggttaacggggaggactgcttcatcctgaagctgagcgcggacccggagactcttcgggcgcgcagcgaggggctggcggagatcatccggcacgtgctgttcggctacttcagccacaagtccggactcctcgtgcacctggaggactcgcacctgacccggatccagtccgccaccggcggcgacgcggtgtactgggagacgaccatcagctcgtccgtcgaggactaccgcgccgtggacggcgtggtggtggcgcacgccgggacggtccgccgtgaccctgttccggttcggcgaggcggccgtggggctgggccacaccaagacccgcatggaggaggcgtggaccatcgaggaggtagcgttcgacgtccccggcctctacgccgactgcttcatcccgcccacagacgtag

SEQ ID NO: 283407 - DNA, 561 bp, Zea mays
gccagcacgacgaccattaccatggcagcagtgaacctgtgctgctcggatgaggcgctgtcctcgcattcctctgccacctcctcgccacccccggccaagtggaggaagaggtcgccgacggccacgtgaaaactgaagaacgcaagtagataggattatttatacgctttttgggggggcagagattaacagggtttgatcgatttctttgcagtttgtttgtcgttttttcttctttgtgattctttctccttttttccccttttgccatttatttgttctgttcttttgggttggatctctactcctcggtggggggattctgcctgcctgctcgaccggcccagtcatcatggcggcctgggcctctggcctctgcaccgccagccagtatgtgaaggcgactagactcgagagagagaaagaaagacagctactacgtataacagacacatctgtgtttctctgtgcaacactctgtggggcttctataaccccgacgcaaagctgcagagagggaccattgattggcgagcgagggcagccatggcggcagat

SEQ ID NO: 283408 - DNA, 875 bp, Zea mays
catgcgttcaccgtgatccagttttgtctgctgcggtcaaggataaggtcgatggcatggatgtaaatcatatagttgaatggatgaaggaaaattcgaaagaaacatacgaggaggctgtacaatgtatgaaaacaaactattatggtgccaaacttgtcacagaggcactacttcctcttcttcagttatcctcctctggaagaattgtcaacgtatcgttaggctttgtactactgagaaatttcaacagcgaagaccttatgaaggagtttgaagacatcgacaatcttactgaaagtagactggaggaactgatggatatagtttctagaggattttaaggctaacttagtagaggcgcatgggtggccgacaggtggatcttcagcctacaaagtcgtcaaagcggcgctcaatgcgtacacgaggattcttgccaagaagtatcctacgctgcgtatcaattgtttgacgcctggttatgtcaagaccgacatgtctatgcacatgggggtactgacacttgaggaaggcgctcgcaaccccgtgaaggttgctctcttgcctgacgacggaccgactggtgcttattttgatctgaatggcgaggcgtcctttgtgtgatggtatttctcccttttcagcttcagaataaaagaaagagctatgaagtagttagtgccaatcagtattgtagttcgacttgaatacttaaactagcacgttgagcaaaccgtagagctcaacaccagggatttcctcgtcttctgtataatatctctggtgatgattgtatatttgcaatgaaccatgcagatttggtcgcgccaaggtagtgtttggttggcacaatggtaatggcaacaggaatg

SEQ ID NO: 283409 - DNA, 652 bp, Zea mays
ggacgcgcacccagcgtggagagcagcaggagctacgcgaattcgggccgcgagtgcgccggttcaggttgccgccgccggtggcattgtggcagacgaggtggcctgttggtagccgcgggagtttgcgagtaggtcggttccggttggtgtgcgagcgaaggtgctgttggaggcgtggatctggccggcggcgggcgatgggaaggagggactagggctcgattggagggaaaggcgcgatcttggaggctcccatgggcggatgcctctcgcaggaggagcaccggctccagagcaggccagctgaagctgctggagcagatggattgcggaagtctaaatctgattctaaagctgtagcaagtgttcttgctcctccaaaagatgtggtggacctgcaagtagaaggatatggaaatgtgaatattttcacatatgacgaattaagagcagccacaaaaaacttccggccagatcaaattcttgagaggtggattgatggttttgtttacaaaggtgtaattgatgaaaatgttagagcagggtttcccatcgagacaggttgctgtgaaagaactaaacccagagggcttttaaggtgaccaaggagtggcttgcaagaagtcaactatcttggggcacttaatca

SEQ ID NO: 283410 - DNA, 576 bp, Zea mays
aaagggcccccctcccccccacagcgcatcaaatttattgcactgctctgctgcctctcatgaatggcgtttatttaagtctccaccctccgccccggggaactcttttctgtgtatcgcggaattttttgggttctcgggctccgccgcgatcccatccccatccccgccttgccgttgccgttgccggcccccccggttctcccggagctttctttctggccggcgcagtagagaagcaagacagaattgcggcggcgcctgcccgcgcaaaggaaataatcagcactgtttgccaaaggcagctcctgacgcatggctagtacttaaggatactttatgtgcagtgcagaccatgaagatagatgacgaaaggccttaccaaactcatatttttcatgatcttgcatctaacggcagtcctaaattagactgtgaggctgaaagacaaagtaatcacaaggttgaggcagataaatgggtgagcaaaccaatcaatctgagttagctttgtgaaggctgagcatctgatggaggtaaaattcggaagacacgcattgaggatacttctatgac

SEQ ID NO: 283411 - DNA, 546 bp, Zea mays
aaagcatgctagcatgtcttatgataaagccaattccacgcagttaccatctgctggtagctcactaggtgctgaaaaaaagaagaaaacccctgtactttctgaagaagtacctgtggagaggatagctctgttggcttccgatggttttcagtcaaagggtaaccagaatagcggggctagcagttcttcgcagaatgacaatgtgatccagaaactctcttctgacgtaggccagctaaatgtaaacaagaacaatgtgaatgttacgaaatcttgtttgcctgatgagtataagcctgagaagtggatgttagctgatctggagtcaagggcgttgagccaactgaaccttgcaatagtcggtcatgttgattccggcaagtcgacactatctgggagattactgcatctcttaggaagggatatcaaaaaaatatatgcacaagaatgaaaaggagtcgaaagaaaaggggaaggggtcatttgcttttgcatgggccctatttcttcatgtgtgttttatattccatttttaggggaagg

SEQ ID NO: 283412 - DNA, 781 bp, Zea mays
ccgcgcgcccggcggaaggaacggtggcgtttctccgttctacgaagtggcgccatctgcaccggtcggctgcggcggcttgtgcggtggctttcctcgtcagttgctcttcccgaacgccgccagcaccgcccgtggcatctgcgtctctgccttctccaaccgccagcaccgctcccgatccaggaccaagaagcgtgtgaggagctttcagctgccacccggtgccaccatgctccggcatctccagcgatccctccgtgccattcactactcacccatcatcggccgtgatgcctcctgcaaccccattcccctccaccggtcctgggattcacatatagagcatgccaccagagatttctctacttccacaagacttacaggacatccaatatatcagcagaatgagttagaaccaactacgcctgtgaaggatactgacttaataattgaccgcatacgaaagagcacacgaaaattggaggaaggccctgttggaaaaaatctgtcttcagcggagaaaagggaatttctcgtcaacactctccttagccttgaagattcaagagaagctgtttatggcacccttgatgcctgggttgcctttgagcaggattttcctttggcttcactaaagcaagcacttttcagttcttgagaaggaggaacagtggcatagaattgtccaggtgatcaaatggatgctgagcaaagggcaaggaaatacaatgagaacatatgagctattggcatgtgcactcgagaaggataatagagc

SEQ ID NO: 283413 - DNA, 822 bp, Zea mays
gttagatggtaataacacctttttgcctattcgactggcgtcatatattcctttttctactgcatcaaaaataccttgtacatattcagctcgtaattttgattgatttctaacaatataatcaagcctgtcttcatcctccattgctcgaccgtctactactacttgttttgataatcggccataacataaccagggattaggctgattaggtctatagtgcacatgatatttcaaaaattcatgcaaagttactctatctctcttggagtcatctctgttttgactaatgtgttgtccatggtatttaatacctagttgaaagcctcgttcgccatatggaaataggagcgggtattgtagaggcatatatgctggatggaaaatagatatcctttgaaggctattttggtgtgtgctaacaatgatgtctcgtttgtagttctcaagggataaatcacctacaatcagcatagctaattcttcctgatgtggcatctcatattgaattctatcagttttgtcagcgcctactattctaatgcttacatctatgcctttgtgttcttcgagaaaatcacgagcttggcggaatatttttactaatggattatattcgtcgagcattttttttagccctctcactatttctggatctatgtcttgctcacctggttcttcatttgttagagccctaattctattactaattgcattctttgtatcaaaaatatatagttctgcaaatttagggcaattgtctggtaaggtagtaatgatcctattcgatgatgtatttggccatttgcacgaaacacatat

SEQ ID NO: 283414 - DNA, 458 bp, Zea mays
gttagggcgcagtcaagcgatgcgatgccatgcgatgcgggcggctagcacgaggtccgcggctcggggcttttggccttcttttagcgttggaatcctcgaaatcctgctgcgactgggatgcgtcgcattctctgcggcccttttgttttccgtcaccaaaaccggctgctcctgagctcgctcgttttatggtcccaattcggatccttcagcgagtatcttagcttggctcgttaatgtaattgagctcactcgctagctcgaatcaactggcatttgtcagcaaagcaatgattgcacttgtattagataaattaataagtgatgtactgtgttaatttggtgttgaatttatgtggcacccgaaattgtgagtattattatacctttttagtgttattttaatttccaactaaatggtaattgattatagtaaaaaaaaaaaaaaagggcgg

SEQ ID NO: 283415 - DNA, 637 bp, Zea mays
atcaaattggataaagataaatagcacaaaaaaggccatcagataccacacccctgaaatactgaagaacctggacaagctattactggctaaggaggaattggctgttatatgcaggtctatgtggcataaattcctcacagatttcggcaagtactatgcacagtttcaagcagttgttgaatctcttgcagctctggactgcctctactcacttgcagttcttgcaaagcagaataattatatacgtcctatttctgtccatgataatgaaccaagtcagattcacatcaaagatggacgccatccggttctggagtctttacttggagacaactttgttccaaatgacacagagcttcacgccgatgttgagtactgccagattgtcacaggacctaacatgggaggaaagagttgctacattcgccaagttgcactaattaccatgatggctcaggttggttcctttgtaccagcttcatcagctatgttgcatgttgttgatggaatttataccagaatgggtgcatctgacagtattcaacaaggaataagtaccttcatgaagagatgaatgaagcttcaaacatactgcataactgctcatctcgatccctagatatcatcgatgagc

SEQ ID NO: 283416 - DNA, 489 bp, Zea mays
cttgcagtcgcagtgggggtcgctgtcaatggatcaatgcagtctccgccggtacgcctctatcgccggtggcctcccctcggcagacagcctcgcctcgcttgcttctattgctgtgctccaccacggagccctaggtggagctacgaaccccgtgatccccggcggtgtggcaccggagctcggcggcgacggcgggcacatccccctcatgccctaggtggagcaacgaaccccaccgtgctcaacattgccgccaagaacgcgactctcctcgccgcgctgctctatctcggggacctcgcctagcattgccccctgccccgcgtcgacgaggtggagtcctccctcgcccgcaccttccggatgatccaggtgctactcgaggttgtatgcattgtgggaataagggaattgtagctgcttacattttgaagagatttgattataccttaagcacgattgcaactgaaactttggctgtgggtg

SEQ ID NO: 283417 - DNA, 559 bp, Zea mays
aatgcatataacaaattcttgggcattcttgcagccatttacattggggatgtggtgtgttacagggttgtcttttcttgttgtgggtgtggttatttggattcttgagcatcgaataaataatgatttccgtggctcgccgcgacaacaaataataactattgtttggttcagtttttcgactctgttttttgcacatagagaaaacactatgagtaccttaggacgtggtgttttgctcatatggctatttgttgtattgatcattcaatcaagctacactgcaagtcttacttccatcctaaccgtgcaacagcttgatacttctataagaggactcgatgacctgaaaaatagtgattatcctattggtttccaagttggttcttttgtcgaagaatacatgatcaaggaactgaatatctcacagtcgaggctaaaagctcttggttctcctgaagagtatgctgaaaacctcaagctaggtcccaagaaaggaggtgttatggctattgttgatgagcgccctatgttgagtggttttgtcacttactgaaga

SEQ ID NO: 283418 - DNA, 443 bp, Zea mays
gtttaccacagatttggagttcgaccacgacgacagaacccgccgtccgacccattcacccccgtggaccgtgccggtgccgcggcacgccgccgccgcaacgccatggggaagcgatccggcggccggaagcttccgttcttcaccagatcctcctcgtcctcctccaagcggaatcgctccgggcgtcgcctcccttccccctccaagcaggacaacgcgacgagggctcttctcgcctcccccaccgccgcctcgccgtccgcgaccccggactctgcagcggcggggcagaccgcccagccgccctctcccttctagtcaccgcgggcgcgggggtgccttgtcggggaagatcaccaagaagaagcccggcgcgcgcctgtggatgcggctggaccgctggggtgcctccgaggtcgtcgagctcgacaaggccacca

SEQ ID NO: 283419 - DNA, 476 bp, Zea mays
agtagcatagcagtaaatttgagtaagcattgctcgtttaggatgttccttcatatgatgttaacaagttaggttcacttggctccggtctgtaaatggttgtagtttgttgcgttttctgtctgtttggcgggcataaatcatgcatataaccagcgcatttgcttccagtttgtacctacactcccaggaatgatttcatttgtaatactggcaccctagattgtggtgactgccgccaagagcaagaggcaaccaatgcaataaagtgcggaaaagaatcaatagaagggtagattctagggtagaacaggaggagggtgcacttgtgcaagaaaccattcggttcttgcgacgctataagcataaactttattggtttttatttatataccctgatgatcttgaagcatatgaaagactacaaataccaaaaccaccaagctttaaaggggcgagaaaactaatctccaagg

SEQ ID NO: 283420 - DNA, 542 bp, Zea mays
tcgagcagctccaggagcagaaccagcagtatcaggcatcgagtggttcattgtgctcaaagatcattggcaacagcataatctcccaaagtggccccacctgcacgccctcttctggcactgcaggtgcttcaacaggctgccaggaccgcagctgcttgccctcagttggcttccgccccacgacgaacttcagtgaccaaggtcgaggaggcttgaagctggccgtgatcggcatgcagcagcgtgtttccaccataaggtgaagagaagtgggcacaacaccattcccaggcacactgcctgtggcaactcatccttggctcttgaaactttgaatatgcaatcgacatgtagcttgagatcctcagaataaaccaaaccttcagttatatgcaagccttttttgaggttgctgttgctgtacctgagaactgtggttaggttatgagtttgttcctcaagactgacccatacatgacatgctaccttgtgctgagtttctgagacaaagccatcgaaacatgatcttgtggttcagt

SEQ ID NO: 283421 - DNA, 490 bp, Zea mays
tcgaatgcctgtatcatgctgcatcttccttcgctggggccagcctcgtcaactccgcttccggttctggcccattggcgttgcttcacatcgacgcgcctgcgccgccggtccgccgcgccttcccctcccttctcccccgcgtgccctcctattccttctctgcggcggcgtggggagctgcatctgccttcgtctggaggagtgggaagaagcgctgccgaaggggtgatttacgaagccagagagcggctgggagcaagagtgcctgggactgggagttgaagctagagaggctagttgcttgtttggtgcgctgccaaaccgccctcaacatctgacccgtctctccctcacttccacggttccagcgagcggcgcaaccgcgcaactgagcagctagcatgggggacgaagaagatgatcctgactggctccgcgcgtttcaggcaccaactgtggcacctgtgatgctttcttctggttcaga

SEQ ID NO: 283422 - DNA, 621 bp, Zea mays
cccacgcgtccgcccacgcgtccgcccgaagaaaatgctttccccttctcagctaaagtgaccgtggcacattagcccgggtgatactgcggtgggcccgcgttttggttcctccgccattcgacgccaccggtgtgccgtctggtccgtctaccaagctggaatcggtagaccgtttcgttccatttgtccccacacgcgactaaaatttacatcacctcgaacggcggcggcggcggcggcggcggtttctcatctgcggcgcctcttcgatgctgtttgctttgccaaggctttgatcccagatggggatctcgtcgggtgcagacttccaccagcagcccaccccacaggccgtgctgccgccacgcccccatggccgtgcgccgacgctgcagacgtctctctccctggctggttccgcctcgccggagcaggtcgggtcgcctccggacacacaggagccgctgtcgaactccgacgcgtggcatgactccgccacagagagcgccagctcacgggagacttggccctgggagcccgcaagagtggtggcggcgacgctcctcccgtggcatcagcaccgataactgcactgaggatagctgataaaaggagaag

SEQ ID NO: 283423 - DNA, 698 bp, Zea mays
cccacgcttccgcccacgcgtccgctttatatttacaagcctatggttgacaatcctctgtaccatcttccctgcttacatattttccaaactatccaattccagcatccaaacagacacggtatgtaactccttgtttaatattatttgcaactttttacaaacatattatatgactataacctaatgaaattcatttgctaggcccgacgattgctaacatatcccgatgtgccacaaagtacagagctgatgaacactaaacagaccagcttaacaataatgaactatcgtgaccactgaaaaggatgaagcacaaccaagttgacaaagcctgctagattccagaaatccatgaaaataaagcttgttacatcctcatgaaatgcatgaagggatttgcttttgcatatttatcgaggagggcttcatcacttttaatgaaaaatgcatctatgtatatataaaccacctgttgaagcctgtcactccatgtgtgttgatgcaacatctaggaaaaaacaatgctattagttgttggcatatgctactttaatactacttaatatgtattgcagtctcagttccctctaccgtttggtccaaattgcatctgtgtacatagagaccaattgttagaaactttctaaatcggtgtatatttaatgcaacctctccaagacactattattagttct

SEQ ID NO: 283424 - DNA, 781 bp, Zea mays
gctacgcgtccgcccacgcgttcgcctgtaacgggtccaaccaagagaacgagtccgaccaagagagcacacgcaggttatagattatatgatgttgagctgactgtccaaagaagctacaagggtcatcatgtgccccttgtttccctcatcagtaaatggacaggtaaaccaattgtggggtatcctgtcactgtggaggttctggaggatagtcgtcccacaacaagtagaaatgagcatcgcccgccgatgggtagtctcggctccttaccaaagagcagagttgcagaaccaaggcatgcaagatcttcacccgcatcacgatcaaaatcaaaacccagtggacgtaaaaaggcctcagaacatgatttggacaagtcttggcggccccatatcaagaaaccagcatcttcgccgaggaaaatgcggaggctgtcatctttcgccggcagccggagagagagtgcagaccagaagcctgtagttgtgaaggctggcggaccagcagtcgcgtgtgtcccgcttcgacttgttttgagtaggatcaatgaagcactaagcttcccgttgagacaagaaaaccccccctgaggctgtggcagttttgcattgctgagatagaatgtgggcaggcatatacatttgctaggttttctttgtacattagttaccatattatctgaaagcgtattgcctggcatatttatatcagtatattatgatgtaatctgtagccacactaggcaattacgacttacccaccgtgagatatgggccg

SEQ ID NO: 283425 - DNA, 829 bp, Zea mays
aagaagagcaccagtttggaaggctaattccgaaggaattgagatgtgcagaggtagatgaagaatgtggagaaagacatcagggtagctaccaagcgcaatgacatgttatctgcaaagagctgatgctgctcggagtcatctcgctgctgctcagccagacggcgcgcttcatatcggagatctgcgtgccgtcctcgctcttcaccagccgcttctacatctgctccgagagcgactaccaggacctgctgcgcaacacggacgccaaccagacggcgctcgacaagaacatgttcggtggccaacggctgcacgtctgtggcgagggccatgaaccttttgtttcgtacgagggccttgagcagctgcaccggctgctcttcatccttggtatcactcatgtgttgcacagttttgtaacagtggttctgtccatgatcaagatctatagctggaggaagtgggaaaccttagcaggtccaattgctgctgaggaattgaaagctaggagaaccaaggtgatgagaaggcagtcaacctttgtttttaacaatgcttctcatccatggagcaaaaataaaatacttatttggatgctttgctttttgcgccaattcaagggctccataataaggtcagactatttggcactgaggttgggctttgtcacatatcacaagctaccacattcatatgacttccataaatacatggtacggagcatggaagatgattacaatgggactattggtatcagttggccactttgggcatatgcgattggctgcgtattaatcaatgtgcatggtatctctacttctttctg

SEQ ID NO: 283426 - DNA, 422 bp, Zea mays
  unsure (1)..(422): unsure at all n locations
ccactcnatttttttttttttttttttttttgggggggtttaataaggcaggattgcacaagttgctcgttgcagtatgaaaatcccatgtgcacctacacactaatatcttactacagttgtttatcctcgtcaacaaacccgttcagctgcgcttttggctaatgaaattctgtggatggacgtggactaataaactctaaatcagggtacacaagggccagtcactgtcttgaattgcagaagcagcagactcaggcaccaatatcttctctctccctctcaccaatatgttctaaatcagcagaagcagctgatcgatttactcaccaatatgttctctctccctctcaccctagggtatgccctgtctgccctgctgtatcatcatctgcgctgcgggagctagtaaagggcacaag

SEQ ID NO: 283427 - DNA, 645 bp, Zea mays
cccacgcgtccgcggacgcgtgggctggcaaaggcgagccggccccggagacgaagaagggctcccctgcgccggggaagcaggacgccgcggaggaggctggcgcggacaagcccggcggcggcggcggcggcaagaagggcaagaagaacaagaatcccaacaaaccgctggactgcggcggcgaggccccggccgagaagcaggcgtcgccggggcccgagagcccgcacgtgcacggcggcgccttcccgtactacgcggcgcacccggtgctgagctgctacaacgtggcgcacccgagctcgagcgtgtcgtactacgcgcccgccgccgtggtggccgtacggcgggttcccgcccatggtgccggcggagttcatgtacggcccgccgggcatgcaggagtctagcatgctcaacgaggacaacgccaactcgtgcagcctcatgtgatgtctgtcacgcacgcgccgccgctacctacctacattgtcaaattaggcggtcaaagctcttgcttgttgaccagagattaattctttgaattgctcatcatcagcgcgtcatgtaaaaatcagatgacggtaatagtatattctagttctaggagcgttcagcagtgcactgctactgcctactgct

SEQ ID NO: 283428 - DNA, 1110 bp, Zea mays
agaccacgcggaacggcaacagcaagctgcctctctcccttgcgcgcgcgtgatttcatcttcgtccgaccccaccccaccccaccccacctcaccggagcccctctccccctaactcctccggcagctgctccgatcccgaaccgtgattcgctcgatggcggcaaccgcgggcggcaacaagatccgcaacgccaagctggttcttcttggggacgtgggcgccggcaagtccagcctggtcctccggtttgtgaaaggccagttcgtcgagttccaggaatccaccatcggcgcggctttcttctcgcagaccctggcggtgaacgacgagacggtcaagttcgagatatgggacacggcggggcaggagcggtaccacagcttggctcccatgtattaccggggcgctgcggctgccatagttgtctacgacatcacgaacgcggcctcttttacacgtgcgaagaaatgggttcaagaacttcaagcacaaggaaactcgaatacaatagtggctcttgccgggaacaaggctgatttgttagatacgaggcaggtgtcagcagatgaagcaaaggcgtacgctcaagagaatggtctcttcttcatggaaacttctgccaaaacagctaccaatgtgaacgacgtgttctatgagattgcgaagaaactgcttcaagggcagcaggttcagaacccacaaggcgggatggttctcaaccagagaccacctgagaggatggtgagctcttcttcctgctgtgcgtgaagcgcaagatggaagtgtggatcacatgttccatggcctggactccaggagtattaggtgcgcggaggcggggaagaatgttgccgaatcttgtgaagtggttgccatcccagttgctgaaatcctgtacttttcactgcttgttcgttgccgtgttccttgtaaatgtgaatacttattactttggagcctcacgtcacgtgttcttacggtgcatgatcgtgcttgtctttctatgacttgagagatcagagtgaaacaaggcagattcgtttgaccccttatccaataaagccatcataaaatttgggtttacaaaaaaaaaaaaaaaaaaggaa

SEQ ID NO: 283429 - DNA, 289 bp, Zea mays
ttcatcttcgtccgatcccatcccaccccaccccacctcaccggagcccctctccccctaactcctccggcagctgctccgatcccgaaccgtgattcgctcgatggcggcaaccgcgggcggcaacaagatccgcaacgccaagctggtgaggaatcatccacgcccccccgagccctcgaattcgatccgttcacgccccgctcctcccggtttcgtgtctggattccagtcaactaccagccggaggagtccgtggctcgcccctacgctctgttcccctgacgga

SEQ ID NO: 283430 - DNA, 534 bp, Zea mays
cggtttccaggcggttcctcctccagccagactctagagaaagaaggcgcatcgtgagagagagagagagagagagagacgcaatggcgtcggcgacgttcctggaggtgctcctcgccatcttccttccgccggtcggcgtcttccttcgctacggctgcggcgtggagttctggatcgacctcttgctgaccgtgctggggtacattccggggatcatctacgccgtgtacgtgctggtggcttaagttgtgcgaagaggaggacatgaagactctcgatctgtccagaagtacgtagtgatgtgaggacttctcacagtcccagtgtgcatgtctgtctcgattacgcgaattaggagtgactatcggctgatgttgttaataaaacgtgtgtgggtgctgcagccaaagttgtgtagctgggggcaaaaatgtttatcacagcaatggttttttttgggttctttcttttaccggaggaaccgccccgcgattgctggaacggaatccctgttgtgtcaacagttgcttg

SEQ ID NO: 283431 - DNA, 388 bp, Zea mays
agtatcttcaaggcttcagcaccacagcagccagctggaccagccggccccgctgcactgcacggccattctccgatatcatggcgagagcttgcaaccacgcgctgagactgctgcccaattccatcgccacgcagctggcatgcagcggaggcagcaccagatgcagaaacctcagcgtccacgcgcagctttccacccaagacgatgcttacacgaccgagccgccactgaagaaagcgcaagtcacacagagcctccggaggacccgccggagggcacccggcggcgcgcggcagagccctgatctccgtcgggacgtcgtgcggcggaggtgatcagtggagcagcgacatcgcactgacgttgcggcagtgcgactagacga

SEQ ID NO: 283432 - DNA, 437 bp, Zea mays
cccactcgtccgcccacgcgtccgcaaatacatgtatttgtgatatgtacatattttgttctatggtgttctttattgatcagttgaaaggtattcagctctaccatggtgtaaccgatttctataatcctgtggaacttctagctaaaatgctaaatatatgaacctgcattattgataaatatcttacatatttgagttcttgacaacacacacatctataactgtaattcataacatcagctgttttgttgtcttccatttagcttataagttttcactgaaagcatgtggcctactataacttgaactactagcctgattgtatctgtgtgcttttagcagccgatgtccactgcacaacgaagcgataggtcttctggcagtaagccatgggagatgcagcagtattcacaacagaggcctggttatggatc

SEQ ID NO: 283433 - DNA, 521 bp, Zea mays
cagagttcgtcctcacagtcgaccgactcccttgacgctccccgaccttcgcctccgactcggacagttcgactcgaaccctaacgccggctgcccaggtcgcagcgtcaccgtcaggcgcgccacgtgaacgcctgcggcttgctggtcgcggtctctcgggcaggcacgccgtgcgtgccagccagcaggagacggcggtcatctgcggggcgcgccgaccgccggcgccgacaggtggagcggccgacgcaccgcgattcggcgaagcggaagctccaccttccattgctcaggaaagcaatcggttatcctatactggacctgcccctgcttggatgagatgattttagagaagccaagctggatccgtcatgaggggctgcagatattctccattgacatccagaccggcggcctccgcttcgccactgcggcggtgatcagaaggttcgaatatggagtatggaaatctgtgcataaggacaatgccaacaaatgattcgaaccaaaggttgctt

SEQ ID NO: 283434 - DNA, 443 bp, Zea mays
tcttacgcgtgggcggacgcgtgggcggacgcgtgggtttgctttcttcgataaacatttattggcaagacagatgaacctctcaattgacaagcgatgcaggatagataatttgtccacaagcatgattgcattatcccaggtgcttatgaaagtgtttaccttttcttcaatatgaagtctgaatgtgtggtggggcctgtctgatctatctagcaggtttagtggtactcgcatcagctaaaccttaaacgtgttgtcttcttaatgtaatataattatacatggttctactacttgtttgaaaaaaacttaaacttatttctacatatggaatcactaaatggtccgtgtttttcaatactaattgcagatcccttcggtttgataagtaaacatgagaccccttttgtaggatggttggatatcttctgtttaaacta

SEQ ID NO: 283435 - DNA, 492 bp, Zea mays
taatcttcgaggccgcttccctgagaccgtcttgccggggaacgcccgacgacctcgccggcgaccttctccgcagcctccgccaccgtgtcgaccacctcgatggccacctccgtctacttctctatcttgtcttctaaagttctgaacctcctgtagataggtatcgcaagtatgacggccccgaccacccacttggcccacggaggcatgctgctgggtattggcaggtttcctcctgccggatttgcagggccaggaccaaccgcaggaattcgtgtagttcctttgataatagggaaggcattgttcatgcctgaagaactcgtcgttaacccagtcgcaagacttcgctggtgacgagacggtgcggccgggatcactggattcccgtggcgacgatgaagaaaaaccacacacacggaggtatggagtgccaagcctctggaggtgacagaagaaccgagtgcggccatgggatttgaagggcgc

SEQ ID NO: 283436 - DNA, 368 bp, Zea mays
tcttttctgccggttcttctccctccttgagtactacttcctggcaatttatcttctccaacaaggtccgacatcaacaagtgattgctcgcggccccgcaagcgagagagaacttttcaacccaaacaaacagtccaatccaattcctagggcaatccggtgaacgtgtgcgtgtgtatatacatacacacggccgccgccgccgcaggcctcgctcctaccgccaccggactcccctttcgcgtccgcttctcttgttgttgctgtgctctcctgttaccgggacccggaggaaggcaggaaggaaggaacgccggaaggcggggatggccggagagacggtgcgggagctgcgcgcgaacttcgc

SEQ ID NO: 283437 - DNA, 490 bp, Zea mays
agaataacccttgctgataaaaatgcaccatatgaagaagtttcgaagcagattgaggatatgtgtgggtccacaaaggcagctgctgtccctgtggttcctgactcagcaggcacggattcaaatccattttctcttgaggctcttgccgttttcatgtttcgcgtcctccagcgggtcaatcatcctggtagtcgtctatatttactcatgcaaatttgttagtcatttttatgcattgtgatatggctgatattatattaacttgtcatttaaaagggaaatctggacaaggcctcacctaatgcaggctatgttttgctaatgttttaccacttgtatgatggcaagagtcgaagagaatttgaaaatgaactttatgaacgttttggctcccttgttaagatgcctctcctgaagccagatagagcgccattgcctgatgcggtgaaagccatcttagatgagggggattagcttgttcaagatg

SEQ ID NO: 283438 - DNA, 724 bp, Zea mays
  unsure (1)..(724): unsure at all n locations
ccggtatttctggggcgacaccacgcgcgcctgctgttactgaaatcatcancaagcgagaaaaccgttcacgcctacactgctccttccatgctttttcattcacccaacgttgctctcccaaaggccataaaccactgacacatgagggaggtgttctctatagagtatcgacgacgataacgctgaactgcataaatttggttatatcatctgaaatatagaaatcgggtgcaaatgaaattagttactatttgttcattcaaactatgatgtctgaaaattcaggcaattacagattctcacacgagattatgaggttgtgatccaaatcgacaattatctgttgatttgttcaatgtcttatggctgatcctgttggagtttattgggtttggtccatttactcaacaacttttaaaggtcccctctgtttctgaccttaccttgtgcgttgagttcataattgaatccatcaaatcgtggataccgtaaccgaactaaatccatggataccgtgactgagttagtttcagttttctatcttttgtgtctggttattatgagtaatttttctgtgtaaagacgattctctcctcgaaagatatgagaaataaccaacctgctatgtggtatggttttaggcataaggagcattcggtgttgtgtgattttaggctcctgtccacactagtgtgacgacgaaacagtctttgaatcttac

SEQ ID NO: 283439 - DNA, 481 bp, Zea mays
ctgagaactagggatttagcggcgactgtgccgcttgtcatgaacgcgagcgaccttcgcaccggccacctccacccatgctattgagccccactcttcgacccaaaccaccacactgcccagattcagatccacccagcgcagcgccgttgtgactactggatctcaccgtggttctcaccaccgtcagcaagcccacctccgagctctcctactagcggaaggtgcttcgcaccactgagcaagttgggtagtgctcgttggcctcaccgccgacgaatgtgtcctatcgcgcttcctctacaacgagtgcatgaaccactcctttgtctatgaggcaccggtccccgtctccatgtttgcgcttaggctcattgataaggcgcaggtccgtacctctccatgtgcttgctagactccccctcccttctgtgatcccgatctcttcttttacgagcccaaggcagaccgatagagtaag

SEQ ID NO: 283440 - DNA, 472 bp, Zea mays
ctccgcctgcaagcaagcacctgcgccgaacgagcagcgagcgtgttgaggcaggctggcagtcagtggcagcgggagtaggagacatggctaccgagatgaagggcctctcgttgctcgtcctcgccctggtcgcgtccgctgcatgcctcgtgaccgtccgcggcgcgggcgagtgcggggcgacgccgccggacaggatggcgctgaagctggcgccgtgcgcgtccgcggcgcacaaccccagctcggcgccgtccaacggctgctgcacggcggtgcacaccatcgggaagcagagcccccagtgcctctgcgccgtcatgctgtccaagacggccaagaagtccgggagcaagcccgaggtggccatgaccatccccaagcgctgcaacctcgtcgaccgccccggcggctacaagtgcggagattacactctgccatgagctgcgcgagagctgcttgagcacat

SEQ ID NO: 283441 - DNA, 537 bp, Zea mays
gacgctagtcgcatcactaagctcgcctataaaagccaggcagagctgtctgatgttttgtcattgccatcacaattcacaaactcacgcctaataacactacacaaccagctataggggcctaccagctttgtcaagggctgaagaagaccatggccagagccatcgtcctcgccgctcttctcctcgctgccactgccagctccacgactgcgaccacgctgaccatccacaacctctgccctcacccggtgtggcctctggtgacccccaactcaggcctaccttccatatccgacaacaccgcgcgactagaccccaacgcgctgctcaccctctccttcccgcccaccttctgggccggccgggtggccgcgcgcacgggctgcgacgccggcgcgtccggctgctggacgggcgccgcgccgcccgccaccgtcgtgcaggtcaccgtccacgacggcacgaaccaggaccaggccgcctacagcgtcagcctcgccgacggtttcaacgcgcccgtggtggtcagcccgc

SEQ ID NO: 283442 - DNA, 515 bp, Zea mays
gtgggattgactagacaacgatccttaggtgagcaatctcgggctgccagattcgggggggcgttcgcgttcctaccctcccatcactctccccgtaaaaccccggctgggtttatctcatcgccgccgggcggcgagcggtgggaggcaatggcagggtgggggccctccaggctgccgacgtgcgggccgtggggccgcggcgtggcgctggagagggagctgtcgcgggacggcagccactacagcatctccagcggcatcctgccgtcgctcggcgcgcgcagcaaccgccgcgccaagctcaggcccttcatcgtctcgccctacgaccgccgatacagatgctggcagacttgtctcataatctcttgtgatatactctgcatgggtttccccatttgagtgtggcttcattcggaaaccggcgggcgccctagctgcagtggacaatgtcgtgaatgcgttcttcgcagtggacatcatcctgaccttctttgtagcttacttggata

SEQ ID NO: 283443 - DNA, 917 bp, Zea mays
ccaattttcaaagttgaacgccaacacagtgaagctgaatgtagcaccacatctgatcaggcaacatctagtgattccacagataagaaatctaacaattctataggaaatgaatctgaccggaagccattgaggccactaaccccgtggatcactgacatattgctagctgcacctttgggcattcgaagtgactattttcgatggtgtggcggtgtaatgggaaaatatgctgctggtggagagttgaagcctccaactactgcttgcagccgaggatctgggaagcacccacagcttatgccttccacccccagatgggctgttgccaatggagctggagttatattaagtgtctgtgatgaggaggtagctcgttatgagacagcaaatttaacagcagcagctgttcctgcgcttctgctacctccaccaacaacacccttggacgagcatttggtggctggcctgccccctcttgaaccatatgctcggttgttccatagatactatgcaattgctacaccaagtgctacacagaggttgctttttggtcttctggaagcaccaccatcaatgggctccagatgcacttgatgcagcagtacaactagttgagctacttagagcagccgaagattatgcttctggcatgcggcttccaaaaaattggatgcatctgcatttcttgcgtgcgattggaactgcaatgtcaatgagagctggcattgctgctgatacagctgctgctttgcttttccgaatactttcccaaccaacgctgctttttccaccactgagacatgccgaaggagttgaagtacatcatgaaccactaggtggctatgtatcatcatataagaagcagttggaagttcctgcatctgaggccactatcgatgccactgcacaaggca

SEQ ID NO: 283444 - DNA, 1120 bp, Zea mays
gcagaaacctttgtctttgagagatattcagagagaacaagaaaggagaaccgtatctatccagcaacaagcaccctcaccaactccagcaaaggtggccccgaaccaaagaagtcatgtgaatgcttcttcctggcaagcttctggaccacctccatcacaggcagttgcccctgtccaaatgagttccaatgctcccagtcattccaggtcaagtgccgaagatgatttgtttttggggcccttctgagcactccaaacaagatacaaagcagtctgagtttccaagtctgttgagccaaagcagaagttccatgatgaaggatcattctgcactgaatcgtcaaaagtctcaggcaggcagattgccagttccttctgctgctactgcaaaccaatctggcaaagggaaagcagaggctacaaacaagcagactgaggcaatggacttcagagattggttggagagtgaatgggccaagcttactggaacaaatgatgtaagcttccttgagttctgcataaagcaatcaactaccgaagcggaaatactcctccatgagaacattggttctcttgaccgcaaccacgagttcattgacaagttcctcaactacaaggccttcctgtcagcagatgtgatccacatggccttccaagctcccagcagccgtggtgacggtgcagggcgggcaaaccctgctgctgcagctagaggaggcacggtcatagacgcggagctggatggcggcgggaagaaaaaggggaagaaggggaagaaggtgagtgccgcagtgttggggttcaacgtggcgagcaaccgtataatgatgggcgagatccagaacgtggattaggaggatggcggcacaccacccccgtgtatataacatagtttggcctttggttacatgccaccgaagtctcagggctcgagggaagctgggggtgctcggaaatcggaatggcggtctggtctacctgtttttgccgagggtgggaaactgagcttagatgcagggtcatgtgctggtgattttgggttcctgtaacaattggttaggatcctgtaacggacagaaatattttcttcttcaatagaaactcaccagatggattc

SEQ ID NO: 283445 - DNA, 495 bp, Zea mays
cagttctccacgactccacgcatgcttcaggagacacggtttacgccgcgatccgggatcgggctaccggctccgccgccgctccgccgccctaagccaggtgctgaaggccttcgtcggtcttttcaccggcgacgacgacccaccaggaaaagaattttcctggcatatttttgtttccagaaatattcgtgtcaagttggtatgtcagggatcacagcaatttggcgtcggtcatgtccattagctgctagtcagattctaatggagacatattttggcccatctgtatcttctggtgttctgaggtggttcagcagcggcgctaagcactcaagaaaacctgacttatctgttgctaaccatatcagggtggtggatctgcattattgagttgattatgtgtcaacgatcagaaggctgcccctttcatgccgtatggacactaatcggatgatttcttcaaagtccagacatggtgcattggcaggattc

SEQ ID NO: 283446 - DNA, 374 bp, Zea mays
attcaatttgaagatgagaaaattatcccgactcgtcagcatagtggaggaagagagaaatctctgtgatggtgtagagcagccgtccacccactgtgatagtgacagctccaagaaggatgaaactgcacctgttgatcactgacctaataattgcttcgttgataaacaccgccgaaatgctgaagaaagaaaagtcaagtaattggctttgtgaacttaaggagtggatggatgacaatacagagaaaacagatggcgacaacctgtctgttcgcttaactaatggcaatgggaagtgtatcaaacaacaagagaaggcagagagcacacaaggtgacttcccataacatgtcggatttggcacacgtttc

SEQ ID NO: 283447 - DNA, 553 bp, Zea mays
gtttccaataaggatgtggactcttgatcagaggacatacttttaaaagttgaagaaatcctcttacgctgcacagagatcagaccagcagacagggattataagagaacaacatggccggaactatgttcaaagcggcttgctttgttgacaatggaaaaggcgagcttgtctgctgttgcattagaggatacatctgacatggtgttagaactcggaggaaatttcaaagaaacattaaggcagttgggtggccttgatgatatttttaatgtcatcccacgcgtccgttcagaattggagaaacttgtaaaggatgcctccactacggttgtggagggaaaagaaggtgctcctctacaaagcaccacactcctcttgaaatgtttgaaaattttggagaatgccacatttctaagtgacaacaacaagacccatttgctcagcatgagtcgaaaattgagccctagatgccgctcactttcttttgttggtgtcattctcaacattgttgagttactatcagctctctctctccttcagaaacctttca

SEQ ID NO: 283448 - DNA, 706 bp, Zea mays
cgaaaacaagtaatgttgaatcagtgttgccaaatagcccccaaaacagacctttggtcatattgggtctacagttatcaaagctttctgtgaaaaagactggctacttcagtgacaagacagaggttcagaaatcttcgactgttcttggatatgctgctcatgcagtctccctcattgcatcctatctcaatgttcctcttcggtatcctttgcgctttggaggttcacggtcatatgttctcgaccctgcgccttcagttgagccatcatctataacctcagtaggaacgtctgtccctcccagcacaagcatgaggacaacggagttccctctgtttcttgacagccaggagacaacaaggtcatcatatgcgatattcttgttgaacaaggatatcgagcaacttctgaattacattggcgctgaaagcctcgggccaagacatgtcctagcaaacctgaagcagctgacaacgatcatccagtcacaaggatacatttctgatggttagtttaacccagatacagttttggtgctgtgagtttagtccagaagacacaggcacccttttttttaacccccctttgagtcttgacacacaagaggtggtcgctgtctctgtgctgatacgctcattgtaaatgagcaaaatggagtcactaccaggttgtacaggaaagatgtggatcatactactgtacg

SEQ ID NO: 283449 - DNA, 522 bp, Zea mays
gagcgaggaggtggtacattggccggccatggctagactccgctgcgactacgtcgtcttcgtactgctctcgtctgccctccgccttccaggcgacgccattgcctaccgggggcaccatggccccgccgcacacgactacagggacgcgctcgtcaagtccatcctcttcttcgagggccagcggtcgggcaagctgccgacgtcgcagcgcgtgtactggcgcagggactcgggactctccgacggtcactccgacaaggtggacctggtgggcgggtaccacgacgctggtgacaacgtcaagttcgggttcccgatggcgttcagcatgacgatgctggcgtggagcgtggtggagtttggcggcctcatgaagtccgagctgcagcacgccagggacgccgtccgctggggcgccgactacctgctcaaggccacggcgcacccggacaccatctacgtccaggtcggtgacgcgaccaaggaccacgcgtgctgggagcggccggaggacatgga

SEQ ID NO: 283450 - DNA, 514 bp, Zea mays
accagaacaaatcaaatgctatttgctgcacatttaattatgatacattcatacgcacgtacatgtctcagcaggaccatctgaaaatcaacaaatcgctgtcaacccccaaaacagaacacgctcctcaaaagctgtagcagaggccgccgtgcaccacgcccgccagcagcgtggccaacgccggcgcgcgtgccctgagcgccgaactcggggcagcaccgggcggcggcgtgccggcgcccggggccgagctcttgacggggcacgcgtagtcgcactcggcagggtcgaccacccggtacacgcccttgctggtgagcaggtagacgtccttggcgttgtcctcgccgaaggagaagatgtagcccagcgacggcagcgagctcccggcggcgaagtcgcacgggatgggcgagctcttggagcagccgaacgccatcgtcgacacgttgtacacgccgctgccctgcggcgtcttggtccccgcccacattaacttggcgtacaggtc

SEQ ID NO: 283451 - DNA, 379 bp, Zea mays
aggtctgctctgatactgagaagtcacgagattctttccaccgtgtttcaccgaaccccgttttagatgatggcagcagagcagcaaaagacatcggtgcatcaaaacttaatggtgaggatccaagggattttctcgccggccttgctagcaatattggattagacaagcttcgtgctgccactctcgtatgtgcatcagttgctacatcgtacacggacatgcttcttgcaatgctgggctctagagattcaaggaaaacggccagaagcactggatgaactcgtgaagatttgtagaagtcattacatatttgcttcagaggacaatattgcagagatggaaatggtggctgctggactagaaaagaatttgcatg

SEQ ID NO: 283452 - DNA, 817 bp, Zea mays
cggacgcgtggggaaaaagacactgcatttagctcttggcagcaacgatttggaggtggtaaagtggaatgacaaactccgcatggcttttgatgaatgcatagtccagctgtcaaagaaggtaggtgatgctggaccagttcttgacatgatgtctgtgatgctagagaacatatcacacactcctcttattgctatagcaactacttctgctgtttatcgcacagctcaaataattgcttcaataccaaatttgtcatataagaacaaggtatttccagaagcactttttcatcaattgctgttagcgatggttcaccctgatcatgaaacacgtgttggtgcacaccgcatattttctgttgtccttgtcccatcttctgtttctccttttcccaatttgaaatccctagatcagtgtagaaagcatgatgtccagaggacactctcgagggttgtatctgtcttctcatcttcagctgctttatttgataagctgagaagggacagaaactcctttagagaatatttacatgaaggaagcatgaacagaattttgcatggtattgatgatgaaattgctacccctaatgacttgccaggctcgcaaagcttgagacaaagcctcagactttcttcagtgtctcacaaacattcttatacttctttaaaggaaggtcaaagtcccttgacagagtcaatcaacgaaatggaaacaattgtgctaagactaagcagccagcaggccactcttctgctctcatctatttggcgtcaagcacttttctccaaaaaatgctcctcaaaactacgaagc

SEQ ID NO: 283453 - DNA, 488 bp, Zea mays
  unsure (1)..(488): unsure at all n locations
ttttcgcgtccgggaataactgcagtttttttttagaggggacccgcgtgtttctccacaacgcaacaggnngtccaaaactagtcaatacttctgatacctgaactctgactacaggcactgccacaatcaaagttaatgttgatgctgtctgtggctaggaatacatgtgcttaggggtgacaatgggctctaaattttacactataagatttaaggatcggatcgaattaggattgggtcatatttgtatttatttttgaagtaaaatttatttagggctctaccattttacgaagaagcatttggatcgcgatccattaccacccctacctgtgctaccttctggttgaaaaagtctgcaatgtactctgatgatgaaggtcttttgtatatatggtggttatgaacttatgattgagaaaacagaattttgctacaagagttggattttgagagtagtagttcattgtaagcaccccagctat

SEQ ID NO: 283454 - DNA, 387 bp, Zea mays
tccccagtcccctccgtggggggtgcaacgatgccaggccgcgcaccgccgcgtcatgccatgctccctctcctcctcgctctcctcaccggagctgcccctacggggtcagcatccggggacggttgccgcgtcggctgcccgctggccctcgccgcgtactacttctcagcggagtccaacctcagcttcatcgcctccctcttcggcatcgccgaccacaacaagctgctcccctacaaccccggcatcgtggacccgaactacatcgtcaccggggaacgcgtgagcgtcccgtttccttgctcctgcctcgggctccccgctgacccagacttcacctttcttggggggttcattcccctacacgcttttcggcggtgagac

SEQ ID NO: 283455 - DNA, 325 bp, Zea mays
cccacgcgttcgatcgacacgtttgacatacttggtgtcactcttggaacacacaatcctgagtacggggtcgcgcttacgctcccaaagtcgaccggcaacggcaatggcagtgctactgctactgccagtgtcggcacgaggaagtgtgctaagagaggagacagcatctggggtgcatggctcttcttcaagcactacttcaagcctgctcttgtggagaagccaaaggggaaggtgacgcgagacgcgtctgggagcatctcgggctttgacaagtccgatctacgccttgatgtcttcctggtgcagcatgacatggaga

SEQ ID NO: 283456 - DNA, 803 bp, Zea mays
gcagaatcggtgttaactgaaaatggggctgatgcccctgcatctgacaatatggttctgcggaagctccttcgcataccgagatactttgatcctggggaaacactgttggagacttgttttaattgtagcgaggaagggcatgtagctgcaaactgtccattggaaaagcgaaagaagccttgctttgtttgtgggttgtttgggcacaatgcaaagcagtgcacgcagggtcaagactgttttatctgtaaaaaaggaggccatatggcaaaggactgccctgataagcacagaaggaacgatcatcaatccacattatgtttaagatgtggagaaataggtcatgagatgtttggatgtaccaatgattacccaccagatgatatcgagaaaataagatgctacgtgtgtaaccagaagggccatctatgttgttccgacttctctgacgattgtccgaaacaaattagctgttataattgggcccaatctggtcattctggtctgggatgtgccaaacgcagggaaaccagtgctgtcacaactccaaccttatgcttcaaatgtggcgaggaaggtcacttcgcacgtggctgcacaaagaacgccaagtccgatcggtcgaaaggcaagtcatcgtcgcatattcagaggaatgagaaatggaaaaaggcttccagtagtgctagatcagctccttatgacgcccgaaaaacaagcaaaaggaaaagcccccatctcgaggaaagagtgggcacacctcgtcataaacccaaatcgaggggtggctggactggtgg

SEQ ID NO: 283457 - DNA, 708 bp, Zea mays
aagaaatcaaaatagcatcatcaagactcgggaagacaagtatcgttcaaaaattaaagcactcgagacattagtaaatggcacaaatgaagaaaatgagatgacagtagatcgacttgagctagttgaggtagaaaaatcaaaacttgatgagaaaagaaaactaggtgaacaagacatggttcggctgtcgcaagaaaaggagaatgcagaaaatactattgcttcccttcagcaagaaatacaggtcttgagtaggatgcatgaacagtaccgtgagagaaaagaaacagaggccaggcagatggaggaacacttgtctattagacttaaggaggctgagcttcttttaatgcaatcaaaaaagaaagctgaagaaattgaatctgcttcccaactgaaatctcaactttggagcaggaaggcaaacattttccggagttttatggataatcagaaattgtccattaaggacataaggatatcatctcagtccattaagcaggaaatgtttgcccttcaaatgaaatggatagatgaaatatctagcattggacgtgagttgaaaggcttggtagatgctgctgacaattaccataaggttcttgctgaaaatcagaagctatttaatgaggtacaggaactaaaaggcaatatcagggtttattgtcgtgtcagaccatttcttcctggtcaagatggaaaaac

SEQ ID NO: 283458 - DNA, 486 bp, Zea mays
tcgttacgcgtccgcccacgcgtccgcccacgcgtccgcccacgcgtccgcccacgcgtccgcccacgcgtccgcccacgcgtccgcccacgcgtccgcccacgcgtccgcggacgcgtgggcgagcagcaagaagaagtccggcgcgaggccgtcgggcgagggcaagatgagccgcttggtggagctggaagaagcgcgcggcccgcggagggcggagggcggcgaggcgaggaaggggaatacgcagcagcagcaagagaaggcgaaggcgaaaaggctggtgaagtggaagtgcgcgagcgggtgcggtgcgtgttgcaagctagacaaggggcccgacttccctattcccgacgagatcttcgccgaccatcccgatgacctccagctgtacaggagtatgatcggctctgatggatggtgcattaactacgaccaaggcaacccgaacttgaaacatctaccaggaccgaccttccttct

SEQ ID NO: 283459 - DNA, 449 bp, Zea mays
tttgtgtgcctctcgcgcgcgctacagttgacgaatgcatcatcatcatcatgcaggtggcttgacaaggcggcaatcgtggaggccgagccggcggggaagcagcgggcgagcgcggcggcggcgtcgacggtgacggaggtcgaggaggtgaagatggtggcgaagctgctgcccatctggtccacgtgcatcctcttctggacggtctactcccagatgaccaccttctcggtggagcaggccacgcgcatggaccgccccctccggcccgggctccggcgccggcgccggcggcttcgccgtcccggccggctccttctccgtcttcctattcctctccatcctgctcttcacctcgctcaacgagcgcctcctcgtgccgctggccggccgcctcacggtcctgccgcaggggctcacctcgctgcagcgcgtcggggccgggc

SEQ ID NO: 283460 - DNA, 524 bp, Zea mays
aaaaggatatgtctccaactgctggaaagatattctctcaattgttggatggatctggcgaatataccctggtctacgaagacaacgaaggagacaggatgctggtaggggacgtgccgtggaatgtgtttgtgtcaactgctaaaaggctgagggttttgaggagctcggagcttgccaaaggtttggtaggcacaaggccacctcagattgcggtagctccgagaagaggaccaccagattgctgaaagcctgaaacagcgacaaaattctgatcatttggaatgtgagcaagcaaactgaacccggaccttttgtgatgtgacggtaccttttttttgcctgcagagactaatctagtgagatgaactgccatttcagtctttcagatgtatgcggaggtcctggatattttgtaaattaggctaccatgtgactcgttgctgcagggtaataatgtcctaatgtaattcaacatgggcattaattggacttataagagaaatttcgaagatgcaagatct

SEQ ID NO: 283461 - DNA, 496 bp, Zea mays
cagcaaccagcatgcggcaagcgcgcgcacacaccaaacgcaactgcaactgcaactgcaagagctcgccacagcagataccaacagtttcactcaacatacgagcacgcgaagacatgctacttgtatagtgtcatctgaaagttataaaggggctttggagatcaatttgcctcgctgtttaggtgtattgaaattggatgatgactaacagggtagatgattgtttggagctgcagaacctcagtcatttttccttaccaattcagaaatagcgaatctttaaatcaacagaggattttcctaccaatatagagaaaccagatccataaagaatatggtatcctctttttatacttgttttgtatcatatttgtagtactttttatataactttggccaaacttaaatcgtttgactcctcgaaaagtgacaatcgctcttttttgtggatggagagagtaataattgataactggttgtatataaaatttaa

SEQ ID NO: 283462 - DNA, 401 bp, Zea mays
aaggttgctaaaatgaaccaaaactccagagccaataacaaaatgatcaaaatatgtgataagttaattggcgtattccttgtggataaacctacaccaacggattggagaaaattactagcttttagcagggaatgggacaacataaggcctcatttctttaaacgctgccaggaaaaagcagatacagagctgaaccctgagatgaagcacaatcttctcaggcttggtagaaaacttaaagagattgatgaagatgtacaaaggcataatgaacttcttgaagtagtaaaatccacaccatctgataaacttggttctattgttgctaagcggcgtacagatttcacagtgggaattcttcaaccacctttactatgttgcagagtcttgtcatgatg

SEQ ID NO: 283463 - DNA, 529 bp, Zea mays
caaccacgccgcagagacggtccggccgcccggccgaggccggcagctcatcacgagtgccagatccagtcgtggccaacgccaacacagcgccccctccccacgacgctgaagtcccagatctaaccacacagacacaacccaccacgtcgccaccaccaactaacccattaatccatcaacgccggtcctccacggtcacgcggaagtcaccgccgctctgccgcgctctcccgtagtcccgtaccgcatcgcgttcttcgctggcctcgctgtcgtctcatcgccattggcgtttcgcctgcagctgctcgtccgccagaaccaagcaggtgtaaacatgcttcatcattcaaatagccggaaccaaaggaacaggggatcaagaatcaaaactctactccaagcgaccttgctttcaggtgttgtcttttggctcctgtatcaggtgaagcattcctatgataagaaaaacgagtacttggatgatgctgaggaccagcttacccataatgatagaagcatattc

SEQ ID NO: 283464 - DNA, 446 bp, Zea mays
gtccccagtaaaatgtaccccgaaaacccccacctccgcttcctcctcttcctcgccgtcgcggcagttgccgccggcggggctgcggcgaacaccaccctcaccgcgtccctctccggcaaccagatcaagatcatctggtccggactcccggccccggacggcctcgactacgttgccatctactcgccgccgtcctcccgcgaccgcgacttcctcggctatctcttcctcaacggctccgcctcctggcgcggcggctccggggagctctccctgccgctcctcccgacgctccgcgcgccctaccagttccggatcttacggtggcccggcgaggagtactcctaccaccacgtggaccacgaccagaacccgctcccccacggcaagcaccgcgtcgccgtctccgccgacgtctccgtcggcgaccccgcccgccccga

SEQ ID NO: 283465 - DNA, 809 bp, Zea mays
  unsure (1)..(809): unsure at all n locations
atttctcagcgtgcgcgctctcttctctctcttttgtggtaactggcggcggccgacgccgacgccctagctcacgtcttcgtcggtcccttcccagccttcgtcgcgtccttcgccgtcgacgagaacacacgaggaattcaaggaaacacttgcaggactgaagaatagagaaacatgtcgtctggtggtgtgaaagatttttaccggcagaaaaagaaaggaggcgtggcgaagacagcttcatcctcaaagaacaagacacggcattacactggtggggcttctgttggtgcctcagatgcagctcagacatcagctctagtgtctcatggctcctgggatctcaaagatgactttggtgatgaagaagagcagctgcgacagtttgacgtggacatgaagtttggtccttgcatcggtgttactcggcttcagcgctgggagcgagcctctgccatgggcctccagccaccagctcatctccgggacctcctactgcacgcggcatcgacaaagaatcgcggtggcggtagcccctctgtcgagtgcctttgggagggtaaagtctagaagaaatatcttctaatcccccatcccaggtcaacttcaggtggttaactggagacgcttgttgtaccatgcagcctcttgttgatgtatgttggcactcgtttgtttctccaaggcacgtgttcggtaacagtatatagatggctacctgtgcgtatgttggcgcacttcatgctgaattctcttctcgtattgagatccaaaaaaaaaaaaataaaaaaaaaaaaanaaannaa

SEQ ID NO: 283466 - DNA, 371 bp, Zea mays
cccatgcgtccggcggtggccaaccccggaagcggcggcgggcaaagcgcgcgacgcagagaagcgtaacttcaggccgccggtcgctctacgcatcctgctccccgttctcgtcggagatccaccggggcagcctttctttccccttcctcaatcaagtcgatccaatttcgcgcgcgggtcgggctcgccttctcctccagtctccacctccaccagcgctcgaggtcgacggacgctactcgcagcagttcttctttgcggtgcggccgagaagaagctaaggctcaggcatgagcttccgggaccaggagagttgcggggaggatgggggcaggacgtcctccgcctccgacctgcggaagccgctc

SEQ ID NO: 283467 - DNA, 469 bp, Zea mays
tgccattccagtgatcataacaaaatttacgaacattgtccattctgtgcgtaggggtttatcagagcaggatcttgaggttttaagaggcattgctggttgtggtgaggacataggaagagatgaagttgataggctatggtgctggttatacccagtggctgtttcattatcgagagagagaattaaaaagctgtgggattgcacagcacctagatggatagagggcttgattacaacagaagaagctgagagtgcactaagaagttccagggaattgttaaaggaggcaggaacatttgttctcagatttcctatcacccgaagctggccacatccagatgctggaagcctagttgtcacttacattggctctgatagctcaattcatcataggctactctctcttgattccagtgatgctagcgctgagaaactgcaagatttgctggttcaggaaccagaacta

SEQ ID NO: 283468 - DNA, 471 bp, Zea mays
ccaaatgccaagtctaatgcagaatccagttggggtgaggaagataagatggagtctgatgatcatccgaaagtcccaaaagaatcagacacatggaatacagggagatcaaatgaaagtccatgggataatactgatgcaccgcaggattcctgggttaagagtgcagctcgcaataacaacactcaggatggttcatgggataaagtagtatctatgaaggatcttgattcactccaagattcatggagtaaggcgacaatccagacgaatgatgcacagaatgattcttgggacaatgtggccaaaaatgccccggattctgccgcagaagactcctggggggctgcaacaccagcggagacaactgattctggtaacaaggagtggaaatcagatggatggggggcaaaatctggtaactggagcagccaaagaaataatcctgggagacccccaaggagaccagat

SEQ ID NO: 283469 - DNA, 389 bp, Zea mays
cttgttttgtgctatgtttccagaagactatctaatacacagaaagagattgattagattgtggatagctgaaggatttatagaacaaaaaggggcatgcagcttataagacactgctgaaagttatcttaaagaacttatacgacggagcatgcttcacgttgcagagaggaactgctttggtaggattaaatgtattcgaatgcatgatcttgtgcgtgaacttgccattttccaatctaaaagagagggtttcagtacagcttataggggacataatgaagcagtgctagtgggatcatattctcgacgagcggctgtgctccaatgcagcgagggcattccatctctcattgatccatccatgcttcgcacttcattacattcga

SEQ ID NO: 283470 - DNA, 389 bp, Zea mays
cccacgtcgtacgaccacgcgttcgcttcgtcacagctgaccacggtgcagcaaccgcagcccacgcaggcgacgaaaagctgccgaaccaccagcagaggagagcgagggaccgcgcaaccgagccactccctagtccctccttctccctctctctctcttcgcctccggatctcgcatgcgacggtggccaccgccgcgcccgacggtggagggtggaggagttagcgaggggccctgaccctgagggctggacggcggcgcgatggggggagcgcagctggtggggagatgggtggagtcgtacacggggatgtcgacggacaacatcaagggcctgctgctcgcgctctcctccagcctcttcatcggtgccagcttcatcgtga

SEQ ID NO: 283471 - DNA, 1151 bp, Zea mays
cggcaaccagtatgcattgggcaaaaccaactgaatatttctcagtattgtcagtcaggaacatatgttgcacgtggaggttcagcagataacagtacagtttgtccaccatgctctagcgactttccttttgaaagaataccgatgtcaccaataccatgctcatgtgtcgttccagtttatgtgggttaccggcttaagagtcctgggttctcaaatttcattccatacgaatcccagttccagcagtacttaacatctgggctttcactgtcatcgtaccaattagaagtttctacttttatgtgggaagaaggcccaaggctgaagatggacctgaaaatatttccaaataacactccctttttcactgtaagtgaggtgttcaggcttaatggtatgttcacagcttggcagattgcagactctgatatatttggcccatatgaacttatcagcttcaaccaagggtggtacaacacaataataccacagggtacaaagtctggtctgagtacaggtgccattgttggggtggtcatggcggcatttgttgcagctgccattctttcatccctcgttactatcatcatattgcggagacgctcaagacagtcttcttcaaataaacgcaccgcgaaaagaatttcaatgaaaattgctggtgtaaaagacttcacttttgacgaattgtcacattgtacacatgactttaatgattcaacactaattggccaaggagggtatggcaaggtatacagaggtgtgttggctgatggaatagtagtagcaataaagcgagcacagcaagggtctcttcaaggttctaaggaattcttcacagagatagagttgctatcgaggctgcatcaccgtaatctagtctctttgctcggttattgtgatgaagatgatgaacagatgctggtttacgagtatatgcccaatggaaatctgcgtgatcatctttcagctagagctaaggtgcctctagatttccccatgaggctacggatcgcgctgggatcgtcacgtggtatcctgtatttgcacacggaagcagatcctccaatataccatcgtgacatcaaagccagcaatattctactggactcgaagtttgtcgcaaaggttgctgatttcggtctctc

SEQ ID NO: 283472 - DNA, 775 bp, Zea mays
gtttcccagagaactctcggaccacaatcctcttatgttagtgactggtcctgaactagtccatactcaacactcctttaagtttgaaaagggttggctgagtcatcctgattttaaaaagattgttgacaatatttggagtaaaccttgcaaagccaagagtgctcttgataaaattcagcaaaaactaaaactatgtaaacaatatctgaaaggttgggattggaacatgaaggggcagaaaaagaagagaaaagcccagattcaagttgatcttggtaacttggaaaagcttgaagaacaatatggattaaatacttaccaactggaattgaaaatgtctcttttgggagaaaatttagatatgattatagaagaagaaacttattggaaacaaagatcacatgaaaaatggttgttaaaaggagatggaaataatgagttttttcatagaattgcaagtggaagaaaaaagaaaaatgatatcctcttctttgaagacaatggtacaaggattgaaggagaacatatgcttgaacatgctactaattattatgctgatctctttggcccagcacctggaaacctcttccaggtggatgactccatttggaacaatgctgagcatatttctgacagtgagaatcgcacactgtgtgagttttttacaatgaaagagattactcaagccttatttcaaatgaaaaaaaaacaaagctgctggtcccgacggcattccaactgaattctatcaaagctgttgggatactataaa

SEQ ID NO: 283473 - DNA, 518 bp, Zea mays
cccacgcgtccggctcgacgtctccccttccctccgcgcgcacctcgtccgcggatgcccgtacgtcaccgtcaccaccacggccggcgccgtcgacatctccgtcgcgtccgtccatgccttcctcgacgtcgcctcatgcgacgactccggcaccaagtggcgcctcgggatgaacagcggccagaccttcctcctctacgcgtcggccccgatccgcctcgcgcagaccaccaccacgcagctctccgcgcctggcttcgccggagccatccgggtcgcctacctccccgacgcgtccatggagccggtcctcgaccgctacagccgctgcttcccgaccgccggccacgcggccctgagccggcccttctgcgtcgactacgcctggcgcaaggacgggcccggggagctgctcatgctcgcccacccgctccacctccgcctgctcgccgaggactgccccgtgcgggtgctcgacgacttccggtaccggagcatcgacggcgatatggtcg

SEQ ID NO: 283474 - DNA, 486 bp, Zea mays
agcgtgatgacttgtgccaactatcttaagttacctccatactcttcaaaggaaaagatgagagagaaactcctctatgcaattacagagggccagggatccttccacctatcttaaccaataagcgataatgatacttcgcatgcaacaggagtttctctttgtaagtatctcgtaggaaaggaaaacacggtgtaaatgtgggtggttcactgcttattttagctgacagcacgatctggtggagctgattttaggagagaaaaaaacggctaccgctctttgtacatactaggtttcaggtgtgatcaagcagatcactagtgtgcctagttcgctactcttttgttcaaactttcggtgtacatatgcgtgcccgcctgataaaagtgccagtgctatctttcattgttcggtggggtttgccttcttaagcgacgttgtgtttcttaccgccccatatgggcaaattatttgtggattacc

SEQ ID NO: 283475 - DNA, 462 bp, Zea mays
gaggtttccgtgtgcaattcagtcaggcgttaggtccatgcaggggtggtcttcggtttcacccatccatgagcttaagtgtggcaaagtttctggcctttgaacatactttaaagaatgctttgtcactatataaacttggaggtgctgctggaggaagtgattttgatccaaagggaaaaagtgataatgagataatgcgcttttgccaaagtttcatggatgagctgtatagatatttgggccctgatcaggattttcccgctgaagatattggtgttggtccaagggaaatgggttacctttttgggcagtatagacgtctttctggtcattttcagggaaattttacaggacctaaaattttctggtcagggtcaagttttcgaacagaagctactggatatggtctggtgttttttgcacgtcttttacttgctgaaatgaataaagagcttaaag

SEQ ID NO: 283476 - DNA, 536 bp, Zea mays
gccagggttccggttagcacggatgtaaaagatgacaatgccagatggttacaaatagttcaccatagctaaactgaaagaagagctaactaagcatggatttggcacgcagttgttagagctcaagaatccaggcgggaaagatatactcgcactttataagaagcatgttttgtgcgagtaaataatggccacgtgaagttccagtcttcaacacatagtctatccaaactagggaaacaatagagtagtctgtcagtatttttaacaagctgatgcctcattgttctccaggcattcgtttctgctgattggtttgtattttggtgttaacatcgaattagttccggtttgtgtctaggctttgtatttcttagcttgctggttggctgggtgaagttcttaggacttctgagtgctaaatgacctcgaccaacgctagtcgtgggcaagtttgtgggacgtttgtatatgggatattgctgtgtaaaaagtgctttatcccattcaaatataataaactcttcaagtctgcc

SEQ ID NO: 283477 - DNA, 496 bp, Zea mays
ccaaggcttttatacctgtcatcgcagaaactccccccggggtcttcatctgccacggcctcgccaccacctccgcccgacggggacgataagccggaccccatcaagctcgctttcgcccgcgctgccgcatacaagaaggggagggacagccacagcccgagcccgagcccggcgccggccccgcctcccacgccgccgccacagtctccaccaccgtcgcagccgcaggcttcggtcagtgaccccggcagtaaggaggcttttaagcgggcgttggagtaccgaaacggcaacggggccggagcgggcgcggctggtggtgactccccgctgctgggaggctcgccggattttggtcagaatgccctaattagtgaagaagtctcgtttggcaagagagcagggtccgagtttgatgaggctgattttttgggtctcgacttctttgagaaaaaacgttctaaaggtctaccacctgggctggctccagctt

SEQ ID NO: 283478 - DNA, 505 bp, Zea mays
gaccatatcagaattgcaccaactcagcagcaagcacaaatggcttcctccccattgcagaaacaattctattctcacactgtaactggttataatgaattccaagcacaaatgcgcaatggaagacccagaatggattcaaaggcgagatcacagttacttccccgctattggcctagaataacagatcaagagctacaacacttatcaagcgattcaaattctgttattactcctttgtttgaaaagatgctaagtgctagtgatgctgggcggattggtcgtttagttttgccaaagaagtgtgctgaggcatacttccctccgatctcccaacctgaagggctccctttaaaggttcaggatgccagtggtaaagaatggatattccaattccgtttctggccaaataataatagcaggatgtatgtattggagggtgtcacaccttgcattcagtcaatgcagttacaagcaggcgacacagtaacctttagtcgaatag

SEQ ID NO: 283479 - DNA, 601 bp, Zea mays
  unsure (1)..(601): unsure at all n locations
cccacgcgtccgcccacgcgtccgcgccgagcggtggaccgccgcgcagctccttgagcacccgttcgtggcggctccctgccacggccacggcgaccacgaggtcccgcgggtgtcgcccaagagcacgctggacgccgcattctgggaggccgaagacgacgacgacgacgcggacgaggcagtgttggcgagtgcgtcggagaggatcaagtcgctggcgtgctccgcctgcgccttgcccgactgggacggggaggacgggtggatcgacgcgctgggtgatcagcagcgggtcgaggtctngcgcgcggtccaggtggcgcgcagcgcgccaggcaaagtgtccagcgtcctggcggtgccagctggggagatggatgtcggcggcggcggcgggctcccctgtgatgaactggaagcagaggacgtgtcgttcggtggggaggttccaggagcagcggatgcttcggctgagcgtcagaagaaacgctatttgattttgcgttcgcactactgtcatgtactctcgtgtcagttagtgccctgtaatctacccctagtagttgttaataatgcaataaagttatgggttcccccc

SEQ ID NO: 283480 - DNA, 654 bp, Zea mays
cgtactcgtgggcggacgcgtgggtgtcaatggatttcttatgggatgtcggccttatcttggagtagactcaactcatttgactggaaagtaccttggacagcttgcttcagcgacagccatagatggacataactggatgtatccagtagcatatgccatatttgacaaagaaacaaatttgaattggaaatggtttatgacactcctgaagagggctattggaacacccccaggtttgaccatacacactgatgcatgcaagggtcttgcatatggggtgtcacaagtgtttggtgatgcagctgaacatagggagtgttttagacacctcatggctaatttcaggaggaagtacaatggtgaggtgctgaaatacatgtggccttgcgcatgggcatgcacacatgagagacatcaagtacttatggataaaatttcagaaacttgtccaaacgctgtcgcatatcttagatatgaccacccacacttatggacaagagccaaattcaataaaatctgcaaggtggattacgttaataacaacatttcagaatgtttcaacaattggattaaaaatgtgaaggagttgcctgcagttgatctcatggacatgctcagggtgatgataatggagaagattgctacaagaca

SEQ ID NO: 283481 - DNA, 512 bp, Zea mays
cgcaagatttataaatcacagctgccaacctaaccttttcgtccagtgcgtcttgagctcacacaatgatgttaaactggcgaaagtgatgcttttcgctgctgacaccatacttcctcttcaggagctatcctatgactacggttatcgattggacagtgttgttgggcctgatggaaaaattgtgaagctggcctgccactgtggtgctcctgattgccggaagcgcctctactaacctgcagtgtgtttctttctatttggattttggaggaaacagcttatattgtaggaaaaacagtcatggtacctatgtagttggcatgctcttgatctatagcgatagcgaaagaggagcaacttaatctccttttagagcattcttattttgtgagaattggaggacatgctggtcatggtagcatattttgcaggaaatcaattagctgatatatctgggcatggaccccctaaactatgtaatatccccgtttcatcaatggtttggatct

SEQ ID NO: 283482 - DNA, 1200 bp, Zea mays
cctacgcgtccgattttagatcaatggaaaaactttctggaacgcgttgatacaaaggtaactaatgatgaaattagatattgggcatcctaccgtggccaaacactgagccgaactgtacggggaatgatgtattacagaaaagcattgaagctacaggctctcttagacatgacaaatgaccaagatttatatgaagcacttctagcaattgagcaaggaaaaaataaaagaaatatccaccaagcattagcagctgaactagaagcacttgcagatatgaaattttcatatgtcatttcatgtcagaagtttggggaacaaaaaatcaaaggtgatccccatgctcaagacatcatagatctgatgatgaggtgccctgctctgagggttgcttatattgaagagaaggaagtcatagtaaataactgttctcatacggttgaagggcaggaagtcatagtaaataactgtccccataaggtttattcatctgtgttaataaaagcagagaataatttggaccaggagatttaccgtataaagctgcctggtccacctatcattggagaagggaagcctgaaaatcagaaccatgcgattatcttcactcgtggagatgctctacaaacaattgatatgaatcaagacaactatctggaagaagcttacaaaatgaggaatgtccttcaagagtttgtaaggcatcctagggacaaagctccaactatccttgggttaagagagcatatcttcactggaagtgtttcatctcttgctggcttcatgtcatatcaagagacaagctttgttacaattggacaaagatttcttgctgaaccccttagggtacggcttcactatggccatccagacatttttgatcggatatttcatttaacaaggggcggcataagtaaagcgtctaaaactataaacttaagtgaggatgtgcctgctgcgtatcactccatattgcgtcgtgggaatataatttacagtgaatacattcaagttggcaaagggcgcgatgttggtcttaaccagatatccaaatttgaagctaaagtggcaaatggcaatagtgagcaaacaatcagtcgtgatattcaccggctaggtcggcgatttgatttcttcaggatgctctcatgttattttacaacagtgggattttactttaatagcctaatatcagtt

SEQ ID NO: 283483 - DNA, 574 bp, Zea mays
tggaagccacgatggtgacttctgtgctgttgatgtgaagaaaatggaagtttcccactggagcaagaaggtccatcttggctccccagtcacctccattgaattttgtcctagtgaaagggttgtaatctccacatcacatcagtggggagcagagctcacgaaactgaacgtgcctgccgactggaaagaatggcaggtctggctcgtactcctggcgctcttcctagcctccgccgtcctgttctacgtgttcttcgagcgatcagacacgttctggaactttcccatggggcggcaccagccggcgaagccatggaacgtgctcaaggagtctcctccggtccccgaggaccagactccatggtgatggtattgcttccatcgcgtcatctgtgaagagaagagcgatactgtcccagacccaacaaagccaccgcgtgctgtttatcttgttacaattataaatcgtccatgcttgttctaccactctcagccagtgaccacgcaagtttgtaaccctggactgtcataaaccaggtgatagtaattgaacacattctgtcttcgtgcg

SEQ ID NO: 283484 - DNA, 691 bp, Zea mays
atctgcttctgcttgtgatgctgctgacatcgaatcaaagctgctaaacctcggtccatccatcacccgcggcgcgacacacccaaaggcctctccctcccgtcccgtgtcccgatcgcaccgcaccgcaccgctccccacgatggcgtcgcacatcatcctgccgccggacgacgccgacgagaaccacaaccaccagacggcggcggcggcggcggcggaggaggaggaggaagagcgggacgagctggggcgcgacgacgacgacgacgagcacggggtgccaccggcgctgccgcccaaggcggcgctgccgttctcggccacgtgcgtgcggatctcccgcgactcgtaccccaacctccgcgcgctccgcaacgcctcctccgtcagcctcgctgacgccgcctacgtcaagatctccgaggccgactttggatacgtcctcgacgacgtgccgcacttcaccgactacctccccgacatcccgacttatcctaatccactacgggatcatccagcctattcaactgtcaagcagtattttgtcaatgaagatgacaccgttcctcaaaaggttgttgttcagaagaacagtcggcgtggtgttcacttccgtcgtgctgggcctcgtcagagggtttattttggcaccgatgaagtgaaagcctgcattgtaacttgtggaggc

SEQ ID NO: 283485 - DNA, 486 bp, Zea mays
tcgcttccaactggcggcggcggttcataccctcgcgaagaccactagggccgccgccggcgaatctcaagttctcaacacctggcagaagcaaatcggcgtggcactcgccgggcaccgctcccttctccctccccccacttcccagttctcgatcgtctcaactctgcgggctgcggttccgcctccgcctcctgacgacctcgcccacacgaccgctgcccgcttcggtcgtcgcccacaccgccgttctctcccccgggtgcccataaacccccttctccgcgccatcgttggcccggcgtaaccatctccgctgcggggacgaggaggagcaagcaaacaggaagcagccgagtatcttgccagtatattatatgcgttgaggtggcattgctgatgaaagtgaagacatgaggctcgaatgaaccctaactgcccccgccaaaaccgcgcgtcgtagcagtcactgactcctccagtcaa

SEQ ID NO: 283486 - DNA, 484 bp, Zea mays
cccacgcgtccgcggacgcgtgggcttgaccaagggctcctgacgaaggctttcatcttcggcgtcgcgcggaaattcgtcgggcagaggaagacactgtagcatctctggcatttatttctcagcgtcgtccgcttggcccgtggtccgcactaaccggacctgtcctttcactgtcgtagagtggaggatagaggtggttcagtgtctgcctaattggggcaaatgccattgaccattgtggctgaaagagaacagagctgatgaaaaacattttggtgtacagatatgctgccggctgttggatagcgaggaatggggaatagagcaaacaatgtacttctcgtttggagaacggaactcctacgatatatataaatgtgtttcatctaaccttgtatctcagccaagaacagatcagatgcctgtgcagatgagaacaagcatttttctatgtagcttactgcggcttcggcttctcccc

SEQ ID NO: 283487 - DNA, 654 bp, Zea mays
cctacgcgtccgcagggtgccctatgggaagcaagctccttataacgtgacggtaactttacttgttccggggaattatcaaggagataggcgcattgttgtcagtggtgtgtatcatcaaccagggaagcaacggatgatgcttcccactgttcctgttagaactactggaactgtggtcgtggagatgatcgataaaaatgggctgtacttctccgacgagttctcactcaccttccacatgcattactataagctgctgaaatggcttctgctactgccaatgcttggaatgtttggtgttctcgtcatcttgaggccccaagaaggtgcgccgctgccatcgttttcacggaatatcgactagtggtgaaatgccggtgacccattgaagctgacgaagtgactccccaacatctccatgacctaaatgtcttgttcagtgtagtatcccaacagttaaccatttcatggattatagttatattttttacaatgtacccatttagttctgcagaacaattttgtacacagccattttcaatattggctcacccaaagaacaagcatattgtcaccattgagagtttacagtaggccttggaaacggtaattgtcagattctaagagaagcgacactcggagaggagaagc

SEQ ID NO: 283488 - DNA, 662 bp, Zea mays
atcgacgagtgcacaaaagctagggagagagagagagagatagaggagggcaagcaataagtgccctgcacgtccttgctttgtgtgtgagacagtgagagagagagagggagggagggatcagagggaggagaatatggataggggagtcgtccacaaatcatcggcggctctagtgcgcgagatgggggaagcaggccatagccatggatggtggagcatgaataatttgctgaggcccccctttgagcagcagcaccacgcttctcttttcatgccgtccacaaccaccagcagcagcaccgccgccgccgcgccctcttcttcttcgtcgtcgtcgccgcctctccaatccttctcctctctgctgctctcgaaccactacccgctgcctaccaccaccagcacgtcgccgtggcagcacgacaccagcagcaccagcagccatggccagccggattcttggagccagctcatacacactggcagcaagccaagccagatggcgtttccaactacgatttgttcggaatccggaggcggcggcagcagctacgtcgtctacggtgccgcagcggctagccatgggagcagcacaagtgatgtcgagatccagttgccatggggaagcagcagcgtactccagcagcagcagaaagcgt

SEQ ID NO: 283489 - DNA, 545 bp, Zea mays
tcgtgttgacccaatcatggcagctaaggcctataagtataaagcagaaatactttttaatgaatacttgctagcagattcatatgttctatacacttctgtgctcgcggggctcctgatgtgcaagttgtcgtatgacttcacacacataatcagttctgtctacttcaaaggttatgcctctcttgcaaagatgaaaaaaattgaatggaacaacagaggaatgtccactgtccatgcaatattcattacaatgatgtcagtatacctagtcttcttatcagacttgttctctgatcagctggaaggtccagtaacatttcgcagttcacacctctccaatttaacattgggggtctctgttgggtacttcattgcggatcttgcaatgatattttggttctacccttctcttggtggtatggagtatgttctccaccacatcctgtgccttgtttgtgctgtatattctatgctttctggggaaggacagctataccccatacatgttctcatcttttggactaccaccccgggaattaacc

SEQ ID NO: 283490 - DNA, 482 bp, Zea mays
  unsure (1)..(482): unsure at all n locations
tcgctccccctccctcactcccgtttcattccattcccccccagacgccgctaccgccgccgccgcacgcacgcttgccccgggatctggagatctggtagcgccagggggatggaggccagcgccgggctggtcgccggctcgcacaaccggaacgagctctgtcgtcatccgccgcgatggcgagccggggccgaagcccatggaccagcggaacggccaggtgtgccagatttgcggcgacgacgtggggcgcaaccccgacggggagccgttcgtggcctgcaacgagtgcgccttccccatctgccgggactgctacgagtacgagcgccgcgagggcacgcagaactgcccccagtgcaagacccgcttcaagcgcctcaaggggtgcgcgcgcgtgcccggggacgaggaggaggacggcgtcnacgacctgtagaacgagttcaactggagcgacaggcacgactcccagtacc

SEQ ID NO: 283491 - DNA, 526 bp, Zea mays
  unsure (1)..(526): unsure at all n locations
tcgctcgagctgagatacgtgagtggtgngctgacaagttctcctatgaaaattacaaggcgatcaactccaacactgtacatgtggaatgatatgaatgagccatccgtcttcaatggccccgaggtcaccatgcccagggatgcaatgcattatggagatgttgaacaccgagaattgcataatgcatatgggtactactttcatatggctaccgcagatggacttctcaagcgaggcgaggggaaagatagaccctttgttttgtcaagggccttctttgctggaagtcaacggtatggtgcagtctggacaggcgacaactccgcagactgggatcacctgaaatcttctatcccaatggtcttaattcttggtcttactggtttgcctttctctggcgcggatgttggtggattttttggaaacccagaaccggacctgttggtgcgttggtatcaagtaggagccttttatccttttttaggggtcacgctcaccatgacaccaagagacgtgagccatg

SEQ ID NO: 283492 - DNA, 711 bp, Zea mays
tcgtgcctgaggagagttggcaagttaaactatcatccttcttgtgtatcaaggagttatgcctcaaatttcacaattctggtgatagtaacacatggcctcaagacacagcttacttggttgaggagctatttcatttggtatcaccgaaattagtagactccataagattagtaaagattgctcaggttcacgttgctgcatcggagtgccttcttgatttgagcaaactgtacagagacttcccgctgttgaacagaacagaggccaagttcgaggatgaactcacagagctctgcgagtctgaaaaaagcgaacaagcaaaggcgattctgaaggaatgcctggccattcttaaagctctccctggagtaaccatgacggattagaaaccagaagagggaacacgcaaagttctcgtggtgattgtaaactcgttccgatacatagtattcggatgtatgcatgtggtacagaatacggcatagttctccctccgttttgtgtcatatggcaggggagataggcgcatgcttccattagttttgctaatttactgcctagatccttatccttaaccgtgatattctgatacatgtgcttgtaacaaacacgagattgtccggcagcaaaacactgttgcagcagcatttgttgtctagatcgttaacccagatattctgatacattcgcccgtacactcgtttccgc

SEQ ID NO: 283493 - DNA, 456 bp, Zea mays
acagagacttcccgctgtcgaacagaacagaggccaagttcgaggatgaactcacagagctctgcgagtctgaaaaaagcgaacaagcaaaggcgattctgaaggaatgcctggccattcttaaagctctccctggagtaaccatgacgacggattagaaaccagaagagggaacacgccaaagttctcatggtgattgtaaactcgttccgatacatagtaaagttctcttggtgattcgaaactcattcggatgtatgcatgtggtacagaatacggcatagttctccctccgttttgtgtcatatggcaggggagataggcgcatgcttccattagttttgctaatttactgcctagatccttatccttaaccgtgatattctgatacatgtgcatgtaagaaacacgagattgtccggcagcaagaaactgttgcagcagcatttgttgttt

SEQ ID NO: 283494 - DNA, 437 bp, Zea mays
cgcagagaaaccctttccactcagattcgttcggttcggttcggttccgaccacgcgggcgcgggagagagtggggagatgagcgcggctgcggaggacgcggctgcggccgaatggtggatccggaggcgggagcagcggcgcggggtcgtcggaagggggcgcgcggcgccggttcgacgacaagggcctcgtcgcccgcacctcgctcatcctgtggcacacgcaccagaacgacgtcggcgccgtgcggtagctgctggaggaggacgccgcgctcgtcaacgcccgggactacgacagccgcacgccgctccacgtcgccgcgctccacggctggcacgacgtcgccgagtgcctcgtcgccaacggcgccgacgtcaacgcccaggaccgctggcagaacacgccactagctgatgcggagggcgcaaaga

SEQ ID NO: 283495 - DNA, 373 bp, Zea mays
atcgttccattcccctctaaacactagccgcctagcgcctcgatccgagcagccctaggtctcgcggaggtagttctggttgatttggtccaagatggcggaggaaaaggtggggcggatcttcgtcggcgggctgtcgtggaacaccacggagcgcacgctcgagcgcaccttcggtcagtacggcaaggtcatcgaggctcaggttgtagtggaaagggagacaggccgctctaggggatttggatttgtcacattttcagaacctcgggctgtggatgctgccattcggggaatgcataacggagaactggatggccgcaatatttctgtgaacaaagctgaacctaggaactctgatggctatggatat

SEQ ID NO: 283496 - DNA, 428 bp, Zea mays
gagaaatctctcgcctcccgtcggagagtatcggtgaccgatgtgtcccgacggcggcggaagctgagggaggtcctggcggcgtcgtcagctcaggggtggcgctgtggcaacctgcgcgcgcgcggttttggctaccgagaggcgggtcgggcgtcggcgggatggcggcgtcgctgaggtggtggtggtcggcggtggtattgtcggtggtggtcggcgtgagcccggttgtcgccaacacggagggtgatgctctatacagcctacgacaaagcctgaaagataacaacaacgtgctgcagagttgggatccaactctggttaatccatgtacatggttccatgttacttgtaaccctgataacagtgtcatcagacttgatcttggaaatgcacaactatcaggtccattggtgccacagctt

SEQ ID NO: 283497 - DNA, 428 bp, Zea mays
gctagcagcacgggatccaaaatccaccacgatgagcagcggtggcgggcggaaggcggcgggccccggcggcgaggaggcggaggtggaggcgcttatccgggcggcgcaggacgcggtgctcctgaagctcaaggcgaactcccacctcgtctcctcggcctccagccctccttcgctcgacgcggcggagctcgatcccctggacagcgacctcgcccggcgcttcgacgcgctcaagtcccgcgcggcggcgccgaatccgaaggcggccggagccggagccgcccttggagggatggatgagctggaggcgcggttcgctgcgctgaagggggcggcggggcccgagaaggacacgagggtgaggctgcaggatctggaggggaggtcgtcggaggacgaggcggacgaggtggacaaggtga

SEQ ID NO: 283498 - DNA, 445 bp, Zea mays
ggaaaaggaaaatgataaggaaaaagaagaggaaaatggaaatgagaagagcaaggaaactggaaatgagactgaatatgaaaaggtgaagaacataaaactggttcacatagattatattttggagaaggctgaaactggcgttcacttcgttggcaatgtcatgcgtagcagtagtcagataaggcgggcacactgttggtttccttgtgttgatactgccacacaacgctgtccatttgacctagaatttacagtcagcacagatttcatcgctgtcagcaacggtgacttgctttaccaggtcttaagtaaggaagatccttcaaaaaaaacctatgtgtataaattgaacactccagttagtgcacagtggatatccttggttgttggtccacttgaaattctccttgacagaaatgacataaatgtgtcacacatctgt

SEQ ID NO: 283499 - DNA, 530 bp, Zea mays
cccacgcgtccgattttattcaatctccatctggatgcgtgtgtgtgaccggtgagcgagacagattccacagcaatttgctcctcttccacgcacaggcaagactgctccccagaaaagattgtagttttcatcgatttagccggtttctgcccgggggatcgctgctggagatctcagagaaccgggaggctccgagcttttgctccgtttgcgtcgaatctgcctcgggagcggagaaaggagcggccttccgagctcgtacgggccgtccctgagaaggcgagaggggacgcggcggcggcggagtcagctctagggcgctcgtggaagtcggtgatgcccgtggtttgaggacgaggcggcctcggtggttttgaggaagccagcctctgccgcggcaaggatggactccagcggggaggaactcctgaagaagatccgggaactggaggttgggcaggcgcagctcaagcaggagatgtctaagctaatacccggcgctggggagcgtcggcgctcgcaatccg

SEQ ID NO: 283500 - DNA, 960 bp, Zea mays
cccacgcgtccgcccacgcctccccacctctcctctcctgtgcgctacagcgagggggaaggggagcgtcgaccgattcgtcccggcctcccgtcccgccgctggcctcgcctgccccgatggcggcggtggcgatccaccagttcgccgagtgcatcacctgccacgcctggagcccggaccagtcgatgattgccttttgtccaaacaaccatgaagtacatatctataaattcttcacagacaagtgggagaaacttcatgttctgtcaaagcatgatcagatggtttcggggatagactggagtaattcatccaacaaaatcgtaacagtttcacatgatagaaattcgtaagtatatgtcaaagtgcaaatttctagaagatctatcttgtttcttactctggcaggggataggtgggtacatatatatattttcatttgacctcagatatgtttggacacaagaaggatctgattggatacctactctggttattctaaagttaaatcgtgcagctttatgtgttcagtggagcccaaaagaaaacaagtttgccgtgggaagtggtgccaaatctgtgtgtatttgttattatgaacaagaaaacaattggtggattagcaaggttatcaggaaaaggcatgaatcttctgtcactagtcttgcatggcatccaaacaatatatatcttgcaacaacgtctacagatggtaaatgcagagtgttctctacttttatcaagggtgtagacacaagaggatcaaaatcgagcacttcaaccgattcaaaattcggagagcaaatcgctcagcttgatctatcatctacctgggtatttggtgtaaggtggtcaccaagtgggaagacattggcctatgcagggcacaactccatgatttatttcatcgatgaagtcgaatcatctcctgtggcacaaaatttggcactgtgtgat

SEQ ID NO: 283501 - DNA, 482 bp, Zea mays
gtgggttcttgctgaagcatttgacatcactccacccaatttggatgcattacattttggtgagaattcaagttcatcggatttggtttctgacttgttccggcgtgaaccaaagtgggtgctggccatagaagacaggtgtaagttccttgtacttggcaaggtgagaggcagttcttcaagcaatctgaaactgcatgtcttttgccccatgatgaaggacaagagagatgctatcagtctaattgcaggccggtggaagctttctgttcagtcggcttgtcgggagcctaggtgctttgttaccatccatgtcacatccaaatcaaaaccgcctgctcgcatccggggatccaaggctcggtgtacctgctacagctcgcccatccttactttgatccacttgttgcacatggatccgaggctggtcgtcgccatgcttgacctgccacgggatgctgatgtcaatgctctagtcctaa

SEQ ID NO: 283502 - DNA, 490 bp, Zea mays
tctttgcggcctgctgctttcacctccctctccctctcgggctctctcctaacatctcgagctcgatcgcaagccctcaccccctcagacactccttccccaccaccgacatacgtacatgaagcacccgagagacgccggcgccgtgccgctctccctcgcgctgtccctgggcggcggcggtggcgtggccaccaagcacggcatcagcaagaagccccggcgcgcgccgggcggcgagttcgtctgcaagacgtgcagccgcgccttcgggtcgttccaggcgctgggcgggcaccgcaccagccacctgcgggcccgccacggcctcgcgctcggcgtgcccgccgccgcgccggcgaaggaggataccgcgacgaagccggcagcggcggaacccgcgcccgcgagccacctgtgccacgtctgcggcctcggcttcgacatgggccaggcgctcggcggacacatgcgccgccaccgcgaggaa

SEQ ID NO: 283503 - DNA, 659 bp, Zea mays
ttgtagaggatgaaagtaaaccaaaggatgttgcaaaacaaactgtgaacggtgatgttacaatagctgatgaaggttcacagaagagccaggatagttctagtaaaacaaaaccaggaaaatctgtccttattaagcaagaggaaagggaaactggggttgtcagtgcgagggtcctttcacgttacaaaaatgcactgggagggatatgggtggtgtccatactcttcttttgctatgcactgactgaagttcttcgcatttcaagtagcacatggttgagcatttggactgatgagggttctctgaaaattcatggctctggttattataatttgatctatggaattctttcctttgggcaggttctagtcacactctcaaattcatactggttgattatatcaagtcttcgggcagccaaaaggcttcatgatgccatgctccgatcaatattgagagctcccatggtattttttcatacaaacccacttggacggatcatcaacagattttcgaaggatatgggtgacattgaccgaaatgtcgctgtatttgtcaatatgtttatggcacaaatatctcagttgctctcaactttcgttctcatcggctttgtcagcaccatgtctctttgggctatcatgccactcctgatt

SEQ ID NO: 283504 - DNA, 465 bp, Zea mays
ttgccacgcccaaactccatctccatcacctcgcacttatcggtgaaaccgcgcgatgactacggcggcgcccgcgctgcccatgttcctccggctgtgcccggcctcgcccttcctcctcccccccagcctacacgtccccagctcaaggcgccccactccgtcgcgcctgagctcttttcgccctgcaaggccactcttccccatctcagctgtggagaaaaccaacgaggctgctgcggctggggagggtgagctcgaggggatgccgcccgagttctacgacgaggagtggcaggcccgtcagcgggagaggactaaggagtggcatgcatatcggcagaaagaggaggccgaggaggaaagaataacaaatgagtaccgagagataggcatgcgcctgaaagcttatccgcagaagaagttcgcaagctaggattttagtttaagtttcataagagctgg

SEQ ID NO: 283505 - DNA, 483 bp, Zea mays
gacgcttcaccatcggaaaggccacagctagggttcgatacttcgatccccactccatctccaccgaagaccgtcgcgtcgctccgccaccgaagcagctcaaatttctctataagatgagctggagatttcctctcttcggctctcagcagcagcaagcagatccaagtttccaggacatccctacgcagtcttggtaccctccctcggtggtaggttcctcttcacgtccatccacccctacctcttctagtgctagtctacaccaaagagcttcagatagtccgcagtcttcatcccgtgggcaaccatctcctgctgaggctgcagggataattgcccgtttgaaggataagagtattgaggagttacaaaggctattgaaagacagagaggcatataatgcattctttaactcacttgatcaagtgaaaacccagaacaatgtgcgtgatgagcttaaaaaagagaccatgcaacttg

SEQ ID NO: 283506 - DNA, 679 bp, Zea mays
  unsure (1)..(679): unsure at all n locations
tcgcttacgcgtccgaaaattgttagaataatctatttagttgtgtgcacaggagtcatcttttgtgagtggttcattactgacaagtcctgttggtgagactctgtcaacatcaatgattcaggaaatatttcttcttgctaaggatgctaaggataagcacatacaagattatgctgcatgggctatttcatttctcagaagcaggtggtcgaagaatcagaatcagattctttatgaggacaatggttctaatagaagtcctgatgatcatgatcaagcttcaagtttttctgaacaaagcttgtttggaacttaagtctctggttgagtgatctaaaatttgaaaagtctggtgatgtggtgccaataagtacagttggaacagttttaaaatgcctttccaaagctccccgattgccaactacagactggggagctattgtacggaggtgcattaaagctgaggcgcagatttctcataagttaaccaatcaggaagatcctaagatactaaaggaggcatgcttatatttgactctagctcatgctgctcacataagtcnccttctgcagtttttggatgatctgactgacatactcagattccagagattagatataaatgttcagtctattttgctgcaacatttgttacacctaatgaagctattctctg

SEQ ID NO: 283507 - DNA, 522 bp, Zea mays
cctatcgcgtccgcccacgcgtccgtgaagatgcacaggatgatactttagaaaatcaagttcaagacgagaatgtagaggataatcacttactggaggatgggcatgatttgacgaggtatgatgtgaacaatgaggctggtgagcatgcacatgataaccacctggtgaaaaatgcggaaatacttctaaatcatattatggttgcatgtatatcagataattgccatatgaacaatgagaaaatgcttctaaagcaaaatgtggatgagcaacagatggagaacgagcagatgcttatagatcaggtcactagtgttcaagttttggatattcaccatgtgcacgatgaacagttactggtaggtcatgctgcagatgatcatcaccaaatggaaccaaatcccatggctttttctttgggtgttcatgatctggataactactatctgagcagcaagcaaatacttctgtataatgatgtaggaggtatacaccatttgaaggatgggcaaattattt

SEQ ID NO: 283508 - DNA, 324 bp, Zea mays
agaggagctgacccggccgctccgggaggcggaggagttcctgacgacagtggaggcgcactcaactccattactaacaccgggccaaccatgggagctttcatctcttcagctgcagctgcagataaaactggagtcgtcgatatgtccgacgatgaacaagaagaaggcagcggcatggaggcagaagtagccctgggcatcgatccttgctccgatgacaaggagctcaagaagcagctcctcaggaaatacagcgggtgtttgggcaacctgagaaaggagctgtgcaagaagaggaagaaagacaagctccccaaggag

SEQ ID NO: 283509 - DNA, 296 bp, Zea mays
  unsure (1)..(296): unsure at all n locations
cgctccnatagctatggcgactgtgagtatcgcaatactgtggctttccctgcgggccgcatcctcagttcaggagcatcacggccacctccagtgctgcggccagcacgaccactgccggatcgccccagtgcgacgacgactgcccacatcgccatagacctagcgctggctggcgcggaggagcgagccatattgcagcacatcgacaactatgcaagagacgcagggcgtcgcggacatcttcaatcaccagtgcttggctcaggtgtgtctgctcaggaacgcccagatcc

SEQ ID NO: 283510 - DNA, 531 bp, Zea mays
cggacgcgtgggcggacgcgtgggcggacgcgtggccgcgatgtcgcccaagccggcgaagccgacacccgccaccgagttcgagtactgcgagctgtgccgccatcaccacgaccatggccggcgccatcgctacatcgtcaagcacaggagaaatctcgacgccgcgctcacctgcttccgctccaagctctccgacctccgccgcgccttcctccccggctccccctcttcccagccgccgtcggacccgtctctggtgccccttctgctccattgacctcgtcgacctcgacagccgctccgctggtaacaatgccatttaccatatggcaagcagtgagcacctgaagggtgtgaaggatttcctgtggaagcacgggggacggatggatcacggtggtctcgcttaggatttcagaggatgtgcttgccaagtgggagaaaggccctgaatgctagagcacaggaacgaagaagggggactgagagctgattgaccatctctgagcagataaagcaatgggcata

SEQ ID NO: 283511 - DNA, 559 bp, Zea mays
gttcgtggagtcgtctcggcggcggcggaacaagccgggaacctaccgcaaagggcgccaccgatgctaaagccacagacgtcgtggacagcttccctccctctccttctcatccgccgctgctcgagaaccgcggccagtccatctcctgccggtgaccggccgctctcctttgtcccggtctgcaagcggcggatgagcacgctggcgcatcccaggtttgcccctctccctacggagcaaactgaatcccaaacagatggcggggctgcacggtaccagttccggctggtctcttacaacatcttggcccaggtttatgttaagagtacgctttttcctcattccccatctgcgtgcctcaagtggaaatctcgatcgggagctatttttacagaactaaagagctttgatgctgacttcatgtgcatacaggttgttttatataaaagtctgccgcgtttattattactttggtttcattacagaatttgtttgttttactattatatatattaattatttatattctatactaaacttcaatatttattatatt

SEQ ID NO: 283512 - DNA, 644 bp, Zea mays
attcctcggtaatttattgatggagactcaaggaataaatgtggagatggatcagtggagaaactcggttgacagtgctctttcttttattgatgaactctttcagaatctctgcatcatggcacaaggcattcgtgaagtaaatcactctgctcatgaagatagtgcacggtcctgttctgtgatcagggactatgaaaaactatcaacctgtttgatggacaaagtttacaaacttgaattggagaagaaactattggaggaacagtcccaagaccaacaaaatgagatttataagctgaaggccaatctggaaagctgtgagaaggccatagatgactgtactcttcaacatgaactggagaaggatgccattcttttagagctcctaaacctccagaaggaagtatctatcttgtcatcatcttctttgatgaaagaaaaggaatctatccgaaaggaacttgatagaactaaagcaaagttaagagagacggaggacaaacttaagaattccattcaggagaaaacaaaacttcagagtgagaaagcagaggcccacaaagaaattaagaaattgcaaagccagagaactttgcttgaacgtgatttacggaaacgtgattcagctactggtgacaaaa

SEQ ID NO: 283513 - DNA, 403 bp, Zea mays
gtgaaccagtgcagcgctgcaggccagcgtggaaactggaaaagctgcctccgccaaatccaaaccaaacgggacggtcgccggaggaagcatacccgaaactcccctcccctctccttacaataccgcgacgcggcggctgacgtcgcttagccgctttcccacaccttcgccgccgcctatactcctgcagaaatagccccagggagggcggttgctgctgcttcgtgtgcggtgttccttcccccgccgcacgcgggatccatttgacggacggaccgaccgagcgacccacccgtccaccgagagccatggggcagaggcagagccacagcaagcgggacgggagcagccacgggcggcggtcgcgctcctttcagcagcagccgtcggcgcagtgggg

SEQ ID NO: 283514 - DNA, 723 bp, Zea mays
attaacgcctccacccacctccgggccgcccccgcccccatctacttttattcacgccgatcgggcacttgcttccaatacagcgccggccgggccgttgcgtccgtccatcctcatccccatccgccacccaccccgcgcccctccttctcactccagtgctggctgccggccagctccgcccccggggtccttgagctggaggtggcggtggatgaccagctctcggagctttctgaggcgaggatcggagggcgttgcgttaggtccgcggttggtgagcggcggtcggagcggtctcgcgcgcggcggggtcgttcgatgacgcaggaatcgcgctctgggagggtgggaatacctcgcgctcgcgctcaaggtgctcgattaatttactgcctgaggctgagggggggcgcgcctgtgagctgaaccgttcccgctgcactgactcctgagctcgggaaatggttgggagcgtgcacgtcaatggatcggtccacggcggcaatggcacggccacggaggagcggctggacgagctgcgccggctgctcggcaagtcggagggggaccttctcaagatcgtcagcgtcggcgccggcgcgtggggcagcgtcttcgccgcgctactacaggacgcgtacggccatttccgggacaaggtgcagataaggatctggcgtcgcccgggccggacggtggaccgttccaccgcggagcacc

SEQ ID NO: 283515 - DNA, 471 bp, Zea mays
gggaaggtaggatgaacgttgcgatgtcaaattccgtcacaactgcaatccgggatagcataagggacacagctattgggaaaataaggaacactgagaaggctgatcgtgctacagtggaacaggctattgacccaagaacacgcatggttttattcaagatgttaaaccgtggtgtctttaataacataaatggctgcatttctacagggaaagaggcaaatgtctatcatgcaacaaagacggatggccaggagcttgcaattaaagtctacaaaacctctgtccttgtttttaaggatagagaccgatatgtccaaggagattatcgttttagacatggttactgcaagcataatcctcggaaaatggttaagacctgggctgaaaaggaaatgagaaatcttttactagtgagggcagttggaattcgatgccctgcaccatcactactaaggctttatgttctgg

SEQ ID NO: 283516 - DNA, 1071 bp, Zea mays
  unsure (1)..(1071): unsure at all n locations
gatgtcttctcgcttcatttctggtgccaagcatgaagctgggtacgatgcatacatgactggatgcatttttgcgcagttgtgtgcttatcttggcatacaatttgagcagttctcacctctggataacctagcaacgaacactaagctgcagaaacacgtcaattttttgtcccctagctggaacagtggaacagtgcttgatttgagcactggcatggagacaccagatccaggttatacgagaaggtaccctgctgctgtgtatgataacattgttgtcatctggggattcctgtctaaggttagaccgaaggaaattaaggattgcatctgcaaagtatttggttcaggttcagttacaaccgtcttctccattgattccactgctgcccttgtgcagttcaagaaacaagagtctgtaaacgatttcttggatttgaaggctgttttggagagggcagatagtgctatctcaattctacaccccctgtcaactatattggaaggaggccaaacacgagctgcgaagtatgatacctacagagacatctgcagctcttctgaatcaaaatatctctttgctgatcaagctgaatcagtctgtgcaacttcaaagaatcaactcatagaaaatgttgatggcaatcttatatctgatgttcttgatggagtcgcactcgcctctgtaaccgaggaagatggaataataccgagttccaagaatcaaaacgttgctgaagctacatgttaggatatagcttagatgctctatacgaatacgatggcaaagcattgtttgggcagacgaatgtgaagctaattactaccatcggcctttttcagcaggttattggcctggccttctatttgaggctccctgactaggccaatattttgatgggtattctttttaccagtatctttaggcacagtgccatctctagcatccgcacggtgcaagctctgacctacagagtaaatctacactcatgcagggaagcattgttcttacggccatttcctaaaatgattaatgcattgttaataaaaaaaaaaaaaaaggnanaa

SEQ ID NO: 283517 - DNA, 756 bp, Zea mays
cttaagcttattgagcaaagtgacacactttggaagttaaaggatggacttaagactcatgtatcggctgctgaattaagggatatgcttgaggctaatgggcaggatacatcaggaccagaaaggcacctattggatcgctgtgcggatggaatgctatttggagcgctgggtccttgcccagtctgtgctaatggcatgtactattataatggtcagtaccaatgcagtggtaatgtgtcagagtggtccaagtgtacatactctgccacagaacctgtccgcgttaagaagaagtggcaaattccacatggaacaaagaatgattaccttatgaagtggttcaaatctcaaaaggttaagaaaccagagagggctcttccaccaatgtcacctgagaaatctggaagtaaagcaactcagagaacatcattgctgtcttctaaagggttggataaattaaggttttctgttgtaggacaatcaaaagaagcagcaaatgagtggattgagaagctcaaacttgctggtgccaacttctatgccagggttgtcaaagatattgattgtttaattgcatgtggtgagctcgacaatgaaaatgctgaagtcaggaaagcaaggaggctgaagataccaattgtaagggagggttacattggagaatgtgttaaaaagaacaaaatgctgccatttgatttgtataaactagagaatgccttagagtcctcaaaaggcagtactgtcactgttaaa

SEQ ID NO: 283518 - DNA, 659 bp, Zea mays
ctctcatcaccaatctggaggggagcgatctgtatcgaccatcttgtatcttgtgtcacttcaagatcttaccaactgcccttttcgggttgttgatgagataaatcaaggaatggaccccataaacgagaggaaaatgtttcagcagcttgtcagagctgccagccaaattaacacgccgcagtgcttccttctgacgcccaagctcctacctgatctggagtacagcgatgcctgcagcattctcaacattatgaacggcccatggattgaggagccagcaaaagcttggagctccggtgattgttggaggacagtggtcagcgcagctggacactgagcgccgagtattttgccttggaccgtaggaggcttgtaaagtttagcgtgtagagctggatgcagcttttgggtggttaatttaagtttgtagttgtactacatgtaagtttaggaaagttaaggtagctggtggcattatcaatgtggaaccagatgttgagctgctcaaatcacttggcagcccttttgacacgggagggtaaggtactgtggaatgatccctaccctgtaccggccagtattcctggaagtgaccagtttacttaagtaattgttttgcagcggaaatgcagccggcatgcaatgtctgtcccccc

SEQ ID NO: 283519 - DNA, 488 bp, Zea mays
ctcacgcgttttgagcagtttcagaacatgcatcttgttcgaccacccatgcagccttcatgggctcctcctcaggatctgccaaatctccaagatgatattacgaatcagatagagttctatttcagcacaaataatctatgccatgacacattcttgagaagacatatgaacgatcaaggatgggtacctatcaacctaatcttagggttcaatcggatgagggcatttacgagcttggtggacaccaactacatattagatgctatccgtggttctgagttattggaagggcagggagataatgttcggaggcgcaatgattggatggaatggctacttcattaacgctgtccactagcaaatcaagctaagatgccaaaatgcagccgcctgctatcttaggggaactgaataaaaagcttgtgggaaattctatggaggagtgctgcagattgacacatttacatgacaatctccatgcatgc

SEQ ID NO: 283520 - DNA, 560 bp, Zea mays
gagagagagtagggcgcaggtgcgaaggggcccaaggagaggcagccatcatctgctcctcgtgatgcgcgccgctcattgctgcagagcgctgccgctttcgccccacttgaagcttcaactccgcttccccagtcccgccgccgtttcggcctaaaactcccgcaaatcctcgcccgccgcacccagattctccaggtgggagcagcgcgccgccgccgccgaccgaacgcgggccgcaccgtctccccgccaccgcccgcccgcagcccccgctgccgccgccgtccgggctccgtgatgccggctctcgacccaggaaagcggcttccctgttcgcccaagtgcacgcgactgactgccggtcctggtgccttgagatgcggcagccgttctacggccggcctcccgtccagatgaaggtgcagctggtggaacaggaaggctccaggggatggggtcttccgggtgcgcggagatagtcgagctggcggacgacccgaaaggtgctcgtcctgcgcatctgaaagtgaggggtcacgcccgtggggcaggaggat

SEQ ID NO: 283521 - DNA, 773 bp, Zea mays
gttactctcaatggccgacgatcccctggactcgtcgccgtcggcgtccgccgccgccgctgctggcggagtctcctccggtccccgcccagcgctccggccccggcgggatgcatttgagtacggcgctcggcgaggacggctcggggagtgctgacctccgcgacctgcttcttttcctctacatccaatcctacaagcgcctcgtgccgcgcgtgcacaaggactcgcccgccgtcacggatgtttggccgtcgacctccgccttcgatggatacctctccgcgctgtcgccgatccagtttgtacggagcaatagtcgccgttttatgccttcacaagcagatgaagaagctcatcagctatcgtatttacaaaagcatatggccaacattctaacacttttagcagattctattgatggcgagggagatgattctatggtattgacaatggagacttttgagcaccttggattttttttgcagctctctgaaggaactccattaagccaagcagctaccttttttgcgaattcggatccagacatgcccgctgctcctgtacctgctgctttggtacatgattgggtcttgcagcatatagcttcagcattagaatttatggcagagaagactgtggcaaaagaaaacagccaacataatgcatttgatcctgatgtcacaatgtctgatgctgtcacgaatacaagaattcatagcagttcaccaactggcagttctgcaccaaactatcccgtatactaccgaaac

SEQ ID NO: 283522 - DNA, 436 bp, Zea mays
tttattccaacctcgctaggctagctaaccacaagaaagatcgcgcgctgcgagaggcgccggccatgagttcctgcgtcgccccccgcgttctcatcgtgtcgcgtcgcactgtccgcaagaacgtctgcgtcgcctccgccggtgagtaccacctggacctcatcgtgggctacggcgcggtgccggtgatcgtgccgcgcgtggcgggcgtgcacgcgctgctggactcgttcgagcccatccacggcgtgctcctctgcgagggcgagggacgtcgacccgtccctctacgagtccgctgacgacgccgacggctcgctctctccggagcagctggaggccgtgcggcgcctgcacccgagcgacgtggccatcgaccgcgagaaggactccatcgagctccgcctcgcgcgccgctgccttgagcgtaaca

SEQ ID NO: 283523 - DNA, 332 bp, Zea mays
cggctcgagctctcaatcagccagcccacagccaattaatctcgctagagggccggccggccggctagctaaccacgagagagaaaaaaaaagatcgcgattgctttcgcgcgcgcgctgcgagaggcgccccggccatgtcttcctccccagcagacctctcctgcgtcctcccccgcgttctcatcgtctcgcgccgcactgtccgcaagaacaagttcgtcgacttcgtcggtgagtaccacctggacctcatcgtgggctacggcgcggtgccggtgatcgtgccgcgcgtggcgggcgtgcatgcgctgctggactcgttcgagccc

SEQ ID NO: 283524 - DNA, 805 bp, Zea mays
tctcacgcgtccgggctattgaggatgagaagattaagcaggataagatgcataacttgtcccatattaaggacaagaagattacgcaggataatatgcagaatttgtcccatattaaggacgagcaggataacatgcagaacttgtccgacattgaggatgagaagattaagcaggatgagaggcagaacatgtcccatgctccagtggatcttcaaaccactgaccaagtaatggagaatggtcaccatgtcgagcctagtgtaccaacaactgtggaagacacggggtttccattggacaacaaagaacatcctccatttgataagcaaaatgatgttcctgagcacgagtcccagcagcttgaacacacattgaagcacgacctccctcagctggtaggggggcctgagcaggatgatggaacagactgtaaaaggcctaagctcgaagagtaggttctggatgatgctcactttattttggacagttttcctggagactggtgaactgcatacaacttggcacggagttggtgagcatggctttgccggtgccttgctgtgctgtgaaatatgccctacggctgattgcagtttacaattcgagggaggtcgtgctagcaaatatttttacgttcaaccgaacattggaatatatggaccaaaacatgctcacgcttctgataacgggtgccattggttccttaaatatgtgttccatgaaagtgaagcaaatgattttcatcccatcagggttgcatgcacctcatctcaatagcccattaaaaaaccagtatttttat

SEQ ID NO: 283525 - DNA, 456 bp, Zea mays
tgttacgcgtccgcccacgcgtccgaagatgtggaaggagcggggaaacttaaatgttcatgtggagaaggtgcatgtgaaggggatcataacaatagcaatatgtttgttttggatgctgatgattctataagtaggagagttttttgcaaaaacaaactgagcagacaataccatagttttataagaaacctatggtttacaaaacgacgtcgtgatcgtgaaagctttaccaagaggaggaaggatggagaagatatggatagcttgagaaatggaaacatgctaccttctttcaatctacctcaatctggaagggttatgtatttctggcctgaagtcattaagaggagattatgtagatctgattattttacagatcataatcatcctcaaatccgtttagtgacagcagtactgattgcacttgctgttctctgcctgctggtatctcat

SEQ ID NO: 283526 - DNA, 661 bp, Zea mays
cggacgcgtggggaagcactagcctgagcggcggcgcggaccggcgagacgactgaccgaacgagtgcgccagagagctccctgcaaaccttgccgcgcagtaaatggaacgcagacgtgcagacaaggaggaggcagaagagccgctgaggcccgaggaggaagaagatgaggaggacgaagaggaggggtgggacgactggtgctccgacggcgaagatgttggcggtgggctgctgtgtttgttctgtagctcgagtttcgactccgagagctcactcttcgagcactgcgccgccgagcactgctttgatttccacatgattgtgaaggagctggggctggatttctacagctgcatcaagctcatcaactttgtccgctccaaggttgcagagaaaaaatgctggagctgtggccaagcattctcttccaacacagaactctgcagccacttgcacacagtggagaattgcctaattgagggaaaggtgccatgggaggacgatgtgtacttgaaacctttcatggaagatgactcccttttgcacagcttgtcaatcgatgacgatgatgaagatggggactgtggagtgtcaatggaaaagggacaatattcagctgggaatgaggttttagctgaaccatgggggaacaagct

SEQ ID NO: 283527 - DNA, 980 bp, Zea mays
tcagcctgtaaattctgataatcatgccaaatatgaagatggagatgaaagtgaaagtgtggaagcacggaacacccgacatcatcaacaatatgaatcgctaaataaaaaatcaagtttgaagaggcgaaaggataataatagaagcaacagctttcatgagctacacaaggacaatgttgacattgactgcaggtttgatacagacggcactgaaaacacctcaataggtgactgggataatagtccaccacaagggggtgcatgtcaaagcagtgaaatctggtgctcgattgctaggcactaagaggtttaccaaggagaagggaagtaatggtctgtcaaatgtaaacaagaaattggtaaagatgggtaagaaaatcagtactaagaagcaaaagaatgacaaaacaaataggcagtttcaagaaaatcacaaaaaagctgacattgtggatttgcttcatgaagatgatggagatgaaggcacatacatagactgtaatgaaattcgaaaacaaaaaacagatgacgtgagagtaaaatctagaggcaaaatgcaaagtggcaagaaaaaagtcagcagatgtcaggcaagtgatggttcgcacaatggaggcaaggaaatgaaattatcaagtgacatagaagtgtgcaacagaagaggagatggaacaacggcagccaattttgaagaaattccaaaagaaaaggccgatgctgtgaaagtgaaacccaagatgcaaggtgacaagaaaaaaaccagtaaacatcaggcaggcgatggagataaaggagcaaaattttcttgcgatatagaagggtgtgacatgagtttcagcacccagcatgacctgtcgctgcacaagagagacatctgtcctgtcaaaggatgcaagaagaagttcttctgccataaatactttgctccagcaccgatagtgcacctggatgaaagggccgtcatgtgctcattccca

SEQ ID NO: 283528 - DNA, 778 bp, Zea mays
agtaaagagaacatcattggtactgggaggacagggactatgtacagggcggtgctgcctgacggctccttcctagccgtgaaaaggctacaggactcgcaacattccgaatcacagttcgcatcggagatgaagacacttggccaggtgaggcaccggaacttggttccgctcttgggattctgcgtcgccaagaaggagaggttgctggtgtacaagcacatgcccttgggctcgctctacgaccagctaaacaaagaggaaggtagcaagatggactgggcgctgaggctacggatcggcatcggtgcagcgaaagggcttgcgtatctccaccatacctgcaaccctcgagttctccaccgcaacatcagctccaagtgcatcctcctggacgaggactacgaaccaaagatatcggacttcggtctcgctaggctcatgaacccaatagacacccatctcagcacctttgtcaacggggagttcggagacctcggctacgtggcgccggagtacgcgcgtactctggtggccactcccaagggcgatgtctacagctttggcgtggttctccttgagctcgtcaccggtgagaggcccgcccacgtctcctcagccccggagaatttcagaggaagcctagtggaatggatcagtcatctgtccaacaacgcactcctccaagatgctatcgacaagtcgctggtggcgaaggacgctgatggtgagctgatgcagttcctgaaagttgcgtgttcctgcacgctcgccaccc

SEQ ID NO: 283529 - DNA, 512 bp, Zea mays
agctggagtgctggactgcagctgccagcggcatttgcgtgcagcactgcctgcgcctgctgtgccgcccagtccaatggagagggccgcgtcggtcatctcctcgctcctcggcggcggcggcggctccggggcacaggcggcaacggtgaagtccgtcctcgtgtaccccatcaagtcctgcaggggaatctccgtgccccaagcccccatcaccgccacggggttcaggtgggatcgccagtggatgctcgtcaactccaaagggagagcatgcacccagagggtggagcccaagcttgctctggttgaggtccagatgccgccggaggcctttgccgaggactggcaccctacgcccgacgaccacatggttatcagagcacctggaatggaacccttgaaggtccctctttctgtggaatgtgccacaatcagtgatgtctctgtgtgggagtggactggcgctgcttatgatgaaggtgctgaagcagccgaatggttttccacat

SEQ ID NO: 283530 - DNA, 583 bp, Zea mays
cttctggggagcaagaagccaagcccatgcagatagaaggtgaggccacatgtggtattctcgaatttgaagaagtggataaggatggtgaggatagtttgtgtaatgactgcatggttggtgttgtttcctctaatgaggaaacagagcttcctatgaaggaaagaacagatgaagctgtccccagtgttaatgttggcgagccagagcaagtaactgaggatacaagccaagatatcatgcagggtggattggccaggggagtttttataggcacaatttttgttaagccagtatcagatcctcatgttgaatcaagcctcgtacataaagtcaaggcggaagttcatttagttgatgaaatcacagcagagtcagatttgaaagctgaaaatatggtcgaagtgaatagaacagatcgtgaagttgtcgaattagaggtataaagcgccaggtactcacgaaattgggaattcttcagaagtagaaccgaaggaagagtttgagatggaggttgatgatgctgtttcattgcatgaagctgcagcttctgcatcagaaaatggttctgaagaaaaatcta

SEQ ID NO: 283531 - DNA, 674 bp, Zea mays
aggatgccgaagaagtgttgtacactgggaggcctaacagtagcatgggtcaatctttacgagaccttgagaacgaccatgcagatttccagttgacaccactcgatcctcattctgtggttggagaagctaatttgccgcagcataatgtcccatcggacagcgatctgagtcctcttggcttactttggtctgagctggaagggcgtccaaaacaacctctctcatctaatgtacttggtgtaaatgaacgtagaaatcccaagcctacaacacccaatgacattccacctgtaaacatgagacaagggccacttagcagaatgaatgaagtttctagtgtgcgcgatgagtggcctgcaaactttggtcggctggacaacatgaatgatgcaaacatttctggcagaatccatcaggttgaagcggagcatcatttgaattttgatgggcacctgctgcttcaacagatccgacgggagcaacagcaacagcggcaggagcaattgatggcccataataatttagagttttctggtgcatttcccgggcaggggtttgatcctttgaaccaacaccgacagcctatgaatcaacagattcctgatgtggagcatcttttgagaatccagtttgaacttgagcaacagcagcaacgccaactccaacaagag

SEQ ID NO: 283532 - DNA, 578 bp, Zea mays
tctttctccgcctcgaaggatctagagccgcacgtgctcccaaccaagcgccgcccgcctcgtgccctcgtccttgcgcgcgggctgcagttgttcttcaagtgccgcctccgcttcggcgcggatcgcctcccgttatcccgttcatggccggccgcagcgataagaaaccggcgagttccgccccgccgcggaagggcggttaccctcacggatcggtctatggaagttcttcggaacctcgaaaacaggatgcctgtacattctctccttcggttagcagcaaagattcactgcataaggtggtcacgcttacaccagttcaaccacagaaacctgtagactccagaggcagtcactgtaatgcaggatctgattctggagaggccccgtttgatatatgcatgagtggtaacaaatgcgctgtaaagttaaaaccatccatattcgagaccaacagagaaagaaagcagcgagacagagaatgttccaaggatgtacgtccattgcagttgagacctgggatggttctgttgaaaagattcataaagcctaatgatcaggttaaaattgtcaaa

SEQ ID NO: 283533 - DNA, 783 bp, Zea mays
tcgatttacttgtgatgaacctgcatcaccagagttcattagcgctcaggccccagctacacctggtttaatggaagagacagttccttccagggtccatgaaagtcctgttctgagtccacagagaaaggcatcaccatcaactaatgatgacactgcaaaggctgacactcctgctgcaccagcctcagattttctccattcggctacaggaaatgccagtgatgtggtgggtgctgagatgacagaacttggattggcgaaaccggtgcaagttgggtcttctgttgtgcaggactctcatgcatcggtgcaacagcacacaagtgagggtttaccatcccagggtcaagcttcacacttggaagctgctgctgataagttggtcggctctgatggtatagctgcatcggttgatgaaacggtaactgtcaatgcaaccattgaagatgtacctttggctgtaaatgattcagaaccatgtgttgatggttctgctggaccatctgtggtgaacctggtacagatggatggtccattatttgatgcacaaggtacagtactaagtgcagattttcaacatgaagtccaagcaatgcaacaagtagtggcatctaacgatagactgaatgaactatcaacttcagaatttgccgagcctgagaaaatgctgacagctcctaatgctgaattcaatcatgcgattgacttggggcagataactgcggaaaaaggaacaattgaatctgatggaagtaacataataggcagccttacaagcag

SEQ ID NO: 283534 - DNA, 660 bp, Zea mays
tccacgcgtccgcccacgcgtccgattttttttccgtcctccgccactgatcaggaccaccaatgggccatgacacttggaaatcctatgcttgggccatgaccaccaatgggccttcgccgagcatcgagaagcctccgcgcccgccgcacgccggaggaaaggaagtcaccccatccccaaattcccaaagccaacaccgccgagaaggacagagactggaagcgcaagagcaggcgccgcgcgtgctggcgatggagaagggacgtcgtgctctccgcacccgaggccgctgggtcctcgtcctcccccgcctcctcgtcgtactcctccttcgccgagaccagggtcatctgccgcgtgtgtcagaagcagttcgcgcagtacacttgcccccgctgtaacgcccggtactgctcgctctcgtgctacaaggcttgcagcaggtaggatatggtaatgtcgcacgggtgtcaacagtcttccctgacgacatcttggcaccccctggctctgataccacttgtcaggaaccacgccggagagacaaccttcagcaggttgccgacaaactcctacctcccagggtcatagtgttcaatgcactgaatccttcatgcgtgagaatgttatgaacgagcttaagcagatgcaacctga

SEQ ID NO: 283535 - DNA, 172 bp, Zea mays
gttatttgctagtacctgtgtgccttagttggtgggagtcgatctggcttacaatggggtcttgtccgagaattgccagcagaccgtgtagactgcactgttgccggtcgtgcggcccaactgcagtaagacattatgcagcagtttatccaaaaacatagtcttatgtatc

SEQ ID NO: 283536 - DNA, 538 bp, Zea mays
ttgtcgcgtggggcattttagatgcttatttacggccataaaagttttctggcatctcatatgtgactgagataagccattttagcttgggtgttggttgcctggaattaagtcactatctgttgatcctttcctttcagaaacatgtttggtttgtgtgttgtcatatttttgccacttcaccgcataagaaaaatgtcagatagtgagaagattgaagaaagacaagaacatctgcagtgttgccaattcaatcttgcgatgcaaaagtatgatgacttggggaatctacagcaatcttgtaatattgttttgaaaaccctatttattttcttgtaacatgtgcctcttgcttcctttctttgttattataatttttttcgcttttggtgcagtttggaagagttatgttttgtgtctgcatgacttgtcatcgcaacaattgactgcatgaaaacagtaattgcacgaaacaggacatggacatcttcagtgtccccagtatcagggaagtaactgcatgatgactgtcttggga

SEQ ID NO: 283537 - DNA, 600 bp, Zea mays
tcgtctagcgacatctttgcgtggggtggccgcggtcgtcaccgaggtgcggcgccgtcggacgaagcatcagcagcggtcgccggacgacgatcggggtgcgagctgcaggtggtggtgccgtcgtcggcgccagcggccgtggctgcggaggacgccgccggcgacggcgacccccgggcgttcctgacgtgggaggacgtgcgcttgacggtggccggcggcccgcgcggggcaccggacgtgaggatcctggacgggatcaccgggcacgcgcgccccggtgaggtgctggccatcatgggcccgtccggcggcggcaagacgacgctgctggacaccctcgcaggaaggttaggacccggcatgaataaaacaggtctgattttgatcaacggccggcaggagaagcttgcgtatggaacctcggcatacgtgacccaagacaacgtgctgatgtcgacgctgtcggtgcgggaggccgtgtactactcggcgcagctgcagctgccggacacgacgccggcggcggagaagcgggcgcacgcggagcgggtgatccgggagatggggctcgcggacgccatggacacgcgcatc

SEQ ID NO: 283538 - DNA, 575 bp, Zea mays
cctagctccgccactgccgccacctccctgctccaaccccgcacctccgcttcgccatgaacccttcgtcgtcatccacctcctcctctggcgggtaccactctagggccgctgcctttgcttccccgcagccgcgcggcggtggcggtggcggcggccgagatgggagcgaccgcatcgacgccctcggtcgcctcctgacgagggtgttgcgccacatggcggcggagctgcgcctagatatgaggaccgatggatacgtgcgcgtccgcgacctgttgaagctcaaccttcagaccttcgccaaggtccctctcaagtctcacactgttgacgagatcagggaggcagtcaggcgggacaacaagcagcggtttagtctgttggaggaagacggcgagctgttgatccgggcgaaccaggggcacacaatatcaactgtcacatcagagagcctgctgaagcccattttgtcccccgacgaagtgtcagtttgtgtgcatggaacttacagaaaaaaccttgactcgattttgcaaattgggctaaagcgtatggcaagggtacacgtacat

SEQ ID NO: 283539 - DNA, 525 bp, Zea mays
tggtggtggagggagcgaagccggattgttacacggcggtcggggcgctctcagcgtgcacgaggttaggcgcattggatttgggatgacaggcggctgaaatagtgcactaggatgaggtccttgacaacccagtcctgggcactgcactgatcaatatgtatgctaagtgttggagcacaagagaggcatggatggtgttccagcagatgttggagagggacatcattgtttggaatgcgatgatcatggggcttggcatgattggccacgagaagattgcatttgtgcttgttggccagatgaagaactcgggtgtgaagctgaatgataataccttcattggattgctctgcagctgcacacatactagccttgtgaatgatgggcggcggtattttcataacatgacttatgtatacagtataagccctaggattgagcattatggttgtatggttgacctgttgagtcgtgcgggattgctggaggaggctcatcagctgattggtgacatgccaatgc

SEQ ID NO: 283540 - DNA, 781 bp, Zea mays
actgttattattacggaacgcacaacactaggggggaatttattctccaatacttgcttaggctcgagccatcaacatctctgcatctgagttttcagtgtggcaaatttgaccatacagatcgtttgttacaaagcattgagagcgcctacataaatagcttgttaaatacaagtgacaccaaagaacttattccaaaatcctactacatgcctgactgtcttgaaaattcaaatttatgtgatcttagtgtcaagcgggatggggaacctataggcgatgttgctctccctccatgggcaacgggtttgcctgaagaattcattcacatcaacagagaagcccttaaaagtgaatatgtgagctctaatctccataactggattgacatcatatttggttacaagcagcgttgatagccagttgttgaggtgcaactgtgttatttggatcatcattgaaacactgacagtagaacactacctaactcgcatatatttggataggcagcagacatattgtactacgtgatgaggagtctgctgcgttctttttacaggttatgggcctgcaattatgcccctttgtttatatcatcgcaggggcgatgtctcttaacttagatttccttttcgtattgaacgctgggaaacgcacccgatcatgccaagagtagcttgtctgcttccttccttctcgagcaatccgtatattttgccaacagattttgtaaactatattgatgtttgctgttttgtattcatgttttatactaattttt

SEQ ID NO: 283541 - DNA, 284 bp, Zea mays
cccacgcgtccgcccacgcgtccgcccacgcgtccgcccacgcgtccgcccacgcgtccgggagtctgctgcgttctttttacaggttatgggcctgcaattatgcccctttgtttatatcatcgcaggggcgatgtctcttaacttagatttccttttcgtattgaacgctgggaaacgcacccgatcatgccaagagtagcttgtctgcttccttccttctcgagcaatccgtatattttgccaacagattttgtaaactatattgatgtttgctgttttgt

SEQ ID NO: 283542 - DNA, 522 bp, Zea mays
tcttctttttccgtcccctcctgcagccgccgcccgccgagacgccaagcgcgagcgggaggagaccatgtcacggtggcgcgccgccgcctacagcatctccgcagctgccgcgtcccgcaactctgcggcggaggccggcgccctctccagggccttggcgaaggctccctcgccgccttcgcttcctctccaaaccctcacgagaaactttgccaagtccgctgccgccgccacggccacgtcgcccggccctggcgcttcctctccgcccgctgggccgaggcccgagattagactgaagtctatgttcttatccaagccctgttcattagcgttgccacctgactcccctcatagagcagtggatccacaatataagggcatcaagcgattcctactcacattgttgttgttctacagtaggcaaagcaagtccatcagaggagcaaatgttggttatgaacgaatcacttctcaagttgatgcacctactatttatgatgttttcagttggagaaa

SEQ ID NO: 283543 - DNA, 475 bp, Zea mays
cggccgccctttttttttttttttttttatcggtaaatcaaaccccaacaaagtgctatttaacattctggttgcacaaggatttcccattctggatatctggcagtacattctctttacagttactggttaatcactcagctacttacatcaacatgcttcagaatgtacacgccacaaccaacaaaaaatttctctagtcaaaggcaagctccacctccatgcagtcaagtcatcactgcatacgctggatcagtcaggccttggtttgcatttgcattgcatccactgcatcagctcggctcatcagtcatcaggaactgtatacaaccttggagatcaccgagaatggcattatcgcccggtggcctttgttaccctggaacccaacgttcccgaacctcgctgtggagctgtttatggtgggcgttcacaacaaaggtcacgagctgcttctgtccgcttggaatgaaaa

SEQ ID NO: 283544 - DNA, 559 bp, Zea mays
gcagagcagtgcatgcgccctgcacctccactctgcagctctgctccccctccctctctcccgctcctcctccttttccttctccagctcggccgcctcagcccgcgccgcgatgtcagaggaggacgaggaccagccgccggccaagcgacccagcccgtcgccgcccgcggaccaggtgctcgacaacgtgctcgagacggtgctccagttcctggacgccccgcgggacaggagcgccgcctccctcgtctgccgctcctggcacagcgccgagtccgccacccgcgagtccgtcgccgtccgcaacctcctcgccgtgtcggccacccgcaccgcgcgccgcttccccaacgcgcggagcctcctcctcaagggccgcccgcgcttcgccgacttcaacctcctcccgcacggatgggacgcctccgccttccgcccctgggccgccgccgtcgccgccggggccttccccgcgctcacctcgctctacctcaagcgcattcccgtcaccgacgccgaccttgaccttctattccgtccctcccggggtattccg

SEQ ID NO: 283545 - DNA, 637 bp, Zea mays
gtcctgttctctcgcctgtggcaggtcttctaaggactttgctgatgtccatggacttgtcatgcatgcttacaacccaccaaatgcagattcacttgttgatcatcttggtttgcacaaggcattgtgtgttcttatgggatgggattatacaaaagtccctgagaactttaagggctaccaatcattaccttctgaccttgtccaagcaagtagggaggacctcattgtctggccgcctactgttatcattcacaatacttcgactgggaggaagaaagatggtcgcttggagggtttagggaacaaagaaatggataaaaaaatgacagaactagggttttctggtgggaagtcgaagtccttgtatggaaaggaaggacatatgggtttgacacttatcaagtttgcaaacaactcatctggcttgaaggaggctgagcgtcttgctgagtatcttgagaggcaagatcgtggacgtataggttggtcacgcgctcatgccagtcgttctgtagattcagatcagaaccctttgttggtcgagacggataccaggacagctgagacgaagaggatacgttatgggtacctagcaattgcatccgatctggacgaactagactcagattctaga

SEQ ID NO: 283546 - DNA, 274 bp, Zea mays
gtttcgagttgtagatctacgtagctgattcgttggatcgggagagcattggaaaagccaaagctgaatttcaggccataatcaaagatcctttgatgcttaacagtgtaatactggtacttgccaataagcaagatcatgaaaggggcaatgacaccaatggaggtgtgtgagggtcttggcctctacgatttgaagaaccgcatctggcacatccaaggctcttgtgcgctcaaaggtgatggcctttatgagggcttggactggctggcaa

SEQ ID NO: 283547 - DNA, 518 bp, Zea mays
  unsure (1)..(518): unsure at all n locations
tttcgtgttcgtgtccgactccagtggacaaggcatggcggggagaggcggcggcggcaaaggcgccgcagggaggatgatgtcgctgcaggaattcgtgtcctgcatgcagccgctcatcgatctcgagaaggcggcggagatatcggcggagtccgagacgagcgctaagagcctggagacgagggggtgcgtcattgccaacctcaagtgcaccgatgcccagacgggactgatggggaagacgctcctggagttccaacccaacaaaggcgacgttctcccgtctcacaagtttggaacacatgatgtggttgccctgaagccaaataaggcagatcctggatctgcttcacttggtcaaggtgtagtttatcgcttaaaggattcttccattactgttgcttttgatgatattcctgaagatggtttaaacagccctctgcgtcttgagaagcttgcaaatgaggtcacttatcgcangatgaaggatgcactaattgaactttagcaggctg

SEQ ID NO: 283548 - DNA, 619 bp, Zea mays
  unsure (1)..(619): unsure at all n locations
ttggacgcgtgggctactagaatctgcttccacggagaagcaggctggcccgagacaaacaaatggaacagggaatcatcaggatcatactgaagatagtgaatccaatggtctcgagaagctagaacaaagtactgagacgggagagaaggacatgggcaaaaagcgaggtgcacacgctgctggaaagaaaccgaggtgtggtgagagcaagcagcaaaagcattctgcagtgaatcattgtcaggacaacattggtgccaaggaggaagtcatgaaggatgtgaagctggtctttggagaggacatcnaggtgtgctcagatgccagctaactgctctctgccacaattgagagaaatagttcagaacaaattcccgtcactgaaagcgtttctgatcaagtataaagacaaagaagaagacttggtgacgataacctcgtctgaggagctaagctgggcaagcaatctggcagtttcgcaagtgccaatccgattctatgttgtagaggttaatcatgttcaagagcttggtgtggatggggtcaggagacgtccttcctttgccacgttagagagaaatcgtgatatcatgttggatattgggaccattgggca

SEQ ID NO: 283549 - DNA, 581 bp, Zea mays
ggatgatgaaacaaaagccctccaggtggagttgacaagtcttcttgatgctgtccaagaaacggagacaaagatgatagaaatgtcagcacttaaccatcttatgtcaacacatattctacaacaagctcaacaaatccagtatttgtatgaccaggctgttgaagctacgaataacgtggagcgtgggaacaaggagctatcccaggcgatccagcgcaacagcagcagtagaacctttctcctcctcttcttctttgttctcactttctcggttctttttcttgactggtacaacaactgagttagtatatgaagacattgtatgctggtcatgggaaatggttaaattatgaaagctggtctgccttgaagtccaaaccttttaggtagtctgttactttctaagagtagtgatcaagctgctgttcgccgggatttgtcatttcatttctgacgtgcaagctacagaagcgatgggcttgtagagaggacaggcagtggtcagggcatgaggccatttccagtcagttgtcaacagcgtcgtcgtcgtccagagtaccttaagcattgaagtcgat

SEQ ID NO: 283550 - DNA, 843 bp, Zea mays
tctttccctagctgagatcgcccaatctctacaattatgggaggtaattgaatcttttcagcttcaaaattcaaatgatcagcatgtgtggatatttagcaacgatggtctgtacacctccaaatctgcctataaagctttattcattggagcagaatcctttgagccctggaaaagaatttggaagagctgggcagcgcctaagtgtaagacctttgtttggctggccataaataacaaatgttggacagcggacagacttaacaaaagggggcttcagcatcctgaattttgtgttctatgtgaccaggaagacgaaactgcgcagcatattctatctgattgcgtcttcacacgacagttccggcataatattttaactccaattggtctctcttctgtgggtcctaagagaagagattcagtttttgctgaatggcggagaaaggcttcaaccaagattcccaagagcaaaagaaaggggtttaatagtatggtaatccttggggcttggagtatttggaagcagcgaaacaggtgtgttctttgaaggagctcgaccctgccttactaccttagaggacggatttaaagacgagatgagattgtgggtttctgctggagccaagaacttgcgctctctttttgaccctggatagagaaagggaagtcttacagcctattaaaagacgggggtgttggggtgtcgtatgtgtctgtgtggtgtgtgttttgtaagggtgagtgtgtgtttgtgttgtgtttgttctgtttgtcccgggccacaggccctttttccctctacttcaatttaatgatacgcagccctcctgcgtattcgat

SEQ ID NO: 283551 - DNA, 395 bp, Zea mays
ccaaagagcaaaaaaaaggggtttaataagtatgataatccttggggcttggagtatttggaagcagcgaaacaggtgtgtttttgaaggagctcgaccctgccttaatcccttagaggatggatttaaagatgagatgagattgtgggtttctgctggagccaagaacttgcgctctctttttgaccctggatagagaaaggaaagccttatagcctactaaaaaccgggagtgttggggtcgtttgtgtctgtgtggtgtgtgctttgtaagggtaagtgtgtgtttgtgttaaaagggtgtgtttgtgttgtgtgttctgtttgtcccgggccacaggccctttttccctctgctttaatttaatgatacgcaccccccctgcgtattcgat

SEQ ID NO: 283552 - DNA, 587 bp, Zea mays
  unsure (1)..(587): unsure at all n locations
tctgcctgtgcccttgggctgggctccatggagcccaggctggtggaagctgtggttttcggctgcatcccggtgatcatcgccgacgacattgtcctgccctttgcggacgccatcccgtgggaggagatcggtgtgtttgtggccgaggaggatgttccgaagctggacagcatcctgacgtccatcccaacagatgttatactgaggaagcagcgtctccttgcaaacccgtcgatgaaacaggccatgctgttcccccagcctgctcaggcgggagatgcattccaccagatcctaaatgggctcgcgcgcaagctcccacatggtgacaacgtcttcttgaagcccggggagagnggttctgaactggaccgccggaccgccaggcgacctgaagccttggtagcatctgcctgcctagaacctttttgggaaaaaaagcaagaatgagaacatggtgatatacatacatgcgctttaagttaccagggtgtatacttgatagggcttgctgaccacaagcaaatgtacatttggtttggtctttctctttccctgagcctgtataccatatatcttcattt

SEQ ID NO: 283553 - DNA, 405 bp, Zea mays
ttctctaaccacaacaatgccctcctcccttcccacctgacctgcgccgcgccgcgccgcgctgcgcagccatccttgttctgtcccgggtacgccgccacacacatcagttcaagcgcttctctccctccctcctcttcgtggatcggaatcgacgcctggaagtggatgacgatggcgggttcttgcgccgcggtgcccgttgccggtctcccctcgttgaggacgccgatgccaactcacctcagacttggcggctttatgccctgttcctcggccgcgcggagtcgcggcgccgccgtgctgggatgcgctcttggggccaggaagcagacgccgggagttctgaaaccagtgctctgcagatacatgcgaagagatgggcatgaaggtgatgtgagctat

SEQ ID NO: 283554 - DNA, 678 bp, Zea mays
ttttcgtttccgaaaagatatggaggccaagcacagggaagtagaggcccattagatggtagctgtgatgaacccatgcctctcccacatccaaaggttggatttaacttgccagaccagtggtcacgacgagtggacaaatcgttgcctgcacaagctattggtccaccgaacttctactactagaacgttgctcttgctccaaaaggtgtctggactaccatatcaagattcttgtatgatattcaaccagagtttgtggactcaaagttcttctgtgctgctgccaggaaaaggggttacatacacaacctgccacttgagaacaggtaacctatcctgcccatacccccaaagacgatatcggaagcatttactcggaccaagaggtggtggccttcatgggacccaagacgacagttcaattgcctccagacttgcgtgtctagcgcaaaattgctagagaggattcgcgtaccctcacaaacagttcagacccacctcctccaagagttcagaagtatgtgttggaggagtgtaggaaatggaacctggcatgggttggcttaaacaaggttgctcctctagagcctgacgagatggagtttctactcggctttccgaaggatcacacgagaggtatcagcaggacagagaggttcgatctctaggaaattc

SEQ ID NO: 283555 - DNA, 853 bp, Zea mays
ccgacgtgaagagtaagttacaagcaaaccctcttcttccgaaaatcaccatggttggcatctcaatgggtgatggtgcacagatgagcaaagccaacttaaagaagacaatggaagacttgacaaaagagttggagcaaacgagtgaagaaaatatgttcggtgatgaaaaagacccactttttgttgccaacgttggtgactactcaaggataacaaagattagctctgcatgaggctcgttgaccaacaggcgacagcaagggtgttgtactgaactgctaacgaagtctacagtccatgatactgatcttaagagggctctactgatataatgatgcaaatcggaggtcatcagatcatatggacattcgactgtagaccgttctgactttagaggctatccaacgtcaacagttacaagccaatctaaattttcggatatgatttgccaaaaggatgattgttaatagaaaagtttgcagtatgtccaccatgcagttaggcgtgaagatctgaagcaacatgttgttggatttctaagatcttagctcgtaacagctgtagagtatggtggtatatagcttcaggattgagatgggggtcacaggagtctgtcaggtgagcagagtcgaataaattgatgtgggtagcatttttcttcactagctgcgtatcggatctgagtgtgtatggcgagagttccggtaaatgttggttcgcatataggtccttggattatttattgtacgcgatatggtgagaggaggttgtagctaacatgttgtgtctccgatcatcaaactgacattattgtctctcttgatcttaaacttgcttataaatagacctt

SEQ ID NO: 283556 - DNA, 470 bp, Zea mays
aaaatgtctcaccctcaaggcctgtccaagcctgcaactgataacattagagttagtggttccactgatgttgatgtcgacgcgcaagctactaactcggaggttgctgcaatattatcgcgagtgacctgctccaagtttgaatgagagagcgctacttactaatttgctagaggtaactagagaattagagatctctagctgagctgtgacagaggagctcactcctgctccacaaggaaggataactactcattagtcattactgatcaaggtatccctatccagttgctgagttgcaaagaggatgctcccggcttgagttatgtaatttaaaagtgtgtatacatgtctcgtgtgctaatgttgtctgatattgtgctggtggatctgtgaggattggaaaatgtcaatggtgatgaggtccatgctcctttggcaaagatcaataaaactcttcttgagtgctc

SEQ ID NO: 283557 - DNA, 479 bp, Zea mays
tgcgtccggtggtggcggaggaggaggaggaggaggagggggaggaatcgtaggggagcgctcgatgccgacgtcaccgccgctgcccccgcctcccgcggcggcggtgtcggctcgctgggccgaggccgctggtcacgtcgatggagcggaccgtgctgcgcgctggaccgccagatctcgcagttcgtggccatggatcggctgatttgggcggactccgccgacgcggacgcgttcctggaggcggtcgacgacctcatcggcaccgtgcaggagctggacgccgcggggaccaaccgcgccttgctcgaccgctccgacgagctgctcagccggtgcatggcgcgtctggaggatgagttcagggagctcatagagcgccccgacgccgccgcccccgtggtgccgggcgggttcgggtcggaccggagcgacgacgacgcggaggacttcggaggtgggaacaactacggcga

SEQ ID NO: 283558 - DNA, 533 bp, Zea mays
cccacgcgtccgcccacgcgtccggaagccaccaactcagacatgactaaattcactgctatacagaagcagataggccttctgctaaaagaagtatcaccgcacggaggaccagcttcaagaggaggagcacaggattgttgaagctcagactgaaatttttatcttacacaggtgcttaggtgacatggctgaagcaaatgctgatgtcttggcacaattgcagaggcaacaggtggtatgcaaggatcaagaggagaaagttgatttcttgtcacagaacaaccagcatctgactgaagggataggttctgtagtggaagtactgaatctggatgagaaatacgaatcattggatctgatgaagattgatgatgttgtgcagctactattgcatgagatcaagtgcctactgaatactatttctgatgctcaagatgtgaagcagaaccagatccttgagaagtcccttgttgtcacgcttcttgagcactatgggcgagaggtggctgacctgaggtcggaaaggagtg

SEQ ID NO: 283559 - DNA, 600 bp, Zea mays
gcggttttcttcgggcctcgggcttctccccctctgcagacggcgtcgtcccctcccatttctccagcatcgacgatgaacggcggcggcgggcggtggcgggactcctcggagcagctcctatctcgacgtagcctgcaatgccggtgccggccggtgggcgcagcagtccggtggagtgcggcgcggggactgtgagatcttcgggtcggtggagccagctaccccggcgcggactgcgcggaggggacgccgtggatggggactcgccgggacagaggcagcagctcagacccgggttgctcgatctacatgctttccacacggagctgatccccgattttcaagtaccagggatgtatgatggtgcccaaaagtttggctatggaggaggtctagatgaatctgatatgagattcacagcaaacaagctgatgagcaagtctgctgtttttcctgatggtaactacctgaaggccttcacagagaaagagaaggcagcacctgtcgcgaaaatcaaagtggtggtgcgcactagaccacttaacaagaaggaagtatcaaagaaggaagaagatatcatagacattgaacaaagat

SEQ ID NO: 283560 - DNA, 547 bp, Zea mays
atcgctggctcgatcgccgctgtgttcacgcggaggaactagatcagcacgcgaaagccaacagcgcagtcgaggaggaagcgagcagtccaggtccaggatggcggcggccgtggcgtcgctgtacaggcgggtcctcccgtcgccgccggcggtggacttcgcttcgccggagggcaagcgcctattcgcggaggccctggcggcgggcaccatggagggtttcttccccctggtctccgtcttccagacgcagccggagccggccttctgcggcctggcctcccttgccgtcgtgctcaacgcgctcgccatcgacccgggccgccgctggaaggggccctggcggtggttcgacgagtccatgctcgactgctgcgagcccctcgataaggtcaaggccgagggcatcaccttcggcaaggtcgcctgtctcgcgcactgctccggagccgacgtccaatccttccgcaccaaccgggttaccatccacgacctacggcggcatctcatccgatgcgtctactcgcaggactgccatctgatc

SEQ ID NO: 283561 - DNA, 444 bp, Zea mays
gaattctgaagctgataaagttgagcaggtcaaagcataatacagaaagaacaagggccagcccatggtatattcctgcaaaagcttgtactggcctgagaagggtgccttctttgccctctcccgagataaaatgggtcttggtagtggtttatgtagttcttgtgataatatagagccagattctgacgaattgaaaatattctcgaagaccagctttgtctacagaaaggctacatataatgtcaatgagtttttatacataagacctgatttttttgctgaagatgaggatcgtgcaaccttcaaggctggccgaaatgtgggtctaaagccctatgcagtttgtcaaatattgtccatccctgaaggggctggatctaaaaaactcaatccagcatcagcaaatataagtgctagaagattttacagaccagatgacat

SEQ ID NO: 283562 - DNA, 497 bp, Zea mays
gctgcagaacgcggaccccgcggcgctgcaggccgggctcaactggccgtgcgggccgggccacgccgactgctcggccatccagcctggcggcgcctgctaccagcagaacaacctgccggcgatcgcgtcctacgcctacaacgactactaccaggagatggccagcaccggcgccacctgctccttcaacggcaccgccaccaccaccaccaatgacccaagttcagggtcttgcgttttcgcgggaagctccacggcgggaggctactccaactcgagcgtgccggtgggcgcaagcccgccgaccagcctctcccctgcgacgggcttcacacctccagtcggctccagccccccgtcgtcgtcgtcgtcggagttcagccccccggcggtcggcaccgaccctttgtctggctacaccccgccggacggaggcggctacagcaccccggcgggttcctttaacggcaccgggacgttcgggccgagcggca

SEQ ID NO: 283563 - DNA, 548 bp, Zea mays
  unsure (1)..(548): unsure at all n locations
tgctccacaggtgtgctgttagatgacctcctagttgctgaagatcttgctgctgctgaaacaaccagtgcagctaatcatcgagcagcagcagctgctgcatccacaaatggacaaagagaacctggtagatatgcctacaacgatgaacaatcaggacaaacagttacagtttcaagtcctgatggagctgttgttcttgggactccagttgctcctccggtcaatggggacatgtatactgatattagtcctgagaatgccattatccagggacagagaagattgagcaaaggtgttgattacttggttgaagcatcagctgcagaggctgaggcaatcagtgctactttagctgctgtaaaggctaggcaagttaacggtgagatggagcattcacctgacagggaacagtctccagatgctgcaccaagtaccaagcaaaattcaagcctcataaaaccagatgttgctcttgtcaacaattcaacagcacctnctggtgtttcggtgcaccatagagcagttgtggtggctgcagatactgg

SEQ ID NO: 283564 - DNA, 616 bp, Zea mays
cccgtgtcccttatgggcttggttcaagaaatggccagcaatttgccattgatgaatcagaacctagaattgaccgcaatggagatatttcagcagatggtctgactgcattggttaaccttagccaagaaaacaatgctgctcatctcaggatcaaagtctatttgagacagggatgcagacaagatatcgcagtgttccatctgtttccactcccggtggttgcttctgtccagatgcaggagtcaaaggagcatgactgggaaactgcagaggatgcaactgtatcattagacatgaaaacacctcttagccatctgctgctttccgctttggggttgagttcgatgatgtgcacaggcttgctgatggtcatgtgaaacattcgactgaagtgttttatgcaggatctctatggaaggcgagtgtacaggcatgcaatgctgaggatcctcatgggcgacgcactctcggactttttcttcaccggagcaaggctcaaacgttagatcccttgaggcaggctcacttgtacgtagacccctcggaaaaggagactgcgcgctatcaactcatgtggacagcaaagagggaggtgatggtgttcggatgcctg

SEQ ID NO: 283565 - DNA, 423 bp, Zea mays
tcggttgcggcggcggaggctcttccagttccatccatcttctccctcgtggctctgcttcctctctcccgtagtcccgccgaccccgcgcgccggccaaggaaatcaagcgaaaacgccagagtctgattgctccacatctgctgtcatctctgaggggtttcccgccttcctcgcctgctctaatggctaaagaacaggatggatcccccaaggtgcgccacccagaattccaaaggatgcgcgtaactctcaccataggtgtcattggcctctgtgtcacagcatacattcttggtgcttggccaggtacctcgaacggcagttagttccccctcaataagtaccagaacccagtgcaaagatcccgtgcgatcatctggtgctcgcctggatttccaagcccaccaccaggtgggcttc

SEQ ID NO: 283566 - DNA, 409 bp, Zea mays
gcggttgaccttgcatgggttcatgctgcacagataggcatccttgaattcggcattgtccgtcatgctgtcaggggagtggtggctgctgaactccaggatggctgtacaagtaaaaccgatcagcattcagtaaaccagaatacatgcactgactctcaaatgggccactcaaggaccaatgatgttctgcgtaaaaggataactggcaccattctcaatgttgacaacttaaggatgcttggtggcaggagaggtttcttttaccttctctctcttatcttgcacaatacaaaaccagttggacatcaggaccttgtcggcttagtcatctcactactgcttcttgcagatttcagcttagtcttgcttactttcctccaactatattcatattctatggtcgatg

SEQ ID NO: 283567 - DNA, 390 bp, Zea mays
ttgttctcctcctgctcctgcattctcgcccggcccccaaattcaccttggccaccctccaccacctcgtcgacgcgggcagcagttcgcctcatcgtcctcccacctgacgacgtcgcggttcgcgctctcgcggcgtgccgcgcacccacgtctcccgcgagttccacgccttctgtgccacgcgccacctggagccactgttcgccgcgccctccgcatctccgacctctacatctccatccgcggaagcagaccacctccaatccttctctttcacgcagtcattgcttgcctccttagcccaactggtggtaccagaggttcatgtttcattattaggaatgaacagtagtcgacaaatggaacttcactacataaaaactggat

SEQ ID NO: 283568 - DNA, 689 bp, Zea mays
tctggaatctttctgatctatgtcaaagagtttcagctacacatcttccaccataggatgggcatcaattatccaagcaactggtccctagtggattctgtttctttgcgtcaggtatgcgccagtcgtggatgatggcgaggtggccatctgtggatggacctagtgctggtgttaaattgtgcgcagttggggacaatgcggagtttgtgctcttggagatatttggtactattgtattcttggatattacaagcaggcaagcagagaaggtgtatgagctgacaccagaggataaggagttggtcagtggccgccccctggagggtgatatggcctcctgttttccctcagttgaaggatgcatattatgccaaaaaagagtgatgcaaaggctcaaaatccagcttcagaggaaccagttcaaagctcaacctgcaggtccaaagatgagaatgagaagcataccaatatccctgaagaggcttcatgatgagccccccctgttcccaggtggcgaggtgtagtaaaaaccagagagaataaagggaggctagttcatgtaaataactttgaataaaaaatagttgttaaactacttggttagatcagatcatttgatgtaaataacgattgatcgaaacccgtcggcactttgtaattattggtatgccaagcttttctttatt

SEQ ID NO: 283569 - DNA, 471 bp, Zea mays
catacttgatgaagcgagaattcgctgttgatccatccacagctcgtttccacctctcggaacctctccgccggcctgttctgacgtcagaaccatctatatcttcaagaattcttggttcgcaagaccgttttttgatctttgcatcggatggactatgggagcacctctcaaaccagcaagctgttgaaattgtccacaatagtccacgagaaggtgttgcaaggagattggtacaaacagctctaaaagaagctgcgaggaagagggaaatgaggtatggcgatattaagaagctcgaaaaaggagtccggcgctacttccacgacgacataacagttgtcgtcgtcttcatagaccatgaactgcgggcggagcattctttctcgacctctgttcctgaactcttggtccgtgggttccgtgatgcggaggcacgcttcaactttttaagggagaacgacatacttg

SEQ ID NO: 283570 - DNA, 575 bp, Zea mays
atcatgtttgaaaatgaaaaccgtgacatcttgcttgaaattgcatccagctgatgtggataaagatgccccttttccttctaaatcaccacgaatcaatagggctgctccagttccctcgaagttaccttcggctgataaagctactccagttcttccaaaatcatctctgtcagtaaacaaagcagctctggtccgtcccaaatctccagcagttgacaaagcaactccagtttgtcctgaatctccagcagttgacaaagtaactccagtttgtcccagatctcaagcagttgacaaagcaactccagttcgttctcaatctccagcagttgacaaagctactcatgtttgccctcaatctccatcagttgacaaggcaactccatccattgacaaagcaactccagttcgcccaaaatctccagccatagataaagtaactccaattcctcccaaatctccaccagttgacaaagcctctccagcaccaccagaatcactatcaggtgctagagatgtgcctgttccttcaaggtcgctgcaaattgataggttcattccagcccccccaa

SEQ ID NO: 283571 - DNA, 376 bp, Zea mays
atatggataaagatgcctctcttccttctaaatcaccacgaaccaatagagctgctccagttcctcctaagctgccttcagctgataaagcaacgctagttccctcaaagctaccttcggttgataaagctactccagttcctcaaaaatctccgttggtaaacaaagtagctcaggcccgtcccaaatctccagcagttgacaaagcaactccacatcgtcccaaatctccagcagttgacaaagcaactccagttcgttctcaatctccagcagttgacaaagccactctagttcgccctcaatctccagcagttgacaaagcaactccagttcgtcctcaatccgcagcagttgacaaagcaactccagttcg

SEQ ID NO: 283572 - DNA, 276 bp, Zea mays
tttgtcgtaggcccggatgtgcacctcgatgttttgaacagaccggcaatttatttatttatttgttttctgctctgttgtatgtatgaagaattaacctcagtgtgaatacatgtccatggaattttacggtcacagaactgtgcagccagtgcacgtgtggttcacctgtgaacattttgaatttctagggtatatgggaacacgaagtggagtagctctgtctgtggtgcttgagtgggaggtgcatataatcacaccctcctctcccatccc

SEQ ID NO: 283573 - DNA, 524 bp, Zea mays
agagctcaaccgactcgggaccaaaatcggctgctgttgctgcctgggacgaaatcggaggcatccgcctttctcgagagatcgagctccgcgccggagcaggcgggccaggcggtgccgctgctggtatctggtgggtttacaacatagggatggagtcgagatccatccggattcgacattcgaggtcttctgctttgctgttttaaacctgtagaggcagaggacttgggaatgctgaaaaatgtgcctgcaaaccgacgggggaattttttgtgcaaacaagattcgacctctgttcaagcagatattgttggcttctcatgagtatgggcttcatgctgatactgcccttcttttcaatgatttaaagcacagtagattgaaggcctttatatttgttggccatcaccttggagacgacggttaaaatcttctacattctttgataagtggtgtggcgcttgttcattattctatcgttgcatagtttgatacgatggatgggaggaggacaattttga

SEQ ID NO: 283574 - DNA, 565 bp, Zea mays
atcagaatcgagtgatgtcataattaccatgcttccttcatctactcatgttttagaagtatacaatggacccaatggcttgctttgtcggggcgaacgcttgggcccatggttatacatagattcatcaacagttgatccacaaacatcaagaaagatatcgacagccatctcaagatgccttttaaaagaaaagaaaggtaagttccaccatataacagtaaagacatagggcctgtttgtttcagcttatagattatataatctagattataatctagattatataatctggattataatctatggagattataatctgtatgtagttgtctgttagttcagattatacgtatgcagattaatgttctgtgagacacactgacaccaatgctcttgtttggttagacgtcttctttttttacggtttggcattacatggattcatacaactatgtgcaaaataggaaattaaaattatgccatatgcaccattggaaagctacatatttccgtttgcaacatcagtcatagagactggtatacaatggaagtctttattagc

SEQ ID NO: 283575 - DNA, 695 bp, Zea mays
cccacgcgtccgcccacgcgtccgcccacgcgtccggagataatggacatcagtctcgatctgcctgggagcagttctgttgctgatgcccttgcccgcttctttaagccggagatattggaaggtgcaaacaaatatagttgtgaaagatgtaaaacgctcacctcagcgcagaagcaaatgtttatgctgagggcacctaaggtgcttgtcatacaactcaagaggtttgaggggataaatggtggaaagatcaacaggaatatagaattcaaggagacacttggtatttctgattgcatgtacaataaaagccaggatccgcaaccagtatataacctttttggttgcatcgtccactcagggctctccccagagtctggtcactactatgcatatgttaaggatcctagtggtcaatggttttgttgtaacgattctcatgtctccctatcaagttctcagaatgttttgtctgagaaggtctacatcctattttatatactgaattcaaaaactcaaaagtctagtacaaatggttactcttttactgcagctaaacctttcagcaccaatgtaattgacatatcaagcacctcacctagtgagacctcgaagatacctttggtaaaacagaatgacctacgtcttgccaaaggtaatgtactgatgcccttgaggaatggcaagactgc

SEQ ID NO: 283576 - DNA, 487 bp, Zea mays
ctcgtcctgaaatctcttacgtcagtctttgaaattattgaccgggagccaaggattgatcctgatgataccaccggcttgaaaccacccaatgtctacggaagcattgaattcaagagtgttgatttctcttatcctgctcgccctgaccattcttgtcctgatgtaatttttaatcttaaagtgagtggtgggcaaacacttgcggtggttggggttttaggatcagggaaaagcacccttatttctttgatcgagagattctatgaccctgttgctggccaagttctactggatggtcgagacatgaaatcatttaaccttagatggttgcgcagccacatgggcctgattcagcaagatccagttattttctcaacgacaattagagagaacattatctatgcaaggcacaatgcaaccgaagctgagatgaaagaagctgcatggatagcaaatgcccatcatttatcaacagtttgccaca

SEQ ID NO: 283577 - DNA, 824 bp, Zea mays
gttcgactggatcatgcatgagtaccgcctgggggacgcggaccgtgcgccgggcaagaagggctcacggaagttggatgagtgggtgctgtgccggctgtacaacaagaaaaacaactgggagaaggtgaagaccgaggagctggaggcggcggcgccgtccatcaccagcaaggcgcagcggaggattccatgtctgacagcttccagacacacgactcggacaacgacaacaatgccttcggcatgcagaacggcttcggtaacatggtgcacgggcaggccatgaccatgaggaacggtattggcagcgtggcgaggacggtgaaggaggatagctattggttcacggaccctgaatctggatgatctgcaagcaccctacaacgtgacccatgtgttgaatccgaacccgatccagatgatgaatctggcggctgggcaaggccatggctacttgcagtccatgagctcgccgtcgacgaagatgtggcagacgatcctgcctccgttctgagagttgctgtgttggaagggggaagagatgatcttgggcgtaggagtggttagactggctaggaacagcaggtttaaaatttggagggtttgaattctgcaactgttgctggtagtcttgtaagggttattcatttgttaaattatgtgcttggtaatataccaaaaggacaatccatctccctttgcactacttgaagaaaccagtacaaaattacagttctcataaaaaaaaaaaaataataaagaaaaaaagagggaaagggataagagatgagagattaaaaaaatagaaatgttttgatatt

SEQ ID NO: 283578 - DNA, 700 bp, Zea mays
gtccggtgtggcgacgatggagaggtgcggcggcggcggggacgagatgatgatgacctcgggcgcgacgggccggatcgtgccggtgttccgctccgtgctgtcgcggcgcgctctgctccgcgtcgccgtggcgctgcactcgctcttcctctggctgctgctcctcgcccgcggcctccgccggcaccgggcggggtccggcgccgacgcgttggcgtcggaggcgggggctggggccgggacctggagcgcgcggcggtggcggctgcggctgcaggccgcggaggaggaggacgtgcgccgccgcagggcgctcgcggaggaggtgcccatggaggaggaccggggcactaggtgggccaccttcctcgtcaccggggccaggaggaacgcgcttttctgccgcctctgggcgccggccgtcgacgagatgaggggcattttggtcatcatacatggcttgaatgagcacagtggaaggttccggcactttgctgagcagctgacagcatgtggtttcggagtatacgcaatggattggatagggcatggtggaagcgatggcctgcacggctgtgtgccttcactagattacgtcatcgaagacatcgaagtgcttgttgacagaattctgatggagaatccaggggtcccttgtttccttctcggacacttccaccgtggggctgacgtcctg

SEQ ID NO: 283579 - DNA, 487 bp, Zea mays
tttcagctggcctatagaacgacaagaagggataactggatcgatgtcgaggtgaaggtggacaacgtaaggtgtgatgtggactctttggtctccgagacccttatggcggagcgtggatatggctccgaagagaagcacttcccatctcgtgtgatgctgcaaatcacacctacgcaacaatctgatgtgctctctgtttctgtcggcaagtccaacgacaaccccacacacgaattcggcatcgagaagggctttgagggttcatttgaacccccaaacgcatttggcctcaaggcgtcagtaactgaaagccttacactagccatgaagccctggaaattcgagcagtctgtgcatgggaacactgcaaccttgaactggtttcttcatgacggcgtcaacgggagggaggtttattcctcaaaaccttcaaagatttctctgctccaaccgaaggcctggtttcgtgacaggtacttaaatg

SEQ ID NO: 283580 - DNA, 374 bp, Zea mays
gttgacgcgtccggccagctacgcgcgcaacttcgatgacggtgcgtggaaggccgaggagggcgtgtcctgggccggccccggcggcgcgttcttccccggcgccaacatcggcggcgcggccgtggacaccgcccgcctgtgatgccgttcccagctccgtccgtccactagctaactggtaactgttgctgcgctggaaatggatggatcgtggtcgtggatgcgtcactcgggatttgctttcttttcttttttttcttgttcatctggattattggcatttactttcttcggtcgaaaatgaaaaatattcaggccgtgcttgttcgggtgcaacaaacaatttaataatataaaataattttaaattg

SEQ ID NO: 283581 - DNA, 534 bp, Zea mays
ctctcggtgtgcccccgctcccgcagccccgcgccggcgctccccccactcgcgctcggcgcagcgcctccgcaacttgcgctcggtcgctccagcgcgggcacgcggcagcgcccctcctccgcggcacggctccgccggccgtccgcccgtgacccgcgcaacggccgcccggtaaggccaggcgcttagtcttgcaggccatccggcagccgctcggccgcccgcccctcgcctctcctctgcaggccttgtcccccaatagctcgatccaggagcaaaagaccgaacctgtggaggtgaggttgattttaagaagtacacgccaccatagaacgaaatttcataatgctttggcaaacgagttgtagactatggcaacccgaatcctgtcgcgtcaaaatctgagaaagttggcttcgttcacgctccagaatatatcccagaggcaactagttccgccttatcctccagctctcagatccactattggttcccccagcaaatttctgagccccctttacctgtctgggc

SEQ ID NO: 283582 - DNA, 673 bp, Zea mays
gttcaggacttcactcaaggttctaccttatcagatctgagcagcttgaatgcttccttgcacaaccctagagatggagttataaatactacactcttcataagttatctttctgactatatcgtggagatcagcaatgagaatgtgcttggcccagtcagtattcttgcgagtattggtggcctgtatgccttcagtgttgcattttttctctgtctcatggctcaatgtgaaggcagaataaagaagcttcgtgacgaggataccagaatgctgaaaatcctgagcaaacaacgcgctcaacgaaattggaacaaggttcggaagtttgtcatgtacacatggggtccaagcaacttggatccaaccgatagaagtggaaagtggcctgaaggctcggtgatggattccatccatggatccttccacaagataagaaaaccaactagaagaggaacctccaacgggagcaaacctaaggagcccgctgacatggcagttgaaattgaaagagttggggagacacagcagccaagcagttctaggtagccttggtggatggaggttcaggacatgtcggttcattgctgcagcacctctgaccatgatttgcaatacgaccatactcccggagtggagctgtttatatcaagagtgtaggtagaggcaagtc

SEQ ID NO: 283583 - DNA, 683 bp, Zea mays
atcaatcgaggaacttgttgctgcgttagttgagcttgaagaaaatgagcgctcagccccagtagaaaaggttgaaaatgaaagacactcggacaatgaatctcagaaaagacacgcgcgagatgctggtccatctgtgaatggtggaagcgctgcaaatggaaccgaggaaaatggcaaggctcatgaagtagcagatagtgagagctattcagatactggcagcattgatggacgggaagatgaggaggatatattatctgaggataaatcaaatgatggctcagataacgaaggcgacgatgaagatgatggcattcctgttggttctgatgaagatgaaaatgttgaggttagacagaaagttatgaaggttgatcctaaggagcaagatgactttgatcgagagctcaaagcccttcttcaggagagcttggagtcccgcaaatcagaggcccgttcaaggctccctctgaatatgatggtaccgatgaatgtccttgaaggttcatcaaaagactcgagggccacagaatctgagagtggagaagaaacagtagatgaagagggtggcaatgctgggggtagcagcaaggtgcgcgttaaggtgctaatgaagaaagggcacatacaacagacgaggcaaatgttaattcccgctgatagttcaatcgttcgaagca

SEQ ID NO: 283584 - DNA, 528 bp, Zea mays
ctcacgcgtccgcccacgcgtccgcccacgcgtccgatgccaccggcccaccgcaaccctgagcccttgattcgggcggatcgaagttagcctcagccttgcacgcggaaaggggcgtgaacggagaaattgggggcaggcgccgcagtcgattgcgcccgtacaccatcggagggtccatgggccgtgtccgggagcttccttaagccaccgcgggggtgctcgtctcatctcgggcgtgtgcgacggtcggcgagcagcaatttctcgccgaactttgacttcgccgcacaactacgtatcgtcgtggattacgccgataccgtctagctccccgatgaacaagtgaccgaggacccaggtgttcagtaggtggaaattgcggagcaggagctcattgaagacgagcaagccactgtggaatctgaggatcaacaagtagagatagctgagcaggagctcgttgaaggtcaagaacaggtaccacaggatgaggcgcatgaaggatgctgtgacgagttcgagaga

SEQ ID NO: 283585 - DNA, 450 bp, Zea mays
ctgcactacaagcagtacagcatcggcgtgcacgagagcagcctcacggagcagtacccgagcgaccatgagatcttcaagaaccccatttctttccacaagaaagggtttgacttcatcaggcagaccttcatggacaagcagaacgtgaagctggactgcaagaggttcaggcctattctgttggaggcactggacaacctcaacgcgtaagaccgtaaaagcttgtgcttgtgctcaattggtactgggcatggcaatagagattccttcctgtatacaattccttcttttttttttacaattcgttccttttagtaaaatctattgttcgttctgtccctccctgagaaggttcgcattgtggaaaatttaggagaaattggcttataaaagttgttgtaaacacactgtataaattgctgccaatgcatagctttcgttctattc

SEQ ID NO: 283586 - DNA, 536 bp, Zea mays
gctgcttttcggacgacacgttgccggacggctacgctgtcgagaaaggggacatggtgaactaccagccgtaccaaatgggcaggatgcggttcctgtggggcgcggacgccgaggagttcaggccggagaggtggctggacgacgccggcgtcttcgtccccgagagccccttcaagttcacggctttccaggcggggcctcgcgtctgcttgggaaaggagttcgcgtacaggcagatgaagatcttcgcagcggtgctggtctacgccttcaggtttgagatgtgggaagccaatgctaccatgggctaccggcccatgctcacgctcaaaatggacggcccgctgtatgttcgggcatcgctccggcaatgaggtgtgggcgactgggcggcggccacgaagtcaaaatacgttgcgtactgttatgatactatcttagatattaaacttgttaaaataaatattttattttatcttagctaaaagactgaaaataatacgagttgaagagaaactcaacctttttgttat

SEQ ID NO: 283587 - DNA, 560 bp, Zea mays
gctttcgagcggcgttggaaggcttcgacggaggcgggctccccacgctgcgagggctgcaggctgcaggctgcagcaccggcgcagcacggcagggctagcaaacctgcccccggcgtaggacggtaggagggagcggcggtggcgagcttcgacgagcagaaggcagcgacatgcgtccgcaaaatcggccgatgcgcaggagacggaagcgggcaagcttccaccagcaaagcggtgtgctgagcggcagccgccggcgctatatatggggccgccaacgactaggcgccggtgattgggagccgctttggccctttggcggtgctgtgtaaccagctgacggattgttgcggggggtgaggccacggtgcactctatcgggcggcaggggggctctgcactctgcaacatgcgacagcaggaaggcagacgtggcaacctggcgggaggcgatgaggaattgaagattgttcccgctcaacggcgcccatgggacgttagaggaacatcatgagggctataaaaagggcagaagctcgagcaacacctgtgaccag

SEQ ID NO: 283588 - DNA, 578 bp, Zea mays
tggctgcttagccggccatgtctagggtgttggagcctctagtcgtcggcaaggcgcccgcccgtcccatcgacaacttcaaccccacggtgaagatgacggtcacctacggctccgacaagcaggtgttcaacggccatgagttctttccgtcggcggttctgtccaagccgcgcgtgcaggttcagggcgacgacatgaggtccttcttcacgctggtcatgacggacccagatgtgccagggcctagtgatccatacctgagagagcacatacattggatcgtcaccgacattcctggaacaactgatgcttttttcggaagggagttggtgatgtacgagagcccgaagccgtacattggcatccacaggttcgtcttcgtgctgttcaagcagagcagccggcagtcggcgcgcccgccctcgtccggcggcagcagggactacttcaacacccgccgttttgccggcgacaacaatcttggccttccagttgcacgtgtctacttcaacgcgcagcgggagactgccgcgcgccgtcgatgatcgatcatcaccgtacctacagtctgcatg

SEQ ID NO: 283589 - DNA, 564 bp, Zea mays
cgcttgtctctgctcgcccaagcacaggtgttggcttcctcccatcgtatcaaccatatgtcgagtccttgcttatcccctgcgcataggaacccagctccctcacgttgcctcatccctagacgcgctcgcccagatcgagcgtcgtcgctcagctcgcccagccctccccatccttctctagccatggtgctgctcccagtcttctgctcgcccctgccctcagccttggcgtctggccgccactgccccagctttccatggcggcattttctgcttcctggtggccgacgccctccctaaactgagcaccgccgtcaactgcgccttggcgctaatcctccccaacctcttctttgccggtggtcgtctccagccccttccatggcacctagttttattcccatggcgagctcgcccaagcaatcacctccatcacaggtgatgttttccccttccctttcctcaagtttggttctcggtgcccaagtttttgtgtccctgcagctcgccgtgcctgcgcagccccgacaacgactccctcttctgcgtcgcgccattgac

SEQ ID NO: 283590 - DNA, 582 bp, Zea mays
gaaaggactacctctaaaaggcaaagaagttggacgaaaaaaaggaatttcagtaactaaagaaaggtcccatgaagccattgtttatatcttactttcagactctgttgcaaaagggcatgttatgcttccgtactctattcgtcacttcataagtgctggtgtacattcatgggtatatattaagacatattcagccaacatcaaggaggatgaacctctagtgacaatatctcctttaaagttcaagatgcatgtgaaagatgctcatgatagcagtaaattagtcggtcaggaagtggacacttcgaggataaccagaattccttcagaaaatggtgatttcttccagaaagctcgttacagtgaaaacaaaaatattcgaggtgcagatattgagagcatttctgaatcagtgtcaaggcagaaattttttattaagcattggcttattgggcaccttaaagaaatgggcttgcatgctagccatactgagatgaattcaatagtcttgccaaccaatattttgctccatttggaagcgatagataaagcaggaacccaaggagttgaattcttata

SEQ ID NO: 283591 - DNA, 495 bp, Zea mays
gcagatgaatgcttcccaagcgccatccatgcaggatcgacaccggttgattcccatcttcacagctacatccgcgggaaggtgtaccccgcgccaagaatgtggtatgtgagagtcaatgtgattgagggacaggacatatacccaatggagaaccgcatacctgatgtgctggtaaaagtgaggctgggccatcaactgctgaggacaaggcaggttcgctcgccgaccagaaacttcatgtggaacgaggagctgatgttcgtggcagcagagccgtttgaggacgacttgctcatatcagtagtagaccgtgtggcacaagacaaagacgaggtgattggtgaggctatcataccgctcgcgaggcttccaaggcgggctgatcacaaaccggtactcccagcatggtttcgatctaagaaggccaggggatcttcgacgtgaaccagctggaggaagacaaattctatgcgaaggtaagccttcgtgtct

SEQ ID NO: 283592 - DNA, 132 bp, Zea mays
tggaactgggattttgcagatatcagtgggtcgattttcgctggaggggtctgcggaaacagatacattgttgtcgtatattcattactgatattatttgcattgcggaaggaaaaggatgtgtgaatggtg

SEQ ID NO: 283593 - DNA, 571 bp, Zea mays
ttctgacataggaattccggtgtcccacaattctacagaagttgcactaacctactatccaatatttgagttgcttgctgttcaccctggccgtctcatgccaagtgcactatcatgttcattgacatggccactttcaatacatctacaacagcatcctgtacgcagcggcgtgcccctgctactgctcgtcacggcgcaatgtataggcaatgttgctcgagaaggagcatagctgagaagcacattactggttccaggggctttgtggactctggcccgttcaatgctgctaaataggggctttacaacaagaactgctgtttgggcactgtcaaatatagcagcgagcagttttgagcataagaaactggtatttgctagtgaggtgactcaaaatgaagctgctccattggctgcacaatatcgcagacaaggatttcaaactctgaagctcaagattggaaataacttcaattcagatatagaagttctggcatctatacgactcgaccatccagattactcatttattttgcatgcgaatgaggaatacacatatggttcatta

SEQ ID NO: 283594 - DNA, 724 bp, Zea mays
gcctcgcccacccataggccatagccggtagatactttcatcaaagatagcacacaggattcgccccgccggttcgcgtgaaaaggagccgacgaatccacctacccgcattcgggctccagcgccaccccgtgccatcgggctgcgtccgctaacgaccgcccgttcgcgcagggcccagggtgtgggagggagcaatggtcgctgggatggaggcggaggaaggggtgatggcgacggacttcttctggtcgtacacggacgagccgcacgcgtcgcgccgccgggagatcctggccaagtacccgcagatcaaggagctcttcggcccggatccgtgggccttcctcaagattggtttggtcgtgtcgcttcagctatggactgctacattcctccgtgacgccagctggctgaagctactgacggtgtcctacttcttcgggtcgtttctaaaccacaacctgttcctggccatccacgagctgagccacaaccttgccttcgcgaccccatccctgaaccgctggctgggcatcttcgcgaacctccccatcggtgtgcccatgtccatcacgttccagaagtaccacctggagcaccaccggttccagggcgtggacggcgtggacatggacatcccgagccaggcggaggcgcgcgccgtgaggagcgccgccggcaagtccgcgtgggtcgtgctccagctcttcttctacgctct

SEQ ID NO: 283595 - DNA, 602 bp, Zea mays
tcgctacgggcagggaggcagaggccgtggtggcggtggcagaggcggtggaggagggtacggaggtggcggcagaggaggaggtcgcgggagggacgggcttgactcgctcgccctccctaagccggactttcggagcctgataccgttcgagaaaaacttctacgtggagtgtccctccgtccaggcaatgtcggaggcggatgtggcgcagtaccgccgcctccgggatatcaccatcgagggccggtgatgtgcccaagccggttagatacttccaggaagccaacttcccagattactgcatgcaagctattgccaaatctggatttgtggagccaacacctattcaatctcaaggttggcctatggctttgaagggtagggacctgattggtatcgctcaaacaggctcagggaaaacattatcttatctgttacctgggttggttcatgttggtgcccagcctcggctagaacaaggcgatggcccaattgtattaattctcgctcccacgagagaactggctgttcaaatacaggaagaatctacaaaatttggatcatattcaagaactagaagcacatgtgtctatggtggt

SEQ ID NO: 283596 - DNA, 1060 bp, Zea mays
  unsure (1)..(1060): unsure at all n locations
gctttctcgtctcctcccgcgccaccatcaccgccgcctcctccaaaccctgtccagggccgccgtcgccgccccagatgttgacctccaccagaggctgtgctcttcgtctgcagcgtcgagcccgagcctgtcgatatggcggcgaaagaaggagatgggcaaggagggcctcatggcagtggcgcagctcaagcggctcgcggctctgcccccggcggggggtcacccgcgcctggagcagttcatgtgttcacacgtgtcgcggctcctccgcaccgacctcctcgccgtcctcgccgagctcctccgccaggaccatgtcagcctctcaatgaagatatatggttgttgtgcggaaagaaatctggtaccgccctgacatgtacttctaccgtgacatgctatacatgctagcgaggaacaagaaaattaatgaaacaaggcaggtatgggcggatctcaagtctgaagacgtgctatttgatcagcacacttatggcgacattgtgagggccttctgtgatgctgatttgattgaccttgcaatggaaatctatgatgacatgaggagctcccccgaccctcctctatcattgccgttccgtgttatcctgaaagggttggttccataccctgaactgagggagaagataaagcaggattttctggagcttttcccagatatgattgtgtatgatccaccagataccttatctgatatagatgaagaattcaagttttgatgaatgtacgccttcatccggattcagtgcttctgagttacattccctgcactgcaggcaaacctccatttctcgttcttttggtgggctagatcaattgtaaatgtagctgtctcgatctgcccagtagctgtggtaccaccaatttcaacctcttgatgaaccatttttgttaatctatgctttggagaattgtctgcttccgtctgtgtctcgtcctactttgaatcaccttgttctgaagtttggtactgctgctgtgcactgagatttgtgttccgttgatccctgctatataatcatgcgtacncttc

SEQ ID NO: 283597 - DNA, 460 bp, Zea mays
tttacagagcacgagaagttgactatcgtgaggtggccaggaaggaaaagtatctgcggcaagcggcatggggtcgcccaaggcggccaagagcatggtgaagcagcgcatctggcgtcaccggctcgtcgcgccgttcgctgccgttctcatcacggccgctcgtcgtattctccggcctgttcgcgcaggacccaagtgccacctcggagttcactgccgtgaatgcgggtaacaccctgccagggcgcgataagtcggaatccacagggcccgctcaagctttacaaggcaccgtgcctgcagcatgcgagagagggacagcaaccgcagtgccggcccaacgagaaagaagcactggaggatctgaccctgaagagaagcaatcgcccgcacaggaccaggaaggagaagaaacctttgctaagtcaggttgagtccagtacacaacatgcacacc

SEQ ID NO: 283598 - DNA, 625 bp, Zea mays
gcaaaccagagggctggaagatctggacgcactggacccggaaaatgcttccgtctatacacgagttacaactacatgcacgacctagaagataatactgttccagagatccaacgaaccaatcttgcgaatgttgtgcttacactcaagagtcttggtattcatgacttggttaactttgacttcatggatccacccccatcagaagccctattaagggctctggaacaactttttgctctcagtgcactcaacagtcgtggggagttgaccaagactggaagaagaatggcagaatttccactggatcctatgttgtcgaagatgatagttgcttcagagaaatataagtgttctgatgagatcatctccattgcctccatgttgccaattggcaattctatattttattcgtccgaaggacaaacaagttcatgcagataatgcaaggttcgaatttccacactggcaactgttggggaccatatagcactactaaatgtgtataattcttggaaaggaacagactattcaactcaatggtgttatgaaaactatatacaggtgcgcacatgatagagggcaagagatattcgggatcaactagatgggcttatggaaagag

SEQ ID NO: 283599 - DNA, 445 bp, Zea mays
  unsure (1)..(445): unsure at all n locations
ctcctcagtactctggggggaccatccatcagtgcgatatctgcggggccgctgcgcatccgagctgctcggggaatgcacacaaggattgcaagtgtgtatctatggctggtttgggccatgtgcttcaccagtgggctgtacaatggattgacagcgcggatcactctgaagaagactctttctgttgccactgtgatgaatcttgcaatggagctttccttgcaggctcaccagtttggtactgtatgtggtgtcagcgactggtgcatgttgattgtcacagcagcttggccaaggaaactggtgatatctgtgacttgggaccattgaaacgattgatattatcacctctttgtgttaaggagcttcattggacaggtgctgggattntgagttctatcacaaatggggctaatgaattggcttcagtgtccgagagaca

SEQ ID NO: 283600 - DNA, 468 bp, Zea mays
agggagcttcctcccttcctccgagggcgctggtctctctcccatggccggccctctgctccggcgctcggcatccctgcagcaggcgcccttcttcctccctggctcccacggcagcaagcagccagcagggagcaaggccagcccccatggcgcccttcctcctcggctcaatggtgtggccgagcagcaacctcttctctctgtttcctgtgcgtgcgcaggggcagaaactccatggccgccgagctccattcctccaaacagcagctccctccacggcgccatttcttccagccggctccactttcccctgcgccctacctttttccatggaagcagcaggagctccacctcccatgggcgcccggaggacgcaggggaagcttgagccggctggaagaaatggggccgtggagggagctgctgtttggaggaatggagctcggcggccatggagtttctgcg

SEQ ID NO: 283601 - DNA, 547 bp, Zea mays
gggtttctgaaagcagtggcagccaatcaggttctggtcatttctggcgagacaggctgcggcaaaacaactcagcttccacagttcattctagaagaagaaataaacagcctccgcggtgctgattgcaacataatttgtactcagccccgccgtatatctgccatttcagtagcagcaagagtatctgctgagagaggtgaagaactcggcgaggctgttggataccagattcgccttgaatcaaaacggtctgcacaaacatggttgctgttctgcactactggagttttgcttagaagactggttcaagagcctgacttaattggggtgagtcatttactagttgacgaaattcatgaacgcggcatgaatgaagattttctcatcataatactgcgtgaccttctaccaagacgtccagatcttcgccttgtactgatgagtgcaactataaatgctgaactattttccatgtactttggagatgctccagtgatgcacatcccggggttcacttttcctgttgctgagttgtttctggaag

SEQ ID NO: 283602 - DNA, 692 bp, Zea mays
ggccgggctgaaggggaggttcttgttctccgtcgccggcgtcggggacgacctctacgtcgtcggtggccggtccggtggctcggatgccagcaaggtgaagacgcacaagggagtgctggtgttcagccctcccaccggctcgtggcggaaggcggcgcccatgcggagcccgcggtctcgcccggtgctgggggtgtttgagatgtccgccagctgcagcattctccacactcgcgtagagaagaacgtccggcgcggcaagtctcggttgggtggcgcatccgctgtgtacgaggacccgcaccggctctccctcaggcgcctccgaatcagggacatgctggacgaggacactgattccactgagcgcgcttcgtatcatcacggcagatccgccggacacgaggagggcatggaaggccaaccgaggctcgccattgtcgccgtcggcggacgcggtcgctgggacgaaccactggtgtcgggggagatatacgatcccgtggtcgacaagtgggttgagattgccgggtttcccaccgacgtcgggctggcctgctccggcgtcgtctgtggccggacgttctacgtgtactgcgagtccgacacgctcgtcgcctaccatctggacaagggctcctgggccgtcatccagacgctccgcccgcctccgcggctccgcgactacg

SEQ ID NO: 283603 - DNA, 617 bp, Zea mays
aaaccagtgaatgctggtcaagatttggcgtgggggatgcacgctcaagattctagtagtacaaacccgttcctggatcatgcctacttgatgagccacactcaaatttattcatcttcccgtatgagtagccaaccatgtttccctgaagaagttgatttcctttcagagcttgtaatacaacatgacaatatgggagtaactgctgatgccctttgggaacctgcaactccacctgatgatgcgccattaccatcagaaattatgactgaagatgatttcagatccttctgccaagaatatcatgagatagatttttcatctgtcactaactgttctcacagtgaaccagcctcagattctaacaaaattccaaatgcttttctgatcagagagtcagattttccatgttataactctgccttgccagtgaagttagatcaggaagcctgtattcattctaagttctgttctgagtgtgtcgaatattcatgtgctgtggaaagacaaggcactacatcaatggttgcttctggtaaagaagatagcgtggacaaggacgagacatcaggattagatttccatttaaattctctcgagttttccgatgacaacag

SEQ ID NO: 283604 - DNA, 549 bp, Zea mays
ccctcgcgtccgcggttagaagttcgtacgacgtcttcttgaggaggcgatgaaggtagacccggtttatggcgtggcaagctgtgttcacagcttccgaccaaaaccgctcgggtgtcttgaattcaccaagcatcgtcctcgccatgtctataagcgtcatgttcttcctctctaccacaccgttttgctgtggtgtgtagggagcggagaactcgtgcttgattccttcctcctcaaggtactcctccacttgaaggttcttgaactcggacccgttgtcgctccttatctttttcaccttgagctcaaactcgttttgagctctccttaggaagcgcttgagggtcccttgggtttcagatttatcctgcaaaaagaatacccaagtgaagcggggaaaatcttcaactataacatgaccatacttacttcccccgatgctgaggtaggcgacaggtccgaagaggtccatgtgaagtagctccaaaggtcttgatgtggtcatcacattcttgctatgatgagaacttcccacctgtttacctg

SEQ ID NO: 283605 - DNA, 473 bp, Zea mays
ttcctcgcgtccgctcctcaccgaagacgccattagccatgagcagcttggcttatccgctcctccggctcccgtgccgctgctctatcgcgccggcgccggcgccggctgtctcagctccccgcaccgctgtgtctatctgcttcggcttccgcaaatgcagggggcgagctgacggcgcgggaaaagcgagcgcaccgtcgggaacggcgggagctgcgtgcgacggactggaaggaggaggtgcaggaccggctgatccacgagccagcgcggcggcggaagaagcctcctaagcgttcgtggagggaggagctcaacctcgacctcctcgccgagctggggccgcagtggtggctcgtgcgcgtctccatggcgcccggcaccgactacgtcgacctcctcaccaaggctatctcacggcgctactcggatgtccccttcagatttacaatccatcaatccagtaaaga

SEQ ID NO: 283606 - DNA, 526 bp, Zea mays
tttttacatccgcggcagcgtagcgctccccatcttcgagccccgcagccggttatgccttggcgttgccgagctcgtcatgaccactgagaaagtcaactataatgccgagatccagaacatctgcagcgctctcaaggaggttgatctcaggagctctgatgtctcgagtgatccccgtgcaaaggtgactgatacttcataccgagcaatcataccaaagatcgtcgacgttctcagaactgtttgcagagacgcacaatctgccactggcccagacgtggataccctgcatctgccaggcaaagaggggaagccgccacaccgatgaaaaactcaagcattgtgtgtctaccctggacgaagcgtgctacgtccgcgacctgaatgtaaatggctttcacgaagcttgctctgagcatcatttgttcagaggtgagggtgttgtcggcagggcctttgcaacgaacgagccatgtttctctgaagacattaccgcctccagcaagatccaataccctctctc

SEQ ID NO: 283607 - DNA, 723 bp, Zea mays
cggacgcgtgggcttgattcggaattattaggccaggagcaaagcaaaagctttgatatgtactcctctctttcccatcttttcccgtctgtccccactcagcaccttgccaccttgtgtggcgtgtgactagaaagccacagctgccgagttggaactgcaaggaacacatgagactgagggttgcacacacacacctgttgcttagattaactttatttacaagttcatgctttacaagattaagcatcttcatctttcttttgacatttttgcagcgacagatccaaacattcatctcggaggccaagccacgagcaactggaagattcagtgtggcttgcatccttgaaggcaagtggcgccagttctatgaaaataacgtcatggtggtcggcgcccactgtgttccgatctgcattagcaattgcagtggcgaccttgcttggtgcacaaattgcaccggatcatcctgtggtcggcttgctatgattcggcaaggttgcggttcttgattcttaggagccatccaagttattttcagaccggaagcagattagagcggtagtagatcagcaatggggatagaattctgtgtaggttttttgttggtggataggtgctagcgctagagaaggaacgatgtgttacaagttggcaatcggaattccatgaatgcattacataagcacattgcctttcagaaacattgctctttgaatt

SEQ ID NO: 283608 - DNA, 1116 bp, Zea mays
cggacgcgtggggtgtactgagttgcgcacaagatcaagatattttagaaggcgaggtaaagtccgtcgtttgaagtacacctggaaatctgcaggttacgttttcaaaaggattaccgaaaggtaggatcagccttgtcgacaatataatccttgtggttgtccatctacatgcggaaagcagtgtccatgtctttcaaatgggacatgttgtgagaaatactgtgggtgtccaaaaatttgcaagaatcgttttcgaggatgtcactgtgcaaagagccagtgtcgcagccgccaatgtccatgttttgcagctgacagggaatgcgatccggatgtttgcagaaactgttgggttgggtgtggtgatggtacattgggagttccaaaccagagaggagataattatgaatgccggaacatgaaactgcttcttaaacaacaacaaagggtcttacttggaagatcagatgtctctggctggggagcattcctcaagaatagtgttagcaaacatgaataccttggtgagtacactggggaactaatctcacacaaagaagcagataagcgtggaaagatatatgatcgtgagaactcatcgttccttttcaacctgaacaatgagtatgttcttgacgcatacagaatgggtgacaagctgaaatttgccaaccatgcccctgacccgaattgctatgccaaggttatcatggtaactggtgatcatagagtgggcatattcgccaaagaaagaatcctcgctggtgaagagttattctacgattaccgctatgagcctgacagagctcctgcttgggcccgtaagcctgaggcgtcgggagcaaaggatgatgggcaaccgttcaatgggcgtgcaaagaagctcgcccaaaacaaccgaggctgaatctgatttgattctttcattgttaggacaaatttggcagccattcaactaatacaaggaacctgtcattcataggccccaatttatttgaactcgtcattgtaactcgtatgtgcttgaattctccatggcagctggtcctgccatccgtagagttaggtcccgtttgttttgaggaactaaaaattaatccctctattttagtc

SEQ ID NO: 283609 - DNA, 720 bp, Zea mays
caggaaagtcatatttgaaattgaggaacttaaagatgaaaagcctggcaatagggcagataacagcaaaaccttgggacaagtagttatggttgaacaaaacgaaatagaaaacagacttaatcaagagcacttgcagagtctccgcctgaagcaggaacgggctggtcttgagaacagaaatgcgtaacttactgaggaactccacttagttcaagatcaactttctatcgaacaaaccagggcttccaaatttgagaatgcaatttcagatattcaacaacgactacagaagatggataccctagaaaaggagattgaatcacttcgctatgaactggacagcactgtatccgaagaagaatcttcaagtggcaacgagttgcaccgcagtcggggcttttggaggtggaatgggtgaactcctcgagactcaaggagtgagtattgaagagaatactcttccaaatagttgtcattattttaatttttatgtctttcacaaaaatatatgaattcgtggatggtactagttcggaagcatatagaggatctaagcaaactgcagcaacatcaactgtgaaaagcatcttacagaaagtaaaacgagtatcatgtggcccagaatttcctatgttagaatagtttcttatctgataatgacgccggcaatgatcaccataacgaattatttttttcatacatatgtggtgggatatt

SEQ ID NO: 283610 - DNA, 459 bp, Zea mays
  unsure (1)..(459): unsure at all n locations
ctttctgtgcgtgaaggcatcgaaattgttgtatctggtggtatgtcgatgccccaaattctgtcaaccctcgacccgcagatgatccttggggacagaaccggaccaagcagaagctgaagctgctacgagccctttgtttacctttgtgctgatgattgttagtaacattttcatacaggctaccacgagtacggcaaactagactccgagcacaagtatctgtatattaagtaggtgtaggtgactcacacggtttgattatttgctggactctgtaccatggtttgtagtttgtactgcatccgatgcaagaaagaagcatctcacctgtctgtgatatatccaactgttgtcaaattactatcctctgtgtagtccttgattctcatctgacaacgttgaattgggttcttgacttgtcgatggttagctgcattcttttcttttananaaaaa

SEQ ID NO: 283611 - DNA, 860 bp, Zea mays
agcaaacatcaaactcattctgggcacacaattgaatcaagtgaagctactagtaggagacggagtaaccgggaatggaaagggattggtcggaagggtaatgaaaaatttccgcttcgaaatgtactaactgatattcttcatggggaggacaaaagatcgcaaaagtccaatgaagtacgaccccctccatcaaaacaacagaacgacaggaagcgtgaaagggatgatgagacacatcaaacaaagaaggactcctcatcacgctccatgcttggtgatggtgcttcccgtcgtcttctacagtttgctgtccgagatgctgtaaaagctgtacagccaaccagtacctctgctgaaccagcatccaagcgcctgtgctctgtggtcgccactacttctacagagcacatgcgtgataggagatcagaaagatctcaggactacctgaacgatagaagatcagaaagatctcaagacaacttgagtgacagaagatcagaaagaactaggccaatgctacaggtacatggagctgctttagctcttagagctgcagcggaagctgctgcagattctgcaaggttagatctactggaagtgttttcaagcgattgggtcaagggaatgttgtgaaacagccatctcgttctcgtgaagagaagagagattatgaagattttgagccagttacgatcgcagatgaacatgattctgatcaatatgttaataatgaggaatccgaagaggaatctggagagctaaccatggcagatagggtagctgttagtggaatgtatgttgattcgagctctgaagatgatatggaccgagatgagggtattacaagataccaaact

SEQ ID NO: 283612 - DNA, 490 bp, Zea mays
  unsure (1)..(490): unsure at all n locations
cccacgcgtccgcaatgattcacagagatgggagataatttgcaagttgtctatcggcattgtgaaaggactggaccaccttcacacagcatcgcagaaaccaatcattcatggcaatctgaaaacaaataacattatgcttgacgctgatttccagcccaggatatcagacttcggcctctaccttctgctgaaccctgctgctgcgcaggagatgcttgagacatctgcaatgcagggttataaggctccagagctgatcaagattagggatggcaccagggagagtgatatctacagtttgggagtgattatgctcgagatgcttgctcagaaggaggccgcaaatgatgaatcgccaaatgcgcgtgacatccatttgccggtctctatcagagatctggttctcgagaggaagatatctgaagctttcagttccgagcttatcatacagagcangaanttctggatggagggcaatctgaatgcc

SEQ ID NO: 283613 - DNA, 530 bp, Zea mays
  unsure (1)..(530): unsure at all n locations
cccacgcgtccgctctctctctcccttctgctggtctagttttggtttccctctcgctttccttcgctcctaggcgcggctccggcgggcggaagaggagggagaggcaggcggcggcccccggcagttcctccgtccgcggagcccagagggaggagggggaggcctggtctggggctgtccgctgaatctgcttctccgaagatcgggtggaccacgggactcggcgggcgcgcccgatctgctccgccgtcgaggtgaagtcggctgatatgacgtacctcatttggataacaatttgaccggcaccagatgttacagatatatgcaggaggggctagggcaaaggatgcatgtacctcatggtatcaatctgtgtttcgcaacttcttccgtgccctttcaggcgcaatcttccattgagccccgtaccgcagaagtgaaccctgtaccatctgaaaagatatctgctaactcacaagctgntagagatgatgctggagcagctgaaggtatcgacatgaatggaa

SEQ ID NO: 283614 - DNA, 823 bp, Zea mays
ggctcaagaggtcgccgagaagcacgggggactagagggcgacttgggggtcaatccgtcggatgaccatttctggtttggccggccaaagatcgtcctgtacctgatccacttcatcctcttccagaacgcgtttgagatcgcattcttcttctggattctgactacctacgggttcaactcctgcatcatggaccacgtccccttcattgtgccgaggctcgttgtcggggccatcatccagctcctctgtagctacagcaccctgcctctgtacgcgattgtcacgcatatggggactttcttcaagaaggagatcttcgatgagcacgtgcagcagagccttctgggctgggcgcagaaggccaagaagaggaaagcgctcaggaacaatggcaatggcagcaatggcgccgcggccgggtcgtcacatccatctgcgactgcgaggctcgaactgatgagacgagctgtcgctcttgaagaaggcagtgccggtggcaacgggagtgaggctagtgcggccgagctacacgacacgggcccgaagctctgaacgctgtagaaaacgcccggcagagcgtcagaagatgcagtgtttctgtacgcgagccatatgtcactatgtcgtgtggctgtttagccaggtggtgtagtgtgatactgcgtatcatgatttgtatgcttttctggattgagcttgaagcgtgttatggagtggggagctttgtgtagtgttgtgctcatggaattggaggcgatgtttttaggccggatcagagacgatccaggcgcgcaagggtacgcagaaaggcagcccccc

SEQ ID NO: 283615 - DNA, 575 bp, Zea mays
gtgaaagaggcaattcgtttcattactggtttgctcaggagctctggtaacaaagacaaagatgaggacaaagttgagccaatggagaaattgctgagccactgcaaggagatcgcggaccaggtcaatgatcttggggcttctgtatacccaccacaagactcgtctgagatggagctcgctataaaaagactgtacaatggcatcaacgggatgcgcaaggaaatagggaacctcggtggcgcacctgagagcacctttgcagcccttgaaggattcgaaaattgccttggatctctgcgggccaggttagctgatgatgtggtgaacgagatggaaggtcttaatattagccattagcacgtactgttcagatttttccatagcagtgttatgccagtatatcttctggttttgcacgatggaaggagcttctgtggtttcagtaaatgaggcgtccggtctctgtactgatggcgttgttgcgggtcatcgattgtaaaggaagtgggcctggatttctgtaacttctctggttagtgatgccactgtttacgggtcattcattgcgcgaa

SEQ ID NO: 283616 - DNA, 696 bp, Zea mays
gtttaggccaacgatagttcaggacacggcagacgggaggtgcctcgacgaagtgcatggcaacatagagttcaaggaagtggccttcagctacccttcccgcccggacgtcatgattttccgagacttctccctcttcttccccgccgggaagaccgcggccgtcgtcggaggcagcgggtctgggaagagcacggttgttgctctcattgagcggttctacgatcctaatcaggggcaagttttactcgacaatgtggacatcaagacgctgcaattgaagtggctcagggaccagattggcttggtgaatcaggaacccgcacttttcgcgactacgattcttgagaacattctttatggcaagcctgatgccacaatggcggaggtcgaggctgcggctacttcagctaatgcccatagcttcattgctctccttcctaatggctacaacactcatgtgggagatagggggcttcagctctccggtggtcagaagcaacgcatcgccatcgcccgcgcgatgctgaagaacccgaagctcctgctactagacgaggccaccagcgcactcgacgctggttcggagagcatcgtccaagaagccctcgaccggttgatggtcggcaggaccaccgtcgtggttgcccacaggctatcgaccataaggtgtgtcgacatgatcgcggtgatcca

SEQ ID NO: 283617 - DNA, 532 bp, Zea mays
  unsure (1)..(532): unsure at all n locations
attagctgctgcataattgcctattacatgctcgtgcacagaccgtctggtaatgctaagcctatagcttccaagctagttaaatgcatgggaccgaaatttactaaatttacaactactgtttcatggctgttcctgtattcatttggttgttgtcactatgtctattgtatcagtttcctgtcagaattggatgtgtggctaccaagctatgtaactgtaatgaacatcatttgcagttttgtagacattgtccttatatgaaaacttgctcattctactttgttagctttctgttattgcattcatgtcaaataccacacaagatattgctattatttggaatgaagattcatgccaaatgaaggcttgcccatgagcatctgtacaagattatgcatcttacttacccaactaatttaatgcaatatgagtgaggtcctgtctgggtaggtgggatntggatcctaacacttgtctggaatctctttgtaactttacattggctaagtgctctgcttgatgtactctc

SEQ ID NO: 283618 - DNA, 419 bp, Zea mays
ttttagggactttgctggcaaggacatcgaaatcaagaaattggttgatcctaattcgaaggaggcaatagagaaggccaaggcagctggtgccgccccatcagctgtcgatagcattctagagcaaatacggaagaagcagaagctgagcgtcctggacaaaacgaagaaagactggggagagtacaaggaagaaaaccgaggcttggaggaagagctggacgcctacaagaagagctcgaaccagtacctcgacaagcaatcattcctgcagcgaactgattaccgcgagtttgagcgcgagcgggatgcccggctgtccatgatggccaaacggaggaccgatatgcgggaggacgatgtgtaggactgaaatgtatcccttcctgtggacattctttttcttttgagatagtggt

SEQ ID NO: 283619 - DNA, 600 bp, Zea mays
cacccattgctctcactcgctcccgccggttgctcgtccccggacccgccgcactactgctataggcgcatccccggcgccttcgcacactctctccccggccacttcccaaatccgcccgccattcatgcacccttctgtgcactggcagcgccaccattagctcgcagctcaagctcgccactaccattttggtcggttcttgaggaaatcgatcgaaccgttggagtgccaccactggcagaggctgttgcattcttgagttgagcaggaagaggagaggaagcaatggctctgtcgacgttctctgtcccaagggggttcctcggcgtgccggctcaggactcccatttcgcttcggcggtcgagctccatgttcacaagctgctccaggccaggcctatcaatctcaagcctcggcggaggccggcatgcgtgtcggcgtcgctgtcgtcggagcgcgaggcggagtactactcgcagaggccgcccacgccgctgctggacaccatcaactaccccgtccacatgaagaacctgtctgtgaaggagctgcggcagctggccgacgagctccggtccgacgtcatcttccacgtc

SEQ ID NO: 283620 - DNA, 666 bp, Zea mays
tctacgcgtccgctggtgagggcaaagtaggtgtatattacctcgccaggatttcggacccttctgatttacctcatgctactgtgtctaccaatgaggactatggtgaaaaacatatttcacctgcaactatatctaaaaggagttgactccaagtgttgcaggctcagtatataagagtactctcacagaacatggtgctgagccatctagtgcgcaaacaggtagcaaccagcaggaatcaataaatgtgaaaaacagtagctcagcttcaaaagaacaggaaacaactgacaattcattgtttatctcttccaataagaagcccttagacaccaagcaaggtgaatgtgactggtccacctgcagccttgcgtagcttagcgttaacaggaaacacataacctacaatattttccagcttttctactgaaggcatgaatccaacaggaggcaatgcacctaatgaattagcttcttccttgcaaccaagcagcagaagttttggaaacaaccaaactggtaaagaaggcctggattcagttcaatcagtgggaatatttggtggatctcaaaactccaataaagatggcaatgtctatggtttcaagtcttcattattcacctctagtggatctgtccctgccaagatcggagaaaggaatg

SEQ ID NO: 283621 - DNA, 139 bp, Zea mays
tgtgtgcctgcttgcggtcagtctacatgcgtgcctgacccttttggattgctttatctcttgtgtaataagttgtgaccattatttttcgtgtggaatgtatgcatgcatgtttacatgcaccagctgtgttttatgt

SEQ ID NO: 283622 - DNA, 276 bp, Zea mays
ctctcccatccagccttctcttcttccttgcgcaagccgcctggtggtcgaccgctcatgctcccatcccccaccagcgccgagctccaccaattgcacctccttcccatggcgtgagccctgcgttggcgcgcacctctgctcggtctccatctccccagtcgtcggaccggcctcctcccagccatggcgcagggccctgctcatcttcggcttccccttcgcgtaggcttgccttcggccgtcgtgaggacaccagcaggctccagatccgaa

SEQ ID NO: 283623 - DNA, 280 bp, Zea mays
tatcttcactcgcattgtcgagaagaaggtctggaacggaggagattccccttattccgtcgggatacccaaaatatacttagagacaagtaacatcttaacgttttgaggaccttcggccgaggaaggcccccaacaataggtatcttgcaatttagacaaaccatgcaactcaaatgtactccataaggggaagtggtgcaagccaattgactttgttgctttggttttattctttcattacggttcttttttataactcgtgaccgtccagttggaa

SEQ ID NO: 283624 - DNA, 720 bp, Zea mays
ctgagactacctgtgtccggacgcccggtctagcaactagcaagcgccgcatccctcgcctcttcccgacttgccccctcgattcgatccgagcttacttctagggttcttggccccgctccaccgtcgcccatggcagacgatgccaaccgagcggccttcatggagctgcagtcccggatgatagataccaccgcgaagatcaagcagttacaaacccaaatgcgttctaaagaaggggaaaagaagcgtgcctaccttactttggaggaacttcgccagttgccagatgataccaacacctacaagactgtcggaaaagtgtttattctggagccaaagtcagttctgttcaatgagcaggagcaaaagcttaatgacagtgagagtgcgatagcttcaatgcagacatccaaagactaccttgagaaacagcagggcgaagtggagaacaatattagggagctgcttcaacaggacccaggacttgcgcgtcagatcctctcaatgaccgttcaatgagagttgtttttctctccatttaattttttagataatttgtaatgtcgcagtttgatcagtcatgctgtggtcttgccttatctgtgagacatgtgcggtctgtaatttctgaggtgtttggctggtggaatgatgtggtccatcattatctcactctagtgcttttgtttggtttgtggaatagattgagttaattca

SEQ ID NO: 283625 - DNA, 360 bp, Zea mays
caggtccgtgagtggaaacagcgtgcatgaccatgtacactatcttggcatcagcatgcatgccgagtcatggggacattgcagaattgttacggacaatagtaccctgccacagcagtataagatggatcctgatggcaatataatcttgtcgaagcagcctggattatcagtaaatgaactacacagtgcacagtgaaaaagtcaagatagcgttaataaatttcatttcttgtatgatcctctggtggactcgaagtcgaaggggatatattaggacggacgaccttggctacgaaaaaaaggcagcaatcttcattctataggatgtatgtacatatgtctgtgatgttagttcca

SEQ ID NO: 283626 - DNA, 773 bp, Zea mays
gttttgttactgcttcacacttcggctctacaacggtgattggcactcagatcctttgggtgcttgcactgtcgccctgtcgatgtcgaaagtcatgggccaggatgctaaacctgagactgtacctgaagcactcgcagcctgcatcgaggagacatgctcaccagcttacaggcatactggtggtttcaggtttgctattggactcgtggacgatatcatcgccattctctccttgggacagaacgcacttatttgtgccttatgcgacttccatcgactcattgaagttggtaagagcatgctcaaggtggagaaagtgggcaagacggagagggcacagaactctccgaagcttcgtagtgcagctaggaagctattcttcatgacttgttgggtccatgagcagccagatgaggcgtggccatctttagctcacatcgtccaggtgcagaaagcatctatggaggagttggagaccgggaattggaaggcggatagaaagagcaaaccacaatccgcggttcttatcgaggagctgtaggcatatggatgtaccactggaaactggatcgcgaggctctgtacccttgtgtatcgctcaggatgaatccaacgagagaccttgtccttgtaatgcagttagttgcttctgtgtacacttttttttgaaaaaaattgtatttgtatacgagtttgaaatcctagttgaagcgatcctgctttactttgcctgttaagttgcggaatgatccaatccatgcgttggagct

SEQ ID NO: 283627 - DNA, 651 bp, Zea mays
ctccaattcagacccctctctccctcacccacagtccccgccgccgccggcgccgcgtccgcgtcctgtgcgcctcgctcactctgcttccgccgccgccgcagcagtcgtctcgcagcggagcggacccggaggcctaccatggcagcggcaatctcgctggaggccggcggggccctggcccatgacctagggtctgcagtcgtcacaggtggtgtcgccctcgcgctcctcaaattctttgaggagctcgccaagcgcggcgtcttcgagcagaaactcaccaggaagcttgttcatataagcgttgggctggtgttcatgctcttttggcctctttttagctctggatggtatactcctttccttgctgcgctagcaccaggggttaacattatcaggatgcttctactggggctgggacttatgaaaaacgaggctatgggtaaatcaatgagccgctctggagattacagggaacttctcaagggcccactgtattatgctgctactatatcttttgccacgtctcttttatggagaacctcaccagttgctatagcacttatatgcaccttatgtgctggggatggtatagccgatgttgttgggagcctcctaggtaaagacatgcttccataccctcccaac

SEQ ID NO: 283628 - DNA, 379 bp, Zea mays
cccacgcgtccgcccacgcgtccggtccggagtcattttctggaagatattcttgaaattactgggcactggttaactccatacaatcaaattgatgactatggtcaagaaaaaagttggaagatgcaaaagcaagctctacaaaagcggaagagccaaatcgcttctgttgtggaagatgctgttgaagctgctgatttgagggactatagttcgcgaactcgtgattccttatcctgttggaatcctgattcaattggttttaatttaatagaaaatgccttatgccatatttgtcaaaaggaacgatctggtgcaattcttgtattgatgactgggtgggatgacattaatgcattaaaagagcagcttccaagca

SEQ ID NO: 283629 - DNA, 484 bp, Zea mays
aagaagaggggtttaatcactggatgccttggatgaggcagaacggatcgctgctgatgccaaacaaaagggaactctatccacgactgacattctggctttaaagagggttatatctgaaaaccgtcagaagttggctgatcagctagctgaagctgcttgccagtcttctatttgtggtgttgagcttcgagctgcagcgtctgctctcaagagacttggtgatggacctcgtgctcatagtttgttgctcagtgcacacaatcagagacttcagttaaacattcagacaatacaaccatctagcacatcatatggcggggaatacactgcttctcttgcgcaacaattttttcctgttatagctcaggctctcagtgactcagttgaggtcttcagtgaaaaatcagcttacacatctgaactagttacttgggctactaagcaggcaatgtcattttcgctcttgtaagaggcatacttt

SEQ ID NO: 283630 - DNA, 533 bp, Zea mays
tggtttctatgttcctaccctttcccctcctcccggtgccgttttactttcccttggttctccacacaagcaaggcgctcaacctgccgcccgggaaaaaccctagaccggcgatgtccgtccccggcgcccccgcgggcggcggttcccgcagcttcgacttcggcgccgacgacgtgctctgctcctacgatgacttcgccgcctcgtccgagcccaagcgccccgatccggccgacagtgtgcccgattttcatgatagcagattggccgggccatttgtgaaaccttatgaacaagaaagttatgggaaagaggatgtgctttctgctgttgagaaatgcatgaaaaagtatgctgataatttgctacgatctcttgagggaatcactagtcggctttcgcaactggagatttattgctataagcttgagagatccataggtgaacctcgaagtgatgtgcttcgtgatgagactgaccatagggtgaagtctctggagaaacatctaaatgaagtacacaggtctatc

SEQ ID NO: 283631 - DNA, 365 bp, Zea mays
  unsure (1)..(365): unsure at all n locations
caagctcgncatctccgactggaactaccccttcttgctggccatcgacccggacgtgggggcattcgcggcgggcaacgccgtggcgctgaagccgacggaggtggcgccggccacgtcgctgctgcatggccgacctgctgccgcgctacgtggacccctcgtgcgtcagggtcgtgcagggcggcatcccggagaccaccgcgctgctggagctccagtgggacaagatcttctacacaggtaacagcagagtaggacgcatcgtcatgtcctacgctgccaagcacctgacgcccgtggtcttggagctcggaggcaaatgccctgtcgtcgtcgactccgacgtcaacctacacgtcgct

SEQ ID NO: 283632 - DNA, 585 bp, Zea mays
caactttactacccgtctcgcgcgatcggaacacattccgcttgtcctctctcgccgctgctccgacgagctcgccggcgccgactcccctcccgtcggaccagcccgccgaaagcggccggacgaacgacaggcttccctcccctcgcacttgcctgcctcagtcgccttcctgagcctctttctgcgcccggccacgggctcgcggccccgcgcccgagcgcgtgcagcaggcgccgaacccgcctcctgtgccaccccatcgaagctcgccggccacgtggagggattccttttcctcgcagcattcctcgtcgccgacggcttcgtcgtactctaggggttggattggcgtggagcggagagcagtgcaaacctgggattgaattctggtgtagatggattccacagctcttcaatatgaaaaccaaaaattggtgcaacaactggaggtacagaagtccgaaatgcatgcattggagcacaagttcaaggagcttagtgatgatcaatgttcttatgacaagacttctgattctttgaataaactgtggaatcagctgattgatgatttgggtctgcttg

SEQ ID NO: 283633 - DNA, 555 bp, Zea mays
cccctggtccgggatgacgctcgcggcctcgctgggcacgtggacgtcgtggcgcgctcgacctgagacgtcactggtcctgaaacttctccagggggacgacgagacgatgggctgggcgaggtcggccagcttcgacgggtcagacgaggaggccatcgcggcgggacctgacctgaacatgcagtcgcacctgagcctcgcgctcctcggggtggatgcggacgacacgctgtcgcgctgcagcagcacggagcgcacctcggccgacggctactggagccggtcgtccagtttcgactagcggtagctgcatgatggaactgatgcaacagagtagagtagtgtggttacgtacagcaggcaggcaggcgattggtatgcttgatgagatgattgttcatatcaggattcaggtggttggaatgtggacagcagctgatttagtttagatggcagatttagcagtgttgctttgctgatttggctaggagtatagatctgaatctgaccttacgatgcaattggtttcgtatttgtattgtttttctttcc

SEQ ID NO: 283634 - DNA, 881 bp, Zea mays
agaaagtaatatctgcaatcaagtggcggaatcaatggcattccatgaaaaggaaacacaaggtgaaactgaagagatggaagagcagaagaacatccctcgacattatgaagttgaggataataatgagacaaatgaactgtctcctacatttgcttctcagaataacttcaatttgcaagttgagaaaggaatacaaatctacaatttagatacaccgccacaagatgaattgttgatcgatccacccgataaagggaaaacagttgattcggagttattacctaacatcaaagcagaagatgctgttacagtggaagaggaaaagattggccagtctagctcatttaaaatacgtgatctcaacctggttggtagtccagaggttgttgacatgcgaggtgaccctcgtttaggccaaagctctactgctggatgtccagtagacctacaagataatcaacaagttgagtttgaaacagctcttggtaacaacccgaataatactgacacatgtgccccctttctgttgggaaataagtcagttcaagttattgatatcgaagatgacataccaattgaagccggtgcttgtgacacgtcaaaatcaaaaggtgagatggtatattctagcatggagagcatgatgaacccgcctccggtgaacaccgatgctctacatggtatccaagatgggtatagtcttgcaatttcagattaccttggtgctgatatgtcatgctaccaatcaatacaagcagaacttcaagatgggatggacctaaacggttcagagggcattactgtgatggatgatccaatatacagttctcttagtgacataggtgttatggaggtttgggaccagcaacttcaagact

SEQ ID NO: 283635 - DNA, 305 bp, Zea mays
gaagctcgaattcgctcgagccaaccggcgccctcgtcgccggcgccgcagtcaacacctgagacctcgtcctgcctgcctgggacgtgagatggtatattctagcatggagagcatgatgaacccgcctccggtgaacaccgatgctctacatggtatccaagatgggtatagtcttgcaatttcagattacctgggtgctgattatgccatgctaccaatccttaccagcaggacttcaagatgggatggcctaaacggttcagaggccttactgtgatggatgatcatatacagttctctta

SEQ ID NO: 283636 - DNA, 474 bp, Zea mays
aatgcataagtcttacaattcctccagaccataccgagagacattcgttcacaagataggccttaacaatgtccctgggcctcgttcatcataatctcgatgtcacgatatcaagcagaagacgtgtgctacagcacagtacaggcatttgaccagccataatgctgttaacttcgtaaacaacacttgttgctggacttaagtaccgcagttaacataagcagattggtttgctgatgacctgaagtttctacaagcatcctcatttccaacccgtacacaagtcctcgggtgtagccagaatatgcattcattttgaagccaaattttgttcggtcgagacatcaacacttcacagagaatgctcaaacagacaaggtgattctacgtatacaaggatttgtcaaaagcatagtgatgtgtatgaagtattaaaagttcgggaagaaaaatgcgctttcctgatttatcgtc

SEQ ID NO: 283637 - DNA, 614 bp, Zea mays
gttcgtcggcgtgaatctgcagggtttggttctaacacatacgttgttactgacacactagcgaaatttgagcttatggatggcgccccagttagaggagaatcgattccggtgagactattcttgacgccgtatgagcttaccccaactcatcgcaacataaacaccaagtttagtgtcaaatactacctaaacctagtcattgttgacgaggaagaccggaggtatttcaagcaacatgagatcacaatgtatcgccttctagaaaccccacaatcttcataggctcctttccttgctttctatgagttggaaccagagctagaggcattttggtttaaccttgcacgaggacgccaaagttggtggccttacttttggtcccgccttgtacataactctcccgagggagcaatgcagttcttaggtaagagacataaaaatgcagttctaccatatggtgttgctttgttactgcctttgtttgaatctactcgggataaagtcatggaaatgtttgtatcaacgtgccttcaccttgtttctttcttgtccttgctggacttgtaaagctttggatgattctccatgtgtatgatgatgatatttgcgtc

SEQ ID NO: 283638 - DNA, 427 bp, Zea mays
atcttgctagatctgctagtgcccgttctgatggcctccttttgctttgtggtggaagggatgccaatagtgtgccactatcaagtgcatatgggcttgctaagcatagagatggacgctgggagtgggcgtatggcccctggtgtgtctccatcacccagacatcaacatgcagctgtttttgtcaatgcacggcttcatgtctcaggaggggctcttgggggtggtcgcatggtagaagactcctcaagcgtcgcagtattggacactgctgctggagtttggtgtgataccaaatctgtagttacaactccaaggacaggaagatatagtgcagatgcagcaggtggtgatgcttctgtagagctcacacggcggtgcaggcatgcagcagccgctgctggtgatttgatattcgttagggagg

SEQ ID NO: 283639 - DNA, 521 bp, Zea mays
ccactgcgttgcgcacatggagatttgctttgcggtcactgtggttttttaccccgatgtactctacgtctccggcggaaacacgcaggttatcgcctacagcgaggggcggtacaggatcttcggggaaacgattgatattgccgtcgggaactgccttgaccgattcgccagggtcctagagctctccaatgaccctagccccggctataacatcgagcagcttgcaaagaagggagaaaaattcattgatgtcccttatgttgtgaagggtatggatgtgtcattcagtggcatattgagctttattgaagctgcggcgattgaaaagcttaaaaataatgagtgcacacctgcggacctatgctactcattgcaggaaactatctttgccatgcttgtcgaaattactgaacgtgccatggcacactgtgattcaaaggacgttcttattgttggtggcgtcggttgctacgaacgtttacaggagatgatgaagattatgtgctcagaaagagggg

SEQ ID NO: 283640 - DNA, 1026 bp, Zea mays
gtcaagtcctggacactgctgctggagtttggttggatagaaatggcattgtgacctctcgtactttgaagtcatccaatgaacatgatgcttcttcggatctacttcggcgctgtcgtcatgctgctgcctcagttggttctcagatttacatttatggtggactcaggggagatatcctcctcgatgatttcctggttgctgagaatgcacccttccaatcagaaatcacttcgtctatgtacaatgttgatagagtccctaggggggaaactcaaaatagaaacaataattttcattcagattcacctgtccatcaatctacaaataacaggcaagaggcagcttctggtttcagtgcggacaagaagtcaattgacatgttgatagaggcctcaactgcggaagctgaagctgtcagcgctgtatggcgagctgctaaggaagcatctgcagcgtcttcggaagacagtctttcggagggaataggatcagaatccccattgagtgaaacttcaccaatgcctgaagatttcgatgatggggggtctctagaaccagatgtgaaactacattctagagcagccgcggctgctaaagaagcagtaggagatttaggatgcttggtcaggcagctctcactggatcagtttgagaatgaaagcagacggatgcatccttcaaacaatgaccaatcttatccaggccggagaacattaaatagacaacgatcaccacaaggtttgcataagaaggttatttcgttcttacttaagccaagaaattggagagctcctgctgatagaacattttttctggattcttacgaagctggcgagctatgctacgctgccgagcagatttttatgcaagaaccaactgttttacaattaaaagcaccaattaaagtatttggtgatcttcatgggcagtttggggacttaatgcgcctttttgatgagtatggctttccgtcaactgctggtgacataacgcatatggattatctcttcttgggagactatg

SEQ ID NO: 283641 - DNA, 464 bp, Zea mays
gagcactgaagaccagcactagaggacttttttttttgtggacaggtgaagtcagagcaaatctggctgctgttgctccccaagatttgtcaaaagtgtttcctcaagtaaaaaaaaatgactaaagtccccagttccccactgatgcaccgtcggtgccaacctctgccaaagtaacagaaggcctcagctcagctcatttctttggactccagataaagctaccagcagcacatgtaatcttggtcacttcgtcgtccaaatccccatgtatcgacgtataaaaaataggtaagaagtttaattatccatacctccgttccccttgctgtagaatactagcattttaggcatattgttttcgcgtccaatagatgagagccgggccttgcaaaaggcttgtggtttgggaatcccaagcattggttgtccccttgtatgaaataatgatggccccgttttcc

SEQ ID NO: 283642 - DNA, 372 bp, Zea mays
tggttccgctgctcttctttctttcctggcatcttggagacggcggcgagacgaggagaggactggaactggaccatggctgcctctgcggctctcaggctaatcctgcgctcctcgcccgcgtcgcgtcgccagattctgtccgagatgggatacaagttcacgcttcttgttgtttttttttgcgccctatcgtttgagatgtttgctttagtaatttcttctcccgcacctttcagttcattccatttcctttttcctccgggggctttagagtgcggatatcgatgagaaagcgatcagaaaggagaacccacaggaactggtggtcgacttggctcatgcgaaagcagacactattctggagaagac

SEQ ID NO: 283643 - DNA, 663 bp, Zea mays
  unsure (1)..(663): unsure at all n locations
gtaagatgacattgntggagagaccaacgaggggcagatactgaaggaggagcttaagtatgagaggcagaggacgaaggatgcgcgcgaggacctggagaaggacaggcgtgctgcagaggctgcaatgaatgaggtcacgaccaagaataagatcctggaaggagagaacgggcggctattgatgcaggtagagcatttgaaggaaaatatgaagatgaagcggatgggtataattcagatacttgagagtcgtgatcatgaattctggaatgcaaatctggaagccccagttcctgtctgagtctgaccgatccgtgtcgaaaacaagcaaggatgacagagataagaagtagctagcccttggtcattgctagttgaatagaacagcaaggaatgccctgtgctggagaagtcattgcttgcttgagctcgtcgtcctctgatcagctttcagcagccaaacagggaatgcccaagttttgaagactcggatgttcctctactatggaaagctcttcaggagaaatatcttaaatctgtctataaatataacatttcttgtaagctatctaggtacttatctaatatgagcaacacctgtacttgatcgctctaccttacaaatgctcatcatcgctattatctatggcctattgatct

SEQ ID NO: 283644 - DNA, 791 bp, Zea mays
ctggccaaactggtaatgctttgggaaattctgggcaacatcaaacatataatggcttatatcatgttttcaagactgtttacaaggaaggaggcgcacgatctttgtatcgtggagtaggcccaactcttattggtattcttccatatgctggcttgaagttttacatatatgaagatctgaaatctcaagttccagacgattacaaggattctgttatactgaagctctcttgcggagctttagctggtctatttggacaaaccctcacttatccactggatgttgtccggagacaaatgcaggttcagagcaagcagtctcaaaattcgagcgatggcttccgtataagaggaacttttcagggtctcttgctcatcattcggtgccaagggtggagacaactctttgctggcttgagccttaactatgtcaagggtgtcccttcagtagctatccgtttcacaacatacgacatgatgaaggcattgcttggagttcctccccgagagagagtccatgcgtcaggtggtaacaagtgaagcaatgttggccatccttgtgttatgactgatgaactaaagaaattctaggttgtgacattgttattcttgttatgaatcccattgcatagggtggagagtgttgtatattggtcaaatagctatattcatgtaacattaagttgagatgcttgtatcatccattatgctgcttgtaatgtaaccatgaatacaatgacgcccccagagatcgctttaaattaactataaaagattaatattaccctt

SEQ ID NO: 283645 - DNA, 479 bp, Zea mays
ccaaaggggagacatctcgagaagcgcttccccatctccccccaacagaaactgcgtacgatctcgtaaattgcctgggagttaccaacgccgcaaaggtttttactcccttgcctggcgaaaccgcacgcgcgggcgggcaaccaggagagagagaggggttgagagagagagagagagagcagggtatccctctgcttctccagcagccatgacgtcgtgctcgggaaacgccacggtggcatgccgggatgacgcgcagccgcacggggacgcgccctgcgtcatcgtctaccccttactcgccaagactggggaggtccacatcccggtggccggagacgaggcgccggccgtgcccgtgctcacgagcaagtcgcccgggcggcttgccaccgcggtgaaggaggccttgtccgtctccctgggagcggcgttcccgatgacgccgtggtgtcgtccagcgacgcgcatgcaga

SEQ ID NO: 283646 - DNA, 546 bp, Zea mays
ctacgcgtccggcctcggagactgctgcaggcggaaatagtgttccacctgatcagtctctacaagagaagaagctggtcctctccccagaggccaagaaccttgtccgcggcgaccgtggggactgatgtcactgtggaggatctgaatccgtctccctcggaggaagcctccgatgggaactctgaggctgcacctgacgccattgatgcgagcgagcaggccgaggctagcacgggacaagcctcttctgctcgcaaattgggacgcaacatacggaagagcgagatgcctcctctgaatgaggaggatctagtgcctggcgcatcttttactgggaaggtgatgtctatcaagccattcggagttttcgttgacattggggcattcacagaaggccttgtccatatctccagagtaagtgatgggttcgtgaaagatatatcttccctcttcactgttggacaagaggtgtcagtgagattgcttggagcaaataaggaaacaagcgtatctctctgacgatgagggaaggcgatgactatg

SEQ ID NO: 283647 - DNA, 567 bp, Zea mays
  unsure (1)..(567): unsure at all n locations
tcngtatttggtaaagtaaagggtgttcagctgtcattttacctgcaacacaaaatttctggcttatctcctagcccatctccggctccatcgccatcacaatcaccttctccaagcatgccgacatccttgtcaccttaccctgcatcaagtctccctggtccagctttagccccttcatggagcagacacccttgctttccatgttttaggtgtaatccctctcctgctggtagttcaacggtaaaacctccttgcattgttagagaccccaggctacctccattaatgcattcaccaaagccacccattatgccttccccgccaaaatacctccctccagcagatccaccggttccttcccatgtagttcctcctcgccccttacctaatcccaatcattttccaaaagcagtttctagacccgattctcaaatgatgccaataccttcgccctcaagaccagtgtctcgacattggaaggccccagggaaaaaagggaatagcagaacatcgaatttctctccaatcgcgccaacgccatatgctctccttcacacttgaagt

SEQ ID NO: 283648 - DNA, 521 bp, Zea mays
agctgcagcaaacaatttctgcactacaacacactttaattgagaactccgaccgaggctttaagcgatcaggtttttgttgcgacggccatcgaacccgcaaggcccaaccaaggttccagagatcactaatccctagaccacccatctcttttggccgggtgacattagaccatgccaagagacaatgaccacccttcccttcttttctaccttgccacaaaaaattccttcgaattctatcaattgctttgatgacccaagccggaagatccaaagccatgtttggctctaccagcccgagacataagatccgctttccatcccggcaatagaatggctacccgatcaacaatggcctgaaattggtgccttggaagcttccgaagtgaaagaggcaatccgagatacttacacggaaaatctgaaacgggacagggaagaagctcttgaagacaattaagctcctcatcgcccctctgcttgtatctcccgcccgcatggaagtcgctgacccggac

SEQ ID NO: 283649 - DNA, 572 bp, Zea mays
  unsure (1)..(572): unsure at all n locations
ccacgcctccccgtcctcctcctcgtcctcctggctgcccatgtcgtctccacctccgcccatgccgagcctcctcttccgagcccttacaacacctccgcccatggcgagcctcctcttccgagcacttacaacccatccatgtgctcggaatcgttccggtgtggcggcgtcgagatccgctacccgttctatcttgccaacgcaaccgccgactacagcgggaactactactcctgcggctacaccgacttgagcgtttcctgcgaactcgaggtcgaggggccgtcgacgacctggacccctaccatccgtctcggcggcgacaactacaccgtcaagaacatctactatgactatcataccatctcactggcggacagagatgtgctcggaggcggcggctgccccgtcgtccgccacaacgtcagcttcgacgagacgtggctgcacaacgccagcgccttcgacaacctcaccttcttcttcggatgccactgnnggccacgcgatacactgcctgaatttgccggcacaacatcagctgcgccggttcagtactccaactgtca

SEQ ID NO: 283650 - DNA, 558 bp, Zea mays
aaacaggctgcagacagcaggggtgcccaaaagcagggaaggaagagcggaaaagtccaccagttcaccaccaccttcctcggatccacaaccccgacgcccgagtgcagagtgctccacccgggtcctttcttcctccttccccagtcccagtcccagtatcagtaccagtccaagccccactccccaccccgaacctcgcaagtattttagtcttactccattcgagccctaccactaccagtggcaggcgagcgagaggcggtggaggaggagcggacggaaccgtcgcctgctgcgtctgcctgcgagatctaggcgagcgcggccatgggtgctcgctgctccaagctctccgtctgctggtggcctccccacttcaaatcgccaatgctcgagaatggcgccgccggagatgatggcagcggcgtgccggtgttcgccgagtacagcttcgacgacctccgggtggccaccgacggcttcgcccccgatcgcatcgtgtcggagcacggtgagacggcacccaacgtggtctaccgtggcacgctcttcagc

SEQ ID NO: 283651 - DNA, 596 bp, Zea mays
ttcgatcgtccgacctataccaacaccaaaaagcaagcttgcaattcagagagaactgctggctctgaagaagaaggcactagctttgaggagggaagggaaggtggatgagtctgaggaagagctgagaaagggtagtgttcttgaaaagcagcttgaagagcttgaaaattcttccaaaccacctgtagcaaaggaaactaggagctttccatctaatcccccgtacaaggttgaacccccaaatatcaatcttactgatgaggtatatgaacctgaggttacagacaaggatatgcaggatccagcattgctgtcggtgctgaaaaatatgggatgggaagatgctggttcagattctgtggaaacaactgacaaagcatcattttctgcacatgtagttcatcataaatcatcaaaaactaagggccagcttcagaaggaattgcttggtataacacggaaggctctcgccctcagagggggagggaaaaacactgaagctgaggaggaacttgagaaggttaaggtgttggagcagcaacttgcagagatggaagaatcaaataacttgagtgctagtcaaggtgttacta

SEQ ID NO: 283652 - DNA, 724 bp, Zea mays
aaacgccccacgccccacggactacggtaagccagcggacgagccgccatccgccacgccatggcctctctcttcgccccggctcgccgcctgctcagccttggccgccgccgccaccgccgcggaggacagctccccgtgcccccctcgtctcgtagcaacagcgcggaggagcgaccaccgccggcgcggtcgctgagccttgattccacgctgtttccgctgggccacccgagcacactccttgtgccggagatcgaactgtgggcggcgcggcccagaaacctcctccgagccgttgagctccaacgcatcgtcaaggagctccgcaagcgccgccgccaccgccaggccctcgaggtctctgagtggatgagtctcaagggtcacgtcaaatttctgccaaggatcatgctattcacctggatttaattggtcaaatccatggggttgaagcagcagagacctacttcaataacctatctgacaaagataagacagagaaaccctatggtgcacttctcaactgctacacacgagaactcttggtcgacaaagcgttggcccattttcggaatatgaaagagctgggtttcgtgttctccacgctcccctacaatgacctcatgggcctctataccagaatagggcagcacgagagggtcccttcggtgatggcagaaatgaaaagcaatgggattgttcctgataattttagctacag

SEQ ID NO: 283653 - DNA, 753 bp, Zea mays
gctggatatccaggagccgcttcccttggtgacatgatctgtggaatggcagtggctaagatcacgtccaaggacattcttttctggttcaggtcacatacagctgctgaaatcaagtggggaggtgcaaagcatgatccatctgatgaggatgacagcagaaggatgcaccctaggctgtcctttaaggctttcctcgaggttgtcaagatgaagagtttgccatggagtgactacgagatggatgctattcactcgttgcaacttattcttagaggtacactgaacgatgccttgaagccggcccagtcatctggtttagataaccagattggtgatctcaaacttgatgggctcgccgaactgcaagcggtgacaagtgaaatggtccgcctgatggaaactgcaactgttccgatcttggcggtagatggcaacggattggtcaacggatggaaccaaaaggtggcggacttgtcggggctgcgagttgatgaggctataggaagacacatacttacacttgtggaggattcttctgtatcaacttgttcagaggatgctatatttagctctgcaaggcagagaagagaaggaagttcgatttgagctgaaaacacatggctccaagagggatgatggccctgttatcttggtcgtaaatgcttgtgccagtcgtgatcttcatgaacatgttgtttgggtgtgctttgtagcccaggacatgactgctcacaagttgttcatggacaa

SEQ ID NO: 283654 - DNA, 497 bp, Zea mays
tcacatagctgaggcctcgattctccgaggttgtccttgtttacttcgcgcgccgaatcgtaattcgcaacatttttccagtatctccttgatcatgttcatgatttttccaggctatggtcacttctgggtcagaagtcatgctaccagcatcagcaataagctttcctgtgctcaccagcacgaagaaggttttgaaaacatcacccgccgatatctccccagactgtgctagcttaccaccataccagaagtccagtgcccatgacaagaacgagaggcaaggtgacaaccctgtggtgatccctgctacccatgatttcttccttgcttttttcatgggttcctcttgcgcatgctcgaatagctgaagaacctttgatgaacatccaaaggaggttaccatcctgtggttgtaaacagcttctatggcaatctgggtgctttgatgctgagcctttgcccagtcccttgacacatttgagagaaccattttt

SEQ ID NO: 283655 - DNA, 740 bp, Zea mays
ctctgttgaggctgaccgaaggctgcaaccaggcatacattttgtagtttgatgacaccaccaccatccacaaaacacctgctgaaaagaaggaaccaagtcctgatcaccgtggacgccgcaaggattcctcggagacctgctcaaccgagcagggcagcggatcggacactgaagagtgcgagcctgtgttgaagggcaaggatgcatgcaaggagtacatcaagagcttcttggccgccatcccgatccgggagctgcaggctgacatcaagaaaggtctcatggcatcaacgcccctgcaccaccgtctccagatcgagttccactacacggaaccccgccctgccgagatcgccacgcctgctccactgcccccattcgaagcccccttcgagttctgctggcccgagccaccgtcaccgccagctgccactgaatccaccgtgacccatccacctgccatggaggccggcataacccaggctgtcgccgttgtatagccggtcctggctgctgctggggcctagggcaacggttgcttagtttaacatatagagggcggcgcttcttttagcgagcgaattgtgaggtcgaaaccagatcgaagatttggctggcttcggccctggtctgctccttttgctgtctaattaagatgaactgactagtatagcttgactgtcttttggtctcagctttcatcatcttgtaaagaaagaaaggatgattgctcctgc

SEQ ID NO: 283656 - DNA, 790 bp, Zea mays
cacgcgtccgtcatgtttcctgccataagccacagcagcaacgaggggattggtttgcaggcagtaaaagtaactggatcagagagcattgatgttgacaaacgtcttaacatggtaacagaagagataggtgtaagaagcaccgagccaaacctcataccttctggacctatagattctgatacggtgaagccaaatgtagtagaagctaatattacctttcagaaaccatccagtacagatgccataaaattgccaaccataccggaaggaaattttagtactctggagaccaacaatgggtttaagcaggaagcagctccggctaaggaaatactagatgtgacatccttcaggcagcgagctgaggctctggaaggtctcttagaactttctgcagaattactggaacacagtaggctggaggagcttgcgattgttctaaagccatttgggaaggccaaggtgtcccctcgagagacagcaatatggttggctaaaagtttcaaaggcttgatgaacgacgaagcaagccgcagttcaacgtgagtacgcatagcttttgtgccaccctttttactttggttgatttctgcttgtgctctgaagatgctatggttgtcttgttcatatctggcttcttggtatcgtgtgttcgctgtttccatttcgatagttgttcattctttacagcacatgttgtaaatagcccagatttgtgaacagaaaataatacatgccagaaatggtgttaatttacatggttgaagtaacagagactaatttgatc

SEQ ID NO: 283657 - DNA, 437 bp, Zea mays
ctgacgcgtgggggcgtacgtacgtgaacacacatcgatctccatatatctgtctagttagctagctagctagtagacatatggtgggctcgcagtacgacgacgacgatgacaatgttgttggtcgccggaagacgaggtggtacgctgtgaccggcggccgggggttcatggcgaggcacctggtggcggccttgctccgctccggtgagtggcgtgtccgggtcactgacctcgcccctactctagccctcggccatggagagacagaggggattctgagcgacgctctccgtgatggccgtgctgtctatgcctcggttgatgtctgcaaccttgaccagcttgccaaagcctttgaaggggtagacgttgttttccacacagttgctgcggatcctagcatgaacaacctgcaactttactacaaggttaac

SEQ ID NO: 283658 - DNA, 468 bp, Zea mays
ccaggtggccggcgaggcggcaaccgccgccgtagagacgatggaggacgcgttgggctccgcggtgggtccccacttcagcggcctccgtctcgactcgcgccgcctctccctctccccttcctcctccccctcccgctccgccagcggcaacggcacgctcgtcgccgcgccggggctcgcgttccccaaggcggaggacgggaccaggaagcccttcgtcataggcgtgtgtggaggcaccgcgtcgggcaagacgacggtgtgcgacgcgatcattcagcagcttcacgaccaccgcgtcgcgctcgtcaaccaggattcattctaccatggtttaactgaggaacagtctgagcatgtgcaagactataattttgatcatcctgatgcattcgatacagatcgacttttggagtgcatgggaaagctaacaagtggacagtccgtgaatattcctatatacga

SEQ ID NO: 283659 - DNA, 459 bp, Zea mays
ttttcccaccgctcctgcgcgttgtttctcgtcgccggcgtccgtcccccggcgtccggcaaccggcaaccggcgacgacgatggaggcggcgctgggggcgctgtgccgcgccggaggctggtcgtacgctgccgtctggcgcttccacccccaagaccctcgattgctcacattgggggactgctactgtgaagatgaggcaaaagcaatggttcaggagatgcttaatcttgttgaagttgttggagaaggcatcctaggacaagctctagtaagcggagagtgtcaatggatttacgacgatacttgccacgcgttgaatcagacaagccatgctgataacggagacttacatctgggttatacttggtggcagcatcagtttctcagtgggataaagactattgcactgttacctcttcagttgcatggactggtgcaatttggttccacacgg

SEQ ID NO: 283660 - DNA, 432 bp, Zea mays
cccattcgtccgcggacgcgtgggctcttttgttgtttttttttttttttttttttttggaaacaacttctcttccttttttttttcttccttctgaggatatcatcgccatcgccagctactaccatatacaaagggggtccaaacattcttcgcacattatcattaacggcttatatacaggcacgaacgattttgggggtagcaatgttgaagaagaaaccaaaaaaaaaactgtcgatcctgtaactgcagctaatcctacgccacacctgtctgaatcctgttcatcatcactggttatttttctttgctcgacgtttgctgtttaccgctagcgctggggggtttacttcccttccccccctcagagcgagccttcgaacgagacccggagctgcaccgcccccgccggcccgggccgttgggggg

SEQ ID NO: 283661 - DNA, 431 bp, Zea mays
  unsure (1)..(431): unsure at all n locations
ttggaacgagtccgtgcttgtctccgcgcacacttccgcggggaagaccgtcgttgcggagtacgccattgccatggcgttcagggacaagcagagggtcatctacacctccccgctcaaggccctgagcaaccagaagtacagggagctcagtcaggagttcacagatgtcgggctgatgactggcgacgtcacgctccatccgaatgccacgtgcctggtcatgacgacagagatcctcagggcgatgctctacaggggctccgaggtgatcaaggaggttgcctgggttatattcgatgagatacattacatgaaggatcgtgagagaggggtcgtgtgggaggagagcatcattttcttgccccctgccatcaagatggttttcctttcggctaccatgtcgaatgcgaccgaatntgctgaatgga

SEQ ID NO: 283662 - DNA, 512 bp, Zea mays
aatggctcaggggtgcgtatggatcgtcgtcaggagcgtgccgatgcacgttacatagaactagatgatatgtgatggtgtgctctcccggatcttgcttggaaggaggcaccagtaggtcattgggtgcacggctacggtaggtagctagctatagtttacaaggggaggctagaatgatccacacccagctgacgtggtttgcgtgattcgtttcgtgcttgcgtgtgccttgcactgccactgccatactgtctgaatctgaaggtgcagggctactcactactgagttactgaccgagcgatgctgccctcaacgatgtttctgtgaccatcagcgtatcaatcagcccttaatctgaagcctacactggagcttcatattgaaacatacattggagtattggacttgagtagtacatttgtatataacgtaactgctaatagagttagcatatgatctagttttgaacatgaagctcatgtgggttgttcagccatgttcgatccca

SEQ ID NO: 283663 - DNA, 826 bp, Zea mays
ctaggaatgggggccaagtcagtcgtcccggtgacaattggggaggtcttccttctgctcatgggatgggcaacatttcaagccttgggtcagggaaccttgctcgtggagctggagataataacttcggtttgccttctggcagctatggaaggagcaactcaactggtacaattggcgagcctttttctgcagcaggcaatacatatgatgtaaacaatccagatacatatgggagcagctctatttatggtggcacagcctggaggttcacatcatctgaggttgacatgccttttggtcatgatattggaaattttgatccgacaatcaaatgagacatgtcagcaagtcacatgtgcaactatcctgttaacaacaatcagccaagcagaggtatcacttcctagggtgagtattactatatccacatatgacttggtgtagatgaaacacccattcagtcaggcatccgggtgcgcggccgtgaatcggtgattgtcagattaatatacaggttagttttgtctagctaaccagcgggtgtggtttgcgaacaccaacatgctagagatggagctgctagaggagaagcggatacagaaacactttgtggagggtttgttcttttggggtcatgttttagttttgattcttacgcgtgcgtgggtgaggccttttggtttttgaatgagatgtaattattgcggcacatatttagaagccatgttccaaccggggattacattttcgttttgtaatcccaaaaactgttttgttgaccaataaaaaaaaataaattaaaaataataatttatattattag

SEQ ID NO: 283664 - DNA, 870 bp, Zea mays
  unsure (1)..(870): unsure at all n locations
cccacgcgtccgcccacgcgtccgcccacgcgtcggggctcagctcagctagcatatttgagtttctctcgtgctctagctactagcaacctcgacatcaatggcttctggtgccgccgccccggttaagatgtccactgcagtgactgcctgcatcctgctggcggtcctgctgcccatggcgcccaagctagtaatgggtgattgttccggcagttgtgttaccctttgcgacacctttgctgatgggttctgcacgggcaacgccgaccccgccatttgtccaccggaagtgcaggagctatgccatcccacggttttcacagggtgtatcactgaatgcaatacactctgcgctacaagcggattcgctccttgcgctgcttgatgagaaagtatcgtttgcggcagaataaaggtgagtgcaagagcaaccagcaggcctcttccccatgcatacgcacactgcagcgcgacctgagggaggaagcatgcaataagcttccacgatgatctacctactatatcccacatttccttactatattttcctttgtttaattcagtcaagattgtgtcgttcagagtccagagcatgcatggggtgcgtacgtattactagtattattgtacttctccatatgcatatggaaaagtgcactgtgctagcttctgtacgtgtgccttttctgtgcatgcatgtgtggtctttcagtgtctactctagctattagtaggcatatgtcattgtcatgtaatcgatctctcgcggccgggctttcttccatcagcacagctgagggaatttcaattgaactaaaatcatatttnnncccnnnngggaaaaattaaaaaaannnaaaaaanaaa

SEQ ID NO: 283665 - DNA, 602 bp, Zea mays
gtctcttttctgctagcatatttgagtttctcacgtgctctagctactagcaacctcgacatcaatggcttctggtgccgccgccccggttaagatgtccactgcagtgactgcctgcatcctgctggcggtcctgctgcccatggcgcccaagctagtactgggtaacgtttgttccgaccgttgtggtgccctttgcgacacctttgctgatgggttctgcacggaagaccccgagctttgtccaccggcattggcggggccatgcaagcccacggttgtcacagggtgtatcactgaatgcaatacactctgcattacaggcggattcgttccttgcgctgcttagcttgatgagaatgcatgcatgcgcattcataataagtattattattgtttgcggcagaataaaggtgagtgcaagagcaaccagcaggcctcttccccacgcatacacacactgcagcgtgagctgagggaggaagcatgcaataagcttccacgatgatctacgtactatcccacattttccttactatatatttcctcggttaaatcacaggcaagatggtgccgttcagaggccagcatacatgggctta

SEQ ID NO: 283666 - DNA, 841 bp, Zea mays
ctgtgttgctatatctaagatgcacaatatgagtgctgctgtcttgacatcagtgcttacattgattgacgaatatgacctgtatggtcaagtggcataccccaagcatcataaacactcagaagttcctgacatttatcgtttagctgcaagaccaaagggggcttttgtaaatgtagcttacttcgaacaatttggagttactctgatagaggctgctatgaatggtttgcctataattgcgacaaaaaatggagcccctgttgaaattaatcaggtcctgaacaatggtctccttgttgatccgcacgatcagaatgccattgcggatgcactatataaacttctttctgataaacatctttggtcaaggtgcagagagaatggactgacaaatattcaccaattctcgtggcctgaacattgcaagaattacctgtcaaggatactaactcttggcccaaggtctcctgctattggtaacagagaggagcggagtaatacacctatttcaggaaggaagaatatcattgttatttctgtagactctgttaacaaggaagatctagtcaggataatcagaaatgctattgaggtcatacataaagaaaacatgtcgggttcaactggttttgtgttgtcaacttccttaacgatatcagagatacattcactactactatctggaggcatgcttcccactgattttgatgctttcatctgcaatagtgggagtaacatttactatccttcacattccagagaaacgtcaaacaactccaagattacatttgcattaaatcaaaatcaccagtcacatattgagtatcgttggggagga

SEQ ID NO: 283667 - DNA, 486 bp, Zea mays
ttcagtcacagcagtagagtttgaaagcggagagcatcttctgcttcatgtcaaaaacacttgtttggttataggatgatgagacggttggttggttataggatgatgacttacatacacacacatcataactttatccacatgagataaaagcgggaacattatcgtcaatacaaggagctgatggagaagttgaaactaacaaagtaacaggggatttcagaaagtgctgtaattttccgttggaaatatctgttcgggaaagttgtatagtgtcatcatatacacacttgtgcagttatttgatgaggaaacttacatagcctagagcagatgtgtttcctatattattattgccttgtacaatgtaagatgaattccatgagtcacaaatagcatcaggtctctatgctcatacttggacaagttaagaggatggcacggcatatttttgtgtcaccgcaccgaggttgtcgctctctttat

SEQ ID NO: 283668 - DNA, 497 bp, Zea mays
ttctgtttcatcataatgttacacattgttcaagaccataaatgagaacaagcttgggttgtggaaaaacttcagaaagtaaagacaatggaattcttgacgacgatggtttggcacccaagtttttaaggaaagaacaaccttttagcaaccccggtgcatctagaaagtattaggcctctaactcttgttgatcacaagtcatacctttgatcatttgaaaaccatagcggctctttctgattatgtcaactagccgagtggatggaagacccaaaaaatgctttggaagtctcacaattatggataataaggcgtccattatcataaaggctacaaaggaaattgaaatcagaaggaaacctgccagtccaggttcttatatgccaaattcagcagtagatacgcactcctggtctctcaccattaacttgattctgcagccaacgagattgaatgaacacttctcgtgacattacgtgccacatgcttatacc

SEQ ID NO: 283669 - DNA, 820 bp, Zea mays
gcgtaaatagctgaagctcatctttataccataattaaggtagctcgagatgaggatttgaaggaacaaattggaaagggtatatattttgatttggtggaccatgaaaaggttcataatttccgtatacagaaacaaatgccttttagttgtttcaaggaggaagtagccaaggaatatggtatccctgttcagtttcagcgcttctggttgtgggcaaagaggcaaaaccatacataccgccctaatcgtccattgaccgttcatgaggaaacacaatctgtggggcaactgagagaaatatcaaataaggcacacaatgttgagttgaagctgtttttggaagtagaacttgggctggatttgcggcctctccctcctcctgagaagggcaaggaagatattcttcttttcttcaaattctacaacccagaaaaggaagaactctgtttcatggggaggctctttgtgaaggccttgggaaaaccttcagaaatcctggcaaaactaaacgaaatggctggatttccccctgatcaagaaattgagctttttgaggaaattaagtttgagccaaacgtgatgtgtgaaactatagacaagaaactcacttttcattatagtcagcttgaagatggggacattatttgtttccaaaaatcaccaggagcagaatatgatgcacccgtgcgatatccggatgttccttcatttttggagtatgtccataataggcaggttgtacatttccggtctttggagaaaccaaaggatgatgatttttctttggaattgtcaaagcttcatacctatgatgatg

SEQ ID NO: 283670 - DNA, 455 bp, Zea mays
tttgttgttggacaaagcacggatgatatgtcatactcagagcttgaagtaggagcagatgatactgccacattggataaaattattgattgcttggcttctttagctaatgaacatggcggagatcacgatgccgggcaagagattgaattagctctgaagataggaaaagtcaatgagtatgaaactgacgtcacaattgataaaggagggccaaagatttgaattcttggagctggaagagtctgtcggccagctgctgagtttctggcatcttacccagacatatgtacctatggtgttgatgaccatgatgcagatcaaattcatgttatcgtggcatctttgtatcaaaaagatgcagaagagacagttgatggtattgaaaatacaactgctacccagcttgatgttgctgatattggaagcctttcagatcttgtttctcaggttga

SEQ ID NO: 283671 - DNA, 461 bp, Zea mays
ttatcacaataccaaaaccaggagcttatgataccaaacctacctgagaaggagactgcatcagagcgattccaagatgcggagcagctggtgacaccaaacctacctgaagaagatgaggagactgcaccaaagcaattccaagacgaggagcagaagggacttcaacaacaccaagagccggatgagcaggcatcgcaacctgaagagcagaagtctcagcaggaatgccatcagaaggcaccggagcaattccaaaccttgaagaagctaggcgcgccaccacgtcttgctgacaacgtgccccggttctcccttcaggagcttatacaacagaagcagcttccgaccggcgaggcgatgcctgccagcaagcaaggcagccgtggagagagtgtcctcgctgatcacaatgtttcaggaccaggagcagcagcagggggcacgacactggccatggt

SEQ ID NO: 283672 - DNA, 555 bp, Zea mays
ggcggggagttctcgtgcggcgtggacgatggcgcgcgcgccgtgctggccgccggcgctgtcggccacatcactcgcctcctcgctcaccccgacgagaaggttgtggatgcatgcgcacgtgctcttagaatgatatatcaatcaagattagctccaaagtttgatgttaatagtggggaaaacgtggattttgttctttcccttttggacagtgagaacgagaatgtcacagagctggctgctgctattgtatctcactcttgtgagagtggtgcagaacaattgtcactatgcagtgctggagttccacagaaacttgttagtctttttggatgttctatgaatctaccagatgcttgtttaggttctatcattgcagttattcaaaataaccaagatgttgcttcaagatttgcatcaacggaccatggaaaaggttttcgttcagtagttgggttaatacatgatccgagtccacgcacaagattacttgcttgcctctgcttgattgcacttgggcatgcttctcctgatcatttttcagacaatcag

SEQ ID NO: 283673 - DNA, 629 bp, Zea mays
cggactcgtggggcttactgccgggtactggtgcgctacaaggaggagctgacccggccgtgcgacgaggccgcagtcgttcctgagcagcatccaggcgcagctcagcgacctctgcagcggcggcagctcgccggcggctaccgccacgcactccgatgacatgatgggctcctctgaggatgagcaatgctcaggggacactgatgtgccagacatggggcaagaacatagctctcacttaggtgaccacgagctcaaggagatgcttcttaagaaggacagtggatgcctcagccgtcttcggtcagaggtcctgacgaagcggaagaaagggaagctaccgaaggatgctcggacggtgttactagagtggtggaacacgcactaccgctggccttatcctacggaggaagacaaggtgaggctcgcagcaatgaccggtctcgacccgaagcagatcaacaactggttcatcaaccagaggaagaggcattggaagccatcggaggacatgcggttcgcgctcatggagggtgttgccggtgggtcttctgggacgacactctacttcgatacaggcacaattggaccctgaatcatacaccacttgggatgacaactggcca

SEQ ID NO: 283674 - DNA, 739 bp, Zea mays
cttcggcaagtccgtcttcagccggttcagcgttctcttcaacgtcgccatcgtgtggctgtacgcctacatcctcaccatcggcggcgcttacaagaactctccgcccaagacgcaggtgcattgccgcgttgatcggtcgggccttatttcaggagcaccttggataagtgttccctatccctttcagtggggtgctccgacgtttgacgccggagaagctttcgctatgatgatgacttcgttcattgctcttgtagagtcaactggcgccttcatcggtgcttcgagatatgcgagtgcaactatgattcctccatcgattatcagtcggggcgtgggatggcagggcattggtctgttgctcgattcatttttcgggacagcgaacgggacatcggtttcagtagagaatattggactgcttgcgttgacacgcattggcagccggagagtggtgcagatatctgcaggcttcatgattttcttctctgtccttggaaaatttggagctttgtttgcgtcgattccgctgcccgtatttgccggcatgtactgtctcttcttcgcatatgttggtggcgttggcctgagcctccttcagctctgcaacctaaacagctttaggaccaagttcatcatggggttcgctttcttcatgggcctatcggttcctcagtacttcaacgagtacacagccgttgcaagctatggtccggtgcacactggcgccagatgg

SEQ ID NO: 283675 - DNA, 416 bp, Zea mays
caagaaccaggtccaaagcaagggctgatagaaattcagttggtataacgtctactaatgacacacggtcgtcttgggcagccccatcaatgcatgataaggaagacatttcctcaacaatatcagacccaggacctatttgggactgtgaaccaaagtgggacacagggccaaaatgggatagtgagctaacttgggagcctgaccaccccattgaacttcctggaccacaagaggacatgggaattggagcaccgatggaacttgtgccaaatttggatgagaaatgggtagttaggaaagggcactttcttggtgtcctagtatgcaaccattcatgcatgacagtgcaaagtctgagttcacaagttgttgcaccgaaggccatccatgatgacaacagcttggacttactt

SEQ ID NO: 283676 - DNA, 486 bp, Zea mays
tttgcgagcgccgcccttttttttttttttttttttacaaaaactttaatgtatagctattacactacaccgtgtttacatatacatatatatgtctatgcctttattttagacatacataaaacataaaaacaaaagaaacgcaagacattgttaaggagtaaggtcgactagaggaaattaacgaagcacgatctctcaattgttgttccgtgtgaaatgcctttaatacacagtatatatatacgcgctacgcggtatctagattgctgaaattcccaagctggaccttcagaagaactcgaggctgaactcgccgcccacggcgccccggccgatgtcgaagtcaaaacgcggagggctctgctcctgctggccgtggcagggcaccgagaacctgtgcccgaggagtgattgctcctcgcgccgtagccggcgaagggcgtgcccttgctctcggaggcccagtgcagcggcgcgtcgccg

SEQ ID NO: 283677 - DNA, 915 bp, Zea mays
cccacgcgtccgatgcatcagcggccctggtcctctctcccgctcccgctcaagggcagcagagaaagcagctgagcgctgactgtggatctcatccgtatcgcgtatatacgtcgtcctgtttggatccaccgcgttttgctaattcccttcgaaccggccggtggccttcgttctcccaccaggcctgtctgtctgctgtatccgccagagcttccatggattccaccctcttcatcatcggcgtcataggcaacatcatctcagttctcgtcttcatatcgcctatcaagacgttctggaggatcgtgcggggcgggacgacggaggagttcgagccggcgccgtacgtgttgacgctgctcaacgcgctgctgtggctctactacggcctcaccaagcctgacggcttcctcgtcgccaccgtcaatggctttggggctgtcatggaggccatctacgtcgtcctcttcatcgtctacgccgccaaccatgccacgagggttaagaccgcaaagctggcagcagcgttggacatcggtggcttcggagtcgtgtttgcggccaccacattcgccatcagtgaatttgaattgagaattcatggtgataggaatgatatgtgcctgcctcaatgtgctcatgtacgggtcaccccttgcttctatgaaaacggtgatcacgacaaagagcgtggagttcatgccattcttcctgtccttcttcctcttcctcaacggaggcgtctgggcaacgtacgcggtgcttgaccgcgacatcttcctcgggatccccaatgggataggcttcgtgcttggcaccatccagctgatcgtctacgcgatctacatgaacagcaaggcctcccaatgcagcaaggaaacagcgtcctcgcctcttctggccgccgcccgc

SEQ ID NO: 283678 - DNA, 446 bp, Zea mays
tttgtagaagagataacattaccagagcttgaagagatgcgtactgctcatgttgtctcaattggctcagaatcattctgtgacttgaatcctcattacaaagcaggaagaaaaactgagtttaccttggatactcgaacaagtttggcactttttgggtctttcactgcaactgattatgtggcttctcagagcataaggaggaggataatgcattatcacatggaagctttcaagaaggtcaatgtcatagcaactcctacaactggcattactgctccaaaaatacctccaagtgctctgaagtcacgagagtcagattatgttgtgtcagcttacttgatgcgattcatcatagcagggaaccttcttggtctcccagcaataactgtgcctgttggtcatgacaagcaggggcttcctataggtttgcaactgataggtcg

SEQ ID NO: 283679 - DNA, 547 bp, Zea mays
tatcagcaagttacaagctgaaagacagaacgggtttggaaagtgaggaattggatctatggcagtatgagaatacagcagaagctgctaaaacaatatgctctactgtaaaatttctgtggtctgcaatggaacctcacttgctgcaggtattggcatgcttgtcttttgcaggtttggtggctgcattatataggtactatcaaagatcaagagagtgctgcaactgcatcataacctatgactcacttgctgaacaaccattgttagttcaacatcaagttgcgcacctgtcagtgacttcttcagttcgagatgcacagctacctgttcactcttcggagcaacctatacaattggcaattcctaaccaaggcacggctggtagtttggaggttcctatggagttgacattgcccaagctggacccattggtcagtcttgaggatcctgcacaagagtcattgcccatgacagacccactggtcaccgtcaagattcctgtgattggtcgtgggatccatgatcagaaacttaaacgtgggga

SEQ ID NO: 283680 - DNA, 486 bp, Zea mays
tgtaggtctttctctccccgaccgagtttttttagtatgaacagtagtacaagttgtaatttcgggcaccacacagtcagccccttttgcctaaactgatgcaaaaggggggaaacataaatggagttgacgaccaggtaatattttttgtaaggtcaagattttgacatctaacaacggtttgctcatagtgagaggtggggtgaagtctctaagagcattgtgcattcttcttgaaattatggccctacagtaatgaatcatctgaaagctgcaatgtggaagatgatgataagattttaagaacactagttctgcacatctaatcttgctgatttcacacatttaatgttgcacttcatctggctttgataagaagtactttgttgggtgggccatttggaactttgggcacaatatattagaattcctgatgagttttgcagcttcgcgttccaatgttttaatttagagggaaacatgttt

SEQ ID NO: 283681 - DNA, 836 bp, Zea mays
  unsure (1)..(836): unsure at all n locations
gcaatacacaagagagaagacaaggaatagcgccacggcggccagggtgccgctcgacctctatgacttgttcttccctccctttcttcccttcacaaggttcctgaggcccgctttgagctgagatggattcgtcccagtagtgttctgggcgctcccgtttcttgatttcttccgaacttaggcattactgtttacagaatacgaccacaagattccggacactgtgttttgctcttctccgagtttgcactttgcttgatattccatttggaggcgctgcgatgggctgtctgcaaacaaagcacgccagtcgatcgccacacttgcttgatacacgggaagctgtagcccttgctgctgaaacatcttttacagtgagtgaagttgaagcactgcatgacctcttccggaaattaagtaattcagttatcagagataatctaattcacaaggaagaattccaacttgctctctttaggggcaagaagcagcaaaatctctttgttgatagggtatttgacttgtttgatcaaaaacgaaatggtgtaattgaatttggtgagtttgttcgatctcttggtgtgtttcatccagatgcaccagaagatcagaaagttagcatttgcatttaagttgtatgacttaaaacagacaggctttatagaacggcatgagttaaaggagatggtgctggctctgctggacgaatcagatttggatattgcgagcgacgctgtcgagatgattgttgacagggccgacgcaaaaggtgatgggaagatagatcaagaagaatggactgaatatgctanagacaatccatacgtgctgag

SEQ ID NO: 283682 - DNA, 611 bp, Zea mays
ggacgcggcacgcatgcgcgccgagctggccagtggcgacgtggccgtgtgccccgagggcaccacgtgccgggagcccttcctgctccgcttctccaagctcttcgcggagctcagcgacagcatcgtgcccgtggcgatgaactaccgcgtggggctcttccacccgacgacggcgcgcgggtggaaggccatggaccccatcttcttcttcatgaacccgcggcccgtgtacgaggtgacgttcctgaaccagctccccgcggaggcgacgtgcgcggcggggaagagcccagtggacgtggccaactacgtgcagcggatactcgccgccacgctcgggttcgagtgcaccaccctcaccaggaaggacaagtacacggtgctcgcgggaaacgatggcgtcgtcaacgccaagccggcctggcagagccgcgtgaaggatgtcctcggcttcctgctccactaaccacattactttgcacggctctggactctgcgctcaaatacttcgctcaccgatttgattgagtttatactttacatttatttatacatgtaagtaagaataaccacacgcaaaaacatgtagtagtaacatacagtagtga

SEQ ID NO: 283683 - DNA, 788 bp, Zea mays
gaagcagcaaaagctgttgaagaggaaaggctaaggaaagaagaagagtctaagaaagctgcagaagctgctctacatcagaagaagctaaaggagaaagagaagaagctgctccgcaaagagaaaactcggttgcgcactcttgcagcacctgtcattgcagatagccactttggtctatcagaggcaaatgttgaatcggcatgtgcttcacttgatatggaacagctgaagaagctctgtgatggaatggatggtaaggatgcagcgggaaaggcctggttgctgagcaatgtacttcccaatgaaagttcctcaaaggaagcaaagaaaattgaagggaatggtgtggagccttctgccccaaaatccaactctacaggaggtagagcgacagaaggcagtagcagcatattgaacagctatgagaaaaaagagagaccatggggaaaggaagagattgagatgcttaggaaagcaatccaaaagtatcctaagggaacttcgaggagatgggaggttgtttctgaatttattgggactagcagatcggttgaggaaattctcaaggccaccaagactgttcttctgcagaagccagactcatcgaaagctttcgactctttccttgagaagcggaaaccgacacaatctattgcttcgcctctttcgacccgagatgaaattagttcaactgagggagctgggactgcatcgtcaaaggctgcagcacaatctgcgaatagccagacagccaatgagaaagctgctgctgatcctgtcacgga

SEQ ID NO: 283684 - DNA, 589 bp, Zea mays
ttctaccagtatcagcagatatatctctgcgaccaaaactaagcttggtgaaaggacctggtccaacatgcttttcttctgcgtagttgctctatttactattgtgaatgtctgcattgccgtgcatttcttatgcggcggcaatggcgctgaagaggcgtacacgtatcaagggcaacactcccagttcaccatggtcacaatgacatacgaagcccgtctctggaatttgaaagtgttcatcgaacactactccagatgtgaatcggttagggagatagttgttgtctggaacaaaggtaaccctccaagcagtgacgcgtttgactccactgtgcctgtgaggatacgggtcgaggagaccaattctcttaacaacagatttagggtggatcctctgataaagaccagagctgttcttgaactggacgatgatatcatgatgacttgcaccgacttagagaaaggatttagggtctggagagaacaccctgagcggatggtgggcttctacccccggatgatagatggcaaccctatgcagtacaggaatgagaagtacgctaggggtaagaatggatacaatctg

SEQ ID NO: 283685 - DNA, 997 bp, Zea mays
ctcaccgcgccgcagccgtgagaggcaccacgccccacccgagcctgtagggtgagtcggcttcttcccaccggccgcacgtctccgctggtcccctccatcaccatcgctggtccctctccgtcggttcccctccgccgtcactggacctcgtcgtgagtcgtgaccgctgctaccagtcccctacgccgccgtcgtccctacgccgtcgtcctcctctacatcgccaacccttaaggattcaactgtatcagctcaagatcaatatttttttagatgagtaagcttgcaaatatgttctcggctctgtgtctggatgctgaaagcaatgaagatgttggccgagctgaagtaccacaggcgtcttccagcacagacaaaactgctgcaagcaaagctgataaaaatgagcagaatgacacaactgcagtaaactatgaggagacagcacttgtatcatcatctagtgattacaggatgcctttggtatggattgacttggaaatgaccggtttggatataacaaaagatcggattttggagattgcttgtatcataacggatggcaaacttacaaaacaaatagagggtcctgacttagttataagccagagcaaagattgtttagataatatggatgaatggtgcaaaactcatcatgcagctagtggtttgacggaaagagtactgcagagtgaactttctgagcatgatgcagaggcaaaagttttagactttgttaggaagcacataaattcaggcactccattattagctgggaattctgtttatgtggattttctatttctgaagaagtacatgccacagcttgcagccgtcttctctcatgtaattgtcgatgtgagtagtataatggctttatgcatacgatggtaccccaaagaaaggaaacaaactccaagaaagcaaaaaacccacagggcaatggatgatattaaagaaagcatcgccgaactgaagtactacaagcacaaca

SEQ ID NO: 283686 - DNA, 800 bp, Zea mays
tggaccttcaggagagaaatgagaggctattttacaagctcttgattgacaatgtcgaagaactgcttcctgttgtgtatacaccaacagtgggggaagcttgccagaagtatgggtcgatcttcagacgaccgcagggtttatacatcagcctcaaggagaagggaaggatcttggaggtactgaggaactggacagagaagagtattcaggttattgtggtcactgatggtgagcgcattttaggcctgggagatcttggttgccagggcatgggaattcctgtggggaagcttgcactgtatactgctcttggaggtgtacggccatccgcttgcttacctattaccattgatgtgggaacaaataatgaagacctactgaaggatgaattctacattggcttaaagcacagaagagcaactggccaggaatactctgaatttctggatgagtttatggccgcagttaggcagaactatggacaaaaagttcttgtccagtttgaggactttgcaaaccacaatgcatttacacttcttgagaagtacaggacaaaccatcttgtatttaatgatgatatccagggcacggctgctgtagttcttgcagggattattgctgctctgaagtctgttggtgggactctagctgatcatacattcttgttcttcggtgcaagagaggtgattggcccttttttggaaattgaaagtgtaaatgctattggtcactattaattactgcatataccaagactgcatcgcatttgcttacttgctttcacattcccatgaatc

SEQ ID NO: 283687 - DNA, 588 bp, Zea mays
gtcttactatggcatgtgtgggctggcgaaggagtgtctacatcagcggtacttcagcaaggaatactctgaatttctggatgagtttatggccgcagttaggcagaactatggacaaaaggtccttgtccagttcttgcagggattattgctgctctgaagtctgttggtgggactctagctgatcatacattcttgttcttcagtgcgagttatacgatcaagtgactagtgatgtgatttgccatggtgagaaaacttcttacaagatgggcgcaagagctttcctagtggccattcgtgcttacacagacctgttttgataagacctgagcagcgatgcttccatttcggaccacgaccttagctaaggctaatggttcgaaatgtctgaagtaccgaagacagggctagctcctcgtttttgtcatgtcaaataaattgtgtatgattgcaacaatattggcaaaatatcgttgtactttatattttgatataatgtgaacaaaacaagtgccctatgagcccatcgtgcatttatgcatcttcagactaagttttgcgccaaaaaaaaaaaaaaaaaggaca

SEQ ID NO: 283688 - DNA, 738 bp, Zea mays
gtttagatggtttagacatgttcaacggagacctacgtaggcacccaatgcataacgggattcaaagacgtgataacaatgcgaagagagagatgaaaaaaccgaaattgatatttgaagagatagtaaagggaggtttgaaagaatgaaatattaccaaagatttagccctcaatgttttgttgttattgtaccaaagaatggaaaatactgcaggggactaaaatgttttgttgttattgttgttttttgtaagcatagatattgtgctaatgctccagtttgttctactgcttcagagaataaaaatgttgttgcataattgattgccaataggtaaatgaagacatccagacaagagcatatctaagcaatgtctgtgttgccaaggagcttcagaaaaaaggcttaggctatacattagttgacaaatccaagaaattagctcttgaatggggcataacagatctgtatgttcatgtcgccatcaacaacgtagcagggcaaaagctgtacaagaagtgtggatttgtttatgaaggcgaagaacctgcatggaagggtaggtttctggggagaccaaggaggctgcttctttggcttgatatgagcaaagtgcttgtgcgatcgtgcatgtaaatacatatttagctatttgtaatcatattattgcaattgttggttttaatattcgacccaaatctccaattgattgcagtctgaatcatccctcttttc

SEQ ID NO: 283689 - DNA, 571 bp, Zea mays
aaagctgcatagttgttgaatagtatgcaactagaggatccagtcaacatggatgatatggggattccagagataaacactgttattctgttagacagagaggtggacatggtaacaccaatgtgctctcagttgacgtatgaaggcttgttggatggagatgctacaaattaataatggttcagtggaagttgatgcaagcatcattggagctcaacaagatgggaaaaaggttaaggttccactgaattcaagcgataagttgtacaaggagattcgagacctcaattttgaagttgtagttcaggttttacgtcaaaaagcaacatctattcagcaagattatgcagaagtgaaatccaccaacactcagtctgtttcggagctcaaggattttgtgaggaggttgcactcgctaccggagatagctaggcatgttcatttggcacaacacttgcaatcgttcacggggaaaccctcctttcatgcccgactagacatagaacaaacaatactggaggttcagaactttgaaatatgctttgagtacattgaggagaagatacataag

SEQ ID NO: 283690 - DNA, 283 bp, Zea mays
ggtcgctgatggtatccagatcactggtatggcagttgttacaattgtgtttgctgccctgggatttctctcacctgcttccaggggaatgctcctgaccggaatgatcattctctacctcttccttggtatcattgctggatacgttggtgtccgtgtctggaggactatcaagggaacctcggaagggtggaaatctgttgcttggctgactgcatgcttcttccccgggattgtgttcatcatcctcactgtgcttaaatccattctgtggggcaagaag

SEQ ID NO: 283691 - DNA, 782 bp, Zea mays
atttattgttcatggacttgatgacaaaagaccgtgtgatcaggtcttacgcgtgctttcgtccctcacaacagaagtctttttcagcaataattttatttcagtggatatttgccagcaactcctccaggcacttacatatgcagattgttcaagcgctcctatcatccacctattcacccagattatcagattctgccctgacaatttttttgaggttgaagcctttgtcttctctgcaatagagttattgtctcagtatctgggtctgatacttcaatgtagggatgggagttctcagaataattcaagtaacactttgatttctgagttgtctattgcaagcgagacgatggcttatcggatcaaaggagagtatttgtggaagctggtgatgttagtggtatctacttcacatcaatcatttcaacaggtttcaactaatttatgcttctcaaatattatatgcttcctccaaaatatcttccctttcatgaggaaaatttttagagaaagagtcgaatcagatggtgagtgcacaagtcctaaagttgtctttggtgctatggttggcctagtgggatacttctatgtagagtgtgataaaaagatctcattgctcgaaaacaagatttctgattcctacaagctgttgaataagatactacttttttgcttgggagaagccactgctctttgcaaaacttgttcctgagatcatttatcgaagtgaaaatgtaagtaacaatgatgtgctcctttggggcagcttcaggctgtgc

SEQ ID NO: 283692 - DNA, 902 bp, Zea mays
  unsure (1)..(902): unsure at all n locations
ccctcgcgtccgcccacgcgtccgcttgcccctttgcatcagctgatccaacaagctctacaccagagaacttctcagcatcctgcctaaaatcatatgcaacaggtgactctgagtggtcagcatttgagtggatgcacactgattgcctgccagatttgatcaagcttgcctgcttgttgcctgtgaaagaagataacttaagaaccatcatcacaaagtacctcttggaagtatctggactctacggtaaagattatctggagcacattatgctacctgtatttcttgtagctgctggtgacattgatagtggcgattttacctattttcctctatcaatccagccaaaagtccgtggcttgcgtccgaaaacttcaactgctgaaaaacttgccatcatgtgtgtcttcccattattgttatctggtattttgggttctccttccagtcgtcaacagttggaagagtatctgagaaaagtacttatccaaaacaccaaggatggttcattttctatgcatcatactactgagatcattaacgcagttcggtttctttgcttatttgtggagcaccatagtgtcatctttaacattttgtgggagatggttgcgagctcggataccagcctgaaaataaatgctgcggctctactgagagcacttgtaccctacacggatgtgaaaatagcatcaactcatattttgccagcacttgttacccttggctctgatcaaaacttgatagtaaaatatgccagtatagatgcatttggagctgttgctcagcatttcaaaaatgacatggttgttgacaaaatacgcattcagatggatgctcttcttgaagatggatcacatgaagcttctgtttctgntattcgtgcacttgcagtagtg

SEQ ID NO: 283693 - DNA, 568 bp, Zea mays
ggtggatcgtcaacggcgcccggccccggcggcagcgctgcgcgcgtctcgagggcagcgggagccagcagccgctgctccaccaaggcggaagcattttggaaccctgaactctgggctttaagaagacactactgctgcaaccatgagcaccatgaagttttgtcgcgagtgcaacaacattctgtaccccaaggaggacagggacaggcgcaccctgttctttgcatgtcgcaactgcgagcatcaggaggtctctgacaataactgtgtctatcggaacgaggtgcaccatactgctggggagcgaacacaggtcttgcaggatgtagcttctgatccaactcttcccagaaccaagactgtccgctgcaatctctgtgggcatggagaggctgttttcttccaggccgcagcaagaggggaggaggggatgaccctgatctttgtgtgctgcagccctgattgtggtcatcggtggagggaatgatgcgatgaaatcttcgctctaatagttgtttcatcaaagcatgaaacttaacttggtttggaggtttcttggaactat

SEQ ID NO: 283694 - DNA, 583 bp, Zea mays
gcaccgatctcggtcccaatcttgacaagatcaaaacggagatgctgttcactagagcgctgctggtcgcggcccagcgaagggacgtcaccggaaacccagccctgcaggggctgctcgagatgctcggcaagaaggccaaggaggctgagaacaccttacacgagctccaccacttcatgacccgggacaagatcgacgggactcgatacgccgctccggaactgggcgatggcctcggcgccaaagctgagcatgcgcaccatgctgctcgccacactgctgataactggctctcatgcttatcttgctgctgtcgacgagatgatgacgacgacgacgctgcccatgccatgcctcgccgtcctcgtgacgatggccatgttgcaaagttgccattcaaccgagtggccatgtccaacaaaatcaggcagctcattgaggaaatgcactcctattgtactcgtatctctaacgtcctcgatgaaatgcccagcaggagcagggacattcacacgccagaaagagacttaggcatcccattccaagagaaatatatgtcggtccttgacgctgagcgaga

SEQ ID NO: 283695 - DNA, 596 bp, Zea mays
ctggatcatggccttctcgtgtttatgctcagactgcaaagtatcccatggcaaacagtgttgctcaggatatgtttggaataattccaggtgatacagattatagaatatttgctgaagacattacaaacattccagggcttgatataatttttgttctcggtggttatttctatcatacttcatatgatacattggagaatctacttcctggaagtattcaagcacgtggtgaaaatttattcaaccttgtgaaggcattcacaaatcctatgttgttaaaagaaaacgagatatctaataaagctgctaaggatggaattgaagatgtgggggcagtcttttttgattatttgacttggttcatggtattttattctcgtgatatatctctgattcttcacagtctaccgatatgccattttcttcttgcaccgctgttcctgaagttcccaaacgttaccttgatgtcatggtttgtaactctcctaggtttcatgagaggaatggtactccatacgtttggtgtaatccttgcaatatatattcctgctctggctgcagcattaagattattattcacaaagaatgcattg

SEQ ID NO: 283696 - DNA, 694 bp, Zea mays
cttatgtttcgcttccaagtaagactctattgcccagattgtgacgaattgcttgacactagaggaagaaatttccttcatactgctattgagcataagaaatggaaagttgtctggcgtttctctggtactgcagatcttggaaggatggcaaatgtcatggattcagaaggcaacacacctctgcatcttgcaatcaagaatgcagaccagatgatagtgagccttcttatggcaacaaatagtgtgttgccgaatatagtgaacaaccagggcctcaccgccttagatcttgctgtactggcaactgacaaaggcataagttatacaatgaatcctcaggtcatcatactccgctgtttggcatggactggagctgtccttagtcctcgtcgccttgatcatttcatcgatgattttggcattggcaaaacttcaggaaacgagctcaagaaattcaccaacattgcacagaaaaagcatggaattgtatttattttttaattaggctgaaggaaattataacaaacaaatgcatcgaaacatgattatttaaacaaagtttcttatgtatgcttgttgagtgttgacactgtttttattagattcatatgctaactttggtacaattcttctcactgttgagtccattttataattgtaccttagtccccaggttcatgtggtttatttg

SEQ ID NO: 283697 - DNA, 577 bp, Zea mays
tgatcatgtccctgtcatgcatgcgaggaggcaaaggtcgctgcggcctgtcgaagctttttctcctgcctgctattcttccggaggagggagagaagaccgatcatgggtcagcgtcaccatggttggaacaaagtgattggattggattggatctcagtatacatgagacatgcatgagaagccccccctaccccttttttcttcttttttttttctttttcactactactactagtatttctcttttttttctagcttgtttttcacctttactttctttggacaaagagggggaaaaagaagcaacttccttgaaggcgaaggtaggtatagtagtaattatcaatagtggtgggcataagacatgatggtggtggtggttcatggggtttatagtaaggagtagctcaagaagggtggctctcatggctccccccttcttgttgctccacaatgtgatgatggtatggaggtggcatggtagaaaagcttggtgaatctcaatgtgctctcgagtgccgtgtctgtccctagtggaatggaatgtctctggtgtccccgttcatttttttta

SEQ ID NO: 283698 - DNA, 621 bp, Zea mays
acatccttgagcatggagcagacataaatgctgtggatcacactggacaaacagcacttcactggagtgctgtacgtggtcatattcaagttgctgaactacttctgaaagaaggagctaaggtggatgctactgatttatacgggtatcaggccacgcatgttgcagcacagtatggtcagactgcattcatttaccacattgttgcaaaatggaatgctgatccagatatccctgataatgatggaaggagccctttacactgggctgcttataagggatttgcagactccatacggcttcttttgtttttgggtgcttataggggacggcaagacaaagaaggttgtactccattacattgggctgctattcgggggaatcttgaggcatgcactgtcttagttcaggttggcaaaaaggatgatttgatggtgaaagacaaaactggcttaactccagcacagcttgctgccgataagaatcatcggcaagttgcatttttcctcgacaatgctagaagggtacacggcagaggatgtggtgcgaacaccagatttgggaaattgtcaaaattaggcctcgctcctcttctttggtgcaccattattggcatgctta

SEQ ID NO: 283699 - DNA, 981 bp, Zea mays
cagcttgctgcacaccagcacccagaagcagaagctcctatatcctgagctcctggcacagcaacaatggcgagacccagtgcagctgctgccggcggcttcttactggcttgcgccgccctgctcttgttcgccggccaaagcaacgcacaaacaaccttcatcttcccattcgcatccctctttcctgtaggttacgtgccgccgatagtgaggatctacagcaagcagaataccgggctgaacatggccgttcgctacggcaaagttgtcctcgtcacagccaactcttgggaccaaacacagctatggtggaagatcccccctctcacgagcctttttgatggagagggcgccaagtactggctggtgaacgtcgcaaccaaacaagccatgacgtgcccaaacggtccaatgcaggtgcaactggcagaattcaacccttacaatggcgcgcagatgtgggtgccgagcacaccccgtctccaggacggcgtcttctaccagataaaaccatacacgcaggattccaaggccctcaacggcttggggggatacgtacatgacggcacggagatcgggatctattctgacacacctgtgtcttccaacaccttatggttcacaagcaatatcttcccctttccgttctattaagaatggcgaatgaacatcaagggctctcgacgtgcttgttgttgcgtgcttgatcaagaataaattaaagacgatacctgagatcttttctttctttcttttttcaaaatgtcatgcttccttgtgtccgcgtgccttacatgttttcacagaatttggtgtctcttttttttcttcaaaaattgaacaagttgaatgtgttccttatgctatgtctctggttttcttttttggttctcaagatttcatgtaactacctgattagcacgcaaacatactgctatgcctaaactaaatttgatttatatactatattattactag

SEQ ID NO: 283700 - DNA, 620 bp, Zea mays
  unsure (1)..(620): unsure at all n locations
gccgaagctggacctgcaaagcgacaagaagaaaggaatccaagtgcagcttgacctgaagagcaatggggatggcccgcgcgggaagaaggcgcctgctgccaggtcaagagcaaccgggtcaggtgggaaggccgcggcgggaggaggttcggctgggaagaggaagaggtaaatgagacattcggcgcctgcccacagttggccggtggttagtttggacgcacagatcccttggtaaataaggagcaggggtggtaagcttcagagttttgctcatctaatggcacatgtaggcactaggctactgtacctgctcccatattttctcccagggcacccatgtcttgctaccagaatttgtttgcacttaggctacttccaggttgtggcaatcgagagttcggtgtggtctgtttcatttagcgaatttgtcagtactctataccacgggtcgttgcctcgttggctttgtcttcgtattctcttgtgcattttcgcgttggtagacagggttttatgtgtaaagaaaatgcagtagcgaggcatttaggcaggtaaggacccccaaaaacctaaaatggcacaagtttactattaaaaaaaaaaaaangagttaa

SEQ ID NO: 283701 - DNA, 889 bp, Zea mays
agtcgttcatgtctgctattagtgaagaatacccgttaatcatacttgtatattcaaaggggagtcctcggtgtgctcaatttattgagtactggaagcaaattggcactcaattggatggaattgtcagaactgctatggtagaagttggtgattcacaagtggctggtttggcgccgaaaaacggttctcgaaacggccatttttccgtaatggtgtaccaacacttgttgcataccctgctaactgcaaaagtccatcctgttacatgaggtacccaggtgggctttttgtggattctgttgttgattgggttgcaacatcagttgtaggattgcctcggatcttgtactattcaaaggagacattgggcccccaattcattgggaagagtggcaatcataaggtcaaaactatctttttctcaagtactggagagcgtgctgctccattccttcgccaagctgcccaagagtattcaagttattcatcatttggatttgtcctatggagagaagacgaatcccagatttggtggaattcgttaggggtggaatcggctccagcacttgttttcttgaaggggccaggcacaacgccttttgtacaccatggaatttttagcaagtcagagttcatagagatgatggaggagcacaagcaccatgaactgcgacagctaagaagtgacacatctttggaattgggttgtgatgctagaggtcattcacgtgctggcaatgatgcagcaatttggtattgtgtaattggtgctggtcgtccaagtgcagaattaagcaagaagagacaaattttgcggaaggctcaagacaaattgctaggtgatgttgacagatgtgctgggaacgttgacaattcaatagagaca

SEQ ID NO: 283702 - DNA, 605 bp, Zea mays
gttctagaggagaatcagtccttggaaaatgctcttcgaactttgctgcaggagcttgtgtcatctgcggtccaatcggataaaaagattatgcagtacgggaattctttggatagcggagaaagtaactgcctgataactcgccttcttgatattgtgctttacctttgcgaaagagggcatgttgaaggtggtatggtattccagctgttagaagacctaactgaaatgtcaacaatcaaagactgcaaagatatctttgggtatattgagagccagcaagatgtattggggaagcaagaactttttggtcgtggcaaactagttatgctaaggacttgcaaccaacttcttcgcagactatcgaaggcaaatgatgtggtgttctgtgggcgcattattatgtttctagcacattttttcccattatcggagcgttcagctctcaacattaaaggagttttcaatacatcaaatgtaacaaagtacgaaaaggatgctatggatggaatctctgttgatttcaacttctacaagaccctctggagtctacaggaacatttcagcaacccagctttgacttctacaaatccggcaaaatggca

SEQ ID NO: 283703 - DNA, 580 bp, Zea mays
gccgagggatgtcactgctcgcactccgccaccacacgactaggacaacatacccttttaattaatcgcaggaaagctgcatctctctctcaaaaatcactccgatgtcgatcaggaaaacacagaaaacaacagccgctgacagaagctgctgccaccaaactgcattttctgtcaccccatcaagcgagcctatcgcatatagcgtgtagcattagacatgtcatgtcaatatgtcatcttccaaatgaccaaacacgagagctagcccaagctgggtaccacgaaacgcaatttcaatttgtaatgaccagcgcgcacggcgtgttagggacagccggacgtccctctcggatgaacaggccggtgtgacgcgcgacgaagctcaggggggtgcaccgcacatgcgcagacctgtctgccaacgaatggcatccgtttccttctctctctcgccgattcatccagccgtatatgtaacgctaacaatatatatctgcaagactgcaagttgccattgcacagcacgggctttgattgctacactagctaggctccaaaagggcatcccatgtagtag

SEQ ID NO: 283704 - DNA, 595 bp, Zea mays
cttctctgttcgcaaaggcaaaaacacttcgcaataaggacctcatcgaaatatatttgagcccacttataacgtgcattccaggtcttatatccaatgctccagatgactcaaaaggctatttgttggaggtatttacggactcatttagagattgcaaggtggattgcaagctaatgttgccatatttggatgcagttggaggaatgctgtttcctgagaaaacaagcatatggcttgctgaaaatgattcaggtgtgttgggctatcatgacatatggatacatgagctacctggaattttgctacaatcaattgataaagcccccttagttacaaaggttgctttggagcttcttctaagaattgggcaatacttccctgcagtggactgtggaaggctgcgccccttcatgaagttatttggtgttgagtcattaccaggagctgtggatcttggtccttttgttaaacttcctcgtgattgccaagaacttgccatttcatgcctttattattttcccagtctgctccctgacgtcattgagccattggcctcatgttgcttaagtgatgcgctggaacccctcatact

SEQ ID NO: 283705 - DNA, 450 bp, Zea mays
gtgttctcagcgtggcgatctccggcgccgtgcagcgccgcatggtggacgtcgggggcacggtagcgcagcgcgtgccggcgccaggccaggtggtgaccaaagcgcgcgaggccgtcgcgtcgctcaccggcgggaagcgggtctcggagaccgtgcaacccaccacagcaacaggtacattggaacaattgaacttttttgttttttgcagaacgaactcgccattagcggagctgacgagacgatcgagctctgtcctctgtgggttgcagggaaagatgtgaaggaagtctatgcggcggaggcgcctgtgatccatggggaggagatcggcggcccgaagctgaacaccaataccatgtgagctgctcatggagagcgcgggtgatctctgagtattgtagcacgtcagtgtatcgagtgctcgataaattgtgtggtatgcgc

SEQ ID NO: 283706 - DNA, 237 bp, Zea mays
aaggaagtctatgcggcggaggcgcctgtgatccgcgggcaggagatcggcggcccgaagctgaacaccaatgccatgtgagctgctcatggagagcgccggtgatctctgggtgttgtgtcaggtctgtgcgttcgcagtacacgtgaatggtgtggtttgcgctgtggagtagagtaggagctggaataataagcgtgctggttgcgttcaaaaaaaaaaaaaaaaaaaagaaaa

SEQ ID NO: 283707 - DNA, 733 bp, Zea mays
attggacgtggcgcgcaagatcacctccatggccatcacctcccgcgtctcccgcctcgaggccgacgctgcgcgcctccgccgtgacctagccgaccgcgaccacgccgaggccgagctccgtgcccgcctcgccgactccgacgcgcgcctggccggcgctctcgacgagaacgcgaagctagcgaaggaaagggactcgctcgccgcgacgaccaaaaagctggccaggaatttggcaaagttggaggcttttaagaaacaactgatgaaatcgttaagtgaagataatctattgcaactgtctgaaaccagtcaagatcacaacgcagaagatttgacagctcgagtcccattttggaaagatgaagtttcgagcagtaacacttcttcagatgcctccagcagatctacaattactgaatccgtccatgacggaggataccagttctcgatcacaccatatatgcctccaaaattaactcctggctcaacaactatgatttcgtcctctagtggttctccccgagcttattcaactggcccaccctctcccaagttcttatctggtccgacttcacctgcaaaagctcgatctgagggccaattggcattgtcatcatggcaaggatcatcaagtcatcagtattcagcacctaccttttcttcccaacgccagttattcgcagggcgaccacatatagatgggaaggaatttttcgacagcacggac

SEQ ID NO: 283708 - DNA, 569 bp, Zea mays
cttgtttatcacctgaatatctctcaagacaacaagaatttccttgtctacctgctttcatgggtcgtaattattgccattattggttttgttaagcttgtcaattgtgctagccgtcgtttgagcacaaagcaccaactcgtcttcaggctcataaaacttttgacattcctctcagtggttacttccttggtccttctctattgtctctgtcgattatctatcatggatttgatcatctgttgtctcgcattcataccaactggctggggtctcctccttattgttcaagttttgagacccaaaatagagtactacgcagtatgggagcctattcaggtcatagctcacgcttacgactatggaatgggatctctgcttttcttcccgatcgctgtgcttgcatggatgcctgttatctcggccattcaaacccgggttcttttcaacagagcattttcccggcaactacagatccagccttttattgtaggcaaaactaaacggagatagcataaccgatggttttacatcgcatattggggatttgtgaatatcatctattggtt

SEQ ID NO: 283709 - DNA, 603 bp, Zea mays
cccacgcgtccggagcttttgatgtacatagttatcatagcagtcaccagattggcaaggccagggatcaccaaactgtgctataaccgacggcctgagaagcaaagtgccctggtgcagtggctgatcaagctggctgcaattgcggctatggtggctgcatattccattccattctttgtgatccctcgcacagtccacccgatcatgggctggtccgtctacctatttggcgcgcttgccttgtcagtgctcgttttcaatgtgtttctgctcccgccacttgatgtgcttacaacgtggcttgcaattgtgggcatgctcatcgttatggcattcccatggtaccatgatggtgttgtgagggctctggcgatctttggatatgcattttgctctgcgccaatcttgtgggcatccatggtgaggatgatggactcactgcagacgatgctcgagagggattcattcttcccccggattggtgaaccagcacaggagactgaattcagcaagctgtactgattcttttacgcacagatttgggatgcttcatcaccatatgaacagatgattcggatccagtaattctcgattgatgct

SEQ ID NO: 283710 - DNA, 722 bp, Zea mays
tttaaagctcttgggaagctaatgatggaagttggtttgatgttggctcatcattgtgatcgctatgtaatgaggcaaggagtagggtcgtatgatggtgacagtcttgagcagacaattgctcgttcgaggtgtcacgagggtcgtctgttgtactatttcccacgacagtttagcaagcagacagacttcaagtcggtttcatcatggtgtggatggcacactgatcatggatctctaacagggcttacatgtggcttgtttacgaagaattctatggaggtaccatgtccagacagtgcggctggactatacattcggactcgtgataaccaagttgttaaggttgtgttcgacgaggatcagctggcttaccaaatcggggaaactactgaaatactgtcaagaggttatctatgtgcaaccccacactgtgtgcaggcacccagcagcgaaaatgcttcaaatgttgaccgctctacttttgccttgttcatgcaaccagattggaatgagaagctgaagtttccaagcgaaatcccctatcaccaagagttgattccaccaaacggaacgctgactttcggggagtactcagaaaggctggtagacaagtattaccagacaacaacgtagagcataccttaagaaaagctaccgtccatacgttcgtaccatcaagtgtgttcttgtgtattcatttctagctttgatcataactc

SEQ ID NO: 283711 - DNA, 458 bp, Zea mays
agtaggtgcaggtaggagcaaagtgaattcgttttagcaacgcgagagagagagaggcccgatagtcagtcagtcagtcaaccagtgcagtatcagttgttgagcgtagatggtgaaactaatgtagcagctcagttgtactcctcccgaccacctgatgaatcctacacaattgtagagtggctgcagcaaaatcacggccatggcaccggagctcctccaaggaacgcaagtccaccagctgctgctgctgctggccatggcggtcgcgcggattgctagtgctaatgttccacaggctgttgattgctgagaagcaagtagcggtggtggtggcgggcagcagacggaagatggcgggtgtctgatactggtggtggtggtagtagtcgtgcgtaatctgttgcctggacttggacttggtttctttaatgcaattatgatgatgaagtgaatgc

SEQ ID NO: 283712 - DNA, 762 bp, Zea mays
cggacgcgtggggcaccacttgctcctgcctcctgctgcttcttcccgagttcccgtgccgccgcgagcgctcccaaccaagcaacgagacaacaacaacaaccctagcaccgccgcagcacttgcgccgtccggtcctgtcctcccgcggtctcgacgccgccccctaccgtcctaccttatcgcgcaccgctccatggccgccaagtgggcccagaagaccgtcgttatcccggcgcatcggcggggctgccacctcatcacccccaagattctgagggagatcgagggcgacctggccgggttcaagtgcggtctcgcgcatttcttccttcagcacacaagcgcatcgctgaccatcaacgagaactatgactctgatgtgcaggctgacactgagacttttcttaacagaattgttccagagggccacaatgctccttggaaacacactatggaaggacctgatgacatgccagcacatattaaatcttctatgtttggttgttccctaacgattcctataactgatggacgtctcaatacgggcacttggcagggcatatggctgtgcgaacatcgagaccatgccagccctcgcaaaattgtgattactctcaacggtgtttaacttgaagatcttatatgctgccaggaaatagggccaatgcattttggacctgaatgtgtttcagttaccatgtactatgttgagttgtaatgtatgctataaattccaataaattcatcgttactatttcg

SEQ ID NO: 283713 - DNA, 1472 bp, Zea mays
  unsure (1)..(1472): unsure at all n locations
attcatcattgcacaataaaaaagttggagtttgacacaaagtattactatgctgttgggattggacaaactgtgaggaagttttggtttttgacccctccaaaaagcggcccagatgttccatatacactcggtctcataggtgatcttggtcagagctttgattccaatgttacgctcacccattatgagtccaatgcaaaagcacagggagttctttttgttggggacttgtcatatgcagataactacccatatcatgataatgtgagatgggatacgtgggcaagatttgtagaaaggagcgtcgcgtaccagccttggatctggactgctggaaatcatgagatagatttcgctcctgaacttggtgaaacaaagccattcaagccattcagccataggtaccccacaccctacaaggcttctggtagcacggcaccttattggtattccatcaaaagggcctctgcctacattattgtcttggcatcgtactcagcatacggcaaatacactcctcagtacaagtggcttgaagctgaatttcccaaggtcaacaggagcgaaacgccatggttggttgtcctcatgcatgctccatggtacaatagctataactatcactacatggaaggtgaaaccatgagggtgatgtatgagccatggttcgtgaagtacaaagttgacgttgtgtttgcaggacatgtccacgcctacgaacgcacacacaggatatcgaatgtcgcatacaatgttgtgaatgccctgtgcactccaatccctgatcaatcggccccagtttacatcaccatcggtgatggagggaaccaggaaggattggctaccaacatgtcgcagccgcagccgagctactcggccttcagggaggcgagcttcgggcacgccatcctggacatcaagaaccggacacacgcgtactacacgtggcaccgcaaccaggacgggagcgcggtggccgccgactccatgtggttcaccaaccggtactgggaaccgacggacgattcggccgacgatttccagtgaggacgagagctgcagctgggttggttattcgttgcggttcctcacgaccaataagcatcgtcctgaatacacgaagcctccgaagctccgatgcaggcctctgcttatagctctccttggtcgttgcccgtgctctcttggagagataaaaagacgtgtgaagagtaaaacggagtgtctctactctgattgtgtaaagaattcacgttcacagcatacgttgccgccttgccggtcgcatgtcgacgtggtgtgtaaattgctaagcagcgtgtactagtcatctaggtgctgctcattggtcagtagtaccgtttcctcttcaccgaaaaaaccctgcctccttgcaaaaattataaaataaaataaaataatgccctgccttcgcagcaatgcaaaaaaaaaaaaaangtagtagggcn

SEQ ID NO: 283714 - DNA, 822 bp, Zea mays
aagaatctggttatgcagatgtcaatgacaatagcttcttaaaagttaacttccaaatggaacagggattgccacttgtacctaagtcattgaccttcaatagagttaaatgtgcagtttcaaaaggcattaagttgggtccgacatttttggttactagtttgacaggcggatccattgttggggacatggcaccttatcaagcttttgccataggtggacttggtagtgtccgaggctatggtgagggcgctgttggttcaggaagactatgtctaattgctaactgcgaatatacgattcccttggtgaagcatctggagggttctattttcatggactgtgggagtgacttagggtctgctcgtcatgtccctggtaatccagctctgcggcaggggaaaccaggatttggtattggatttggatacggacttcacttcaacactgacctaggtcagatccgtgtcgactacgctatgaatgcatttaaccgcaaaaccatctattttggaatcaacagtagcggtggctcttaggttatgaaagacatagctctcacttaacatagactggcaattcaattcgattcttttccgtggacatagaaggggagttctttttcttgacagtgtgttccggacatgccagcagaatcttattgtttgtactacgtgctggcattcaaaaggtgtatagttgggatccacaagatgcattcttcttattatttattgttatgatcttttttttgtgggtgtgggtagatgctgaacaaatgtttttgctgagaagatggtatgcttaggagtagggcggctc

SEQ ID NO: 283715 - DNA, 784 bp, Zea mays
tcgctcgaacgtgtgcactcctgatagatgtggcgcatctgtagtcgacgagaggagtaatggaggaacatgtactggagctgagaacttccagctcccgaacaagatgatgccagatggtggcatgcgtctttatggtggtgcacaataccatcgggcaatggctgaatctcgtctggtagttggtagtaccaggtgccctccgataactagcgatgtaattgttaatgcttgtggtgttgaggatattcatgatggtacaaactactccaggactgcttgtgtaattgccgtggcaagagcacgtgacacgtttgagccattccttgatcagttgggttttaggcttttgtacatactgaagaggctgatcccaatctctgttttcctgctggggagacatggtgagcactttagtagccatgaagtgcttataaggccgggccacggagcattccagagggttgttgaatccactgagcaatcatgtcgtcaaaggtgtatggaagatttggagagtaccactcggtatggcacttggtcccttcacaacaagaaccgtgctggattgagacacttcctcgattcatttgttgcaccgtgagcaactatcagtaaatacactgaacgtgcgggtttctgggttgaatgataacaaacaggattaggcatagggtgactcgaagtcaaaccattcttcagacacaaatttgtccactgctatgccagagacaaggctgggtgacctattggatagcacactctggaacagacgcctggttcc

SEQ ID NO: 283716 - DNA, 601 bp, Zea mays
agttactaaagcctggcatgtaggcgccaccgacggcggtggggaaaatcttggtggtatcacaagcagcagcaagaagcccgatgaaaatcgtgtgctggatgcctcgcagattgggaaggcagaggcggtcaacatccagttcggtcctttcgggatcagcgcctggatgagcgacacgggtggaaccagccatgctggaagtgtggaagacctgagggctgatggcgtggagactggtggtaggaattactcgtcgtgctgcagttcgccgaagacgtcggattccacttcgaaggagcttatggaggactattcggtctatgtcagcgaagaagaggaagaggaggaagctgacgacccttgtgatgctgaaactgatgaagatctatccgatgaagaaagagacatgcacgagatagatgcaggctctgtggacgagcactcgaccaagtcagacgaggcgtatgaggacctagccatgcgcgatgtcgatggagagtggcgactggtccgacgatgagcagcaggcgtcacaaaaccaagaactcactaccctggagtgcagcattcatgggagtggggcactgaagatgatggc

SEQ ID NO: 283717 - DNA, 364 bp, Zea mays
tatgttgcgaaaaagctcttttgcatgggatgtaaagctcgtctgggacagttcaattgggctggtatgcagtgcagctgcggagcctgggtgattccagcatttcagctgaccaaaagtaagatcgagccaatgctcaatgtaacaccagtgcaattaggcgaagttttgacccccttagcagtgtcgttacaacatatatatgtgactaggaaacagtatcatgtagacatgtataggcactgtggtcatttggtctgctgtttagtctgctgctgctgattggcacgtgggttccaccaagctgcaacaactgatactaggaagcattaggtgggctttcagtttgctggtttgttttgcc

SEQ ID NO: 283718 - DNA, 413 bp, Zea mays
gttcgccgatctgtgggccaaaggcttcagtttgctaggtgagcatctgcacagttctgaaataggcgcctatggttgcacagttttttactacaacacttattccacactcaggctaaatttggctcagttggttacaatgtcatgttgattggaatctgccatttgtgaatctatggtctatgacttatctggtagggttagattggataaatgtgttcaatacacaaaaacttgtactatctatatgacactagagattagtgtgccagattgctaaaagctagataatctactgctaccatttaaaagtaactgctggattaattttataggtggattgtgcttaaaattgcaatatggagataaatctggtaaatctgtgcaccagaatggctgggctgaactttatt

SEQ ID NO: 283719 - DNA, 397 bp, Zea mays
gtcgatcctaacatgaattttggggcgttctcccagtcactctgcaaccagcatgtagtttcatttcagacaagcgttaccactagcggttcaggagacatgccaacatatctggattgttccactgggatggatgccggtgtggggatgctgcccacaccttcagcggttgtttccactggttcatctaatatgccagcagattcagggcagaacctcaaatatggtgggccgctggctgcggattggatcacagctcgagcttgaaattctgagagatggcatggagaaatatgttcatgaacaaggcatcatgaagtatataaagatagcagcatcgttaccaaacaagacagtaagagatgtcgcaatgaggtgccagtgggtagggaagaaa

SEQ ID NO: 283720 - DNA, 540 bp, Zea mays
ggaggcgcggcggcgggggcagtaggtccgcggcggacggcggcaggaccgtcaagcagaagcagccgcagcgtggactgggcgtcgcgcagctcgagaagatccgcctgcacaaccagatgctggccgcgtaccgctccgtcacccggcagccgtctgacgaccacccccagcagccgcagggccacgacgtcgtcgtcgacgccgtcacgcattttcagctggtgccgccgccacggagcgactccagcccgttccagccgtaccaccaccggggcgtcgtgcagtactacggcggcatgtacagcaggaccgaaacgagcccgccgtcgctgtacgcgcacgacgtcagggactcgtcgggacacaggctgtgtccgccgccgcagcagcagcactactgcatgacgatgatgagcagcagcagcagcagcaggagcgacgacagtgcctgcagcgccgccgaggagctcgacttggagctcaggttgtagcatggacccgctgcagcttttggttttggtctgggctgggtcatgt

SEQ ID NO: 283721 - DNA, 738 bp, Zea mays
agtctgtgctgaaagatagcaataccaataaaacagaaacaaggaaagtactcccagtgggtgatctggctttacctagctatcatgacctgaagacttctgataacaaaaaagtgaaaagagggtcattttctggtccaatagcttccagaccacggtcaacagagaacattgatgttatttctgcagcgcctaggcatagctcagcacatcagccagtgcagcatgagagtatcccccggcaactcgccgccacccatttcctcaccgaagatcaaggaacttcatgagcttcctcgaccacctgttaatacatcaaaaaatatagcattccccagtttggttgcccactcggccccattggtagcaaatcctgcatctctgacacccaaagttcaagaccattttagggcaagacaaatgcttcccagtactgcttcacctttaccaactccaccgcctggatccatatcccgcagtttttctataccttctagggggagaacaggttcagacggtaaggagatagaagatcagcaagacaagggagctgccagaatgagcctttcttctcttccttcagctcaaacattgttggaagatcgtcagccattgtcagcagctgctggatcggttagcaaaacataggagtattcactgcgagggtggcatactatcattatcaagcggtatgatgagccgttcgttgctatcagggctctcagcagccagaacagc

SEQ ID NO: 283722 - DNA, 460 bp, Zea mays
gcgcgcctccctcgccctcgcactcgccgtgctctccttgctaacctagccctgccgcgccattaacggcagctccctcgtcttacgtgttatgtctcgtcgtgttcagtaccatacctctctgaacatgagccagctgctgctctacttggcttgctccatggcggaaggggacgggccgggcgggccgtactgcgacgaagaacagtgcggtggaactggttggttggttggttttggttccagcttcattttcacctcacaccccacactgctagtggcgacggtggttgggggtgcgcggtgcgctgcgtgccttttttgatgaatcctagctacacgacgggatggcgtgtggtttattcgctggtaggatggctgcctcttttcctccgaggaccattcatgtcttccttggttgtacggacctgtcttctttcttggttgatgtacacaagac

SEQ ID NO: 283723 - DNA, 530 bp, Zea mays
tgtttaattcgtctgttttgcatagcatttgctacgccactcatgtcactagtaagctcttgctatgatgctaccccaaaatgggtatgctgcatagtgtgcaggagctatgttcgatacgatcaacttgtgcatgtttggtaatttcttaacagcatatgcatcaaacattcttgtgacactctcgctgcaatgagtagggacaataagttgataagtttgctcaaacaattgagatccccccccctccagtgcttcttgctcttttttttccaatcgtatattgacctgcaagatgattgtgctcgtacaggcatgccttctatttgttccttccataccgagtatccgcttaagatggagatattgattctaacttttgaactctgaatcacaggctgagggtgccatcatggctttgaattgcatgcggatgatattgggaacactgcctgtcaggcatgaccttccctctagccacattctgcatgtctctttatttggagggtatctagactgaaaaactgaac

SEQ ID NO: 283724 - DNA, 503 bp, Zea mays
gcgctgttcattcaaaatcagtactctcaatttggaacgtgcccggcgattaaaaagtagactagttgcattgaccagaagagttcaaaaagtcagagatgaaatagaacaactaatggatgatgatggtgatatggctgagatgtatctcaccgaaaaacagatgaggatggaatcatctgtctttggtgaccagtctttgttgggctacaattcagcaggcgctgttggggcttcagtttcagctcctgtatctccagtctcatcgcctacagaatcacgaaaactggagaaatctttcagtttgtgtagaagtaggcatgacagtacgaagggctcagataacacaatgacagagcatatccaggagctggagatgttactggaagcttattttgttgttatcgacagcactctgaacatgctgacatcgcttaaagagtacatcgatgacactgaagacttctcaacattcagctggtatgccagcatattttatgctc

SEQ ID NO: 283725 - DNA, 650 bp, Zea mays
gtcttgggaacagaggttcaacgtcgcacttggagcggcccgtgcacttgcttaccctcaccatgattgccggccacagatcctgcacctcaacatcaagtcatccaacattatgttagatgggaaatacgaagctaagctatctgactatggattggggaagctgttgccgattctaggaagcattgaattgagtagaattcacaccgcaattgggtacattgctccggagctgtcatctccaactttgagatataacgacaagagtgatgtatttagctttggggtggttttgcttgagaccgtgacagggcggaaaccggtggacagccctggggtagctacagctgtggttctgcgtgattatgtaagagaggtattggaggatggaactgcatcggactgctttgatcgaagcctgaggggaattgttgaagctgaattggttcaagtgctcaaattaggtctggtatgcacttccaatacaccatcaagccggcctagcatggcagaagtggtacagttcttggagtcggttagaattagctcttgatcttctgctgtcaaacatagtcgcaaataggatgtaacaggaaaagtgttctgattttttttttcacagatgaaggtacattttttttatttttact

SEQ ID NO: 283726 - DNA, 923 bp, Zea mays
ggaccgtggctccacaggagttggggctgtatggaacacagccaacgtttccgcgggctccaccgttgcgattttcggccttggcgctgtcgggctcgcggttgctgagggtgccaggctacgaggggcagctcggatcatcggtgttgacataaaccctgaaaagttcaccaaagggagagagatgggcgtcactgactttgtcgactccagggcctctgacaaaccggtgcacgaggtgatcagggagatgacccatggaggtgtcgactacagctttgagtgtaccgggatcaacggcgtgctgcgagaggccttcgtgtccacgcatgacggttggggcctgacggtggtgctggggatccatgcgacgcccaagatgctgccgctgcacccgatggagctcttcgacggccgtcggatcaccgcctgcgtcttcggtgacgtcaaggggaagtcccagctgccggccatcgtcgacaagtgcgtcaacggggacctggatataaaccttgacgggttcataacacacaggatgcccttctcggacatcaacaaagccatccagttgctggaggaaggcaagtcccttagatgcgtgctcaacctctgatggacatggaccgaccaccacacatgcatgcgtgggagattattgtccttggttagtttggttactacagaaataatcaaataaatatagaatccgcagtgtgtgtcgagttgtacaattcacgtgtgcaccagtgctactttattgtaaaggagggtgtgattgaagccaactagtagcagcaggggcacaagtgttgtttctatcgtacatgtgctgtgatgtctcaaagttatctcggttctcacaacacaacttattgtcataaaagatgctgatctttgattttacataacaaacttgtttcact

SEQ ID NO: 283727 - DNA, 486 bp, Zea mays
gtctcatctcagtcccatcgaaggtctagctgtgagtgttgatggattgctttgctgcacgatatcaaacgatcggtctgtgaagatatatgatgttgtaaactatgacatgatgttcatgatacgtctctcatttgttcctggggctattgagtgggttcatcgagaaggagatgttaaaccaaaacttgccgttagtgaccgaaatacacctttcgttcacatatttgatacccattctggttcaaatgacccaatcatgtccaaagagattcatggtggccctgtcaaagttatgaaatataaccacattcatgatgttgttatatctgctgatgccaaaggactgtttggatattggtctccatctaccctcatgtttccagaaatgaggtgaggcttcgcctgaatcagatacaatctatttgaaatgcgaatgcaagatactgtgtctgctatgagtaagcatgatgcactcaattgctg

SEQ ID NO: 283728 - DNA, 660 bp, Zea mays
  unsure (1)..(660): unsure at all n locations
ttcttagactgagcgcggggagggcgacagcgtatcgatagatgtgccgatcgaggagctctgtgacgaggacaagatcaccgcgttcttcaggaggctgttgaacgagtggacccaggaggcggacggtatgcctgaggcggaacggaggacggcaaaagggaaggccgcgatagccacctgcaagcagtgcacgcgatacctcgaccctctgttcaagcagtgcaagaagaaggctctcccttctgatgtccgacaagcattgctggaggtggtcaagtgctgtaggagacgagactacttggctgcagtggacaactatatcaagctagcgataggtaactcgccctggccaattggtgtgaccatggttggtattcatgagcgatcggctcgcgaaaagatctacacgaacagcgtggctcacatcatgaatgatgagacgaccagaaagtacctgcagtctgtgaagaggctcataacattctgccagagaaagtaccccactgatccatcaaggtcggtagagttcaacagcctggcaaatggtagcgatctgcagtctctcctggcgcagcanaacgcgaagaatccagaagaaacgcttcgggtagtggcagcgtcatgaaaggttggattatatctgtcatcggattctag

SEQ ID NO: 283729 - DNA, 484 bp, Zea mays
  unsure (1)..(484): unsure at all n locations
gtcacagctcacaactcacaagctagcgatcttcctcgtgcaatcgaagcgagttctcagagctgtctacggaactctgaagctcaacgcagcgttcgcttctgaattcgacccgaagcacagcctcgctcaaggcaataaaagccggtgttactgttgccgcgccatggagccggagatggaggcggcgctgatcaaggtcgggatgttcgtgctggtgcaggcactggtgtacctcatcctgtcgcagtcctccaccgtgttctcgcgcaccaagagccttgccctccgccccgcgcggtcgctcagcgcgcgccgcatgctcgcgctgctctccgacctgccgctcgtcgccggagagccctcgcccgtcgccgccttcgcccgggacgcggtccgcgttgtcgcccatgctcgccgccgccggcccgaagcaggactgagttncgcgaccgtcgtgtggccacttagctataagctagct

SEQ ID NO: 283730 - DNA, 615 bp, Zea mays
cgtgcaggtaagagatcaggaggtgtaaaactacgagaggatgaggaagacctggaggtgaagctcaggcgcatcatggagaatgtccctgtgcgtgtcagtaacacatcagggtcctctgctggctctggctctggtgatttccaccagtatcggcaaatgaggaggagagagcaggaccggctagctcgaatggatgcggactaccagaagagaaaagagatagctgagttcgaactgcggagggaggagaggatgaaagcagctgaggagcggacagccaagaagcgcctgaaacggcaaaagaagaaacagcgtaagaaggagaagcgagctaaaactggtgataatggtggtgaagaacctaacagagtggagtcgtctgacgatgacgaaggctcagatgacgatgacaagtccaagcaatgacacgtcaatttcgcacctgaagatgatttcggactctctggttgtctgggcaatgaaacacacgtctgtacggctgttgcaacaggttacagggcgaatccggtgctgtttctgtaagaggatatgatattctgagcagagatggatagcactagataatttgctgttagtgttcatcattcagag

SEQ ID NO: 283731 - DNA, 532 bp, Zea mays
tttgtggaaatgaaccaagtgcctgtttctttgccaacaagaactctaccatcaggtgcaccaggtatgactagcagggtcccaacagggagggcttactatcctgtggttggaagcagcagcagcagctcaagtgttggtgctgtcccaactatccacggatcatctggcgctgcaatgtttgctaacggtggctatgttcctagtagtgttcatgctggaactgttccgatcttccctaacccagcgcctgctacttcatctggctccagagccatgccccaccagatggtcattcagagtcatccagctgctacttccgcagcaacctcttctacatccatgcggaccgcccaaccatcattacctgccagaaccgcagcggcttccagacatgcaaggcatgtgtcagcagggcttgccaacaacggaaggtacagaagggccaggagctcttactacaggcttcatccattgatggtagaggcagagcggttcatgatggaccacttggtcttctacgaatcgagag

SEQ ID NO: 283732 - DNA, 838 bp, Zea mays
ctcgagcgcttttctaaaagaaaaaaatacagtcgcatctcgcctccagcagggtgagttcgcctcggcagggtgtggcataccatggagagctcgtcgccgtcagtgccgttcccgctgctgcaggcgccggtcgagagcacctaccgcgcctgcaccatcccctaccgtttcccctccgacaacccgcgcaaggccacccctgtcgagatccaatggattgacctctttctcaactctgtcccgtccttcaaacagcgggcggagaacgaccccaccgtacccgatgcgcccgcgaaagcggagaagttcgcgcagaggtacacgtcaatgcttgaagagttgaagaagaatccggagagccatggaggaccaccagattgcatacttctttgtaggcttcgtgagctagtactcagagagctgggatttagggatatcttcaagaaggtcaaggatgaggagaatgccaaggctatgtcactttttgagggagttattaagcggaatgacgaaattgaggatgacggcaaaagaattgagaacttggtccgtggaattttagctggaaacatttttgatctaggatctgcacagcttgcagaagtttttgctaaagatggcatgtcatttttggcaagttgccagaatcttgtatctcgaccatgggttattgatgaccttgatgcttttaagagtaaatggaccaagaaatcatgggaaaaggcagttatttttgttgataactctggggccgatattatcttgggtatattaccatttgcgagggagttgctccgacgtggcacaaaggtgatacttgctgctaatgatatgc

SEQ ID NO: 283733 - DNA, 690 bp, Zea mays
atgatagtgaaattgattctgatgcacagtttgtttattcagtaagagaaagcttgcaattgtttctgcaagcttcagacctgtatgacccagaagatgtgctcgatgtcatagcagaatcagagctatggctggaaaaggcaatattgtataggaagatgggccaagagaatattgtacttcagatactagcattgaagctggaggatagtgaagctgctgagcagtattgcgcagagattggtcgagatgatgcttatattcagcttttgggcttgtatttggaccctcaaaacgggaaggagcctatgtttacagcagctgtacgacttcttcataatcatggtgaatcgttggaccccatacaagtattggagaaattatctcctgatatgcctctccagctggcatcagacacaattttacggacactgagggcccgagtgcaccatcatcgtcaaggacagatagtccataatctatcacgtgcgacaaacctggacgtgcggttgacaagactggaggagagatcgaggcatgtgcagctaaccgatgagagtatctgcgactcctgtcgagctcgcctcggcaccaagctatttgctatgtacccaaatgactcggctggttgctacaggtgctatcgatcccagcaaggtgaatcttcatcagggcatggtcgtagcatga

SEQ ID NO: 283734 - DNA, 713 bp, Zea mays
agctctcgtcccttcgcgttgccctccgtggtcgccggctagctccacatcgccgccatggagttcgccggggctggacgaggaccaccggccgcccctctgtagcagacaccgccgccgcgccggacaaggacgtggaccactgaagcaggtcatcgaccacgtttcccagctgcagcaggacgcctccgaccggatctgcaccgccaccggctctcaggcctcgtctacaccggcagcaaccaatttcgaccaacagtgactgagagtgaggatgtcgcaggcaagcttctctggtttcggagagcaaaagcagcaggtgttgcttacagagcacgatatttctaaggcggaattgaggaatcttccgctggtcaactgcccattctgcatagaccacccacagcttgccgcgcacgtctcagggcaacctaaaagcatgggggcacatcttgtcgcatgtcggagatgtgataagatggttgagaagaagatgagatgcccctttttcaagtggctgtctgtttatgcggagttcctgctggagaaagacacttatgatgacaatagtcttcttcgtaagattcaagcacttcagagggagaaagaaaatgccaaattactcgagaaccaggtgacaagtccatggaacgtgaactaccaacaggggagcaaggtgccaacgatgaacagtgcctttgaggttatgatcg

SEQ ID NO: 283735 - DNA, 515 bp, Zea mays
cttaccgtggcttcaccttcctacgctataacctcactgtggcataccacagaacaaatctcttggtacgctacggtaggtggtcaagggatccaaatggaggccctctagtatctcttggatataagcaaggttacagagttgatgtggatattcctgaccatacatgggtagaggcatgtagcttccatgatgttcttattttcaacactgggcattggtggtgggcaccctcaaaatttgatccaatacggtcaccaatgctgttctttgagatggggaggccaattgtacctcctttactgccaccggctggactggatttggctcttcaaaacatgatatccttcgcgaacaaagcaacaagaccaaacgcagtgaaattcttccgcactcaatctcctagacatttcgaaggtggtgactggaatgaaggtggatcttgccaacgtaatcagcctttgtcgtcaaaagaggtggaagaaatttctctttggacataacagcactaatgt

SEQ ID NO: 283736 - DNA, 612 bp, Zea mays
taacaggtgtctccccattgcagctgaggactgctgccatggctcttctacgtcatggatccactatgccattgaagagatgtgaagagctaatgcagattgtgaagtcgtactatggtggtagagatgtgactcctgaagatctcgagatggcattacttgttggtatgagccctcatgagcgaaggcgtcttgaaaagaaaaagggatattcgtttagagctcaggctcaaactattattagaaagagcagcagcaataccatctcagaagacagtggacatggatcagaaaattgtcatgccttatctgcgcgatttcctgaggttggaactggtagtaatggtcagcaagagtttgatgagacagggaatcaaaaccagctagagaatttaaccctgagccagggaagctcaagtttgcagtcagcatggaggacacacttctgatcatgacactgtgacactcgagaccgataccgagcagcaggcaggaggtgcctgtactcctggaaacagtcatgacgacaaggaacaatccatatgtgacagttctagtcaggtcatttccaagaatgctgagaagatatccctgttgggtcatgggcatcat

SEQ ID NO: 283737 - DNA, 619 bp, Zea mays
agctcggattcgctcgagcagatgcaactccatctcaagtagcttctgctggaacactcgctgttgctttcatggaaacattaagtacggtgcttctgggatttacagatggcaacaatgtggaagacgcatcaggcttcttagtatcacttgtgtttggactcggtccacttatcggtggaattatactcgtcacattctctcttgggttcagcatgccgcaccctcttctcaccggtgtcgcatccggcatagctttccgtctcgcggcatggagacctgtgcagctcctgatgacctcaaaaatgggtctcttcaccaccctcttcctcctcatcggaggttccctggcctaccacgccgcagcatcaagcatcctccggttgttcaatcgcaaaaggtcttccgtgaacgtgatcgcgccatcctccggcctctctctcagtgccctcacagtgcagtcccttcttgcctgtggcgccgtattccttcacgcgtacgccgaagggcttgcgctcggtgtcgcggctcgcaaggcctatggcctcggccgctacatggttctcccggcctctctccacggtcttccacgcggcgctgccgcggcgagctgcgtgta

SEQ ID NO: 283738 - DNA, 368 bp, Zea mays
catcaatcatcagccatccagcactcgctcgctcactacgaactccatccaactcgtacacagcccccctctctctctctcgtccttcgacagctagcgcagcagcagcactagttttcagcagttcatcaaccggcccggcacggcggcagagatgaggcggcgcactgcagcatgcccttgccgctcgcggctgctgccctgctcctcctcctcgtctgtttcttccactactcagcagcggctcgcctcctgccgccttctcctgtcccagctcagttggttcaccgagaaactggcgtcacggctgccgctgccgctgcatacggcggcctggcgctgcagagtggcgtgggcaacggcgacga

SEQ ID NO: 283739 - DNA, 665 bp, Zea mays
cttcacgcctgtcaagttctatatcgaggatgaccagctgcataacgttatagatgacgtagatggcctgttatatatgggacctgctggacctgttcctccaccattgccacctccaccgccacctctacctccatcaaaggttgatggtgatgaatcagggtcggactcagactcgtcgatctcatcctgccctgcttcaatgttatctgatgagagccaaaggccccgtggctctctaccacgtccagcaagtcttaatgcctttgatatcatatcattttcaaggggatttaacttatcagggttatttgaggagaaaggggatgaagtgaggttcatctcggctgagcccatgtcagatatcataaccaaattggaggacatagcgaagctgaagagcttcaagttgcggaggaaggactggcgcatctgcctggagggtacaagggaaggagttaaggggccattaacaattggcgcggagatatttgaactcacacctccccttgtaatggtggaggtaaaaaagaaggcaggggataatgaagagtacgagaacttctgtgacaaggaattgaagccagggatgcagcaccttgtccaccatatggtccgagctccaagtatgctgcttactgatgccaagtagatcgaaaggcttt

SEQ ID NO: 283740 - DNA, 790 bp, Zea mays
aattccagagaacctgcatttaccaaagattgataattcagattctgagaacataatgtatccagataggtcaggagaaaaaacaagcaaaagggaaactaggatggcacatagtggaatgctagagtatgctgatatgcagaagaagaaagcaacctcaaggcttccacagaacggtactaataatgtcatagtgtctcgaatgcagaaatcaatatccacatcagataatgaggaaagaagtagaaacaactctttgattgagacaaagacaggtagaaagagaagagacagttcttcagatgatgataatttatttttctccaagtatgataaagatgcaccagaactcaaaggtccaataaaagatttctcacaattcgaagattatgtgcaggagtacaatgagaagtatggagtctattcttacttgagcagtcagatagacaaaactaagtcagattttttaagggttcaggatgatctcaatgttgcgaaagaaagagacatggaacagtattataacaccgtggaaagactcagagacatgtatcatgaatcaggaacaagacataaattgatgaagaaggtcttcgttttgcttcatgaggaactgcagattattaaggaaagaatcaacgattttacggacgcctattcaaatgagtagctgttttactctcataacatgtgactgcttcttgtcaaggctgataatatctgggcatcagcattatgctttgcctttgtagaaatttacttggcttggaaatattcagtcgaaggcacg

SEQ ID NO: 283741 - DNA, 277 bp, Zea mays
ctcaatgttgcgaaagaaagagacaaggaacagtattataacacggtggaaagactcagagacatgtatcatgaatcaggagcaaggcataaattgatgaagaaggtcttccttttgcttcatgaggaactgcagattattaagcaaagaattaaagatttttcagaggcctattgaaatgagtcactcataacatgtcacttgcaattgtgtttcggagactgtcgctcatcgtaaggctgataatgtctgggcatgagcattatgctttgccttt

SEQ ID NO: 283742 - DNA, 498 bp, Zea mays
gcaggatcatcgaggacgcggtcgtggttccctcgcctcccaggaggtcccgccggcttgccaatgtccctgaggtcaagtacgcagagatagcaccacaccgtgcagatagaatgacaaggtctcctagaagaccagctgacctcatctacttggcaagacgcggatcaatttccatgaaagctaggctggaggcaacaaggaaggctgaggagctagaatcacaactcgatcctgaaatcccatccttcgtgaaggcgatgttgcattcgcatgtggttcgaggcttttggctgggtctcccgagccatttctgtgacacttacatgccgaagcaagacgccactatcaccttggtggatgagaaggatgaagaattcgacaccaactaccttgcctacaagaaggggctaagtggcgggtgggctggttttgcgctataccatgcgattcaggatggagattcaactgtttttcagttgattaagcccacgacct

SEQ ID NO: 283743 - DNA, 862 bp, Zea mays
  unsure (1)..(862): unsure at all n locations
cattatgttcggcaacgtggcagaacatcctcagaaagccatggacaccctctttgcaatgcctgggtataattgttggccttctacaaagacattcaattacgtccttcacatgcttgtgtgcaagcggcagtacgaggttgttcacgaggtctactcgagcgcgcccaggcttggggtgacgttggacacatgttctttcaatatccttgtcaagggtttgtgccagtacggtaaatttgatgaggctatctccttgctgcatgagatgccgaagcaagggtgtcagcctaacgcgacaacctactcgacctttatgcatttcctttgtcagcgcagtcaggttgataaagcatttgagctgtttgagagaatgcggaagcaggatattgctgcagatacggtcgtgtacaatattttgatctctggtctctgcagggacgaaagagtgaccgaggcattcgacctgttcaagtcaatgacttctgaagggtgctgtcctaattcagggacctatcaggtacttcttgatggtctaatcagtttaggacaactttttgaagccaaaagccttgtttgcactatgagtacagagggtgtgaggccgagcttccaatcatacaagctactgattgatggcctctgtagtgatgactgcgtgggtgatgcacatcttgtcttgaagcaaatggtgggccaaggttttgttccccggatgggcacttggacaaaacttctcacatccatgttcaagttttagcttncgcatcggtgatttccttggcctaaacagacacatgaatgaaaaaatcaaattttggcagactcttgactgaaggtcatcaagtttggttagaggagc

SEQ ID NO: 283744 - DNA, 477 bp, Zea mays
gtgccatcttggtcgaggaggagggaagggaaaaggggggcgcatgggcggccagtggctgggggaggggatgccgtcgtccaacctgcagtgcttcttggactgcaccacccccaccgtcgagacgcacattctccccaagacgaatggacgattgccgaccgacgcctggcaccacgctgagatggacagcgtcgagtacttcaatcttgccgacctctgggaacagtactatgaatggagcgcgtacggcgccggagctacggtgcagctcccaggaggggacagcgtagttcagtactatgttccatacctgtcagggatgcagctatacaccaacaaggtcctgactgcatccagaagttttggtgaagataatggcatggatttatggagtgatgatgaggacaacgagaagatgtcgagatcctggagttccacctctgatgaatcattgttcaactgtgatgtgttatg

SEQ ID NO: 283745 - DNA, 692 bp, Zea mays
atcgggaaccccaccgggtactggaaggcgccgtacggcctcatctaccgcaacatggcgatcctcggcgtggagggcttctccgtgctgcccaggcactgcctcgcgctctccgctgggttcttcgcgttcgccttcgtcttcagcgtcgcccgggacgtcctgccgcggaagtacgccaggttcgtgcccctgccgatggccatggccgttccgttcctcgtgggcgggagcttcgcgatcgatatgtgcgtcgggagcctggccgtctttgtctgggagaaggtgaacaggaaggaggccgtgttcatggtgcctgcggttgcgtccggtttgatctgtggagacggcatatggaccttcccgtcttccattctcgctctggccaagatcaagccaccgatctgcatgaagttcactcctggaagctagaaacagtatggacagttctcggaaatggagaatgcgagatacactgaaggcatcaactgtggttggttgaagccatatgtcccctgtattatccttgttgtgcatgtgtgggttctccaagggtttcagcactcgagattttttatagagtttatatgttttgttgtcatgttgggttcaacctatgtttatgttttgggtggaaaaaaagattacaactgtacatttttaacagaaattaatgctcattttggttgtgt

SEQ ID NO: 283746 - DNA, 342 bp, Zea mays
caacattgtatcttcaattacctccggtgcgacccagaagatcattattttcttctaactgagagccctctgactgcccccgagacccgggagtacaccggggagatcatgttcgagacgttcaatgtgcccggcctctatattgctgtccaacctgtccttgcgctggctgctgggtacactacaaccaaggtgttgtagttgatgtgggtgatggggctacccacatcgttccggttgctgatggttatgtcattgggagctgcatcagatctattccaattacaggcaaggatgttacccaatttattcatcaacttctaaaggaaagaggtgagaaca

SEQ ID NO: 283747 - DNA, 483 bp, Zea mays
ccagcaggcttaacggacggacggacgtcatgggaaactcctcatctcgcggccgatcagagccgaggcagggcgagcagaggaccatgaagtggagcgtcgatgggttcgcctcactcctggacaagggcgacggatggacctactccagagtgttcgagctcatgggccacaactggtacctgaagctgaacccgagggacaagaagagcggtgacgacgccacggagtacgtctccctcgtgcttacagctggatgacctctcggtgaagccggatactgtcgtgaaggcctccttcaagctgctgatctacgaccaggcgtatggaaagcacagcgagcatcaagttcggcacagtttccagaccgcaagcacgagctcgggagcctcgtgcatggtttccctcgaaaagctgacggaacgaccgtctaagttcatcgtcaacaacagctgcaccttcggtgtcgagttcatcagagtc

SEQ ID NO: 283748 - DNA, 561 bp, Zea mays
  unsure (1)..(561): unsure at all n locations
ttggtgtatgttcaccgcctcatcatgcgtggcacccttgaggagaaggtgatgcccctccaggggttcaaggtgtcagtcgccaatgctgtcatcaatgctgagaactcgagcttgaagaccatgaacactgaccagctgcttgatctgttcacatcaacccctgcttcaagaaaagcaagcgacgagcagagtaagaggaaatctggtggcaaaggcttgaagtccattcttaatggtctggatgagctttgggatcagtcgcagtatgccgatgagtatgatctgaaccagttcctggcgaagctgaacggctgagccaccaccggctggctcgtgtacagtgtataaagcaatttggggcaggttaattttgttgttgctgttgtttgatagaggaaggaaaagattagatgctaacagatataggtggtggttggggttacgatctcaatttttttggtttccatcttcctcaatttttgttttgaggagttgtatatactctgctcacctataatcaaagctgcagctcttatcagaaaaaaaaaaaaaaggnaa

SEQ ID NO: 283749 - DNA, 681 bp, Zea mays
ggcgttttcaatgggtcttcaaacaacaagtcggcgcagtcgggttgtcaggtgattgacaatgacgactacgatttgctgtgtcgaagtggtgttctggtggaacaagagtacacggtgtcatcttgggatggccacacggtgcttttgggtgactcgcacgtggttacttttagtgcgggtcaggcgctctggttggcgacgaattcacaacaagttgtctgcctccacggcgagctattctttatagaaaaaccagaattactcacgattgccaactccacatctaacatggcaaagggtatttctagtgattcttccttaaagttgcctccgattaaggacttcctcacagttgccgtgagtcctattggagacctcaaagttgctgcgaaaactttgatgggctcgaagaacctatcgaaggagtcaaaggcatactacgaggccttaaagaaagaacgtgctgccgaggatgctcgctcgacacttgaccttgagttccagaagttcgctttcgcgctgggcaatttctttcaacggatcaaaccatcaaagggtggcgaaagctggccagattggacgttaagaaatgcccgagccggaaacttcaagaagctcgaaaacaaactggattcgatcttcaaggtagagcatgcgaggattgaagggataacgcat

SEQ ID NO: 283750 - DNA, 529 bp, Zea mays
cggcaccttgtggttgttgctataatgttgagttgttgagagattcttgctccgctgtttctgtttatgggaggtatcataccatggaggaccacacggaggggcttgatgagtgtgttgcagaagctttcttgttcagactgaattcgttagttgatgctagcgaacagttagtggatttcaagaaaggagaggacgacggcttgaatcttagtgctctggagaaggaacttcaaatgcttactccgtacttggctgatgaagatgctcttgagagtactggacttgaagatgacgtcagaggaaataccaacctagatgtatgtatggtaacaaacgaggaaaatgctaatggcaaagaatttctaaaagatagctactgcatacttccttctcctgagagtgcagtcccttttgatgtttatgggggggaagacttcaagacagaagatacagatcttcaaaaccctaccgctcgcaaattttaggaagatccaaaaattgatcctgcactctctaagtttcagca

SEQ ID NO: 283751 - DNA, 872 bp, Zea mays
atgtactggaggcactacttatggtcagcttcctacatactctaacacgtctgctgcaccaagtgctctcataaatggaaatttcttgagaaatatatcttcatggatgcctagcagacacatatcaactgctcaggaaggagaagacacaaggtttcctgggagagcacgaacacttggttctgtaggaactgaacccactgcaagggaggcaagtgcgcatttgcatgctaggttgttggataacacaactccaagtgacccactaacgaatacacagcatacagctgtgaacacagtcagagctgatgcaacagtgacagctgagcaggttgatacatttgatgaagaacttaagaagctggttggaatgggatttgaaaagactcaggctgaagttgctcttgctgcagctgatggggatccaaatgttgccattgagattctgatgagtcagcagggttgaagtttgaccataaagtacaaattgaaaggaagcacggtatcgagccattttttgttcttacaaaggttcaaaaagtaggctgtggtttggggagtctgaaaaaggatggctgcaatcttgtttataccgggggtgcagaaacaacgtgcagcctaattgcaattctcaaggctttatgtaaggtagaaagtaacgttggatgttctgttaaatacgaacaatcagaaaatgctgaatttagtctgaaaatagccagtgtgtttgttttagcttgcagattattacaatctacaagccaggggaaactagattattgggctgtaacaataagactttgacgttgggactggttcccttttgagattgtggaaaaaaaaaatctaaaaattttatcttaaaaataaaa

SEQ ID NO: 283752 - DNA, 347 bp, Zea mays
tgaagtttgaccataaagtacaaattgaaaggaagcccggtatcgagccattttttgttcttacaaaggttcaaaaagtaggctgtggtttggggagtctgaaaaaggatggctgcaatcttgtttataccgggggtgcagaaacaacgtgcagcctaattgcaattctcaattcttccgactatagaatttatgtaaggtagaaagtaacgttggatgttctgttaaatacgaccaatcagaaaatgctgaatttagtctgaaaatagccagtgtgtttgttgggctgtaaacaagattgagacctttgactagattattgggctgtaacaataagcccttgccgt

SEQ ID NO: 283753 - DNA, 699 bp, Zea mays
ttttggctgcactgcaaatcaactagtgtcgtggcgtggttcacatcgcatgattcgagctggaaatgacagtattgttaaaaagctgacattaactcaggccattgacgcaagagatgcactagcgaagtcaatctaccccaatttatttgactggactgttgaccaaattaaccactcacttggaacagggaggcaatttacatggagatccataagtattttggatatttatgggtttgagtgtttcaataagaatggttttgagcaattttgtataaattatgccaatgagaggctgcagcagcacttcaacagacatcttctcaaactacaacaggaggaatacttggaagacggaattgattggacccccatggaatttgtggataacactaattgcttatctctctttgagaagaaacatctagggctattgtcattattggatgaagagtctactttcccaaaggcatccgatttttcctttgctaacaagcttaagcggcaattaagtggtaactcttgcttcaaaagtgaaaaagaaggcacatttaagatttgccattatgcaggggaggttggtgacatatgatacagctgggttcctggagaagaacagagacccattgcactctgagtcaatccaactactctcatcatgtacatgtgaactttcaaaacattttgcctctgtca

SEQ ID NO: 283754 - DNA, 570 bp, Zea mays
aatgaaatggctgtaagaatagaagataaagatgagaggatatcaagcctggcgaaactcttctttcacgagttgtcaaagaaaggaagcaacccaatttataatcttcttccggatatcttgggtagactatgcaatcaacacctcaaagaagaaacattttgcaatattatgcagttcttaatcaactcaattaagaaggacaaacaaatggaagctcttgtggataagctgtgcaataggtttgctggagtaaatgatgtcagacagtgggagtatatttcttattgcctttctcagctaaccttcactgaaaagggcctgaaaaaactcattgataattttaagatgtttgaacatgcattgtcggaagattctgtgatgaaccacttcagaagcgtaatatcaaagtgcaagaagtttgcgaaacctgagctaaaaatttgcattgaggaatttgaggagaaacttagcatggttcatcagggaaaagaagaacagggaggaaccaacaaaaatgctgaggcacacagacagagaattgattcgcttgatgaatttcttgttact

SEQ ID NO: 283755 - DNA, 1015 bp, Zea mays
caactatccccatgacaccattgcagattctttccaggctcttactagctgagttttctgttattttttttagtatttgttgcgtgctacttacttttaagagtattattttttttagtatttgttgcgtgctacttacttttttagtattgataatgctgtattatcgtgcatgtaatgcctgtcttttgctgtgattatctcagtgttgaaacaacagcattttacaaattttgtccaggttgcgtctttgaaagacacaattttgcgcaaagatatggaaatagagcagatccaggtcatcaaaagacaaagtaaaatccccaaatttgttgttagatagaaatgtgcctggcttgacgaagactacagcaaaccaacctagccaactattatcaggcgaacgaatgcttaagtctagtgacagagttctatcggatcgtcagagttacggcgaggtgaatgtagatcctaaccaccatgtgatggatactgcaccagtgagcatagatgaagcaggatatgagaacaatgctcggatgatggtttatcgggtgaaaccgagaatgataattcagctgctgagatgacagcggaacggctgcatagatttccatcaagaataagcaggttcactctcacaaagaacgggcagccatctatgtctagatcgaacccaaaggatgctaagactccaagcaatacgaaagctccatcgagccggttgacaggaggctcttcagccaggtctaaaagacggcagtagagcacgatcaatgttgctcgttttgatgtgcattgtagttgaaatgtgaatttggtgggtagttgtaggaccgttttatgattgtaactttagaaaatgtcagacactgatggcagaatatttgagacatttgtttgatcatttgcttatgccgagcaaaacagcaaacaatgctcgattgtatgtgaaacactctgacctgtgaccatttgaatgtcggtgcgcctccggaagtccggagttgtgtat

SEQ ID NO: 283756 - DNA, 642 bp, Zea mays
ctcaaacgccaaacgcaacacccgccagcaggccacctgtgagcagcgatgagctcgtcgacgcccggccgcgatgacgacgcgccggacctcgtctgccagatcgactgcgtccacggcatggtggacgcgctctcctcagtccgctggaagcgccaccaggacgcggtgatggagctgtcggagcacgggatcgttctctccgtagaggagagcgggtgtctccaggccaaggtcttcctcaagcgcgagctgttcgtagagtacgactatgcgggggacgggaggcagcggttcggcctcagcctgggtctcttcgtcgactgcctcaacatcttctcatcgccaggccacgcgtccgccgtcgagatccgttaccctggccccgacatgcagcttctcctcaagtctgtgggctctgccgatgcatgcctgtacgcagaaatcagaaccaggattccagacacagtctcctgggattaccattctgagcatgctgggaatagtccagtcagttataccgtcaagtccgccgtcctgaaagaaacgatcgacgacctcgaatggccaggttccagcatccagattcgaatgcaaccagatcctccaactgttatactaaaaggcgaaggtcatggcgac

SEQ ID NO: 283757 - DNA, 754 bp, Zea mays
  unsure (1)..(754): unsure at all n locations
gtcaatccctcctctccgccgcctacagctgcggggagctcgccagtcgccacttcgccagtcgccacttcgccagaatggttgcccacacggtggcttctcctcgctttgttcctcctaccggcgtggctgctgatctcggccgtctttgtgtaatttgtttggatcccgcagttccatcagtaccaggcagcgggtcgcgcgctgccagtccccgctgatgagcaccccaagatctaccgcatggagcttgcgctaccaacgaggtctgctccaaatccaagctctggtactatctgaggaagctcaagtctcaagaaggtttaagagcaacggtcagattctcgccatagacgagggttaccacgacctgcacaagcagtaccgtaataccaccctgaatggtgccatggagcagatgtacaatgagacggcttcctgtcggtcaccctacatacagatcatcaagacggcaacaatcaactttaagctttgcaagagggacaacaccaagcagttccacaattcaaagttcaagtttcctttggtttactgcaacaagtcaggccaccaaataggaagctgaagaccaccttcaaggctttaaggcccaacttgttcgtgttatccaacttaccctgacaccctcccaaatctgtcaggctgtcagtctggtggtttgctagttcagcgtaatgcaatctacatgcaacctattgtttctaagttctaaaaaaaaaaaaaaaaaaanaaa

SEQ ID NO: 283758 - DNA, 587 bp, Zea mays
  unsure (1)..(587): unsure at all n locations
ccctcctctccgccgcctacagctgcggggagctcgccagtcgccacttcgccagtcgccacttcgccagaatgttccatcagtaccaggcagcgggtcgcgcgctgccagtccccgctgatgagcaccccaagatctaccgcatggagcttgcgctaccaacgaggtctgctccaaatccaagctctggtactatctgaggaagctcaagtctcaagaaggtttaagagcaacggtcagattctcgccatagacgagatctttgagtgtaaccctacaacaatcaagaactgtggcatctggctgtgttaccagtgcaggacaggttaccacgacctgcacaaggagtaccgtaataccaccctgaatggtgccatggagcagatgtacaatgagacggcttcctgtcatcgtgtggtcaccctacatacagatcatcaagacggcaacaatcaactttaagctttgcaagagggacaacaccaagcagttccacaattcaaagttcaagtttcctttggtttactgcaacaagtcaggccaccaaatangaagctgaagaccaccttcaaggcttaaggcccaac

SEQ ID NO: 283759 - DNA, 292 bp, Zea mays
tgatttggtggttagggatccctagaggatccatgggggagaaatccccttgcaattcaattttgaatagcaagaggatttcttccccagggatccccggtcaccaaatcagccctcagtgtcaactcctcctctccgccgccaacagctgcggggagctcgccagtcgccacttcgccagaatggttaatgttccatcagtgccaggcagcgggtcgcgcgctgccagtccccgctcaagtctcaagaaggtttaagagcaacggtcagattctcgccatagacgagatct

SEQ ID NO: 283760 - DNA, 393 bp, Zea mays
cggaaaagtgaggtctccaacaccttccatttcaccttcacggtctgtagtgacacgctgaagaacgggttgaagattcgcatcgttgtcccctcaaccgaagaagaggcgcggcggatattggagcgcatggaggcagacggtttatgcaactaatctttccgcagatccacttgtttcggagttcggacgtgctttacttgatatatgtctcacttaccgttccacggtaccagctaaaacggggggatttggcgacgatttgagcagcagccagcagctaccataacgcgccggcaatagaacggcatagctgtagctccatggtactatttgtgattttttttttacagagaccgcatgttgcgtataataacatactcctcgagactc

SEQ ID NO: 283761 - DNA, 516 bp, Zea mays
gccgccgtgctgtacatcaacataccccacatccacggccccggcggcaagcacggcggcgcgatcggaaagcacggcgccgcccaccatggcaagaagttcgacggctactacctctggccgtgaaggatcgatcgatcggagcagccaacccagcatcgtcatgcatgcacatacctgccctgatgatgatatggtgagccgcgaaggtgaagagagtacgttcccgttcatccatcgtccttagtgatgctcggtgattagttgatgatgaagagtgaagactacacaccaacccacacacatttgatcgacccagcgacgtacccgccaatttttttcttcttctttcctttttgcccgcccccttttcttcattctttttcttctagatttgtccagaaattgaaagatgtgttaagatgtgttgaattgtttagtttaataattaccgtacccgtgggaattaaattatgtccctacttatatatacattacgcccaagaggaaggatca

SEQ ID NO: 283762 - DNA, 684 bp, Zea mays
ggtgccgccaccggcgccggcgccggcagcctccaagaagaacagtgctagtgttggagcaaaacgaaaaggtggtcctggagggttaaacaaagtctgtggtgtgtctccagagctgcaagctatcgttggtgaaccagccatggctagaactgagattgttaagcagctttgggcatacattcgcaggaacaatttgcaggatcctaacaataagagagagattatatgcaatgatgagctccgattagtttttgagactgatagcacggacatgttccagatgaataagcttctgtccaagcatatacgtcctctggagagtaaaaatgattcgaaaccagaagcaaagaaattgaagccacagggtgatgaaccaatttcttcagttgaaactgatgttaaccaacttccccttatggtttctgatgcgcttgctaccttttttggtaccggagaaagagaaatggtccattctgaggctgttaagcgtgtctgggatcacattaaaagcaatgatttagaggatccagagaatcctacggtgatactgtgtgactcgaagcttaaacaactctttggacgtgaaagtcttaccgctcatggtgtctcggagttgctttcagaccacctttacacgcaatctaccaatatctgactggttagttaccggactttctcttg

SEQ ID NO: 283763 - DNA, 502 bp, Zea mays
cgccaaaaaggccaaacctgacgtaacatcaccaataggttctttatcagaacacaaaagaagtttaccccctgaaaagcataccaatgataggttgaacaaggagacggggaatgttagccgtgatgcttcacgagatagcagtcctgccatgaaaggaagaccttcagctcctggaaatttacagaggatagatcagagcccaaatttacctatcccaacaatgcattctgagggaacaaaaggaaatgctgttaaatcaagttcaaagaaaaaatcagataagatgcagaaaccatggcatggtattgatggtgactttggctcatgttattcacatggtgtagatcaccatgccaattttgatggctctgatgattcttccacaagaaaaaggagtagacatgagaatcctcttattgatgataaaatgcttaagcattcgaaggacactaatgctaatataaattccatgaatttaaccaaaagttccagagaaatt

SEQ ID NO: 283764 - DNA, 539 bp, Zea mays
gacacgcgtccgcggacgcgtggggacttcctcgctggtagcgacgaaggaagcgagggtggtgactctggactggagtcagacgagtctgatgaactcgaggcaaaatcacgagcaattgatgagcagaaactcaaggcggaagaagatgcagaggaggaacttcaaaccaacataagatcagaatctgatgagttcagattacccacggcagaggagctggaggaagaggcacacagaccgcctaacctaccaaatctcaaaaggaggatttcagaaattgttcgagtgctctcaaacttcagcaagctgaggcagaaagatgttccacgaaaagattatatcaaacaactgaaaactgatatcatttcatactatggatataatgattttctagttgaagcattaattgagatgttcccagctgttgagcttgttgagttactggaagcctttgagaaaaggccgcccgagtgcttgcggacgaatacactaaagacccggaggagggatcttgctgctgctcttataccaagagg

SEQ ID NO: 283765 - DNA, 757 bp, Zea mays
cccacgcgtccggaatcagtctgcccttgattacataaatggatctgtttcagcatctcaggtctttttgcctcgggaacaacttgagaagcaatactgcagtactggtgtacattcctcgcctcagactagtagtttcacagctcctgcagttagaagtgctataccagatccagacgtccgtcaaagttgtgcaaattcatcagagtcttcgatatcaccacctggaagcaaacagaaatctgcgtctgatgatagagatactactatttctgttttactcgaagacataccaggggggaggttgggtccgcaatggattcggcccacacccccaagacttcctttatttgatggggagctacaatggctgaaccctgacaataaccacgagctattatgggattatagcatgtgtgctgacacgaatcgaggggctgctatccgagatttgattgcaagagccttaaaaggtccacttgcacctattcaacaggagcaagtcgtagtagaactggcaaaggatcctaaactggtttattattgtgggatgactccacagaagcttcctgatcttgttgaacacaacccactcattgctgttgaggttctttcaaagctaattcactctcctgacatttctggttactttgatgttcttgtgcacatggaaatgagcctgcattctatggaaggtgtgaacagactcactaactgccgttgacctcccaacagaatttgtccatgcgtacatcac

SEQ ID NO: 283766 - DNA, 517 bp, Zea mays
cttacgcttgcttcaaatttgatcaatgcaagtcaatgcacttgggtacttatctgaactgtatgctgctaatatttctcaatgttaggcttgtccgaactgaggcacgcaacatttttacagtgtctggtctgccagacgaatactgatgccgtttcggtaacagtcatactgctactgactgcttgagtaacctttaaacaatactgccaaccgcttgaattcatgtggtctgtcggtgtttaacatggttggaaccaattgcttatccgcttagggatgctttgtcgtgcctgcaagcacatttcaggggtgctatgtatttttgtatcagatcaatgctgaagggcccttatggttgttttgtgctaagattatgaaaatattaagtgttaaaatttatttgtaaaagaaacatcttgtaggcttcatgttatgattctctcacataatggcatattatctgagctgattgggactacattatctacactgaaatggaaggtctttctttgga

SEQ ID NO: 283767 - DNA, 394 bp, Zea mays
tgaaaaggggaccacttttaggtagcataatcggacatgaagatgaaagatccgtacttaggaatttgttcctgaatgcttcgtttgacctttcgctccgtatgttggcacctcggtgcataatgcatcgtgaaggtggtacatttgaggagctgccagcatatgatcttgtcatgcaatctaatgctgcagtggtactggaccatggaacagatattttcatttggttgggtgctgagctagcagcccaagaaggacaaagtgcagcagctttagcagcatgccgtactctggcagaagagctcagcgagaaacgttttccagctcccaggatactttcattcaaacttggttgctctcaggctagatatgttgtctcacgcctgatcccagc

SEQ ID NO: 283768 - DNA, 480 bp, Zea mays
  unsure (1)..(480): unsure at all n locations
gttcaacatcaaacctttcactgagctcaggtgttaataatggacctacacctgtgtatccaacaggcactgagaagagttctggtgaaacttggtttgaagtgggatggtcacgaacatatacggcaactactgatgatattggacatgtgctaagatttgaatgtatagttgtggatgtggaaacacgggggactgtgagagctcctacttcagtcatgacatcccgtgtaatcccagcaccgaccccgacaccacgccgcttgatccctgttaatgcagctgatgcaatggtccacttcgatttagatagccggacttcttcttttgggacatttactgtgctgtcctacaatattcttgctgatacatatgcaacaagtgatacatacagctattgtccaacttgngcacttacatgggcttatagaaggcaaaatttgttgcgtgaaattattggttaccatgctgatattatct

SEQ ID NO: 283769 - DNA, 517 bp, Zea mays
cttgctttccggaggagcggcagcacgcgttctgggtgcccgtgaacaagcgctactacgcgctcgccgggaagctggaggggctggagctgccggcgtgcgtgaacgcgacgacgtgcctgccccgcgcgccccgggtgacgcgggtgcccaggggctgcagcgccaacatctacaccgacaacgccagctaccgccagttcatccgctcccacttcgggtgcacccccgtggagatggagagcgccgccgtggccctcgtcgcgcaccagcacggcgtccccttcatcaccatccgctccctctccgacctcgccggcggcggctcctccatcagcaacgaggccgccacgttcctcgacatcgcggcgcagaacgccgtggacgtcatgctcaagttcgtgcccctcatcgcgcgccgcggtggcgaacaggagcacgccgccgacatgtaatgtaaggcgggatcggagacagatccacgacgctgagacgttgcgtgccacagacacaacac

SEQ ID NO: 283770 - DNA, 550 bp, Zea mays
tcgtttatatcctaaccaggctcactaatccttaccaatcctttcacccaaatcatacataagatagatgttcaatatgtctagggacccattggtcgtcggcaatgttgtgggagatattgtggatcccttcatcacaactgcgtcactgagagtgttctacaataataaggagatgacaaatggttctgagcttaagccatctcaagtgatgaatgagccaagggtgcacgtcggtgggcgtgacatgaggactctttacacacttgtcatggtggacccagatgcaccaagccccagtaaccctacaaaaagagagaaccttcactggttggtgacagacattccagagacaactgatgccagtttcgggaacgaaatagttccgtacgagagcccacgtccaatcgccggaatccatcgcttcgcattcgtcctgttcaggcagtcagtgaggcagaccacctattgcgccggggtggagatcaaacttcaacaccagagacttcgcagccatctacggccttggctccctgtcgctgcagtgtac

SEQ ID NO: 283771 - DNA, 798 bp, Zea mays
  unsure (1)..(798): unsure at all n locations
caagaaaataagcttgctggatggggatatagtgctggaggacttctggtggcctcggcaattaattgtcggccagatttgcttcgtgctgctgtcttaaaggtccctttcttggatgtctgcaacacccttctccatcctattgtacctcttacagccattgattatgaagagtttgggtatcccgtggattatgaggaattccttgcaatcaggaagtattctccttatgataacatccagaaggatgttccttacccagctctgtttgtgacatcatcattcaatacaaggtttggtgtatgggaggcagcaaaatgggttgcaaaagccgtgaattactcaatatgatccagagagggccggtatttctcaacctgacaacagatgttgtagaggagagcaagtatttgcagaccagagaattatcattggagaccgctttcctcattaaaatggtctgcagtgtgtgaacaacatgtgtcttattattctgaatcaaaccctgttggtcaaatatgggaagctgaggcaacaatgtcagtcctctccatcctaggcacctgagctatttaatcgattaattggagctttatgagcttttgcagaattcatgaagaatttgtatgtccatatttcctaaatcatgaggtatctccagatgacctggttttatgccactacttacaatagtggcttaaaaatcacaaatnatgctcanttgtgagtgagtccagatatcccgtggaacaagtccacaaacatacggttatagagcctctacattatactgcaatg

SEQ ID NO: 283772 - DNA, 468 bp, Zea mays
gttttgttatgggacaacaccgccacgcgcatgaggcgctttgagtcattcaccgttataggaactggaacattcggctgtggtacgttcatcattgagggggaagatttcattgcagagaatatcacgtttgagaactcagctccccagggctctgggcaggccgttgcagtccgggtaaccgcagataggtgtgctttctacaactgccggttcctcggttggcaagacacattatacttacactacgggaaacagtacttaagagactgttatattgaaggccattgtgacttcatctttggtaactctgtcgcccttatggagcattgccatatccattgcaaagcagcgggatacatcactgctcatagccggaagtccacatcagaatctactggctatgtgctcctgaggcggactattactggacatggagaagctggatacatgttcctaggtctgaca

SEQ ID NO: 283773 - DNA, 340 bp, Zea mays
gtcagtcacttgatgggaaacatacaatttttgggagggtatgcagaggaatggaaattgttaagcgccttggaagtgtgcagactgacaataatgacaggcctatccatgaagtgaaaatcttgcgtgccgttgtcaaagactgaagcattatccagatgtaactccgagtgttggtttaggctttaataatggccatgttcatgtaagtggtgcctttgcgaaaaggtgaaaagtgcagctagttccagcctatatgactatggtctctcgatgtggctgacctgaaaccctacctgatgagtagattggaccttttgatcaagaaggtatttgaaac

SEQ ID NO: 283774 - DNA, 528 bp, Zea mays
cttacgcgtgggggaaggatcaacagggccgggtggggcctgctgaacaggaccattatcactgccggggaggatgccaccattcgcatctgggactcagagactggacagctgctgaatgagtctgataaagaatctggacatcagaagaccatttcatcgttgtcaaaatccttggactggtcacattttattactggctccttggataaatctgcaaagctatgggatacaagaacgctaaccctgatcaagacgtatgtcacagagagacctgttaatgctgttgacatctctcccactcatgataccgtggttctaggaggtggtcaggatgcaatgaatgtgactatgactgaccgccgtgctggtaaattcgaggctaaattctaccacaagattttgcaagaggaaattggtggtgttaaagggcattttgggccaattaatgctttggcatttaatcctgatgggcggacttttcaagtggtggtgaagatggatatgtaaggctgcatcattttgatt

SEQ ID NO: 283775 - DNA, 528 bp, Zea mays
  unsure (1)..(528): unsure at all n locations
cttgttcggcggcgcgcggcacgaggtgtccgtgtccgccattgccacgtgcgggcagctgaagaagctgctggcgccgaggacggggctgcagccggcggaccagcagctgagctaccggggcagggcgcggggcaacgccgagtacctggacgcatgcggcgtcaagaacaagtccaaggtggcgctcgccgaggaccccgccagcgtcgagcgccgctacatcgagcgccagaggaacgccagggccgagagcgccaaccgcgccatcggcgccgtcgcgctcgaggtggacaagctcgccgatcaggtaactagcatcgagaaatcgatttccagagggaacaaggtgccggaggtgcagatcacgacgctgatcgagctgctgatgcggcacgcggtgaagctggagagcatacctgcggccggggactcctcttcgcagaagaacattcaggcaaagcgggtgcagaagtgcgtggagacgctggacgtgctcaaggtgtccaacgcgcggntgcaggcggt

SEQ ID NO: 283776 - DNA, 588 bp, Zea mays
tttattcgtgggcggacgcgtgggcttgcaaatgaccttgtcaaagttgggataccaacctttggcccttcatcagaggctgcagctttagaaggatcaaaggacttcatgaagaagctgcgtgataagtataatatccctacagctaagttttatggctgaactatattaaagaactatctgtaaaagagggcaaacccagtgccaaagactcccatattagtggagtctggggaaaggataaaccgaggcgagtcttccttccgcagatgcagagaggctacctcgaaaccgtgacctggtgactgtgagacatctctaattactacacaagtttcacacaattacggatgctgtggaagctaaaaaatatgttaaaaatgaaggagcccctatcgttgttaaagctgatggactggctgctggaaagggtgtggttgtcgcaatgactttggatgaggcgttcgaagccatagattctatgttggttgaaggctcattcggttctgctggttcactggttatcatctaagattttctagagggtgaagaagcctctttctttgcattggtagatggcacaaatgc

SEQ ID NO: 283777 - DNA, 686 bp, Zea mays
gccccgcccgctccccgccctcgtcacctacaggcccaagtgggaaggaggcgaatacgaaggcgatgacgaatcacggtttgaggctctgctattggcaatggagctgggagctgaatatgtggatgtcgagcttaaggtggctgacaaatttatgaaacttatttctgggaggaaacctgataactgtaaacttatagtttcatcccacaactatgagaccactccatcgtccgaggaacttgcaaatttggtggctcagattcaagcaacgggggctgatatcgtgaaaatagctacaaccgctactgaaattgttgatgtggcaaaaatgtttcaaatacttgttcactgccaggaaaagcaggtgccaatcattgggctgctgatgaacgacagaggttttatttctcgggttctttgcccaaaatatggtggattccttacttttgggtcactcaagaaaggaaaagagtctgcacctgcacagccaactgctgcagacttgataaatctgtacaatattaggcagatagggccagacactaaggtctttggtataattggtaaaccagttggccatagcaaaagcccaattttgcataatgaagctttcagatcagtgggtttcaacgctgtgtatgttccatttttggtggatgacttggctaaatttcttgatacat

SEQ ID NO: 283778 - DNA, 627 bp, Zea mays
cccactcgttcgcggacgcgtgggcattactccaattcacatttcacgtatatgcgtatatgttaagaaaagaatattctctgcaatgatctttgtgaagaatcattagaggaatcttacagatgatagtttattgaatgattgtttggttacttttattgagcatgctattttctccaatgtaagtgaagatgacataattcacctcttcatggccataaagaagcgtaaatcaaaaagccttagagtgttaggctagtatttttctagtatttatataagatcttatctactttgaatgtttatgttgtaagctatgtaatataatttgacgaattgaatgtaatatgagacattttgattattttccgtccatatatcgaattgatgaaaattatatatgtgcgctattgaattatacatggtattgcatgtcatttttttaatcctcgactaccctagattcaagtcctgggtccgccactgatagtggccctaggcccctagcctctagcgtcaaaactgaccggcgacaccactggttgtaggcatttgccgtgggaacaaaggactgtgtatcgagcaggcataccctgttaaaaatcctggttccactactagtcaggc

SEQ ID NO: 283779 - DNA, 756 bp, Zea mays
cccacgcggccccgtgagttgctgctcccgcccgtcgatgcttggttagcagaagagacggcggcggtaccatgttgcagtgcctggatggagtgaagcagctccttgccgtgctcctcaggtgctgccacatcgacctcaagcagcccaacggcctagaggatccggaggtgctcgctagggagaccgtgtttagcgtgagcgaggtcgaggcattgtatgagctgttcaagaagatcagcagtgctgtgattgatgatgggctgatcaacaaggaggagtttcagttggcgctgttcaagactaataagaaggaaagtttgtttgctgatcgggtatttgacttatttgatacaaaacacaatgggattcttggatttgaagaatttgctcgggcgctctcagtatttcatcccaatgctcccttggatgagaagattgagttttcattccaactttatgacctcaagcaacaaggcttcattgaaagacaggaggtaaagcaaatggttgttgctacacttgcggagtcaggaatgaatcttttagatgaggtcatagagagcatcattgataagacttttgaggaggcagacacaaagcatgatgggaaaattgacaaagaagaatggcgcaatttagtagtgaggcatccctctttattgaagaagatgacactacaatatctcaaggacatcagcactagatttccgagctttgtcttgcattctcaggtcgatgatacctgaatttctg

SEQ ID NO: 283780 - DNA, 321 bp, Zea mays
acccacgcgtccgcggacgcgtgggcctgagagcaatgggtacttgcgtgtctggtgcaacggcggcttgacccaacaacgcagtgcaatatgtaatgctgttgtcgtagcacgaatcatgaatgctacactagtgctgccagagttagacacaaattcattttggcacgatgagagtggttttgtagatatatatgatgttccccacttcatcaacacattgaaatatgatgttcgaattgtcatgagcattccaaaaatcactgcacaaggaaagaccaagaagctcaaagcatataagattttacctcctagagatgc

SEQ ID NO: 283781 - DNA, 920 bp, Zea mays
ggctggggtccccgcggctgctggtggcgccgatggtggacaactccgagctccccttccgcatgctgtgccgccgctacggcgccgacgcggcgtacacgcccatgctccactctcgcatcttctccgagaacgagaagtacaggtccatggagttcaccacgtgcaaggaggatcgaccactttttgttcagttttgtgccaatgatcctgacattttgttgcaagctgcgaagaaggtcgaaccatattgcgattatgttgatatcaattttggttgcccgcagcgtattgcaagacggggtaactatggagcatttctcatggacaaccttcccctcgtaaaatcccttgtgcagaatctagcagctaatcttcatgttccagtttcagttaagatccgtgtatttccacgactggaagacacattagcatatgcgaagatgcttgaggaagctggcgcttctcttgtggctggccacggccggacatgagacgaaatggatgggaagaaatctcgagctgactgggatgccatcaaggccgtgaaggatgcacttagagttccctgttttgcaaatggaaacattcgccatatggaggatgtgaagatctgccttgaacatactggtgctgatggtgtgctttcagctgaaactcttttagaaaacccatcattttttgctggtttcaggacaaaggaatggaaagaagatggcgacgagaatggagacggtggcttggaccaggctgatcttgtgattgaatatctgaagctgtgtgagcagtaccctgtgccgtggagaatggttagatcccatgtccactagatgttgggcgactggtttagggtgcatccagaggtgagggaggaacttattatcaaaacaagcttaccttcgagtggttgcatgacatgt

SEQ ID NO: 283782 - DNA, 609 bp, Zea mays
gactgaggctgaagtccgaaaagaaaagaagaaaaagagtaaggcaattacagaggatgagactgaggcacaaatccgaaaagaaaagaagaaaaagaagagtagaacaattgaagaggaagaacaagctggattgttcgaccatagcgatattaatgatgaagtatatgccagaaaagaaaagaagaaaaagaagagtagaggtattgaagggggcaaggagcgagacagcgacggggaaatttgcagtcccaagagaagaaaatctggagaaagaagcaaatgcctgaagaagaggagcaagaaacagctggttgcctagtacaagtatcatttctcattacccgccttcttgattttgcagaattacacaattttgtgtggtagtttgttcggaattgtatcccttttgaaaccctgcaagggaagtgcatcattttcgtgtgcgcatttttctactctggtgtagctaaattttgagacatacacgctggagtagttacagccaaaacttgaaactaatttttgagatagacatgtgggactaaatttcgagatatacgcgtaggagtttctactataaaagtagaaagctttttttatgtcttt

SEQ ID NO: 283783 - DNA, 854 bp, Zea mays
gggggaggatgggcaggcgcagaggttgaggaggaggaagaagaagaagggggctcggggtggtgctcttcaacttcggcgactccaacagcgacacgggcggcgtggcggcggtcatggggatccgcatcgcgccgccggagggcagggcctacttccaccaccccacggggcggctctccgacggacgcgtcatcctcgacttcatctgtgagagcctgggcatgccgcacctgagtccgttcatgaagccgctgggctccaacttctccaacggcgtcaacttcgccattgcagggtccacggccatgccgggagtaaccaccttctcgctggacgtgcaggtggatcagttcgtcttcttcaaggagagatgcctcgactccatcgagagaggtgagagtgccccgattgttgagaaggcgttcccagatgctatatacaccatggacatcgggcacaacgatataaacggtgttctccacttgccctatcatacaatgctcgaaaatctccccccagtaattgctgaaatcaagaaagccatcgcgaggttgcacgagaatggagccaggaagttctggatacatggaacgggagcattagggtgcatgcctcagaagctttctatgccgagggatgacgacagcggcctcgatgagcatggatgcatcgcaagcattaataatgtctgcaagaagttcaattccttgctgagtgaagccttggacgagctgcgtttgcccctgaaaagttcgtctatcgcctttggtggatatgcgcgctatcaagtatgatcttgttgccaaccacacgatatatgggattgagaagccattgatgacatgttgtgg

SEQ ID NO: 283784 - DNA, 619 bp, Zea mays
gggaaatccggttgctggcaaagactgggaagcaaaaccgggcgttcattgccgagttgggtgcgataccgttgctatgcaggttgctgctgtcgtcggattggatggcgcaggagaacgcagtgacggcgctgctcaatctatcgatctttgagccgaacaaggcccggatcatggaacaagcggactgcctgcatcttatcgtcagtgtgttgaagaacggtcggacaacagaggccaaggagaatgctgcagctacgctcttcagtttatctgtgggccatgactacaagaaaaagataatgaatgagccaggggctgtggaggagcttgcgtctatgctgaccaaggggacagcaaggggaaagaaagacgcagtgatggcattgttcaacctctcaacacacccagaaagctcaggacggatgcttgagtcatctgcagttgtatctttaattgagtcactgaggaatgataccgtttcggaggaagctgctggtgctctggctctgctgatgaagcagcctaccatcgtgcatctcgttgggagctctgaaacagtgatcactagcctcgtcgggctaatgaggcggggaactccaaagtgcaaggagaacgc

SEQ ID NO: 283785 - DNA, 494 bp, Zea mays
ggcggttgttaggaggaagaagatcgggaggttcctgtccaggctcgtcggggcggagaagcggcggcacaccggggacggcggcggcgagctcgtccactccaaaaccatgaaggagaagacggcgttcaagtgggtgttcttctgaattccaccatctcagaccagatgccaccaccatgcacacacgctcgaggcccagtttcctcgatcggtcggtatataggtgcacgctcacgtacttttgtgcttaaatgaatctgcagttatagcacggcttgttttgtattgtgtacacgagaactctaagccaaaaccattgaccattctgcactatttgggatatttttgggggaaaaaggttatatgagaaatcgtgtgtgtctgcttattttgtaaaagtagaacgcatgtacaacagctacgaagtgttaagtatattacgtggatattaaatgtatgttccagtatccgatagtggtttagtttaaaaa

SEQ ID NO: 283786 - DNA, 579 bp, Zea mays
  unsure (1)..(579): unsure at all n locations
aggacccattctcttccagtaacacctgtaggaactactgacaaggctgcatctcctccaaatcagatgagataccctgccaactacaactaatgaaggagttgaagcaaaaattaggcgctcactttcagtacctggaaatcgcaaaaacagaagtttgaggagggcagattcattaggtgtcatccgtgtgattccaacaaccccaagacctgtcccagtcgaagcaaccacatcaagcgatgtaattgaagaaacaatcgatgtccctgaagatggaggcgaagatattcctgaagaagaggcagtctgcagaatttgttttggtgaactcaacgaaggaggtgaaacacttaaaatggagtgcagctgcaaaggagaacttgcacttgcacaccaagactgtgctggcaaatggtttagcatcaagggaaacaagatatgtgatgtctgtaaacaagaagttcagaatctgccagtgatgttactgagaataccaactcaaactgcanacaagcgggtagcaaatgctgctcagcagagagcagctcaacaatacaggtaagattttggcaggac

SEQ ID NO: 283787 - DNA, 563 bp, Zea mays
gaaaagagcatgtaattaatttggagcgaacagaatcagagatctttgctgtagcgcctcctccacctccacctccgccctcaacaccgccacctccatctccacctccacgattgccatcaccacctcctgctgaaaaagtggcgtgtaaatcccattgtacgtccagtaaaaagagttagcaccccgccaaggactggtccctcgacatctgcaacatccttttccgtggcatcacttcagcaatatacaaatagttttcaagagcaaaatttgataagggagagtagattggggaaagtgtatctggcagaacttcctgaaggcaaattactggaagttatgaagattgataatgctaatgggagaataccagtagatgactttctagagttggttgctcgtatatcagatattagacaccctaacattcttgaattagttggatactgtgctgagtatgaacagcggttactcgtgtataaccacttcagtaggaaaacattacttgatgtactacatgaaggggaggatattgataatccattatcctggaatgctcg

SEQ ID NO: 283788 - DNA, 757 bp, Zea mays
tcgtttcaggaagtgcattgacattgtggaggactgcctcagcgatgctaaaatggacgtgggctcggttcatgatgttgtccttgttggtggctcctctagaattccaaaggtccagcagtttctccaagagctcttcaacgggaagaagcttttcaagagcatcaaccctgacgaggctgttgcttacggagctactatccaggctgcaatcatgagtggagaggatgagatacaggactacctcatgaacgatgctacgcctctttctcttgggttggccacggatgggggtgtgatgaccgtgctgattccgaagaacaaaaccatccccacaaggaagaaggtggtcttgtcaactgactccgacaaccagccttgtatccgtatccaggtgtacgaaggtgagggggccatggctcgcgacaacaacctgttgggtgagtttgagttctccattcctccagcccccaagggtgttccacagatcactattacatttgatatcgatgccgactgcatcctcgatgtcgcagctgaggacaaaaccaccggcgagaagatgaggaaaaccatcaccaagaggttccgtttaaagcattaaattatttattatttatcaccatatgtaattaaaaagagatgaactctagaaattctgacagaaattagaaacatagcaattttctaattttagtttcatagacattaatgatcaacgccaataatatccaatgggtggagtcttttgggtgct

SEQ ID NO: 283789 - DNA, 514 bp, Zea mays
ggctgttgttatacgagttgttgatgatgtagctaatggtattccatctacatacacaaatggtgtatcatcaccaccctccactccatcttgttctcaaaatgaatctttggatccagctgctcacttgataacagggaatgagatcaataatgaagctctgacttctccatcttcggtgcaagatagtcctgaagataaaataacgcaagttgcaaaggctgtgtcttgtggcagtgaagtagttaaggcagatacattgccatatgccatgctgcggccgatagttgttcctagtatatcacgaaggtcatcacgatctgagattaagggtgctcatgatcacaggaggagcccatgtgtaccatcaacaaggagggacatacctattctaagaagacctccatcaccagtagtacttagtgttcctcgcgtacctaggccaccacctccttcacctgctggagagtcaagaaaacgagggttccctatcgttagatcccgcagctcaagt

SEQ ID NO: 283790 - DNA, 737 bp, Zea mays
tcaccagcgcccagcggtttctcgaggtgcgtgcgtgggtgagagagaggcgacttcccggaggtttagcatcttcttctctctctctcagtctcaccctgtccctcgcgaaagcatctccattcttcgctcctctcttcccgcactgtttctcggaatcgctcttctcctccgcgctgttcttggaatcgaaaggtgggaagcgcaatgagcaacgagttcgattacctgttcaagcttctcctgatcggcgactcctcggtgggcaagtcctgcttcctcctccgcttcgctgacgactcctacgtggacagctacatcagcacgatcggcgtcgactttaaaatccgcacggtcgaggtggagggcaagaccgtaaagctgcagatttgggacacagcagggcaggagcgtttcaggaccatcacgagcagctactaccgaggagctcacgggataattattgtttatgacatcacggacatggagagcttcaacaacgtgaagcagtggcttgacgagatcgaccgatacgccaacgacagcgtatgcaagcttcttgttggtaacaaatgtgatctggccgagaacagggctgtcgacacttcagtagcacaggcttacgctgaagaggtaggcatcccgttcctcgaaacgagcgctaaggagtcgatcaacgtcgagggaggcgtcttggcaatgtctgctgccattaagaaaagtaaagcagggagtca

SEQ ID NO: 283791 - DNA, 874 bp, Zea mays
ctagataaccaccaacttcggcgttcgatctgaggtttgattcggaagccccgaaggtggcactacctcagggcatgatggcaccagtgaactcgttcaatacattgttccagtcacctgctttctgggggctcatgatgccagtgtctgtgagctcaatggcagcagatgtgatccgtgggtactgggcgcaacggatcttgtgggagattggtggatatgtggctttctatccacctactatttacaggaaggactatattcaggcatacccatttgcagaagagaaggatcttcatgtgaatgttggtcggttgatcaagttcctgaatgagtggaggtcaaacaagaggacactctttgagaagattcttgatttgagttatgccatggctgaggaagggttctggacagagcaggatgtgagattaacagctgcttggctgcaggacctgctcgctgtgggctatcggcagcctcggctcatgtcattggagattgataggcagcgtgcaaccatcggagaaggtgacatgaaggagtttgtgcccaagaagctgccatctgtgcatcttggggttgatgagattggcacagttaactatgagattggaaatcttattaagtggagaaagaactttggaaatgttgtgatgatcatgcacgttagtgggcctgtggatcgcacagcacttgagtggaggctgctttatggaaggattttcaagacggttatcattcttgctgagcagagcaatgcagagcttgctgttgaacgctgcatgctgtcacacgcttataagtatttgcccaaggtttttgaaagatacagtggtgctgatggatttgtgttcctccaagaccacatggttct

SEQ ID NO: 283792 - DNA, 603 bp, Zea mays
gctagtgcgtctcctcgacttcggcatcgtcggggccggcgcctccgcggacatggcgtggtggctggtcgtgctgggccagtacgtctacgtcgtcggcggctggtgcccgctgtcgtggaaggggttcaccatggaggcgttcgccgacttctgggagttcatcaagctctcctcggcctccggagtgatgctctgcttggagaactggtactaccgagtgttggtgttgctgacagggtacctggacaacgctgaaatcgctgtggatgcactctccataagtcagacgatcaacggatgggagatgatgatcccgttcggcttcttagcagcaaccggggtgcgagtcgcaaatgagctcggcgcagggagcggcaaaggtgcgcgcttcgccatcgtggtgtccatcacgacgtccgtggtgatcggcctcgtcttctggtgcctcatcctctacttcgacgacaagatcgcgcttctcttcacgtccagcgcggtcgtgctcgacgccgtgcaccacctgtccgtgctgctcgcattcaccatcctgctcaacagtgtgcagcccgtcctctcaggcaagccgctgaacgacccgtc

SEQ ID NO: 283793 - DNA, 665 bp, Zea mays
ttagctttctcatcgccgcggccaccaggcactacctcctccgcgagatcgtcaaggagcaccccaccctggagcgggtggcgctgacggacgccggcgggcagggcacgctcagcatggggcgcgaccagctcagggagttcagggacaggccgctcgccgccgcgcccgccgccgccgccaaccgcacgcaggtgcccgcctgcaacatgaagctgcgctacgcgccgctgctggagctctcggacggcaccaggatccacggcgccacgctcgtggtcatcaagcccgtcggcgacgccggcgggaaggacctcgacgagctcggcgccggcgccttcgacgggcccctgagggaggccgtggccgcgctcggcaagcgccgcgcctacctgctcgagatgaacggcttctagtctgtgcgcctctctggctggtccatggcaatgggcatctgttaattggccaatgggcaacggcaactagctagattgctcctccgttcgcttacctcagctgtcagtcagctcctgtcctgacgatatccttgtgaaaagaaaaacagtagtatagaatgggccggtgtgggcagcgccagccagccggccagcgtcacagggcattctgatgctatcatgaacggaaatgaagcagtcagtcacatt

SEQ ID NO: 283794 - DNA, 563 bp, Zea mays
cggactccatcgaggaaccctaaccagagcacagcacacggagcgacggcggcgcgccaccggcgactggcggctggtgccccctctcggtccccactccccagcacggcgacggcctgctgcatcagatggtaaattatttttcagactcagagtgcaaaaaagttggttcgtccagggaagaggaatagaggttatgcttttgtgtgagcggcggcggtgctggcattcttgctacctcagctctgccaggaaataaattgcagcagcgcggaatttgtgtggagattcatgtttacgaatgcgcagcgccaggtcgagcgcaccggccgttctggcactccgcgagaccagtaccttcaggatctcgtgacccagttccagaacgccacggatgaagaatctaaggagaagatagttgctaacctggcaaattttgcttatgacccttttaattatgccttcatgcgccagctgaatgttctggagttattcttggactgcattacagagcctaatgaaaggcttatcgagttcggcattggtggaatatgtaactcctg

SEQ ID NO: 283795 - DNA, 264 bp, Zea mays
cagggaaggacttggctagcaaattcaagattgcgaagaaggcgctcgacaatactgccggagttctgatgtaactctgcccttgtcgaacattctgggcatctccaagtaaaacaaagttattagaacattctgctggagtcctctgttctcgttttgccttgttattagaatgcttctccaagagacctttcatgggttttgaatgcttacccaaaaaaaaggctttgatggtcatacattgtaccatttcttagaagtact

SEQ ID NO: 283796 - DNA, 456 bp, Zea mays
tgaagacgaggtgaccatactgagtgctctcattgagttccgtgccaaaaaaggtcggcttcctgcgtccattcaggacacgagcaaggtacacagccagattattcatcaactcactgctaatgcttctacggctcagcttagtgataaggtcaggcgcctcaagcacaagtacaagttgctgctcactcgttcaaagaatggacgggatcctgatttgccaaccaaacatgatcgcgatgtctatcaacttagcaagaaagtttggggattgaaaagtctactactagtacgaggatctcgtgtgtcacacgaggacactgaagatgcagaagagagcaatgaagagcaggagatagaggagagtgatgaggatatagaaaatgaatggggactccgtgatcgcacaggcaaggaaccaagggcattgacatttgaaaatggcaatggtaatgc

SEQ ID NO: 283797 - DNA, 1030 bp, Zea mays
cggctcgaggatgttgccccacttgtcaaaaagattgatgatccagacatggcaaatgataaggatttgctacgagttgttctaacgttggactatgcttgcaaggacgttggattcttttatgtgaaaggccacggcatttgtgagatgctaatgagggaagtgagggatgtgtcacacaaattctttcagcttccttacgaggaaaagatgaagattaagatgacacgtcaaagtgggtatagagggtatcaaaagctaggagagaatgttaccaaggaaaaacgtgatatgcacgaagcagtcaattgcttgactcctattgcacctggcaaatacggagaccttggtaaaacacttgaaggagacaatctgtggcctgaatacccatcaaatttgaaggtagtactggaaaactatatcagccttgtcaaagatctttcaaggaagatcatgcgaggtatagctttggcattgggtgggcctgctgatgcctttgaaaggggaatagcgggagatccttactgggctctcaggctggttagctaccctgtttcaagcagtgatgagaaacgcactgatgatactgggatgatgggatcgcacacagactacggacttgttacactggttaaccaggatgaagacatttgtgcccttgaggtccaaaatcgttccggtgtgtggatacgtgccaacccgattcctggaacctttctttgcaacatcggtgacatgctccaggtctggtcaaatggaatttaccaacccacagttcatagagtcatcaacagctcccatcaacgccgcgtttctgctgtgtttttctatgagaccgattttgatgctgccgtagagcccgttgagttgtgcgtggagaaaacaggcggcgtcgccaagtatgacaaggtcgtgtatggcgagcgtctggttcggaaggccttctgctgctttggccatctatagggctggagaataagttatattgctactgtgaaaacaaagggcttactatatgcattgcacacac

SEQ ID NO: 283798 - DNA, 659 bp, Zea mays
gccgccgcccgtcctccgatccatcctcctgcacggcaggggcagccacacttgttggttcctctccctcttccctctcccgtgtggcggcgggggatatcatctatgatggggtggctgcggctccactccctcttctcccctctccggaggatgtgggtgagggcgcattccgagcgccggaaccggagggggatgcgcatcctgtacaaggacgtgcagtcctgccaggacgaggacgtgcgcgtgctctggtccatcctcatcgactcccaccgccgccaccaccaccacccgggcgtcctcgacctcgagctctgaagaagaatctcatctgcgcgatggcgtgccgcgtgcacgtacgtatttatgcacgtgggttcgatatgtgatcaagagagcacagcactgcccttccattatattccttcagaaaaaagaaaaaaggaggactcagaggttgaagaagaagaagagagtctgagagaggggcttaattctatgcttttgtgtgctgctgctttcctttttcttttctttttttgcacctttgttctgtgctagaaaaaacgagcgtgaggttgagctctctgtacatagacacacacgcacacttgctcaagtgccttacctttaattttaccgtacgtactgtacac

SEQ ID NO: 283799 - DNA, 504 bp, Zea mays
aggattctataggggactctccatctagctcttactatcagagcgaggaccaggaagattcttccaagagggtgccgatccataatgatgaaccacaaggaaatctgctaggcgagcaatgcactgacaagcgaactagaaagccaacaaaaagatacatagaggagctatcagacattgagactcatgactcaactgtaaaaaattcttcaccagcaaaaaaggcctgcacatgatgaactgttaatgaacccgcgagtagcacctttcaatgagactggttctctgggcacaatctatcctactagaaaggatacctttggaggatttagtgtacacgttccttacgtttcaaggatgagaagggggcgccctaggaaggacttcatttcatttgcggataagggaccctcggttgaacctaaagggattcagccatcagttgagatgatattagtgaaggatggtgacaagggaaaccacctgaggaaagtacctgaggtt

SEQ ID NO: 283800 - DNA, 429 bp, Zea mays
cacaaggaaatctgctaggcgagcaatgcactgacaagcggtcctgacacccagcataaagctttagaggaacaatttggccatgcaaatcagaattatcaaaatcttcatattttgggtctccatctgagaaggatctttatgttgatggaaagaaagctgtgcaggtgcatgtcaaaagaatgtatgatttctttacgagggaaaaggggtatggtaccccacatgtaactcggatactgctgttttttgacgatacatttctcgtcttttggagtaggaatttttgtgtagttaagaaactgataatagaacattatagaggtaggactaaacaagttagggtgtgtttggcgtttggctttaacttttgcccactaaaagccaaaagaaaaaacaaaggtatgaatttagaaagtagctttttct

SEQ ID NO: 283801 - DNA, 559 bp, Zea mays
catgatccaggacaaggagggcatccctccggaccagcagcggctcatttttgccggcaagcagctcgaggacgggcgcacgctggccgactacaacatccagaaggagagcaccctccacttggtgctgcgtctcaggggcggcatgcagatcttcgtgaagactctgactggcaagactatcacccttgaggtcgagtcttctgataccattgacaatgtcaaggccaagatccaggacagggagggcatccctccggaccagcagcggctcatttttgccggcaagcagctcgaggacgggcgcacgcttggccgactacaacattcagaaggaaagcaccctccacttggtgctgcgtctcaggggtggcatgcagatcttcgtgaagacacttactggcaagacgattacccttgaggtggtgtcctcagacaccattgacaacgtcaaggccaagatccaggacaaggagggcattccaccggaccagcagcggctgatcttcgccggcaagcagctggaggatggtcgcaccttggctgactacaacattca

SEQ ID NO: 283802 - DNA, 385 bp, Zea mays
gacaggacatcctattcagtaccacctcgtgattgtggtgttggggaaggcagttgggctggggtatgctttagcccaatgcagcaatccatggtagctgttgctcgtcagttgtgcaagaccattgatatctatgatcaagatagtcacgttcgcagtttacgcacatagagcctatattacaagctactgcatacccaaaatgactctagcttcctcatcgactcttaatgatctttgtatgcacattctgtttattcgaaggaggctgctgtggattcaacacataaacccatgagttcttttagcagcatccattatctcacaattgtagactgtagattgcacgatttagggggtagaacttaacttgcaggctatggta

SEQ ID NO: 283803 - DNA, 563 bp, Zea mays
cgtgtttttttgtacaggtggtcagagtttttggtctccttaggctccaaagtgtccagggccagaaatgtttgggtaaggcaggtcacaatttcagtagtatgtgtagttagttgaaattttttcatggtggctagttcttgttgcatgtggaattaggttggggttatagtttgccgatgcccgatggttttgtttgtcagcagttgacaattgtttgactgtatctaacaagtatcgagccttgtatctggttgtctgtgaaccatatatacatgttttggttggaaaaaaagaagaattatgttcttttgtttgcggagtgtagacttcttagcttatgctgattacttaaggtggataaaacaaaaaccttcattctttcagtttggctatcaggattcaggagtcagacctctggttctgcactgagagccatgttttttcttattctagaatctgattggttgacatttcgcttttcttgctctgctgttgtcattgtctggtacgtgttagtttaaatagttagtgttgttcaaagggaaaattctgcgtccagt

SEQ ID NO: 283804 - DNA, 566 bp, Zea mays
gagtgattatcatgcaacaaggatctcaatgtactggatctcatggactgccgcagtttgggtgatgaagctgttagggctctgagctgccttcccaagctgcagactttgacgttggatgccactgatattagcgaccaatcattgaaatatctaggacttggaacatgccctctaacttccttgtctctgaggggttgtcggaagcttacaaacgattgtatcaccttgttatttgctggtcatgtgaaacagagcctacagatgctggatctctccagaattccaagtatcacggatgatggtatcatgttattagcaaggagcagaactcctcttattgagctcagaatgcgagaaaatccgaaaatcggggatgcctctgtgatggctcttgcttccatgcaaatagatggtggaacctacggtagtaccttgcagctgctggatctttttgactgtggtgggattacaccccttgcagcacgttggtttaagaaaccttactttcctagattgcggtggctgggaattacaggtagcttgaatagggctattgtggatgc

SEQ ID NO: 283805 - DNA, 679 bp, Zea mays
agtttttgaagcactggaggagcagaagacagtggtggactctcttgtcaggcaccatgcaaagtgtttgccagaccctacgtgtggtcacagaaagagagatggaagacgaagcggcgctggaaatgaacgagctgaactcttttactcctcctgggaaggacaaagatgagctgtcctttggaggcaattcagcagatcgtagagaggcctcttggacaagtctggcaggaacttcacagcaagaacccgacttagctgcattgcggatgcatggaacattctcacctggggggcagggtctatctctatctggtgttcaggcaactgctgaaggcagtaagacaaaaaggcgcacaaaggccgagaagaccgttagtttgcaggttcttcggcagtacttcgctggtagcctcaaagatgcagcgagaagccttggagtgtgtcccacgaccctcaaaagaatatgcaggcaacatggtataacccgctggccatcgcgaaagatcaagaaggtagaccactctctaagaaagctccaacagatcattgattcggttcatggtgcagagacagctttccagctaaacaccctgtaccaggatctcacggacacctcaatatcatctgacaacaatttgtcaggaagtgtcagggctcctactactcaggggatctc

SEQ ID NO: 283806 - DNA, 685 bp, Zea mays
agaccgggtcggcgtcttgcccaaaatcgtgaagctgccaggaaaagccgattacgaaaaaaggcatacatccaaaacctactgagtagcagactgaaacttactcagttagagcaagagcttcagcgggctcgtcaacagggtatttttatttcgacatcaggagatcaacctcaatcaacaagtggaaatggagctttggcatttgacatggagtatgcacgctggttggaggagcacaacaaacatgtaaatgagttgaggcttgcagtcaatgcacatgccggtgataatgatctccgtggtattgttggtagtgttatggcacactacgatgaatttttcaggctcaagggtgtggcagctagatcagatgtttttcatgtgctgtctgggatgtggaagacccctgctgagagatgtttcatgtggttaggtggcttccgatcatctgagcttcttaagttactggcaggtcacctagagcctcttactgatcagcagcttgttggtatatccaacctgcagcagtcctcccaacaagctgaagatgctctttctcaagggatggaagcattgcaacagtcgcttgcagaaactctagcatctggatccctgggccctgctggaccttctggcaatgttgcaaatacatgggacaaatggcgatggctatgggaaaact

SEQ ID NO: 283807 - DNA, 396 bp, Zea mays
gggttattgtaactgggtgtatttatagctgggtacatgtggtttagtacggtagagttcactgtttatgagaatagtggcgaaggaattgtctgactcagttcgaatagggaaattataagcaaaatataggacaagagtatttttggagttttctgaaatttgaactatgcttaagggttgacatggttggatagaggatattttgataagaattttgaaacaacaattgtcgaaatatgagtttggacggaggagttttggattttataatcataggaaatagaaaaagaaaaggaaaaaaagaatattccaaaatttgaatatttggagatatttgtaaaatcatgtatttttgagcggagtgtcaggaattatttctgggctattcatgag

SEQ ID NO: 283808 - DNA, 526 bp, Zea mays
ggctatcctgtaggttcctcacttggtttgtacagagacacagaagttggagttgccaaagaaaatgagacatgtagcaggagcattatatctgtggaggaagatgatgtgccaatagactataaactactggcgggtctactgatcaaacagaagtttcttcttctcatcctttcgagggcagcccgacagaagaattggtcactgaaccaggtaggcatgcggctccagatggtatctgtaggacttcacatgcagctgaggatagcattcaacatctagaagcggtcaaacagggtggtgtcctacaagacaagtcaagccagtcgttggagatgcctctggaagatattgatccactgaatcaggctcagatgcatggtggaagcactaagaaatcggcacctgatctatccccgaccaaacagaagaagcaacaagcagttcaagaaaggaaaaggatgccacagtcaaagagggggaacaagtggctggtgaatccttgatataccccaacaaattttga

SEQ ID NO: 283809 - DNA, 541 bp, Zea mays
caatagaccctcctactgcatcggatctggatgatgctatatcaggggaaatactttcaggaggaactgtccgtattggggttcacattgctgatgtttcttactttttacatccagagactgctttagatgctgaagctcaaagtcgatctacaagtgtttacaccctgaaacataaaatctcaatgttgccttcaggattttcggaagtggtttcacttaatccaggtgtagataggcttgccttttcagttatttgggatattgatcctcatggtaacctaattagtcgttggattggtcgaagcatcatctttttctgctgcaagctgtcatatgagcttgtgcaggatctgatttgaatgaaaccagtcagactaggcttgaaggttcttctcttgaagtacatggtatatttgggagagatgatgttatcaagtcacttagaggcctctatgaagtctcacaaaacttaaggaaattaagttcaagggtggagctctttctcttgatactgcaaagattatgatcatggttgatg

SEQ ID NO: 283810 - DNA, 720 bp, Zea mays
gatggtgagtggcgatggcgggagcgggaggccgccggccgagaggaaggcggcgtggagggacggcgccgtcacctacttccacctcctcttctacatcgccatctccggcggccagatcttcttcaacaagtgggtcttatcctccaaagagatcaactttccctatcccgtggcactgactctgctgcacatggtcttctcctctgtagtgtgctttgcaatcacaaaagttttcaagatcataaagattgaggagggaatgactacagatatatatattacttcagtcattccaattggaggaatgtttgcaatgacactttggctagggaacagtgcgtacctctacatatctgtcgcatttgcacagatgttgaaggcaataatgcctgtagccgtgtttcttctgggagcagcatttggcctggaagaaatgagctataaaatgctttctatcatgtctgttatcagtgttggagttattgtggcttctgttggtgaaattacaatcagttgggttggagtggtttaccagatgggtggagttgttgcggaagccctaagacttatcttcattgagatatttctgaagaaaagggtgtcaagctcaacttgatatccatgatgtactatgttagcccttgcagtgctgtatgcctctttattcccttgctgttcttagagaagccaaagatggatgatagtatttcatggaac

SEQ ID NO: 283811 - DNA, 663 bp, Zea mays
cggatcagccgcagttgatctggaggcgcgggccggccatggaggagggtggcgagcacacgagtcttctggtcaaggatgatgcatcatgtcatggcgaggaaacacagagtctattggaagcaaatctagggccacagctgaaaagtaaatgctctgattggagagcaccggcactcatcctgggattggaatgcttggagagcatggctttcaatggcattgccacaaacctagttgtgtatctccgttcagttctccatgggggtattgcttccagtgcagcaactgtatctctttggtacgggacaagcttctttgtgccaattcttggagccgccatagcagatacttgcttgggaaattataagaccatcttgatcctccttattatgtacctatttaaatgcaaatggtcattgtgcgggataattcttatttccggtggaaacattaatgcttttacttaaagttttgccaacgcaagtttatgcttgtcatcaaatggacctcaaaccatgattttcttggctggtttgtatctcactgctgttggatgtggaggagtaagatctgcattgcttccgtttggtgctaaccagttcaacaacgagaacagtctaaacgtaaaaagagaagaaattcttcagcttgttctaatat

SEQ ID NO: 283812 - DNA, 771 bp, Zea mays
gatttcggcctggcgcgatggcaacctgatggagacatgggcgttgaaacaagagttatcggcacattcggctatctggctcctgaatatgcacagagtgggcaaataacagagaaggctgatgtatactctttcggggttgtgttagtggaacttgtcactgggcggaaggctgttgacattaaccgaccaaagggtcagcagttactaactgaatgggcacgcccattcttggaggagtatgcaattgacgagctcatagacccacgactcggagagcgctactctgaaaatgaggtgtactgcatgctgcacgcggcaaacttgtgcataagacgcgacccacattcaaggcctcgcatgtcccatgttcttcgcattcttgagggcgacatggtcgtggagtctggttctgttaacggcagtagtgattctgggagcagaagctggaggttgctgagcgagcaacagcattattgccaggagtacagagtagcccggctcaccacgaatcgcgaagggcaggcgaggggaaacgctcctacagcggtccgggacacgcagagtatctccaacagatattagtgctgtcgcataatgcaagagatcgctcaaatcctgtattattccctcgcccctacctccctctcgcatttctttctttttgggatcattttatgctcacttcctagccctagcaatttgtaggctggaaaagcttttgctgatacatggttgtcctggtgtatatagaaatggtaataggattac

SEQ ID NO: 283813 - DNA, 411 bp, Zea mays
gaatctggtggttctgttactggcagtagtgattctgggagcagaagctggaggatgctgaacgaacagcaacattgccaggagtacagtagcccggctcaacaagagtcgcaaagggcaggcgaggggaaacgctcctacagtgccttgagggcctcttgggaccgagacaagcagagtatctccaacagatattagtgccgtctcataatgcagtgcagctgagattgtttagtcctgtattattccttcgccctacctcccggtctcaattttttttggcttgctcttttgtcttcacttcgtagcaatttgtaggccgaaagcttttgctgatacattgccctggtgtatagtagaaatgggtaataggtttacaagtatattgagctgcaagttagaccctctcct

SEQ ID NO: 283814 - DNA, 446 bp, Zea mays
gtcaaggtgcttcctttcttgaaacctataatcgaaagaaattctcttaagtcagttatccaaggcttcttgccaggaatcatattgaaaatctttcttatacttctcccaacaattctaatggccatgagcaagattgaaggacacacatcgctctctggattggacaggaaaacagcaacgaagtactacattttccttttcgtaaatgtgttcttggggagtgtaataactggaacagcattccaacaactagacaacttcatacatcagtccgcaaataaaattccagaggttgttggagagtccattcctatgaaggcagcatttttcatgacatacataatggttgatggctggtctggtatagctgctgaagttcttcggttgaaggcattagtcatattccatataaagaatgcgttcttggtcagaacggagcacga

SEQ ID NO: 283815 - DNA, 470 bp, Zea mays
cttgaaagggatataaaccatggggagactatttggaatactgctgttgtttggaaacaacggcaacataattggcattcatcgaaagaatcacattccaagagttggtgatttcaatgagagcacatactacatggagggtaacactgggcatccagtgtttgaaacagcttatggcaaaataggagtgaacatttgttatggaagacatcatccccttaattggcttgcgtttggtctcaatggagctgaaatagtgttcaacccatctgcgactgttggtgaactgagtgaaccaatgtggcccattgaggcaaggaacgccgcaattgcaaacagctacttcgttggatcaattaatcgggttggcacagaagtgttccctaatccattcacatccggtgatgggaaaccgcaacacgcagactttggccatttctatggatctagccatttctcagcacctgatg

SEQ ID NO: 283816 - DNA, 432 bp, Zea mays
gtagaatccttccgcagggcatacaacacctctgccagctcaaggttctcggctgcagaacgttcctgggactggagctcctctcgattctcagagacgagcggattggctcagcatgacgacgatgacagtgaccaggctaaggagaggcctctgggtctccgcaacaaggagccaaggtggcacgagcagctgcagtgttggtgcctcaacttccgtggtcgggtgaccgtggcttctgtgaagaacttccagttgatagctgcaccacaactagattctgaaccgtcacagcaagctcggcagcaaacccagccttcgaattcgtcttcagcatcggatcatgacaaagtgatcctgcagtttggtaaggtcgccaatgacatgttcactatggactaccgatacccactctcggcattccaggccttc

SEQ ID NO: 283817 - DNA, 833 bp, Zea mays
cggacgcgtggcgccgcgcgtgtcagccgatggaagagctgcgggccgccgtgacggcgcacttggaccaggtagcgggcctcgtgcaggcgctctcctccgagctccgccgcggcataggtcccgccgccgacaacctgcgcgccttcatccgcgccgttgactggacggagccatggctcatgtgcttgatggcattccatgtggttctgctgctcactgctgtagggttcaggaggaatgcccatttccagctattcttggtaattcttgcataatcaagagtgtatctagctgaaaagatgaacagatacccgggagagaactggaagagctctaccagtaggaattattttgaccgttctggagtttttatctctgtcgtctggtctgggccccttattgtcatatcgattgtcagtgtgattagcagcctcattgcattatgtcgattgatggtgaaatggaaaagagcagaacttaggcaccgggctcgacttgctcatgacaagaaggattgagagaagagaaaaaaatccttattatgggagaatcgaatgatttagtgattttgaacttttctaagtttgtatgccgcttgtcaacagggcactcaagaattaagtgttggaaatcctggataagcgaggagtgtctacagctattgttcctgctggtcactgtaggacagtagcagctagacatacttcataaaaaaatagatatggtacctgtctctatcttgttttagattgtagatgtaaacatggatgtaatcttgattgaaactgccaagatttgtagaacaaagcctcactgtttcgtttcccatc

SEQ ID NO: 283818 - DNA, 487 bp, Zea mays
cagacaggaagcccgccgaacatcacaaggctgcgaacctcctagaagctcgaggagatgctctccaagctgtcggcgtggttcgtgaacccgcggaggaatccgctcgcgcgcctccaccggaacgccgtcgcctcccgcctccgcaaatacgggctcaggtatgacgacctctacgacccgtaccacgacctagacatcaaggaggcgctggcgcggctgccgcgggaggtggtggacgcccgtaaccagcgcctcaagcgggccatggacctctccatgaagcaccagtacctacccgacgacgtccaggccatacagacgccattcaggagctacctttttgacatgcttgctcttgtgaaaaaggagagcgcatagcgtgaagcattgggagcgcttccactctaccagagaaccattccataaagtgccttttgcatgatccaatcaatagtgcacgcgatgatcagcagaggctgatact

SEQ ID NO: 283819 - DNA, 1195 bp, Zea mays
cggtctcgtggggcaaattccatgctgcctcttcttgacaaggccaagagcgccgtccctaaacagctgacgaaaaggaccccgcttagactcggagcgactgctgggttgagacttatcggagaggagcaatcagagcagattctcgaagcagtcaggaaccttatccacactaagagcaaatttcagtacaagcccgagtggatcaatgttattgagggatctcaagaaggatcatacctatgggttgctctgaattatctgttggataaattgggaggggactactcacagacagtagctgtgcttgacatgggcggtggatcagtgcaaatggcctatgccgtttctgcaaatgccgctgcaagtgctccggcgccgcctcatggggaagacccctatgttacaagagagtatcttaaaggaaaagattacaacatctatactcacagttacttgcactatggcgcttgtgcatcacgagcggagattttgaaggctaatggatggaccattcagcagctgcatgttacgtggattcattggtcaatacacctacaatgaggagcaatatgacgcgactgccgcgccggaaggagcagtctatggcaagtgcagggaagagatcggcagagcactgaacctgaacgcgccatgtgaaatgaagaactgcaccttcaatggcatatggaatggcggcggcggagcaggccaaggcagcatctatgttgcatccagcttctacttcgtggcctcagaggtcggcatcgtagatggcaacgcaccaagcgggaacactacccctggcgcattcggagcttccgcggagaaggcttgccagatgagtgttgaagaagccaagatcgaatacccaaacgtcaacgatgtcgatgtgccctacctgtgcatggaccttgcctaccagtatactttgctagtagatggctttggtgtggagaggaccaaggagatcacagtggtggacaaggtgaagcacggagagtactacgtcgaagctgcatggcctctaggctctgctattgaggctgtgtcgtcaaccaaagaatggcgtcaagataaatgatctgttggtccaatctcatatgctagtattgtatctgacatgtacagtactggcaccacttatgaaataaacgaaaacgtctgtggtctcacaaaaaaaggaaggaaccaa

SEQ ID NO: 283820 - DNA, 512 bp, Zea mays
gatctggcgagtcaaggactaaaaggttacatcaccgatgaaataagtcatcttaaagacttggtaagcttgaatttgagctataattcactgactggaagcttaccacctggtttaggtcaaccttcacttgtgtcactggatatttcatcaaatgagtttactggaagcattcctggaaccataggttcatccaagttacagactgcattactagacaacaatcaactcgatgggcaagttccagaaagactttactcaattggcgtgcatggtggcgtgatagacctctcaggtaataaagggttgtgtggcgtgcctaccttacctgcttgtgcattattctgggagaaagcagggttgaacaaaactgggaaaattgcacttggagcgtcgtttgggtttgttctgctcgtcatactatagtggtcacatactgtgcatcagagggggccatatgactatgattttgacttccctcaagatttgacctccatatcagcaatatcagc

SEQ ID NO: 283821 - DNA, 407 bp, Zea mays
cctctccccccgctgccgagctcaccccaccgcctgccgcctgaacttgtctcgcccgcggcagatctgctccttccgctcgctgcaccgcaacccggataggagaccgcgcgcggtcgagaactacctggggaccaacgtcctcgaccagctccggtgcggccggcacacagctccacagatttggacagcgcaattacttaagctatttgtattcggatctgatccaaccctggtggtcagctggactcatcgcccatggagcacactaagtcaggccccagcagttggccagaactggccgacgtggtgccggtgccgcaggacgatgggcctagccctgtggtgtccatcgcctatcgagatgactttcgtgaggtcatggattactttcgggccctttacct

SEQ ID NO: 283822 - DNA, 607 bp, Zea mays
cccacgcgtccggatgatttttctttggaattgtcaaagcttcatacctatgatgatgttgttgagagagttgctcgccaacttgaattggacgatccagcgaaaattcggcttacaccccacaattgctactctcagcaacctaaaccacagcccgtcaaatatcgaggagtggtgcatctgtcggacatgctcatccactacaatcagacgtctgacatcttgtattatgaagtgttggatataccactgccagaattgcagttcctaaaaaccctgaaagttgcatttcaccatcctacgaaggatgaggttgttattcatagcatcaggcttccaaaaaatagcaccattgctgatgtaataaatgacttgaaaactaaggttgaactgtccagtcctaatgctgaactacgtgtactagaagtcttctaccacaagatctataagatctttccactacatgagaagatagagaatataaacgaccaatattggacactacgtgctgaggagattccagcagaggaaaaaaatataggtccaaatgatcggcttattcatgtttatcactttaagaaagactttaatcagactcaactgattc

SEQ ID NO: 283823 - DNA, 571 bp, Zea mays
gtgttaagctcagcgtctggaccaacatgtgcaggttcatgagcaacgacgggctcggcccgccgctgggcaacgaggagggcgtgttctccgacaccggctggtatggcaccaaccagttctccgtggatgtcatcttcggcaacaggatgaagcagtacgagtgcctgaccaaggactcgtccgttgccgcggcggtgttcgtgccgttctacgctgggttcgatgtggcaaggtatctctggggctataatatcacgacgagggatgcggcgtcgcttgatttggtggagtggctgatgaacaagcccgagtggagcgtgatgggtgggcgggaccatttcctggttgccgggaggatcacctgggatttcaggaggttgacggaggaagaagcagattggggcagcaagctgcttttcttgccggctgcaaagaacatgtcgatgctcgtggtggagtcgagcccgtggaattcaaatgattttgggataccatatcctacgtacttccacccggccaaggacgccgaggttttcctttggcaggatagaatgaggagcctggaacg

SEQ ID NO: 283824 - DNA, 384 bp, Zea mays
gtctgtcgatgctataaatatgcctgacgaaatggacaatctcggccgtgctcctgatgtttctgcgtccaatgctctcatgtctggattagcaagaacaggcatgcttgatgaagctcttagtacgatgagaagaatgcttgagcatgggtgtctccctcatatcaattcatacaatattatacttaatgggctggcactaccgggaggacctcaccgtgcaacggaaacgctctgtcacatgaaacaatctacagttagacctgatgcatgcctcgcataatactgaccttggggccttgcgtcatgccggcatgtccgaggaggcattacaactgctgaaagatatgaatacactgccgattgagaacgaccttatcacat

SEQ ID NO: 283825 - DNA, 421 bp, Zea mays
ccccgccagtaactccctcgacccccccctcctaccataattggtacagatcctttctcacgccctgggcctgactatattacgatgggggacgccgaagccggacgagctgtctcatgagactctatctatgacatggactcacaggatgaacaatggctcattcagctgaatcatgctcattcagattcaaacagctctcaaaggaatcatctctcttacgaagactttgagaggataataagcatatttcaaaaggatgcctacaacaatgcccaaggaaaaaatgatcggcgtgaagtttgtttatagatatcctgctttaggaaaggatgatcacgcgcatgctgtgtatatatattggacaagtgagaggtccaagagagctgctccattgcttatggtattccacggcgcaccc

SEQ ID NO: 283826 - DNA, 873 bp, Zea mays
tcttacggggaacaaggaggccatcgagaaggataaggccagacttgcagtaccgatgaactgagtagaggctacttccaagactttgccgagatccgcgagaacgctggcaagattgcgacagcgagtaaggtcatcatcccagaggtagatgctgggaagtttcctgatcttgatgtggattcccctgatggaggggcactgcatctgcctcttggtgcaccaactctgcaagctgatgatggtgaggctggagaccataagattcctggggcttcattggtgtgcctttccttccgcgcaacgctcgctgaaaatggcagagtcatggagtttaccttacctggatgctttcggtgctgccaagaacatgcatgtttatgaggtctcatttatagattcttgggtattatcattgagtcctatgaggcgagcatttctgaaggcgatgaggaaatctaacaatccacggagacatgttgtgtatgctttcggggaccattatgacttccggaagaagcttcaaattataaaccttctcactggatacatatatctggttgatggcctgggaagaataagatggcaaggctctggatctgcaacacaagaagaactgtcgtcactaacagcgtgcacctccattttgttagatgaaaaatgagatggggtggctaatctttgctattttgtaacttctggtacaagatattttgcttttcactaagcaaatcgagtttttttcccgtgggtaataagtattggatggttagtttttttcactaaacaaccttgattctctgggtgaaaatgatctggcatggtattaatcgtgtatttaactgctatcctaactcgtgctttaataagact

SEQ ID NO: 283827 - DNA, 782 bp, Zea mays
tgattaagagaatgacaccacagcacgatgcaccacaggcaattcagtttaaagtcagcgacaaaggtagcggcaatgttggatctgagttaccaagtcatccaggtgtcgttacaggatccatccttactgccactaagaagctcgggaccgcagttccatttgataatgccaaggtgctcattgcgtcagctgattctcatgaaggatttcatggcttgatcatcaacaagcgattaagctggggcgtcttcaaggatctggatagctcgatggagcctattaagcatgcaccacttttctatggtgggcctgttgtggtgcagggttatcatcttgtaagcttgtcaagagtatcctcggaggggtacatgcaagtcataccaggcgtctattatggcaacatagttgccacaagccgggtagtcacacggatcaagttgggcgagcaatctgtcaatggcctgtggttcttcctaggctactcggggtggggatacaaccaactttttgatgagctaactgaaggagcatggcttgtgagtgtgaagccgattgagcatttggactggccgaagagttgaaagggttctgtggacctcacgcctcagctgtttctttaggaaaattcagttcatcttgcacatatctgccactctgcccacactgcaccgtgacattgtactgagcttttttttggaacatagcagcactgtgttttcataccattcacaccgtactatggtcacatattttttatacatagtacttttcttatagtg

SEQ ID NO: 283828 - DNA, 694 bp, Zea mays
cgctcgtctgcaaatctgcaaatggctagcatcagcagtcttgcagcacttagcctcttgcttctcgtgagcgttggattaagcgacgccatccgggtggccagatactccagctctcaaggagcgggacagggaggggggaatggtggggcggatcagaacggctcaggttcaggggttgggctcggttcgggatccggtgagagcggtgcggacggcgtctacgtgagtgccggatcggtggtgagggcggtggctggtcacagtacggtggtactgcttttggtggcgggtctggtacggggtccagctccagccagtatagctcgggatcatctttcggtaatggcgggtctactcttgccgggggcatcggcggcggcggcggcggcggacagggctcggagaaccaaggctccggtggctacggtaccggcggtggcaccggatccggctctagtgaggctagctccggcgacccgccctcggccacaccaccgtacgcaagcgcagatgcttctggcaatggtggtggcatgggcggtggtcgcgacggcgggactggcggcggtaaaggccacggatctggattcggcgaaggacagccttaagagtttcctatcagattttcaaagctggaggccaaaagatgctatttcattttcatttgctttgcgtacgttgattttttata

SEQ ID NO: 283829 - DNA, 661 bp, Zea mays
cccacgcgtccgcgaggggagatatttattttccgttccgttttccccgtcagaaaggagtacttccaacaaactgctccgctttcagcacctgcccagcggaggaagagtgcggattgcggcggcgccggcggacgaaacaatggcgtcggcgagggacgagcatcttgatgggattcgcgcgctgatggcggcccactcgccgccgctccacgggctggtcgtcccctccgaggatgcccaccagagcgagtacgtgtcggagcaggataaacggcgggagttcatctccgggttcacagggagcgctggcttggctcttatcaccatgaaagaggcattgttgtgcgacggatggccgctacttcttgcaggcaacacagcaactgagcgatcgttggaaacttatgcgcatgggagaagatccaccagttgaagcatggattgctgataatctggctgatgaagctgtcattggaatcaatccatggtgcatctgctgttgattctgctcaaagatatgagaactcattttcaaagcaggcaccagactttgtttcagctttcttctgatttggtggatgaagtatggaaggatcgcccgctagttgaacctaggcctgtaattgtacacccagtagaatttgcagggcgcagtgta

SEQ ID NO: 283830 - DNA, 401 bp, Zea mays
tttgaagccacgtgaagaccgcgtctacagcacagagccggcggcggctagggcacagaggaggcggcggcacgagctccgtctgcacgagatccggcggcgacatctacaccggctcaccggcgtccacgaggggaacgccactggctgaccggcgccatcccgtcggtgtccgcttctcgccgtagatctttgcatcgatgtggccggccactggagtacgcccaagtggtaggcaactcgtcgagaccctcggctacacccaagaggaagccgaggacgcggacggcctgctccctcggctggaaatgcggcgaggcaggcacgccggcgagcctcgtccactgagagatcgcggcggatgctctgcttccctcccgcgtcctaatgagcgaggaagt

SEQ ID NO: 283831 - DNA, 797 bp, Zea mays
  unsure (1)..(797): unsure at all n locations
ttaggagctacttgagcttgctgacaaggttgttccatttatttgtatgctgaaaacacatcccgatatcctgtctgattttacaccagattttggggccaaccttcgcacaattgctgggaagcacaactttctgatctttgaagaccgcaagtttgctgacattgggaacacagtaactatgcaatctgaaggaggtatattccgcatcttagactgggcggatattattaatgcgcatatagttcctggacctgggattgtagatggcttgaagctcaagggtttgcctaaaggaaggggcctacttttgcttgctgaaatgagctcagctggcaaccttgcttatggagactacactgctgcggctgtaaagattgccgagcaacatcctgactttgtaataggatttatatcagtgaatcctgcatcttggtctccagcaccgtcgagcccagcattcatccatgccactcctggggtttagatggctgctggaggagatgcccttgggcaacaatataatactcccatttctgtgagtgcatttttgccattcggttctcgttggatggctcacttgcttcttgtcgactggggatgaggtgtgttgggttgtggtcactggccggcggcagctaggaacaacgacctatagtaggtgtcaattgaggcgacattgcgtcaggaagcagaagacatgcacgcaattgatttgttcttaacacttggtgggaattaaaaggaacagagagatagtgngatgggcagaggctttgcaccttttgcgtcaaact

SEQ ID NO: 283832 - DNA, 493 bp, Zea mays
ccgctcgatgactacggcagcgggaagagcggtgtttaagttgtgctcaaggggcatgaggccccgggttccggcttgtcatggagcccgatgaaggaggggtggctgctgagcggctcgtatgataagaagatttgtttgtgggacatctcctctgggagtggcgctcctgttctggatgcacaacaggtgtttgtggctcatgaggatctcgttgaagatgttgcttggcacctgaaggatgaacatatatttggatctgttggggatgactgtcagttgatgatgtgggccttgcgtacaaacaaaccagaacaatctattcttgcacatcgaaaggaggtcaactctttgtcattcaatccattcaatgaatggatattggctacagcatctggagacacaactatcaacctatttgacatgcgaaaactatctagaagcttgcatacttttgacagtcatgaggcggaggtgcttcaggttgaatgga

SEQ ID NO: 283833 - DNA, 681 bp, Zea mays
aggggtcggttttaacggattgggaggctcctaatatggatttcctatttggactggacatgctgcgaacgccatcagtgcatgattgacctaaaggacaatgttctcagagtgggaggtggcgaagtttcagtgcccttcttacaagagaaagacatccccgcacacatacgcaatgaagagaaactgtctaagttagggtctctcagccaagcaactggagagtcatcaaggacacgtgagggtactcccaatgcgccacaacaaacccctcctccaggagctccagctgcaaaccctccacagggaggagattttgaagcgaaagtcacgaagcttgtggagctcggttttgacagggcgtcggtgacacaagcgctcaagttgttcaacgggaatgaggagcaagctgctgcgttcttgtttggtggttagactggtgggagcagccgttcctggctttgtgttcgctcaaccctttccagggttgagtacttgaatatttgatacgaaagtgattaaagtatttggatactgtttgtccagtgaaaggacttacttttagaggttttatgttttctcttgtttctgagaacaaacatttgttttctgtacctgatacatagactgatagacaccagaatggagacagaactgtgaagatttttttttattaagagg

SEQ ID NO: 283834 - DNA, 596 bp, Zea mays
  unsure (1)..(596): unsure at all n locations
ccgggtcccgaatttcctttgtggtcccacgcgtccgatanccttcttcagccacctccagttcggcttgtttggttttgctcgtcgtcaccggcatcgccctgctgctcatcagaacctactgatgcgtaccggaagggatatgtctggagggggaagaagaatgtggattctttctcagcgccgtgtatcgcgtcacaggtcgttttgtttttgttgttgaatttgtgcaaggattcgttcgattggggggatatcatatcatggtcgctgcctcctgtcctgtaaaatggtggagaagcgtagcaccagagatagatagatagatcagcatggtgctcgcttgctcggagctggaggcgttttgggatgcacgtacatacatacatacattcattctctgcttttagtaagaaatctgtgcattatggagtagcacaccatgtatgtatatatcagacataagaaacaaaccaccaaaaaaaggaggtgtatatcatcgtatttctacgtgtaataagccagtgtattcagatcgaataatgttaggaatcgggttaatcagagccagaaccgatggggttcttattcttcct

SEQ ID NO: 283835 - DNA, 767 bp, Zea mays
ctactgcgaagctgagacaccaaaggaaaacttttacattgaggtctggcagggcctggaccctgcaatcgcttcgattgtgctgacactgccgtcaaatagtcaagctgagattttgtcagagtggcttcagtcgaaacatgttagatatcctgaccttacagaggcacttgaagcctggtgttatagatcgaaggttgctaaaagaaggctctctctcttgagcgacattggccaggtatcttgattcctgaccaattaacaattaaccgaagcggacctgagatatctgaattgaacaagtttgcatgctttctgctggggaaaatcatcaggttctgtgatcaccagcataaattttggaatttggaggcagtgcagaaaagggctcttgccaatattcgtatccatgacatgaatcctgataacaagtagccgaagcggggagggcctgttcggttgtttgggattggagccccgaattaattcctagccgaattacttatctaatttatatagattttaataagctggaatgaatcctggcttattccggtacaaccgaacgggcccttagtaaattacccagagtttgtctctatagattgcaggctaactttaatctgaagcgaaacggcctgtgattaatagggtgtcatttcttgcttgtggaaaagaagtttgtaatgagtgatcagttaacattgtctttgagaaaagactcaagggatgcgacatattcacttaccgaatgtaaatcatgattc

SEQ ID NO: 283836 - DNA, 551 bp, Zea mays
tttaatgggcataatatgctggcaattgctgttcatgtttcctctcaggttgagctttgccacattacaagtgctagaaagatcgtaaccttgccccaaacatgtagtgccaatgcgacagatcatcctactaagaaaaagggactatgcatggctgtgcaagctttcatcccccatgaatccgcaggctacgtaaatattttgtcaagttatgaagatggaagcactctttggtgggatgtacgaaagcctggattacctttatcttcagtgaagtatcattcagaatcagctttatccattgctattgatggattttgcaatggtggaatctcaggaggtgctgatgataaagtagtcatgttcacgctcgaccatccaaagggcacatttattcttaggataggcatagaactcgagcgaccgggtattgctggcacagcaattcgtccagacaacaagatcgctgcaaccgctggctgggatcacaggattcgagtgtacaactacaacaaaggaaatgctctagccgtgttgaagtatcacagtgc

SEQ ID NO: 283837 - DNA, 876 bp, Zea mays
ggacgtgttcggtacgcgtgggcggacgcgtggggcggaggaggcctcgctcagggcgctggtgaagaagcagatcagctcgtcgtcacctcccggctcagctcaaggtgacatcgatctcattgctgaaacgcgggctaatgtaagtctctgagttgcttgaacccctagatacttcgagggacggacgatcttccaaggtccatgggctgccacagaaggagtggaaggtgaagcaagatacagaccaattaagagtgatgtaccgtgagggtccagaggggacaccatttcataccttacttgctgaaggctttgcagatggacctattgacgtttgtacatgtgtgtcatgggaatcaactttatacaaaaaatggtttccacaatacaacctgccaacttttagaattgatcagtcaggctgcttgaaaaaagtgcggattggtgaagagatttgtatggtcagaaagggtgaaggttccatggccggtttcagagagagaggctattctacactatcttgaactggaatatcttaaagaagatgtcgtaattgtgataatgaaaactttatcagacttggatgccatagatgttcgaacccatggatttagtagggatggaattcctgaagctggtgacacagttcggatagatgtgtttggaggctttgtattgcaacggattacaaaagaaagaagctttttcagggcaatagctaatatggatatcaagctagattttgttccaccatggttgatcaacttcatgtcaaggcaactaataggcagcgggcataagctgtatcaaaaggcagtcagcaccgtggccagtcatgatgatgactaccaggaagctttgagaggaccgctc

SEQ ID NO: 283838 - DNA, 843 bp, Zea mays
cgacccggcgactggggcctgggccgagctgccggacatgctgttctccaagtcgcaggccatgccgacggccatagctgacctgctcaagcccgtcgccgccggagtgacctcgtatggggggaagctgcacgttccccagagcttctattcctggccattcgccgtcgacgtcggcggagaggtgttcgatccggagacgaactcgtgggagcagatgcctgcgggcatgggcgagggctggcctgcgaggcaggctgggacgaggctgagcgccgttgtggaaggggatctgtatgccctggagccggcgacctcctcttccggcggttgtgagatcaagatgtacgacgcgcaggaggatgcttggaaggtcgctgtgagccaggttcgtgctggggcatttgacgagtcggacagcccttgcttgcttgctgcgtttcttggaaagctccatttggtcgtcaaggatatgggcagcaggatcagtgtcgtgcagatggactctctgatgaagccagtggattcgccagccctttcggctgccacgacatgccgaaccccggatgtctcctcggagcaggcacatgtctggaaagccattgcatcgaagaacattgcagctgctgaacttgtcagctgtcaggttctcagcatctgagttcgtaaaatcgagcttctctggaacttctttgtgtaagtctgtgcagtagatgtgtttctgccacacatctgaacatcagaggctatttctttctttcagcaatgcacaattgtttgtgcaatctgtgtatataacatcacatagaaactgaatagggtgacgcagctttgtcaatccca

SEQ ID NO: 283839 - DNA, 427 bp, Zea mays
gcttgcttgctgcgtttcttggaaagctccatttggtcgtcaaggatatgggtagcaggatcagtgtcgtgcaaatggcctctctgatgaagccagtggattcgccagccctttcggctgccacgacatgccgaaccccggatgtctcctcggagcaggcacatgtctggaaagccattgcatcgaagaacattgcagctgctgaccttgtcagctgtcaggttctcagcatctgagttcgtaaaatcgagcttctctggaacttctttgtgtaagtctgtccagtaaatgtgtttctgccccacatctgaacatcagaggctatttctttctttcagcaatgcacaattgtttgtgcaatctgcgtaattgttatctgtgtatataacatcccatagaactgaataaggttgacgcagctttgtcc

SEQ ID NO: 283840 - DNA, 381 bp, Zea mays
tggtgagtacgctacagaagctggttcctttgactagggatgtttaccattgcttgctgaagacctatgtccgtgcgggaaagcccccgtccgatctgctggagcgtatgaaggaagacggccttgaggctgatgaggaaacagagagaatcctcgcgggagaatgcgagcgagtagacatgcacccgttgtcaatcactaaccatctgattggttagtcgcaccgtctcatcctgtatcagtgcatgcattgattttatttaagtctttgtttggttgcctgtatacttaaagcgtgagctgcatgagtggatgcaaactaatttattttgggaccgtttgactgcatctgctcatacgtcaaaatcttcggtttctgac

SEQ ID NO: 283841 - DNA, 621 bp, Zea mays
cccacgcgtccggcgcctgccaaggtgttggattttggcgccgggccaagttcagctctttgggcaatgagggcagtgtggccaaaatcaatagagagggttaacctggtcgagccttccaaggaaatgcaaagagcagggcagagtcttctcgacaatctgaaggggttgccacttattcacagctatgacagcatccaagagttgaaccgcaaaatagaaaaacatgagcgaggccatgatcttgtagtatcatcttatgcacttggcgagattccttctttgagtgaccgaatcacaatagtgcgccagctttgggacctgacgagtgatgttttggttttgttagagcctgggacacctcaaggagcaaagatcataagtcaaatgcgctcttatattctttggatggaaaaaagaaagtgtcgcaaaattgaaaaatcctcaagccgtcctccaagtagcatgaagagtatcgtagcacaagaagcctcattgaaaaatgggtcttttgtggttgccccttgtcctcatgatggtcgatgtcctttggagaattcagacatgtactgccactttgtccagagattggagaggacgtcatctcaacgtgccttcaag

SEQ ID NO: 283842 - DNA, 274 bp, Zea mays
gttattactgtcttccttacacaggcttaatatgtctatgagacagcagggcaatgagggcagtgtggccaaaatcaatagagagggttaacctggtcgagccttccaaggcaatgcaaagagcagggcagagtcttctcgacaatctgaaggggttgccacttattcacagctatgacagcatccaagacttgaaccgcaaaatagacaaacatgagccaggccatgatcttgtagtatcatcttatgcacttggcgagattccttctttgag

SEQ ID NO: 283843 - DNA, 563 bp, Zea mays
aggagcggaaaaaatgttatgtgtgcaatctctcaacatcagccccccctgtcccgggagtcttgtatatttctacagcgaagattgctttctgcagtgacaatcctctgtcatacaaagctggaaataaaactgaatggagctactacaaggtggtcattcctcttcaccagctaagagcagctaatccttcagtaagcaaagtaaatcccgcggagaagtacattcaggtcgtttccgttgaagggcatgagttctggttcatgggttttctaatgtacgacaaggctgcacccagtcttcaagaagccttggctagcgctcgtgagttgcaaccgtgaagacaccaagtggtgttctttccggttacatacatcagtttccacatctcgagttcaggctgggccgctgggatttttctcctgtttcagatcctttttgctgaagcttttgacccagttcacccacaggcctgcaaatgtgtcagaaatgtgtgccattcctgtcaatgttggaatcaggccagatttttatatatatggaaaagcgttgcccctgtccat

SEQ ID NO: 283844 - DNA, 306 bp, Zea mays
ctcaaggagcgcgcgctgtggtaccaccgggagatcaaggccagcgggtacgccggcgaggtcgagctgttcgagtctaaaggcggcggccacgcgttccatttcgacatgctggactcagagcagggcgtccagctccaggagcggatcgtggctttcatcaacaaaggagcaccaccgagatgatgaataagagttttttatgctattttaaatatatcatttggatacttcaaattgtaatacaccgaaagttgtttgattcccgatcccgaaacaatatattcgttaaaaacccacggtccg

SEQ ID NO: 283845 - DNA, 504 bp, Zea mays
ataccgaccccaagccaaaggaccaaagcaaggctagttaagcagcgtcactgaagcggccaacgcgtcgccttcaccagtctccactccagagagaggagagctttgattgctggtggtctggtcggcggcggcggcggctatggagcccctggaggtggccataacgatcatattcgacgcgctgctgctggtgttcatggtcaagctcttcttcgccatgttccagatgaagctcgtcgtcatcctcttctacctcgtcatcctcctcttcgccatggccttctccggccgggcgcccagcagcttctagctcgacgatcgtagcagcaggtggcaaaaaattgaagcttttcttctccctcccccctctttcgtttcttctcccccctcttggtcttggagggtggaccggtggagtcgtgcagcgctacgtacgtcctgtgaaaaaagactattatcatctcggttttggtggatggctagctaatttatttctctcta

SEQ ID NO: 283846 - DNA, 585 bp, Zea mays
acttggacgcgtgggcggacgcgtgggcgcggtcaaggtttcgctggagagcgcctgccctccccgttgtctcctgcgccgacatcctcgccatcgccgcagagatctcagtcgagctgtcgggaggccccagctggggtgtgcttctgggcaggctggacagcaagacctccgacttcaacggatccctggacctcccagagcccaccgacaacctcaccatacttcagcagaagttcagcaacctcagcctcaacgatgtcgacctggtcgccctttcgggggggcacacgttcggccgggtccaatgcaagttcatcacggaccggctctacaacttcagcgggacgaacatgcccgacccgacgctggacgcctcctaccgggccttcctgacgcagaggtgccccaggcacggcgaccccacagccctgaacgacctggacccgacgaccccggacaccttcgacaacaactactacaccaacatcgaggtgaaccgaggcatcctcaactccgaccaggagctcaagtcgtcgcccctagcgcagggcaccacggcgcccatcgtcgaccagttcgcgg

SEQ ID NO: 283847 - DNA, 441 bp, Zea mays
gcggaccggccggattccttggttgccacgcgccgatcggcgcaggcgcgcgccgagatggtcgagttcctccgcacgctggagggcgcgctccgcgacgggcccttcttcggcggcgacgccctcggcttcgtcgacgtcgcgctcgtgcccttcacgtcccggttcctcgcctacgaccgcttcggcggcgtcagcgtggagaaggagtgcccgaggctggccgcctgggccaagcgctgcgccgagcgccccagcgtcgccaagaacctctacccgcccgagaaggtctacgacttcgtctgcgggatgaagaagaggctgggcatcgagtagagcatccatcggtcggccggaggctggccgggagtcataaggacgaaccaagatcgagctatgcgctgtagtgcggaactcttcacagatggtgataagaagggc

SEQ ID NO: 283848 - DNA, 431 bp, Zea mays
ctgacgcgtgggcgacgccctcggcttcgtcgacgtcgcgctcgtgcccttcacgtcgtggttcctcgcctacgaccgcttcggcggcgtcagcgttggagaactgagtgcccgatgctggccgcctgggccaagcgctgcgccgagcgccccagcgtcgccaagaacctctacccgcccgagaaggtctacgacttcgtctgcgggatgaagaagaggctgggcatcgagtagagagcatccatcggtcggccggtggctggccgggagtaataatgacgaaccaattatctagttttggtttgagtgtgctcagcagagcagttcgtcgtcgttgtattttctattgtcagcggtggcagcgccgtacgtgttgcctcgtgcaccacatccgaataaatggttatgaatttcttgttgtcttcacaaaa

SEQ ID NO: 283849 - DNA, 476 bp, Zea mays
  unsure (1)..(476): unsure at all n locations
aggaccggccgaattctttgncgacccacgcgccgatactgtcgaggattcgatcaagttcgtgtttggtttgagatggcggagtacaacaccccgagggccatcatccctgcagacgacgattactcctccaaccgttctcaaatcatggtgtggcgtgtcgacccaacgctgctctagctagccctcttgccacgctaagagcgatagataaagatgcatgcatgcttaaaataaacattccatgacttattacatagtaatgccatacacgtacgtatgtatatgtaaacttttgctgcatcagaatcatatatatagggaaaagaacgccaagcagcagtctgcatcagtcgtttgtcgtcgaaatgctcaaggcaacgcatcgcatcgcatcatcctcttgcttgcctgcgtgcaatccttttcttgtccgccctgcattgcatgtccctttntctttttcttcttgtttg

SEQ ID NO: 283850 - DNA, 796 bp, Zea mays
atccgtccgtggtcttgctccagaaggacggaagatgcgcatcaagctttcatcagagctcgccgcccacccacaccggcaggcaggctccgtcggcttctccgcacccgtgagaactcttcggccagtgaaggtcgcgtccgatgaactcgagaagggacttccgtagccatagagctgctttatttgatggcattgaagaaggtggtgtgagagtccagcttattcttctcgtgaaattcatgagcacgagaatgatcaagctctggacagtttgcatgatagggtcagcgttctcaaaagattgactggcgatatacatgaagaagtggagaaccataaccggatgctggacagaatgggtaatgacatggatgcttcgagaggatttctttcagggacggtggacaagttcaagatggttttcgagacgaaatcgagccggaggatggcgacaatggtggcatccttcattgctgtcttcttgctcatatactaccttacaaagtagcagcacggctgtctggctataaggttcgcagtcgcagcccctgtggtgtcgctgcgtgtgatgatgtatattgtgtggtcctaccttcgcacttgatgaccggaacgttggttctctcataagaaacggagcattggtggatttgggagttgtcagatactcagatgaatgttttttcagatacaatacgtgggtgtacatcgtttgagccgactggggggcctggtaatgatatgaactgtgaaccgcaaagattgtgatgacttattaccatcgttgtgcccc

SEQ ID NO: 283851 - DNA, 609 bp, Zea mays
gatgtttttttctccgtattaccatcctgcttttgtaccaatgccctgctacggttatgttccgttttactgtgagccacaaggtgctgcacaggctccgcatgaggttgtcaagccagtggctgtgcactcagcgcctccgctaaacgccaaagatctttacaacatgtctgaattgagcctgaagggcgactcgaatgcaaatggtggtgtgcctgcttcccccttgcctccgaagccgatcggtagaccagagaggcaatctgctttccatggcaaaggacctacacctaccggtggctcgtcaggtggactgattcctgcagtcaagtgaattccgattatgctcctaaacatgccttcatgtgtatgtaatactagaaatagccaaatcgtaatagccgcctgtgctgctaaaatggtggtgtgttttctagcaaaaaatctatactgctcattttagccttcaccagtttggaagtcatgatccgagggtaaatatattgttagcttgttgtttttgcaattagtcttctttttttccccatcaatttgccccaattgtcttcatcaatccttaaagttccccactattatttgttttaaaaa

SEQ ID NO: 283852 - DNA, 565 bp, Zea mays
tgactgggctggtgtcaagccacccttggtagaggaggatagggagttcctggagaagaaagagaagctgcaggagtgggagcagcagctcaccagtgcgtcacaacaggcagaagcacttgtcaaggctcaacaagatatggctgaaacaatgggagcgcttgggttggcattcgttagattaacaaagtttgaaaccgaggaggcaatgtatgactctcagaggatgagagcagctgacagcaggcgtgtagccactgcagctgttaaagctagcagggcatgtcgagatttgaatgcgcaaactgttaaatatctggatacgctgcatgaacatttaagcataatgttgtctgtccgcactgcattttctgatcgggcaagtgcattattgactgtgcaaacacttatgtcggatttggcatcattagagtccaggatcgagaaactcgaggctgcatccttgaagatatttggtggtgataaagctaggactcgcaaagttgaagagcctagggaaacaattagggctactgaagatgctaagttctgtgctttaagagag

SEQ ID NO: 283853 - DNA, 479 bp, Zea mays
gtgatttcgaagaggagacttctccagtcaagcttaacccagctgagaagttcctcaaggcagtgcttgatgtgccttttgccttcaaaagagttgatgcgatgctttacatcgcgaacttcgattcagaggtcaattacctgaagaagtcgttcgagaccctcgaggctgcttgcgacgagcttagaagcagcagactatttcttaagctacttgaagcagttctcaagaccggcaacaggatgaacgttggcacaaaccgcggggacgcgcacgcgttcaagctcgacactctgctcaaactggttgacgtcaaaggcaccgacggacacacgacccttctgcacttcgtcgtgcaggagatcatccggacggagggctcccgtcagtccggcagcacccaaacaaccccaagaacccaggcgaaccctttgcgagatgagctcgagtgccagaagctaggcctccaggcagtggcc

SEQ ID NO: 283854 - DNA, 481 bp, Zea mays
ggttgctctttttggtccctcagttgatgagatgaatgaaaaggcgaggcataccccagattttagaagttcagtgggctctgataggaagaaacttaaaatttccagcaacagatatgtttcaagaggatctaggaacgaagatgtgcatacacgacactctcctcaagattattcacattctaagcaagaacgaagtagccacaacatgaattatgagtacagacgacataaaagagattcttcagcagcagataagcaccgaagacaagatgttggagatacaaatgacagacaattttcaacaatgggaaatgacagcaagtcccataggcataagcatgaagaacggcatagaagtgatcatggtaatggagaaaaagaagatgacagcaaaactaggcctaggaagcactgttctgtaggcgtggaagttggaggttggatttctgactgggctcagacttactggtacagacat

SEQ ID NO: 283855 - DNA, 861 bp, Zea mays
gttgcggcgctcgatgttgtcaaatcaccatgggttcttatacgcgtactagcgccctatatccccgtattttacatatacatattcgcgcagatgaggactcgggtctctgtctcggaaggaaccggagcggaagcctccggtaaggagggtgaagtccaagcggccgttcaagaaatctgtgctggagcaacagattcagcaaaagggtgcgagctcatcctgttccgctaacacgaatcagcagttggagaaccacaagctgaagcaacagattcagccaaaggggtgtgaactcatcctggttctttgacaccgatcagctgtctgagaaccacgagagtatgtcaagggggtcagcttcagcggtgtcaaaaagagaggaaagatttgaacaacccaacagctatttgactgcagtgtcgtatttggtgaagaatcggtgtccaaaaagtcatttatttttttatgcaaaagcgctggaggatggggctgctctgaacatttttctagctctgccgcactatttcgctaggaaaaaacacctcgatcacttgctagataatcaatatgtcttgctgacaccagagaacaggaggcagtggcatgagctacgtcgtcgtagaaatcctgatgatgatcatcatgatgctcctgctcccaatgctcctgctgagcaggcttctgcttgaccaccatggagactcaacctgatggcgctgccagttctttctgtagtttagagtcgcagtcgttagtgctgtgtccctatttgattcatgtggacctgcagtaatggggattatggacttactgtaatgttgagacttaatatgtgtactatttggctatttgtgactt

SEQ ID NO: 283856 - DNA, 468 bp, Zea mays
acggattcctgaaggattggaagcgttgggataagaagaagggcccaggacggatcacagtgcggatggttccatcgtacaaggtaacaccaatgcagctgaagagggacaagagcatcatcatctggaggcaatttaatggccatgagcccgagaattactggtaccgagtttgcgaaggacgagctgccaaagtcatccaaaggccttggtatgctatctggaagtccaagagactgatgaacattgtgactgagattgcaggtaggatggattgggattacgacggtttacatgttgtccgagggtggaaggcgcagaacaagcaaatgtatccaaacctggattccgacacgtcgcctgatgcgctcgttgataaggtgaccaagcttgttaagccgatgagagatctctacatcgcaactaatgagccgttctataactacttcgacaggctcaggtcacact

SEQ ID NO: 283857 - DNA, 445 bp, Zea mays
ctcctaccgggcgggcgcgggccactggaccagcgacacatccggggagaagaaagctcggaggatccgaacgacgctgacggcgaggccgtaaccgcagagcagcggttgttgggatctcctgctcctggtcctggatgctggcacttgaattccagcatgaggtcaaagaagatatttggtttatccatttcccttgtactcatcaacctagcttctatattggaacgagctgatgagaatctcctcccagctgtttacaaggaagtcagtgctgctttcgatgccggtcctactgatctggggtaccttacatttctgatgaactttctgaagtccatagcatctcccttggcaggtgttcttgcttttcactatgaccgccctgcagtgcttgcgatagggactgcgttctgggctttgtcaacgggggctgttggtgtca

SEQ ID NO: 283858 - DNA, 938 bp, Zea mays
cttgagccagttttgtgtgaagaacatgtatcaagttcaatccagcaaacaaataaagctatcctgatgccttcaagatcaccactagttgataatgaggctaatccaactcccccaaaatcacccgtgccacaggctgatacagttgctaaagctactccagctccacccaaatcaccaatgctacagattgatacaattgctaaagctacagcagctcctacaaaatcttctacttcacagcttgataaagttgctaacatccaagctgcccccaaatcacctgcaccccagcctgatgaagttgactcacatcataactcagtatcgggacagattctgtccacatctatctccaagcctcgagaagatacggtttctaagagggctgcagtcgttactgtacctggaactcctacgccaatgtcaaggcctacaagtgcacctctgctacaggtaccaaaatcaactatgctacctacaccgtcagtccaagtttctccaatgctttcacgttcgcggactatgtcagcccaagtttctccaatgctttcacgttcgcggactgtgtctgaacggcctaacaatgagccttcacctaccgccccaatgtatgtaacgcagacatatcgaaatgcaattcttggtaagggccatcttgatacaaccccagcaagtcttgagcaatcaacttctgtttcgccgaatactgcagcttcacagccatggtcagcatatgcgatgacaacatcggtcatggcccctccattcgaaaggaatggccagttaccaggtaagcaaggcttcatgtttgggcctagcagggcagaaaccctcgataactggcattcatggaaaggtaacactgatgttaacagaaatacgtggaaacatgattttcctaaccagcaaatgaccaattgtgatgctcaattaca

SEQ ID NO: 283859 - DNA, 1153 bp, Zea mays
  unsure (1)..(1153): unsure at all n locations
agcgtgccgcgccgtgatgggcaagtccttccggagcgagggtcgcaacaagctgttccgggagcttgtcctcgacaccaccaagctgctggtcggcttcaacgtcgaggacttcttccccttcctggctcgcttcggcgtgctcagcaagctggtccgcgccaagtccgagagactgaggaggaggtgggacgagctactcgataggctgatcgaggatcgtgagagcaagtatgaggcggcggcggcgggggcgagtgatctcaaggacgatgatgacgataacttcatacatgtcttgctctccgttcgacaggagtacgaccatattaccagggagcaaatgaaagctctcctgcaggacgtgtttatcggggggatagactccacatcttcgctgctcgagttcaccatggctgagctcatgcggaaaccacgagtgatgaacaagctccaagcccgggtaaggagcagcacgcccgcggggcatgatggagtcgtcggcgaagatagcctggagcacatggcctacctgagggccgtgacaaaagagtcccgccggatccataacgtgacgccgctcctggccccgcacctgtccatggatagctgcaccatcgatggctacacggtccccgccggggtgcaggtcctgatcaactcttgggccatcggcagggacacgcgctactggggcgacgacgctgaaggagttcgtccctgagaggttcatggacggcggcagcgccgctcatgtcagcttcaaggggagtgacttcgagttcctgccattcgggtctggacgaaggatgtgcgccggggtgaacttcgcgatggccacggtagagctaatgttggcgaacctcgtgcatcgttttgactgggatttaccaccggggcaggagggtcgcgacattgatgtgtcgcaggtgttcggtctagtagaccgccggaaaaagaaacttcttttggttccaaaattacgtgtatactatcgcatcccccttcccggacccaagaaatactgggctgtngcatatatatggatgtacttgcataaagggtgcgtatatgtaagcttacgacattacttatactggggatttaatgcaataatgttattagaaaacaaaaaaaataaaaagggcggccg

SEQ ID NO: 283860 - DNA, 436 bp, Zea mays
tttgtggcttcgctccgtgctctccccgctcaggaagctctggtgccgcgtcaacgcggtgcagcgcaagacgagagggatctacatcctgtacgacgacgtcaagtcgtgccaatgcgaggacgtgcacgtgctgtgggcgatcctcgttgagtcccacggcctgccgacgccgacgccgacgccgcctctgctgagcctgaagcgatgaggggcggcgggtgctccgccgctgcaccccctgaataagcgaacggtccatggatatacctcgacatggctatgtctctgagaggagaattcaagtagtagcgattctgaattctgatgtacatagggatcaaccgatgtgtgttgtgtcgccggtgtgctgctctgctgccggcctggattggcgcctctgttggaggctgccgagacgagagtggcctgcacc

SEQ ID NO: 283861 - DNA, 547 bp, Zea mays
tagcgcgcccgcggaagtaactctggctgcgaccgcacccacgcgtttgtattgactatggcaaagagtgtgctgtgtgggttttttttgaagaccatcgcgcacgacgacacaatatctagtagcagggagcaagatgtcgctgtgaaaatttcctgtgagcttgcacaaaagcattggcaaagtgctcttgaaggtctaggagataccattttggtaaatcaggaaacacagttctggcaggtggcatcagctatgcttgattacataatggggataccaaacgtccttgcttggggtaatgttcttaatgctacatgctctgcggtcaagcacttctgctcccatgcacctaggctatcttggaggctgcagacagataagtgggtgtcattattagcttcaggtggaattgagggcttcaaaaacagtgagatctgtttgattgatcttttctgtacaatgttgaatcattctgaaccagagcagcgttttgttgctgtacaacagcttgggaggattattaactcaacaagttctactgaag

SEQ ID NO: 283862 - DNA, 455 bp, Zea mays
ttttcgttcgcctccgcaaaaggctaacgccagcccgggcgcgcgctaacggcagcaacgacagcaacccgctggctagctagtcctccccacgattcgactccgccgccgtccccggcccagcacaccttttcttctctcctgaagcaaaaaccaccaaagactagtcctacaaaatctaggggttctatggctgtttcaatgagggaggtggatcctgtttttcaaggtgcaggtcaaaaagatggattggaaatatggcggattgaaaagttacaggctgttcctgttcccaaggaatcatatgggaaatttttcacaggagattcctacatagtactgaagacaactgcccttaagaatggttcttttcgtcatgatatccattattggcttggcaaagataccagtcaggatgaagctggtacagctgcaattaagactgtggaactcga

SEQ ID NO: 283863 - DNA, 729 bp, Zea mays
tcgtattcctgaagtgtgctatcttgacaaaacctcagtcatatggtgtgttgctgcagttaccagctcctcagcttgagaatgccttgagtaagaacccgacactgaagacgcccttggctgagcatgccgagcagccaaatattcggtcgacacttccaaggtctaccttggtggttctgggtcttgctgaagatcaaccacagcaaccagcagtaacacaggtgcagagcagccaaaaccaggctgcggaaaccagtagctctgctgctgatacggctacagaagtaactcaggaatcttctggtgctagctaacatcttttatgccgaaatgggctaatgcttgcaggttgtaagccatctatcattttcatctctggagtgatgttggtgattgatgaaatgggctaacgcttgcaggttgtgtaccatatgtctcttgagggtctaagatgtgtttttctgtgtgatgcgtctcattggacgggtgttagctgctgcatctggacgcctaaatgagaactaagttatttagttgctgggggtaattctaattttcggtggtgcacagggaccattgtaaagtaaagaggttaacattatatatcatccttaaataggaaaagggcaaacaagtgtttgttgaagctgtagctcaaacagtccctacttattccatgagttgttgtcaaagctgttctgcactcaagtggggctggctatgtca

SEQ ID NO: 283864 - DNA, 433 bp, Zea mays
agtaacacaggtgcagagcagccaaaaccaggctgcggaaaccagtagctctgctgctgatacggctacagaagtaactcaggaatcttctggtgctagctaacatcttttatgccgaaatgggctaatgcttgcagaatcaaatacaggattggctggatggcagagtagatacttcagataatgaagccggtgaagttcttaaagaaaggtcaatgagtcgatgaaagtgggttcaatataggccaatttgatgaacacaggcattgaattatactagattaggctgctgaatagcgtaatacctacatccatttaggtgtgttttcttgttagcgtgctattgtaatgtctatattgtaatgggtctcgacccaccaaactttgttatattaatgcactcccaatcttgattaggattagggttttcaat

SEQ ID NO: 283865 - DNA, 885 bp, Zea mays
tcgttccggcaacggcgtcgcggccctgcgcgacgacaacctcgacacctactggcagtctgatggggcgcagccgcacctggtgaacatccagttccagaagaaggtgcagctgcagctcgttgtgctctacgtggatttcaagctcgacgagagttacacgccgagcaagatctccatccgggccggggatggcttccacaacctaaaggagattagaacggtggagcttgcaaagccagttggatgggtccacatatcattatccgggattgatccacgagaaacattcattcacacatttatgctccaaattgctgttttatccaatcatctgaatgggagggatactcatgtccgacagatcaagatctacgggccaagaccgaatcctgttccccaccagccgtttcattttacttccagggagttcatcacatactctactattagatgacagtggatgagcaatcaagataggatcggcagctcatggctctggatgatcgcgccatattagtatatttgcctgcttgtgtgctgtctatcgggtcttggacgtgtatgtgtaatgaagttgttaagttagctcagcagcatccacatctcatattttaaaccccactacataaagagtgcagtgcaaaatagtgatttgcagggcacatgtacctgctggccatagccttaggtagcaataacatacttttgaatttgtttcgcggcctctgttggcttgcagtgtttgcttggttcattggttggtcccaatcattttgtgcccttgatgttcagtgccttaggttagcctatacagtttatggacggtcgtactgttaaacctttgaaactttgtagtttcatttaaaaaaaaacatttttatg

SEQ ID NO: 283866 - DNA, 572 bp, Zea mays
ccatgtcctgctgctgccgccgcgggacctgagaggagaaggacgaggacgaggtggtggttggcggcgtcgcgccgacggcggacatgggttggaggcggggaggaggcgcggatggcgtggccaggagatgggtgctgctgctatgcgtcgggagcttctgcctcggcctgctcttcaccgacaggatgtggagcttgccagaagcagatgaggtagcagtactcccaaatttaagaagagaggaagaggctgagcgcaagactggagactgtaatgtaggcaaagttcaaggaaaacacgattacaatgacatgttacgtgtctcagatgctcaccataattcacagactttggataaggcaatagcgaacttggagacagagctctctgcggcaagaactctacaagattctttcctcaatggatctccagtgcaagaagattacaaggcttcagagtctaccggtaggcgcaagtaccttatggtaataggtatcaacactgcttttagcagtcgcaagagaagggattctatccgcaacacctggatgcctacaggggaaataagg

SEQ ID NO: 283867 - DNA, 567 bp, Zea mays
tgtacttggggttggattccagctgtcaggtggagacagccaaatgaacgaactaatttggtatagctggcttggtggggtgattatcggcacaatgataggtgcaaacagtgtcctagaggaacactgcaaagccggacctcgcaatgtcgtcataactggaagcacaagagggttaggaaaagcgcttgcccgtgagtttcttctttctggagaccgtgttgtaattacttcacgaagtcctgaatcagtccttcagactataaaagaacttgaagagaacatagaggaagggttatctgttgccaaaaagaaacagaggaaaattttatcgcatgccaaggttgttggtacagcttgtgatgtctgtaagcctgaagatgtgaaggagttagtgagttttgctattaatgagcttggctcagttgacatttggataaataatgctggcacaaataaaggttttaggccattggtaaccttttcagatgatgacatcactcagatcgtcttaacaaacctagttggttctctactgtgcaccagaagagccatgaatgtcatgca

SEQ ID NO: 283868 - DNA, 465 bp, Zea mays
tcgttctaccaaacactgctgggaagtcaaatatgctattggatgattctcaaaatcaaactcatgatgttgctcgatctcatgccatctctgccgatcctgaagctaccctaaaccccactaggaacacttctggatggctattccctttgtttcccatatttttggtcactggttatctgttgagcttgatatctgcaagcaagtcatgcaggcagtttatgattcagcttattgagccattcacgcgcgacaagaaatcggtggacattagaggcaggtcggagggatctcccaaaagaagaaaaacacggaagaaggatggacttgtcaatagccctgagaccttgacagcatctgacaaggagtgcagtgatactggtgggtcaactgaggcaccaatggaaaattctgcactaaaagatgcccttggtggtcgtcacattggtaaactatatgtctcca

SEQ ID NO: 283869 - DNA, 681 bp, Zea mays
cggacgcgtgggaaagagggagctctagacggggaggctcccaaatcgatattttttcgcatctgtccgctctccgacgcggcggcgaatctgagaacccctcgctgagtggtcggcggcgagtccgtgatggtcggcggccggcgggcgcggacatgcacaaccgctcctcctcctccgccgccgctgcgtcgtcgttgccgctctcccccgccgacggcttcctgcgcgtgaaggacggcgtggacggaatgatcaagtacgtcgccaacgagccctccgtcgggctctacttcgtccagcagcacgcccgggcttccatgcccctcctccttgacgtcaagggtaagctcgtagagaagacgcgcgaggtgacattgcacactgaagacatggaggattctatttgcgctgtgagatccatggctgattttggacttccacttgctgatgacatgatcaaggacataaatagatcactgcaaataatgtcaaagacccagccaaagagagggttgatccaaaaccccagttgggggttccagtcaaggaaaagctcaggaacttgggacgaactgggctctaccaatggaagtagcagcaggaactacctctcttcaatgctcaacacggcgaagcatatggcatcgggtctcaagtggccgcagcctgattttgcaa

SEQ ID NO: 283870 - DNA, 375 bp, Zea mays
tggagctcacggggtgcgtggatctggggtggggcttgagctaccgcgagatccccgagctgtgcggcacgctgccggccctcgacctctgctactccatgagccagcgcttcctggacgagcaccaccaccagcagctgggcaaggcggaggaggcgccgccgctcgctccggcctcgccggcgcagccgcccgccaccaccaactggaagatctccagccctggcgacagccggacgaggtgaaggcgaggctcaagtactgggcgcaggcggtggcgtgcaccgtcaggctctgcagttagctgatcaacgggatggcggtggcgccacccataatcttggcacaagagaccagcacgcaagaaggggaaat

SEQ ID NO: 283871 - DNA, 395 bp, Zea mays
atcctggtgagcgcgccgacagaagctcctgtgagcgctctgacagaagctctcgtgaacgcgccgacagaaggtgctcaatggagcgcaaagacatcaattatagcatggaatccagtgcttctgatagaagctcatctgggccatcagagaagcagctgtatgacaaacaagggaagggtatattccatcctgtttgtggggtcaagactcggacagtcactgcagatgaagctgctgctatagtaatggcagctactcgaggactgggtgctgcaaatgactcacttaacaccatgaaaggaaccaaggacaatgttcgcacccatgttagtaatgatccctcttccagctttggaagtttctcatctttacaggaccgaaatgcactgtcc

SEQ ID NO: 283872 - DNA, 554 bp, Zea mays
acgccctggagttccatttgtacatccacaggaatccatgggaccatttgcacaagttgagatgctgaaggagcacatcttgccctatttgaatgggctctgttgtcgaaggactgatgacgatgatgaaaaattgggattcgcagtgagtgggcgatcagggaggagagcaaagattggggtggtccagtatgtgaacaggcgacagggatgtggccccattgtgcataggatggttgccgggttgaactgaggaggcatgaagaggacgttgtttcttgctttgcctagtgcgggcccggcaccattgttgatcaggtttagaagcagaggcatctctgttgacacaattgatggtcaggtttacaagcagactcatctggtagtcagtgttgtgttgtaaattaatgagtgttattgaattaccgaacctatttcttgtaccatgcatgacatgcaacgacactagttatgatcatgacgaatcatgtaacagacctgtttactgcagtgcagtgtttaatgttagaccgggttatttgcttgtgttcctt

SEQ ID NO: 283873 - DNA, 472 bp, Zea mays
ctcggccctggtgaggggggccgtgcatgcctgcacctgccagtgtgcaatgaacacattacccttcgttttgctggcagaaggtagcaggcattaaagaacccagaggtgtaaggcagagtcagccatccatttgatattgtcagcctgtacacactctcggtgtagttgctccctggtccctgcatactgagatgcaggagggacacttcatactctgtactctaaacagaagcaactcgaggtttattgggcaacccctcttccaatccacaagaagctgggaggtgaagcttgggctgtggggccacctgcatgcccctttcaacttccttctgttgcttgctcctcacaggttgagagcgatcagggaggagagcaaagattggggtggtccagtatgtgaacaggcgacagggatgtggccccattgtgcataggatggttgccgggttgaactgaggaggcatga

SEQ ID NO: 283874 - DNA, 692 bp, Zea mays
gtttagaggcagcgcaaggagcttcgcgcgcgcatcgcggaggtcgccagggaggaggcggagcgcaagcgcgtcctcggtgagcgctccaatgccaggcacaaacaagttatgctccaagcatatgaacagcaatgcgatgaagcacacaaaatatttgctgaataccagcgccggctacatcagttcgttaaccaagcaagggacgtgcgaagatcaagtataggcgtggctggagctacaggtgctcttgtggatatgcaattgcagagtgatagagatgatctttacccatcgactatcaaaagcaatagattgccagaggatcttttagaaactgcaggtgaaaggagcattcggaaggcatgtgaaactcttgctgcggatatgattgaaacaattcgaagttcattcccggcatttgaagggtgtggcattaattcaagttgccaattagatgcagaaaagctgggtattgacttggttggtgaaataccaacatatgttaaacttgttgcattggattccctaaagaatccattcctgcttctgcagtcaatcattacctacacatcacgcatgaaaacacttatacatagagaaactgacaagattgacatacgcgctgatgcagaactactgaggtataaatatgaaaatgagcaggttattgatgcgcttcagctgatgca

SEQ ID NO: 283875 - DNA, 614 bp, Zea mays
gcgacctcggcggcggcgaattcccttactacccggtggacgacgggctggagttcgagatgcgtgggtaccttgacatggcgcaggggatgctcatcgacccgccgcagccggccgctgggcagtcggcggcgtggatcgaggacgagtacgaatgcgaggtcagcctttggagctactgatcgagcgcgtgtggaccggacgagctcaggctttggtaccataccaacaacgaccctgtgtacatacagcttatggtgtgctgatgatgtctgtactgtttccctgctcttctgacgaatcgcaatcgcaatgcagtcagaaggagcagaggagtgtgcttaggttttgagcggctgtctctgcacatttggcgctaacacggccaaggtagccttggcgccagatatggcacttggtgcggacgccctcttataagttacgtaagataagaaccacatggtgtaataaacagcagagagcctgctgagcgtttgaacctgcagcgatgtcaatcaagttgccgtgtgatgtctagtggaatttacctgaactgaaaacatatatgctctatggataaatgtccactgcaagagcaaatatattgattggaa

SEQ ID NO: 283876 - DNA, 590 bp, Zea mays
ctcatctatcaaaatttaccataagatattgcaaataggcatgttcttctgttggaccccatattgggaacaggaaattcagcagttcaggccatctcccttctattgaagaagggagtacaagaagcaaatattatatttcttaatcttatttcagcgccccaaggagtgcatgtggtgtgcaagagattccctagaatgaagatcgttacttcggagattgagtccggtctaaatgatgatttccgtgtcgtacctgggatgggcgacattgggagacagatactccggcacagatgaataccactcatcgacgccatttttctgtgacgataaaaatcgtgtcaggctcttgtgagaagacaacatcaagccatggacgcggcatattctccaattttttagaaacttatatctgcatttcgaactctagaatgcacatataatgatgctttctttaccatacagacagcacagaacacctcttggtataattggacccatgccattctcgtctgtctggaaagccgcgtcatgctcagtagcctctagaaggaacattttttttctttcatgtaataaattagggt

SEQ ID NO: 283877 - DNA, 570 bp, Zea mays
tgtgtacgcgtgggttctgccagatcaactgatatacttctttgggccgaagatgttaaaagctttggatggacaatcgtatttaaaatatccattggtgcaggaattacagatatgtgtatgagtgatgatggaaacttccttgccgctattgtggaaaagcgcttaatgatatggaagtattgttgtgtggacgtacatgagtcttcatgcttttcaaagttagaagagatacaatatgagaatgatgatgacattaaaagaaaaaagggtgtttcactatcaaaacattgtgaaaacataatatcgttgaaatggtcgagcgagcttgacttattgactggttcgtctgtcgggaccatatgtgtccatactcatcctgcactgaaagaaaatgtccatatttctctggatacaccgtttgaggtgctttattttcgctggagctatgtgcatgcacataataaaagtggacctgtgaaatgtgtttcatggattccaagaaaaccttcattgttggcagtagctggtaatgacggggtagtcattgtgtgggaagtggtggatgct

SEQ ID NO: 283878 - DNA, 564 bp, Zea mays
tttgcattgaaaagtctaaaaattgaggcgcttggttgtactgtgaacgagtgcgccctgttaataactacagagaccattttgtcaacattgccagaagaagggctttagaagcaaacaagttagcagctgcacagagagaatcaagcgagaaacaaactaatggtttaacacatgtcgattctgagatgctggatgacaaattagcggctatgcagagggaatcaaacaagatgcaaaatggtggtccagcacatgtcaatactgaaatttcacactgtgggagatgcgatgtgaattctgattcaaagggaggtttttttgctgaccagtttgagaatttggcaaactatcgagcacattatgaatgtactggtcctgagatttggaaacagactaaaggtaacctgcatgccttcgttgcagcagctggtactggcggtacaatttgccggagtctcacgatatcttaaggaaaagaacaggagcatcaaatgttttttaatggaccctcctggatctggtctgttcaataaggttaccagaggggtgatgtacacaaaa

SEQ ID NO: 283879 - DNA, 381 bp, Zea mays
cttacgcgtgggttcgctcccctaggtcgcgagcgagcgacggccgactgcgcgagaccgcgagtgaccgccggtcgagccccgaggccggagcggctcccccgcaggcctgccctcgtctggtcgccgcctcgccgcgcagcaaccccgcgacccgctgcccggccggcccgcgttactgagcagccgtgtccattactgcatttgtagacagcgcagctactggctgacccgactcccttctctcccaattctcagcgggcgatgcaggcgaagaagctgaccctgctgcagacggtggcagctgcgggagtcttctctgccgtctccttttggtatggcttcatgttcggaagggagtccgcgcggcgcgagctttgt

SEQ ID NO: 283880 - DNA, 533 bp, Zea mays
tcgcccacgcgttctttccaagctctgacgccacctccgaatccacgtggccggccagacgatcgtctgtgaccaaccagcgctccaactgtcccggagactcccattgacccgcacgacaagaagatgcaaacgggacctcttgtagggatagctgttggctcaatagctgctgcctcgtgcgttcttttcgcgctggtgttctgcctccacaacgcacggaaaaaacccgatgatgggagcagtgaagcgaaagcgtctagcagggaagtcatggacagtagccatgacaacgctgctgtggcaacttcagacctccaactgatccagcctgctggaaagatgactccggacgacagagcgcatggtccaaacggttgtaccgccaaaaggccaaagcagcaggttactgtgacgacagtgagttcctacacagttgctgctctccaagtcgctacgaacagcttctgccaagactctcttctaggcgagggctcgcttgggcgttgttacaaggctggttttcctacggg

SEQ ID NO: 283881 - DNA, 648 bp, Zea mays
gttggaggccggccgggagcggcggcgaggcgcggagaatccgtcgagagttggggagaagaggaaggctcccgacgacgcggcacagggggccggggaggacgaggaggaggcgtacgacgacgagagcaagctgctcaggaccgtgttcgtggggaacctgccgctgcggaccaagcgcaaggtgctcatcaaggagttcgcggcattcggcgagatcgagtccgtcaggatccgctccgtgccgctggtcgacaccaaactttcgaggcgaggagccgttttacaggggaaggtcaatggattggtcgacaatgtgcatgcctatattgtcttcaaggatgagcagtctgcacgcgctgctttgtctcataatatggcactgttcggcggcaatcacattcgtgttgatatggcatgcccccctcgtaagaaacttcgaggagaagggcctctatatgacagacagaggactgtgtttgttgggaaccttccatttgatgtaaaggatgaagaggtttaccaggcgttctgcagttctagtggatcagaaggtgatgttgaggcaatacgtgttatcagagatcccagttcaagcctagggaagggtattgcatatgctttatttaaaacgagggaagctgtaat

SEQ ID NO: 283882 - DNA, 530 bp, Zea mays
gtgggaaatgaggtgctcggaggccaagatcaaagcttgtatcagccacttgttgatgctgtgaagaatgtgtatgatggtgctcatgaggctccacttggagagaaaaattgagcttttcacacctcattcggaagctgtttttgctacttcttatccaccctccgcatgtgtgttcaaggaggaactcatgccatacatgaaacctcttctcgacttctttgcaatgattggctcacctttctatgtcaacgcatacccctttttggcttacataagtgatcctgaacatatcgatatcaattatgctctctttaaacccaacaaaggaataattgatccaaataatagcctgcactatgacaatatgtttgatgctcaggtagatgcagcttatgctgctctacatgctgctggttatgataacatggaggttcgggtggcagagactggttgggcttctagtggggatcaaaatgaagcaagagcttcatctgagaatgcaggacgtacaatttcatccttcgaaa

SEQ ID NO: 283883 - DNA, 553 bp, Zea mays
ttctcgctttcgcccgcgtcgaggcgctgtccgcctacctgtggaaggcgctcgccgacgtcgtggccgcgtgcccccggagcaacaaggagcgctgccgcatgggttggtgggtcagcgcgcggcgccgtgtcacggcgctaagctcgtcgctttgatgcccggctacctggggaacgtgacgacctacgccctgggcgacgcgccggcggaggagatcgtgcggaagcctctggcggaggtggcggccatggtgcgggacccatcacgtcggtggactacgacgagtacctccaggagatggtggactgggtggaggtgcacaagacggaaggcctgatggaggcggccgtcatcggagtcggcgcgcccacgctgaaccagtcggtgatgaccacgttcccgctcgacaccgacttcggcttcggccaggctactctggcaaccacggtctctgactatggcaggctttgctccgctttcctttcggtcggagcgcggccgggaggcgacggctcctggctcgtcaccgcctacatatggccgcagctgg

SEQ ID NO: 283884 - DNA, 534 bp, Zea mays
tttccgtttcccacaaaaccgtcagttgtcttttcccctgtaaatcgcaaattcgtcttccctgcccatctatcgcttggacacctctgcaagggagcacatggctctcgagaaggccaaggagatcatcgcgtcctccccggtcgacctagctctccgaaaggccaaggagaccgtcgcctcccaccccgtcgtcgtcttcagcaaaacttactgtcctttctgcacccgagtgaaacaattgctagcaaagttgggggcaagttacaaggctattgagttggatgtggaaagtgatggcgctgagctgcagtcagctctcgctgaatggactggccagagaactgttcccaatgtcttcgtgaaaggggagcggattggtggctgtgacgcaaccatggcgatgcacgacggtgggaagctggtgcctctgctcaccgaggctggagcaattgtcactgccagggccactgcaactactaccactccgtctttgtagacatgttttacagcgctgttccgctcgcttcgtgg

SEQ ID NO: 283885 - DNA, 378 bp, Zea mays
tcaaggagaagaaacgagataaggtcaagttttttgtcaatgctcgccggccccccgggtgtgacacatgtcttaatcctctcaaaccctcaaagcctgccacatttgcgctttgccaagtcaccgcagggcccaacattcacatttcagatagaggagtactcacttgcggcggacattgcaaactctcagaagcgcccaaggtccccaccagggatattcaaaaactcaccactgggtgtacttggcgggttgacaggtctcggcaaccctttcaggagtttggtcgaatactcccaacatatgttgccttccggtgacccaaccactgtgaagctggtaacatgccacaggattttgttgttaaaccatgataaa

SEQ ID NO: 283886 - DNA, 496 bp, Zea mays
tttttacggttcggagcatgagcccgaagacgagcaggagtagaaggtcgcaccaggtctggccgggccggaagcggcagaggaggacgaaagcttcgacttggggtggttcgaccagtacccgacgtggcaccgttcggcgctgtacgcgccgctgctgccgccggaggagtgggagcgggagctgcagggggaagacgccctgttcgcggggctcggcgagctgcccgagtgcgccgtcgtgttcggccgccgccgcgagctcagcctggccgctaccgcgccgtgctcctgatggtccttaaagtcttttttacactagtagctctgatcgctgcacggggcatctgttcaaggccgtctgctgcctaagctttctgtccccgtgtccgtgttgattgggtacgcgcgttcgccgtccaaggttcgtttgtcccgtttgcgatgtggttccagccagaaagcagcgcaaggtttggcctttgtgatcccaacc

SEQ ID NO: 283887 - DNA, 442 bp, Zea mays
ttctacctttccatgaggaggggcaacgtctacgagtacccaattgggaagctgcgcgtccagaccgtcgctatcatcgcattcggcgccatcatggcagctgtaggtttccaggtcttggtccaggccgtcgaacagctggtggagaacaaacctggcgagaagatggcatcggagcagctgatatggttgtactccatcatgctttcggcaaccgccgtgaaactggctctctggctcttctgcaagagttcagggaacagtattgtccgggcttatgcgaaggaccactacttcgatgtgataaccaatgtcgtcggtctggtggctgctgttcttggggacatattcttgtggaggattgaccccgcggtggctgtcatacttgctgtatataccatcgtcaactggggcaaaactgtattggaaaatgcagctaccc

SEQ ID NO: 283888 - DNA, 521 bp, Zea mays
ccacgcgttctctttggatgagatgcgcgagctgtatccttacctggttgatgaggccacgatccttgtcgaaccggcggtgctggagagagtgctcctgaacattgaagacatggacgcccaggtgttggacaagaagatcaggaaggcgaggaagcagctcgccgatgccatcacggaatcggcaaggattaacgacatggaagtgcctacaatatttgtgtttacatccagcaagcttcaaccagaaaagttaagagtggaaaatgagaataatcttttggttgatcatttggagaaaatggatgatgtggatatttgtgctaaacaacgattggcaagagtggaacgtgaagtaaaggagttgagacagactgtaatagcttaccagtctcaggcaaagggtataatatgtgaatcagccaagggtggccttcaatcaattgtagctgaaaatcagactccagccaatatactacaaaagaagacagaagtaccaaatgacttgatccataaaaaga

SEQ ID NO: 283889 - DNA, 451 bp, Zea mays
atgagttccctttcaagcctgaggacttcagccgcttcgacgaatcatcagatactctgttctactcggttccacgttttgtcactcacattgatgaccaagcaatccaagctctcacagagtactattctgaagttcttcctccaagtaatactcctggggtggccattctggacatgtgcagcagctgggtcagccattatcctcccggttacagacaagagaagatcgtggggatgggtatgaatgaagatgaactgaaaaagaactcggtactgactcagtatgtcgtgcaagacctcaatgtgaacccaaagctttctttcgaagataacacttttgatgttatcaccaatgtggttagtgtagattaccttacaaagccaatagatgtttttaaggagatgcgacgaatactcaagccaagcggccttgccataatgagcttttc

SEQ ID NO: 283890 - DNA, 585 bp, Zea mays
acctcgtcgaccacgtcctcatcgtcaccgtcgacgccggctccttcagcggctgcaaggccgtgcacccgcactgctacctcctcgaggtcaagtccatggacatgaacagggccaagacgttcgggaccccggagtacgtggagatgatctggctcaagctctccatccagcagcgcgtcctggagctcggctacaacttcctcttcacggacgccgacatactgtggcttcgcaacccgttccagcgcatctccgtctacgccgacatgagctgctcggtggacaactccaagatggcgccggcgctcctggactgcgagaacaacgtcgggttctactacatgaagtcgacgaaccggagcgtcgagatggtcaggtactggcgggcggcgagggcgaggttcgacgggaacctgatcgagcaggtggtgttcaacaagatcaagtacgagctcatcagcaggctcggggccaggatccagccgctggagacggagtacatcagcgggttctgcgactttcaggatcatttcgacagggtctgcaccgtgcacgccaactgctgcatggggcttgagaaca

SEQ ID NO: 283891 - DNA, 503 bp, Zea mays
ctcaaagcatcctactgccgctcaaagtagcttagcttaggcctcagggcagtccagtccacagggccttcttcaagctgatatatagcagtaccgtccatgggcaactgcacggcgtcgcagcgcgcagcggagtcgtgggccgacgacggcgagtgggaggaggcggcgtcatcgtcgccgttgtcgtcggagggcgaccaccaccaccaccaccaccatcatcatcaccgcgacgagaggagagaggagcaccacgactccgaggtgaccatcaggatcaccaagaggcagctgcacgagctgatggagaagaacggcggcggcggcggccacgggttaccgctaccggggcgacggcggtcgtccgcggagcagctgctggccgacatcatggactccggcgaggtgcaccaccgtgaccaccactggcactggaagcccgcgcttgagagcattcccgagaccggcgagtcatggactgtcatgcatggaccttcttg

SEQ ID NO: 283892 - DNA, 495 bp, Zea mays
cgacgacgtggtgcccggcctggccacgacgccgtgggagttcgaggacgacaaccccttcctcgcctaccagaggaacaacgctctgttcgatcaccagctggaggcggggaacaacgtcggcagggtcgagctgttctgaggcgccgagatgatctacttcttcctcgatcgtcattagattagatgtagttaattaatacgtcatccccggcctacgatcgagcagttcgcgttgcacagaccagagcactcacggccgttgaaaataagcaagacaaagggatgaaagtggttgcacccggtttcttggttttctaaaacctttggccgggccgaccacaacttgcaaaggaacagttggagagaaaaaaaaaatgttcgttagcaatctcccagtgctgtttggcattggagaacccttccgtggattgtttattggacaatgcaagaaccctctacgtaccttgaaaatgggaataataaagccaggcc

SEQ ID NO: 283893 - DNA, 435 bp, Zea mays
atcttcctgtagtgcttgaagagctgcatggaaataatcactttcaggaatcacatggggaatggagaagagatgatcgtcctgttgaagtctatgatgagtggcagagtgatgatcatctccctgaagtaaatgaagagtggcataatgatgatgagtctaatgatactgcagacaattggcatgataataattctgaccaaccaattgatcatgatgctgctcttattagaagagctaatactttcatccctggagatgatgataatgtgtacagcacagaattgagggaacttctaagcagaaggagcgtttctaatcttcttcacagtgcttttcgtgaaaacttggatcggcttatcccgtcatatgtggaacggcaaggtcgtggtcctctcccttgggatctggaaggaacaacccctgcccctccat

SEQ ID NO: 283894 - DNA, 477 bp, Zea mays
ctattctgggtaaaaaggttggtgtaccagtttactcagaaggaactgaagcaaaaccttcacaaatagccaaaaacggtttgaaggatgcaaaagtcaataaggctgatgtaattatagtggacacggctggaagactgcaggtagataaagcaatgatgaatgagttgaaagaagtaaaaaaagcagtgaatcctacagaagttcttcttgtggttgatgccatgactggccaagaagctgcagggttggtcagctccttcaatgatgagattggtataactggtgctatactgacaaaactggatggtgactcaagaggtggagcagcactgagtgttaaagaggtgtctggaaagccaattaaatttgtaggacagggagagcgtatggaaatcttgagcctttttacccaagatcgtatggcacaacgtatcctgggaatggggagatgtactttcatttggttgaaaaagc

SEQ ID NO: 283895 - DNA, 477 bp, Zea mays
ttttgtgtccatgcgcagcctgtgctcggcgttccggtttctggccatgtcggtggcatactacatgaacacgctggtggtcgtattggtggcggacgagaccacggcctggggcggctagggctggcttcccgttgacctcaacgacggccacctggatctactacttctggctgtggacggggatcagtgtggtgaactacgtcgtgtacacggcatttgcaaggcgttatacggtcaagaaggttgtcggtcagtaaggatccagactatctgtatgatcaattactgtatcttattgtattttgcagtgtacactactccggaaccgagacttttggtgttcatttgaatgcatggtcctctgtacaagcctactagcgtactgtcttgtcttacgatttgtataacattggaaaaggatttgtatgcatgtgtagattgggatgtagtgttagtgccaagaaatcaccgttt

SEQ ID NO: 283896 - DNA, 388 bp, Zea mays
gcttcgtccaggcgtaccggcttgagggcggggccgcgctcaaccggctccggcagtcggtcgtcccggacaccgtcgagctccgcgccgcgtgcgccttatccgcgccggccgccaccgccgcctccgcgtcagccatcgcgcactgcgtgcagaccttcatcaccgccatggacgccgccaagctcaacatgcttgccaacgaccaggtccgccccctgctgcaggacgtctgcgacatccatggccaggctcggcgccctgctgccgcccgactttgaggggaaggtcaaggtttccgagtggcttggcaagctgcataagatgggggccgcggatgagctcaccgagcagcaggccaggcagctcaacttcgacctcgattcgg

SEQ ID NO: 283897 - DNA, 549 bp, Zea mays
ctttatcacatgatgctcctcagctttattggctgtcaattgtttgtctggcgtttgatgttttcttggtggtcttctgtgttgccttggcttgtgtgattggaatcgctgtttgttgctgccttccctgcattattgctatcttatatgctgtaactgatcagcaggagggagcatctgaagatgacataaacaacctatccaaattcaaatttcagacaatgagtgatgcagacaagctagctgctggcattgcagcacctgtgggtggagtgatgacagagtgtggtaccaatcctcctgtcgaacatattctctcagctgaggatgcagagcgctgtatctgcctatgcccgtatgaagatggcgtggaactacgtgagctcccttgcaaccaccattttcactgcagctgcattgacaagtggcttcacataaatgctacatgcccattgtgcaagttcgacatcatcaagagccaccgtgacctagaagaggtctagggcactaaggaaaaaaccgcccaaaacttttcgaatgtctttgctg

SEQ ID NO: 283898 - DNA, 313 bp, Zea mays
tcggtcggaggcggaacgatcagcggctgggggggggctgtggaagggcgctgtggctcgccgccttcgccagcgccaagtcccggaccagcggctacaacccggccctcatcaagaagcaaaaggagttctacaagaatgctaaattaattagcaagtacaaaaagacaaagaagcaacaaagtcagtcaaacaaccatccagaaattccagtccatgaggatggtggtgacactgcccgatatgtgccaaaaccggatcacaaagggaagaagcccactgggcctaggttgaaggaagagtatgagaaaaa

SEQ ID NO: 283899 - DNA, 777 bp, Zea mays
taactgcagggctctccagtctctcccccaaggactgcatcgccttccttctctccatgaaataactatccttgggcctcaaaacatcgtatcactgcctaaggagggcctccccgattcactacgactactacatataactgattgctgtgccgagatttatgaggcatgccagcggttgaagggaacaaggccagatatacgtgtagctgcctccaaacctcgtgtgcaaaattgaatacctgcttctgcatgtctttcgcacagtcagctctgcttcagcatgcctttcactctacaggactttttcattagtgctgcacatcattcaagaccataaatgagaacaagcttgggttgtggaaaatttcagaaagtaaaggcctataactctcgttgatcacttcagaaccactggaatcaagacatatagcaccacaagccatacctttgattattttaaaactactgtacctctttgattcttttagtcagcttagtggatagaagaccaaaaatgctttggaaatttgcatcctactgatacattgctgcatgagaaattaaggctggcccaggaaggctcaacatatgcttgtgaataaagcttctagtgaaagatagtagattttcatcagttcactaccacgatgttgtcgcgatggatgagaacggcatggaagacagtgacctagaagaagacagcaacctacatctaagttgaaaatgtgttgcccgtggttaaagaaaatcctgcagatgaacagcgccaccctc

SEQ ID NO: 283900 - DNA, 891 bp, Zea mays
gcactacgccgacatgctcgccaccttcgacaacccgctcaaccacctcgaccgctttccctacttcagcaactacatcgacctgagcaagctggagttcgacctcctggtccgctacatcccagggctcgcgccttcccgtgtcgccttcgtcgggtccggccccttgccgttcagctcgctcgtgctcgccgcacaccacctgcccaacacactgttcgacaactacgatcggtgcgccgccgccaacgaccgtgcgcggaagctggtccgtgcggacaaggacctgaacgcgcgcatgtccttccacacggtcgacgtcgccaacctcacggacgagctccccaagtacgacgtggtcttcctggccgcgctagtaggcatggcggctgaggacaaggccaaggtggttgcgcatcttggcaggcacatggcggatggagcggctctcgtcgtgcgcacgcccacggggctcgcggcttcctctacccgatcgtcgatcctgaggacattcgtcgcggtgggttcgacgtgcttgccgtgtaccacccggacaacgaggtcatcaactccgtcatcatcgcgcgtaagatggacgcccacaccaaggggcttcagaatggacacgcgcatgcacgcggcacggtgccgatagtgagcccgccgtgcaagtgctgcaagatggaggccaacgcgctccagaagagagaggagatggcgaccacgacagagctgtccatctgatgcaaggaacttttgagcacctatgcgtgcgtggtaacaataatagttacaaatcgctgcttctgaatttctcatgcacttctttattcgatgctatgcattgtgaagtggttaataagaaatgtgtcttcctatgtgatgatatat

SEQ ID NO: 283901 - DNA, 780 bp, Zea mays
ggttagtttcagcaggaaaaattgatggcctagtgtctggtatcttcacaggaggtgccatcaccgacactgggccatacatgatagagcaaactgacaatgtcaagctctatcgcatgtacttcagagaagagtgctgtttcgaattgaggaaaacatgtaccacagacgactgagggaattgttagctggctagatggcatgggggctgaatgcagagccaagggggatagccatcttggcaggaacatagaagactgagcggctctcgtcgtgcgcagcgcccacgggaggtcgcggcttcctctacccgatcggggatccttaggacattcgtcgcggtgggttcgacgtgcttgccgtgtaccacccggacaacgaggtcatcaactccgtcatcatcgcgcgtaaaatggacgcccacaccaaggggcttcagaatggacacgcgcatgcacgcggcacggtgccgatagtgagcccgccgtgcaagtgctgcaagatggaggccaacgcgctccagaagagagaggagatggcgaccacgacagagttgtccatctgatgcaaggaacttttgagcacctatgcgtgcgtggctgctgctgaatttctcatgcacttctttatttgatgctatgcattgtgaagtgtttaataagaatgtgttcttcctatgtaatgatatatgccaagttgctagcacttttacgtgtgatgtgacggacatcgtgtgaacagtttgatggatgggttggtttatcgtttctcactcaaaaa

SEQ ID NO: 283902 - DNA, 523 bp, Zea mays
taaagataagtgaattggattattacccttgttaccgcactgcaagtgggtacagtatcacctttggtctccctaaaattgcaaaaaaaaaaggtcaacccagtgtcttatctgtttcttcaaacatagtgagtagatctgtcctggcatcaagatcatcacctggccgaccattgcacgaagacagcattactcatactgacatgtaagcatatatgttgtttatgaaattctttatatgataaatgcatcctagataaattgaatcctgtgtaaaggatgtttctgtggattgtcatagacggacaagaatttatggacatatggttaaagtgttatcggaaaagccttaggcaagtagcagtttaaattataaatactagcaactgcataaatagcgtgggtagtaaggcttttttttatcatggtgacatttgagattttttatttgaatatttttgcaaatagtttctcttacatctatttttttcaaatatctttgaaaaatactcccgtttacttt

SEQ ID NO: 283903 - DNA, 738 bp, Zea mays
aaattgcctccagactacaaagaattcctctcactcgtgaggaggaagaaccttacaagggatgatgaattcttaattgtaaacaatgctgccctactacccatgaaaaaccgcactgaggtattcctgatgctacacgatagaattgtcaattttcttggtcagaaaaatcgagcaaagaagaagaaaatactctccaatctcccttacaagaacaactggttggatactgccacggcaaatgcaaagatcaaccagtgggttgtaaatgttcaaaatgagtacaaaaggactacaatcgatctactgcggctcaacagaaatgtaagaagccacttgcatcagtacaaccacgaagatgatattgaggaaattctgtattgtgaatggcccatgctgctcattgtcatggagaagatgttgcacttggaaggtgagctccaagacactggcatccataacaagttcggctagggttctactgcaaaacagatgaaagatgtattctgcatttccatgggttggtaagctactgttcttcgatcttcattgagaaagtttatcagttcacggtgatgaagtgtaatgctacctgtagttgttttctctggacacgtcaacttgaaggtaaagctggtcagcttttgtaaagcatgttgtaagatatcacattacaaactctaaaattgtgctgcaaaattgaatggtattgagtttgcattcatcctttaatttctg

SEQ ID NO: 283904 - DNA, 714 bp, Zea mays
cggactcgtgggcggacgcgtggggttgaggttagggagcatgactagctggtgttgcgggcaagcttaatgaagggtatagatgaagatctatcaaaggatttccgtgaacggtcatatgcacaagcccagcatatttttgttgcacggagaagaaatttgaagttttctgttggtaccatccatggtgcagtccttgctttgacagcttcggtcctttctgttccatacgacatgcctagctggcttccttctaatgtctcgctacttgctcgcttcatccgggagcctccccccataagatcaacagtcacgaaagctgttgcagaatttaagcgcacccatgctgacacatggagcatccagaaggacgcattcactgaagacgaactggaggttctccgtgatacatcttcctcctcgtcgtacttcgcttagattaaaatttcaaaggccataggatattctctggtactggtgttgtgtatatgaatttataactgttgaagtgtcggtgtttttcataaagtatatccttgtacgtacctagttttatttcatcaacagatgccttcgtacaactgagatgaagttatgcagtctactgtataccgtctggacatagcggaagcattatggcatgtgggatccttgcgtgggctgagaaattgttaacatccaaaaaacaaaaaaacaaaaactgagactattctc

SEQ ID NO: 283905 - DNA, 731 bp, Zea mays
gacactttgaagcggcaccgcgcgccgtgcggtactccgcgtcatccgcgcttcattttctaccctcccctccactaccgccgactccgtggcgacatcctgagtcggagcgccgtgctcgtccggattcgagacaccgagcacaacgcgagctctttctgtagtgttcggagctgaaaatgagtgaggtgaataatactcagctggaccttgagaaaggattttctcaagtgtctcatgataatgattcgagtagccctgtaacggtgcacaagatgaaagttgagacagaaggtggaagtgaaatcgaatcacccactccagaaaaacgtgaatctagaagcaaaggggtcgttgtgagttcactggcaaggaatttgcttgcagagaggtacaaagacagacttgcaaatcagctggtggaagatgagagtgagacagatgatgaagactataatgaaagtgtttcgcctagtggtagccgatctctttttttagaaagcattgaacttcttgagaaacacaaggatttgctgaatcttttcaatagaatggagagttctataagattgcttcacctaccgaagaagatggctacatttaataatattgccacccaggtggggatactcacaaaaaggtggtaacgatgatgaaagtatctatatgggttattaggtttgctatttgcttatttggtgcagttggatgatagtctttctgcattacag

SEQ ID NO: 283906 - DNA, 287 bp, Zea mays
catacgctcgagtgccattcgccgtgcggacctccgggccctcccagttttccccctctccctgccagtaccggcgccgctggccgactcccgtggcgacaacctgagaccggagcgccataatcctccggattcgagacaccgagcgcaccgcgaactttatctgctgtgtttggagctgaaaatgagtgaggcgaatactactcagcttgaccttgagaaaggattttctcaagtgtctaatgataatgattcgagtagccctgcgaccatgcacaagatgaaag

SEQ ID NO: 283907 - DNA, 562 bp, Zea mays
tggatacctctgatacttgtattgaagatggtgaactctgtgatacttcgtcagtgaagaaaaggatggacaaagtggcaggagcaaatgggttggaaggggtctcgatagagtgtgctaatttgttgaataatggcattgatgttttcatgaagcagttaattggatcttgcattgaattagttagagcaaggtctcgacatggcaaactaaggcatgagacattgaagcagcagctgtgccgaaagctaataaatggtgtatcagtgcataaccatgttcctgggcagagttctgttatacctccagagacaaattccatctccatgcaggacttaaaggcagtaatagagttaaacccttgtttgcttgggattaatgcatcactgctacacgaaaagatcaattcatatgactagtaggatggagctagttgtattcatctcgtcacaagatcctatgatcttgatggtctgtcttgtttcatggctgttgtaatcaagccataagtttattgatgggtgcggtgaaggcaagcgcattctgtgcagtaccctgattg

SEQ ID NO: 283908 - DNA, 590 bp, Zea mays
actgaccggagcttagctgggtttcacattccatcggatcgacctagcctcggactcggagaacatgggaggtggaagggacaatcatcatgttgataaaggatgttatcctccaactgtctatcctccagtacattcaactggatcatatgcatttgcgcctccagttgcatatccatattcgtatgcacaacatggatctatggctccacccccattaggatcatatccatatccttcacctatgtactcttcacatagtggttacccaccatctggatatccaacatacaatcaaagtgtttacccatcaatgggtggctatcctggtgctagtttgcatgctactcaacatcatggtaatggatataacatgggggcaacactcattgggggagcagcagccgcagccgccgctacctatggtgtgcatcacttaacccatggccatcaccctcacaatccccatttagggccattttggccaggttaaacatcattttaatggacactatggcaagttaaagcatggaaaatttgggaaacacaatgggctaggaggaaaacatggccttctagggtggaagcat

SEQ ID NO: 283909 - DNA, 710 bp, Zea mays
ctgctttataaaagcaaaatcattacgggtgcttcagaatgtctttgacaatgcacgggcaagagaaagggaacgggaaatgctttatcctgatgcctgtggtgcaggtggcagaggatggatcagccaagggatggctaactataggggtcatggaataagagaaatgtgtgctctacacactgcccacctttcatgtgctacactggtggatttctggtcagcgcttggtgaagaaactaggtcatctcttctgcggatgaaggaggaggatttcattgaaaaacttatgtacaggtttgatagcaagagattttgccgagagtgtcgaaggaacgttatccgcgaattcaaggagctgaaggaactaaagcgcatgcgaagggaacctcactgcaccagttggttttgtgttgcagatactgcgtttcagtgtgaggtgtttgaggatgctgtcatagttgattggcgccagtgtttatcagagccagatgaatcttatgaccactttgaatgggctattgggacagatgaaggagaatccgatatttttggctctgaaaatgttggaatgaatgcacaagtccacagaaatggaatcgatcttgatcagtttgaggactacttcataacgctgcgagcttggaggcttgatggccagttcacagagctgtgtgtaaaagcacatgcattgagggtcaatcatgtgt

SEQ ID NO: 283910 - DNA, 613 bp, Zea mays
cggctcgagcccggcgtggttctacctccacgtcacctgccagctgatcggctacggcgtcggcgtctccggctgggccaccggcatgaagctcggcaaggagtccaggggcgtcacctacaccgaccaccgcaacatcggcatcgcagtcttcgctctcggcacccttcaagttctggcgctgttcctgcggccgaagaaggagcacaagttccgcgtgtactggaacacgtaccaccactcggtggggtacgccgtcatcgtgctgggcgtcgtgaacatcttcaagggcatgagcatcctgggcgtggagcagcggtggaggaccgcctacatcgccgccgtctgcgtgctgctcgtcgccgccgcggcgctggaggccgtcacgtggggccgtcgtcctcaggcggcgcaaggccgacggcaagaccttcagcagcgcacccaacggccacctgccgcattccgtctccgtgtgagtgggctctcgattgtatttaccggcttgttatcgttagagtttgctggggttctggcctgccggcttgtattgtatgtccgttttggacggtcctctattgctctgcatacgtacatgcatacatgggcattt

SEQ ID NO: 283911 - DNA, 660 bp, Zea mays
ctccgctgcgcatgtgcggttggccatcacaggccaaggacccctcttcctcttcccttttacccatcaccgcccccctcttcccttcttcccccactgtcgccgctcctcgtcttccactctctccactttgctgcttcttctcccttattaatgctcgtgggctcctatgatccgccctccgccgcgggtttcttgatccatccccggcccaaggaagcggaccccggcgaacactcctgacagattcgcccgtccgccgctccctcgattcggtcctccccgtcagcggcaggtgtttaggacctctgcagcatagcatctggtccgtccctggagatgtccggcgtacaggagcagttcgagatcaagttccggctgccggacggcaccgacatcggacccaggcggttcccgccggcgtccaccgtcgccacgctcaaggagaccatcatcgcccagtggcccaaagataaggaaaaaggtcctaggactgtgaatgatcttaagcttattaatgctgggaagatactggagaacaacaaaccctatcagaatgcaaaagccccaattgcgacttctctgcgatgacacaagcatgtcgtattcgccaccgcctttaagcaacagtctgttaaaagagccaaaagaagcgaaaat

SEQ ID NO: 283912 - DNA, 566 bp, Zea mays
tatggacaagcccaagaacaagttcctcgccttcgtcacacccaagaaggatcatgaagcttactgaagtgggttgcagtgatcccattcctcgaccatgtcccggcagcctgtagctgtagtgcactccactagatttctgttgtgtttgttcttgtctcgaaatagagcccgttcgatgtgtgtaagaccattctatatgtgtgacgtgtgagcatcaactctaacatggaatggagacaagagccaactttcggtgccgatgatgatgtgaatgtgtgaaatttatgtcattatacagtgttctaggcagacttttcactccgaataatttgtctgccttctctctctctctctctctgaaaacggctgtgtttttgttgctaggtccgaaatcttatgattaggtgcaaatttggaggggagtcattaaaacatcaattaatattggttcctaatggcctgtctccatgggccaaaaattagcccaaccctgggggccatttcataaccagttgtagtttgaatatacacacccccgtatgtacaatgagtattagttaggt

SEQ ID NO: 283913 - DNA, 589 bp, Zea mays
cgtcgacctgtacatcgaccagggcggcgtcgacggccactacgacgagctggccaggcgcctctacgcctacaacaggagctaccgcggcaggctcggggtgacgctgacggccacggtgcggtgcgcgtacccggacccgcgcgcgcaggcggcgctcgccacggggctcgtctcccgcgtccacgtccgcctgtacggcgacctcaagtgcacctggtccgaccgggaggcgtgggagaagtgggccgcggcgtacccggccagccgcgtgttcgtcggcgtcgtggcgtcgcccgaggcggacaaggacgcgtacatgttccagaaggacctctactacaacgtgctgcagttcgcccagaaggcgcccaactacggtggcctcatgatatgggataggtactacgacaagatgaaccactacatcagcagcagctaataattaagcttcccatccacatccacatccacatccacccgggttatcacctaataataagcttattggaattttcttcttcttaactttataatacactgtaatgtaataatgtgatgatctgatgatccacaacggcataaaatg

SEQ ID NO: 283914 - DNA, 490 bp, Zea mays
cattttctcagcaaaaggtctagcatacctccatgaaggtgctgttccaccaatcatacacagagatttcaaatcaaccattatccttttggatgaaagtctcaatgctaaggttgccgattttggtctttcaaaaccttgtgtctgacacacaaaagggtcattgtttctacccaagtgaagggaacattgggctatttggatcctgagtattacatgacgcaacagctctctgagaagagtgatgtctacagctttggagttgtcctgctagaactagtaactgctagccagcccatagagaaaggcaggtatattgtccgtgagatcaggacagcaatagatcaatatgatcaagaatactatggcttgaagggcctaatcgatccaaaaattagggattcagctaaattaattggcttcaggtgatttatacagttggctatggaatgtgtggaagagtcttgttgtgaccgcccaacaatgaatg

SEQ ID NO: 283915 - DNA, 481 bp, Zea mays
catcgactcgtcgtcggacgacgacgtcgagctcggcggctgctgctgctcctccaccaccaaaggctgtcgcggtggcgggagcaaaggacggaccggcgccgtggccgacggcgtggctccatggacgacagggacgtcgctacaacgccattctagctagctagctagcttcgggttcctttatttacacgtaaggtcgtcgtagctgtgtgcgtactactagtttacatatatagctagtagagtctactgcacgtcctgtctttcctttttttttcttttcctcgatcccgcctgtttttaattacttccctttggctggcctggttttgtttaaaatagccggcgagtttggaatagcgcggcgattttttgaggcataactaggctctcttgattagtacttagcttcgctccttgcttggacacaagagatgtaaataccagaaagctgctagcactgtacattactgcctta

SEQ ID NO: 283916 - DNA, 504 bp, Zea mays
cgcgccgtggctgctgcactggtggatgagccagccgtggctgcccacctccaccgtcgtcgacggctccgcgcccttccccaacgcgctggacgagaagaaccgcgtcatggcgctctccaacggcatgttccactcgagggcgaggctggcgacgcagcagggcgtacaggagtccttctaccgcgacatggcggtcatgttcgggaggtggacggacttcgagccgacggacctcgagaagccgccgtttccggtgcacctgttccagggtgacgaggacggcgtcgtgcccgtgcagctgcagcggcacatatgcaataagctcggctgggtcagctaccacgagctccccggagctgggcacttcttgtcagcggtgccaggactcggcgacaggatcctcagcacgctcctgtcctcgccggcgtcggcgtgactgatccacgactcgcacctagcaagtactagactactagtacatgactgatgttgctgtagcta

SEQ ID NO: 283917 - DNA, 546 bp, Zea mays
ggcattgttgcaggctttcatgaatgtaactaaactgacaaacaatttgcccggatggacaagtgatttctgttcgaacggagacagagggtggagaagaaacactcgatgaataggtataacacataccactgctgaacttggttccctctgcagcaatcccacgagtttagccgtgaaccagtggtgctatctccccctacgatcaaagtaccggtggatctgtggcgtgttagtttcagtaggttagggatctgacatgcaagaacgccgagacatcgttcctaagacggctgcgatatggagcggcgttcattttaatcgtcaataatatttctgagaagcattgtctttgtgtagaagggaaggaaagaaggatgaaagtgatattggggactggctgtaaagtgtaaatacactaaaagctccctcctgtggaattactgcttgtaacattgtatacactgactgattaacctagtaaaaaacttatatgtttcaggcctatgctgtatgatatgcgacagcatgatgttctggtgataa

SEQ ID NO: 283918 - DNA, 532 bp, Zea mays
gaacgagaagctccctcagagcgtggtcgatctactgagagctcatgttatcactctccaccattatctgatgttgtttatcatgctgggtttctcagttctgttcgactgcatcaaagctcctggtcttggtattgccacaagatacatgttcactatggcaattggtcgtgtacttcggacgataactttcatcgctaccattcttccatccgcaaggccttggtgcgctgtagcccgttatcagatacctcaacatcctcatccttgggcacagaaatattatgttccgtatgcttctgactcgaatgctattcgcagagtcataacacaggatatggcatatgctgctgttcaagcttacccagatgaatataagcccgattggggacgtatgagcttccttgtagacattttgagaccaactcctggagaagggccttcgtggtaccatcttctgaagaagctagtggcggctgcaatgaccttatgtacagtggacatatgcttgttgctgtcctgactgcaatgg

SEQ ID NO: 283919 - DNA, 569 bp, Zea mays
aactagaggttgagaagcgtctgaggaggcattctgaggacctactcaggaagttgggcatggagttgtctgaaataaagtcagcgtttctcaagtcagtcaaggaccttgagaaggagaagaaaggaaatcgcctcttagaagatctttgtgaccagtttgcaatgggcatcaggaattacgaagaggaactcagagtggtaaagcaaagaaatgtcaagaattatgagctcaaatttgataattcggtgctccatatgtcagaactatggcttgatgaacgaatgcaaatgcaaaatacagatgtcaatggggaattggctcataaaaccacaataacagaaaggctcagcggtgaaatacaggcctttcttctttctaaaaaagcaggtagctctatgaataatgaaaaacatatgaatgataatactagattacgacgtcaatcacttgagtctgtccatttgaatggagccaccagtgctccccagtttgctgaagatgatgacgactctattgctagtgatttgaattgctttgaactgaatatgcacgggcatatgggatcc

SEQ ID NO: 283920 - DNA, 722 bp, Zea mays
ctgtgatcctagggattcaggatgaaagatattggcccttgatgtctccattaccatcatacggctatgggagagagcacaagggacctcgatatgggagccttatacacggccaagacctgaagcatgtgactataacaggtcataatggtaccataaatggacaaggtcaaagttggtgggtaaaatttcggagaaagctccttaatcacacaaggggtcctctggtgcagctcatgcggtcaagtaacattatcatttctaatatcactcttcgtgattctcccttctggactcttcacacgtacgactgcaagaatgttactatctcagaaaccaccatcttggctccaattgctggagctccaaatactgatgggatagatccagattcttgtgaaaatgtggtgataaaaaattgctacatttctgttggtgatgatgggatagccataaagagtggttgggaccaatatggaattgcttatggccgtccatcagctaatattactatccagaatgtcgtaatccgctctatggtcagtgctggagtatcgattggaagcgagatgtctggtggtgtctcggatgttttggtagagaatgttcatgtctgggattcacggcgaggcgtgaggataaagactgcgcctggaagaggggcctatgtaaccaatgtcgtgtaccagggcataacctttgaaaacgtacgtgtcggtata

SEQ ID NO: 283921 - DNA, 432 bp, Zea mays
gttgatctcacagtttgcacaaaatttgcatgacttacttttggagagtggtgcattgctaccctcggatttattatctgatcaaaataatcatgacattcacgagtaagagagtacaggatggttattagttgctcaatcaacacaaaatttgccaaacgcttttgtagctaaagattcgtcatcgcctgatgaagatgaacagccccgtgcagaaaatacagatgcagccatcagagatttggatttgcatggtcatactgcttgtgtttatttccaatgaggatctaaatggttggctgaaggctctttggttgaacatgtcaccgaagtagcactggataatttggacatcgttgagattggtctagtgtaaaaacgatccagctctgttatcgatgatgtcgctgaatatgaaattaccatggtaag

SEQ ID NO: 283922 - DNA, 716 bp, Zea mays
ttcttctctagccaagttcatagaagtgttgtatatggagatcagccaagatacagattggacctttatatgcccactagtacaacagggttaaagccggttgttgcgtttgtgactggtggagcgtggatcataggttacaaagggtggggagcccttttaggcagacgcttagcagaaaggggcatcatagttgcatgcattgattacagaaactttcctcaagggactattggtgacatggtagaagatgcttctcaaggaatagcttttgtctgcaagaatataacaagttatggaggtgatcctagcaggatatatcttgttggacaatcagctggtgcacatattgctgcttgtgctctcttaaatcaggccattagagaatccggtgaaggagatacttcctcttggagtgtatcacagctaaaagcttactttggtatttctggcgggtacaacctccttaacttggttgatcattttcatagacgtggcctttaccggtctatctttctcagtatcatggaaggtgaagtatcactccagaaattctctccacaaatgatgattatggagccatctgctaggtctgcagtttctttattgcctcgcatcatccttttccacggaacaagtgattattcaatacctccagctgaaagccaagcatttgctgatgctttacaacagcaaggcgcaagggcagatctatt

SEQ ID NO: 283923 - DNA, 837 bp, Zea mays
  unsure (1)..(837): unsure at all n locations
cccacacgtccgcccacgcgtccgcagcacaaggagtacaagctcaaacaatagcgaacttttaccttgcatttgaatcaaatttgagcatcattcctgtgattaacaagattgatcaaccgactgctgatccagataatgtaaaggatcaattgaagaggttatttgatattgatccaagtccgcccccgcgtccgtctgccaagactggtagaggccttgaacaggtattgcctgctgttattgaacgcataccttccccgcccgggaaatgtgatgcacctgtacggatgttgcttttggattcctactatgatgaatacagaggagtgatttgccatgttgctgttgttgatggtgctctgcgtaaaggtgataagattgcttcggctgcaactagccgtgcatatgaagttcttgacgttggcattatgcaccctgagcttacacctactggagttctctacactggacaagttggatatgttattagtggaatgcgttcaactaaagaagcacgcatcggtgatacccttcaccaggcaaagagtactgttgagccacttcctggtttcaagcctgtaaaacacatggtcttctctggtctctatcctgccgatggttccgactttgaagctcttagccatgcgattgagaaactaacatgtaatgatgccagtgtctctgttacaaaggagacangtaatgcacttggcatgggattcagatgtggcttcctaggattgctacacatggatgtgttccatcaacggcttgagcangaatatggagctcaagtcatatcgaccataccaaccgtaccttatatttttgata

SEQ ID NO: 283924 - DNA, 531 bp, Zea mays
attcagcttgtggacttcggagagatgggacccattcggtgttctcgttgcaaagcgtacataggccctttcatgaaatttgttgaccaagggaggcatttcatctgtaacttatgtggattcagaaatgatactcctagagactacatgtgcaacttagggcctgatggtaggcgacgcgatgctgatgacaggcctgaattgtctagaggaacagttgaatttgttgctacgaaggaatttctggttcgtgatccaatgcctgctgtatacttcttccttattgatgtctccatgaatgctatacaaactggtgcaactgctgcagcttgcagtgctatttcccagtctatttcagatctaccagaaggtcctcggacaatggttggaattgcaacatttgattctgctattcacttctacagtcttaaacgtgctcagcagcagcctttgatgctcatcgttcctgatactcaagatgtatatacacctcttcagactgaccttattcttccagtttctgagtgccgg

SEQ ID NO: 283925 - DNA, 641 bp, Zea mays
ggccgtggacgactccacggcgctcccagtcgcgtcctcgaggggtacctcatggccacgctcttctacgagccctccacgcgcaccgcctctccttcgaggccgctatgcggaggctcggcggggaggtgctcaccaccgagaacgcgcgcgagttctcttccgccgccaagggggagacactcgaagataccataagaaccgttgagggttattccgatattattgttctgagacattttgaaagtggagctgcaaggagagcagcagatactgcgaatattcctgttattaatgcaggtgatgggccagggcaacatccaacccaggctttgttggatgtgtacacaataaagagagaaattggcacactagatggaattaaacttggtttggttggtgaccttgctaatgggaggacagttcgttctctggcttacttgattgctaagtaccagaacattaagatatactttgtatctcctgatgttgttaaaatgaaggatgatatcaaggactacttaaattccaaggtgttgaatgggaagaatgttcagatttgttggaggtggcatccaagtgtgatgttatttatcaaacacgtattcaaaagaaagatttggtgagaggaatgatcttta

SEQ ID NO: 283926 - DNA, 516 bp, Zea mays
tctttgatactgatgataagaatactcctacatgggtcgattcactgaaagataagcaagtcagaagtgttgtttgtggaattaatttcactgcagcaatatgcattcacaaatgggtatctggagttgatcaatcgatgtgctcaggttgccgtcagccattcaacttgaggagaaaacgccataattgctacaactgtgctctagtattttgtcattcctgcagcagtaaaaaatccctgaaggcttcattagcacctaatacaaacaagccctaccgtgtctgcgatacctgctacagcaaactgacaaagggacttgagacggatatgcattcttcagcgaagcgagctgctactgtaccgggagtcagtgatgcaaatgaggaggatctggaaacaaggtcaaatgctcaactatcaggtttgtcgtcaatggaaatttttaagcatttggatagcagattttccaagaaaataagaagtttgaatttaataccactgtgtttcccctgtg

SEQ ID NO: 283927 - DNA, 690 bp, Zea mays
aaagactcgacttcaatcctgagagcacatataaaggtgaaacaaagaaacaggcatggagtaatatgccacctgatgatttggtcgtcaccgatggtatttcagaaaacagtggctactatgtttctggcgaatgtcccaggaccaaagtgcctcaaacatgtcatgtaacttgcaatacaaaaaaagaccctaaacgagttgaacgtgtggttggatctggaccagtggcacaagatatcagtggtaatttgattggtccacagtgcaaaacaaagggtactccactgtgcagcaaaggaaaaacagtaattatgattatagattctgaagattctgaaccttccgcgcatgaaaaagaggatacaatgaagctagccacattaggaccagattcagatataagtcttgtggctggtaataccaatgaggaccctataagagctcaaagtggcattgggaatggaccctcagctgtactagctgacgagaaggggaatttccctgaaattgagtgtggaaccaagtgcatttcagcaacatgcagtgaagtaaaaacagtatctcaaattataagtgctacagctctcttagatttacatgattcagatgaaaatttaggcagaaaacaaagaacaaatgccattcctttagattctaggacaacgcggaagattatcataattatag

SEQ ID NO: 283928 - DNA, 368 bp, Zea mays
gacttgctggaggactatttaagttacaggaaatggacttatgaacgcatcgatggcaagataagtggcgctgataggcagatacggatagatcgcttcaacgctaagaattcaactaggttttgctttcttctttctactagagctggtggtctgggaataaacttggcaactgcagatactgtaatcatctatgacagcgattggtacccacatgcggattggcatgctatggcaagagctcatcgcttaggacagacttgtaaggtgatgatatacaggcttgttagccgaggtacaattgaggagcgaatgatgcagcttacaaaaaagaagattttattggagcacttagttgttggtcgact

SEQ ID NO: 283929 - DNA, 969 bp, Zea mays
gctaacaaaagttaagatgccactctcggatttggtgagtgcagctctggcgcttgatcaatctaccttggatgttgatcaagtggagaatctcataaagttctgtcctacaaaagaagaaatggaacttctcaagaattacaccggagacaaacaaaatcttgggaaatgtgaacagttcttcttagaattgatgaaagtgcctagaatggagtcaaaactgcgagtattctccttcaagatccagtttggttcacaagttgctgatcttagaagaagcttgaatatcatcgactcttcatgtaatgagatccgaacttctctcaagttgaaagaaataatgaagaaaatccttctccttgggaataccctgaaccagggaactgctagaggtgctgcagttggcttccggttggacagtcttctaaaacttacagatacccgggcaacaaataataagatgacactaatgcactacctctgcaaggtacttgctgcaagatctccacagcttttaaacttctatgtggatcttgttagcttagatgctgcatcaaagatacaactaaaaatgttggctgaggaaatgcaagcagttagtaaagggctggaaaaagttcaccttgagtatgatgcttcagaaagggatggtccagtatctgaaatttttcgtgagaaactgaaagagttcaccgacaatgctggagctgatgtgcagtcgttatcttcattgttttctgaagtgggtaaaaaggctgatgcgttaattaagtattttgcacatgaggagaacctgaagcaagctgagcttgagaagaaaaaagctgaaaaagaggcagaagcagagaaggccaagaacgcacaattaactggcaaaaatgactctagaccatcaaatccaagacggcaggctaaacaaaccttagagaggacaaggtctgcaagcagacgaggaagagatgttgggtg

SEQ ID NO: 283930 - DNA, 610 bp, Zea mays
caagatctccacagcttttaaacttctatgtggatcttgttagcttagatgctgcatcaaagatacaactaaaaatgttggctgaggaaatgcaagcagttagtaaagggctggaaaaagttcaccttgagtatgatgcttcagaaagggatggtccagtatctgaaatttttcgtgagatactgaaagagttcaccgacaatgctggagctgatgtgcagtcgttatcttcattgttttctgaagtgggtaaaaaggctgatgcgttgattaagtattttggtgaggatcctgttcgctgcccctttgaacaagtaatctctaccctcttaacatttgtaacaacatttcgaaaagcacatgaggagaacctgaagcaagctgagcttgagaagaaaaaagctgaaaaagaggcagaagcagagaaggccaagaacgcacaattaactggcaaaaatgactctaaaccatcaaatccaagacggcaagctaaacaaaccttagagaggacaaggtctgcaagcagacgaggaagagatgttgggtgataaccgaatggtcagtatttctgtgcttctgatcgtcgcgagctatggacgaccgctgggca

SEQ ID NO: 283931 - DNA, 526 bp, Zea mays
tgggctgccatcttaggtaatcatgaccaagagtcgacaatgacccgggaggagctgatgaccttcatgtctctaatggactactcggtatctcaagtaaacccacctggttttttggtacatgggtttgggaattatcatgttggcatccatgggccattcggatccgagctggtcaatactagcctgcttaacctttacttcctggatagcggtgatcgtgaaatggtgaatggagttaaaacatatggatggatcagagagtctcaactcgcctggcttcgttctacttccctggagcttcagaaaaaaatacatgccccagcattagcgttcttccacataccaatcccagaggtccgagggctctggtactcaggcttcaagggtcagtaccaggaaggggtggcttgctcatctgtacattctggtgtccttgggacccttgtctccatgggagatgtaaaatctgtctttctgggtcacgaccatcttaatgatttttgtggcaatctcaatgggatct

SEQ ID NO: 283932 - DNA, 570 bp, Zea mays
  unsure (1)..(570): unsure at all n locations
acttatggactaagcctcaatatgctacaagggtgggctattgctgtcctctgcagtttggaaaatagaatgatatcagtggaaagaatgttgcagtatacgactattccttcagaaccaccacttacaatatcagaacgccaaccaaatagacagtggccaacaaagggcgaaattgagtttcttaacctccatgttcgatatgcaccgcagctgccttttgttctaaaaggcctgacgtgcaccttactcagaggaaagaagacaggtattgttggtagaacaggtggtggcaaatcaaccttgattcaggcactatttcgcattgtggacccatgtattggccaagtgtttatagatggcactgacatctgcaccattggactacatgacctccggacaagattgagcatcattccacaagatcctgttatgtttgaggggaccctgcgaagtgcgaaccaatattgacccccttggggagtacagtgacgagaaaatctgggaggcattgtattcatgtcatcttgggatgaagntaagaaagacgagcttaagcttgactctaca

SEQ ID NO: 283933 - DNA, 671 bp, Zea mays
gtttatgagctctgtccactgatttgacatggatatctagtaataacgttggctctaccaggaagcagattgctgttgcttatggacaaaaaggtgggaaggataatctagccatcctagaaaatttggtccagctaagacacaagtttgctaaattgctggggtacaccaactatgctgattttgctattgagcccagaatgccaaagacttcgaggaagatcttagagtttttggaagagatgtctgaacaattaagtgatgtggctaatagagagctcaacatactcaaagacctcaagatcaaggaggaaggaaatgctcagtttggaatggaagatttattgtactacatcaaaagagctgaagaattcaaggttgatcttgacgttggtgaaattaaacaatacttccctgttggcctggtcatatctggaatgctgaagatatttcaggatctatttgcactacgattcgacgaaattaaggatgttgatgtttggcatgatacagttcgtgtgttttctgtttgggatgcaagttcaagtgatcttttgggttacttttttcttgatatcttttccagggaaggaaagtatgcccacacttgtgttgtgacccttcagaatggatgcttatgttctaatggtacacgtaaggttccggctgct

SEQ ID NO: 283934 - DNA, 663 bp, Zea mays
ggaaggagtccgtcaggtcgagatcgaaaccgactccgcttccgccttcccgccgttggggttcatcagcagttcgcagggtaaagaaagggcggccgcgatgtgggtggaaatcctgtgcggcctggtggtctacaagatcatccaacgcgtcttcttcgccggcggcgacgacgcttcctacctcgccgacctcgactcctcccactccgatctctgcttcgccgtcgcctccaggctcgagaagctctacgccggtcgatgcttcgtcggtctccgcatccccgaccccgacgccggcgagcgccagcatatcgacgttgtcctcgttaccaagagggaggtgatggtggtagcgatcaagaacttatctggttttgttgaggctgacaaggatggaaattggtcttgtcccactgacaagaagcataagcatgagatatttccaaacccggtactagaagtcaacagactagctgctaatcttcaatcatacttggagcaaaggggagcaaaactgcctgatgggcatatcatcgggagagttgttctgccaaatcccaactgcaggccttcctatactataagcacccaaccagaggtcatgttgtatgatcaatggaagaatctcaagacagacctcaagagtggactctcagcatg

SEQ ID NO: 283935 - DNA, 571 bp, Zea mays
gtacgtgtgtgtgcaaacaatccgatcagctgggaagcaaacaacaacgaacgaacgccatgatggcggcgtgcttggaggcgaagaaaccctacctgatcgctcttgccatccagatcatcggcaccggcatgttcgtcatctccaaggcagccttcgacgacggcatgagcaccttcgtattcatcttctacaggatggccgccgcctcgctcatcctcgtgcccacagccattgtccaccaaaggaagaatatgcggtccatgtctgggaagctgcttctcaagctcttcttgctcgccttgatcgggaacacattcagcttgaacacgtacaacctgaccctgaagctgacgtccgcgacggtggggtccgcgctagccaactccgtgcccgtgttcaccttctgcctggtgctggtgctgaggatggagacggtgaacctgaggacggccgccggcgtggccaaggccgccggcgtcgcgctctgcgtcgccggagtcctcgtcctcgccttctacgccggtccggccatgagccccgtgaaccaccaccgcgccttcgccggccc

SEQ ID NO: 283936 - DNA, 680 bp, Zea mays
gggagctaaagagttagcccaagtggaaccagattcttcaaaatatgtcttatctccagataatcaggagattggagaaaaactatcagaaattggtgccagattggaatacccatcgttgaacaaagaacgtgtacaggatgtaagaaaactatggcaagatccagccattcaggaaacttattcacgtgggagtattctgcaagtcccagactgtgcacagtacttcatggaaaatttggacaaattatctgaagaagattatgtaccgacaaaggaggatgtgcttcatgcaagagtacggacaaatggtgtggtagaaactcagtttagccctctaggagagagcaaaagaggcggagaggtctataggctgtacgatgtaggaggccagagaaacgagagaaggaaatggatccatcttttcgaaggtgttaatgctgtaatattctgtgctgccattagcgagtatgatcagatgttatttgaggatgagacaaagaacagaatgatggagactaaagaactctttgattgggtgctaaagcaaagatgttttgagaaaacctcattcatgttatgtcttaacaaatttgacatatttgagagaaaaatacaaaaggtccctttaagcgtgtgcgagtggtttaaagattaccagcccactgcacctgggaaac

SEQ ID NO: 283937 - DNA, 588 bp, Zea mays
ctctgatgtcgtcagtccaagtattgttgaactctaaagacttgctggacactgagcctgaaggaatacgtgaactaataagcagttgcaaagtcgggaacgctacaaaatcaaagttaagaaaagtggcagaatggatcatacacactaaatgtgctcttggggaaagtcatcatcagatgcaggtggtatctaagaactggaaactagcaaaagaaaatgaatcagcacattttttgtctatatcagagctaatctctcagagaaagttatgtaatataaacatttttgcatgcatcggcaagatggttctagtgagttctccgacctctcctttaaaggtaaacttgtcggtttggtcggtcatcgacagacgttctttcaaagagcacagtgatattgtcaggagatttggttactgctggatgtaagctgtgtgggctcgcctctctatcaccaaaaccttcatgaggaaaacacgtttgcacttgattgtcctaataacccaaaatatctccatgttcctggtcagatatacaggccatttctgatatatatctatgaccaatctggacaagttcctttgct

SEQ ID NO: 283938 - DNA, 598 bp, Zea mays
cacacacataggccgggtcagagttccatcagagcagctagccatggcgccctacgattccgagccccttgatcactccctggagctccatgagcttcactaccagctgatcctgatacagcactggtgtggcactagcaaagcaaaccaagtagaagtcgcatctcccggaggctttaacaagctgggaaacatggtcgctaacgattgggatctagaagatccctgccaaaacgggaaaatagttgcgcacgccaagggtctgcatgtccaagctagcagagaagaagcaagctggcatgcttcgtttgacatcgtcttcgagcaaggcagcgggttggaagggtccacactccaagtaatggggcctaatgcattcaagggagacgcggtcaatcgctggaggcaccggaaaacttactatggcttcgaggcgtcatatacaagaaatacctaacgacggtcgatagcacatccaaaattgaccttcagatccatgcgttctacatgcccatggaacgaaaagatgcctgaacttctggagaaaatgtttggcgctggtaattaaaatgaccggcgattctcgttgttgcagacg

SEQ ID NO: 283939 - DNA, 1273 bp, Zea mays
ctcaggcgccaagccacgaacattgtctcgacaaggctgggccgcgcagagccaccgctgcgaaatgaaatcgtggagtacatgctcgacgtagactcgcacatgtggagcatgaggaagagcaaggcgaatttcttccgcatcatgagcgtcttgagccccttggtcgcggtgacaaagtggttcgatcagatctgccgctggaggaacccgctgaccaccgtactgatccatgtcctcttcatgatactggttctttacccagagctgatactgcccacagtcttcctctacctgttcctgatcggggtgtggtactaccggtggcgtctgaggcagccgccacacatggacacccgcctctcccacgcagagaccgcccacccggacgagcttgacgaggagttcgacaccttccccacctcccgcccgccggacttggtgcggatgcggtacgacaagctgcgcagcgtcgccgggaggatccagaccgtggtcggcgaccttgccacgcaaggcgagcggctgcagtcgctgctgagctggagggacccaagggcgaccgcgctgttcgtggtcttctgcttcgtcgccgccatcgtcctgtatgtcactccgttccgcgtcgtggtcttcctcgcaggcctgtacgtgctgaggcaccccaggttccgccacaagatgccatctgtcccgctcaacttcttcaggcgtctgccggcgaggaccgacagcatgctgtaggcgcggcaggtgcatggccccatcgctggcgggtggtttcgcctctcagttgcagctcacagatggttgttgctctctcttaagtaagtgtatccaaaaaaaaaaggggctgctagctatcttcgtttactttttgagcttctctgtgttgcatggttggttatgtattcatatggttgtgaacctttcctgtaacaactggacgcatgatgcgtgactgtgtctaggtatgcatgcatgtgtgtgatgcttgaaaactccgagctttagtgtttattgctttacctacttgttcagcggcagtgctgtcagctaacaaggctctctactgctgcatgtgcatcgtgtttggtttgcagctcaatttaccgacttgccagttgtaattgggaaatactgatctggattttgcctagccgagagcctgagagttctcttctacgcagactggaactatttgggtgccaatctgagcagaggcgggctgttgtacttgtgaacttaatagtgatgtcatggttgaatttcc

SEQ ID NO: 283940 - DNA, 591 bp, Zea mays
ctccgccgaagccaagcaaaccaccgacctcgacggagtcttctagccgtcaccctcgttgtcgccctgctcctcctctcagccggtccggccggcggcgtggcgtgaagatcaatccggacccggaacgagttccctcttttgctggttacataaactttggaataggaggatatcccatattgatctttgtgattgagattgattttttttttctggaaaatggagatacaaacttcagggaagcccattgatgtgctgatggagaaggttcttagcatgaacattctgtcttctgattactttaaggagctctataggttgaaaacctatcatgaggtcatcgatgagatctacaacactgtcaaacatgtggagccttggatgactggcaattgcagaggcccctccactgcattctgtcttctatacaagttctttaccatgaagcttactgtcaaacagatgcacggtttgttgaagcatcctgactccccacacattagagctgtaagtttctgtttcctgcccttctgtttgctgatgctgaatgtcttgcttcatggccctgtatctattcattaggcatga

SEQ ID NO: 283941 - DNA, 648 bp, Zea mays
  unsure (1)..(648): unsure at all n locations
cccgctcctcttcttctactacttccattcacaccccacatgccgacgctggcgccggcggcggcggtggcggcggtggcggcggtggagtcgtagccgcctgaatcagcggtcttgtagtgacgccggaaccaggggcccgacgggcaagccgatggcggcgccggcttccgcggcggccgggcgcggcggggccatgtcgtcggacaacgccaagggcctggtcctcgcggtgtcgtcgagcgccttcattggcgccagtatcatcgtcaagaagatggggctcaggagggccgccgactccggcgtccgcgcgggatatggcgggttttcttatttagtggagcctctctggtggataggcatgatttctatgattgtaggtgaaattgctaattttgctgcttatgcattcgctcctgctattcttgtcactcctcttggtgcactcagtataatcatcagcgctgcacttgcacatgccattctacaggagaaactgcacacatttggtatactcngcctgtgttctctgtgctgttggatctatcacaattgtgctccatgccccacaagagcgtgacattgattctgaaagggagcttgggatcttgcaatgaaccagctttcctttgctatgcggctata

SEQ ID NO: 283942 - DNA, 653 bp, Zea mays
ctacagtgccatcgaagaattacatacggaaggacgtctctagtgatgcatatgaacatcctcatctatggtatgatactaatgctgttattcatgccctggaactttttcttcaacatggagatgaagtatctgacagcaacaccttcaggtatgaccttgtggatttgactcgtcaagttctggctaaatatgctaatgacgtttttctaaagatcatcgagagctacaaatcaaacaacatgaatcaagtcaccatcctctgccagcactttctcggcctcgtaaatgaccttgacacattactatcctctcatgagggttttctgcttggcccttggttggaaagtgccaagggccttgcacgaaacagtgagcaagaaatacagtatgaatggaatgctagaacacaaattacaatgtggtttgacaacactgagacaaaagcaagtttattgcgcgactatgcaaacaagtactggagcggcctgctgcaagattactatgggccaagggccgccatctacttcaagcacttgttattaagcatggagaacaatgcacctttcgccctcaaagaatggaggagggaatggatcagtctcaccaacaactggcagagcgataggcaggtgttttcaaccacggctaca

SEQ ID NO: 283943 - DNA, 514 bp, Zea mays
gcagtttccactctcagtaggctttcctatagagaaccgtggaagtcctgtaggcatgagtgcgttgagaagtcacctggagcggatgaagcatttgacatttgtgaggcggatttcggacttccatttgctccttaagcttgctactttcctagatgcaaagtcagacatgcctactatagctgcatgtgtaaaaactcagagcaggatgcccgaggggtaccagtttctgatcgagtcctttgctagtcagggataatattgcctctgaaagcatgacacgacgatgcataatttatttacctgtcacatcaggcgtggttcggttattcttaattcacgtggattggaaggtatcaggatgaattgatatagattttaatttgctatagatttaaaccaatttaatcctatccaatttatatggattaaccttaaaacgaataagcccttatgtgtaacttatggatgtctcaggtgtataagtattgttcaatgcattcacttttcgata

SEQ ID NO: 283944 - DNA, 500 bp, Zea mays
tgcgatgcattttatgctgatatgaaaagcgtccagcataaggaaagtttgacaagtgagctgaagaaacatctatcattggaatgtgaccttttgaacttctttgagcagtttgaaagactgttatgtgatcgtcggtctgcagagatggaggctgatgtgaatgctaatcagagtacaaagaagccaccttctatgcgaatgttaaggcaagctgccaatgcatatacaccttctgcctttaaaatgtttgagagggaatttgaattgtacatggattgcatgctctacatctgtggtgagatgagcacaattttcgagtatagaataagtgttgaggacaaatcaagagatcactttgttaaatttgattcactcaattccatgatgaattgtacttgtaagacatttgaatttattggcatcccatgtcgccatatgctgaaagtacttgacatgaggaatatcaaggacctttctgcccagtacatcatgaaaag

SEQ ID NO: 283945 - DNA, 520 bp, Zea mays
aaagtttctgtctttttttttgcaataacattcggacttatttttattagtccttttatgcagactttgagaactttgaagtgtgcatttcggccatttcaatctgatcagtctagtagcttatttctaaatgctgatgctgcaaaccagcgtggccctggtactttaggtgataaccaagcgaggtcatatgggaacacaagtgccattgagatggctgctgctaaagctgctcagcatagattgatgcgtggagtatggactaatgctcgttttggtgatatgcgtcgtgctttagcagcttgtgagcgactgatactactgcatcacgatccgcatgaactgagggattatgcagcccttctgtaccactgtgggtactatgaagactgcctacactacttatcattgtaccaaactgcaaagtctgggaaatccccaaccaatcgattggagatcttggaggacgaagctgtgaatactctcaaagcgcggttaatgcttatcttagcagaggatg

SEQ ID NO: 283946 - DNA, 751 bp, Zea mays
tcttaaagttaggaggccgataaacctggaagactacactccacctgttgagcttcttcagatattacccctgaagtccagcgttagaggaaatgatgttggcccccaaatcggtccaaataactcaaaattttctccaggaatgcaagctttattagacctgctgtttgctgttgaaggttctgtatcagatgcagcaaagattttaggcctaagcactggtgctttgtcaagattgattctgtcagatgattctctccgaacggccgcgaatgaactgcgagcttcgaagggactgaagcctttgagttgaaatcctttgtaaaatcctcagcttcaagtgcaccatatcccataggtgccatgttcgacagatgtcaggaggcattatttctagggaaaacctttgaggtttcatgcggtttgtttaagggatgttcgtcgtcattagattgccgtaaatatgttcagtaggcagctagtatatcttcaggatattcctcgtttcgtattacatatacccccaatgttcttcagcagggcaacaccattacaccacttaaccaatatttttccttgaggacctgttaacctcaaacttttatttgccagccaaaagttgttgaagcggctgtgctgaattgctgatttaattggctgtaactacctcatgggtacacaattctaatcttgtttcctttcagcgtttgatgatgcttttatatcaaattggtgctcttaaatttaaatg

SEQ ID NO: 283947 - DNA, 339 bp, Zea mays
ctgatttcgggctggcgaaggatggtccgaccggcggcaagagccatgtctccactagggtgatggggactcacgggtatgcagctccagaataccttgccacaggtcatctgaccaccaagagcgacgtgtacagctttggggtggtgctcctagagatgctgtcagggcggcgggcgctggacaagaaccgcccgaacggggagcacaacctggtggagtgggctaggccgtacctgagaagcaagcggcgcatatttcgcatcctggacccacggctgggagggcagtactcccttgccagggcgcagaaggctgcggcgctcgacctgcaatgcc

SEQ ID NO: 283948 - DNA, 703 bp, Zea mays
ggaattgctggacccacgcatgcggccactttttcgtcacgccacgcaccgattatccggagctccgcctcgccacgccggggacgaggtggctgagggctcgagctgatggcaagcatgaggtcatggaattctagcttgctcggtgaagggcgcacacggtgaagaagagtaggatcgtgagctatgatggcatgaacaacatgaacgaggctaggcagatagaggacacacctgaacttgtgaaagctcgagatagaccataaaatgaggatgatgaattatatacacttgacctggtaggaatgagagttattgacaaggatacaggcaagctcgtaagaacagctggtcatgaacacaatttgggaggtggagatcttctacacgtgatgatgggctcttctgagggtactgctgttgatccagattcagaacatcaagatccaatctcatcacgtgagcatgtgtggattccatttgctgaagatattgtacctgatgttgatatggcaagcagagaaatgcggattacacctccgaacgggttacttgagctcaattctcgttctgacaagagatcgaagaaagaaaggcgtgcgatggagtggaaggacaggaaaaggtttcaacgtcgtgtaattgcaggaaagaaggtactctccgaaatggaccaagtccatgttctggaaggtttggtatc

SEQ ID NO: 283949 - DNA, 439 bp, Zea mays
tgtttaatcctgagctggctagctcgatttacatcaagtgccagagcttgagcaattggtatggggtgatcccaacactgtggccaaacgtgaagtacatctatggcattatgacggggtccatggagccatacctgaagaaattgagacactatgctggtcacttgccgctgctgagtgctgactacggtgcatctgaaggatgggtcggctctaatataaacccaaccctgccacctgaggaggtgacgtacgctgttcttcctaacattgcttatttcgagttcattcctctggaaaaaccaaaatgggaggaaacggagatctgttcctctgttcactacatagagtcggagcctgtaggcctaactgacgttgaggttggcaaaatctacgaagttgtaataacaaattttgcaggtctataccgatacagact

SEQ ID NO: 283950 - DNA, 562 bp, Zea mays
  unsure (1)..(562): unsure at all n locations
ctcactgccggcgctctatcttccgctctctctcctactcgcgctcggcaaggcggcggcgcgtcattgtcgggctacggcgtcacggcatcccctccgcctctcgccagtcgcctcgcgccctcgcctccggtcacaccggccggtgactctgctaaaaatggtgttcctttcaaatgaagacgcctggatccatgatgaagacatcatggatgatgttgattcagatgttgaagaatcagactcagaaggtgattcaggtgaagaagctcaggctaagcctgcagacaaagcgatatacaacaaggaggctattcttgaaaaacttgaagacatagcctggcccaagaatgtggactggatgcacaaactcactgttgagcatgatcaaggggagaaagttgatgtgaacgatgatcttgcccgcgaacttgcgttttacacccaagctttggatggcacaaggcaggcctntgagaagctgcagtcgatgaaggtcccgttcctcagaccaacagnatactacgctgagatggtgaagactgatgcacacatgcacaag

SEQ ID NO: 283951 - DNA, 485 bp, Zea mays
gtgttgcatcaaatgcctattattacacctgcttacccttgcatgaattccagctacaatgtatctgttagtactagatatgtgatgatccaagaattcacacgagcgtttgagatttgtcaggccatagatgaaggaaaagcagactgggatgcattgtttgagccatatccattttttgaatcatataaaaattatctagaagttaatatcacagcgagaaatgaagatgacctcaggaattggaaaggatgggtggaatctcgccttcgcactcttgtattaaagattgagcgttattcacatgagatgatccttgcacacccatatcccaaagatttctcagataaatccaggcccttacatatcttttacttcctgggtctttggagaaaacaaaccacccatgctcaagaagctgagcaatttgacatcaggggaattgtaaatgagtttaggaatactatttgtgcatatcaacattg

SEQ ID NO: 283952 - DNA, 281 bp, Zea mays
ctacgtctcactccactagcagatgcaagcaatccgattatggctcaggttgcatttttatcagccattgtgggttccgatgttgcctcagctgcagcgcaagcagctatttctgcccaatcccgtgttgaccttaatgacggcgagattgaaacttcaataaatagcatcaagcaagaagaatcatctcacacaaatgggctctcagccaacgtgttactgaaagaggcagctgctaatgcacgggcacaactcgagaaggaaaggaacagcatagagca

SEQ ID NO: 283953 - DNA, 738 bp, Zea mays
  unsure (1)..(738): unsure at all n locations
ttattagaaggttgcccctttcatgccgtatggacactaattggttgattacttcaaagtccagacatggtgcattgccaggattcttaggtgtttcaagcttctatcgtggatactcctcagatactggaatcaagccagaagcttcacagagtggtgtctctaatcttccttctacagaaagctctgaggttggcactgcaggtgctggtgggggttcatggattgaaatcttggacaatgctcgcaagtctactatagatgctaccactgatgcaggcaagaaagttaaggagctgactgatgcagttgcacctcatgtccagcagctatttgatacatatccaaatcttgaaaaggtagttgttccacttggtggaacaatatgtggtacaatgatggcatggttggtcatgcctatcattctaaggaggcttcacaagtacgcatcacaaagtcctatatcagcacttctggggaactccaccaagaatgatgttttgtaccaaactagtctctggtgtgcattagaggatcctgcaaaatatctgatcacgttcatggcattttcagaaatggcaacacttattgcaccaagcgtatcaacttaccttccacaggcatggagaggtgcatttgttctgtcttttgtatggttccttcagaggtggaaaaccaacttcattgctaaagctatgaccanactagatgcctcaagtgttgatcgcgacaggatat

SEQ ID NO: 283954 - DNA, 508 bp, Zea mays
gtcgactcctacagcgtgcaccgcctcctcattaccgccgtgctcgccgccgtcaagttcatggacgacatatgctacaacaacgcctacttcgccaaggtcgggggcatcagcctggtggagatgaactacctggaggtggacttcctgttcggcgtcggcttcgacctcaacgtggcgccggagacgttcggcgactactgcgccgtgctgcactcggagctgctgtgcgccgaggctgcccccgcgccgctcaggctgcagcactgctgcctgtccgaggatgacgccggggccggatgcagcgcccagcagcagctcgctgcatgaatgaaagaaacctaagcccatcatcgatcgatcgatcgatcgatcgacgactcatccggcggcttgggcgcaggagttgtaagccggtgcaaattgttccaaattattagatggtttgtcttttttctagattatgaagctttcgatatacacacatctatatacagtgtgtctagag

SEQ ID NO: 283955 - DNA, 639 bp, Zea mays
agacttctttactgtcccaatgtcctaggccaaggagaagacattcttttggtgaagaggagttggcatgtctcccacacagaaggcgagatattgtattggatggtgaaagcaatgatttatttgttgctatggaaggatttgatgaaacatttgaagtttcttccaaaggagagaacaagaatcgcaaagggcttcttaactggttcaaacttcggaaacatgacggtggttctaatgctccaagcttaggtggtgaccaatctagcctgaggaaagcattggctgccccttggacacccgtagaaattggacttaattctcaaacagagcaagagatgtctaattctcccgagaatctatcagctaacctactgagcattgaccatgaagaatttcattctgatggactttatggagaagaagcttctttggtcaccagaaaaacatcagatcatgttgatttattgagagagcaactgaagatcctatcagaggaggttgcattacataaaagtgttctaaagcgactcgtcgaaggagctggaagaagcacaatgaatgggcatgtcgagatcgaaatgaaaaaggtcagtgacgagattaaggacaagcagcagcagatagcacatttagaaa

SEQ ID NO: 283956 - DNA, 848 bp, Zea mays
cgtgtggctcacgctcaggagcaagaagagggtaaggcggcgggcatccgcaaatatcccaatcacccaaatccctgcaatttccaaggaaatcaaggaggtgagggtggagcaagtgccagcgagcgactttgtggcgcatgatggcgtcctcctcacgttccaggacaagaccagcgaccgggattcagacaaggtcatggcccatttgggtgttagcaaatcgaagcgtggtgatgagagccattcggggtcatttcgctacatggacaaggatgcaggattccagtcagctgaggaaggtggctctggaacgtttcggcagacttcagctaatgccatagttgctccttcacctctggttggcctgcccgagttttcataccttggttggggtcactggtttacgctgagggatctggagcttgctaccaatcgcttttcaaaggacaacattattggtgagggtggatacggtgtagtttatcgcgggcagctaatcaatggctcccctgttgctgtcaaaaagcttctcaataacctaggtcaagctgagaaggaatttagagtagaagttgaggctattggtcatgttcgacacaagaacttggtccggcttcttggttattgcgtggagggtacccaaaggatgcttgtctatgagtatgtgaacaatggaaacctagaacaatggcttcatggagctatgagtcaacatggctctcttacatgggaggcccgcataaagattcttcttgggactgctcaagcgcttgcttacttgcatgaggcgattgaacccaaagttgtgcaccgtgacatcaaatccagcaatattttgattgatg

SEQ ID NO: 283957 - DNA, 767 bp, Zea mays
atatggagggcagtggaacgcaaagtacaataaatttggtgaggtcatcctctggtggttttactaattcaggcgtcgtcttaaaaatggctcaggtcataaaggatggttctgccagaggacaaagatatcctgctgttcttgtaaagaaacctgagactatgataataccggcaagggagcttgtacaagtttttgccaaggacatagaacttggcggcgagctgccaaaagttcctggcaatgacaaaaggaaggactcgctgattgattctgctattacccgctatcattatcttgaagagagggaacttgagcgctgggcaccagatggaggagattcagagtgtattgaactggagaagtatgaccggcagggaaataggagctgggaccagtttgaaaccaatgcagcattatttggggtaaagagtactttcaatgaagaaatttataccacaaagcttgagagaggtcctcacatgagagagcttgaaaagcatgcttcgagaatagctagagaaatagagggagaagataccagagatattcatcttgcagaggagagaggcttattcctgggtgatgacctggaccatgatgaagagataaaatattcagcagtgcgtagagacactgataacagcaagtacaagccaccatttactaaggtccgaagcagtacatgccatgttgattcgtttaacaggacagtccatattgatcccaatgattcactggcatgttcatcaacaatggacaaagaa

SEQ ID NO: 283958 - DNA, 345 bp, Zea mays
ccagaacccagctcagacagacgccgccctccgctgctctgctctgttcctcttcctccttgccccctgagcaggcgatttgtcagcccggaaaccattcgaacaggccgagcccgcccgcctccattgctcgcgtgcgtcagagaaggaaggaaaagaagaactaggagcagagttgaataggtcattatgcgccggtggctttgctgcagtcattttgacacgccgtatgtcgaaaacgaaaatggatttatgagcagtcctgatagaacaagtggtaatggaaacggtttaaatgcaaacagtgatcctgcaaaaccgccttccattgaaatacctgcattg

SEQ ID NO: 283959 - DNA, 286 bp, Zea mays
cgccccggcaaggggaagatgcgcaccgccgctacatcaaccgcaagggacccctcattgtctacggcgctgagggctctaagatcgtcaaggccttccgcaacctccctggcgttgatgttgccaatgtcgagcgcctgaacctgctcgacctcgcccctggtggccaccttggtcggttcgtcatctggaccgagtgcgcattcaagaagctggatgaggtgtacggtgccttcgacacgccatcggcgaagaagaagggtttcttgctcccgaggcccaagat

SEQ ID NO: 283960 - DNA, 421 bp, Zea mays
ccactctctattctcaatcactattcacataaaagaggcaacccctgaaggagaagagctgataaaatgcgggaagttaaatctagttgacttggctgggtccgagaacatctctcgttctggagctaaggagggccgtgcaaaggaggctggcgaaattaataaaagcttgcttactctgggtcgtgtgattacggcattggtcgaacaccttggacatgttccttacagggacagcaaactcaccagattgctgcgtgattccattaggaggaagaacaaagacttgtattatcgctactgtttcaccctctgtgcattgtctcgaagaaaccctgagtacattggattatgctcaccgggcaaagagcattaagaacaggcctgaggtaaatcagaaaatgatgaaatctacattaat

SEQ ID NO: 283961 - DNA, 488 bp, Zea mays
gcagtagttgacatgatactgacccttttggttgtagcataagctgctatttatcttgatctgttttatttgattaagatcagcgagcaagctgcggccttcttttgcttcgatccatctccacttgtttttttgctggctggagtttcttttaattgtttgcttagctctgcagcttcgatttgttccgaaactttgttgatctatctgtgctgttgttgctcagatcagctcgcaaggaactaacacactttattttttagatcttagaattctgactccatatcttgatctcgatggcttgcacgccgtactacaacacctgcacagcccgccacgccacgaagaacgccccgtcatttccgcgaccgccggcgccaccccaggctccgcgcgccaaggagccacagccacacaagatggccgtcgctcctgaaccatccaagaagagggtggcgccggggactggactggaggagtggacggag

SEQ ID NO: 283962 - DNA, 582 bp, Zea mays
atcgcgtcgtctcctctctatccgattccgcccgcggacccaggctcccgcatggacgctgccggcggggtggaggccgccgccaacggcgggatcgagggctccgccgacccctgcagctcaggcggggccggcggagtacaggcgcgccgtccaccagatcgccggcggcgggaaagctgctgatatcatcttatggaggcgagcgcgtgttacatttggtgctatatttggtgctactctggcatggtggttgcttgagaagtctggactatcattactaactatctgcgctgatatacttctcatatagatagatctgcagttcataagggttaaaatagctggactgctagataggcagcctaggccactacctgaggtagttttatcagaggagaatggtagcaatgctgcggcttcattccgagtgaaagtgaacagcatgctgacgatagcgcatgacattactcttggcaaggacttcaggctatttttccaggtcgtgattggcttgtggctgtcatctgacattggaaatttctgctcggctattcctctcgcttacaaaggaaccgagtt

SEQ ID NO: 283963 - DNA, 521 bp, Zea mays
gagtggtcgcccttttttttttttttttttttttggggggttttttttttttttttttgagaagctgaaccaaacaggcacataatgctgcaaccatatacatgcagggggctgaaccaaccaatggttcatggacacttgcttcattacatccatccaatgaggggttgcagaattgcagttacagggcaagttacccaatcaatactaagaacgatgaatcgagctatccaatcaatctcattccaacacaacataaaatctaactctaataacaggccatccccgatttatcagcatctgcaggcagcaaagcacacggcatccaattagttcaacttgggggcccagctgggctctttcagggaggcctgcactgcttccttgatggccagattcggaaccagctgatgctccttcagaggttctcgcgtcaccgggtcgaaattgccaaccttgtggagatgttcaacaagtacagccctctcatatgttacaccactcggtgtgatcactgggtc

SEQ ID NO: 283964 - DNA, 558 bp, Zea mays
gtgcgttctgcgacctagcaatcttttcggtccgggtggttccatcttggtgaggtttgttgctggatatgcaaggtctcccttgggcaagtttgtaataggcagtggcagtaacatgtctgactttacctatgtggaaaatgtggcccatgccaatatttgtgctgagcaagccttgtcttcaaatgcagcttctgtagctgggaagcccttttttgttaccaatgacgaacctatggaaacatgggagtttatgaattgcatgatggaagccatgggttgtcagaggcccaggattaatcttcctgccaagatgttattgtttgcagccttgttctccaaaatgattcatcacaggcttggttttcaaatgctttccacccctcttcttcatccagatacaatatacttcttgtcgtgtacgagaacctttaacacttcaagagccagaagattacttggataccacccaattgtatcattggcggatggcattatgaggactcttgggtcattttcagaactagcagataatttggggttgcagaacacagggct

SEQ ID NO: 283965 - DNA, 474 bp, Zea mays
cggtctcgtggggcgccgcgccgctcgcgctcacacggggggtctttgaattggccttggggtgatctctacatgtgaccactggacggggaccttcctcggtagtaagtagcgcgcgcgacggccggagggagtctcagtcgacacatcgtgccgccggcgttccacgggttcattcatttcccagtggacttatgcatatgctccttctgtgataataattttcacgtactggccatcatatatatgggctacacgctagttctttcttggaatgtatggaagttctcttttgtcgctgtggtctttattttctcaaatctggtggttttagaacaatccttgtaagaaatgggaacgcagattcaagaagaatttgtaagtgtaatcacctgcaggtcattccagatttcgtacgttttcccagaaaaaacacaaaaaaaaaaagggcggctgctcgcgatctagaactag

SEQ ID NO: 283966 - DNA, 857 bp, Zea mays
ctgggctggtaaatagtgtagaagaagggattaaaagggggatattatcagacatcctcgacaagtctcaacctgattggccaattgcggaggctgagatgttggcaaaacttgggttgtggtgtactgccttaaaatgcagggacagacctaaccttgagtcagtggtgcttccagagctcgaaaatatcctgagcagggttactgtttctctcaaactcgaaaatatccttgcaccaagccacttcttctgtccgatattgcaggaggtaatggaagatccttacgttgctgcagatgggcacacctatgaacacagggcaatcaaagcttggctcgaaaaacacaagatatccccaatcacaaatcagaggcttccacatctatccataattcccaaccattccttgcatgcagcaatacagcaatggaagttacgagcatcttaaggcccgtgtcgttttaatcttaatccatatggattgaacgggattgagtgggtttaaatccctaacgagccaaaattctttctaatttcttccaatctcatcttatcaacatggaatgagaataaccgaataaggcctaataaaggcatgaggtgcctggtttattcgttgtataaagtttgattcattactgtctgtttgagttaagatgtaaataaagaccaatagttctataatgtagcagtgaaagaagatagtattgtaggaataagttgtgttgctagtctagatttgttagagctggtttaggctactcagccaatttaagttacaacggaattaagttttccacccctgtatgtttttgtaccccaaaaaaaaaaaaaaaaaaaaaaaaaaaattaaaaa

SEQ ID NO: 283967 - DNA, 647 bp, Zea mays
ggccaggcgctgctgcagtgcacgccgcacatgtgccccatccgggtgcactggcacgtcaagctcaactacaaggactactggcgcgccaagatcgccatcaccaactacaactacaggatgaactacacgcagtggacgctggtggcgcacaccccaacctggacaacgtcaccgaggtcttcagcttccagtacaagccgctgcaaccatacgggagcatcaatgacactggcatgttctacgggctcaagttctacaacgactttctcatggaggccggcccgttcggcaacgtgcagtcggaggtgctcatgcgcaaggacgcaaggaccttcaccttcagcatgggctgggcgttcccgcgcaagatctacttcaacggcgacgagtgcaagatgccgccgccggactcctacccctacctgcccaacgccgcgcccgtcgtcgcctcgcagctggtcctgtccgccgccgcctcggcgttcccactgttgctgctcctggtggcatgaccgtgaccgaaccaacaagggcaaggcctccgttttgttttcccgtctcgtcccgtgggcagcgagcagacttcagtaggcagggcattttatttggttttgccaaggattcaacacttgggttttcgtcag

SEQ ID NO: 283968 - DNA, 548 bp, Zea mays
agtgaagcctgctgacgagagttcagcgaaaaggacagaagattgttccagtggtgaaaattctccagtgttttatacagctagggctggtaatgaacatgagaattgtcatgataatgattccgagaagagcagtattacttcaaattcatgcgccggtgatgattatagagacgaagtcttgccagacgagtcgtccagctgtaactgcgaggataaaaccgtctcagaagcaacagagtctggagcaaatgtaggtcgagctagacccttggagaaaaccacggtacctaatgaaagaaagccatttattaacaagctgcagtggctgttgaggtttggcagaccatcagctgaaggcaatgtggtggagaagggcagtcctcaggcatcatcggatgataaacatgacgcggttcttacttgcccttcacctgctgatgcgagttcagataactcttgcagcggcataaatttggcttatggcgataataagaaggtgatgggcactctgaagaatatcgggcagaacatgctcgaaaacatca

SEQ ID NO: 283969 - DNA, 778 bp, Zea mays
gcagctgctcctgccgcagggttacccgtgcaccgagcacaccgttcaaacctatgatggctttcttttgtctcttcagcatattccacatggcagaaatggaattgcagataatactggacctccagtttttcttcagcacggtcttttccagggtggagatacatggttcataaactccaatgaacaatcacttggatatatccttgctgacaatggttttgatgtttgggtcggaaatgttcgtggcacacgttggagtaaaggccactctactctctctgttcatgataagcttttctgggattggagttggcaagaccttgctgaatacgacgttttggcaatgttaagctatgtatatacagttgcacagtccaaaattttgtatgtgggacattcacagggaactatcatgggtttggctgcgtttacaatgcctgaaacagtaaagatgataagctctgctgcgcttctttgtcccatttcttaccttgatcacgtcagtgctagttttgttcttagagcagttgccatgcatcttgatgagatgcttgttattatgggcatccatcagttgaacttccggagcgatatgggtgtacagatattagattcgctgtgcgatgatgaacatttggactgcaacgatctgttatcttcaataacaggtcaaaactgttgtttcaattcatttcggattgactattatttggagtatgaaccccattcgttatcaacataaaatttgcagcatcttttccagatgatcaggaaa

SEQ ID NO: 283970 - DNA, 507 bp, Zea mays
gaggaggggaaggaacaagatgagttccaagaaagcaacaaaccggggtttggtacttgtccttctgctcgttgttttgcctgcgctttcggtcgccacgcacgcaggagaaagagagttgccagatgaaaaggatcacaagggccattccactgttgcttctggaaaggggggaacggcttcaggagatatggtgaagacgaatgactatgggcgctacgatccgactccggcgttctccaagcctcgctccaagcttatacccaactaattacactcacacttgctgcatctacatgcttactatatggatggcatgcatagaaatagtcctgtacagaatataatgtatatatatatatatgtaactactcacttcgtttttttgtcgcgttctagttcaaaaataaactaatcggcgaccaatattcgaaaacggaggtagtatctagccttggcgcctctctgaatgtactcgtctttcagtcttaagttggtgtgttggat

SEQ ID NO: 283971 - DNA, 647 bp, Zea mays
ccgggggagctggtattttatacccgggtcgatttacgcgcccgcggtctttgtgggttagagcttatatattttgttgggggttattttgaacaaacaaaccttttgtttcccataggagtatgttctcttctgggatcactcacggctatgagtgtaaagagctcttggaattgccttgaagctaacattgccaggaacaaaccaattattctatcctcagacttgggcctttgcactgattgtagctacctgtgtgagcacccagattaactatctaaataaggcattggatacatttaatacagcagtagtctcaccaatatattatgtgatgtttacatcactaacaattatagccagtgtgataatgttcaaggattgggaccatcaaaatccaacacaaattgttacagagatgtgtggcttcatgactatcctatctgggacgtttcttcttcacaagaccaaagatatgactgagagtcctggacaatgtttgtccacacggcggtcaaagcatgctagtcagaatgcgtttgcaattgaagtcgtgccactaaaatgtcaagattctatagatgatgagaccttgactttgtcacttccccaggttgaaaatggttacctaaaggaagagcatcttc

SEQ ID NO: 283972 - DNA, 685 bp, Zea mays
ctttttcagcgtcgccttcgggtgtggttacgacgggcatgttcgaagcggcgacctgtgttcgcctaccgacggcgtgctggggctcgggaccggctcagtcagcttgctctcgcagctcaaacagcgtggcgtcaccaagaacgtggtcggccactgcctcagcctgaggggcggcgggttcctcttcttcggtgacgatctcgtgccttaccaacgcgcgacatggactcccatggctcgcagcgcgttccggaactactactcccctggctccgcaagcctgtacttcggtgaccggtcactgggcgtgagactggcgaaagtggtcttcgacagtggaagctcgttcacctacttcgctgcaaagccataccaagcacttgtcaccgctcttaaggatggcctgagcaggacgctggacgaggaacccgacacttcgctgcctctctgctggaaagggcaggaaccattcaagtctgtgcttgatgtgaggaaggagttcaagtctttggtgctcaactttgccagtggcaagaagacgctcatggagatccctcctgagaactacctcattgtcacagaaaacgggaatgcctgtctgggcatcctcaacggatccgaaatcggtctcaaggacctgagcattattggagacattacgatgcaggatcacatggtgata

SEQ ID NO: 283973 - DNA, 686 bp, Zea mays
  unsure (1)..(686): unsure at all n locations
aggaaattcattttctgatatgaagaaatcagatgaatatttttggagagctctgaacaatgtactaaaccaaaatgtactacagaactttggattttctctcccggaggtcaagcaattgggtggttttgacctaataagttcacttggtctgaaatcacgcaatattgctgaacaggaatatcgggaatctggacttgcaatggcagatacttcaacaaatggtggcagtgaaacaacttctgaaaatacagttggtgttgagaatgaaaatagaacattgacaaccaaagaggaggtgcaatcttcctttccagatataaataaagtatctcgggatgtattgtctcaaacagaaaatatactcggagctctgatgatactttccaaaaatctctcaccacatgatcagtcagtaccgacaactggaacaaatgggaaatatgacatgattagagaagagcaaggtgcttcagctgcagattctgttcaaaaggctgatactgtttcatctgcgttactgtccattgatgcacaggaagcagaggatatgcggcgcttgtttgcaagtgcagagactgccatggaggcatgggctatgcttgccacttcactgngacgtaacagtttcatcaagtcggactttgaaaagatatgttttcttgacaatatttcaacagacacac

SEQ ID NO: 283974 - DNA, 382 bp, Zea mays
  unsure (1)..(382): unsure at all n locations
agaaacnnggagagaattgaaagcaagaaagcctttttatttcccgaaaccgtggaggagctgagagcactgcatgacaagaagggacagaagatcctgagaaaacaacaaatgtacccaggtcctagggacaaattaaatgcacgccaaaaggcactggactcgagatggaagaaggcccagagaaatgcgggcctcctgaagcgtcagcctacgtggccgtccaacgagcacctgggaaagaaaggcatcagcgggcacatcaacgtagatcataagaacgaagccccgcctggcgagctgacaatgccacaagatgcgtcccgtgacaccattagagacaccagaggacctacaggcggagaacgaccctacacaaccc

SEQ ID NO: 283975 - DNA, 495 bp, Zea mays
tgcacgcggtgagtccttgcacttgcatggacgatattcacaagccggagatggccatcgccatcacggagttccgggcgctttgcggctttgccggtagcgaggagctcaaggatgtcctgagggcatttcctgaaattgaaggactagttgggcatgaagatactgccaggctgatgaacatgaaggaagatgatggggttagtgaagtaaaatccactttgcaatcagcttttgctaagctaatgacagcaagtaaagacatggtttctgaagcagttgcaaaactgatcagtcgcctgaatactgagagcaagattaggaccttaacagacaaagaacagctgcttttgtccttggagagacaatatcaagacgatgttggtgttctagcagcacttttttttaactatgtcaagctcagtcctggcgaagcgctttatattggtgcaaatgaaccgcatgcatacctctcgggggaatgcattgaatgta

SEQ ID NO: 283976 - DNA, 639 bp, Zea mays
gagaggatcatgatatcagactatgcagatgccacatctctgtctacctacttgtctgaatttgatgagcggaatctcccacccctatcagctggacagcggctgaacattgcgattgatattgcccgctgtctagattacctgcacaacgagcgggtgattccacatggcaacatcaagtcgtctaacgtcctgattcagaactccactccatctgctctggtgactgactacagccttcacaggctgatgactccaatcggcatggcggacaggtcctaaacgccggcgcgctaggatattcccctcctgagttttcaagcaccagcaagccatgcccatctctgaagagcgacgtgtatgccttcggtgtcatcctgctggagtcgctgtcagggaagattgccggtgagatcattctgcatgaacgatggcgtggccgacctgaccgactgggtgaggatgctggatctggaggagcgtgtcgcggagtgcttcgacaggcacatcacggctgttgagagctcggaaggcgccccacaggcactggatggcatactgcgcatcgcgctccggtgtatccggtcagcatcggacaggccgaacgtccggacggcgtctgaggatctcttgtcctta

SEQ ID NO: 283977 - DNA, 535 bp, Zea mays
gcagaaggaatcaactcgatacttgcggtattgtgcaagaacagaaacgaggcactgcgacagacagcggggcgggcagtggagagaatcctgaggacggacgaaatagcgtatgagatatctggaaaccagaatgttggtacagccttggtggaggcattcaggcatggcgactctaggacaagacaggttgcagagcgagcattgaagcatgtagataagttgcccaatttctctgggatattttctaagatgggagcacaatgaccacgttccatggaagtactcgtgttctatttgacatgaggcaggcgcagatgaacacttgtgttcccagcaggccttcactggttttgctgactcgcactccagctagatgttgtagcgatctgattggtggaagaagaattaagtattgcacgtgttgtatagtgtgtatttgaacctgtagacttgtctgtactttcgagattggtcagattcatagaataggttgctatccctgtcgtgtggagacaatacatattgcataacc

SEQ ID NO: 283978 - DNA, 263 bp, Zea mays
ctggaggtgcaaggtctctggcacctcttaaagctctcttccctaatctccacacaaaagaaacaatatctagcaaagaggagctggctccattctctaaatattcttctcgcatggctgcacttgatttcattgtctgtgatgaaagtgatgcttttgtggctaacaacatcggcaacatggctaaaattttggctggacgaaggagatactgtgggcacatgagatcgatccgaccaaatgccaaaaggctctatccctta

SEQ ID NO: 283979 - DNA, 764 bp, Zea mays
aatacttccaggctggcatcactaacagttgaccttggtgaagatgaaaaggaattgctccattccgaggctgagcaaaacaggagaaaaagaatcgagtcacttgttaatctgcagcaagaactaaacggcctgattgaaccaaagaaagacctcgccatacaaccaggaatgtacgtttctgttcctcccagcacgccagacacagctgaagaagagaatgctgatcccagccaaggcacggctacttcgacctcagaaactgagcaacgtggccaggcaagcaacgccagcagcaacaagccgaagaatccaggccatcgaaggagaaacagagctaatgcatcaagacgacagcctcatggccagggccagccagctaggcagcagtggcagaggaaagaagcaggcacttcacaccaataaaacaacatcgaagcaacgaggaggatgtgacctgtgagttgtttttgtcggctatgtacatcaatgtcgtgccttgctttcgtctcataataattgcgagccatggtatgacaatgttttggcgtatgacaatgttttggcgctgctatggaagttccatgcaagtgatactctggaaagaaccctgcaccggattctatgggagtagtaagtatcaagcacatgcatgcttggctagtacatacaatatctgatttttttttttgtgtgtcattgccaggtactatgttcaaactgattgtccgtagtcagaaaagcaactgattacactgtttgtt

SEQ ID NO: 283980 - DNA, 701 bp, Zea mays
gtgacttttttcactggtgcacttttcattaagttggggcagagtcctatcagacaggcgccatcagggagcatgacagcatccacaccagcacgagcaccagcagccgatcccgcagccatggctgatcctgcatccccggctaatggtcagttctctcctcgtacaccccagcctttcatggagtacgtgaggaggaccattgatgacacaccgtactataagcgtgatgccaggaggcgattcaacccgcagaacacctactgagcatgcgtggcagcgtgtagtgtggactggttggtctgttgtaacgttcctgatttaggtccgcagttggtttagaaccacagttgtagttcttgcacgagtatgcccttgctgtgagaatgctgtaaaatttgtggttctagcagcacgtgcggtgaggggtggacatctattttggtagaagcctgttgtttgccattttgccaacaggtataggacatctgttttgttagaagcatgttgtttgacatttcgccatagatataggacatcaattttgttagaaccctgtcgttaattcttggcatgtaattttaggtctgtacattggagtacgggacaaccaaacccttggtttagacaactgttttagctcaattgctgcagatacttgagttttggtggcctgctttaaaaaaaaaaacatgtgtgtt

SEQ ID NO: 283981 - DNA, 640 bp, Zea mays
tacccacgcgggacttttttgtcgttgtggactgcaggatctctggggacagattttaaagcacagcttgttgaaggacaagctcaaattaacacccttcagagtgaggacagtggggtctttgttggtattgaggatgccaagagccttcagatgactgaagttttctcctcgaccatttcgaccaatatggcctcgcttatggaggtgtttgcaggaggatccttggaaatgaaggtaatggagaaagttggatgccagaagtactcggctacacagtgggaatcagataaacccaatgagtatcaacgacaaatccattacaagttcagcaagaagctgtctcccgttggcggagaagtgacaggaacccagcagaaatctcttatgcctaataagaaaggatgggttatcgaagaggtgatggagctccaaggagtccttcttggcgacttctttacgctccacatcaagtaccaggtcgaggacctcgctcccaagcaaagagcaagcaatgtccaggtctccctgggaatcgagtggtcgaagagcaccaggcaccagaagcggatcgagaagaacgtcctttccagttcgtccgcgcgcctaaaggagatgttcagccttgcgtcgagggagc

SEQ ID NO: 283982 - DNA, 529 bp, Zea mays
ctgactcatcatctctgggacactgccaagtacgaggaaggaaggatttgtaaatgccactttttggagtttctggccttttggtttagtcatcaagactctagctagcaattatctaaagaaacacatgaaatgctaattgccaccaagatggcaaaattgccggaaaacagcagttgagggagaaacttcattgcaatgctaacaataccagtgcccagatcatgacaatcagagccagtagcaactgaaccttaagtagccaccaagtttggcaaaacttctgcaactctagttgagggggaaattttttgatgcgacttgttgatgcacaagctgaacggcccaagatttctgtagttgctgcttgaaatattcttgataggaagggcaattttgtagatgtctcgagagtgtaaaaaacatgcactgtagttctctttttacctgtaagataagattgtatgcagtatgcactatttgagttgtaacgggataagttcacgaaagtatatttttttatttaaaa

SEQ ID NO: 283983 - DNA, 952 bp, Zea mays
gaagctcaattaaaggaaaagtatcagttgcgcttaaaagttttagaagatggcttgagtgggcactccaagtggatcttgtcgtcctcccatggaaggaaaatgtataagtaatggacctccccgtcgactttcactatgtggtgctgatagtatatccaaaatctctccaaacggtgtgttaatgatgaggtctccatctttcaattcaagatcctccctctctaccagcagctggttggtcctgaagcatgcaggaagaacttcaaagtcatttgatggcggtaccaggtcattagaccagggaaaagttctggggagtggacctcattcactcaatagatctacggatgcagttagagattgtgagacagctgatagttggaaggctaatgcagaagaaaaaagtaatgaaaccgcaaacaatgattcagctgacatggtctctggtgtactctatgacgtgttgcaaaaggaggtggtttccttgagaaaggcatgccatgagaaagaccaaactctaaaggacaaagaagatgcaatggagatgctagcaaagaaagtagatacattacataaagcaaaggaagtggaggctaaaaagaagaggcaagagatagctgctttggagaaaaaatttgccgcggtgtgccttgaacaagaacggcttggtaatttgagaggacctggaacttctcagacggtttcgggaagaactgcatcacgaggtggattgacgcgcaacctccaatagcatacatctaacttcaggcaggcatggaattcgtccataggcttcatttccattgtatttgttcccgtgttcttattcgttttgtgatcaaatagcacagatgaccctgcgatacctagatgaggggaaagagtaggttttcatctgacatgacttgcttgtagtgaaggtaaatccttcggtcggtgaggtttaacc

SEQ ID NO: 283984 - DNA, 757 bp, Zea mays
cgctgctcatgagcaccacggcggcagcggtgaccaaggcgcgggagagcccgtacctgctggcgctggcggccaacccgaccttcgtgtcggggctgctggcgtgggccgcggctcaggccgccaaggtccttctcacctccgtcgtcgagcggcgctgggacctgcggatgctcttcagctccggcgggatgccgtcctcgcacaccgcgctctgcaccgcgctcactgcttccgtcgcgctctgccatggtgtcagcgacgcgctcttccctgtttgtctcggttttactctgatagttatgtacgatgccacgggcgtcaggcgccatgccggaatgcaggccgaggtactcaataagatcgttgaggacctgtttgaaggccatccgattagtgaaagaaaactcaaggagctgttaggacatactccgtcacaggtctttgctggagcaattttgggcatcttggtggcctggtattgctgccaaggttgcattgttcccgtttgatgttgttattactgtatgaatgacccagaaacgaaactattccatcacgtggattttgcatgtagcgtaaccagtgaccgggaaagtatttggtcttgactgtttgatttccctgtatatatgtaacctgatagtacggaacaatcaagatatccgtcctttcgaatgtcaatgccaagttgaggctcgatttatttgtgaaaaaaaaaaaaaaaaaagggcggcgctcgcgatctagaactagt

SEQ ID NO: 283985 - DNA, 583 bp, Zea mays
cgctggcaccttgatgaggttctcgttcttgctgggatgtttctctatgtcatcagtcttggctcaagttcttttgtggaagaagagcagtatacatggcacttcctcacttctactctgtatctaatatttctggccaaggcagttcagtcaatgctaaaaggatcaaatccaacacttggtcataaagcagaaggaaatagctttgacagaagtagctttttctatgctacaagctatgaattaacaccaggcaagagaaatggttacaagttatgtactatccttgttgttcttgttgctggaagagttataagagcttggcatcaaggtggaatcaactgggttcactttcctgatatttccaagttactggcgcaagctgacccttctgttgtaaagtctcttcagattatctcagttcttgcagttgtggtattgttttcaatttcactcactttactcagagcaagaccagagtttgttataggagtatggttgacccacatttcttgtggatttttggtcctactgcatgtttggggaaatcatattggtacttcattaccaattaaccatacca

SEQ ID NO: 283986 - DNA, 605 bp, Zea mays
  unsure (1)..(605): unsure at all n locations
gacaaatcttggtgaggcattggtgatgggttatgatgaaatggggtatgagctttggaagccttatttaagatcaatgatggaagctgatatgaaatcagttagcgtgggtactaagagtaaatcagaagtacttgagagttgtttgcagcagatgaaggcctgttttcttgacgcaagggtgaagaaagcaaaactccttgatgcaatggggacattctttgcaaggtctaataggcctataaatgaaactcaaaatccagtagaggttgtgaggcctttgtggtgcatgctaatggatctgcaaatggttgcttaagcgaaggggcgagtgggtgaatttatggtctggggcgccgaagttatccacaatgctagaaacgtggtatggctcccaggatctctttcagaagcggctgtaactaatcaagtttgtcctatctgcgcaccaggccctgtttataagattcatttcaggttccgtcggagggatattccaccaaatttcgatgttgatcacctaggttgtgtggtgngtgtgatgatatcctaaagacctatggagatagtagggttggagtcgaaccaggctgcacaccagcaga

SEQ ID NO: 283987 - DNA, 565 bp, Zea mays
cgagtgtgtacgaggaaggggatgcacgttctgcactcattgtcatgctccaagagctccagcatgcgaagaaaggggtcgacatcttgtctggaactagtgtcaagacgcacttcgcgcgtcccaattggcgaagcgtcttcaaacatgttgcagtgaaccatgagaaccaacgcgttggagttttctactgcggtgagcctgtccttgtgccacagctacggcagtggtcagcagacttcacccacaagacgaacacaaagtttgagttccacaaggagaacttctaatggcataactggagaagctctggacgtggtcctctaatgatttcagaatgtgaattaccagggttgtaatatatatacgagtagaataaaatgatgggagttattttgttatagatgtcaaaagtcaaccatgttctttttgcaatgtgctctgtccacccctgtttactcctctatgccgtctaggcgaagtagataatgtatcttttgcatacaagcaccattaaaaggtgtaacacatgattttttttttgataaaggaagattttattaat

SEQ ID NO: 283988 - DNA, 262 bp, Zea mays
ttgccagaagtctgtagtttcactaccagcggcatcgtcacgcgagcatcacttccatttccatgccaagacaaagagccaaaaacgtaacctcgaggaggcacatccacgtgttctccatattgcaactactgctcaggagaagatgaagtcgtggtggaggatttccaggagttccaagagtacgatgagttctaggcgtggattagcggtaaacccccagtcggctgcctgtgaaggccgtgtttagctacgtttcgtt

SEQ ID NO: 283989 - DNA, 550 bp, Zea mays
  unsure (1)..(550): unsure at all n locations
tttgttttcaagaagaagagcctgagcaacccataccatcagcagcaacgaagagctaacccttggccggtgcaagaaagctatgccatcccacacgacgaaccacctccggcgctggacacgagagcaccagcccctcagaagaactacagctccgagaagatccactacgtccgccatgggcacccgtatttcaacagctgggacggtcaccgtctccctcagcagcagccggaccagcagctgtatcaccagcagcagcagcagcacctgcagcagcacaggcagtgctctgcaggcccccagacgttttacgagcagagctgtgaggctacaaacgaggtcgtctttggtgcggtccaggaggtggacagcaagcggcgaatggtcgagatcaaggctgtcaactacggagatacattctatgaacagtacgggatgcggtaccgcaacaatttcatcggctacaacaacaataacaactattggacagcctgtctatttctttgacttccnctgnctctctcttttcctttctttttttccatct

SEQ ID NO: 283990 - DNA, 992 bp, Zea mays
gtgtttgacaaggtcaatgatcattaaatttgtttcctcacttgatgaaaggtttcagatactaagttacttggttaagttctgggctaaggtacatgatctgaataccccaagacaactaactatgagctccatgtcaattatttcactagttgctttccatttgcaggtaccatgggttaattattattttggtttggttattaaattgcaagtaactgtcccattaccttttgttttaattaattgacctactaaccaatctgcatttgaagacacaaactttggattcatttgtatagaaaataagacgagactcattggggaaattatgaattatcttctttactatcgacaaattctggatatgctttatgccagttcagaaaacatgatagatacccttcttctacacttcctcagtctaaattcctacacttcatgctattgcattctatgtaccagaaaaaatggattttactccattttccttaatggtagtgtttgagtagcaactcattagatgcatggcttagaagataagcatcaatgtgctgtgcagacccggcatcctccaatattgcctgcgttctctgacttgttaaaagatgggttagattgcgaaagcattgagaggaatgctttacggtttagggattttgggagtagaaataaagaatctgtcgctgaactgtttgtatcattgataagtaaactattgtcagcagagcgtctcatgggagcatgggctgtgcgcaagcaattttgaagcgtcatggatctcaaagacctggaagaaaggagtaggcaatttaagtgttgaagatttcttggaccggtcgcaaaattttgcaaggtcagtgggaaaggtgcagatgcagaagatttgcaaatgccttagagaatgtgctttgaatttgctagatttcatgagagggaaaatggacacaacgaagctgaagacccttttatttgggcggcttagcccagac

SEQ ID NO: 283991 - DNA, 512 bp, Zea mays
ttttgccaccgtcttcccggaaccccaccgagccgacgaccgaagccgacgcgaccctcctcgcgtcaccgcgcgcaagagtcccatggccacggcgggttcgtccccccctgccagccagcagcccttcaagctgatcctagggtcgtcttcggtggcgcggaagcacatcctcgaggagatggggctggagttccaagtcatgactgctgacatcgacgagaagagcatcaggagggagaatcccgatgacctggtaatggtcctcgcggaggccaaggctgatgctatcatgtccagattgaacattgatgattatcagaaagaaggcagtcaaccaacactcctgatcacatctgacatagtgcgtcgtccatgaagggattattagagaaaaaccaaccaccaaggaagaagcacggcaattcctgaaaggctattccggagtcacgtgtcaactggtgggtctgttggtggaactaatcttacaactgggagagacttgaagtttg

SEQ ID NO: 283992 - DNA, 512 bp, Zea mays
cgtccgcgcctggaacgccgagagcctgccggcggcggcctccgccggggtcattgcctggacgctcaccctgctcgccatggggttggcggtgaaggagattgcactgcacggcaggaatgccaggctgatatgcatggagtccttcaccatcatcctgtcagcgacgcagctcttctacctgctcgccatacacggaggcttgagatgacatcgtcacactggatggaggaagagactgcattggagtgaagatttgtcgtttccgtacgtatcgaattgagctggtgtgcatcggtttcacgggacagagtgtggctttcctcgtgttttcgttgtgggtttcttccaagctgcagaggcactacgtatatcagtatatggggatcggtttgcgggtatttctgtgtgttaattacgtgcggacctaaatgcatcggtgaagtctaaacttggaaggttttatttggatactttagtatttgtcctaatacatatcctaatcccccccc

SEQ ID NO: 283993 - DNA, 525 bp, Zea mays
ctcgctgaaaaggttacaggaagcaattctggtgattccccgtggtataacagttctcatggacatgcttatggaccgtgaggtcataaggaatgaagcactgttacttcttacttatttgactcgggatgcagaggaaattcaaaaaattgttgtatttgagggtgtgtttgagaagatatttagcattatcagagaggagggctattctgaccgacggtgtagttggtcaggattgccttgaactgttaaataatttaattcgacacaacgcgtcaaatcagatgcttttgaaagagacaatgggctttgacccattgatatcaatactaaagattaggagaggcagtgcaattaattttacccaacagaagacagtaaatcttcttggtgctttaaatactgtggaattgcttttgatggggggcccatctggtgaagcaggtaaagacgctaacaagaatgcaaatcaaactgcattggctcagaaaaacattctggaccatcttcttttgttgggcgttg

SEQ ID NO: 283994 - DNA, 605 bp, Zea mays
gtggtggatcactgtttctatattccagtacagatggagtcaactctaccacaagatgtatacaagatgttgagtcgtccttatgcttttggatgtgtaatgcgattgagaacatcgtcgcagttcaagattgctgattcttatggccatttcttcccagacccccagtacatgcatgttcagcacataaattgttgcgactcttttgctacatacagttatgactttgagtttgaaaaggattcccaattttccaggaagtcaagccctcccattattcaaattgcatttaagtacactgtgcttgtgcacaatggtgatatatcagatcttccaaattctgggtgcagatttaaatacttgttagaaaggaggctaagagtgcggactatccagtacaacacaactgctaatatctgggacctttacgattttgttgatccagatgttgttttgacaatattggtacaccaggttattttggcttctttaagtgatgcactggaaacaatgctgtggctccaagattggctggtggttgtcatcgctcagtacaacaaagcatacaagaatgtcacatctggaggtggtactgagatttataa

SEQ ID NO: 283995 - DNA, 577 bp, Zea mays
caccagtccagatcttattgcttcccttcatctgaataaccacggtgataccctggttgcgtcctactaccacttggtaaagaaccattcaggcactgctgttggagctgagttgtctcacagcatgtcgagaaatgagagcacgctaatcttcgggtcccagcactcgctggatccccacacgactatcaagacacgtttcaacaactacggcatggccagtgcccttgtccagcatgaatggcgtcccaagtccttcgtcaccatctctggtgacgttgacactaaggcgattgagaagagcacgaaagttggcctatccttggtgctcaagcactgaagtgccgagtgtttttgggctctaggaatttattttcggttcagttggattggaataaacatggtctggagtcatctttgcggcaccattttgatcttgaactatatatttttttcactctctgcatggtcaatttcataggaaaatattaggattaattgactttatgtttcaattctcagcgccctgttaataattctgttgattgagaccaattgttaaacttgtgaaatatat

SEQ ID NO: 283996 - DNA, 567 bp, Zea mays
cggattcgttggtcgaattgttcgggaaccgattagaaacggtactaaaacgatttagctagtttttcaatcgttttcgtatttttcgtttccgagtcgtgctaatatcgttttctaccgttttatataatatgagatagatctagcatataatttatttaagttatagacttttgttgtgttcaagtgaatcaataagcgaaaagcaaatgttataattactcactaatatgaatgatgaaaaagagttgtttgtgtatttctaaatcttaaaaattaggcaatacatcactttattatgtttttgttaaaactacaaaatagttatctttctgactatagtttatcgttttcgatcgttttcgaataaccgacacttccgatcccgtatttcgaccgttgattttcgttttcgttttcgtcccggccaaaaaatatgaaaacaaaaacaatttagctgtttttcgatcggtttcatccctatgtgagccaggctatacacgtgcgagctctgtgtttggttgcctacatgcagatttagatccaagctcgcacgatcctcaaagc

SEQ ID NO: 283997 - DNA, 584 bp, Zea mays
ggcgaatgtcttcttgggagagtgcgcgttctacaggctgacgccttgaacttggtccaaggtggactcactgctggcagcaccgcttctgaatctagctgcgcacgaccctccaggcatgcgatacgctgtacgataggttaaagctagtctgggacaggctgcagcagcgatcagagaacgtctcgtgggataccttggtttcgcaggcctatgaagacgatgtcgatatgtccgcgagtgcgtactgggtacctggtcaagtttctaacaagtaccttaactacggagctggtataagcgaggtggaggttgatcttcttacgggagcaatcactataataaggggcgatcttgtgtacgactgtgggaagagcttgaaccctgcagtggacttaggacagatccaaggctcgtttgtacagggaatcggtttcttcgtgtacgaagagtacaccacgaacagcgacggcctgatgatcagcaacagcacgtgggactacaagatcccaagcgtggacatcatcccgaagcagttcaacgccgaggtgctgaacaccggataccacaagaaccgcgtgctc

SEQ ID NO: 283998 - DNA, 509 bp, Zea mays
  unsure (1)..(509): unsure at all n locations
actgaacacccctgcttacgttacgatcaacatggcctcgagaaccaccgcgtcctcgcctcgctctcctgctgctcctttcctgcgccgccgtgagcagcgcggcgcgaaggctggaggaggaggcgacgcccaaggagggggagccccacctgaccgtgccggagctgccagtgccagagcacgagttgccgccgctgcccaaggtcgaaatgccgccgttcccggaggtcgagctgccaccgctgcccaaggtcgaaatgccgccgttcccggaggtcgagctgccgccgaagcccgagttaccggccattcccggattccattttccggagcctactacgccatgacgcgccacccctgcgtgctacttcctcggtcgtacgcgcgcgcgaattatatatgtgttcgtgttgggatatggatgcccgctcgtgtcgtgagtgtgtgctctgcttgcgttcgtgcttgatgtattatatatacaaataaactttatntttctgact

SEQ ID NO: 283999 - DNA, 610 bp, Zea mays
  unsure (1)..(610): unsure at all n locations
atgtcatccggcgggttcgacacagaacagggatccgcatttgcgtcgacggcaggcaacgtatgctacagcatggaagtaaaggacgcggttctgccgccatgggtggtctctgggctgtgcgccgccatgagcttggacgcgaccagctttgatctgacgatcgccacggagccgtcgtcgatgggcttgaacgtggctctcgactccatgggcaccaccgccacggatgtcgcagcctgagggatccaccccctccagctgctctgcgcccacgacgcccttggtgggtgccgttcctgacgcggccctcgtccctgccctgcactccgcctcgctgcgccgcctcacctacacggacggcggcgggtacgttgcgcacacaaccgtgtgagcgcctctgagcttgagagcccggccctcctcggtatgcgcagcgcagcgcaggcttgttcttttcagaatttggagcctgccctggcctttgtcgtacaaggacgacgtgtcgttacacgcttggttgggttggatggtaactaaactatgaagtcagccttcttctgggggcttggaaaggaacacttgtgcttgaactcngagtgtgcttttt

SEQ ID NO: 284000 - DNA, 1054 bp, Zea mays
gtaggctcaagcatcacttgagcgggatgatgaggatgtatattttgatgatgaatctgcagaggtagtaatctcctcccttcgccttggagacgaccaagaaagtggctcgctctttacaaattccaattggtttgcatttgacgaggacaaggcactgaatgatggtttggttagctcagaagcatccccatctccaaattcggaaatatccgcactaaaagaggatgatgaacacgatgaagtcattcttggcgaaattatagatgacataaaaggttctgaaccaactctaccagtctccaacaaagatgcagacaaagaatctggttccaccggcttggcaaatggtaccgttgacaaattctaagatgatatcagaccaccaactccggatgtaaaagagagtcaacctgagtttgttgaatggaaggaggaagaagctgaacctggtgatgttgccgagaaggataccgcagttcctgatattgaggttgaaaatgagaagcagctggattccatggatgatgttatgctttgcgatgcacagttaggagaggaaaagaagagtgatgagcttggcatatgaagtgaatttcagaggagcagaatttcagaggaagcacttggaactggtcagaccattattgcacaagcagtctgaggatcatatgtgagttctctgttgtacacttgaaggtggtcccggaccgtgcatctgatggagcctcaaagattcaacttgtctgatggatagatgtgtaacatgatttggtggtggttattgttatgtgcctatagtctgggctacatcgagacgcaaaattctgaaagtagtcttccttgtcctttcggggttctagttgtgacccaggtaaataactgataggtgaataggtgatgctatttgtacgaaaattttggctcaaatgcagtcgattgttggcatatttagaacttgtttcaaatttgtgtaaactaaagaatatagtttctatttttttccaggtacttaatgcataattcatttgttataatataaacgacctttggt

SEQ ID NO: 284001 - DNA, 826 bp, Zea mays
tgtgacaactgacatcacgattccaatcgtgaccccaaatgaagctgctcaattggctgcaaaataccgcggacaagggtttcaaactctgaagctcaaggtcgggaagaacttgaattcagatatagaagttctgaaagctatacggcttgtccatccagattgctcgtttattttggatgccaatgagggatacacagcaaatcaagcaattgaggttctcgatagactaaatgaaatgggagtgacccctgtgctcttcgagcaaccagttcacagagatgattgggaaggtctccgagatgtcagcgctgtggccatggagaaatacaaagtcgctgttgctgctgatgagagctgccggagtttgcttgatgctcagaaaataatacaagggaatattgcccatgttattaacatcaagttggcaaagttaggggttcttggagcccttgaaataattaatgctgcaagaaaatccaatactgctctgatgatcggtggcatggtcgagactaggattgctatgggctttgctggtcatttagctgctggccttggttgctttagtttcgttgacctggacacacctcttttactgtctgaagatcctgtgtatggtggctatgaagcttttggacctctgtacaagttcacaaatgcccgtggccatggtggtttccttcacttggacaatgatgcctcgaaatgaagctggttaatgattttgtctgtcgttctggagcttcatcgaagcattgcagtgttggttccactggacaaccatgacataaccaaaaatcaaacaagcgattgcagcatatag

SEQ ID NO: 284002 - DNA, 472 bp, Zea mays
tttcttgtaacgtgggtatgggttctctgcactgctggcggtagcgtccaaagagaggggaaagaactgctagttcagcatttgcttgttggtgaaaaggatgtcaggcttctggttgatctcgaaaagaatatcattgcaggaggagcagacttgagtgatttagccatggagcactccttgtgtccatccaaagaaaatggtggtatgcttgggtgggttcgaaggggacagatggtaccagaatttgaggaggcagcatttagtgctcctttgaacaaagttgtacgatgtaagacaaaatttggatggcatctagtgcaagttcttgctgagagggatcaatgcatactgcaagacattgacccagaagagcttcacgcataattgcaagaccctagttttctcgaagaagctcaattgattgatgttccggagcctgatccagtggagaaagcttcacttccaggct

SEQ ID NO: 284003 - DNA, 629 bp, Zea mays
cggccgcgttaactcgaaaccttttcttgtgctctgtctgtgtgtttccaaagcaaacgaaagaggtcgaggatgtcttgcagctgcggatcaagctgcaactgcggatcaagctgcaactgcggcaagatgtaccctgacctggaggagaagagcggcgggggcgctcaggccagcgccgccgccgtcgtcctcggcgttgcccctgagacgaagaaggcggcgcagttcgaggcggcgggcgagtctggcgaggccgcccacggctgcagctgcggtgacagctgcaagtgcagcccctgcaactgctgatcctgctgcgttgtttcgtttgcggcatgcatggatgtcaccttttttttactgtctgctttgtgcttgtggcgtgtcaagaataaaggatggagccatcgtctggtctgactctggctctccgccatgcatgcttggtgtcggttctgttgtgcttgtgttggtgcatgtaatcgtatggcatcgttacacaccatgcatctctgatctctttgcgccagtgtgtgtgactatgtccctgtaacgattggctcagtgattgaatatatatacaatactgttttactaagtaaaaaaccacggtcgcggacggtgtt

SEQ ID NO: 284004 - DNA, 509 bp, Zea mays
  unsure (1)..(509): unsure at all n locations
cataggccgtgtgcggcgttctcaataatcttgttgcgccgccggcctctaccgatcatcaccttcctagctacacgccactggccagtttctttcattcaccatgacgaagctccttcctctgttgttccttgcaatgatgatgctgaacgtcgcttgcagtgcggcacatcacaaggtggaattattggtgcacaaggtgaaggcggggacgacgacggcggaggggacgtcggtcgacaatcaccatgcgataccacggcccgagtatgatagctggagcagccctggaaacatgccgggaagtggccatgacgttgggagccaagaagttaagccatgagcagccttcgctctatacatttctagtacgtcgtagcaaagcttgcatgctagggtacgtacacatataatatatatatccactatctatgtagacatgttgggttggttgttgccatatgtctggatgaatgtatatctctttggtntgtgcacttgtgctgttt

SEQ ID NO: 284005 - DNA, 709 bp, Zea mays
agctggatccgcccctgcggtggcagcatgagcggcggggcgtcgctggggctcaggtcgtcggggagctacggatcgctgccgcagcagcagttaggcggctgccagtcgtcgtccccaccgctggccgcgcggaagcccgcgaagatgtccctcggcgggaccagcggcccgcgcgtctgcgcccggatctgcaagctcgccggacgccgccagcggatgctcctcctcctcctcgtctccgtcgccgtggcattctgcttcctcttctcatcacttgtcagtaaaggtgacgaagatgcatcacctgctgttgagaccatgcttgtgttttctgatcatgtccggagctttgtgaaccctgtttggacatcgtcaggcagaccagtagctcagagaggttcgctgactgtgaatggtttgaatacaccatcgcagatggaaaaacaatctgatagtaaacaagttcaggaactcatgcagagttctccaccggctattgttgtggatcaccatccttgtgaaaacttttcattgtctcctccaccagttgatagaaaacgcactggaccacgaccttgtccagtttgttatttgccagttgagcaagcactggcactgagaccagctaaaccatcattgtcaccagtcctttaaagcttaaattatgttcttgaagagattttgattcccaaagagtccaagagcg

SEQ ID NO: 284006 - DNA, 514 bp, Zea mays
cctgaaacaccacccaaacccaagcagagaagcaaagacacatttggctcactcactcacactcactcgctcatagattgtcctgtccgtccatcatctctagctagcagcttccagtgagagcggcaagcgacaccacaaccagacaacacaccaccaccgagctgtgagaagaagttcgcagacaggatgggcaagctgtggacgatcctcactcacctccactccctagcagggccaacggtgatgctgctgtaccctctgtacgcgtccgtgcgggcgatggagagcccgtccaagctggacgacgagcagtggctcgcctactggatcctctactccttcgtcacgctcatggagatgctcctcgagtccctcatatactggatccccatctggtacgagctcaagctgctgttcatcgcgtggctcgtgctccccaacttcaggggcgccgccttcatctacgacaagttcgtgcgcgagcagctccggaagcacggcctcaccgccg

SEQ ID NO: 284007 - DNA, 303 bp, Zea mays
agcagagaagcaaagacacatttggctcactcactcacactcactcgctcatagattgtcctgtccgtccatcatctctagctagcagctacaagtgagagcagcaagcgacaccacaaccagaccaccaccaacgcctagctgtgagaggatgggcaagctgtggacgatcctcactcacctccactcccttgcagggccaacggtgatgctgctgtaccctctgtacgcgtccgtgcgggcgatggagagcccatccaagctggacgacgagcagtggctcgcctactggatcctctactc

SEQ ID NO: 284008 - DNA, 475 bp, Zea mays
tcgcggtcgcgtgggcggacgcgtggggttcaggagtagcattgtcagtagattttgcgttttgtacagcttataggatattgtctccggcaggatgacagctgaactgattggaacccggaatgtttctggattgctgcttctatgatggctgtcatggaagctgatggtagagcaagactacaaattgcttagataggtcacaactcacaaggaggccaagagatcctgttgtaaagttcaattttagcagttcaaggctgtgtgtccccccccccccccccctgcttctcttacatcatagatgcttgtaaccagattggtagaatttcgttgtttttattcctctttaccccccttgcctgccccctctcaactgtattttaaacaataatgtaaggcatcttggttgagtggctttcatgctttatttgggaaagaatcataattgagtgagtgatatagaatgtaaaga

SEQ ID NO: 284009 - DNA, 482 bp, Zea mays
ctctgctcgtcgtgacggcaaggctgtgcaaataacaaaggagacagagctcacagttcaggagtagcattgtcagtagattttgcgttttgtacagcttataggatcttgtctccagcaagatgacagctgaactgattgggacttgagatgttcctggattgctgcttctgtgatgcctgtcatgggagttgttccagttcagatgatagagcaagaccccagattgcttagataggtcgcaaggaggccaagagaatacctgctgcaaagttcaatttttagcagttcaaggattttgtgggttttttccctgcttctcttacacatgtaaatgcttgtaaccagattggtagaatttctcctttttaccccccttgcctgccctcgactgtttcaaacaataatggtaagacttctgatttgtgtgacttcatgcttttattatttggaaagaatcataaatgggtgtcctcccctct

SEQ ID NO: 284010 - DNA, 450 bp, Zea mays
cttccttgtttgctgaagtccctggtgtggaccgtggagtctcagggagaagcgcatgcgcacgccaatcggcaatccaccaaagattccgttctcccagtcgcctctcccagtcccagatctcgttcactcgcactcgcgcaaccccgcggccccgcgcctaatggcatcctgtggcgccggcgacgccgcgtcagcgcagccgagggccagtatctcgcacgtcatcttcgatatggacggccttctcctcgacacggagggcttctacacggaggtgcaggagaagatcctagcgaggtacgacaaggtgttcgactggtcgctcaaggccaagatgatgggcaagaaggcggccatgtctgcccccatcttcgtcgacgagtgcgggcttaacggccttctaacccccgagcagttcctcgaggagtgcgagagcatgcttcaagc

SEQ ID NO: 284011 - DNA, 711 bp, Zea mays
gacaatgaaaacttcatacggccaggccaggatttatgctataatctctaagcatgtgaaggcatgaggagctcaggtgcgaaacaaggcgagaacagcattgggacatccgggacatggatcggtgatgattgattgtgatgttgactttacatgccatatggcgtcatcgcaactcatcaactcatcgcgtcgatgtacgacgatatcagaaaatggatggatgaacactgcttgaaatgagatcatgtctacttgggggcattctgacaggagttaagaatccagcatttggggaaatgctttggtggcatgcatgtaggtagcacactagcatgcccatgatctgaaaacttggggcgcgcctctctgaccacgatacagctttcttcggtggaaattttggcaccagaatttagaatttagaatttagaatataagccgttcattcggtagtgtaggtcctgtggtcacccctatgtaatgtaatgcccataccaaaatgaatgttggctgtaaattgttctgtgttgaatagattgttagggtagggcagtggccagtggccttcacacctcttctgaatgaaattgcttcttttgttcatgacgtgtgtagcaggaagctcaggaactgtgggctccgttcagttcaaatggcatgctgaatctaaagaggtccagaccttatcaagaatgctgagagcaacct

SEQ ID NO: 284012 - DNA, 513 bp, Zea mays
actagttctagatcgcgggcggccgctcgcgatctagaaccccacgcgtccgcccacgcgtccggacccatgaaaaccgcattgtccagaacattcagcaggagctcacaaaatccaggctgggttcaaaagtttctctcgcatcctatgactcaactgccctgggcaagggacgcaaagtccagatcagaaggctcacagaatggcttggaacccgggatacctgaacatgagtataatgtgacaaggaaccttcagtgggctcatggaaaggcaggggaagatagggtgcatgttgttctatccgaagagcaaggatggctattcattggaatttacgatggttttagtggccctgatgcacctgactttctaatgagcactctatacaaggccatcgataaagaactggaaggactgctctgggtctacgaagacagctctgaaaggagtgatcatgtatctactcatgaagagggtgaatcagttgctgcttctgtggatgctcctcat

SEQ ID NO: 284013 - DNA, 389 bp, Zea mays
acgtggacgtgatcttccgaaagatgaaggaaaccgggttgatcccaaacgccgtggccatgctcgacgggctgtgcaagaacggcctggtgcaggacgccatgaagctgtttggtctaatgcgagagaagggagccatcccggaggtggttatctacacagctgtcgtcgaggcattctgcaaggtggctaagctagacgacgccgtgagaattttcaggacgatgcaagggaatggagtcatccccaatgcattcagctattggctcctgatacaggggctgtacaaggggggcaggctggatgatgctgtcgggttctgtgtggagatgtttgaggccgcttgcaccgaatgcggagacgtttgtaggcttgcttgatgcagtgtg

SEQ ID NO: 284014 - DNA, 211 bp, Zea mays
atcctagtgacacaaaagctgtcagccatattctggtgctttctcaagaagtggtttgacgagcacccagagttcttgtcaaatccactttacattggcggtgattcatacgctggtatgattgtgcctaccgtcacttctgaaattgaccaggggttgaaaattgtttgtagtaaacctaccatgaatctaaaggggtgcctcgttggaa

SEQ ID NO: 284015 - DNA, 348 bp, Zea mays
ggttgtccatgattcttgaagctcctaaggaagaagaggtttcccttcttctagaaattttcggaatatgtcttacagggggcaaagaagttaataatgctatagtgagcagtatacaggacctggcaaagtcattctcaaattaccatgatgaggtcctggtgaaacgtgaagagttacttcagttcacacaaagtgccatttcaggtctgaagaggaacgctgacattgtgaggatagattctgaagctctagatttgtggaagaaactacatgagaaggaggcatcacgagctcaatcaattggcgatcctgataaagttacagaaaagacgtcaactattgagt

SEQ ID NO: 284016 - DNA, 814 bp, Zea mays
tgaaatgggcctttgagactcttcagaggtatcggaaccgattttgcatgttcaatgatgacgtacaggggacagctggagttgctctagcaggcctacttggtgctgttagagcacagggccgtcctctccaggattttacgaatcaaaagatagtcgttgtgggagctggaagaatccagtgctgggataggtgtgcttagcatggctaaacaggcaatgttaaggatgcctgggatccacagaaccggggaagggcataatcaattctgggttctggacaaagatggccttattacgaaagctaggaaggacctggattctgcagtggcgcgttttgccagaggctttggtcctgatgaggtcccagatctctatgagggggctagtcttgttgaagtggtcaagaaagttaagccccatgtgcttttaggactatctggagttgggggcatatttaatgaggaggttctcaaagctatgaaagaatccgattcccctcggcctgcagtttttgcaatgtccaaccctactactaaagctgaatgcactcccgatgatgtattcaagcatgttggagataaagcgatatttgctagtggaagcccttttagtaatgtttctttaggaaatggtaaatctggttatgctaatcaagcaaacaacatgtatctatttcctgggattggtttaggtgcccttctttcaggtgcccggcatgtttcagatggcatgcttcaagcagcagctgagtgcctggcatcatacatcacagacgacgaaattcgaaaaggaatcctcttcccttcggtct

SEQ ID NO: 284017 - DNA, 581 bp, Zea mays
ttactgcacttgggggttcttccccgttgggttccctgggtgtcctggctttgaaagaatggtcaatgcggagccatcgggagtagatcagctgaatgcgccatggcttggaagcgcaggtggtgtgcatggtaatgctcagaatggggtgccaccagttagtgccccagtggtagaagtgccagtcaaggatcccatagaggtgcctgcagtgacaccgccagcgaagccgatgcgagtgaaggtgggtgcgaagaagcgtggtcgccccaagggtagcaagaacaagaagaaattatgaatgccaatgatgaacatgatggttatcatcatagatcacatgaattaactgagatatgcattcaatcacactgccattgtagtcaaccgaagcactcgtctgctggttgaattctcacttgctgttgccaggatctctaatgtggagcaagcaattttattgctgaaagacttctttttcaatggtagaattcttccttttcgagattatgatgttaatctctggttcgtccccactgccgtatttgacattatgctttagctgtaactattgtatttgc

SEQ ID NO: 284018 - DNA, 340 bp, Zea mays
atttcttagatccatgggctggggcgattacgctgttggttactggcctagtgaaattgaagcactaccctgttcgcaagcgatttgctcagaatattgttcttgctccaaaggaagatggatattttatattcagtgacatctttaagctcatttgtgatgagtatgatgatcagtacccttttgctgattacaattgtgctgacaacatgccccaagtggaagcgtcttacacaatggctgacatagggtctgattatttggatggagaacctgaggcacaggagactgttgatcctgctgaaaatcatgtgcagcaccaagattatttggaatataa

SEQ ID NO: 284019 - DNA, 432 bp, Zea mays
ggtagtttctttcatggccttgcaatatcagttacctgcattgataatgaataacctcatattgcattatttggtgagactgatcaggattcctacttatgcttgctatatcataacggtcatctgcaaaattcttgttatcatttgaatgttctgctgttgcttgacaatccctaggataattagtttgtgcaatattctacttcttggtttaccttgaacagatatatatatatatatatatgcccactcgcgcgcgtggtctataactaattacctggctttccaaatccattcttaaataattttgtgattaatagatgtgttttttttaactgtgttgttggagcacttatggtttctacttaaattttgttatggtcattgtaagattttttttggggggcttcatcttttcacttttttttggcc

SEQ ID NO: 284020 - DNA, 444 bp, Zea mays
cggcatcgggcaggccgtgctgacgctgccgctggagaaacagcaggccgtgctgctggcgtggctgggcaggttcctcagggccggaggcgacgggtgccccaacctgcagcgggcgttcaaggtgtggtggaggaggaccttcgtgaggccgtacgccgagcagcctgggagtgggagctcctcgtggtcgtcgtcgtcgtcgcggcggcactgaccgtcgtccagcggtcgttgcctggaaatgacaagagtccacccgacgcagtttcttttctttcaagtttcagtagtagtagtaggacactttgagttaggagacgctggagtttgtgcctctctgttgttgtaatgcttttgggatcgatgtgacaacccgttttgatttcttggcgcagaaatcaacctccctgcgtgatttttaaaaaaaaaaaaaagtgaata

SEQ ID NO: 284021 - DNA, 591 bp, Zea mays
gttttaatgatccttcattgttgatggaagcactgacacatggttcatatcagattgctggcactactccatgttatcagcggctggagtttcttggggatgctgtattagatcatatttttactgattatttctaccatcagtaccctgaatgcactcctgaactgctgacagatctgagatctgcttcggtgaacaatagctgctatgctcatgcagcagtaaaagcaggattacataagcatgttcttcactcgtcatcagcactgcacaaaaggatggccgactacctggacaagtttgagcagtcattttcaggtccatcacatggttgggaagcaggcatcagtctgcccaaggttctaggtgatgtggttgaatctatcgctggtgcaatttacatcgacgccaagcatgacaaaggggttcgtttggagaagcatgaaacggatactggaacctcttgtgacccccgacacccttcagaatgaccctgtgaaagagctccaggaattctgtgatagcaaagggtacattatgggagtcaccggaactcgtgacaacggtgtatccctcgtgggcgcagaaggg

SEQ ID NO: 284022 - DNA, 381 bp, Zea mays
cctgtttacaaccacgtcaccggcctcctcgaggcgcccgagctcatcaccccgccgaacatcctcgtcatcaacgggctgcacccaatgttcgatgagcgcgtgcgggacctgctagatttcagcatctacctggacatcagcaacgaggtgaagcttgcatggaaaattcagagagacatgggagagcgtggtgggcacagccttgagagcatcaaggcctccatcgaggcgaggaagcccgacttcgaagcttacattgagccgcagaagcagtacgcggacgccgtgatcgaggtcctgccgacgcagctgatcccgggcgacgacgagtgcaaggtggtgcgcgtgaagctgatcatgaaggaaggcgtggagcac

SEQ ID NO: 284023 - DNA, 649 bp, Zea mays
cttgaccttggcggaacaaactttcgtgttttacgaattcagtttgggggcaaggaacaacgaatagtcaagcaagaatctaaaacggtatccattcctcaacatttaatgtccaggggatcaaatgagctgtttgattttattgctgctgctttagcgaagttcattgcctctgagggtgagggcttttatcttcctgagccccccccgcgtccgcttggttttacattctcctttccagtgaagcaaaattcagttgcatctggcactcttatcaaatggacaaagggttttgcaatttgatgaaatggtaggaaaggacgtagtggcagaattaaacaaggctatcaaacgccaaggagttgatatggaagtcacagcactggtcaatgatacagtagggacattggctgctgggagatatgtggataatgatactgttgctgcagttatactgggtactggcactaatgcagcgtacatagaacatatggactcaattcctaaatggtgtggcccacctcctgagtctggaaacatggtgataaacatggaatgggggaactttaggtccacccaccttccactgactgaatttgatgtagccttggatgcagaaagtttgaaccctgatgaacagatttatgag

SEQ ID NO: 284024 - DNA, 490 bp, Zea mays
ttctgttgctgccaaactaggtccataagtaggaggggcccatctatgatattgttccatgtacgactagaagttcaaatatatggaaaatgttctcttaacgtgatattagacagcaccccgatttaaaatatcttaaccttcagtattgtccatgtaacaagaacttgactggaacatcaagataagcaagtgtaaatacccaccttggaattggtagttttaattcaaacacatgccttttgtatgttgcgttcttgcctccttggtattataacatgcttgcattaaatgatttattgaaggtaaattctggaagtattgtgattcccataaaacgtgtccttacggatcatgtgttaagggtgtggatggttatgttgcctttttcacaaactcaatttatgatcaattgcaagcaagatgtggtatagctgttggaatgcggatcacgaaggtggtgtcttcactcttcagcatgttccaatgc

SEQ ID NO: 284025 - DNA, 559 bp, Zea mays
tggtcgcgtgggcggacgcgtgggttgttttgcgctcttattcaaaacccaaatctgtccctcctctcagattattgtgagtttatccccgcgccaatccatctgtccatggtccgcgtgggcttgtcttccgcgcccggggtcaatctgacagagcctatcttttacttctgtgctgcagcaaatcgataatgtttttgaccaactgatcaacaagatagaacatgcggattttgatacgcggcctttcttgaaacaattgaatgtgttaggccgctatgaaccaatcaagcggagtatccttgccaactagacttttgaatcttcactgtactataggagtatctgtttttctcaagataatttatttgcacatttgcctcgtttaattcttactgttcatcatcaaaatatcatattctgacacgtccttgttcaacatattcaaactttctattctatgcctcttttatcagtcaagttagtatttcatcccacatatcctgtaacttgactacattacatagtcctagccttgagtagaaatcagtgcaggaac

SEQ ID NO: 284026 - DNA, 579 bp, Zea mays
tgtagttgcactgccatccatggcatggcttggccctcgatccctcgaggacgacacggtggaggcgacgagccgcaggcaggtgatctaaactccagtagtgcctaggcttggagcctggatccgccactgataccaggtagatgatcaaaggttgacctgatagaggataaggagattaatgtggaattcctatactcagccaagtggaaggaatgaaggattaagggaactgatcagatagcagctacctgaaagttccctatgtttctccttgtcttctccaggtgctcgactccgtctctggtaacgcgtaaggaattttggcgttatatcacacattggagtcactgtggcagctttctggcagtgacctatgtggcgagagtggcgggagtaaacactggcgaggcgtcttttgcaagggaccatccattattgcaataggcagtcaagaagatattgctaaaaatgctctgaaaactcctctttcggataagaaagcaaagggtgccacacttttacttagaagacaggtgacaagaaaggtgcccctcatgtggcaaccccacacccagc

SEQ ID NO: 284027 - DNA, 450 bp, Zea mays
gattaaggggactgatcagatagcagctacctaaaggttccctatgtttctccttgtcttttccagttgctcggctccgtctttggtaacggttgaacacgaattagagaacagaccagagaacctttgaaacttcttgcagtcatgtttgtctgtttcttggtaccaggagcaggtgttttgtgtcaaaacccaaaaggttgaacacgaattagagaacagaccagagaacctttgaaacttcttgcagtcgtgtttgtctgtttcttggcgccaggagcaggtgttttgtgtcaaaacccaaaaggtgtctcctttgctgccggatctgcatgccctgccttccatgtcgattgtatttcgtagatttcatggatgctagataattggggccccgcgcttttaagagcgaggttaacctcgcctccagttcaagcaatggggtttttc

SEQ ID NO: 284028 - DNA, 504 bp, Zea mays
ttttggaataagaaatgcagcagcagcagcagcaagcgcagcaatatcagcagcagatggccgggtacacgcagagccaaatgccgggcaccgtgtggatggtgccgagcagcaacaacacgcagggtggtggtgcaccttccagcggcggcagtggcggaggcaccggcgagtctatctggacgttcccgcagatgggcagcgccaccgccgcggctgccgtgtaccgggggagcgtgccgagcgggctacatttcatgaacttcccggcaccggtggcgctgcttccagggcagcagcttgggctcggcggcggcggcggcgggggcagcggaggcgaggggcacatggggatcctcgccgccctcaatgcgtaccggacacaggtggtaacgggatcccgcggccagtcatggcggtggaggccgaggcggcgggtctggccagcagcagcagcaccgtggcgggcgcagcgaccggcacgagagcatgagcaccagcgac

SEQ ID NO: 284029 - DNA, 452 bp, Zea mays
tatcgccttcacctccatcgccattgggctccggggagtgctcctgcacgtcgccatcgttcaggctgcacttccacaaggcatcgtccccttcgtgtttgccaaggagtacaactgccatcctcaaatacttagcacagcggttatattcgggatgctcatcgcgcttccgatcacgatactctactacgttcttcttggaatttagatttctgggtaggcagagccgctaggattctaggaatgtagcagcgaacgcatgcaaagtgaagcaatttggatatcctgaagaccatcggagcagagaaataggggaagctaataggaccctagacagaaatgcagatgagggtgggaaaaaaaatccttgattctatatattttttttgcattttctgttaccgttttagattcaaagcaaagtttagagcttttagcatggaggattgaac

SEQ ID NO: 284030 - DNA, 505 bp, Zea mays
ccgtttcgtaggcgtgctccctgtttcggatgggaagtgggcgtgtttgtagtattcgagcttcgattcgtcaacggagattagaagacctgggatgggatttgaggaaatctaggcatctgtctagcacgtttctagatctattgttgagctgttatatgagagtaattttggaaccctggggtatgtttgaccgagtattctgtagattattgttccgtgacttggtggctgttaccgtccttatctctgcatcatatatctgtgctagtttatgcgtgcttctcaaatatttccggcctgtgtagcatgtgactgataatatgattttggcagcttctgcataagaacaacaaatcaaaagcttgatcagctcggtgccaacataacctcaacaaccaagtttcatgtctgatctcgacgtccagcttccatctgcctttggtatggctacttctcaatctatgatgccatgttttttatgttgtggttttacatagtacat

SEQ ID NO: 284031 - DNA, 371 bp, Zea mays
gggctcctcttcacaatcgctgtcactggaatagcagttatggttggctccatactgttccaaagggacgagagtttcatagctccagtggccatggacttactctgtctgccatgttgtttcttgaccgggagagtcatgccacaggaggtgtatttatgtataataactcctcgaatcagtgcataaatcgagtttgtttgagagcatagccccaggcgtgggtttgtggaaaatgcaatgtttaccgtgtataactgcgttcatctctttggcagtctctgcttactttttttcactactttacttctttccattttttataacttttaatcatttatattctcttccatgcttttttcctactatta

SEQ ID NO: 284032 - DNA, 456 bp, Zea mays
tcatgttgacgtaacgttgtttgattctagttatatttgtacaaattaggataggtatcctgcattttcactttgtggtcattattagcgctttactttttattattgatccgcaatgaacacagcaaccggacactgctagaaccattacagtttatcctgtatttagtcaactttgaaactgtgctcaagccctccattacttgggatctgggaaactcttctgttatgagaaggtttggttcaatctctgatgaaagacgatggaggcattacatttgaataaccgagtgatttcagagaaaatacgtgttctatcaatagagaaggacagcttttgttttttgagaccagagagggccaatcttggcttcatatgtgaacaaggtgttttgttttctgctcaaaaacgtttgctttaccctcgtaagttgtaatcttctatattattcaaac

SEQ ID NO: 284033 - DNA, 645 bp, Zea mays
gaggaattattggagcagtaaaggttctgcagggcttatttccgcagcctggtagactacaattcatctttgctgatctgggggaccagaaatctgtcaacaagatatttgctgaaaatgcatttgatgctgtgatgcactttgcagctgttgcttatgtgggagagagcacattggaaccccttaggtactatcacaatattacatcgaacactctactgattttggaggctatggcatctcatggagtccaaacccttatctactccagtacatgtgctacctacggagaaccagagaagatgcctattacagaagccacacctcagttccctatcaatccatatggaaaagctaagaaaatggcagaggatatcatattagatttctcaaagtcgaagggagctgacatggctgtcatgattttaagatatttcaatgttattggctctgaccctgagggaagattaggtgaggctcctaggccagaacttcgagagcatggtcggatatctggggcttgctttgatgcagcattaggagtcattccaggattaaaggttaaaggaacagattatcccacagctgatggaacctgcataagagattatattgatgtcacagatttagttgatgctcatgtga

SEQ ID NO: 284034 - DNA, 511 bp, Zea mays
ctgtcttgttaccgcagcaggcgcgtgtccgcttcgctcctctctgcggctccctccggcgagcggcgatggccttctcacccccgctgatcgactgggaggcggagagctaccctgcctacccagatttcgcggccattccccttttcgtcgtcttcttcctcgtcgtccgtttcttcctcgaccgcttcgtattcgagtggttagccaggaagctgattttcaaggaggaggatgagaagaagcttggccctactacatatgcaggcaagagaaagatcaggaaatttagagaatcagcttggaaatgcatgtattttctttctggggagctattggcattgtctgtgacgtacaacgagccatggttcacaaccacaagaaatttctgggttggaccaggcgatcagatctggccagatcaaaaaattaaattgaaactcaagacagtctatatgtatgttgctggcttttacacatactcgatgtttgcccttgaggtttgggaaat

SEQ ID NO: 284035 - DNA, 710 bp, Zea mays
  unsure (1)..(710): unsure at all n locations
gttaaccataccctctgccttggtaattttatccggaactctgctaaaggaggttcatatccccaactttccatacgagcaggcccataagaagttcgtagaagcaagtggaaaatgttaacagctttgaaatgtcctgaagtatggcgaccatgtgtttacatgtacatatcacttgcgttgagtgtcgacatccaagaaggaatgttcttctggtacacggaccaaagcgcagggttatcttttcatgagggatttattggcttcatgttcgctattggatcagttggttctcttgtgggtgttatactttatcagaatattcttaaggaccattcctttcgaagccttcttttttcaagccagctgttgctaagcttggcaggaatgcttgatctgatcttggtgcttcgactaaatcttaagatggggataccagattactactttgcggtgatcgatgagggggtctccaaaatgatcaaccgtatcaaatggatgcctcttctggtgcttagctcaaagctttgccccactggcattgaaggcacattctacgcattgctcatgtccatcgacaacattggctcgttaactggatcatgggttggtggattgctccttcatttgttgagaatcacaagaacagaattcaagaacctctgggccgcaatcttgattncgaatatgatgaggctgctaccactggc

SEQ ID NO: 284036 - DNA, 422 bp, Zea mays
caatatttggcctattgtcgaagggagggccctggctgctacaaatatgtggtgtacagaaccctattatgcaagagatggtgtgagtatgatgaaccgtagctttggactggacagcacttcagctgcttcttccagcgatcttggatcttcaaggcaatcaatcatatgttgtgagcgccttaggcgtggtaagaggggtgacttcgagaagtctcagataagcagcactatgagtcgtcaaagcattgctgctgcgtcagatatgtcaatctgtagctcttcagcttcactgtgccctcacattggtgctgtaagtcattcctgtatacgaattgacactctagaaagcagcacttcaagatcatcgatctcttctgaagaatatgatgcttgctgtaaggatgctatgccagtgatat

SEQ ID NO: 284037 - DNA, 448 bp, Zea mays
ctcttcttcagaggcctgcgcatctgggaggcagggctcgacgagctcatgcacaggggcctcgcgcattccaaacaggccttgctcacaggttgttccgctggtggtctggccacgctgctgcactgcgacgattttcgcgcacggtttccccctgaggttcctgtgaaatgcctctccgatgccgggttctttgttgacgcgaaggatttgtcagggcagcgctccatgcgcgctgtgtacagccgagttgttcatcttcagaacgttactaaagttttgcccaaggactgcctcctcgcaaacaaggacgatcccacgcagtgtttcttcccggcggagcttgttaagagcatcagcacgcccacgttgatcgtaaactctgcttacgactcttggcaggtacggtttgtcgttgcgccagacaggtcgtctcccgacgagtcat

SEQ ID NO: 284038 - DNA, 266 bp, Zea mays
ccgagtacaaggagaccgtggagcggcgctactacacgctcaccggggatgtccccgatgaggaggtgatcgagcgcatcatctccgacggccgcggcgaggagctcctgggcgccgccgtcgcggagcacggcaagggcgccgtgctcgccgcggtgcacgagatccaggaccgccgcgacgcggcgcgcgaggtggagcgcagcctcctggagctccaccaggtgttcctccacatggccgtcatggtggagacgcagggggag

SEQ ID NO: 284039 - DNA, 460 bp, Zea mays
tggttttcgagctggggagacaactctagatgagaaagcagagatactcttcttgggacaactgtacagatctaagttcctatctctatgtaaaaactttatttgtacccatagttttcagtttaatttgtgaatatgctgcatgctctgaatatcttgtgtcagggtgacattacttgccattttctgtttctgcaagtgcagtagcacgacggtagttgtacttggagttatatttggcatgaccaatacctttcgaccattctcagatgatatattttgctatggtaaaggtttggtcttgctacgtttgtgttcattttcatgttcttttttatacattggccacacgttagttcctttccaaagattacctaatttaataagaggactgtacacgatgttaaagtgtaactaaattacttaatatctaatatggatatctgtgttcaatagtgtc

SEQ ID NO: 284040 - DNA, 523 bp, Zea mays
  unsure (1)..(523): unsure at all n locations
gcatattagctctccaacagactagccatctaactttctaatctatctggctctctaaattaactttctcactagccaaatttggctagcaactctcgctatctaagctatcttgtatgttggagagtctgttggaatgagacgttatatatagagtttaatatttatagagatacaaataaagatttaaatcgagagccaaaaatacagagtctcttggagatgctcttatgagcagatacgtagttaaatgagcatggaacgttgcatattgattttcgatattgatgtgtattgcaggatgttggtaaggttcttcctgatttgaacggcaagctcactgataatgagttcctgggaggcgaaagctagacagtttctgttagaggaggaaaaagaggatgatgaactcttcttagtaattgtccctgctgttctctcggccatgcaagaagagaaacggtcagtacgtacttncggtacctcagcacatggaagcgcgaaaaagtggatgaaaagtcat

SEQ ID NO: 284041 - DNA, 644 bp, Zea mays
gtttttcttcttcccgagtacctaaagaaattctttgtcaaggtgataagtaacttcagggagtttgaggatgagttggagtcacatgaaaagtatcgtaatgtttacaatattaaagggttccaaacattatccaaacattatctccaagaagcagaatggtttcatcatggctgcactccaagcttcaaagatcaagtgaatgtttctgtcataacggggggcgctcaggtactaagcattggtttgcttgttggcatgggtcatgaggcaaccagagaggcattcgagtgggccatcggtgacactgatgctatatgggcttgtggagaggtgtcacgtctcatggatgacatgtcagcgttcaagaatggtaggaacaagatggatgtcgccagctctgtggagcgctacatcaaggagcacaatgtccctagcgaggtcgccctggcaaggatacattccttggttcaagatgcatggaagaccataaatcaagcaccatgtaagtaccctgctctagtcccggttgtgcaacgagttaccagcctagccaagagcatgacactgctgttcctcgataagagggatgcgtacacatacagcaaggactttcaaacgacactggagacccatttcgtaag

SEQ ID NO: 284042 - DNA, 590 bp, Zea mays
  unsure (1)..(590): unsure at all n locations
ctgccttgtttattgagaacaaacaaaggaaggatggttcatggtatggcacatggggtatatgtttcatttgtggaaccttttttgcaataaaaggattaatagctgctggaagaacgtatgatactagttcttccataaggcaagcatgcaactttttgttgtcaaaacaacaagctacaggtggatggggggaaagctacctttctagtgaaatagggaattatattaatggaaatacccatgtagtgaacactgcttgggcgatgctgtcgttgatatatgctggacaggttgagcgagatcccataccactgtaccaagcggcaagagaattaattaacatgcaactagacacaggagactttccccaacaggaacatgttggatgctttaactctaacttttacctcaattatcctaactaccgcaacttataccccatttgggctcttggagaatttcgccagcggcttggtgcacacaaaaaatgataccagacaatgttcataattattgtattgctaatgacattgagggtatagatataagtatggttcctcgcaagaacatatatatnngtttccatg

SEQ ID NO: 284043 - DNA, 463 bp, Zea mays
acgcgcccgccctctcgttttcggcgccgccagttccgcaccgggactgccgaatctgtgctcgggatcgtctcttccagcggcaatgggggccgattctgaggacgccgtcaagcagctcagcctcctcatggagcaagtggtggccccgctgaagagatcatttcagcctgcagtactgaaggcacatatccatctcaactaggttctcatcaccgcttaagagatgttctaaaggccatatgggtcacatgtgtgctaaatcagctccattcattgctttggcgtgaatggaaatcttcagaaaccaacacgaatatgcaccagggctatcccaaagaaacacttgtgcgtttccttaaggctagagaggggaacgtaccacaggctcataaaatgatctgtgcttctctgaattggaggattgaaaatgaaattgatagtgtgctagagagacctatag

SEQ ID NO: 284044 - DNA, 406 bp, Zea mays
cgcaaggcagcagagcacacggcccaccaccacggaacaaatacaccttcaggtggcctccctccgaccgccgactgaatcttccacctcgcttcgcgcctccggctccgcgccgggccccccgaatctgtgctcgggatcgcctcttcccgcggcaaatgggggccgactccgaggacgccgtcaagcagctcagcctcctcatggagcaagtggaggccccgctgaagagatcgtttcagaatatgcaccagggctatcctaaagaaacactggtgcgtttccttaaggctagagagtggaatgtagcaaaggctcataaaatgattgtagaatgtttgaattggaggattcaaaatgaaattgatagtgtgctagagaggcctatagtcccagtagattatac

SEQ ID NO: 284045 - DNA, 473 bp, Zea mays
tttttgttggacagcaaaccatgagctgaagaagccatcaatcagtctgttgtttccaacaattgacagggtgaaaaaaggggcttgtggaattcaattgtgcaggaatttgctttctctacctgagaaaacatggcaaagactgagatctaccggcttatttcatgatgcaatcccgcaaccaaatgccaggatagggcatcctatgcatgttaaggttgctcaaagacgcttcaagtcttgttttggtgagcattcattcggctggacttattgtgggtctcataacttcagtccggctgcatggggacagcctctgtctcctccctccaaagcaaatcctagcaaagccaaatcagcaccttctaggccaatgctacacatttgcaactatgagcttggcatcatacttattgctctgccaccaggcatgtcaaagcatgcatgtgaaagtaggcacaggatcgaggaca

SEQ ID NO: 284046 - DNA, 538 bp, Zea mays
  unsure (1)..(538): unsure at all n locations
tttatgatgaacatgaagaagaggaaggtgaaggataatgagatgaacagggagagtgatgaggatgttgctagtgacaaagcagaagacatgcatgatgacactgagaatatggaacaaagtaaggacgatgagctgattttgggcgaagatgatgtctctgcatggagggagcttaggctgcaccctctgcttctcaaggcgatgcgcagacttggattcaaagagccaacacctatacaaaagtcttgctttcctgcagcagcacatcgaggcaaggatgttatcggtgctgcagagacaggttccggaaagacacttgcttttggcctcccagttttgcaacgtctccttgtagagcgagaaaaggccacaagattgcagcaggaagatgaaaaaatggaggaacgttctggtggaagccctcttcgtgctcttattctgacacccactagggagctcgccaaacaggtatgcgatcatctaaaagatgtggccaagttcttaggaatccatgtntgtccaattgttggtggtc

SEQ ID NO: 284047 - DNA, 322 bp, Zea mays
tcgtagattataacggtcaagaccttttcatcgaggtacaagcgttctgtatcgaatcttgacggataagggaagcagctgggtggatccggctactcaagtcgttggagtgaaagaattcgtgtgttttttacttgccggctatgtaccatactgcatcgtgtatgtttctacttacattctctggaccattctgcatcttttttcgcccctaatctatgtacatcttcattgtcatggttaagtcagatgcctcaagggcgttggatgcgaggatcatgtgttgtattgggaattttccatggaaccatttttggaactt

SEQ ID NO: 284048 - DNA, 475 bp, Zea mays
ttattctctttctgcatatattcagtcacattcagaggtgtcccatgtggagatcttggaacatgtttcatctatcctcaaagaacatgggtttcaccctactgaagaagacgacatggacactataaacctccaaccttatgactgcaaaatgtcagacaaaaaatcggatagcaaagggctcatagatccaaacagggcaattatggaatcggatattctacatgctgcaaagaaaaagggtaaggctatgaccgtgacatagaaagtagggagaggatgggatcccacatatacaaggagaagttttttcccatattggagatcaatattagtgatacggtgtcctgtgaaggtgtatccatgctacgcaagagcagatggtaggattcagcgtaatcttgatcatttctctgtctctcaaaggaagtcactgggcaatggtcatgtgagaagaacctcaccacttgcaagc

SEQ ID NO: 284049 - DNA, 778 bp, Zea mays
ggcatacacatacctgcgatatttgtttccaagatggctggtgaaacactaaagaagtttgccaggggtgaagatgaagagtgctgtattaactcgtcgatggatgagactgcagggacagtgttggtaatgtcatttgggtcacttgttgtcatcatgtcagttcttgcttcttttctatttgctcgaaactgccgacttctacgccatggagttgataatcacccaccttacgtcaagaaacaagtggtggaaaagtttccctgctcagcgtacagtgctccctgttctagtgaagataatttccaggaagcttgtgcaatttgcttagaagactacaataatggtgatatgcttagacatctcccatgcaagcatgaatttcacaagatctgtattgattcttggctcaccaaatggggcatcttctgccctatatgcaagctagaagtaacgttgggcgggtaggcatacttcattactgcatccaagtgctggcagttctattgaagatcgttgatcttttgatccattgcgaggttcaatattcattttaatcattgatctttgagaatgaagtacagatctcagttcctcaggttgggccttgtagtgtgctactagagtactgcgttcaggttaatatttcgatcatctgtttgatatccttgtttggtgtgtggaagagctcaaggagctctgctgctgataaatgtcaacacttctgttgcagtgtattgccctgtattcctagagaaattaggtgttgtgtgcaagc

SEQ ID NO: 284050 - DNA, 502 bp, Zea mays
gttgtgggtcgtgggtcacggaacaggattatcttcagcgcctagaccccagctggagcaaacacggagtcgaggaagaaggccaagaaggcagaggaggagagggacgctgagctagcttcaggactgcgtgtaatccagaaccccagagatgagatggcgcctgtggagccccttccggaggctcccaacgacggtaggcccatcgtgtgccccatgtcagacttctgccctctcacgatcgatggggtgctgaaggagtcgttcctagagacactacgaaagaagcgaagatggagtggcttgcgatttctgcactgtgaactgattccacaattctactagcttttcagttgcagaaattacaggcgggtccttgtataggggatatatcatcatcatgtgctctgcaaacatggaatgtcagcattcagcaacagaaaattccaacagtgaaaagggtcccttctgggactggaaaggctatacttagagtgcatga

SEQ ID NO: 284051 - DNA, 498 bp, Zea mays
ttaacttctgcagatggtagtaaccaagagcatgtttaggcgaaggccaaatgctagacaactggggttcacctttcggagaaagcagatactgaaaggagtagctcaacaggagcatgattgtattccggatgaacattatgtgcagacgttattttctatcaaaggacttgaagatgaactggagagaagaactttgacctatacctcgtggaaccaatcatcaaatccgaaagacaaaatgacttggcatcctatgaaatttgagtatgatacatctagccctgagcatatcaatgctatcaaggtaggcccttgattttcttctgtatgtattactcagatcagaatttgtgtttgcatggtagaattagttacctcaaacatatgtgttgagaataggtttaactgtcgattcctgatggcaatttgcattctattattcaagcatgatccattgtacttttatgtcagcccgcttttcttagataaaccttg

SEQ ID NO: 284052 - DNA, 728 bp, Zea mays
cctgaacagaactacagcaacagaggctttaatccacgccagcggcagtcaagcagagcatcacgttcacgttggtacagcaattcagacgattactggtaaagaagccattacatatggagtgggcatgtggtgcgaagcaacttttgcatgtgtggagcaaaaggcctccttgcaccaagatggcacctgcctttctgggtttttttaggtgccggtgctgacgcaccagccttcgcagtctcagctttcgtgtctgtttgctgtgtttcttttccagagggtgaaaatattaggattgatcaactggggatctggtatgattggttgacactaatagtgttgtgacttgattagcacagaaaatacgtgggattaggaagtggtacatcaaattatcttttgttggcctggtgatttctgaacactgactgcttgggagtggctggcatgatggtatccactcttgaggagttgaacactgagaacaacgtcgaaggttaggagcaaggataaagatgccggttcctcgaatatctgcaggcactcttttgctggatgcatggctactgtttagcacgggcagtttgcagcagatcagctggaaggagacatgctcagatgctcctgtttggcgcgtgcagttctgttctgttgcttctgtttaatccaaacgacgtagcgctggaaacagagtggctacatattacaactggctaactgctcaa

SEQ ID NO: 284053 - DNA, 493 bp, Zea mays
ttcgattaaatgggaagataccaaagatgttgactcatcgccttttcacagaggcaaggtactctatatgggttgactctaaataccaattacgaagagatcctataggaatgcttgaagctcttctttggaggacaaactctacatttgctatctctgaacatggagcacggagtaacatatatgatgaggggaaagctattgttcaaaagcacaaggctacccctgaagaggtagaggtacaattgactcggtatcgtcaagatggaatgccggacacaaaaagattgcacggactgaaagctctagccgaagcctctgttattgtgagggaactcacccctgcaacgaaccatttcatgtgtgcttggtttaatgaagtggttcgcttcacatctcgtgatcagctcagttttccatacgttttgtggcggctaaacatgcatggattgagccatgtttcctgtatgcactcgcagggatcttgtgatag

SEQ ID NO: 284054 - DNA, 576 bp, Zea mays
ggaagttacgaagactgcgaagattcctccaacagagcaatatatagcagattgaatctggtatggagatgctaatatgccaaattttgatgttaagaaggcacttcacgttgccatgcaacatcaagctgttgtcaagaaaaagttagggaaaatgtcattctttctgggaaaagatgaaaatctctggaaatgtgttaatataatggatgataacgcaaaatacccaaaagaaactctagatgctgttcatgctttcatgtcttctgctccaggctattctgagataaagagttctcaatctaggtatcaagctgctactatgttgaagaaaacatgcctgaagcatctttcccttgctgaagtccttcaggttctgaatatcataattaacacaaaaaagtgggttgtgccccattcttcaggttggcagccgttgccgctttacataatagtggctgatgctactactgccgctagtgtaaaagcttagcattggtacattatcttcttgtatcaattgaacattttgtggtcctggtgtatcctacctagcacaatgctctgcattttgcc

SEQ ID NO: 284055 - DNA, 540 bp, Zea mays
ccctgttttcagaacagatatcaacattgaatgaaaggatggatgagtttacctctcgagttgaagaactcaactcgaaatttacagtgaaaaaacatttgcccagtcagcagaacttagctcttccaaatgatgcttgcaatggttccacgcctacaaatctctttgtctctcatttaggcaatggtactctgatacctcattcttcatcatcaaaccaactttcaaaggattccccgatgatagaagagattatgaacataacatgaggtcagcgccaggttatacatcagctcgacaatctgacaaatctgcttcacgagcatttggtcttaacacgccagactaataataccgccagcaggaaccgggtgctggatagcgacacactcatctgtccacttatttgcctgactgttgccagtatcggttacttcatgtttaaaggtctcagtaggggctgagcacagtgagttggcccaacatgtgctccgaggctcaccaccaagttttggcagaactggagctataggagacagt

SEQ ID NO: 284056 - DNA, 562 bp, Zea mays
ctctttgttccgaagtttatgttgggggcatcgcctctgatgtctcttctgatgatctcaaaaaactctgcgagtctgttggggaagtagtcgaagtgcgaatgccaggaaagagtggtaggctgtatgcctttgtcaatttcagaactaaagagctggcttcaaaggccatccagaagttgaacaataaagatctaaagggaaagaagataagagtttcttcctcacaggctaaaaacaggctatttatcgggaacataccctataactggacagagaatgaatttaaaaaagcagcagaggaagttggccctggagttttaaaagttaatctcgtgaaggcaccacattcagatacgaacaagggttatggatttattgaatactacaaccaggcttgcgcagagtatgctaagaagatgatgtctaccccagaattcaaactagataaaaatgcccctaatgtcagttgggcagatactaagaatggtggtgaatctgcctctactgcacaggttacatcactatatgaaaaaaccttgccaggctgttactcaagaac

SEQ ID NO: 284057 - DNA, 576 bp, Zea mays
aggcgctgtatggagtcatgtggctccagccaattctcggcttcttcagaccagaaagacgcgtcaaggtgaggagcctatggtacttcttccactggctcctcgggatcgcgatctgcgccacggggatcgtcaacgtctacatcggcctccgcacctaccacgagaggaccgccaagagcgtgaggctctggacggcgctcctcaccgtcgaggtcgccttcctcgccttcgtttacctcatggtagacagatggagctacatgctgaagcaaggccgcgccaccgtcgagcagctaataaggccgaccgacagccgcagaacctacccgaccaccctttggaaggagctgaccgtggtgcagcagtgagtgaatctccgaacagaaaggcgagaggtgctttcagacttgctgaataagacggtaaagtgctgctgatggtcttttgtggcttggttgctttgagagaggtgtggagttctataaatttaaacatgtcttatgtgactgagagcgtgcattccggtttccgaatgtatattgtacagcttttttcacggttgaattgaggatg

SEQ ID NO: 284058 - DNA, 1178 bp, Zea mays
ttattttgggtccaaggctttggttggtgaggggtcatatggaagagtatattatgctgttctggaaaacgaacaacatgtggctgtcaagaagcttgatacttcagcagatcctgagcctgataatgaatttctagcacaggtgtccgttgtttcaagattgaagcatgaacactttgtggacatgcttggttattgtatccaaggagatcaacgtctactggcttatgaattcgctacgatgggctctctacatgatattttgcatggaagaaaaggtgttgcaggtgcacaacctggacctgctcttgattggatgcaaagagtcaaaattgctgttgatgctgcaaaaggtcttgaatatcttcatgagaaggttcaaccttccatagtccatcgagatatacggtccagcaatgttcttttatttgaggattacaaggccaaaattgcagacttcaatctttcaagccaatctccagatatggctgctcgtctacattctactcgtgtccttggaaccttcggatatcatgctccagagtatgctatgactggccaactgactcaaaaaagtgatgtatatagttttggggttgtccttttagagcttcttactggaaggaaacctgtagatcatacaatgccaaggggccagcagagtcttgttacttgggcaacaccaaggcttggtgaggacaaggtgaaacaatgtgttgatccaagattgaatggagagtaccctccaaagggagtagcaaagctagcggcagtggcggctctctgtgtccaatacgaatctgagttcagaccaagcatgagcattgtagtcaaggcgttgtctcctcttcttgtgaatgcaccgtatcagccggctgctgctcctgatgtatcttcagatgcatgacagcatgagcaactgaaaacccatgtaaagaaacaccatttactgtcggtatgccattttttccatgaattattcatctttcgtaaaatcagaattgtgtgtgtgtgtttattggagaggaagggaagaggaaagagtaacgcatttgttttgaacccatgtacttcgtgcttgagagctgctgcagttgaaattaattacttaatctaaaaaaaaaaaaaaaaaaaaaaaaaaaaaaaaaaaaaaaaaaaaaaaaaaaagggcggccgct

SEQ ID NO: 284059 - DNA, 557 bp, Zea mays
aagatccgcaaaattctccgtgaaataattgggaagagagagaaggatactagaaacagagaaacaaataacgacgacttgctgggcttattactggagtcaaacacaaggcaatcaaatggaaatgcaagcctgggattgacaacagaagatgtgattgaggaatgcaagttattttactttgcaggtatggagacaacatcagtccttcttacttggacacttattgtgctaagcatgcacccagaatggcaagagagagcaagagaagaggttttgagccactttggaagaaccacaccagattatgatagcttgagccgcctcaagactgtaaccatgattctacatgaggtccttaggttgtacccaccggcaacctttctaacaagaagaacttataaggaaatggagctcggtggaatcaaatatcctgcaggagtggagctccttctgcccgtcatcttcattcaccatgatcccgacatttggggaaaagacgcaagcgagttcaacccagaaaggtttgccaacggcatcttcagcgcaaccaggca

SEQ ID NO: 284060 - DNA, 347 bp, Zea mays
gcgtccgccgtagttccagggctggaaaacacttacggggggggatgatgaagccggtatgattcaatttcgaaggatgaatcttttgtggatctctggtaataccttgttgtcaaagcataatccttctataattggcggtagtgccatttagggcgccatcagtcaaggaaatcggtcacttttgagttctcactcatggctatcttctgaggttattttttcgtctatttctaaattcggttcacatgtatacaacgaaatggccatttcttacgattatttaccaagccattcagtcaatcagattctgaagttctgattgctgaataaaaataaaaaactta

SEQ ID NO: 284061 - DNA, 1021 bp, Zea mays
attcgacaagttcagacgacaggaagacgggagcttcagcagcgacatagctggcgacccaaagggcttgttaggcctatacaacgcagctagccttttgaaccacggcgaggaggtgctcgaagaagcgctcctgtttgcgaggcggcacctggaatcgatacgacggggtggtggcctccacgactccccttatttgtcggaacaagtcgggcgctcccttaagatcccactgccaaggaccctcaagaggctggaagcagtgtcctatatcccggaatacagcagtgccgacgacacaacgtacatccaccctgagatactggagctcgccaggctagattttaacctcctgcagcatgttcaccagaatgaactgaggacagttactcagtggtggaagggtctttgtggtgtcattgggccagaactacggagggatcggattgttgagtgctacttctgggctttcggtatgtactacgaggaagagcatgcacgggcacggatgatccttgccaggttgatcatgctatcatctttgttagatgacactttcgatgatcgtgctactttggaggagtgtcgggagctcaacaaggctatagaaagatgggatgagagtgatgatatttctcttctacctgagtgcatacagaagttcttcctcgaggtgatgaggaacttcgcagagtttgaggatgagctggaagcgcacgagaagtaccgcgttgcttacgctaggaaagcgttccagctcctatccaaaagctatctccaagaggtggaatggtgccaccagggctacacaccaagcttcgatgagcatgtcaacttgtccactgcgtcggcaggtattcaagtgctgtgtgttgggatgcttgtgggcatgggcgatgccgtcaccaaggaggtattcgagtggatgattggtagcaataaccgtgtcgtacgagcgtgtgcagaggtcacacgattcatggacgacatggcagatttcagagaggaaagaacaaaccga

SEQ ID NO: 284062 - DNA, 505 bp, Zea mays
cttatttcaaagtgcctacgtcctccttatggagtcctgtacgtggcttccaagaagaacttggttggttccaatggtggcgccaggcagcttcgagctctcatggaagaggaaggtgtccttggtggccacttcttgactgaggtgtgtgacagggagatatggaagttctttttcaagtgagcaaatataggaagtgggaagagaaggaaatgagttctgacgttgaaacccagtttttatggtttctatctgcagcgatgtacataccgcgaggcatagttccattaattctttggtagtaggttgaaacttcaagaaatatctgcagttgagcttgcacaagtgttggagtcctttcccgctttgtagatctgctatgtgctaatgtcgctctattaagtacagaaagcaaattgtggtaacgttttatatatcgaatatatggtgatggcacttaagccggtgcaaaaaaaaaaaaaaaaaaaaaactcaagactgtttc

SEQ ID NO: 284063 - DNA, 635 bp, Zea mays
ctgcagcgtagccgcggacggaactggctggacccacgcatgcggctgttgttgtatgccagcaaaggctttcctttgctgaagtggaactagaagagttaaggaccaaagtagatgcatctgaaagagatgttgtggaacttaaggaggcaataagaattaaagaggctgaaggagacgcctatatttctgatatcgagacagttggtcaagcatatgaagacatgcaaacgcaaaatcagcatcttcttcaacagcttactgatagagatgactttaacataaagctagtatcagatagtgtgaagatgaaacaagcttgtagttcccttctctctgacaagcttatgctagagaagcaactccagcaagttaacacttcactggagtcatctaaactgaaaattgcccgtggcgaagagcagatgaagacttgtgtagcgcaagctataaaaacttcagctgaaaacagacatcttactattagcctggaaaggattgcgctggagttatccaacacagataaggaactcaagtggcttcggtcctccgttggatcctctgagaaagaatacgagcaaactcagcaaaagatatctgagctgagagcgttactggagcacaagaggagtgag

SEQ ID NO: 284064 - DNA, 609 bp, Zea mays
ctggtgctgcagggcaccacatccagggcgccgagagccacacgctgcacctgcacggctacaacttcttcgtggacggccaagggttcggcaacttcgacccggtgaacgacccgcccgggtacaacctcgccgaccccgtagagcgcaacaccatcagcgtgcccaccgccggctgggtcgccgtccggttcctcgccgacaacccgggcgtgtggctgatgcattgccacttcgacgtgcacttgagctggggcctgtccatggcgtggcttgtcaacgacggcccgctgccgaacgagaagatgttgcccccgccatccgacctcccaaaatgctgatgacgactggtcgtttatcacccgatcgaggggtagatgggcatttaggaaggttctcctgcttcctgcacgtctgtctgcctacttcctttccttacgatgtttggaacaatttggtttggactatttaattaccgtgtgccgatttttggcgagtgcttgggatttcgcgaccctcgctgaatccccttttgaaacacgttaagatgtatatgtatgtaacaacgtttgttctgcggttacttgttcttttttttttacccccttt

SEQ ID NO: 284065 - DNA, 685 bp, Zea mays
cccacgcgtccggctacggagcctatcttgctgatggatcggagtacagtggatcatacggtgctgacatcacagccgagaagctgaagggcttccacaggcgccggctgcaggttcttgcaagtgccggtcctgacctgattgcgtttgaggccattcctaaccaaatggaggcacaggcattggttgagcttctggaggaagagaaagtccagatcccttcctggatctgcttcagctccgtggacggtaagaacctgtgctctggggagagttttgcggactgccttaagatcctcaacgcgagcgagaaggtggccgttgtaggcgtgaactgcacacctcctcagttcatcgagggcatcatatgtgaatttaggaagcaaaccaagaaggcgattgcagtttacccgaacagcggcgaagtttgggacgggagagcgaagaggtggctgccggttgagtgcttgggtcacaaaagcttcgacgctctcgcgaagagatggcaggaggcgggggccagcctcatcggagggtgctgccggacaacgccttcaactattagggctgtttccaagatcctcaaaggaaggacggggcattgatttgtttattataattgagctgttgttgcattatgtcactagccagaataacattcagaatatgtatcctgttgctcttc

SEQ ID NO: 284066 - DNA, 570 bp, Zea mays
  unsure (1)..(570): unsure at all n locations
atgcttcacgccaggtaagcaccctagagaccgcgacgaggaaagctgcgccaaaggaaatggcaaggtgtgggtgcccaagacgatccggatcgacgacgtggacgaggtggccaggagctctatcctgtcgctaatcgggatcggcggcgacaaggcaggcaaagatggcggcagaggctgcaagctcgcaagggtttttgagcagaacgaagaggcggcaaggacggcaactcctcactcggcagccatcaacggcttgccgttcttgcaggggaacccagctgcgctctcgcggtcactgaccttccaggaggggtcttgagcctcgctcgattcacagctgagaattttgtacattagagggttgtatgtaatctaatctaggtgggaggtggggctcatagctgccagcggacattgaaactatacaatagatagatatttgtagatagccaatatatatgggtcgggggaggaaaaaattgataatgagagcaagtccccttatttgtatatattatggattggggctctaacacgngngcctaaactttctattggtaactg

SEQ ID NO: 284067 - DNA, 701 bp, Zea mays
ggataacaaaaagagctggggaaaaggaaggcagtggtctgatgaaagctaatgcatggcaccatcgtgcagatgctatttcatctgtcgttgccctagtaggggtaggtggttccattcttgggttgcctcttcttgatccactagctggacttgttgtctctggcatgattctgaaagctggtattaagactggatatgagagtgttctggaattagttgatgctgctgtggatccttcacttctagaaccaatcaaggagactattttgagggttcacggtgtgaagggatgtcaccgattgaggggaagaaaagctgggacatcattatatcttgatgtgcatatagaggtatatccttttctgagtgttagtgcagcacatgatatcggtgaaactgttcgtcatcaaattcaaaaggagcacaatcaagttgctgaagttttcatacacatagatccctcgtacttagtaggcccgaccatggaccctaaaaaggatcctgaaggactctgatggaacaaattcagaagctatcccacggcaacaaagtgcagaagccatcgggtctaatattatttcatctcatttttcggagaaaatggcgctcgacatctaagctgattacgtgcaagagagtgtgcttcagtccagtttcatgtctcagaaatttgattcggatgcatggagtcgcgagca

SEQ ID NO: 284068 - DNA, 520 bp, Zea mays
aattacagtcgctcctggtgaggatgtgatgacgaaggtcatatcgttttcccaacaaggaccacgagctatactgtgttctctctgcaaatggtgtgatatccaccgttacactctgtcagcctgattcctctggtggcacgttaacttacgagggacgctttgagttgctgtccctgtctgggtccttcatgccaaccgaaaacggcgggacaccaagtcgatcaggtgggatgagcgtgtctctcgcgagtccagacggtcgtgttgtcggtggcggtgttgccggcctgctggtggcagcgagtcctgttcagattgtggttgggagcttcctgccaagctaccagatggagcagaagaacaagaagccacgggtggacgcggcacctgctgccgccgtcccgcagacgcctcccgcagtcccgatctcgagcacagacacccgcagcagcgagcaagggcagcagagctccgcgtcccagaggggggtgaacatgacggtcccggtaggaaccta

SEQ ID NO: 284069 - DNA, 558 bp, Zea mays
acgttgttgatggacgcctgttagctgctctaagggtgcttcttgccgatgatacagaggctgtgcacaagcatgacctgaatacattgatgtctcttgacgtgcaagttcctttaggtcccactgttgaagcatcagcactccggacagttctcgcgctctgcgcgatctgctctccaacactttcacacaaaaataatggacgaccaggccattctaggcggtgggccgcctcttatcacgcaactggccgtccagtttagattgcagaagaagttcacgatcgttgacgtgatgcagaatatcagcaggagaatcaagatgttatcgccgcagaaatccactgggtagttctttaatctgtcgtcagacagtcagttaccattctgtactggctactgcagatagcacaaatcccagttgtgattctgtaccatgttcttgttatgatacttccagtgcctgtcattgaaaagttacatctgcgtcgaacagttaattacttacctgtactgattattgcgtataataataagtcccgattatgagtcttgtacc

SEQ ID NO: 284070 - DNA, 1082 bp, Zea mays
  unsure (1)..(1082): unsure at all n locations
cgcataacctagcggcaccagcagctaaccgtccagagaacagaacagagatgaccaccagcgtccccgtccctctggcttcacagccacaggcgccgcagcgcaagccacggacctacaccccgagcccatggggtgacttcttcctccaccacaccccatgcactccgtcacagctcttgtcgatgaaggagagggcaaaggtcaaggagcaacaggtgaggcagatcatacaggaaacaatggcctcctccaacctgcttcggaagttggagcttgtggacacgctgcagcgtctcggggtggactaccgctactacgaggagatcgaccagttgcttcgctctgtctacgacgacggcgacaaggatggaggcggctccgacgatctctacctcacctcgctgcggttctacttgctcaggaagcatgggtatacaacctcttcagatgtgttcgagaaattcagggacgagcgcgggagcgtctcgagcgacgatgccagctgcttgctcatgctgtatgacgctgctcatacgagaactcacggggaggagattcttgacgacatcatcgcttggagcaagagccgcctgcaatccctgctggaggagaagaacctggagccagagcttgccgaggaggtgaggtgcgctttggagacgcctcggttcaggcgggtgaagcgagtggaggcgaggcgctacatctccgcgtacgagaagaagggcgggcgagatgggaccatactagagttcgccaagctggactacaacatctcgcaagctatctactgtgatgagctcaaagaacttacagtatggtggaaggatttccgatcgcatatagatctgcgcttcgcgcgggacagattggtggagcttcatttctggatgctcggagtcatacatgagccctattgctcgtacggatcatgatggtcaagatctttatattcataagctggtttgatgaccttatggacaactatagcaccacagaggagagcaatgtcttcaccgcagccatggtaaggtgggacgaacagacgacacagcagcttccagcaggctngaaggcac

SEQ ID NO: 284071 - DNA, 1071 bp, Zea mays
ctggagtacaacatctcgcaagctatctactgtgatgaactgaaagaacttacagtatggtggaaggatttccaatcacatatagatatgcgcttcacgcgggacagattggtggagcttcatttctggatgctcggagtcatacatgagccatattactcgtattcgcggatcatgatgaccaagttcttcatatttggaaactttttcgatgacctttacgacaactatggcaccacagaggagagcgatgtcttcaccgcagccatggaaaggtgggatgaacagatcgctcatcaactttcagcaggcttgaaggtactcttggccagcatattgaacgctacaaacaagatcgaggaggagttaaaacttcaggggaacatgcacgctgagctggtcaagaaaatggtgattgacactgccaaatcctaccatgccgaggtgaaatggcgcgatgaacactttgtgccagccactgttgaggatcacctccaaatttctatccctagtagtggttgcatgcagatcacaaatcttgcgctcatttcatcaaggggaaacatgactactagagaggacgtcgagtgggttttcaccttccccaaaatcgtcagaggcgcttgtattgtgggccgcatctgcaacgacatcatgtcacatgagcgggaacaagcttctttagatcatgtggcatccacggttcagacttgcatgaagcagtacggagtgacaacagaggaagccaacgagaagcttagagcagtaatcgagatggcatggatggacatcgtccaagacaaccttgagcaggaacgccccatagcacttctcgacacaatgatcaatgttgcacgaattgcagatttcatatacaagcgtgaagatgcgtacaccctctcattcagcctcaagggcattataggttcaatgtacgtctactctgtgtgagcttcttaatcgagcatttgtacgtaagaaagactcctcagtgtatgtggattggcaaaggtccgtcgagggtacatttaatcccaaattattgtacaagtgttatgtgtgatctatcat

SEQ ID NO: 284072 - DNA, 532 bp, Zea mays
ggcgtcttcacttgttctggtcttctcgtatgcctgatgaagaggttcacattttggcctcaggcttatcttggcctgacattcaactggggagctttactagggtgggctgctattaaggaaagcatagaccctgcaatcatccttccattgtatacagctggtatttgttggacgctggtgtatgatactatatatgcgcatcaggtgtttcgctatccctactttcatattaatccttgatgaagtggccatttcatgttgtcgcggtggtcttatacttgcatatctccatgcatctcaggacaaagaagatgacctgaaagtaggtgtcaagtccacagcattaagatttggagatttgaccagatactggatcagtggctttggcgcggcatgcttcggcagcttagcactcagtggttacaatgctgaccttggttggtgtttagtgtgatgcttgagcgaagaatggtattgtttttacttgatattgactccagacctgaaatcatgttggacagggtggccc

SEQ ID NO: 284073 - DNA, 446 bp, Zea mays
cttatttttagtttggccgctaaggatatgggttcgtcagtagttgcctgaatgggacatcaaaacatgcacactacttagtgttcatataagagagagagagagagaaaaataccatgcagcgtcctgcgagccagtgttgcgattccagttcatgcaattggcatccgtaaggggaatgcaagagcaagacactagagtccagggatgctggtgtaggtagagagggggaacaaggaatttacatacggcatagagatgagagctctctcgtaccattttgtaccttcaattcgcaatgaactttaggcaaggattgccttgggcaattgaacatttgtcgggtgagaagaatccaaagatggatcggcagaggaatagaacaatttgatatatttccataaactacagatatgttttatttttcttaatggtgagctgtcact

SEQ ID NO: 284074 - DNA, 553 bp, Zea mays
gttgtttatcgacgacgaagacgacacagaagatgaagacgatggtacaagtggtgagaagtcccgggctctggtggccaaaggagcaagattctcgtgtcatgatcttgcatcaagtgattcagaggatgaattagatggtcaggttgccccataccacttaatggagaaaagggacctagcgaagagcattcttcttgagctggaacacgagcatcatctaaaagttcaagaagaagttagaagtaagctagcttcattggaggtatgccaccaaaatgaaattcggagaacgatctctgcatttgcccgacttcagaaatatgcagaatcaagaaaagagatagacagaagacttgatgtacacttccagagaagaattgcagaagtactcgataaacacttatctatggtccaaagggatcatgaacaaaaatcccagattgttgaacgccgaataagagatgatgcagctcttgaagaagctataaggaaagagcaagctgttaaggaagaaaagttaaggcaggaaagagcccagctagaagcagag

SEQ ID NO: 284075 - DNA, 477 bp, Zea mays
actgtcttgcaacgacagggaccggatgaacccacaggtattgcttcctaacagcgcccgcctgtgggcccctaaaggcaacccttttgcaggctcccccgtgaatctggatttcaaaagagccatgtcttcgtacctctcaacttaggactcccagctgctataagaaaatcagctgtcctcgctcactgaccttgcaaacagcctatgcatttaggtagtgtttggtttcggagtatggtgggacagagtcgctctgcttttaatttgttgctgtctggattgattctacataggacagagtggctctaaaaaagaaacaatatgtccaaatgttgaaccaactggctttccaaaatctcccagacggagccgcttcctagtgtagagccgctctatcccaactggctctggcaccaaacactatatgagctcacccttgtctcgcgcgaggctagctactgatgtaaaatagga

SEQ ID NO: 284076 - DNA, 945 bp, Zea mays
gagtaaacaaaaataaagtggtcaatgcccccttgtcttcatcagataatatgaatgttcttatatgtgctgtgcagactgcctctgtatccaatcatggagagttgaaggaagatgacgaaaatgttgataaagatgatattgacactgctaatatgatcttatggttggaatcatttgagaatcaggagtggttatcatggataggaggcacaagccaggatgcagtggcgtcaaatatcatagttgcagctgctttggtcgtttggtatccaagtgtcgtgaaagctaaactttcaagtttagttgttagtcaactaatcaagttagttatgtcgatgaatgatcgatatagttcaactgcagctgaacttctagcagagggaatggaaaacacttggaaggcatgcttgggtgctgagatcactcattttatgagtgatatccttttccaaattgagtgcctaagcactgcaccttctagcaatgctatcaataaaactgcagtggccattacaatgcgagaagcattggttggcacccttttaccaagcattggctatggctgatgtaacaggattttttggtgtaatagagagccaaatttgggctacttcgtctgattcacctgttcatgtcgcttcaatcaaaaccattatccgtgtagttcgaggtgcgccgaagtccttggtcccatacctcgacaaggcaatcaactacatcctacacactatggatccaagcaatctaataatgcgaaaagcttgtattatcagttcaatgatggctctaagagaaatggcacgtgtatttcccatggctgctctcaatgagtcaatgacaaagctagctgttggtgatgctattggagagatttatgatggtacaattcgagtctatgacatagaaagtgtcacaaagataagaattcttgatgcaagtgga

SEQ ID NO: 284077 - DNA, 537 bp, Zea mays
tttgtacacataagaatactataaaggagaaggaacaacagcttgctgctggctatttttgtttcctcagaaaatggagaaatgagaggcttttttcatccgtccaatacataatggtggagactcttcttacaggtttggagtttacagattaggtaaaacagaaggtggatactaacaggccatgttagtgccagttttttttttttccttttccctttttgaaggcacataagaaaaggacgaagaaaatagtttttttttgtttgttttagtttttgcttctttccggcagagatggatatgctagtggtgaatctgctgcactgcatatgccacgtacaagtgagagttagtattacaaaatcaaactttccccgctatatattgatttttttggtgacccattttggttctccagaaactgatacacacgattgattgccgcattgtatccgtagaatgcacaagttgggtgatacgcttattgaagttgaagaatattcgtggttagaaaaaaaaaaaaaaaaaaaggac

SEQ ID NO: 284078 - DNA, 581 bp, Zea mays
  unsure (1)..(581): unsure at all n locations
cccacgcgtccgtggcaagtatggaaaccaagatttcgttgaacagcttgtggaccagcatcccgcgaaggccaaagagctggcgagacaagcggacactctgcacgacactcctgtgcagctcgccgcgcatttcaacagggatacgattctaacgctgatgctgagaggtgatcggtccttggggtatcgggtgcacgcggaacactccacgcctcttcgctacatcgccgcataccgaggctcacgtagcttttgctcgagcgcttctggagcactgtccagatgcgccctacaagaacgaccggagcaggacatgtctccacgaagctgtagaacaggaccggacggagttcgtcaggttcatcctcgacgacaactccaagcttcggaaactcgtcaacatggtagatgacgtcggtgacactgctctgcatctcgcggttcagaagagcaatccgaggatggtccgtgctttgctgcgtcaccctgacatcgacctactgtcatcaacacagggntaaacacgngatctggacatgtacaatgatggggacgaagtcaagactataaactggaac

SEQ ID NO: 284079 - DNA, 822 bp, Zea mays
cttggtctcccgccgcgacggcgccgtcagctggtccgtgcaccgccccaccaccgtcttcggatactcccctcgcagcgccatgaacctcgtcggcagcctctgcgtctacgccgccatctgccggaaggagggcgcgacgctccggtggcccggctctcgggtcacttgggagggcttcagcgacgcctccgacgccgaccttatcgccgagcacgagatctgggccgccgtggatccgttcgccaagaacgaggccttcaattgcagcaacggggatctcttcaagtggaagcagctgtggccgatactcgccgaccatttcggcctggaatgggctggctacgaaggtgaggagaacaggttcaagctcgaggaggccatggccgggaaggaagctgtctgggcggagattgtcagggagaacgaccttatagccacggagcttgacgagatcacgaattggtggttcgtcgatgccatgtttgctgtggtgacccagcttctggacagcatgaacaaaagcaaggagcatggcttcctcggcttcaggaacactgtcagctctttcaacacatggatcgagaagctgaaggtcttcaagattgttccctaataataattcatccttgctattcacttctatactgttgttctgcatccttattatcctgctcatttatcagcaccagttctcctgtaatctagttccatttcaaacatcttgctatctgtgccaggtttgcatgttatatactagggacctataaagatcaacacactgcataataggttattcttgtccagcatgggtttgattga

SEQ ID NO: 284080 - DNA, 415 bp, Zea mays
ggatcattcagtattgggtgccgagttatcctcccacctgagagctttcttactatgaggcttccctttgtctatggtgttgagacaaaagagggaagtaaatttcccctcaaattctttgagcgacaaccagaactcacagcatggcttgttgcaggcacagccctgcaaatcgtgtcggtaggggatgtcactgagaaagaaaccgttatgaagtgatagacatgtcatataaagctttactggctttagcatgttctaggcatatatcagtgattttgctatcggtctgttgatggttatattctgtctgaagttttcacttctactcctgaacttgtgctgctaagctgttgacacaactattgcttgctttcactgtgctggagcattgtgaaatagaagttccgctgat

SEQ ID NO: 284081 - DNA, 510 bp, Zea mays
cccacgcgtccgcggacgcgtggatcagatcgactgctaagagagtcgtcccagactatcccgccgggtagctaaccttatcttcccatggagccagcgaactcgcagctttccttgccgtcgctgccgtcgcctacgctgttgccgtcgcaccggctgccgcggaatactccggcggcgcgaccgccccagaaagctgccagacgcaaatcatgtacttcaccaactgcctggcccgtgatgagatccgcgggcagtgctgtagcgtggtcgagagccgcgagtgcctctgccagctgaagcgggaggtggcgctgccctgcagcctgcatcgccaccatcaacgcagatgctccaaggaagggtcgcctccacggtcggtgaagctggccgagctgcagcgcctcccatgcttcaagacactcaagtgctaggagccgttacgagttcgtatttttgttttgtgtacgtgtgcttttgtttgtttcacaattgttccttgttactgtt

SEQ ID NO: 284082 - DNA, 568 bp, Zea mays
gggggccgcacgctgcgagatctgttcgtcgcgtccccggaagccgggcgccgccacagcgggtgccgctgcgactgcggcgaagacgaagacgacgacgaggactgaagggcggtcggtgccagcgcggatcccggcgccggcgtcggcgcgtggcgagtgggccggaggttcggctccggcgggctgcggacctgctcatgcgacggagctggcggccggtgctggtggccatcccggagggggacggcaacaagatcgagcttggagccatcgaggaataaacagaaacggctgggggaattcttccgccgccttctatccctcgtaccgtagctctgttcttcttccgccgttttcctcttcgttgttggcttccccttcccgtttacattggagaatcgtcatcagttcatcttgacgtcttctaccttgcagcagcgagttacttggcagttggcactgcttgtgcgacggctactagagctagcggtcaagaattcaagatgcacgccatttatggccgtccgtcaggttagcaggagtttggataggctgctgaacgctg

SEQ ID NO: 284083 - DNA, 582 bp, Zea mays
tatgggttcctggccaacttactgatcctgattcctttgtcaatggtccctactcactatcagtatcctcacctctccatcccccaaaatttaggtcattggagataaccttcaaattttggttcagtagccaagcaatacttctcagattgccattccctgaatctcttggtcagtgattcttccacaggtgttgctaatagcacagtaattttctctggaccatccctattctaagaaacatgttgctggggatgatgttattaacagctgggtgccaggaaaagggcaaggaataatgaagcccgatattatggtgccagaagctcctcgggtggttttgccacttgttacttcctccaatattaagcttgaacttgacaaaaagaaagaattggtgactacacagttgcggaatacagtcagtgatctgtcacttgctgcggatgatttgatcattccatggaatgagttgattttaaaggagaagattggtgcaggttctttcggaacagttcatcgtgctgattggcatggatctgatgttgcagtcaaaatacttatggagcaagattttcaccc

SEQ ID NO: 284084 - DNA, 541 bp, Zea mays
cctttcttgtgcctagatcacagcctcgccactcaggcccaagcaccttacatatatcactggtttggttcaaaatcagcacagaaggtgcagatgcctctgactgctgttacctctgtaattgatggcttgaaaagactctatgttgtacaacgatagcctttggaagtcgcctacagatacaaagatactgatcctcaggactgacaaacagtgattttgaagcacagccaatggctatgctcttgggtcagtattcaacagggaaaacaacattcattaagcatctgctaaagacaagctacccaggagctcacgttagaccagagccaacaactgatagattcgtagttgtcatgccaggatctgatggaaggaccattcctggcaatactattgccgttcaagctgacatgccattcactggtcttacaacctttgggggagcgtttctgtcgaagtttgaatgctctcagatgccacatccgctgctagagcatatcacctttgtggacactcctggtgttctctctggggaaaa

SEQ ID NO: 284085 - DNA, 787 bp, Zea mays
caatgatggtattcagaaatgcattagggtgcgcttgggttcagggccacgctgtggtatgggaaggaacaggagaggcatggacacttcaggctggagagatgacaagccgtttgacagtagaggctctacattctggccttatcacctggggaagttcctgaggtttcacctttataaggagaacaaggacacacatgaggcactaggggttataggaaaattggcaggggttcagccaagatcgtttggatttgcagggacaaaggataaacgtgctgttacaacccaacaggtgacagtttttaaagtgcatgctagcaggctggctgctcttaatagcaaactcacaggtatcagagttggagactttagttacgtgaaggagggccttgctcttggtcgactcagagggaaccactttgcaattactttgaggaatgttattgcagaatcggccgatgttataaatgctgcagttaatggcctaggtaaaaatggatttatcaattactatggcttacagcgctttggcagcggatctgtacctacccactttgttggtgctgctgtgctcatagaagaacggagacatgctgttagcttgattcttggtacaagggtacattataaatggcatgttgatgctgatgcagcactgaggggcatgccccgacatctgacagtggagagagctatgcttcagagactgaagaactaccctggtgactatgttcctgcactaatggctatacctaaagcactgaggctgatgtatgtacatagc

SEQ ID NO: 284086 - DNA, 532 bp, Zea mays
cgtgtcgtacgcgctggtggtggagatgcagctggtgatgggcttcttcgccaccgcgttctgcaccgtcggcatggtcgtcaacaaggatttccaggcgatcccgcgggaggcgaggcggtacgcgctggagggaggcccggtactacgcggtgctggcgtgggcggcgagctgctgtggcagtgcttcttcctgggcgcggtgggcgtcatcttctgcgtgcacacgctgctggcgggcatcctcatcgcggtgttcatcccggtgacggaggtggcggccgtcatcttcctgcgcgagaggttcagcagcgagaaaggcgtggcgctggtgctctcgctctggggcctcgcgtcctactcctacggcgagtggagcgaggccagggccaagaagaggaagaggacgaggacggaggagggcgccgccgccgcggaggccctgcatcaagcgaaccccttatgctgctgcggactttggcctggccttttgatcttccacgatgagtgtatatcagtatatgttgggatt

SEQ ID NO: 284087 - DNA, 271 bp, Zea mays
gatgcctactgtgctgctgggagatttgaagatgcagttgcaatgttcagaagaatgggggaatggaagctggtgcctgatgtggcatcctataataatttgattcggcacctgcagattaaccagctgatagataaggcggaggtgctctacactgacatgtgtgagagcggtctccgtgcggactccgagacacatggactgctcatgggagcatgcttcagtgttgatcgcatcgatgatggtatctcttactttgacaaaatggacg

SEQ ID NO: 284088 - DNA, 510 bp, Zea mays
ggtgcctgagccagcgaagcgagcgcctcgcttgcagtagttgctagctgcatctggagcgccggcggcccgaccaacgcccgagccagccgtgggcgttcggccgccgattcctctgggctctggtggatgtcttgtaggaacacacttggatgaggttacaatacgcgtggaacgccatacccttcatcctgctattttgtgctatctccacaaataaaatcttctccaacaacaaacctttcagcttcaccatagcgtctgctaggtcgttgcttcagattgacccaaattcaggacttgttcaggacaaggtaaaagttggacaaattttggaagaggacacccaaaacattgtcaatatgactatgaatgtgtcgcctggatggagcattgggaatagaagaactcatacttcctgctagaggtgcccctttcaatagttgccatgcttctactattggacaggattgaggaagacattttttgggagcatatttcggggatcca

SEQ ID NO: 284089 - DNA, 683 bp, Zea mays
acggtcaagtggacttttgtcgagaagccgcgcgccggggagcggacgcgtcaagtgggaggccgagatcaagtcccccgacgacgacggcttcgaccgcaagtggaagtgggaggccaagggcggatcctccgcagccagcgccaggaagctcaagtggggtgccgcggtcaagggcaagggatgtctcgagccctggtcccaggcctacacgtgggaggaggacttcaccgccagcgacagcgacaaagaagaggaggagcgcgcggccgacaagaacaaggccaagaagatcaccatgaacaagaatgagaagaaggaggtgaaggctgccaagatggagaagaaatgccccttcgccaccgtcaagatcgaggagatctcggaagacaatgatgctggatgcgtcgccatcaaaaaggcatttgctaagggcaacggcaagggaaagaggaaggagctctcaccgcaggacgctgcattgctcatccagatgacctactgggctcaccttgctcatcgctcccaggtgcttcgctgcctgcgtgacctagctgtggctaaagccaagctcaaggagctcaggtccctgttctataacatctcctacaggcaccgcattgcgcatgaccacgaagagcgccagaggttctctgagaagatcatcgtgctgctcatcaccg

SEQ ID NO: 284090 - DNA, 1398 bp, Zea mays
tcggaagaattcatgggcaagacagtttcagaaaaacgggccaacttatgacaacataggtctttttttctttgctagagatggccaaagctattaaaatcactacagtaaatgagttgagaatatgctgaagaatgattgagttctcagaggaagtgttggtactgtcgagttgcttatattcccttccaatatcctatcaaagaacttccaaaggtggaatatgttgtactttctatggggtctattcagagttagcaaaaaagattcctctaacctcccatcttatctatccacaagtagagtagaacgaaattttaatgatgatctccaggccatggattggatgccatctacccattcattctcacagaacaggagtgatttagccgaaccggaccctggtttgttaaagtcaactaattttgaaccgagtttggaagccagtcgtgaggtgtgtttggatggagagaactctttgaatcaacttgtacgcagaagagctctagatgatcacctagattcagatgcaaaagcatgttcaacgattagcaatggtgccatgggttcctctgccatgtctatgcaaagaaaacatcagaaacctgattatccagaacatcaagataaaaagagggacacttttggtggtaatgttagtgaaagagatttcgatgtgaacacggtgccagttacttgttctgtctccttaactcaccttcaggaagaacctggtaagctgagcacagccatcgacctcatggatatagaccatggggttagcgcaggtgcactggatcgttcacatgcatcaggtggtgcaggtaaaagaagttttgagacggccgaagtagctgatgaagtacccgagcataagaaaactaagctggataataatgcctgtacgaatgatggcaatagcgataaactaatgcctggaagctcaagcagtgatggcaagcgcgtgtttccacttgatctaaatgcagtgggggatgaggacatcgtaaatattccagccttcaggtgatgaagagttcgctgttccattacaaaccaaccgtggtggtttggttcagaatgagagatctgcattgtaaatcgcatgtgcagtttttggcctaatgttttcagacaacacttacagatgtgatgttcccctctttggcagtgaataattctgctccagaatatgcttacagatgtgatctcatctgccagattccttgtgatgtcatgctaatatcgtacaccacctggcttcgcttggcaggatacacgtccatcaagttactaattaggatgcgtgtatgcacgtggagacaccgttcaaacggacgtgtaaaacactgttttctactctgtaggtgacaatttatagatagccttaccatcttc

SEQ ID NO: 284091 - DNA, 581 bp, Zea mays
  unsure (1)..(581): unsure at all n locations
gccgggatcaggtccaagtctcactgtctttgctctcgacctcattcttcctgaagatgcctaatgctcctccacctcctcctaaggacaaggataaagatggagataagaatggaggtggccagtgtgggtgatcactgatcaagtttgtgaaaaataggagcttacctctcatgcagcatcaccacagctgcttatgttatgtaggtgattatgttgtggttcttcactgtatttgtggcagtaaagaggtgatcaagtcatttggattggtgggcagagaacactattcagataggtgcggatgtactgatcgggaggcatattaggtcagcgagattggatggaattccattgcaatactcgtattggttgactaccaagtctgcgtgtcgttcactaatttacacacgaaatgggctcactctgtaaggtttccatgccatatatgtgaatatgcgaaggtgccaaagagagatgcagcatgctctttgtgctgttgtgccatgggaataagggtgagcctcttagggcttcatcatgctctntgtgctgttgtgccatgagagtaagtgtgagtc

SEQ ID NO: 284092 - DNA, 546 bp, Zea mays
aaaccccttccctctccctcgctctcgctctccatccaccttctctcttgttcgctagctagctcatctcgccctgccggacgtggttcctgccttggcatatgcatagccacctggcctgcagcggctgcaagcgtctcgtccagtaccgccggggagccgccggcgtccgctgcccaagctgcgacgctttcacggccgccgccaacccatcagggccgccggagatgtctgagctggtgtgcggcggctgcttcaccatgctggtgcactcccgcggcgccgccaacgtgcgctgcccgcactgcggcaggctcaactccacgagatcaggcaaccagatgggccacctgtcgtgcgggcaatgccggaccaccctggcgtacccaccgggcgccaccaccgtcggctgcccgacatgccgcaacgtcaatccggtcagggatgctcgggcggcgccgcagacggtgctggtggagaatcccaagacgctagacgagagggcaagctggtgagcaatgtcgccgtcggcgtcgccctgtggaa

SEQ ID NO: 284093 - DNA, 515 bp, Zea mays
ccgtggacgagctacagttctgcttcgagagcggtgatcctgatgtccagacgatggaagcagttgatgcagtgttcgtcaactcaggggacaaccccttcaagcttctgaaagaatccatcaagatgttgtccaagatcaaaggaactttcagtcatatagaggacaaggagatcccttcaaatttggactggtttgggtggtgcacttgggatgcattttacaaagctgttaacccaagtgggattgaggagggccttcaaagtcggcgtgaaggtggtgtgccgccaaggtttctgattatagatgatggttggcaagaaacagttgacgaaatcaaggaagtggatgaagccctccgtgagcagactgtatttgcgcagaggctggctgatctgaaggagaatcataagttcaggggggaaacctgcaagaatcttgaggaccttgttagaacgataaaaggaaaacatggagtcaagtgtgtctacatgtggcatgctttacttggatat

SEQ ID NO: 284094 - DNA, 518 bp, Zea mays
gataactacaaccatcaaaacaagtagaagcaatccacaaaggaacatcaagacagaaggtttttgtgatcttcggaggggacacttcagaacggcaagtatcacttatgagtggtaccaatgtatggcttaatcttcaaggttttgatgatcttgacgtgacaccgtgtttgcttgcacctgcacatggatatttctcctcacgtgatcaagatttcagtgacagttcaagagaagtttggacgttgccatattcattagtgttacgacataccactgaagaagttcatgctgcatgtgttgaggcaactgagccagaacgagttgaaataacaaaacgtttgcgtgatcaagtaatgaatgaacttgggtcagcattgagcaaacatgattggtttgcgggctttgacatagcttatgaacaacctatcaaatactctctgaacagtggatcgaccatgtaaaagaaactgaagctgtagtctttatagcagtgcatggtggcattggcgaggatg

SEQ ID NO: 284095 - DNA, 1045 bp, Zea mays
ctgtcccctaagggcgttgacgaggcaattgaggcggggaaaaggatatgcaatatcccagtcgatgtaatatacacttcgtcgctgattcgggctcagatgaccgctatgcttgccatgatgcagcatcgccgaaagaaggttccaatcattttgcacaacgagagtgaacaagctcacatgtggagtcagatatacagtgaagagacaaagaagcagtccattcctgtcataacagcttggcaattgaatgaacggatgtatggtgagcttcaaggccttaacaaacaagaaaccgccgatcgatttggtaaagaacaagttcatgaatggcgtcgcagttatgatattcctcccccaaatggcgagagccttgagatgtgtgcagagagagcagttgcttatttcaaagaccaaattatacctaaacttgtggatggacagcatgtaatgatcgcggcccatgggaattcacttcgttcgatcataatgcatttggacaagctgacttctcaagaggttatcagccttgagttgtctactggcattcctatgctgtatatatttaaggaaggtaaattcatcaggcgaggaagccccgctggaccttctgaagcaggtgtctatgcttataccaagaatttggctcagtacagacagaagcttgatggcatagttcagtagccatctgcaggcttttcgtttgctactcatccgtcgaacatgcatttggtcccggaaaacaaggggccaagctcctaccatctcatggacattcaactgccaagtagtccattcctgtcacaagtttgtagcggctcatttatctcttcagaaacctccccccacgtggtagtaaaatatacggagtagatgccaattttaggtggtgacctgtagatacaaatggagatatactggatggcagttgtgttatctttccgctttccccagtcacttagatttcagatgtttgtaatggtgcagtaataaacacttgtagcgaactgcatggaacgagacgctgttatcgaatgcttgttcc

SEQ ID NO: 284096 - DNA, 469 bp, Zea mays
aacaaggcggcggccgtggccacgctcctgtccgtcgccgccgtcaacctggggctcggcgtcctgccccacgtcgacaacctggcgcacctcggcggcttcctcgcgggcttcctactcggcttcgtcgtgctcatgcgcccccacttgggctggatggagcgctacggactccccgccggcgcgccctgcaccgccaggaagtacctcgcgtaccagtggaccctcctcgccgtcgccatgatcatcctcctagtcggattcgcggccggcatggcgatgctcttccgcggcgccaacgccaacgacagctgccactggtgtcactacctcagctgcgtgcccaccgccagatgggactgctccaactgatgatccatgcaccaactgcttaattgtcatgcattccccccctagtcttggtactgtagatagactgtatattgagagttattcagatcttaacaca

SEQ ID NO: 284097 - DNA, 555 bp, Zea mays
tttgatggaaaaaatgattatggtgataaaaaatcttaagaaggacaatgaatttctgaagggaaaatgtgagaactcagatattgctcttgtgaagctcattgaagagcgtgagctaacgaagaagcaaatagagaaattgaaaaaccaaaaggagacacttgagtccctgtgtcgatcactacaggcagaaaggaaacaaggccgctccgccagtattccagacgccccttctagccaagaagacatgccagcgacaagtcaagaatcttagcatatgtgcttgtcaatataccgttggtgtccgttacagcttgccgggacttctgaagcctgagaaatgaatatgttactgatatcttgttttgcttgagtttgcgggagttctggtcccatttaacacatactcagctgtcaacctactcaggcctttggggattgtaactataacctagaggtgcattcctctacaagtaactcggtattgttactaaccatataagctatccgttgttccttgttatttgttcgagacaaaggctgttgctggtaaat

SEQ ID NO: 284098 - DNA, 677 bp, Zea mays
ttcattcgtccggcccggaagagctgaagccgcgtgcgctcattacgatgttgcaactgtactaaagaagttctactccattgaaatagatgaactcactgctcctcctggagtggagatcatagactttctcgaggcatctccatcaccacttccttggatcagcgaggaagaactgggccagtacgccgaaaagtttcggaagtctgggttcactggacccctcaactactaccgcatgtgggagacgaattggagacttcttgcaccctggaacgaggccaagattacagtgcccgtcaagttcatagctggtgataaggacatcggtgtccagtcctttggggttgagaagtacatcaagagtggggaattcaagtccactgtcccagattttgaagtccccgtcattgaaggcccccattttttccagcaagaacaggccgagagggtggattcggggataatttcctaccccgtcaggtttaccagcccggaggcatcatcttgatgttttgctcccagttgaacctgaccagaaaaaaaatgatgggcgatgggactccatttctttctggcctgaaaaggtctttagttgcccaataaaatgtgagtagagttgaaaaaggatggaaaaaaaaaaaaaaaaaaaaaaaaaaaaaaaaaaaaaaaaggaa

SEQ ID NO: 284099 - DNA, 411 bp, Zea mays
ttcgtgttcttcgtggccagtctcgtcgccgggttcgagtggctccaggtccccggtgagccggtggagttcgccgagaagcaggagctgtccgtcgtgatgcgccggccgctccgtgccaccgtcgtccggtgcacaaggaacgccaactgaccacacgggttgtcgttgtcgaaccgaacgtctgcacttttctgctcttgtttgttgctgcatgcatgtgcttttctttcagtgaagttcagcgaatttagtaaaaaattcgctaccaaatttcctgtggacttgtggagtcatgttgttagcatgccctgctcttgttggctagaggctttcatgtatttgcactgcactgctctgattgtcctaaaagttataatattaataaaaaaatcagtttttcttttgtcc

SEQ ID NO: 284100 - DNA, 580 bp, Zea mays
gggtgaccccatattttcccagaatcccaaccaccaactatcattaattatttaacttgttctcctgttggctccgagaagagttgtgagttccatttattcatcacccataaggtagcaggtatatcgacatctcaactcataaggctgtcattatctggtatgagttgtgcccaacgttttccatcaattacattcacagcaatgaaggtgcacacatcactcagcagcctttcctttccggcgattgctaccacctgccgaggctcctccggtctccaccaggtagcagaccatcgagtccacatcctcgccgaatatgctgtaggcctccatgacctggttgtagccgaagcccattgcgagaagcagctgcatgctgcgagtcagcacagtgtctggaagcacaaagtagtcctcgctgcttctgtccgctccagcaactgatcgagaggaaccactaattgcagcggatgaagatggttctgcccctgatgtcgatgattcccttatgttaagttttttctccttggccagatattctgaacgcgaggcttccatcaccatccgttctatttaa

SEQ ID NO: 284101 - DNA, 396 bp, Zea mays
  unsure (1)..(396): unsure at all n locations
tttnttttttttttttttttttttttttttttttttcctttttttgggtgtgttcgtgtagaggggggcggtccatttattcatcacccataaggcagcaggtttatcgacatctcaactcataaggctgtcattatctggcatgagtggggcccaacgttttccatcaattacattcacagcaatgaaggggcacacatcactcagcagcctttcctttccggcgattgctaccacctgccgaggctcctccggtctccaccaggtagcagaccatcgagtccacatcctcgccgaatatgctgtacgcctccatgacctggttgtatccgaagcccattgctagaagcagctgcatgctgcgagtaagtaccgttgttggaagcacaaagtaat

SEQ ID NO: 284102 - DNA, 577 bp, Zea mays
ggcgatgacagatgcagcgtccgcccacttttcccctcgcgcggccacgacggatggtagtcggatccgattgatcgacctggaagaatctccaccgtcctgctttaccgagcgaggtgctcggatcctgcagcgaagggagagagtgcattcgccgccgccatccgtgtccgccagtgcttcatctccgatgcgtcgtctgaaggggatacattgatgatcgatcgacacccagatctctcatacactgtctgcttctttggacctacaagttttgaggtgtttgtattttatggtccacacaacatgcgaagaggactggactcgtaacccgaacccggaatactcaaatttcgtttggtaatttcgggtagcaactttataaaaatacaaacttaatttaggcaattcgggtacttgaacttttatgtgtcatatactcatatcatttttaaataaaaaatttgtgcatctataattatttgtaacagtgtaagtgtgcatgacttgtgattggagattaactggttttttatgtccagtatatcatttattaaggtgtgcctttttcctaatt

SEQ ID NO: 284103 - DNA, 554 bp, Zea mays
ggcgttgtttgtggccgagctccgcgccaagatcagcgccgccaacgcgctccgcgacgtcgtgctcaggggcaagaaggtcagggccgcggagggcaaggagatgggcatagtggatgccgtctacccctctgcgctcgagacggcggaccacgccttcaagtttgccgagcagctcgcggcgaggaagtgggacggaggcgtctacgcgtccataaggatgtccatgtaccctgaggcctgcaggtcagttggaatcgtcgaggagagcgatgaggagaagcggaagcacttcgcttctaagctctaacttcgtgattggctgatgagagggtttctgtggaagcatggaggaacctacacattctgtatctgtacatcgtccaaccattggcgctgtcgctacgtgtgaagtacacaccgtgtacttgtgcagaccttgtaatttttacttgcctggtagcgggaaataaatcgaagctcctctcaccctttcttgaataatttgccccagtaacattatcgatatgtgttcatgtgttgtgcttgattcc

SEQ ID NO: 284104 - DNA, 691 bp, Zea mays
gaggagcagaaaaagttctgcattgcggcacctgagccacttctgacgtttgctctcagctgtggaatgtattcttctcccggggtgaagatttacacggctaacaacgtgagggaagaacttcaagacgcacagcgtgatttcattagagcatcggtaggagtgagtcggaaagggaagcttctggcccctaagatactgcactgctttgcccgtggctttgtcgacgacaacagcttccctatctggatctcgcatttcctaccccagcagcaagctacgtttgtcgatcactgcgtgtctcaacggcggcaaagtctcctgggcacccgtactttcggcgtcgttccatttgattctcggtttcgctacctcttcctgccagatgcgggatcgttaaattaactgctatccgagattcagatgcttccctgcctagacaacctgaatgacagcctaactgccaacagaagtgatgaagtccaaagccctgattgaccgctaacagtgtaagagctgtctttcgagttaccatcatgtctggaaaagtaagtttatatccagcgaccatgggagtatcaagatttgagatagcagtcactggattgacccgtgtcattggcagtcagatgcatatctttggaattccttaatcggttcgtccgtctcgacatcttgtcgagtttcttat

SEQ ID NO: 284105 - DNA, 571 bp, Zea mays
aaatcatatgctgcaatatacccacatgctggtggtttcctgcatccactcatgcccctagtggtaaacccattgagtgcagagccagctaagtctgggaacagcaaggataatagtttaaacaagaaactacaggaaattgatggatctgctgtgtcaagtggcaacagtgagaaaacaagtggggatcacagcctagaaggatccagtgatggaaacaacccaaaggtgagcggaactccaaagaagaggagcttagatgataggactacatcagaaacatgtggagtttcagcaattaatgacacaccaggagaatcaggaagattgccagctttgtccagtgtgcgcattccagacacaacgatgaaaccatgtgtgagcaccggtagtgccttcaaagttagtggtgcgacatcaaccgaatggccagctaaggacgacaaggcatcgaagcgtgaaaggaggaagcagtcaaacagggagtctgcccggcgctcaaggctgaggaagcaggctgagactgaagaactggctagaagagtagagctactgaccgcggagaacacgt

SEQ ID NO: 284106 - DNA, 859 bp, Zea mays
ctcagcactctaatgctcttattgctgcagcaatatggggtccgtaagctagaatttctgattgcatttctggtgttcttaatagcaacatgtttcttagttgaacttgggtattctaaaccaaatgctccagaagttgttaggggcctttttattcctgaacttaaaggaaatggagctacaggccttgctatctcattacttggtgctatggtgatgccgcacaatctttttctgcactcagcattagtattgtcaagaaaagtgccacggtctgttcatgggattaaggaggcctgcagattctatacgattgaaagtgcatttgcccttacagttgcttttctcatcaacatatctatcatatctgtcagtggttctgtctgtggttcaggtaatttaaacccagaagatcaagcaaattgcagtgatctggacctaaataaggcttcatttttgttaaagaatgtccttggaaactggagctcaaagttgtttgcagttgctttgttggcatctggtcagagttctacaattacggggacatatgctggacaatatgtcatgcaggggttgttagatcttcggatgaaaccctggatacgcaatcttgtcacgaggtccttggctatcctgccaagtttgatcgatgtcaattatgtggtggttcttcagcagctggccagttgattatcattgcatcgatgatactgtcatttgaactcccttgtgctttagttccactccttaaattcaccagcagcaaaacaaagatggggcagcatacaaattcaatattcactgctgtgctgacatggatgatcggctcgtttattgttgtcatcaacacctactttct

SEQ ID NO: 284107 - DNA, 476 bp, Zea mays
agggctttgagcacgactgcggggtgcaccggggtattggctactttcttgagccactaatactgcttggtctattttcgagggcccctatatcgatccggcttaaaggaatcactaatgatacaaaggatccttccgtggatactttccggacaacaacattgcatatgctcaagcactttggtgctcctctggatggtttcaatctaaatattgacagccgtggatctcctcctcttggtggtggtgaggtgtttctccgggttcgcaatataaatagcacattgacggcagcaaattgggtagatgaaggtatggtgaagaggataaggggtgtttcgttcttcactagagtatctccacagttggaaaaccgcatcatttatgctgcacgtggaatcttaaacgtttcattccctgagttcatatacacacggatcatagaacctggttctgctggggggaggtcaccaggc

SEQ ID NO: 284108 - DNA, 414 bp, Zea mays
tgctcatatccaacagctagatcagtttatgaggaagcttgaagaaatccggcaagaaaaagaggcagctgcagctgttactgcagggactgctgttgctattactgccactccaaccgtgaatgctggagcgacaactgctgatgctactctaaagagtggacgatctggcgaaagaggcagagggggtcggaagaaggccaaggtacccacggagcagccagtgccagtgccagtgccactgccacctattgacttagagttgcctgtggatcctaacgaaccgacatactgcctctgcaaccaagtcagctatggtgagatggtggcatgcgacaatcctacttgcaaaatcgagtggtatcactatggctgtgtgggcgtcaaggagcaacccaagggaaagtggtattg

SEQ ID NO: 284109 - DNA, 730 bp, Zea mays
cggaaatgcgacgcggcgcgctctccctccgtcccgcccgcgctatccccacgttgaggctcggcggccaccgcgacgcccgtggcgctgtcgtcgtccgcgccactgcggcagagggagccgtggagctgcaggccaaggtgacgagcaagtgcttcttcgacgtggaggtcggcggggagcctgcgggccgcatcgtcatcgggctcttcggagaggtcgtacctaagaccgtcgacaacttccgtgcgctctgcactggtgagaaagggtacggctacaagggctgctccttccaccggatcatcaaggactttatgattcaaggcggggacttccagcaaaacaatggtactggtgggagaagtatttatggtgaatgctttgatgatgaaaattttacactgaagcatgttggccctggtgtgctaagcatggcaaatgctggccccaacacaaatggaagtcaatttttcatttgcactgtgaagacaccgtggttggacaaccgtcacgtcgtgtttggacacgtattagaggggatggacgtggtgaagcagcttgaatcgccagagaccagcaggtccgatactcccaagcagccttgccgaatcgttaactgtggcgaggtccccctggacagctgagcgagcgaaatgctcttggtgagtttgaacctgaggtaccgcgaagtcttctcttacgttagagcgtcgacgcccatttgtgg

SEQ ID NO: 284110 - DNA, 262 bp, Zea mays
cctttagcggaacccatatctatacagcggtacaaagtttcggtatggaggaaatgccttgcactacaaagatgactcagatcatgatcttgagtactgtgtctcacttcattcgggtctcacagactacaggacatttgtgggaacaaatctcaatccattgtgggaattttttttggttccatctgaagatgattctgtacattgccaacacttgtcagatgcactgggaaatggtgctatagttgaaacatctgacaaa

SEQ ID NO: 284111 - DNA, 478 bp, Zea mays
tccgtctcgacaagcgtcggcgagatggtgaagaggagcaagaagagcaagagcaagcgagtcacgctgcggcagaagcacaaggtgcagcgcaaggtgaaggagcaccaccgcaagaagcgcatggaggccaagaaggcgggcaaggccggccagcggaggaaggtcgagaaggaccccgggatccccaacgagtggcccttcaaggagcaggagctcaaggcgctcgaggcccgacgcgcgcaggcgctccaggagctcgagctcaagaagcaggcgcgcaaggagagggctcagaagaggaaggcaggattgcttgaggacgaggacattgctagtttggcatctgcagcttccgcacagggcagtgagtttgcagcaaaggagaatgctcccttattagtggcaaagatcaacgatcattcggagaaggtctttctacaaggagcttgttaaagtaattgaagctcccgatgtg

SEQ ID NO: 284112 - DNA, 398 bp, Zea mays
ggtgtaactgcagcgaaaaataccggaatgtctgtagtgatggtcccggatccaaggctggatgtttcgtatcacaaaggagctgaccaagttctcagttcattgctggacttcaaacctgccgaatggggcttgccggcatttaaagagtagacattccatacaagattacaagattataagagtctagtgaagaagaatgtgagatactccctaagatgcaaattaaagagtacaattctttaagatgctgctcaaggaaaattccataaaatgttggtcaaacatacaattgaacattcttgtcgcctcctaactatgtgtcaccaaattactctgaataagttcgttccgattccgatataataatatccatgactttgttttcactacaattt

SEQ ID NO: 284113 - DNA, 575 bp, Zea mays
ggaagctggtccgcttgcaggtcaccggtcgcggatatctcgggtcgacgccacgacgtccgcagattttttagagcctaaagtccttagaaacagcccttgcatctcagtcttttctccagctgggactgcttacaggattgcctatggtgatggagctaggtttggaaaagggtttccgtgcagctctgagtgattttatcctcatgcaattgcagttagcatcagttttcttcacattctcacttggaacaaaagcacactactacggccgcactattctccatgggggtgctaaataccggcctacagggcgtaaatttgttgtttgccatgcaagctttactgagaattatcagttgtattccagaagtcattttgtcaaaggatttgagttgatcttccttttgatagtctaccacatctttaggagatcttatgttagcaatgtcgtgcatgtgatgatcacatactcaacatggtttatggcagtggcttggctgtttactccttttctttttaacccagctggttttgcttggcaaaaattgttgacgactgggctgactggaata

SEQ ID NO: 284114 - DNA, 409 bp, Zea mays
gcgtccggctttgttcgaggctccgcgcctggcgctgggctgcatccttgggcagccatatacgaccggtggatacattgttgcgttactgttgggttccactgccgtcgcatacgctgaccgacacaccgatttctgacgagtccgagttcggaggttggacccgcaagtctgagtatggctaggagtggtggctagccatagtgaccatgttgcaggcctgttctgtgactgctgtgacaccggttggcatgaaccccgttagccgactgaactggatggtctagtgcactgaacccgtaagggctggggaagctggatctgctacttggggccgtcgtgcacccggagttgcttgaatacggtctatatcaatagctatgatatgactgacaggcaggggaaccct

SEQ ID NO: 284115 - DNA, 838 bp, Zea mays
  unsure (1)..(838): unsure at all n locations
cggacgcgtggcaagtgtattcatgcgactggggagttctgcactggatacaacgcagtgagtggagagttggggcatgctgttgaactggggccaagacgctaggagggcagggcattgccttgcagataagggacgtccgtgtgcgtgtgctcggtgaggtggcatgggtgaacatgaaggcgaacgtgctgttccatgtgaccaacgtctacgagctgtgtaacggcaggtggtatatggtccatcaccacagctcgctcatggctgaccctcctccgcacaatatgtttgcttgatgtgctgctattcttgagcggagattagataatcggacgaagatttcctccctcctccccacaacccttttattcgttgtggatctgctgtttgttggtattgctctggatctccgttccgcagttttgtacagatttgttttaggtggtaaggcttattataaattggtgaatgggcgccctggtggccgcggctgactttgatttatatcgcctgcttccagacggtccgagttgatgagtaaaatcttctagaacggtcgaagctcaatggtgtttgttctactgactggactgagtcatggtctctggcaggtaggtagctgatgatgattccgaatctaggtcattcatactatggccttgtttgggagggctctggcttctctgaaatagctttggctccgcttctctgaaagacgagctcctctgcagagccgtgtctttttttaaaatcgtttgcanaacgcttcttgatattttttatttatgatgagacaaggatatgctgaaaaatattatggataaaaattttatgg

SEQ ID NO: 284116 - DNA, 562 bp, Zea mays
  unsure (1)..(562): unsure at all n locations
ctttctcttccggcagaccacacaaaattaacaacacaaacaggatcgatcgagcaacgtacaatggcagctctggccccatccattgtagttcccacagacgccgagctgctgcaggcacaggccgatctatggcgaaacagcctgtgctacctcaaatccatggctctcaagtgcgctgctgagctcggcatacccactgccatctacagcctaggcggtgctgcctcgcttcccgatctgatcgcctcactgtccctcccccaggctaagctacctttccttggccgcctcatgcggctgctgtcgtcctcgggcgtcttcgccgtggttgagtccccagaggctgtctactccctcacaccactgtcatacctcctggtggacggcatcgctgccgataacaatcacatggaccatgcacctttcctactcactgtgacgtcagcacactacattgacctggcaatagacctagctgactggttcaagaaggaagccaagacaccctctttcgatcacaagcacgcagcatcgctgntcgaggagagtatgggagcgc

SEQ ID NO: 284117 - DNA, 576 bp, Zea mays
ttctttccaagtccgggcgctgctcctcctgcggccacggcgaggccgtcttcttccaggccactgcgagaggcgaggaggggatgacgctcttcttcgtctgctgcaacccgagctgcggcaaccgttggagagaataatggacggttcctctggcgcaacagccaggacgacatgattttttttgcaagattttcatccgacagacctgctgctcccccccatatgagcatgtcaactgattggattggattggattggattgtactactatgttcccagtgcgttcagacatttcaataacttgccggcagggtaaacttccctgtggcctgtgcttcattcatttgcatcaaagaaaggatgagatgaggaaaacttattccatgttcgaatgattccctctgcacctaaaggatgagatgaagaaaggatgagatgaggaaaattaccgtcaggtgaggtggagaaactgtcctcacttcacatgacacagggttatgcaaggtctctctctatatttctggttctttttaccaattctgcagctcatggtatgcaagtacatatcttgac

SEQ ID NO: 284118 - DNA, 543 bp, Zea mays
tcgttcaagtctaagtcttagtttttgcttttggaacatctctctaatttcacgatcgagcgtacgtgcgcacaaacaaacaaacaaacaatatatgggttcttccaatgatgtcacggcgattcctctaatcggtaagattttactgacctctctaacacatctcatacttcatgtgaccacccttgacttagtgaactagctagctttgttacaaattttgagtttcttcttttccttttattttgttatttctctttgctacatgttctccgatccactttttgaaggtttatggtacaatataggaagctttcgcagtttatttcagccaaaaatcctcatcgaaaataaaataggctgaaaaaaataagggatggccacaaaaaaagctcgggcatattttttagccgttgaaaattataaagtttggtttctactactttcttttgccactgcatatgatttcttttattggaatataaattagaaaaaaccctatttttcgatgatttttttggccaacaattaatatatgaattt

SEQ ID NO: 284119 - DNA, 546 bp, Zea mays
cggctcgaggccggccagctgcgacagctacgtcggccactacatgctcggcggccactaccgccgggactcccgcgtcgtcatcgacgaggccatcgcctacgccgagggcctcaagctgggcggcaacggcaaggaggtctgggtcttcgatatcgacgagacgtccctctccaatctcccctactatgccacccacggcttcggcactaagctatacaacgcgacgagcttcaacgagtacgtgctggaggggagcgcgccggtgctcccggagacgcagcggctgttcaagaagctcgtctcgctgggcatcaagccggtgttcctgacgggccgcaccgaggaccagagggccatcaccgtcaccaacctccgccgccaggggtactccggctggatgacgctgctgctcaagcccgtcggcctcaaggccaccgccatcgcctacaagtccggcgagcgccagaagctccaggacgccgggtacgtcatcgtcggcaacatcggcgaccagtggagcgacatcctcggcgcgccggaggg

SEQ ID NO: 284120 - DNA, 484 bp, Zea mays
ttggagcgcatcatgaagggccgcaccgccgtgctggtggcgcaccgcctgtccaccatccgcggcgtcgactccatcgccgtggtgcaggacggccgcgtggtggagcagggcagccacggggacctcgtgtcccgccccgacggcgcatactcgcggctgctgcagctgcagctacaccatggctgatcgtgcgcctggagtagatactggagggcgcgcggccggtgtagatactggagggcggtgttagcgtggcgtggcccaaccgtggccggagaagacgtgttttgatgtgaacgatcaggattgtgccgacaaacaagtgatgccgtattcttcttgcactcctgccggctctgccaatgtttagatcatccccttctagtaattctcacacctttttttttcttcctttgagaagatcctagtaattctcagatggacccaattgtttgatgtgtaacggtcagaagccagggtt

SEQ ID NO: 284121 - DNA, 808 bp, Zea mays
ttttgatgaggatcatacagtaaacccaaagagcgagtctgccaaattaagatataacgcagaaaaaggatggctgaatcttattgatgatccaaaactgtcagcttttgtattccgtttaggtggaatatatgggcctggaagaagtgctttggacaccttagcgaagagcaaatctttgtcacggaaacagaagttgcgagaatctaagcaatatactgcacgaatccacgtggctgacatctaccaggctgtcttggctagtatgagcatcagatgtgcaaggaaaatatttaatgtggtggatgacgaccctgccccaagagctgaagtttttgcgtttgctacgagtttgatacagaggagatatcctgatatgataactgaaaccattgatgccaagcctgcaggcttagattatcaagagatgatcgtacctgcagagaaacgggtttctaatgctcggatgaagcaggaacttggtgttaatctgcttcatccaacttatagatctggtctgcagagtatccttgatgcttggcaaattcagcctccccttcccaatacaagtcaatgatgatttagttttgaaaggcatataggtgtatgtacatgtatttgtgcttgatttggttcttgtataaaaaagaacggagtgaataataatttagtgacgttgtagccttttttggcggagttggtctggtgctcgtgttatttttagcattgtttacgaattatatagtacaatctagtcgccatggatctgactagacgattaatcgtgatgagattgattagtggagcc

SEQ ID NO: 284122 - DNA, 726 bp, Zea mays
gcagagtaccatcgtcaatcgactggtttaattcgtgctaagcagcacacgtctccctcttctgaaagaagctgcaggttttcgccggaccatggctggaagaggaggaaatggcgttccggccgaacaggagttcccaggctggagcgtcgccaaagcccaggaagatccacacccacctgtgcggcatgtgcacgctgctagaggtctccctgcgcaagctcggcataaaaacgaggaagggccggcgcatttcatccctggcatctccaactccatgcctagccatcatcatcaatttccgggggcgcagtggagcaagaatcctacgccgcatgtcccctctccagtggaattcatcatagaggcgtttcagcaccaaaaggatgagctgaaggaaaaggcgcgccaaaagttgattcgcttatccggcggggggaactagacaaagaagagaaaggatgcatggggatgaacaatctacagcagcgctatagttgtctggacatcaccatagagaggtggttgatgcagatgacacatacatacatcgtcgacatatatattaatttatgctgcacgcgcgactcgtgagtctttagtttgatttgttgaataaatgtaatgagagctagtacgccgtctctactatacatgcatatctgcatatgcccaaatccacaggatggtactagtccgccatagtaaacaacagaacccaactgg

SEQ ID NO: 284123 - DNA, 542 bp, Zea mays
tcgttcgctactcggttctttaagcataatttaacaatgtcctaaaaatgctgtttgaacacatccttttgcatgctccatagcatgatttggtggttttattgccagaacataaaattgctgaaactcttcgatgttattaagatttgagttgtactcttatattgttatcatttttgtttcatagaagtatatgcgcaaatatgaaataagtggttttaattgccggctaggatgtttcaacctgcggttgactgtaaaatgctacagtattagtttatctacctttttccaccagacgtaatacttggcaattgtgttcggaccattttatccagatcttcaactagccatccactctttgtagctgctttacagatttaataccttgtcatttgcgtagtggcagagttgagcgtagattgttattatatattatttattcatgaacttcaatggtttaagtctaaatccagacttcaaattctttacatcattttacagtaatgttcgattgcttgagccctgagggtagcgcatgg

SEQ ID NO: 284124 - DNA, 565 bp, Zea mays
acttggttgagcaagaacacccagcccacgccgtgccccacgccgtccgggctccggcagcggcggcgggaggaagagggaagcgaggggatggcgcagccgagcaaggagccgtgcaagaaggaggcgtgcgacatccaggcctgcctctccaagaacatgttcgactccaggaagtgtgtgagagttattcagttacttcagtcatgttgtgagcagtgtgagtacaaatcaacacactgtggttccttgtccggattactcaagaacatttctaagtgaggaacaataccgacatagtttactgcagccattgaataaaagtttcttttaggttagtttagtactttatggggctcgcggcaatctctcttacggatcaagggtcctgcgccgggcttcaataatgcagacacccctcaacctgcagaatgatgctctggtcgctgagttgtatggtaccgagtggaaacagcaaaatggtttgttaatgatcgattttaatgcctgtatacctgtggtatccttcggagttcgtgtgctcttgtacaaatgtaaccccatg

SEQ ID NO: 284125 - DNA, 519 bp, Zea mays
ctttcgttacaagcacgcagcatcgctgttcgaggagagtatggagcacaaggctcccgggttccacaagatgtcaatactaggtttgttggtccatgacaacttcgcaaccagcattgccgtgcgggagtaccaggacgtattccagggggtgaagtcagtgactgactgctgttaccatggggatggcacaacagggaaggccctcgccaaggccttcccacagatcaagatcacagtactggaccttccgcaggagattcgcaagataccggctgatggtgttgttaactatgttggaggtgacatgttcaaatccatcccacgtgctcaaatggtgttacttaagatggtgctgcaccactggagtgatgaggactgcgtgaagatccctgccaactgcaggaaggcaataccctcacgggaagagggagggaaggttgtcatcgcagatattattcttgacccaaccttaggaccagtcatgtttcaaactcaactcctaagggacgtatgcat

SEQ ID NO: 284126 - DNA, 727 bp, Zea mays
cccacgcatgcgtacgcgtcggagcagttcttttacagctcaccacttggacagactgtgacatacatgtacaatcttagggctcgtgtgcttaccacagacttccttgattcttataggagagaccgtgatgcaattgggatgttcggcaaggtttgtgatgaacatgaagggtactttgttcatgaggccctttccattgccatcgattgcttacaacttgatattcaaatgaggccagaaatggaacatgtacttttccgtctccggatcattgttgctagaagcaaacttgctgctggtagtaacaataaacctagccaacatattggtcgggcccttgttaacaacactgataaacttcacccaactctcatatcaaccatttccatggaggaactgaaggaagcaaccgggaacttcagttatgattttcttatagaacagggatcatacagtcaatgtttcctgggagttcttaaagatggtcagaattttgctgtaaaaacgcttgatacttctgaacaaattcaagtagaggttccaaccattttaagaatgtgttaccatgacaatgttgtgcaatttcttggatgtttcttgaaggggaaactcgtgttcttgcttatgagtacgccccaaggggctccttgcatgatattcttcatggtaaaacgggggtcaaggaagcccagccagggccacctctatcatggttgcagcgtgt

SEQ ID NO: 284127 - DNA, 434 bp, Zea mays
ggaactaattctgacagaacactttggagactactcaagatcgatagatcagagccgtcagagcttgtgatagacgagtgttctactgtatatactgaaagtgaacatcctgacttgttgaagggtcttgatgacgagcacaggtcaactggcggagtaaaatttgttacaaagttttatggcataattggttttatcaaattccttgggccatattacatgttgattattactgagcagaaaaaaatcggcgaaatctttggtcatccagtgtattaggtgaccaggacttcaatggttgaattagcaaattctaagacatgatctacttttcaaaacttcaaggacgagaacagatacaggaagatctttgaagcacttgatcttaggaaggatttcttttttaggttctcataccacattatgagaagttt

SEQ ID NO: 284128 - DNA, 449 bp, Zea mays
taacccatgtttagtagtacaatatatgtcctccatcaccctcaccactaccatgacatgagccccatatggttatgattacttgtatggttcctgcatggcttctccaaccccacaccatccatggatgccctgaccttgaggtgctaccgctactcacctagtgtcgccatggttccgatgaggaagacctcgaggacgacgatgacgagagcctccatctccacagatggctgctcgagttctgagcccaagaagaaatcccactctgtcagcttcgctggcaaggccaacaaggtttacgaggacaaggacatgggaatcctctgctacaccgacgagaacggcgaactggtgtgcgagggcctagactaaggcccgaggctgacgtggcatgacatggagaaaaaaaacttgaattaagaacgttagaggaggcagaggacagc

SEQ ID NO: 284129 - DNA, 575 bp, Zea mays
tttttattggccggactggtgagcaggacccaacactactccctgcttttgagaccagcctctttccagtgctccagaggatattggttgaggacatctcagagttctggccatatgcttttcagatatttgctcaacttgtcaatttgagccgaccacctctctcacagaattacatgcagctatttggtgtccttctcagtaatgccacctgggaccggccaccatgtgttcctgccttggttcgcttgctgcgagcattccttaggaaaattccaaatgagctaaaccaagagggcaggcttccaaatatcttggcaatatcccgtagcctcctctcacgcagcagcactgaagattctgctttctacatgctgaacacactagtggaaaacgttggttttgacattctgaacccatatataagtgagatatggagtgctttgtttactcggctacagactagacagacagtgaaatttgtgaactctcttgggttttcatgtcgctagtgctggtcaaatatgggtcaagtgttcttggtcattcccgtgatgcaattcagccaaatcttt

SEQ ID NO: 284130 - DNA, 623 bp, Zea mays
gtggtagggaatgccgatggcgggctcgccgccggtggtcgcggggtccttggttgtcgccatgaggtctcagctcgccgaagcgtccaacggcgcggccggaaccgctcagggacgacgaccaggcggtgggaccaaagcaggctgccattgctgtcgggagacaagcgagccgtctgagcacgaccacacggcggtggtggtcgacataccggcaccatccgctgagcgtcctggtgttgtggcgccgaccgccgccaccggatgttgcagcagctccgcccgcgaaacttgtgctgctccaaccatcgtgactactgtgaactctgcgccacgaggttgctgtggcggcattggcgaaggagacagccgcgagaatgcaaggccaagctgctgcaccgatgcccgtgactctcctaagaaggcagggaaagaatgcaacgcaaggtgttgttctgggtgcaaacaagatactcttaagtcttaagcgcaggatacaatctcaaatcttaagtgaaatactgactgttctgttcatgcaacaagaccaaaagctttccgattgttcagatcgactgggttggtcgtgaagttttcacaatgagagtgatcaaatccttagc

SEQ ID NO: 284131 - DNA, 485 bp, Zea mays
gcgcgacgcgcgcctgcggttcgaggaggaggccaaggagctcgtggcgctgctggaggcgcactcgagggaaagaggttcttcgccggcgacaggccggggtacctcgacgtggccgcgtccgcgctcgggccctggcgcagcgtcatcgaggagctcaacggtgtggcgctgctcaccgaggacgaccaccccaacctgtgccggtggaccagggactactgcgccttcgaggctctcaagccgtgcatgccggatcgggagaagctcctcgcctacttcactaagaacttcgacaggtacaaggcggccgtcaatgcgacgctatcgcagtcgcagcagtaataactggccaactgggtacacctctgcccggccgtatggcgggcgtttctttttttttttcttcagaataacgtaactatgcccagtactcatgttttcaattctgcaaagtgcaaatcaacaagtcgctgcgtggtttt

SEQ ID NO: 284132 - DNA, 578 bp, Zea mays
cactttccatctgcaaccagcagagcgagtacgttgcactgcacgagcgaaaaaaatggccaaggttgccgccctgacgatcaccttgctcgggctcctggtgtccgtgacatgccagggcagcacttaccctgcttcgtcgtcgtcgtctagccctggctgcattctgcgagggtggatcccgttcttgcctccttgccacgacgaccaacccccaacgccaaaccctctccctcctcccttcagggctcaccgtgggttactacaagaactgccctggcgctgaaggtatcgtgaggaaggtcgtggagaaggccatggacaacggaaaccgcggcattggcgcaggactcgttcgtatcttcttccacgactgctttgttcgggggtgcgatgcttccgttctcctgaggaacaccagcggctccagcaaccagacggagatgttcggcctgcccaacataaacaagcctcgcgggttccaggtcatcgacgacgccaaggccgagctcgagaaggcatgccccccacggtgtcgtgcgcggacatcgtcgtcttcgccgtacgcgacgccacac

SEQ ID NO: 284133 - DNA, 546 bp, Zea mays
tcgggctctctatggatactgtcgttgctattctagaagagctccaaggagcgaaagggcctctagccgagaagcatcaagagcccaaggctggaaccgaacaggcacctgctgctgggagtgggagcaagagcagtcgcaagcctcgctgaaaatgtctgggaggcacgaaggagactgttggtccacatccaaaatcattgacccatcctcgttaacaaggaaaagcattacctagggtgagaatagggtctaaattttacactatataagatttaaggagcgaattaggagcaagctctatttatattcatttctgaactaaattttatttagaactctaccattttgtgaagaatcatttggaccgcgatccattatcacaccagcattacccggtcaagtcgttagctagactgtagcttgtaaatatgctctggtctagagatgtaatcggattgaatatggacagataactctgaaacacattttttattttggttgttagagcattcatcaaggaggacatggggagactactacagt

SEQ ID NO: 284134 - DNA, 856 bp, Zea mays
aggggtccaaggtggagaaagtggtggcgaccacttacttgtggccttgcaacttctaggatgaagaaatctgaagctgaagcagctgcaatgttaatgaggtttggaattgccagatgcagtgcaaagcccgaacatgtacagttccatgatctgatcaggctatatgctcgaatgcttggacgcacaggaacagctccggccatggtccagtcagtgtacctccaaggctcaatcaaacattcctctgagcacctgtgggcttcgtgcttcatggtttttggattcggttctgatcctgtgatggtagaactgagaccatctgaactaatgttctatgttaaacagattgtcatgccacttgcaatacacacatttataacatactcccgctgttatgcagcactagagctgcttcgcctgtgcactgatgcattagagagagcagctgagtccatgcttgctcatgctggcaaatggagagaaacatcattctcctgctttaggcaagctcattcagaagcccagtacacttatctttggcaggagctggctcttctgaaagcttctgtactggaaccaagggccaagctgatgctccggggtggacaatatgacattggagatgacttaataaggaaggccatatttatccgtacttctatctgtggcgagcaccatcctgacactgtttctgctcgagaaactctcagtaaactcacaaggcttcttacaactgttcagcttagttgattcttatagtttaggagttcacaatatattcttttcagtgtgccttaacatgaacaccgtacacaataaaccagcccttgaaataacaaagtaaatttgtgtt

SEQ ID NO: 284135 - DNA, 522 bp, Zea mays
atggcaacgagatccttcaagctaccaaacccaatgtacttcatcagctgattttattgttagagcagtggacgaaggagcaggttttcatagggtgttcatatggtcccggtgtgaaactgcttttgttagacatccctcgggacataaatttagatttttatcttcaagcatgttgaaattcaactgaggcttgggtccgtcgaatctgccctatgatgatctgtaattacacacttcttttcccacactactggaagcatttgtggtaaggcaaattgtgaggtcatttggtgttcggtcattcagtcaccttctcgttaaattttagttcttcgaatgtctatttcggaggtctcatttagtatgttgcttgatcgcctagggactaaaagcacctgaactgtagttactaaaggtttgaatgtgggacctaagcatacccttactgcggttctaaattataggttttaaaggtcactgactgcttttgtttgatacacccgtttttagagcaaactc

SEQ ID NO: 284136 - DNA, 644 bp, Zea mays
  unsure (1)..(644): unsure at all n locations
atgtgttgaggtggattgatgtgtaaattagtttatgttacacctccanaccacccaaatcatgtggattttggtcaatactagagtacccaacctaggtctgatagagattccatggtgtttcctctcctgtttgtttgtctagacttggactggtgttgaatatatagattatagtgtggaaatgattcgtcgcccctgtatctcattgactctgtgtcccttgtggctgtagattgtgaaagaaatatgctatgaccaatttaaaggtaacgctgtgggatgatgttgagattattgcaattctagaattgcattataaattgtcacgataattctaccgagctcaattatgttttcaaatggttggcacttgcctctgattcaacggtcatttgagatatgtggcgtccgatagattcggctgaagactgggttgtgaggtctattaaggcatgtttggttttggaccctagttgtatagaatgacttcgttcgaggcttccaacttatgagaatgaaatgactttgttctgcatttgaaagatagaatgactttggtccactgtgagccaaaaggtttgatagcccgtttggatgtagatattggagcactaaaatggaaatttgaatcagctttcctg

SEQ ID NO: 284137 - DNA, 823 bp, Zea mays
  unsure (1)..(823): unsure at all n locations
acgattctatgggttacccgttaccatcaaccaagggtattgatggtatgattttggtcaatacctttgaagaattttttggtgatattcatggtaaaggtgtctggagcaaatttagtggacaagcttcttctagcctatccagcaatgtcgttgcactggcgtcatacaatggagggaaaaggttttttgcatgcacggggttttttattccatggaatgagtctacaattattttgacatcagcgagcttgattagaagttctggtgatgggagtgatattgttgaaaacttgaggattgtagtgtcgccatgcgatggcaaaatcagagaagggacattagagctttataatcgacactacaatgttgctcttgtcagtgtcaaggatttctatgttcgttctccagcaaatactgtctgtattaggtacagttctcaagtagcagctgtagggcgttgcttcgaatcaggtgcgttaatggctacgagtggcaagctggttccctggacaggcacacttgattgtgactgcctcgtacgttcctcgtgcaaaatcactaaggctgggatcggaggcccccttgttactctagatgggaatgttctcggcatgaacttctatgataagaaaataggaacccctttcctgtcaatgccggacattttcttgattttaaaatcgtctaagagtcacccctttgctgggcctttctggaaaatggatggngatgacgcaactaggtaacaggtggcctgtgcccatgccatgttggcgactcctaatatgtggatgaggataatctgatgatgatgattctg

SEQ ID NO: 284138 - DNA, 567 bp, Zea mays
tcgcgaggccgccgtcgtggccaagaggaatcataagccgcatcctgccgctgccggcgccggcgccgcgtcgccgtctggacggcgagcgagcctcgccggagtcgccatggtgctgcactcgtcgggcgtggagtacctgccgctcctgctcaagctcgtcgtgctggcgtacgcggcgctgtgcctgggcgagctcctgcacaggtgggcgtcgtcggacggccgctgctcgctctccccgtggtgcgcctgagcagcggtgcgtgtcctgggcaccagcaggagactggtgatgcaaatgcagagtttttcagctgctgaaccaaaaaaaaaaacctccaacagccgtggaggtctagcttagcctttaatttaggcactgtagaagattgactgctttgggattgggtacgctcgcgtctgccgtctgcgtggcgtttgtttcttgatttgagggagacgtatgtatgtacgtacgatacgaggccacggggggtacgctcccctgtatcctctcctctgtatagaatccactgaatcagaatgcaacgcgtgacccgagcc

SEQ ID NO: 284139 - DNA, 462 bp, Zea mays
ctttcttttccaataagctaagcagcaggtgcaaagggaattcgagatccagagagctagctgatcgatggatccgaaagttggcgttgctctgaccctctccctcgtcggcgggctaagcacctcccttggtgcactgttggctatcctcaaccatgcgccaaacaacagaacactcgggattctacagggctttgctactgggctcatgctcagcatgtctttctttgacttggcttacgatgctgtcaacgccatcggctttctgagagggaacctctggtttttcgctggagcgctgctgttctcaacaatcgcggacgttttccctgagccagactgcagtgcggcagatgaaaatgggaagcagcagggtggaaaggaactcatgatgagacatcgccgaagagttatatttagcgtcattgtcacagcaattgtgctggtgtgagtttgcaaaac

SEQ ID NO: 284140 - DNA, 669 bp, Zea mays
tcgtatttttcttgtgtttattccttgctagtacatgtattcgacgccgattaattaaatgctaatcttgtgtatatgtgtatgcttatgtgtgggatgtgaagagaaatatcatatgtatgaaacgagacaagtcgtgagatgattgtttgatgttcagtgttatgctcaaaccagaaatcatcgtctactcggtgaggtcctgctattgttgttttacctcttcctttctgtacccggtgtcgatttattagatactaatcgcgtgtatgttattgtgtgctggtgaggagagaaatccctggaggtttggttgaatgaaagcgaaatcccgaggtgttgttcattaggtgctcgacgtatgggctaaagtgtagctcgacgttgtgcttatactttccgagttgaatttaattttgggtgaattccttcgctatctataattgtcagcttgaatgatgggttaaatagttaggtggtcgatcactcttttgtgattagcataggtacttgtggttagcaggtgtggtgtgatctccgattccctgttgttggtgtcttgcttcatcgtaaccatagggaatgatgtctttcctctaattacttgtaataattgtgtttgatttatatgttgtcttagctaattaatgaaaggcctttgtttggtgt

SEQ ID NO: 284141 - DNA, 290 bp, Zea mays
ccactattagcagcacacttctcatcagccatgaagctcgtcctgtgcttctgcatctgtgtcgttctcgtcatcgcctcgtcgccggtcacgctctctgatagccgccctgcgatggggcgacgctggctgagagacgaagttgtcattgccaggggccctgaagggaacacgacctctgcctcagcctctgcctggtcggaggaggcgccggggataccgtacgacaggtcgaagaggctcagccccggtggtcccaacccgcagcatcactaatcgtcgtccgatct

SEQ ID NO: 284142 - DNA, 554 bp, Zea mays
cctgctaccaccaccagctagctctataaattggtgcaactattggctgcccacccatcatatcgatcagctcttgcaaccttatctccattgcactgcactgcattgcattgcattagtagagggagatccatggccagagatatggagaaggcaaagaaggccgcatcttcccctaagagctcaacaattagtactggtcccaagagcccggtgaggaatggaggaggatctccccctcataagaaaaacactactacgaccgaggcacgtggacggaaacatgagcagcaaaacgttcgaaaaggaggagacacgttgtctcatgacgagagcaaaccacgccgttcctcatcaactgcggcacaaacctcacccaagagatcaccgagacacgaacaacccctgagctacaacaggctccacactgaggagagagcaataaggcgagctggctacaattatcaggttgcaagcaagataaatacccaggaaatcattcgcagatttgaagagaagcttgcacagttgatggaggagcgcgagataaagct

SEQ ID NO: 284143 - DNA, 586 bp, Zea mays
gctgtgcttagctaggttggatgtagcaatgttcagggctgttttgcgtgaatcagatgatgaaattccaacagacccgctgtctgatcccataactgatcctaaagttcttccaatcccatctgggaaattcagcttcggtgctggggtccaactgaaaaatgctattggcagctggtctagatgtcttactgacttgtttggcatggatatggacgactatcaagaacttgacaatgaaggtggtgaaaatggctttggtgaatctgtaaagccattctatcacctgaatgcactgagtgatctcctaatgcttcccaaggatgtgctcatggataccagtagcaggaaagagctttgccctacccttagcccatcaatcatcaagaacatcctggatgtctttttaccagatgagttttgtccagatcccattcaaggttctttacttcaagcactagagttggaggaccacctgggggttaacaagggcatacggtccgatcccgtgcagcgcatcagccaattttgtacaatgcccctgtatttggggcattactaagcggcatcggtgatcctaggaaga

SEQ ID NO: 284144 - DNA, 572 bp, Zea mays
  unsure (1)..(572): unsure at all n locations
cttttatatggctttaagataattgatatcctaactgtctcagctattgcacggcatactgcatctcttgctacttatgcgagaaacaaaatgctggaattgaagcatagcaatgagaaaaatgtttgcataatctatggacaagattttaaggcaaattatctgaaaatgggtccttcaatcacattcaatttgaaaagagaagatggcacatggtttggatatcgtgaggtggagaagcttgcctcattgtcaggaattcatttgcgtacgggctgcttctgtaaccctggtgcatgtgctaagtatgttggtttgtcacactcagatctagtttccaattttgaggctgggcatgtttgttgggatgataatgacgtaataaatggaaaaccaactggtgctgtgaggatatcatttggctatatgtccacatacgaagatgcagaggaatttcttaagttcctgcagtcatcttttgtgtccaaacctgcaganatgaacaatggctacatggtgaatatgaatactcttagtttagtagatgattggtgccagcaagctatttcaga

SEQ ID NO: 284145 - DNA, 523 bp, Zea mays
gtctttttcgacggcttcgacttctggttcatgggctgggtttggtaccaggcgttcttgcaggagctggagaaggccgtcgcgcagtcgcagtcgcagtcgcggtcgcaatgacctgaggcgatccgccggccggcccggcgtttgttgtgctcctgtgtggtctgcttcatctgtgtgcatatgtagtagggtttcggttttcttgatgatggattattgcttggcgtttttggcattggagcaagtccggtatacattatacaggaggaaaaaacgggatattagattgattgcgtaatcggtgatgctgagtaaatcttctacggcgccagcgtaaaagtgtctcggatgaggtttacatgtaacatgtgtcatgaaaaccacaaatgcttgtgcgaccaactagattgtgtgaactgcactctgttcccatcttttacatcgaggcaaccgcgcgtactgatgaatgctatactatttcttattgtaaccaaaaaaaaagaaaaaaaaaaggggcgcc

SEQ ID NO: 284146 - DNA, 553 bp, Zea mays
tttcattctaagacgggtatcatcatgataatagtgtcgctggttgcttcagttgattcgctttcatcgtaccatgctgcatcgctgctggtaaatttatgtccaccaacacgcggagttgtcagcagagcgattgggcttgaagggatttcaagttttattgctggagtgtggggtacaggtacaggatcgataacattaacagagaacatacacacccttgaaacgaccaaaatggccagcagaagggcattgcagcttggggcagccgttttagtcgtctgctccttctttggtaaaatcggagctctcctagcctctatacctcttgcattggccgcctctgttctgtgcttcacctgggcgctaatcgttgcacttggcttgtctacgttgcgatacacccaagcagcaagctccagaaacttgataatagttggatttaaccctatttattttcctgtcaatccctgcatactttcagcagtacgaacccagctccaatcttattttgccaagctatcttcttccttatgctgcagcgtcaagtgga

SEQ ID NO: 284147 - DNA, 539 bp, Zea mays
tcgttccggccaagcctgaggacgacgaggcggcgtcagcgaaagctcgccaagctccgggacctccaggcccaggtcctgcacaatcaccatgcccgcacgtacacaaaggagtcaattgggctgagcttcaagctgctcgagacaaatccagaggcctacacggcatggaactaccggaagcttgcgttgcagcacaatgtcaaggagctttctgacccacaggccatcaagtctgctattgatgatgagctgagagtggctgaggttgctttaaggcagaacccaaagtcctatggggcttggtatcaccggaagtggttgctaaaccaaaagctagcgcctgtggatttcaaatatgagcttggcctcttggataaactgttgaaggtggacgccaggcatttccatggatggaattaccgaaggttccttgcgagattcatgggtttgccagatgatgaggagcttaagtatacgatggataaaatcagtgacaacttcagtaattactcaacatggcataatcgtagtatact

SEQ ID NO: 284148 - DNA, 404 bp, Zea mays
ggatctggttggggcattctatttgtagaagaacttgtaccaatcattgccaaccttttcttggaggctccaccaaatgaaaggtttagtgtctctcctgaagtcattcaaggtcttggaaggtgtatgaacacaaggagagacaacccaaggggtaccctttggagaatatctgctgaatctttcaatcgtgttgtgacagatgaggtcaggcaggacattgttgattgtgcagaagggatgtgaattcatataaactttctagagctcgtttctggaaggaggccgcagatgtgtatgaaactttgcttgttggttcttgcggtcgcgcgtcttcattcagatgcctccttcagctgaattatattacagcttatgaggtccttgaaatgagtgctcttcac

SEQ ID NO: 284149 - DNA, 638 bp, Zea mays
ttttgatttcattattcgacatgcttcgggggaaagattatccaaagaagaaatcttagaagccagacactatgcccagaaactacaatatccgaagggggccttagtgtttaatggcacagacgaagatgatttcctgtactgtctcccagacaacaaagagatatctgtctgtcggaagatggctaaaagtatgggatttctgaggctcgaggatgacctcgcggacagccttgcgtacaacggcctgaacgtacatgaattgtaaatttaaagtttatgaattttggaatagagcttttattctcatgctaaacatttatctttctttttcatagggcttgttggggggccttcgtcttccaaagggggccttcgtcttctgaagggcctcaaatccttgatttaacaatgtttcccaagtggaatatattatacaggtaccttcggactcggaataaaactatacacgatatggaaagcatgatggagacgaaggttgatgcagttccgaagctacgcgcagggtgctttcgctcaatggcagaagaagaactgacttaaggtgaaaggccatctagtcctcgatggatggtcctaagccatagtaaacataagggcatgatgtaatttacaca

SEQ ID NO: 284150 - DNA, 476 bp, Zea mays
cggtcgcgtgggatttttttggttactgggccatcacaatcttcttcagtcagcctgatagatagatttgtgacaccaaaatcttgaattttcgcgtaagaacttactaattccgtttgtagcaaacctgtagccctatgatccagctataaaccgattatggtaaccatgctcaaacatcaatgggatcatcttcaaaatggccctagagttcatcctatgccactggataccataattcaggttttaggcagactgacagcccaactttggcctgcagtttctttaatttttggataacaaccaaagaagatatctgcaccaaagttactctcctacaatagctctagacttttcatgtgttgacctagggcaaaatcctcataatttggaaaatatagggcttcaaagttggccctataccactgcaattcagacttagcccatggagcccaaatgtggctatttgcaaatag

SEQ ID NO: 284151 - DNA, 536 bp, Zea mays
ccctcgcgtccgaaacaacccggatctggagctgacgcgtggtttccgtagtttaatcggacgtagtctgggtgactacgttctggtggtttaccatgatccatccctatagccgctagactatgctagtctgctttaatttccatctgcaattttcttctgttcatcaatcatcagtggactggagtggagtgtctgtggtggtgacagggaggcaggcggcttggattttgcctgtggggttgtagggcggtcatgttgatgcagccctgtcctgggtcacgggggaaaccatgccaggctggactgaaccgcatagagattaattgatttgactgcctttctgctcaattcaattgtaatcaatgcacatgttgcttaatttcacatttctgctcaattcaattcaattggaaaggctactagtttttcaggccaggcagttttccgagaagtttaagtgttcatggaatcatcacggcttcatttgatcgtaccgactcgatcaaacgacgttgcacgcgttgtgctgtgct

SEQ ID NO: 284152 - DNA, 529 bp, Zea mays
tcttactgattgaggtactgaagaaagaaaatgggaattatattgttgcaccttatgaagcagatgcgcaaatgacattcttatctgttaataaacttgttgatgctgtgatcactgaggattcagatttgataccatttggttgttctagaattattttcaaaatggacaaatttgggcaaggtgttgaatttcagattacacgcctagagcgaaatagagagcttgactttaatggattcacaagacagatgttacttgagatgtgtattttaagtggctgtgactatctcccctcattgccaggaatgggcgttaaacgagctcatgcactcttccaaaagctgaagtgtcacgaaaaggtgatcaagcacctgaggtatggtgctgtttctgttccacctcaatatgaagaggacttcaagaaagcaatctgggcatttaagttccaaagggtctacgatcctgctacagaagatattattcatttgtcaagtgtgcctaaagcctcatgaagatttgaatttta

SEQ ID NO: 284153 - DNA, 570 bp, Zea mays
tatgagctgttaattgtttgcctactatggtgctgcaggatagtgtgtatcagctttacgcaattttgatgcgtcttttgctgaaagtgtttcctgctatatcaatctgaggaaaatgggcagttgggttaagcatatctgctttctccaacaatcattttcctctcatgtactcagaaacatattttgtttttttatatgctatcatcagctgttttgttggttagttttttttgtaatatatcatttccatagaatttggcagtattcttctatttgtctgctgtaaatttatagatgtcaggacatgtactctacattcatgttcttctcaactggactgtcataagttttcttcacttctgcacaactagttgctaagcaggatagtgtgtatcggctttatgctaacttctatgcattttgcgctgaaagtgtttcctgctatatagattgaagaaagtgagcagttgggttagacttgtatcatgttttctccaacaatcattttcctctcatgacaccagttttgtgtgcggcgccttagtatttacatgctttaactgcttt

SEQ ID NO: 284154 - DNA, 539 bp, Zea mays
gttggggccatgactccatgcatgaggctttatgcatatctaggcaaagaactcatggttttccttaaacaagatgaaaatcatccatacaagaaatggattaacacatatgcatccagtgattttgaggacaccacactccaaatagaagaattgctagacaaactaagtgtctcattaactggtgaggaacttgagattattggcaagctctaccagcaagctatgaaactggaagtggagttcttttcttctcagcttatagaccaacctgttgtagctccactttcaagatactgtgatccaaaatataaactcttgatcttttctgattttgatttgacgtgcactattgttgattcatctgccattttggcggagattgcaattttgtcattccaaaaggcaaatcaaagtgggattgataataacctcgaccgtgcaaaatcgggagacctgagaagttcgtggaacatgctctctaagcaatacatggaagagtatgagaaatgcatggaaagactacttcctccagaaga

SEQ ID NO: 284155 - DNA, 553 bp, Zea mays
  unsure (1)..(553): unsure at all n locations
ttgtttttttcttctcttccatttttaaaggggcataactagtgccagaagctcccacatgagtggggtctgaggaagggataaactgaggcaagcctttctcctgcaaatgaggagaggctgctttgaacccgcgacctggtgactcagtgagacagctctcatcactgcaccgggtccgcccttctcttctctttcatttttttaattggaaaaatctactttgctgtgggcaaacactgccgtttccctttggcatatatataaacatagaagtgcaagttggcactgttaggttctagcattacatatttttgttctaagttacttgtcatatgtacaacaaggttactttcagaaaaatcggttcacttaatccaactcgatattgtaaagtagggcggaaggttcactggtttacgataaattacttggtaaagcaatattattttcatttataccttaaacctttcataggaggttgtgataatgcattgggcatgtgagaagataacagcatcaacaacttttncagatacaggccttcttgatg

SEQ ID NO: 284156 - DNA, 829 bp, Zea mays
cccacgcgtccgcccacgcgtccgcccacgcgtccgcccacgcgtccgcacgaagacagcaagctaaacactcgtactctgtcgtctccttcccgagcccacaaatccttttgccaatggcacatcctgctagtcatgcccgcctgacgaccaccaccatcctcttcatgtcgcttctgctggtcttggctactgaaacactgggatacccatgcccatgcccctacacctgcgagaacgagctgaactggcgcctgtatctgaagcaagttgccggtgctggaccagaccacaaccaggaggtaattttcagaccccagcacgctagtccgttcggcgtgactgccgttcaggactggacgttactagacgcgcctgctccaggcgcaaaggtgttagggcacgcgcaaggcgtgcatatcatgtctgatctagccagcgtgggctggttcgtctccctcaacatggtgttccaaggtgacaggtttagcggatctacgctccaggtgatgggagttcttccaccggagggggagtgggcttgtcgtgggagggacaggagagctggctctggcacgcggcacgatcaagcacagaatagttggaggcgcgcccgagaccagcttccggcagctggatatccacgccttctacgcgaacggctcagccagctgcgtaggttctgctgcagtgatagccgagaaggggtctgctcacgccaagtgatatgccatgcgaaacagttgcatgcatcctgtctcaagtgcaaaacctacaggaaagaagaagaaaaaaaaaacataaataatcagttggacggatgcaaatg

SEQ ID NO: 284157 - DNA, 568 bp, Zea mays
tctttacgacgtggtatgctaataagagcatcggatggaaaaggtgttatttaccaggcgcgaaacacgaaagaagttgcattggacatgatcaatatgcatgaaaagcagcaattcatggatggagaaaagaatgttgccataatatcagaagcaggatcagctggcgtttctctacatgctgatcgaagggcaaaaaatcagaggagaagagtgcacataacactagagcttccttggagtgcagaccgtgcgattcagcagtttgggagaacccatcgttctaatcaaacttctgcacctgaatataggcttcttttcacaaaccttggtggtgaaaagcgatttgcatcaatcgtggcaaagagactggagtcttttggagctttaacgcaaggagatcgaagggctggaccatcacttagcgccttcaactatgacagtaattatggacagaaagcccctgccaatgatgtacagaggaataatggaacaggatgcctttcctgttgtgcctttcgaatgctctgagaatcaagctacccttgaagagttcatcactaaagca

SEQ ID NO: 284158 - DNA, 479 bp, Zea mays
gcttgaagtaaaccggctttgttgattctgcggctagctagtttcatcaccttgttcttggagctagatagcagcaatggccattgaaatgccatgcaacaaccgtatgagcacagtggctctagtggtagtagtcctgcttgtcgtagcctgtcaaatcgctccagctcattgcactgctcctaccacggtagcaagtactcctagaagcagatacctgctggtggtgcagtcgtcgtcagcgaccaccgctactgcctattccaccacaaaggcaggcatgatcgagggcacagtcactccctcagaaggcggcgctcctgggggcgaccgaggacgttcgccctaccaacccaagccacagcccgggcatcggccatgcattcacccacaacaagatcgggaggaagctgcttgctgcgatcagtcaattgagagggttctttcgacagcaggcatgccagcaagctgcagtttgc

SEQ ID NO: 284159 - DNA, 230 bp, Zea mays
gtcggatgtggaccacccggggcacggaggggcaccggcaaagcacttgctccaggccgtggctaagctgacactgttctacgccgaccgcatcgaccgctatatctaccagacacccgagctcatagactacgcatagctccgacctcagcgcctaccttatgacccacaactatgcatggctatcgacgatctactggctaagacctacagaacacaacacttagatt

SEQ ID NO: 284160 - DNA, 466 bp, Zea mays
cgtggactccagcgccaggtaccgcatcgttgcggcggggtatctgggcgagggcgccgtcgtcgagccgcagtggctgcagttcatgcgggagtggggtccgacggtggtgtacaagtggaggaagcggatggagtgggtgatcggccgcctacctccctggctcaggtgcacagcggagagcatgctgaacaagatgcccaacgagctgtccagggaagaagggccgaccgggcccaaggagaagaacaactgggagggagacgagagatggtaagactggtacgtaggaacagtgctcaacgatgtgattttataacatgtgtggcttaaattaaggggcgtgctatatttaggtgtttgaaaaacagcttcttcgcggaccatacactagtacaatctggctcttgcttgttgcatggcaagctagcatgggatttgtgatcctgaatgaatgtatggatcg

SEQ ID NO: 284161 - DNA, 357 bp, Zea mays
caagtttcatgattttctgacttttgtttgtgttttatacaatttttaaacatgtggatggcaagttcacggccatgtttagtgagcatgttgctcgaagtttttggtccgctcctggaatcggtcgtaacttatgctaagtaacatgaatatcattttttcatgcacggttttccaagtttcaagtgacctgcagttcaaatctaaattttccgaagaaattcaaataaacgaactaaatctactaacgattgaaactctgttaaaattgtccacaaatgatacatgtaggtctacatagtgtaggaacataccacaaaaagtttgggagacaaaaaaaaaaaaaaaacatagaat

SEQ ID NO: 284162 - DNA, 462 bp, Zea mays
gggcctgccaagcaggcccggcgtccaactctggtggcaactgccagggcagcccggcattgctggttgtcttgaagaagaagatgatggtgggctcttcccgccaccagctgctgcagaggaaggggaagtccgtggctgacaagggcgccgccgccgccaccactgtggcggcagagaaggtggtggtcgcggtgagggcagccacgagggagatctccaagacggccatcatctgggcgctcacgcatgtggtgcagccaggcggaagcatcatacttcttgtcgtcatcccggcacacagctctggcagaaagttctggggctttccgctgttcgctggagactgtgcaagtggccataagtctatgttggatcagaaatgtgatttatcagagttgtgttctcaaatgttgaagaaaattgatgtgtatgacatagacaagataaatgtgaggtata

SEQ ID NO: 284163 - DNA, 703 bp, Zea mays
tcttgctgaagcacatagaggtgttctttatgttgatgaaataaatctattggatgatggcataagcaatctacttctgaatgtcttgacggagggagttaacattgtggaaagagagggcattagctttcgccatccctgcaaaccacttctaattgctacttacaatccagaggaagggtctgtacgtgaacacttgcttgatcgtattgcaattaatttaagtgctgatcttccaatgagttttgatgaccgcgttgaagcagtggatattgcaacacggtttcaggagtctagcaaagaagttttcaaaatggtggaagaaaaaactgaaactgcaaaaactcagataatttttgcaagagagtatctgaaggatgttactattagcacagagcagctcaaatatcttgtcatggaagctatacgaggtggctgtcaggggcatcgtgctgagttgtatgctgcccgagttgcaaaatgtctagctgctatggaaggacgtgaaaaagtatttgtggatgacctcaagaaagctgtagagctggtcattctacctcgctccatcctatctgataatccacaggatcagcagcaagagcatccacccccacccccgccgccaccacctccagaaaatcaagattcttcagaagaccaagatgaggaagacgaagaccaagaggatgatgaagaagaaaat

SEQ ID NO: 284164 - DNA, 431 bp, Zea mays
ggccgaacactgcacatgatagcactgttattcaacaaatagccaacaaaaggtataaaccctgaaggcctgaactgacatgtgaaggttacaccacacacagacaccttcctcggttgaatgtgcacccaatacgtatgcacaaacatgttctagttaacttctaccttttgagactttgcgtacccacacaaaaaaaataaaaagaaaatcacaaaggattcaaatgatgaaacttaaccttaaacttctttatcacattcaatacaaaaaggatcataggaaacctttgccccgccaagaaaaactctcggaagttgacaacctaatcatcatgcggctttgacacttgtctcaccctcgagtcatctctagcaaaccatttttatttggcgaatgttggacttcctaactaacaaagaaaatacaat

SEQ ID NO: 284165 - DNA, 542 bp, Zea mays
tgtagctgcaggtattgctggaggcactggtgtcatgcctggaggtaatgtggggcaggaccatgctatcttcgagcaaggtgcttctgcaggaaatgttggaaatgagaaaattgtggagaagaagagagctaaccctgttgcactgctgctgtcttctgccatgatgttgaggcacttgcaattcccatcttttgctgaccggctggagacggcagttaagcgtgtcattgcagaaggcaagtacagaaccaaagatttgggcggcaccagcaccacccaggaagtcacagatgcggtcattgccaaattgggttagaaaccaaccgtgtctttaatacaacttttttttatctcttggactaggtaactagtcctgtcaaaacatttgctcctctcgtaggtttagttcaccattttgttcggcaaatccttgtacaatcttcaggtatctcgtttctgaccaggtttgggtttggggtaactgagcaaactcagtattaatttttacgcaaatttttgcgaccttaattcttaactgg

SEQ ID NO: 284166 - DNA, 510 bp, Zea mays
gggtgttagatccgtccgcctgagccagagccagagcgaaggagtcaatctcacggcacgcgccatgtccgacgagtcgccgccgccagctccggcggccgagaagagtcagcccgccgagcaggcggcaggaggctggggcggatggggactctccatcttctcagagatctcccgcaacgcggtggaggttgctaagagtgccatcgccgacattcagcaaccgccggagcaggacacggtaccgggtagtggcgagaaggatcaagagaaggaaccggagggggaggaggaggaggaggagagacgcaaggcggctctggacaagttggagaaggccggtgaggactcaatcctgggccaggggctgaaggcctttgatagctcggtggagaccatcacgactggtacttggcaagctcttgggaccgcatggaggagtggttcactatttgttcaaaaattggaaaattcagcttcaagcttggccgaaaccattcagcaaggaga

SEQ ID NO: 284167 - DNA, 701 bp, Zea mays
gtgtctcagtgagaagaatgaaatggagctcaagctattgaattccagtgctttgcctaatcaacatgccccaacagaagaacagaagttgatcaagcttttgcaagaggagctccggaattatgaaaaagaagtgcatgaagctaaaaggttgaaatcttcccacatgaatgttgagttgctgaaagaaaaactattggaggagcaggggcgcagggaaagagcagaacttgaattatctaaactgcaggaaattggtgctagagcacataagctggagcttgaattagcatcttgtacagcactgctcagcaacatacctgatgtgtcttcttatgctgacataccccaaaagatcgcagatctgcaaaagcaagcattgacatatttgaacgaagttggtgaggtaacatcaaggttgaaagaattagaggttgcactagaatatgctgatctcagcaagcaacaagcagaaggtgaagctgctcttgctaaagagagggctgcaagtgctactagggaggtcaagcggcttgagcttatgcttactgcgatcagtgaagaaagagataagctgagaaaggaacatgctacggagtcggatcagtctgggatggaaaaaacgataagagagctggagagcattatacacgagctgaaagaattgattagtcacaaggacactgaactcaatataatga

SEQ ID NO: 284168 - DNA, 457 bp, Zea mays
ctgattcaggttcggttaaccaaccgggtttcgtagtatgcgagcatcgttgttggtgggcccccccccccccccactgatacgacacctcgccacaaatcacttgtaatcacacagcagatttaccgccattcaccgactccaaaagacggccacagacacacgaaatacacaaaaccaagctaagaaaaaaaaaccactatcccaaacgcgcgacgaagaaaaagcaacactcccaaaagcatcaccctgggacaaaaacaacaaaacggccacagactcacgataaacgcccaacggctaatctcttgttattataatcgggacgaattggcgccgggttttttcatttaagacatggcctgagctcatcccgggctcagccgttattaccacgccgctacagcaaacggcccactttttgacaaatgccctcctacttgctaatagcctctgc

SEQ ID NO: 284169 - DNA, 726 bp, Zea mays
gtattttatttttttattttttataaattttaattcttgttaaagacggacaaaagactcgttattctttaacatgtattagtggccttacaacaacaacaaataacacggtcgggaaagagagtagataagcagcccgcaatggcccaaaccagacgaaagagcccacaagccaatcctgtggccatgcatgcgactggaataacggttatgtgacttaaatatggtagactgaaattacagaagcgggtgcacacgacagtagaacccgagctacataattacatggggagcttgttgatcttgcagtgctggtagtccttgtacttcttggccttgtacttggccgggctctcctccgtgaccagcttggggtgcggcccgacgacgagctcccccggcggctccacgaacatcggccatgacatccgcgtcttctccttgttcaccgtcgtacggtgcagcaccgccttgtatgccccgttgctgaaaatctcgatctgatcgccgatatggacgatgagtgcgtcgggcacgtacttggcctcgtcccattgaccatctttgaagacctggagcccctgcacctcgttgggcacgaggacggtgagcgtgctcatgtcggtgtgcggcgcgacgccgagcgtgagctccggctgcgggctcggcgggtagaagttgatcttctgcaggaacaccaggccgtctccgccgaaccggctcgag

SEQ ID NO: 284170 - DNA, 517 bp, Zea mays
tatgaactttagactcaaccagctcattaaacaattgtgcatccctggagacacaatcacagaagccatacatatagattatactctcgtgtgtaacaaagctcagcgtgtaacccatgtcagtcatcttcttgaaaacatcttctgctttatccttaagccgtgccttcccatagtttaaaatcattgaattaaacgtgggcagtgatggtctctccttggagtgcaacaaactcttgaacacctgttccatcttaccaaacgcctgcttcttcccataggaatcaatcagcaagttaaaggtaatcaggtcaggcttacactggttgcttttcatccgagcaagcactgcttccatttcacggatcatcccatttttaccatatgcatccatcacaccattaaaagtgtaaatatcgggcgaaacaatgctctcatcaagatccttaaacaaagaagtgacctgcaccacgttccgagcaaaaagcaaaacgctctcaaaagaatgttgtaagta

SEQ ID NO: 284171 - DNA, 873 bp, Zea mays
  unsure (1)..(873): unsure at all n locations
cgttcactctagatggagaatttggtgttttgcggcaacttgagcatttgctaaagagtaagggattttgtgtggtttgtgttgcagaagctgctggacaagtatgctaaaattcacagctgtctggtctctatctacttctgttccatgtatatagtggcaataccgataagatgcaaaaaacctatagtttgactcgttttcttttaccttttgttacaggatctactccaagaatcaggtgcgactgatgcatcaggaaatgtgatattgagtgacattggtgttcacatgcaacagaagattaagatgcatttcaaggacattggtgttccagctgacgtgaaattcatcgatccaacttacatggttcgtgcatgccgtgccaacgcatctgatgcaattttgtgtaccgtgctcggacaaaatgctgtccatggggcatttgctggtttcagcggcatcacttcttgcatctgcaacacgcactacgtgtaccttcccatcacggaggtcatcacagcaccgaagcgcgtgaacccgaacagcaggatgtggcatcggtgtctcacgtccactggtcagcctgacttccactgatctgccatcgtcactgcataaccaaattcgcatagtttgaggtactagatgatttacaattctttcgctgatgtgctccattcacatcgtgaggttccaagattagttaataatgctaaactgtgtggtcttgtctggtttgttcacgaaggtggtgttgtccattgttccgaagctctggtatttgagaaatttgcatatcttcaacacttataaagatagtgactttccacagattctagccattttcaaagatagaggctanncgctaac

SEQ ID NO: 284172 - DNA, 599 bp, Zea mays
ccccaaaagttcagctcgaactgagcgttccttgtaaaaaaaaccgctgatttcaaaagccctgctaattacaggaaattcgatacagcaattcactaattgggactaaacgcagcagtctcttttcgtcagttagcaggtcttcgcacaggcaagcagggcctcagcacagcacatgatctatgtcagtcgtacaagacagggatggcaaaagaataatcacacgattgatccaatcaaaaagaattacatgacgtacaaaacccatcacgaaacaccctagctagttagatgtacgaatctacgacgacgagggttacaatggcctggaaccagatgcgtcaaggcctctgctctggctgctccagctggactggctgaaatcggtcctgaaatcctggctgccgaacgccatccgctgaaacatcctgatctcggccgtgttcgcgacattgaacatctcgctcttgcccggctgaacgccgttagtcagatcgacctcggcgagactatcaagcacccgcacaacctggctcatccgaggcctcctggatgctgaatgtcgaatacaggctgcagcagcttcgaccatacggaac

SEQ ID NO: 284173 - DNA, 1261 bp, Zea mays
tttgaatcttgttctctctattctctctcactacaatggagactccatcatccgcgagcaagaagaatcacaagatcccaaatcgcctccaacaacaacatccccgtttcaagaaaaaagaacgaggactgctcagaaaagagcgtttcaaaaacgcggcagagaagcagcgtgcaacagcaggaacggtgtgcgctggtcgacatatcgaacgattcaccgatcgcggggctggcgaacgggaaggacatcattgagacgccgttgtcgtcgatggcgaagaagaagagggtgaagaagacgatgaagactccggggtcgggagaggctctgctgaggggccaggtgaagaccctcttgcagagggtggaggaagaggctgtgatttcgaagctatcgatggaaattgttgcaccctttctgaaacttgcgaattcttctccaatgtcgcttcttgcgcccactcccgcaaacacaccacaagtccccaatctttctgaagtggctttggtgtctccaccttctagtgtggttgaagaacaattgatctctcgggtggtgaatgaaatatttgaagggaagaagaacgagaatgctgaatgtgagaagagtgtgataaccaggtccttgctgttggacttctcggacaaatccgaggtttcagaatgctcttctgaggtgacatatcaggaagtgacacaaggaagtgttggtagccgtgggtccaccgaggatgatggtgcttccatttggtccattcaggtgaatgcgagcacgcatgacgaagatgaggacgatgaggaaatgggtgaagaggaagaagaagaagaagaagattattgcgaggatgctgaagagtgttatgattatgttggagggttgtcacttgaagagctatgtgctgggatgaataacattagtgtgaatgagaacaagggttgtgggaagcacacgaggtttgtgtacgatagtgaggatgagattgtggagaaagtgatagaatgttgtgctgagtctaatgtgatgcgtttgaagggtttgccaacacccaaaggaaagcaccttcgctttcctcaggaggaagaaaattcctctgacttgtgatttttgataattggtgctgatgcggtttggtttggtattgtctttcttgacaccactgttttggttaatggtgtgattggggaagctaaattgttgctccaataaacacaaccattgttattttcctttacccataataaataaacccttgcttgat

SEQ ID NO: 284174 - DNA, 527 bp, Zea mays
tatataaaaatgtacacgggaggaataagtacaaattgggaactcaacctaaatccacaaaaaatgctaaattacagattacaaattccaaagggaatatttctaagattaataatgttaaaggaacacagccacacacacaaggggctagcatgttaggggttgaagttgcttaagccttcttacaacctgtttcattgtaggtctggtagagagaatgtcaacagtacacacaactgctaagtgaagcacttctaccaaatcatctccaggtcctgcttcccacaacccagcagtgaagaactcctttgcccttccttgcttcagtagcatgcatgcccatgccactatgttgaaaccatttctataagaagaaaacgaaggatccaatgccttcttgtctgagagcaactccagaagcaccacaccgtagctgtacacatcagccttatcagaaacacggcacgtcatggcatattcaggtgcaacatagccgaatgttccggctacaccagtggtagcatgtg

SEQ ID NO: 284175 - DNA, 2298 bp, Zea mays
cggcctctcctgctactcgcacttactgccccgcctcctctccttctactcacaccacccgtcgctcctccccgccgcctcttccctcgccgccggttccacgtgccccgaaccctacaatgtcctcatctccaactgcctcaaccacggcctcccgcaccacgcgctggctcgcgtaccatgcgctgatcgacaaggatgccgttccccctgatgcctccacccaccccaaagtgctccgtgcctgtgccgagaccgggaacctcgctctcgggcgggcggtgcacgtgcgcgccgtggacgccggcatggacgggcacctgtttttccagaacgcactggtgtccatgtacgcctagtgttgggaccttgcggctgcgcgcacggtgttcgacggaatggaacatagggatgtggtgtcgtggaactcgatgatctctggctacgctgcatctggacagtggagaaaggcagtagagctatttcttcgaatgcaggctgagggtgcggagatgaactcagtgacatggaacacgatcgccggcggttacattcagatgcatgattacagggcagcagttggattaattcgggatatggtgagaggtggtgcgagcattgattttgtgactttggtgattggatcaaacgcatgctcacgggcaggatggttgaggcttgggaaagagatacatgggttggcagtccgaatgcaatgtcacgaaatcgacagtgtgatcaatgcagtgatcacaatgtatgccaggtgcaacgatatggagcgtgctctcatgctgttcaagatgataagatgcccgggtctagtagcatggaatacaacgatagctggttttgcattattggatgatgcagaagcagcttctagacttttccgtgaaatggtggtatgcggtgatgtgcaaccgaattatgttactgtggtcacctaccttgccttgtgtgcccgtgttgctaacctgcagcatgggcgggagcttcacacgcacattgttaagcaaggattcaaagggtatcgtctactgtggaactctcttattgatatgtactcaaaatcagggaggctttcagtggctcaaaatgtatttgatactatggatgaccctgacatgatatccttcacttcaatgatagcaggatatggaatgcaaggaaaaggaattatttctctgcgctttttcaaacagatgattgacagtgggatcatgccagatgccatcatcatggttactgtactctctgcttgtagccactctgggcttgtgggtgaaggggaagagctttttgacaagatggtgaagtcatatggtataaagccccagatggagcactattcttgcatggttgatctatatgcacgtgctggactattggaaaaggcggaagaattgctcaaccagactcccttccctccgacatcaactatggttgcagcattagtaggagcttgccatgagcaaggtaacataataattggtgaaaggtcagcaagaaggctcttggagatgaagacagagaacgctgggcacttcgttctgattgctaacatgtatgcagctgcaggttgctggaatgagctagcaacagtcagaaaactgatgagagatctgggtgtcatgaaagcacctgggttagcatgggccgaccttggtaacgggtttaccccttttctggttggggataggtcgaaccctctagctccagaaatctatgaggttttggatgaactaactgaacaaatgagtaatatgaataattgcagtgatccggacatactatccatggaggaacacatggagtaatgtgttcatggtaggacaaggacagattgcggctttggtgtaaaatggagttcattaatacaatgtagagatttcaccatgaagcgaaagggttaaaagggaaaaggtgatgtccttcaagaagcagctcatgtaagtgctactgtgcgagaagatgggcttaccaacatacactcaacgtttatgcatgttgaatgtttcctcgaacgtccaggcaatcacaagttgcttcctcatcgatggtgtcttagctgggatgcatgctaggtgatcgctacggtcacgacaagacttgacggctgtaaggtgaaggtagcctcaactcgatgccaggataactgatactgatttttgagggtgtgcattcagtattaaccagctgcctgatttgagatatgtccacaaacgatgtctttttcgccacactctgcaaagtacttcaagcaaatgggttacatagccgtaactcataactcgt

SEQ ID NO: 284176 - DNA, 558 bp, Zea mays
gctcgagcggcgacatgcagctcatcgccgaggcgtacgacgtgctccgcaggctcgggggcctgtccaactccgagatcgccgacgtcttcgcggagtggaacaggggggagctcgagagcttcctggtccagatcaccgccgacattttcaccgtggctgacccgttggacgggagcgggagcggcggtggggcgctggttgacaggattctggacaagactgggatgaaggggaccgggaaatggaccgtgcagcaggcggcggagcttgcggtggcagcgcccacgattgccgcgtcgctggacgggaggtacctctcagggttgaaggacgaacgggtcgcagccgctggggtgctggaggaagaggggatgccggcgggcctgttggagacggttaatgtcgacaagaaggtgctggtggatagggtcaggcaagcgctctacgcctccaagatttgcagctatgcgcagggcatgaatctgctgcgagccaagagcgtggagaagggatggaaccttaacctcgcagagcttgccaggatctggaagggcg

SEQ ID NO: 284177 - DNA, 529 bp, Zea mays
gaatagaaattccactcttgagcttatactcaatatcagccatacggagcatttcatcctcagaggggaatacaacaagaaatgcattatccccaagaggtaaagcttcccaattccactccaacctagacaatttggcaagcagatacaacaatcaagaatagcttacagaaacaaaacgaaggtatataggtttcgcccatgttgagtcttcttaagctgcttttcgggtcttgttctgattcgcttccatctccgacgcctcaatcagcatgcccatggcttgactatgcatccctagctttgaaagtgccactgcttgcatgtacagtgaggttgggcagtcgggatactgacgtgcgcttgcattgcagcgcggagggcggcgtccaggttgccgcacatgaggtggcagcaactgcgtcgaacgagaactgttggtgacgccttctttggccccacatccatacacttggtataccagtctatggctgctcggaaatctttatcacgaaaagtgaagtcccca

SEQ ID NO: 284178 - DNA, 339 bp, Zea mays
gggcagtttgagcggcgggtcgttcctgtacaccgctgcttgaggcagaggaagaagaggaggaagccttctgattctgaccatcccagctgaactcaatgacagccttgttggtagaggggtcaatccgaatcttagtctcgagatggttggcgacctgacccaaacgctctcctgcgatctgaccggaagagagctgcttgagaaggtaagaggcagcctcgtcaccggcaacacgaccgtagacgacgcatccgagaagggaggatcctcctaatcggtttgctccgtgaacaccaccggcgacttctccgctcgcgtagagtcctggaataggct

SEQ ID NO: 284179 - DNA, 1511 bp, Zea mays
acgcgacgggtatagcgcgtcctggatgttccttccttgcctcactgactgggacatggcaggaggctacagctgggcttctgcagtgctatccttcctgtacagacaactttgtgaggcttgtcgtcggacggcaaagaacgcgagtttaggcggttgcgtgtacctactccagttgtggatgtggtcgcacctaccggttggtcgccctattgagtttgctcctcgaccttggttcgacgtcgtcggcttgcgactacgaccgacggcggcttaccgttgggaccaggtccaggctccgttcgcacgtcaccaacgcgcctacgtcgagtactcaaacgagctggacgcacttacaccgtcgatggttagctggcaaccatacgatcagccaccgtcgccacacattcagttgagctccgcgtgcacggcagatgaagacatttatttattaaggtgtccactgatttgcttctatgccgttgagtaccacttgcctcatagagtagcacgccagttcggtctacgtcaggagttccctgtggagcccttctcaacatcgatagaactccacaagttcgaccgccaaaagcagaagaagatcactgactttgaggcacaccaccaagtgtacattgacgaatgggaccaaatgcatgacctcctctaccagaacgatcagccccacaccaactacaacttccgcgagtacatctcttggtatgtcagtgcaactcggtgcaagttgaagggccagtggacatcagcggactacgccgaactagagtcttcagatgacgaagacacgtcctatgacctagttactcggcatgggacacacgtggaggctgcaccgatcctagatagagtgggcaactccatgatgcagtctgtggttgacatcgagcatttctctaagaccacttctgacagcaggacacttgcctttctctcaaggctatcacgtcgcctacgttgtgctgctgctcgttgtggttgcaggactagcgtcggagttaacatacaacatactctgcagcaccatggtgacacctcgctaggacttggagctatcatcgttgcacagggctcgtcacgttcgacacgagatgcgtttgcgagccacaaggaggacgaggatgacattaagattcctctcgacaagattggaccataggatgctcctaagacacacccttcacagcctataccacgcagacgacggcgacgatcgctgcaacccttaacaccccaggcatcaacgctcttggggccaagggcaacggtaactagaaggatgcgagggaaacatgatggtgcatgtcttctgctttggctttttttgtgctatggactatggatgacgatatagactttctgcgttgtacactttggttgatgatatagattatctgtggtatgcactttgtttgatctagttgtgtgatgcgctatttagagatatatatgctcatatcatattagttttttttataattgtggatgttact

SEQ ID NO: 284180 - DNA, 1418 bp, Zea mays
cactttcccaagttttctctctcacacccttcatttacaaacaacggaatcattctcctttctgctaacacttttactttttcttcatggctctctttctctttgctattttaatcttgatggtcccttctagtaatgcctattggccaccttcacctggctactggccaagttccaaattcaggtccatgagtttttacaaagggtttagaaacctctggggccctcagcaccaaagcctagaccaaaatgcattaacaatctggcttgatagaacctcaggaagtggattcaagtcagtaaggccatttcgatccgggtactttggtgcttccattaaggttcaacctggatacactgcaggtgttataacagctttttatctctcaaacaatgaggcacatcccggtttccatgatgaagtggacattgagtttcttgggacaacatttggaaagccttatactttacagaccaatgtttatataagagggagtggggatggaacaattattggcagagaaatgaagttccacctttggtttgatcctacccaaaactttcatcactatgctatactttggagtcctaaggaaataatattccttgtggatgatattcccataaggagatacccaaggaagagtgctgaaacatttccactgaggccaatgtggctttatggttcaatatgggatgcctcatcatgggcaacagaagatgggaagtacaaggctgattacagataccaaccttttgttgcaaagtacacaaacttcagggctggtggttgctcagcctatacctctcgtcggtgccgcccagtctcagcctcgccatatcgctccggtggcttgaccagacgccaatattgggccatgagatgggtgcaaaaataccacatggtctataactattgccaagaccacaaaagagaccacaaactaacacctgagtgctgggggtaacactttcaaaagtgaataaattgattcttctactataaagttgtgcaatatttggtatatcggttcatatgaatagaataattatgtattttgttgcactaaatccgagtaattctaatgtgtttgatgtggtaaagtaaatttgaaagtcagatcggatttggtgtaacaaggtgcatgatttttttatacccatatggaactataagtgatttatcatgttgcataatttgagtgtagaagaaccaagctctctctaatcactactctgtgtgatttgttacatatgttgtgtgatcttttagaaagttaattttttttttttttatatggggatgacatgagatggggcccttccttgacaacaacattgatgcaagtgtacggattgagagtccaagggtcctccttgacagaagaaatttggtaagattgtgtggattttaaaaa

SEQ ID NO: 284181 - DNA, 433 bp, Zea mays
cacctgcacgcctctcgctctctctcctaacctgtcgagctgcccacagcccgtacctacctgcccccagtccccgccgccccgcctgcccgacccgcggcttatccaccacgtccaccgctgggctggatcgatcgggaccggggtcgcgccgccgccgctgccctccgcactcgcgggatcctgttcctaccatgcagcagcgctgcgcccttgcccgaccgcgccggcccgccgaaccgcgcgttccgctccccgacgatcactccctcgtcgccgtcttctccttcctcttcatccccacctaaatcaacctcctcgccgcgaaattctgctacaatttcttcatcttcccttgccgccgggagcggacggatcgccgcttcctcggccggcgggatgagccgggaggcgcagaaactcgactgcaccg

SEQ ID NO: 284182 - DNA, 625 bp, Zea mays
tatactagtctccgagaatcgagttgatgagtcataatttgaatcatgggagagagaacatcgtttaggaggacaaagaacaccaatctctttgaactgatctggtatcatgccgataacatcagccatttgagtacctggtttgctatcgtttgggtatttgactgaccaatccaactgcaagaacagaaacttttgtctcgccaaagttagaagcatacattatatgagaatttatcacaaaaaaaagcaggggaattgggaaccaacttgtaatttagttgctgacaggaaaacccagttgtacatgtgagaggacatgaatggtccaggaagatagaccagaaaatgctttaagtcggtagtttacagaacttggcaacaaaaagaccactggtttgtgaaactgcaggatcgaatcgcagtgttttggggatgccgccacttctgcagggccaattgtcggccaaattgatcttctgcaaatctgcagaagggttgtgttgaaaggaattgttgaaccacgcattcattctgtgcaactgtcaagctgcaagtactatatacaagtgatccaccggttttcaacaatttaaaaccatttgtgaggagatgtaactgaagc

SEQ ID NO: 284183 - DNA, 573 bp, Zea mays
ctataaacacatcatgcattttttctttgggcttggtgtctgaataaaaaaatcttttcatcacatacaaacataccatgagcaacaacattgttccgatccctaaatcatgcaaacaggaaaaaaaaaaaaaaagttttaactgtcgttttgagaattgaacttcagaacttgtgtggtgggctaccatttatacttgtattacaagatagaggctgggatggtgcctgcgaggacttgacctcgtaatagaattgaggtgcattgctacctggtgtgctgtgtgaagtgaaacagaagctctggggaattgggttcatggattttgttggaaagatggcagttgatggaaaagtagctgaaattgagaatcctgatgatgctgcagtagagaacggtggtactggggtggcattaacctggccatttgtctgccacgcccagtttggaactccttttgaaggatctatgcccattctctctgctctttccagattgggaaagaaagtggaatatacagaaggacgctcttcagttacaaccagccttttcaaagaaggatcaccaataacc

SEQ ID NO: 284184 - DNA, 674 bp, Zea mays
ccttcatggcaaccacgcctttgcgtatcggggggagggaaaaatattttcagcataggcatgttgaaattcagcttagctgactttttgcaaggaaccaaaagatcataaaaggtcaaaactcgaaagcaaatgtatgaagtcaccttccttccaactatagctccttacgtggtggataaattaaactaaatgcattattatcactctcaaaaaagatggatgcatgtgcaaatgccttttcaaaatgggaagtcgatcggttcctgttgaagggctttttcagcaatctcagtctgctccttctggtgaaccttgaggaaaccagtggctgtggccgcagatggagcacgaccaacatatttgacatcatcataacctcccctatttacagctttcattgaagatataagtcggggtaaaatgtaagtgtatccacccatgttcattggctcttcttgacaccaaacaacctcggcatttggatatcgtttaagctctcgttggacaaggtcataagggaaaggacaaagctgttccaccctacatattgcaacatcctttgcatcaacctttgttcgatgttcatcaagttcatagtaaacctttccagagcaaagtactaaacgtctaataccctcctcaacatctttgtgctcattttgatcttttat

SEQ ID NO: 284185 - DNA, 896 bp, Zea mays
atctccttttttttcttcaatctttggcgatggtggtccccttggcgccggtgatctgcatgtgcctgtgatctactgctggctgcatcacctcaatagtctacctgggggcgtatgacagcgaggaggcagctgctcgtgcctatgacctcgcagctctcaagtactggggtcctgagactctgctcaacttccctgtggaggattactccagcgagatgccggagatggaggccgtgtcccgggaggagtacctggcctccctccgccgcaggagcagcggcttctccaggggcgtctccaagtacagaggcgtcgccaggcatcaccacaacgggaggtgggaggcacggattgggcgagtctttgggaacaagtacctctacttgggaacatttgacactcaagaagaggcagccaaggcctatgaccttgcggccattgaataccgtggcgtcaatgctgtaaccaacttcgacatcagctgctacctggaccacccgctgttcctggcacagctccaacaggagccacaggtggtgccggcactcaaccaagaacctcaacctgatcagagcgaaaccggaactacagagcaagagccggagtcaagcgaagccaagacaccggatggcagtgcagaacccgatgagaacgcggtgcctgacgacaccgcggagcccctcaccacagtcgacgacagcatcgaagagggcttgtggagcccttgcatggattacgagctagacaccatgtcgagaccaaactttggcagctcaatcaatctgagcgagtggttcgctgacgcagacttcgactgcaacatcggatgcctgttcgatgggtgttctgcggctgacgaacgaagcaaggatggtgtaggtctggcagatttc

SEQ ID NO: 284186 - DNA, 396 bp, Zea mays
actgcacaagcccaaccacttcaaattcaggatgggattagttgaatctaggctaagtgagacaatgacaaacccttaacgttagccaagcagcctaggggcaaattcaaagaattaaagaacatcgacacacttgtctaacgccaaactgccatgggctttctacaagaaagttctcagctgctctggggcaggggcactggggcattagacagatcaagggttacccaagacaggacacctggaaagcgaaaacctcctcgggttccaaaattagttgcacacactgatcatcgctggaggttgtatcccctcttccatatccgaaagaacatccttcagctggacatcacctgccttaaacagactgaaatctgccagacctacaccatcctt

SEQ ID NO: 284187 - DNA, 974 bp, Zea mays
ggaactatgggctcgaggctggctccaagccagaactgctcatcgccatgagctgcctccccgtcaccgaagccgagcccaagccgtacttgatctgcaacggctacaaggacgcggactacatcgcgctcgcgctctcggcgcgggccatgggcctgaaccccatcatcgtgctcgagatggaggaggagcttgccatcgtcctcgaccagtacaggaagctgcagcagaagctgccagacgacgatgccgtgcgcaagaagttcgagccgatcatcgtcattcgcgccaagcttctcaccaagctaccaggccacttcggttcgacggccggcaagcacggcaagttcgggatgctcgccgaccagatctacgaggtggccgagacgctcggcaaggagggcaagttgcactggctccagctgctgcacttccacatcggctccatgatcccgacgacggggaaagtgtacgacgcggtgagcgaggccgctggcatctactgcaacctggtgaacgagcacggcgccaagtggttggccacgctggactgcggcggcgggctcggggtcgactacgacgggacccgttcaggcgactccgacatgtcggtggcgtacgggatacaggagtacgcctccgccgtcgtgcaggcggtgcggctcaagtgcgactacaacggcgtcgcgcacccggtcgtgtgcaccgagagcgggcgcgccatggcgtcgcaccactccatgatcatcctcgagacgctctcggcgatcccggagccgcaggacgaggacacctccgagcagctgttgaacaggatccaggacctatcttacaagcagccgagagctccggttggcggcgccacggcggccgtttactctcacgccgcagacctcaagaagcacggcatcgagatgtacaagcttggcaagaagctcggcaagagggtcgtcgccgatgccaacaccgtctat

SEQ ID NO: 284188 - DNA, 508 bp, Zea mays
cgaagttccatcgccctacctcacgatcccgcctggcctgagcccagcaacgctgctggagtcaccagtcttcgtttctaattccatggtatgtgctcttctctaggttatgatagggtgtggacgcgttaccagaatcagtattgctttcgtctatggatgctaaactggcagttcaagaatgcttgctttaataagcttttgacctctccagggagttcgtgaaagctctacttcagttccatgatgatcagttctgccttgttttgtagcatccagtctcttctttccaaacaggcttctgtttgttttctcaaaagcagaaaaatagtatcgtaccattcaaatatttcaaagttttcttgaaagcaggaatatgatgatcaatctctgttctttccatagttatgtggcaatgtatgcccccacacttcaggtccaaacttcccccttatgtactacttggaactccaatataatagctgttaatgttgtcaaagctgcatag

SEQ ID NO: 284189 - DNA, 314 bp, Zea mays
accaaacctcaatgaagaggggcagtaaataaataaatagttgctgagctaaaaatgaagtggaagggtgaaaaaaaaacagaaagcaacgggtgtttgttcccacgttataacaattatcacgaactcatcctaatacgactggtaagaaactaataacttgagaatcactaatcctctccacatttatttatgtatctacatctgctggcgcaaccgcagcccgctgcacatcatctgctggtacaccgacggggcagcgccgccggcaacgttgccctcgacctttacgtcgtccttgggcgccacgaggc

SEQ ID NO: 284190 - DNA, 566 bp, Zea mays
ggcaactcaacaacaggttagtcttccttgagttccaactaaacatataagaacatcgttctaattgtacatttcaaaatgtcaatgaacatttttttttctattcatgatccaataccttttgataccatttccttacgagttagttcataatcgctccgtcaggaacaaaatacgaagtcttctgtcaagactgaaaccaagattctgacagtacaagaggctagtttgctgagccaactgaaccagctgaatcacaattcgcagatcattattgatagtggcggtcctcatgaccccaagctcagccgtcctgcatctggcgccggtgcaggcaatgaacacatatcacccccggatcacggacagacagctgaggaaagtgatgcgagggaagactacccggcaatggctactaccacgccagcggaggacgggtacagctggaggaagtacgggcagaagcaggtgaagcacagcgagtacccgcgcagctacttcaagtgcacgcatcccaactgcctggtgaagaagaaggttgagcgctcgcacgaggggcacgtcac

SEQ ID NO: 284191 - DNA, 312 bp, Zea mays
tatggggtgttttggataccaattagtttggataccaattaggacgactaaacacatgctaattataaaactaattgtataattcgggagacgaatttattaatacatgatttgctcatattttgggaaactaaaaatgggctaattatgaactaattagacttaatacaatcgtctcgcgaattaaccatgggttatcaattagctttataattataggcttaatcgggatttaaaacccggactccggatgaatcaaacacctccttaatcggggggggctgaaaccaaaaagcaaattctgaatttttg

SEQ ID NO: 284192 - DNA, 837 bp, Zea mays
ctcaggttcaagaacaccctcgtccgccgccgccgctcctccggctacgacccctgcacggagacctacgccgagaggtactacaacaggatggacgtgcagagggcgatgcacgccaacaccacggggatcccctacagatggactgcctgcagtgatgtgctgatcaagacatggcaagattcagagttctccatgctgccgacgtacaagaagctgatgaaagcaggactgaggatatgggtgttcagcggcgacacagattcagtcgtcccggtgaccgcgacgaggttcgccatcagtcatctcggtctgaagatcaagacccgctggtatccgtggtactcagctggacaggtaggaggatggtctgaggtgtacgaagggctcacgtttgcgtcggtgagaggcgcagggcatgaggtgccgttgttccagccccggagggcgttcaggatgttccggtcgttcttggccggggagccattgcccaagtcctgaaggttcctcacatgtgactgaggccatgcatgcctacctgatcatgtctagctacggtcctgacgggtgagaaggtgacgttccccaggtagagaatgacttgttgataggcgcgcagttcatagctgaggagtgattgattggtctcgggagaaggatgtagagaataataaggatggctatgttatgccatggaaacccatgagcattgcaatgattagcgagtaattttcagtgatctcactctcaagtgcttatgttatgttatgttatgttatgccatggaaacccatgagcaatgcgacgaataaatttgaaggatctcactcttgaacc

SEQ ID NO: 284193 - DNA, 336 bp, Zea mays
tttttttttttttttttttttttttttttttttttttttttttttttttttttttttttttttttttggcccaacaaacaagtttttatttcaaactgcaaactggtgtaagccgcaacagcatgacatcagtcttggggccagaacgcatacatccaacaccccagtttactacagacggcctacacaggccacaaacccgacgggaacccagccccaggttttccagcccacccttaacaacacccgccccggaaatcctactacctttactagcgacacttggtgacgggggggggcccctccgagctccgagctctaggggcaaaaaaagac

SEQ ID NO: 284194 - DNA, 529 bp, Zea mays
gaccaaagccgggcatacgcccccaagtccaaaagccctctccgccccgctctcccactcgtaggtgttctccccgtctccgcccgcactcgctcgtccgcgcgcaggaaggttgacctgtcgggggccggcgagcccggtaagtaagagtgaaaatggatggaagtagtaaagggagtgggcattctgaagcattaaggaactacaacctgggaagaactttaggtatcggtacatttggaaaagtgaagattgcagagcataagcttactggacatagggttgctataaagatcatcaactgccgccaaatgagaaatatggaaatggaagagaaagcaaagagagaattcaagatattgaagttgttcattcacccccatatcattcggctttatgaggtcatatacacacctacagatatatatgttgtgatggaatattgtaagtatggcgagttatttgattacattgttgagaaaggcagattacaggaagatgaagctcgtcgaatcttgcagcagatcat

SEQ ID NO: 284195 - DNA, 487 bp, Zea mays
cataataggttgcagtgagcatcgccatctgcggtgccacggcctactgaaacagccatgtccatgcagacagtaatatactctttttttattcgtaacgttttagttcaaaaatgaactatcactagcagacgacaaatatttaagaacgaaaatagtactaacctaagtatacatgacctttacgcgctcaacacaagaccagtcactcaaacatgttcgttgtccaaaagacgagaacaaggttcctatttacatgctttcggttattcatcaccacagtgaaaatttgcacatggtagaccactatagaaccctaagcttggtaaggaaggccgcacagaagtcaaggaagagcagctgaggtccagtaactctctgcatatctaagaggtacttgtcgtccttcgtcttgtaaagctggaattcaaacttgatcacagtaggtagcctcccattagcatcatcattatccatgatggtagag

SEQ ID NO: 284196 - DNA, 466 bp, Zea mays
tcctttttttttttttttttttttttttttttttttgtttctcaaatttagtagaatgattttatttttcatgttaatactaattattagcttacaagtaatgagttggcgatggagcaactcattaattcctttccaaaaatataaaaaaagaatgagatggtaatggactgctccattctatacatcaaaatatccaagtgttttttccccaattctttgtctactgttttccaatcaagtaaagcataaagcacaaatgaagacacacaaatcttaaaacaaaaacaagcaaatacaaaacagagtatatacccaaccgcttgtcagagctgttcaatcgaccgtggatgctccttgcgacgccattcggcacaagccctgacaatctcggccctgtcatcctgctgccgtatcaggtgtgtgctgtacaggtcagagccgtacaggctcgacgtcagcggcg

SEQ ID NO: 284197 - DNA, 674 bp, Zea mays
cgcaacagtagcgagcacatttaaatgcttcagtggctgattcaggttcggttaaccaaccgggtttcgtagtatgcgagcatcgttgttggtgggccccccccccccccccttagccattgaaacgaatggacctccccgctacacagccccatgaaagaaacttaagccgaaccgaggacagaacagagtgagcgtcacacaccgaccgcagcagcgtgagctgtgagaagagcctatgatgaagatatatactgcgacggcgcgggcgcccaccaaccaccaaagtctgccggcacacaacggagatgcctaagcctacggcgatatgcctattaacaaacccacaaccttgcttatatggcgcccggcttgcgcaagaataacgtccatcatgccagacgagcccgaccgttattcgtgtctataccgcgctataattgatggtggacttataaccggagttttttcatggtacgatagcatatggcttatatgcctatgctgctgcctatgaattttgttattcagcgtcttcaggggcgtttgaggaggtcgcgtccgatatttcggccggagtggcggcgtcagatgtgctttcagagaccgggacgtcaggtggggatgagataggggattcatcttcgctctcatcctaattgacggaggatgtg

SEQ ID NO: 284198 - DNA, 354 bp, Zea mays
gagccaattacatgagcttatatcgcacattagctgattgtaatacatcacgaatcccaatgcaatgttgacggcaaaaaaaaaaaaaaaactactctcaggcagtcaggttttccttccagtcctgcacttgccccagcggagcatgcctgccacagtagcacaaaaatggtggaagctgtacaacaaaattatgctcgacgtgcatcagccgcaggcagctcctccaacgttgtcgcgcaggcccatactagcgctataaacaggatccctgctaatacaatacatttacaagacgcctgcactgcacaggcaggcagcaaacccccctgctgcgtgctgcgtgctgcgtgc

SEQ ID NO: 284199 - DNA, 477 bp, Zea mays
tgcgtagttatgttgttcgttcagatgaggccacattcactagtggtctgaaggcttgttctgagatggcatctcttacagatggaaaagagatacatggcctcattgtaaaatctggttttgtttcctatgaaactgcaaccagtgccctcatggacatgtactccaagtgtggggatgttatttcttcctttgaaatcttcaaggaattgaaaaacaggcaaaatataatgccatggaactccatgattgttggttttgcgaaaaatggttatgcaaatgaggcacttcttctcttccagaagatgcaagaatcacaaataaagcctgatgatgtcacactccttggtgttctcattgcttgtagccatgctggtttaatttccgaaggcttacatttcttcgattctatgagccaagtttatggtatagtacccagagtagatcactatgcatgtctcattgatctacttgggc

SEQ ID NO: 284200 - DNA, 456 bp, Zea mays
ggcaaacagttctgaggtgtgagcaatggcggccggccagtttgcagcagcaggagtcctcaccggccttctcgctctcgcaacacttgcaagctgcaacactgatggcgacatactgtacaagcagaggctagcatgggaggatccaaacaacgtgctgcagagctgggatccaaccctcgccaatccctgcacgtggtttcatgttacctgcaacctgaacaactccgtcgtccgtgtggatttgggaaaggcaggcatctccggccccctgcttccagatcttggagcacttgagagcctccagtacatggagctgttcggcaacagcctgaacggttcgattccgtcaacgctgggcaacctgactgatctcatcagcttggatctctgggacaacctgcttaccggcccaatcccaactacgcttggttacatcagcacgctgcgatatct

SEQ ID NO: 284201 - DNA, 475 bp, Zea mays
cgggcattgccgtttgatggcaacattaacttccacaagactatggcagcagcaattgtggttggtgttgtccttcatgcagggaaccaccttgtatgtgattgtccacggctcattagttcatcagaggtgaagtatgctccactgcgcaaatactttggggaaaataaaccaacatatctggatctggtaaaaggagtggagggcataacagggataatcatggttgtgtgcatgcttatcgcttttactctagcaacaaggtggttccgccgtagcctggtgaagcttccaaggccatttgacaaactaactggcttcaatgcattctggtactctcatcatttgttcatcattgtgtacatatcacttgttattcatggagagtgtctataccttatccacgactggtacaaaaggacgacatggatgtaccttgctgttcctgttggtctgtatgtaggggagaggactc

SEQ ID NO: 284202 - DNA, 489 bp, Zea mays
cacgtctccagcaccgggccaccggcggcgaggtcgcgcgagcgcaggcaggggtggtactgggaggggaggaggggaagaaggaggtgactgcgatgtcgagccggttctggaggtggtacgcggaccggcagttccacaagtgggagaagacggtgctgtgggacatggtggagccctaccgcccgccgcgctccttcgcgccactcgtcggcacctacgtcgccgccttctacaccggcgtcgtcggggccgccgtcaccgagcagctctacaaggagaagtactgggaggatcaccccggcgaggcggtgccgatcatgccacccaaattctactgggggccttggagggtgatgaacggagaagttccgcgcttcatccagccgcccgacgaggccaagacggcgtaggagcttcgagcttgcttgaaaacttttcagaagaagcatgtatctggtctcgatcgaaaaaaagaaattggagccc

SEQ ID NO: 284203 - DNA, 389 bp, Zea mays
cccgagcccgacttcgagccgacgaggagagagctcaggaggcggcggagagaagggagaaaatccccggtagggaggggggaaggaagccaaaggcccaaaggtctcggcgctgccgtagtaccggctgaggcaagatggtgaaggcacgaatgacgacgacggacgtggcggcggaggtgaagtgcctccgccgcctcatcggcatgcgcctagccaacgtctacgacatcacccccaagacataccttttcaagctgatgaacagcagtgggattactgaatcaggggaaagcgagaaggtcttgttgctcatggagagtggtgtcaggttccacaccacccaatacgttcgtgacaagagtaccaccccttcaggtttcactctg

SEQ ID NO: 284204 - DNA, 461 bp, Zea mays
gggagagcaattatgagatacatccaaaagcctgataagaaacaggggctgctgtgcctcttggactggatgattggacaaggctattctgtagactcgtcatcaaggaacttacttttgaagaatgcacaactttttggcgaaaaacaagttatagcagaaatcctttctaagcagcagatagcatcaaggactattggcctaagacacaaaaaatgataaaggaaagattttgtatatgtaaattgttcatatacatccaggatatgcctaggctgattgtttgaggatcaatttattgtgctctgaggggtaagttagagacaagatatcagttatcatcctcaagtgcggatatgcctaggctgcaaacaaactttattaggatttcagattatggtatgcggtatatattgaatcaacttgagtgctctaacatctcatggcttacgtctatgtct

SEQ ID NO: 284205 - DNA, 561 bp, Zea mays
tgtggccagccgtgagagtacatcgacctattgtgtgtcggaacctgagatctttgataccatatattattgcggagtgtcggaacctgagatctttggtaccagatattattgcggatgttatggcagcgactaaggttgaggtgacgcaaggcgggcggccggagatcttgtccacaaccgagcaagaggaaaggattttcttacttaatgcttgctttattagattgatacatcttctctccttatagagagacttacttgacccctaaagaaatgtcttaacgaaatcaatttaacttatctcttcccttatcctaactaaccgaatattttatatcctaactaactaaatcaatttaacttattttttccttattctatcggctccacttgccataacatattgccatctagaaatgaacggtttggtgttaataatgatgtacatgtactatgagttgatttagatatatgaaaaatcagttttcaaatattagtttgtgtatcagttttcatgattgtttgaattatgatattaaatttgggaatctctcatag

SEQ ID NO: 284206 - DNA, 442 bp, Zea mays
cacgatcattcattttcttcgccccatctccctctctggccacctgtggttttgatcaatcggggtgcgtggcggcgtgctactgtcagctatggctgttgcccctttgcaaaactccacaatttggcatttatggggcgaatcttgttagcgttgtactagaacaattgtttagggtatcgtcttaggtcgaatgaactgtttccttgttatagcatagcgtgttgacaacttggcgataactttaaattacatgtgtccactatatatctagtatatatgctcaattatcttgttgagatgtttttccttttctaaatccaacagagttagtgtaccttttgacaaatgaagtgctgctaacggtaaacactgttgaattggcatctttgttcacacccaaattaaatccaatagaaaccataatgatttcggatggtta

SEQ ID NO: 284207 - DNA, 400 bp, Zea mays
  unsure (1)..(400): unsure at all n locations
tctacttgcaaggtcagccgtcttaataacaacagtctttctggtcaaattccgaaaaccttgaccaatatcaacactctccaagttctggatctatcaaacaacaatctctcgggaggggtgccatcaagcggttcgttttctctctttacacctataagttttgctaacaacccaaatctttgcggccctggtactacaaagccttgtcctggggctcctccattttctccaccccctccatacaatcccccagcaccaacttcatcaaaaggcgtgtccagcactggagcagtagctggaggcgttgcagctggcacagcgttgctgatcgcagtgcctgctattgngtacgcattgtggcggaggcgaaaacccgaagagcaattcttcgatgtcc

SEQ ID NO: 284208 - DNA, 643 bp, Zea mays
ggattgattgatgctgactcttgttgtttgatcgatcagtgctctggtagatatagtagcggttttgtccggtgcgactttagcatgcaaacattaaacattctttctacagccttactaactaggccttactaacacaaaacatggagctcgatcctgatgcgcacgcacatcagctagcagaagaacatggagctcctgactttgtcatgcaggcgaggcagctccggcacaggagcactgccagccgaggtatgccctcctccctggctggaggacgcgtctgacatctcctccaatctcaggaacgtgctcacctgggctgcagcgaggtgggcgtagcacactggagcaaccactgagatggctgtcgtgctcctctggtacacgtaagagagcgaatgaacaaactcctgcatctcgtcggcattaaaacctatctcgtcgtgcagaacatgatagtgggtgggccttgttgttccaatcatcccagcatgtgcacacatgtagaagtcgaagttcttaggatggcaaactttactatccaccacagttccaggaagaacattgtctggtgatgccgtctgaaagaacttggtgtgatggttcttttgagcaacaatcacagtgaacttgggtgacc

SEQ ID NO: 284209 - DNA, 325 bp, Zea mays
gatcgatcagtgtgctctggtagatatagtagtggttttgattgtttggttctgcccttggctcgtttcattcctgagctactttagcatgcaaacattaaacattctttctacagccttactaactaggccttactaacacaaaacatggagctcgatcctgatgcgcacgcacatcagctagcagaagaacatggagctcctgactttgtcatgcaggcgaggcagctccggcacaggagcactgccagccgaggtatgccctcctccctggctggaggacgcgtctgacatctcctccaatctcaggaacgtgctcacctgg

SEQ ID NO: 284210 - DNA, 452 bp, Zea mays
aaatgaacaaaatgaaaacaaataatgataaaattaaaatatattttcaacgcgactgagccactgctataaataataaagaaatggatacattcaaagttgtaacctgtgcaaccgacaatctttaaaatggaagtcattccaaaaatctggtttcttaagtaggattcctaaagaagatatgatcgagggcttggcaagctgtaaggcgtttggtcggatcatatgttaataagccatgtaacaagtcagtcaaggaggaccttgaagagtccacatttcgtgatacaatatccttaagatgaccaagcttcttcactgcactaatgctctcccttgaaacagctccttcaggccatcttagacgcgatccacgcttgaaatatttttctgcgcccttgttagacctgcgaatcatgagctctgggatagatcccaaaactctttccatc

SEQ ID NO: 284211 - DNA, 254 bp, Zea mays
ttaatttttttttttggctcaacagaggctggcgacacacggctctctaatatcagaaaaaagaatgtcagagatgtcaggtactcaggttacagaagacgggcacacaatttcatctacagtttcgcagctatcattaaagacaggaccaaccaccaagctacctatccgctgacatattcacagacgacaaggatcccgacggagatcatctacctccctacctcgggccggacagtatcgacggccctgag

SEQ ID NO: 284212 - DNA, 216 bp, Zea mays
aaaagccggactaatctgaccgagaaccagtggtctggaagggtcgagtctcttgttggaacactaataggttgcatatatactagcccgaaaatataaggaaaatgatgattagagatacaacgtgcatacaccgaattaaactctttaagatttatatatgaattaatagcagcaatcaagcagttggatataaggcacccgtagcaattccac

SEQ ID NO: 284213 - DNA, 541 bp, Zea mays
gaccaaccaactggaactggcttttgttactgtactgataagcgtgacattcgtcatgatgaagaaggtgtgagcaatgacctctatgactttctacaggccttctttgctgaacatcctgagtatgtaaagaatgacttttttattacgggtgaatcatatgctggacattatattccagcttttgcagctcgtgtccataggggaaacaaagctaaagaaggaattcatataaacctaaagggatttgccattggtaatgggcttactgatcctgggatccagtataaagcttatacagattatgcactggacatgggcataattcagaaggctgactatgaacgcatcaacaaagtgatggttccagcctgcgaaatggcaataaaactatgtggcactgatggaaaaatcgcatgcacggcatcatattgtgtttgtaatacaatattcaattccatcatgtcacatgctggtgatatcaattattatgacatcagaaagaagtgtgaggggagcctttgctatgatttttcgaact

SEQ ID NO: 284214 - DNA, 473 bp, Zea mays
ttcagtgtgatagtgaagcaggtgctggggctgtcgccagaggagccggtcactgcaaggatactggaggacttcctggccttcatgaagggactcatctccttccccctctacatcccagggaccccatatgccaaggctgtccgggcgagagagaggatatccagcactgtgaagggcatcatcaaggagcggaggagcgctgggtcatggaacaagcagggcgacttccttgacgtgctgctgtcaagcaacgagctatctgacgaggagaaagtgagctttgtgctggactccctgctgggaggatatgagaccacctcgctcctcatctccatggtcgtttatttccttggccagtctgctcaagatctggacctggttaagagggagcacgacagcataagatccaacaaaggcaaggaggagtgcttgacttcagaagactacatgaagatggaatatacccaaca

SEQ ID NO: 284215 - DNA, 535 bp, Zea mays
actaaacacaggggccctttttttttataggatagcagttgaaaccactggagaatgttttacagggtgaagtgaatcagccacttcaagcaattgccatggacaaaatatatctacaccatgtacattaaattacagtctcagctgcctcatatgctagctactagcacgcgccctcagtgttccttcacttgtgagatctgtcactgaccattcatgtatactccatgcaccttccccttttctctctggggtgataactgatggctgtagctccaggagagtcaagattcaggggacgttggctcgatttctattggcagacctctctgaaactccacatacgggtatgccattggaatgtcatcgccgtcaattctccatctataattgaggacaaggtgatggaggaagaaagcagtctccactttagcgagctctgatcctgggcagagccgggggccaccaccgaacggtgtaaacctcttgcttgtcccttggcttgtgccctcccacctacagggctgaaactgct

SEQ ID NO: 284216 - DNA, 396 bp, Zea mays
atcattgctaaaggccaaaatactgcagattcgacaattacaaaatacgatcgccacagcgaaagccacgttcctctccagtctccacagaccattgaccctccaatttgcgaaggttcaacaactcagtagaaaactacattcctctccagtgaacattggttttcacgactcagttcaaaagggaaacacaaacgctgcatcagaactagaactccagcctgtaggagaaagcttgcagggacacacaccaatccaatccagaactatcggaacttaaaactacaacatgtcatcgatatttgtcctccagtagtgacgagtttggcaccacatcagaagattcttgcccactggcaagcaggttgtactgatattacagaagctttgatcttg

SEQ ID NO: 284217 - DNA, 351 bp, Zea mays
atatgggtttagaatttcctgtaagacaaactgatgtctgtggcattcttcaccgccgggagatggaattgaaaaggctggctgtggatagttcttttggaagagaagcatatatggcttttatcccagaaggattcggaaatatgctggactgggatcaagttatgaagtttcagaggaagactcgatcattgttcagcactccttccacaactgctgttgcattaatccacaaatacaacgaccaagcccttcaatacctaaatttgcttgtcagtgaatttggcagtgcagtaccagcaatgtatccttcaatgggacattgtcagctttcaatggtggacgcgcttg

SEQ ID NO: 284218 - DNA, 486 bp, Zea mays
aataacagtacatgatctctaatcagcaatgctagtagtcagttaattactaaacaaatctcaattctcatatcaaacgaagggacagtataggatagggaacgcccatgaacccttccaggtctggtcctccagcacacatgcccgatgcagccttctaaatcccatatcaaaggcacgataatccctacaagtccttcaacgttcggtgtttacttggtaatttaaaaacaaggcaggtccgccagcgaacttatgggtccacggcctgcatccacgctcgatggcaggatcctccagtggttcggtacagcagctcaagtcaagtactatcaagctttcaacttctttgagcggtgctgagggataccttccgtgatttttgcttcaggactattcccttcttcgatggagagcgtctcaccctcctcggtttctcggtagccaggcgcatcccggaccacgggaacttggccgcctcgtccc

SEQ ID NO: 284219 - DNA, 578 bp, Zea mays
aaattatttaggctagtgagcacttgcgggaggctcctcaatgactaccaaagtttagagagggaaggcaaccaggggaagctgaatagtgtttctctacttgtgctccacagtggtggttctatgtccatagaagccgctaaaaaggcaatgcagaagtccatagacgtgtctaggagagacttgctaagattggttctcaggaaagaaagtgctgttcctaggccatgcaaggagctcttctggaagatgtgtaagatacttcacctgttttactctcagaatgatggatttagctccccaaaggaaatggtcagtgcagtgaatgctgttatcaacgagccactcaaagtccaaaatagtactacgtttttgtctagttcatcaaggtagcgaggatatcatgtaatttatcctgttcatatggatcagaagcaacagcagcaagcttaagatatttgtaagtttgtgactgggctggtgtggatctgtgaagctacaactttgctgtatgtggatcaaggtattaggaagatctggttcacatattgataacataatggataaaccataacgtt

SEQ ID NO: 284220 - DNA, 487 bp, Zea mays
ctcgagccgaaaataagaagaaataaagacaagtgtagtgtagggaaatcaagaggttgtttcggtgtttggtgtggaccgagacaacatgtcaaacttcaaggctggttatggccacttctcaacaaatgtcaaaggggtgtttgcagccggtgattgtcgccgtggtcagtccctggtggtgtgggcgatttcagagggacgacaagcagcagcacaggtcgacaactacctcgtcaaagaagacaaagaccaccggaatcaggatggccttgtcaagagacagcagggcctctacaagaagcagcatggaagcagcaaacacacggtgatgacttataggtggctcctctgatttttcatactcataaagttccaaaaggaattgcacagaataaaattgttccaagtttgagcaggagattcattggtttactttaaacgggaaaaataagaagaaataaagacaagtgtagtgtagggaaat

SEQ ID NO: 284221 - DNA, 315 bp, Zea mays
aaaaacgaaacgatggcacttttaaataataattatcaaactggacacttcattacatataatcggcatcaccattaccaactaaaagctaaccttcccaacaataaaagcccgaataaaacaatcattgaacaactgaacactcgaatttggaacaactttataccctgaaacccccccaaacaccgaaacaaccttttgatttccctaccctacactgggctttatttcttcttatttttcccggctaaaggaaaccaaggaatctcctgctcaaacttggaacaattttattctggggcattccttttggga

SEQ ID NO: 284222 - DNA, 524 bp, Zea mays
aattcaatggcaagctttctgattttggattggccaagctcttgggtgcagggaagagtcatatcacaactcgagttatgggaactttcgggtatgtggcccctgaatatgccaacactggtctgttaaatgagaggagtgatgtctacagttttggagtgctactactggaatcagttactgggagggacccagttgactatggtcggccagctaatgaggtacatctggtcgagtggctcaaaatgatggttggcacgagaagagctgaggaggtggtggatcctgacatggagttgaaacctgccactcgggctctgaagcgtgcccttctagtggcactgcggtgtgttgatccggactctgagaaaagacccactatggggcaggttgtccggatgctcgaggcagaagatgtcccgtcacgggaggaccgccggagccggaggggccacagcggtaacgcagacagcgagtctaaggcaagctcaagtgagttcgagataagcagtgatcgaagagag

SEQ ID NO: 284223 - DNA, 447 bp, Zea mays
acaagaggttgatggttcaagggattcatcacattacgaaagagaccataatgttcctactaccgaacaagtcctaataaccaaacgacagagaaagaaatgtctgtacaagctgaagttgctgccgtccgcaccaacagaacaccaagattcacgacagcaagtctgaatctttcgtctcagggggagtcatctccctctgcgcattctaagctgcctactaccaaaggataatgcctaccccaccagaaatgcaatgcccttccgatctctacacagtacaaaatgcaaatgtcctcgcgaaatgaaatgcaatggccttcctacctcctaccaaccagccccgccccccccctctcaaacaaacaggtaatttgatgttcatcgctagtccaaaaccgagtttttgtcaggggttaggactggaacctcgcggacggccccaac

SEQ ID NO: 284224 - DNA, 362 bp, Zea mays
ggaagggtaaaaacaggtgctggactcaacaacatcccctatcctacatttcaactctgaactcccaattcccaaggggaaggaagccccaccaaaagctttaaaggccctctaggtagccaaacctgacccgggtgcttttacacgttttacacgtccccatacccaaaaggggcacatgcagctgaacatactcagcatttagccgccaaaaaaaacaaaacactccccaatgggactccgcccccctccttttttttcactggcctgtctacctttgactgaatcctacaggctcctcctggggctcccagtcgccagaggcatgacacacacaggtcgcattggcaaggaatgggccc

SEQ ID NO: 284225 - DNA, 498 bp, Zea mays
tgggattaactcgagaaccgacttataccgggtccagacctcccctttatatagatgaagggctacgaccgattgaaccccccacaatcgatccaatcaaatctaattatcgtttttaccttatgcattaggagtagctctagtttagcctccctctacctcgaatcttcacctctcttccactatatgtcgactagaggcgtcttgggtggctaccccccacaatcgatccaatcaaatctaattatcgtttttaccttatgcattaggagtagctctagtttagcctccctctacctcgaatcttcacctctcttccactatatgtcgactagaggcgtcttgggtggcctgccgtcgccaagacacaccctatgatctctccttcctgacggggtccctcccgggaggcgagatccaggtctactgcgaagaagacaaccctcttcgccatcgcggaccgtccgagccccatgtacggaccgtctggacgtacgc

SEQ ID NO: 284226 - DNA, 401 bp, Zea mays
aactgaaagatattacatgatataatgtttctagttcataataaaggagatgcgggctacatgaaccttgcagcctcctcagcccccaccaagtcaacaaaaagcattgctgggtaataaatattgccagcaacacccaatacactttagtaataattaatatcacacaaattcaccctccaataacaaaaggtggtagaaacatctactcacacccactactagcatttatagtaaagtcactttcattttaccttatctacccttctcttactttctgtcccctactacacacttaaaccaaaacacggcttcaaactttcccgggaaaatagagggaaagttgaacgcgggaaaactaaaaaaccaaaacgcaactacaaaaacaaacatccatgttt

SEQ ID NO: 284227 - DNA, 454 bp, Zea mays
ctgcacgttaatctaagaagtcatatatttatatataataaaaagctgaaaatattggatccacactcaaactgtgaagctcttattttaatttgtacgtcacattattatttatggatttcaagatcttggtacattgatttatttaggcatgtaaattgccaaagttgatggctccgttagcgttgccttcggtgaagccggtttggttactcagacctttaatcttctgagtgccactgttgttatattttccaacagagcgattccttccaggcataggagcaggactatgggaattattgggtgaggaggttgcattgttgttgtgagtttcaccctcatccatgttatttagcacaccaacaagacccttcagagcatccagtttttcttgaagatctgccatggattttgctaaaaaaaattatatgatctgtctcttgagattgat

SEQ ID NO: 284228 - DNA, 444 bp, Zea mays
caagcaacagtacgaagcatattcagtgggccgtcgttgtaagttacttccctcatcatcaagaacagacacataattacaagtgcaaacagagaagcacacaactgatgagttacacacacggacgacaaatataaaatacaagagatatggctacttggctagcctaaatttgaaaggcaagcttctgcttgctaggcactcagtgtgacagaaacaacattggacagcttgaacttccgagcctttttggaacgcagcggctggaaaacgatctccgtgtattgcttcacagaaatctctttcagctctgaagatgaagtcccctcagctcgatagtcacgaggagaatacaatatttgaactcgtgacctaccaaaaccaccgaaaagagttgacttctggatgatgaagcgactgacttttgacctcttgagaattttg

SEQ ID NO: 284229 - DNA, 498 bp, Zea mays
ggctcgagctcgacccgctcgtagctcgagccgcgaggaatccttcaagtggtgatatcttccatgctgcacccgctgttgatcattctcaggaccgtgtaaggaaagatatcaaggagtggttgaactggctgcgcaatggtataggttgtgattggatggcggcttgactttgttagaggtggctctggtacatatgtaaaagaatatattgaagcatcaactcctgtatttgccattggagaatattgggacagcttgggctatgaacatggaagtttgtgttacaaccaagatgctcatcggcaacggataattaattggatcaatgcaactggtggtacttcatctgcatttgatatgacgacaaaggggatacttcattctgctctgcataatgaatattggagactgatagatcctcaagggaaaccaacaggagtgatgggatggtgggcttctcgtgctgttacattcctagagaaccatgataccggg

SEQ ID NO: 284230 - DNA, 474 bp, Zea mays
attctctttccctttccgccgcagcgattttcagagatttaaccttctttgttcgtagatatgcgcggttactgattagttgatgatagctgtcgacaaatttcacatggaaagagaacgaacacggaaacgccctcgtcttgcatgggacgttgcccctccctcagtgtccgaggcgcaacgggctctgccagtgcccggtgacgaagaattcgaaagaaagcacgtttcgcctccgaaaagggacgacgatcgagagggccattatgtcttcaatcttggcgaaaatctcactcctagatataaaatcctcagcaagatgggtgaaggttagcggtcaagtgtcctctgaatacgagattttaattttttgttttttgtcactgtgcttgtgtcattcagcatattgctagtgctgtaggcacatttggtcgggttttggaatgttgggacgccaaaccagagaatatgtgg

SEQ ID NO: 284231 - DNA, 663 bp, Zea mays
aattaatatatattgataatgtttattatatatattgattagagacagttggaattatatcacaggcttgccatcttgttgacaatcggtgctcgcagctcagactgtggtgtctgcaaacagttctaaaacagaaacacagttttgcagtcattggctgagaacctggaagacatacttgtttcaagcaaaacatgatcaatgatccaatgcccatgccgttcatggaggcgagtgggaatctataacagataacacgcctggacccagcaaagcctacgttgatcagcccacgagtaggttctccgcttcgacttgtgataggacatcgtcttcaaagaacgcctgatgaagggcttctacgagtgcctttgcatcgctatcatggactatcagcgacatgttaacctttgacgctccttgcgagatcatctgaacattaaccccacttttcctcagcacacgtcccgtcttttctagtatgagagacgattgctccacatttccgataagtgaaattatcgccctctgctgaagtagacgaacaattgctattttctcaagctcttcaactacatggtcaagttcctgctgtatcagttccctactccagatctttgatggatcaagtgacacagaaacactaacttcactggtagcaac

SEQ ID NO: 284232 - DNA, 272 bp, Zea mays
gagtttgctcccaaggttatccgtatagattgagcatctcatagcaagaggaacgatcttccgcactccgaatttatttctaaccctaaccccaagtgtagtgcgtgttcaaagtttataattttcagattttgtctattcacccccctaggcgactttcaaaactccatgtcttatattatatgtgtataagtatataaaccgtaggggatgggttggggaccaaggcccctgcctgcccccttggttccgccctgctcgtgtgttacgac

SEQ ID NO: 284233 - DNA, 412 bp, Zea mays
tgtcatcagatatatcatcaggcttccatgttccagtatcttatttggcgggaagtgcgctagtaatcttcagttcactttgctgaacaatgtccctgtcaacgcattacgcacgcagcgcagcattcataactcttgggtaattcaaacccatcaagtgatacatttggttctgaacgacccaccacctgataattacttaacccgattcgacgtttaaatacatctagtttcatatcaatgttctaaggtaaccgaacgagccctaagtggtcaaggagccctttgtacccaacccaaaaaaaagcaatgccagaaatatttttatcgacgttatgaaaaaactaactttctaaaccagattcgttgaaaagatatagaatcccaatcaaacggttacacaacagaatag

SEQ ID NO: 284234 - DNA, 636 bp, Zea mays
gggcgctgggcttcccagtaagaatatccaattgcctattatgcatagtacatcatcaataaaacatcttacaaggctggagccagttttgtactggtgggattatggtgaattgtttgcagcccaaacagcttctaacttttaatttcacttgggattgcaaaccaatagaaagggtacgcatgcttacagcgtctggatgaccagggggtggctctggcaatttcgttatgagctccctccagcctcacaaaattttgggttagccagatttattcaagtttcctgttagcagtcccttgtgggattaaatattctcctggcgccttgctctcaggtgttaaactgttaatgaagtagtcaatggaagtctggctggccagtggatgtgaggcagcggtgccacattctgctgttggggttgacgtgctttggtgttgtaatgacctctgtgatgggaaggtagacataatgtgtgttgcaaacacctgacgtgatgccactgaacccagcaaatgctccatggacagcattttgcccaagtacggtgcagagaatagcatcagatgcatttgcccggcaggcccgaaccatatatgttggatcaatgtattttagatcagcgggaacaccgat

SEQ ID NO: 284235 - DNA, 472 bp, Zea mays
cgtcggcggcgggagcctgctgctggagctcgtcacgggccagcgcgcgctccagctcggcaaggcctccggcgccctgcacagccagaagggcgtcatgctggactgggtgaggaaggtgcatcaagagaagatgcttgacctgctggtggaccatgacctgggcccacactacgacaggatcgaggtggccgagatggtgcaggtggcgctcctctgcacgcagttccagccgtcgcaccgccccaagatgtccgaggtggtccggatgctggagggcgacggcctagccgagaaatgggaggccacgaaccggccgggcatggtcgcaggggcgccgtgccacgacgcgctcggctacgaccaccgcaacgactccaacggctccgtcttcttcaacgacttccacgacaacgacagcagcctcagcagcgacgaagcgcggtcgatcgacatggtggaggagatggag

SEQ ID NO: 284236 - DNA, 452 bp, Zea mays
accaaatcatgcatggtactgaaatgagatgcaattccaattctattgtttggatgtcactgaattgtacgttctaattccacgcaataccgaggggtgaggctttgtattgggagaggatgttctagttatagtctaattctagggaattaggcctctgattccaaatctcaattccacgagcaaccaaacaacagaatttagaaaaactgattctaattcccaattctgtgctccaatatctatatccaaccggggtgttagtattatgtagtttcactggctcttctagttgtgcttttatcgatatcttttgtgacctgaagattaaatttgagtttttcaggaagcgtacttaagacgcatgtcaacatgtttggcggcaggtatattaatattgattcaatccaacccttatgctccttgattcagctgatggtctttgatggtgc

SEQ ID NO: 284237 - DNA, 484 bp, Zea mays
aatattttacagagaatgagatacgaaacttaactgatgggtataagtctgttcggggaaggggggcatttggtgaggtctacaaaggaacgctagaagaccaatcctcagttgcaggaaagagatatattcctggggacccacaaagaggtgtttgccaaggaagtcatagtgcactctcaaataaaccacaagaatgttgtcagactcttgggctgctgcacagaagaaaatgctctaatgattgtcatggagtttatctccaatgggaacctcgacagcatacttcatggcaacagaggtaatggtcgggttcccttccctctgaagaaaaggatagaaattgccattgaggttgctgaagtattatggtgcatgcattcgatgtatagtcctgttcttcatggtgacatcaaacctgctaacatactgctagatgaaaattttcagccaaagatatcagattttggaattgcaagactgc

SEQ ID NO: 284238 - DNA, 654 bp, Zea mays
gtggctgccgctgcccgtcacgcacaggtgcgacgtgtacagcttcggcatgctggtgttcgagatcctcgggaggcggcgcaacctggagctgcagcaccccgccgtgaccgtgagccaggagtggtaccccaggtgggtgtggcagaggttcgaccaggggaagttcggcgacgtcatggcagcgtcggggatccacgccaaggacggggagaaggcggagcggatgtgcaaggtggcgctctggtgcgtgcagtaccagccggaggcgaggccgtccatgagcagcgtcgtcaggatgctggaaggagaggaggagattgcgcggcccgtcaatccgttcacgtacatggcgagcgtgcacatggtttccagctccagcagcggcgacggcgacggcggtagcgctgccgcctccagctattcgtccaaagaactacggtgaggcaccaggagtgccgctaataatcagggcagatgaacacatgcgttccttttctttgtcgtaatgcattgataccatcagttggttgaatagtgctgcttacttcagctatgatccacttggcttgcaattcaagatgtttgcaacatggaaatcatagaatgtcatttaatcaaacttccattttggaccaattacagtacatacag

SEQ ID NO: 284239 - DNA, 807 bp, Zea mays
tttgccctccctcaagaagagaaagaggcttatgcaaatgactcttccgaaggtaagtttgagggatatggcacaaaaatgaccaaaaaccttgaagaaaaggtggagtgggttgattatttttttcatctaatggctcctccttctaaggtcaactatgacatgtggccgaaacacccttcttcctacagggaagtgacacaagaatacaacaaggagatgttaagggtaacaaacaaggttttggagcttctgtccgaaggcttgggcttagagaggaaggttttaaagtccaggttgggagatgaagaaatagagttagaaatgaagataaatatgtatccaccatgtccacagccacatctagctttgggagttgaacctcacactgacatgagtgcccttaccatactcgtcccaaacgaagttccaggcctccaagtttggaaggagaatagttgggttgcggtcaattacttgcaaaatgcactcatggtacatgttggtgatcaacttgagagaaaacaaagaggaaaagagaatggttatgcagacctcgcccattggtgttgatgactacagggataaggtgttgagtaacggaaagtacaagagtgttctgcatagaagcttggtgaataaggaacgaaatcgcatgtcatgggcagtgtttgttgcgcctccacatcaggcagtgatagggcctcttccttctctcatcaatgatcagaacccacccaagttttcaacaaaaacctatgctgagtatcgttatcgcaaattcaataagctttcccaataaggggc

SEQ ID NO: 284240 - DNA, 532 bp, Zea mays
gttctagatcgcgagcggccgcccttttttttttttttttttatgacaaacctggctgacactcggccgccccgttttgtggcttttcaaagaaccatctcaaattgtttgaataaatatcttacaagtgacaaccatgagaggaaggggcatagcagacgacaccccagaaaaaataagtataaaggcagaaacaacaaaattttctttacggtcgacccacctcaactcttatgctacaagaccaggcagtacctagacgacactagacaaagggcactaggcgttggggatactaaggaaattaaggatattaaccatgagtccacgaccaggggggtgtagctttgcacgcatgcagagacacagggaggaagtaaacatcagcgcgatgttatccgaaatcctgctgcttcatcatacattcatgtgactatgcaaacaaaaagtctagttacaactgctcatcagctttaaactgaacgtcaccacatttgtcttcttggctttaagttccaacccttcatctatc

SEQ ID NO: 284241 - DNA, 421 bp, Zea mays
  unsure (1)..(421): unsure at all n locations
gcgcgggagcagatggaacaccgcaactaccagatcgccatcgaggtctctgagcttgaggcatcgctcgcatccaggtctgccgagggcgaatccctctccaagtccctctcccagcgtgaagccgagatctccgagctccgtgataaaatcacctctctcgaggggaagctcgccgcgcagaggcccgtgctcgcggaacagatcgggtgcacctcgaagctgtatcacgagatgcgggaggtggtcaagctggtcgatgccgaagctgtcagtgccctatcggactcggtttttgtctggaaggagactgacgtcgaggagagcctcaagggtgtctctggaagggacgaaattggcctatgagcttgcggcaatagctctggnnaagggttgggcttgtatcgatgacaaggagagc

SEQ ID NO: 284242 - DNA, 510 bp, Zea mays
ggaggagacgcgcgggaagaagttctcggtgtgggcgtacgaggagtacgagaggggcaacctcgccggcatcatcgacaggaggctccccgcagaggacctcgacatggcgcaggtggagcgcgcgctgcaggtgagcttctggtgcatccaggagcagccggggcagcgcccatccatggggaaggtggtgcagatgctggatggggttatggagctcgagaggcctccgcccccgaagtcgtcggacagcttttttagcaccaccacggccagcggcggcaactccagcatggtctcgacagtcgcctcgtcagcggcgcccccggtcgcgccctcgacgtcgccgaacctagagcaggagatggcgttgggacgctccgagtcggccaggaaccgtgaccgggtgacgcggcagctgctgtcgccgcagccgtacatgacgatgtaaaatgtgcgtctgcgtcatcatcatccatccattgcagagatcatcatctggatacacgc

SEQ ID NO: 284243 - DNA, 1069 bp, Zea mays
ccacctcgccggcgtcgcctcggggatagctggatctcgccgctcgacttcgtgttgtcgtgggggccgttgctgtaccaggtgtcccgggtggacgagaagggcctgcagcagtgcaacagcgtggcggccaagatcaaggagcagctggagaaggggcagttcgcggacgccgaggcctcgtggtcggagctggagggcgtcgtcctcgccagctccaactccgtcaacttctacaactttctcaaggacgaggcgtcgggggacgccaccgccactgccacagcggcggtgtcgacactggcgtccttcaggcgccggggcggctactcgggctacctcagctccatggcggcgtcttcgtcgtcgtcagcaggcggcttcgacgggctcatgaacacggtcatcaagaagaagctcggcatcatcccaaaggatctcaagtggggagagcagtcagacgacgtgttcgatgctctggctggagacttcatgaagcccaggatacaggaggtggaccagctcctcaagcttggcgtcaatgtcaccatctacagcggacagctcgacctcatctgcgcgaccaaaggcaccatggactgggttcagaagctcaagtgggacgacctcaacagtttcctgagatctcccagaacgcccatctactgcgacaaggaggggcagtccggcacccaggccttcgtcaagtcctacaagaacctcaatttctactggatactcgaagccggacacatggtacccctggacaacccttgccctgcgctcaagatgctggctgacattacgcgatctcctgccgagtagcaggaggaagaaaacaaggcgacggaatggaacggcctgacaccagttcttcaagattcttctcttttcatacagtcagagaaaaataagtcattggtggtagcattcatacatgcaacaataaacacaaaggaaaaggtagtgataggatcagacagatatttaattcggcagatattattgtgtagccccgctatagagcttgcagctgaatttccaacatgatgatctgattgacagtgct

SEQ ID NO: 284244 - DNA, 411 bp, Zea mays
cgtcggcgtcgtccgagagtctcggcgagctgctcatccggaaggccgacgagggcgtcgcggtgctgatgctgagtgtgggacgaccccacctcggtggggctcggccccatcaagcgcgacgggctgatggccacgcacgaccaggacacggcgagcttcttccgcgacacgcgcgtgcagtgcgtgctctgcccgcgcaaccccgacaaggaccggagctacgtgcaggacatcgagacggccaccatgttcacacaccaccaaaagacggtgatagtcgacggcggcggcgcgccggcgccggagacgccgccgggcctcgtgagcttcctcggcggcatcgacctgtgcgacgggaggtacgacacgcaggaccacccgctgttccgcacgctgggcaccacgcac

SEQ ID NO: 284245 - DNA, 478 bp, Zea mays
gattaaagcttaattttggccctggggccaaataaactgcctaattctctgattatttttggagaacataccccacattattgacaaggaaacttcttcagtctcagatgataaaagagatacccagtttaagcctcatgatctcgtagagaaatgtttctgaatgataacagagccttggtatgatctcgtagagaaacgtttctgaatgatatcagagccttggtacagctgaggagcccattacaatcatcactttgccaaccgccttcctatctctcagggcagagaaagcaagatggacctcaacaagtctgtagcagtgtgaaatttgaactgttatcagaccctttgaaagccatgacaagagttcactgagcgaatcaatgagtacttgtggccggtgagttaaggagcttccccagtacaaaccatgaactgtccagttcttaacaagagcaatattcgctcgaataac

SEQ ID NO: 284246 - DNA, 462 bp, Zea mays
agcgctgccagtgccaccgcgccgtctcccgtcccccccgcgcgcgcgcgcacgccggccaggcccaggccctcatggaggtcggtccgacgcagcagcgcctcggcgacagcttctcccgggggtggctggcgaagcgcggcgcgcgggcgccgtcgctcgagcacctcgtcgccgacgccgacctcggccattccttcggcagctccaggtcgtcgttcatcgacatggaccccgccgcgctcttctccatgcggtggacggccacggccgcgccgccgccggagagcgacttcgagttcgggcttattgttcccggtggcgtgggcgggggcagtgaccccccgtccccggcgctggtcagcgcgagccgccgggtcatccgcaacggccgcctcgtccccggagaaccgctgttattctcggcccgcaacgcgccgacctccccgtccccgaacccgt

SEQ ID NO: 284247 - DNA, 458 bp, Zea mays
gaatccacagaagttaagaaatgagcagagcctcataatccctttctcctctttcttttgtacagtacactttggaaacgagcgaggcatggatcatgcagtctaaatacaatcatagcataaacaaatcccccctaatccttcaaacaggccgcaagcgaagaatacaaagcaatggaacatcaggacaagcagaagagctgtcaacaaacaaccagaaaaatctacacatggtttccatctgtaattcacaacttgcctatgtggtgttatcgggctaccgtgtactcgtcatctgcagcgatccatccttttgcagcttaaggctcaggctcgtgaaccgctctctcgagtactgtctcgacgctttcctccagtctgttccggccttcatcatcgccgcaaactcatcgtagcttatcttgccatccttatcggtgtctacatcacggatgatg

SEQ ID NO: 284248 - DNA, 458 bp, Zea mays
gtttagcaggctcgatgggatggctccagtgaagctattatcatcaaggtacaagtacataaggttagagagggagccgatgctggctggtattggcccagtaaacatgttggacgaaagttttatagagtgcaagctggagcagttgataagtgcgtcaggagccaaaccctgcagctggttgttgtttagaacaaggtcctgaagcctgacaaggcgactaagaaggggcagctggccaaagaagctgttgtaggacaggttcagcgttctaaggaaggttaggttaccaagagatggagagattcggccttgcaagctttggctgctgagtttgagttcaatgacccgccttgggtgcgttctgctgcatgtgacgccattccagctgcagtagtcggcggcgctactaccactagtgttccaggatctgaggaaacctcctggatcactgctga

SEQ ID NO: 284249 - DNA, 441 bp, Zea mays
gacaacgccacgcgcgtgtgtggacgtaatcccattattttgtaacgccctttttacattgcatataaacaaccactgggcctcaagagcatacaatttaactgggtaccacaaaagctcgccgcaggtgtatacatccttaggggctcttcttcctcctctcttggtaattatttgcttgttattaattcctataccaggctaggaacattatttcatgtggacagaccttgctagctaggtagttcctagttcctacgtacgaacatgcatgccaatgaagtaaacctgcctgttgctttgtatatatatgttaatcgcaggtactatgaagtctgcaatggttgctgctgtagtactagccctactgctgttctatgggactggaaacgccaactgcgcaacggtgcgtcccaccagcaggaacagcacggacgacat

SEQ ID NO: 284250 - DNA, 524 bp, Zea mays
attggatgcagagtacggacgcggcgccaaggtgaaccagaaggtagacgtgtacagcttcggcgtggtgctgctggagctggcgaccgggagggtagccaacgacagcagcaaggacgccgctgactgctgcctggtggagtgggcgtggcggaggtacaaggcgggggaccctctccacgacgtcgtggacgagaccatccaggacagggccgtttacatcgacgacgccgtggccatgttcaagctcggggtcatgtgcaccggggacgacgcgccgtcccggccgtcgatgaagcaagtcctgcagcaacttgcccggtacgaccgcaccgccagcgttgccggcgcgtgccaggacgaccgcggcgtcgaactgggacatctgcccaagggaaagcaaggtcgtcaccaagttgccaagagatcgttagacgccggatcatttttgggtggcgacgaggagagcggcaacttcgtggcccatcctgtttaaattttcagtttaactttactttttcggt

SEQ ID NO: 284251 - DNA, 467 bp, Zea mays
gttcgttgcctctttctctttgtggtaggcatgcggttcgatctcatcggcgcgtccatcacccactacgcatccaaatggctcccgggtctcaccaaggacggcccgcacggtggcgcgctggaggagccctgggctcaggcccaggcgtcccccggcggcgggctccacatgatcatcgccagcggcggcggcggcggcggcggcaaggacgacatcgccgggagcacgccggcgcgggagcagcgcatggtggtggagagcctgatcagcatcatcccgctgcagcgcgacagcgtcgtcgtgcggcttcctcctccgcctgctccgcctggccgtcatgctgaaggcgccccggcgctggtgacggagctggagaagcgcgtgggcatgcagctcgagcaggcggtgctggccgacctgctcatcccctcctacggccgcgccgagaccgcctacgacgtgga

SEQ ID NO: 284252 - DNA, 319 bp, Zea mays
cacggtctgcacctcccttgtccttgtggcttcgctcgtcggggcggacgctgacggtacggtgagccgctcgccgccgccagcgctgaccggcaggtcgtcctcatgggcctcctcggggcactccagcgcgcgcacgaactgcacgaacagcggccagtgccccggcgagaagaactccgcgcccatccgctggtacgtgaactggcacggccgagtgcgcccggcggacagccagacgacgcccggtgagccggcgctggcgccgccgcgcgccacggagagaggagcgctctccgccgcgaggcgcgcgccgtgc

SEQ ID NO: 284253 - DNA, 375 bp, Zea mays
cagaaaccttcggactcggaataaagttgtacacaatatgaaaagcatggacaggacaaaggttgaaccagttccgaagctacgcgcaaggtagcttcggctcaacggcagagaaaggaaccaacttaaaggggaaaaggctatttagtcctcgctggattatctttaagtcaatagtaaacataaagggaatgaatgtaattttacacaggctgtgccctgtgcctataaatagatgaacagcacccccgtactgttcacgctaacttgtacttcctcgggcgtcacgcttgtactttcaccttgtgtcagggcgaaggtacaaatgcaatcctatgttgctcttattcattcatgattatatagtcaaagata

SEQ ID NO: 284254 - DNA, 539 bp, Zea mays
taaatgctattgttgctcaaagcctattgacatacctagatggagtggaacctttaagatagatggaaaggaccacatatcactggctggacatttgtcatccaaatcttgtgagaaagtgtggaaattgtcatcattgccgaaggtggttcaagtgacaaaggttcctagaatggcagtgtggcctaagatatttaaagcatcagaacccagtggtgacaatattggcctatatttcttccctcctgaaatgaggcacgatgaagaactagatcaactagttaatgaagtcatggataaagatttgatcttgcgagctattattggtgaagctgagatgctgatattcccgtctgttctactacctgaaagatatcagacattccaaaccaaacactacctatgggcggccttcaaagcaaaaggaggataaaggtgatgcaattgtagaggaggaggttgagaagggaaattgcgtttcaaaccagccagacaaggtacagtctgataatgcttcatttccttcaaaccatggactg

SEQ ID NO: 284255 - DNA, 548 bp, Zea mays
acacccgcaacaagtcagtttcatatcacagcccataatcctaaacccaatttgacaacggtcaccagctcaacgcaatgacactgacagttttgctagaacagcccccatacaccctagcagaataatactgacaaaaaaaaaccggcaccaaaacaaaacgacctttttaccccgctgttatagataaaatacgtaacgtagttacacagcacagatgcatccatcttatcttggcacacaaatctattatttatactttggagaggaacaccacctagatcaaggagagaagcagcacggccatcccttcatccagcctgccgccggagccggagcatcccgtccatccaggcgacgatctcggcgccgacctcgtcgcgctcgggctcgaagagcaggtcgtgcaggaacccgtcgtacaggcgcaggtccttgtgcgcggacgccgccgcgccgtagagctcgcgcgacgccagcgggtccgtgacccggtcggcggtgccgtgcagcaccaggaacgggacggtgacttctccaggcggtgc

SEQ ID NO: 284256 - DNA, 1021 bp, Zea mays
  unsure (1)..(1021): unsure at all n locations
tgtctnagatgcagtgcttcaatctccgacggcataaagccagatgagattgaagcactgcatcttgtcccaagagagctctcgctgaagattgtgagcaagattgaagctggcgagcattttgccgtctatgtcgtcctgccaatgtggccagaaggccctcctgctagtgggtcgattcagggtatactggactggcagaggaggaccatggagatgatgtacaatgacatctctgttgcgctcgatgcaaagaggatcgacagggacccgagggattaccttacattcttttgcttggggaacagggaggtgaagatggatggtgagtatgaaccttcaggtcgtccgcttgacgggacagactacgctcgggcgcagaatgcacgccgcttcatgatctacgttcactctaagatgatgatagtcgacgacgaatacatcatcgttggatctgccaacatcaaccagcgctcaatggatgggggcagggactcggagatcgccatgggcgcgtaccagccgtgccacctgaacaccaaaggccaggtcgcccggggtcaggtccacggcttccggatgtcgctgtggtacgagcacctcggcatgctacacgacgatttcctcaacccgggaagcctggagtgtgttcgaagggtaaaccagatggcagacaggtattgggacctctacgctggcgacagcctcgacgccgacctccctgggcacctgctcaggtacccagtcaccgtcacgaaggagggcacggtgacagagctcccgggggccaagttcttccccgacacacaggcgcttgtgcttggggcgctatcgaagctgcctcctattctcactacatagagaaaccttctgtactgttgccatgttacgtttgcgggctgaattggttcaggtttttgctactccgtattatgctactactggtagtgttattgtatggtttcttcctaataatagtatttatagttttggccttaaaaaaaaaaaaaaaaaatataaa

SEQ ID NO: 284257 - DNA, 359 bp, Zea mays
aaatgacacaaaatcaagttattatttggcaaactaaaggttgtacatgatctaagaaaagccctaataatcttaatcactagcagtactaccacacccaacctagctagaatgcaacaaaatgtatactgacatgcaaggcaattgtccaggaccaactgttagtccacattcattcagagagtattccgaagatatttccccacagcagcaagcaacaacgatgtcgacaaacaatagatacaacagctacatggtatctcatatctccccgtcccatagctcctccaaggtcttgtacggcccgtctggtgacaaaaagaactctgcacggcatgctctcctctgtggaatcccat

SEQ ID NO: 284258 - DNA, 390 bp, Zea mays
gttattttttttttttttgttttttgtttttttttttttttttttttttttttttttgaatcatccccgaagaccacaccaaacttgtcccaaagacgaagaaagccagcagcagaagttgcactggaaattacacacagcactactcgatggtactccactccaacgccaccccactcaactgtgcacctttcttcttcttcttctcgactggtattatgcaagcatgaactcaccctatataccaaccaagcactacacggtggaacaaactgttaccaccgtctctatgaacagctagctagctactgtacttacagcaccggagccaccccgccctcctcagaggtccttcacgatcgcaggcttccagccgcgccacacgatgtg

SEQ ID NO: 284259 - DNA, 502 bp, Zea mays
gagaacaatccacacaccactttacatgcaatgcaatagactgtttgtatttacatgctatgctgtgtccgtatttacatggtcgtactgtcatcatagcataagcatttatttgaaggcgtacgtgacgtgcgtcctaatagctactgtgcattccctgctgggccctgagaaacctcattaagtcaacataaacatcttcctttgccttgacgctcatgatgaaatcaatgtggccataaccaccaatgtacaagagctctggcgtggatctcagctctttgatggtgcgctcaacgtctgttacgtcagccagggcatcaaggcccccataccccatccatatcggcagtgattccggtatgctgcttagatcgaatgagggaggacgcagctggccgtagcgccttaggtttccccacatccatagtcgtactttgcgaacgtgcctttcctgatcatctggaaaagatgcggcaaattttttgatgatgacggatgg

SEQ ID NO: 284260 - DNA, 536 bp, Zea mays
gttcagtgcattcagaacaagcccctgtattttgctgatcggctgtatgactccatgaagggcaaggggacgcgagataaggtcctgatcagaatcatggtctcccgcagtgaagtggacatgttgaaaattaggtctgaattcaagagaaagtacggcaagtccctgtactattatatccagcaagacactaagggcgactaccagaaagcgctgctgtacctgtgtggtggagatgactgaagcccgacacggcctgagcgtccagaaatggtgctcaccatgcttccagctaacaggtctagaaaaccagcttgcgaataacagtccccgtggccatccctgtgagggtgacgttagcattacccccaacctcattttagttgcctaagcattgcctggccttcctgtctagtctctcctgtaagccaaagaaatgaacattccaaggagttggaagtgaagtctatgatgtgaaacactttgcctcctgtgccctgtgtcataaacagatgaataaactgaatttgtacttt

SEQ ID NO: 284261 - DNA, 301 bp, Zea mays
aacgatccttcaggtgcgaaattaaaggaaatgatcgaaatcaatggcgcacggcgccacaacgcataactttaatcccatcacaaaccaatctcgaactagactagaacgtgaaaccctaaaactaatgggtttactgctaattagggtgttatcatgtcgacgaacaatatcagacgtacacgtacacgtgtggtgcagagcgccgggccggtatggttcatgacgccgccgccgtgtccatcatggccttgaactcgtcgaagcagaccaccccgtcgccgtctatgtccaccaccgc

SEQ ID NO: 284262 - DNA, 360 bp, Zea mays
gtggtttatcgtttcggcaaacaatgtgggctgctgagtaagaggacatatctggtgcacataaaaaattggtgcacatggtgcatatattaaattatcaccactcattttagatctaacgtctttagttgatcattcaatttacaaataacaccttccaggcttccaccactacacaccaccacgttggagggtgcttttagcaaaatataccaaacaactagaaacgttagatctaaaatgagtggtgatgatttaatatgtgcagcatgtgcaccaatcttccatgtgcattagatatgttctcgctgagtaatccacctgtggcgaataaataaagcagtcagttctcagtctgtc

SEQ ID NO: 284263 - DNA, 477 bp, Zea mays
gaaattcccatgttatcattcatgatcaggagtacaagagtgggcttacaactgtacagttactccgcggaaaattttctgatatttacatacactcatgaatcactccagggcaggggttcacacttcacaccaagaattaccctgaagacaaaaaaagaagaatcctggacccagaaaaaggaaacgcaagaattaccctgaagacacaaaaaaagaagaatcctgcacccagaaaaggagggctattctttatatgtgaagaaagcaccggatggcttctcattagtacgagaaagaaagccatggatgctgtagtgcttcgtcagctgtaggtcttttcctggggttaatttgcagtagataagacagaaaatcgacaaactctgaatcagggcattgtatgtgtcgtcgcaaggaggttttctctgtgatcaaatactctagttgatctgtctcctcatttttggtaaaaag

SEQ ID NO: 284264 - DNA, 614 bp, Zea mays
gcgccttatcacttcgcctccgtctccgtggcgcgcgcgctcgcacgaacacgagtcccatgtcgtccaccgcagcgcgcgtcgtccacccggctgccgcggcgccgccgcctccccgcccacgccgcctggcgcccgcgaggtgcgcggctggatccgcgacggacacggccaccgcgggtccgacaagggtgacgaccgtcagcaaccgcggggactccttggcgatatgccgggtgctcaacggcatgtggcagaccagcggagggtggggccgcatagaccgcgacgccgcggttgacgccatgctcgcgcacgccgacgccggactctccaccttcgatatggctgaccagtatgggccagcagaggatttgtatggcatgttcatcaacagaattaggagggagcgcccacctgagtttcttgaagaagtcaaggggcttacaaagtgggtaccacccccggttaagatgacaagaagttatgttgaggataatatcaacagatccaggaagaggatggatgttactgcattggacatgttgcagttccactggtgggagtactcaaatccaggctacttggatgcgctaaagcacatcacagacctg

SEQ ID NO: 284265 - DNA, 537 bp, Zea mays
tttgggacagtaatcgctaaaaaggactgaacaagttaccacattagcgatctgcatcgctgtgtatttacagttttataactggctgttgaggactggagggtacatgctagcgcctgaataataggcattcaggtatatggttgcctcaacagtgcgctgagccgctagacccaaataggcaaaaatttagagctgtgcaaaattgggcacgagtatataggtctgtagtagcccagcagcagcatggccaactaagctcggtactcgtcaccacaatccccaataatatcgatcaaatttctgcccctcttcgacacttcagtgatgatgttcatgtcctcttcatccaattcaagtgagaatatggcgttggtgtctttgatgtgttcagagagtcccaatctcacaccgaccatggaacctgcaacagacgtctggttcagtatgtatttcacagcaaccgttgaaatagtaacaccgtgtttcagtgacaccttctttaaggtttgaagcaaagtctggaacaggctccag

SEQ ID NO: 284266 - DNA, 404 bp, Zea mays
aggccttcacaggcgacggcgtggcctccgccggatgatgctggttctgctgcgcgcggtgcatcggcgacgacgcccccgcgtgacgccgcggcgtcgagtacgagaagggcctcgccgtgtccatctccagcgtcttcaccggctcgcggtgctgctccatggacgcgcgcccgggcgccgccgccgcggccccgcgtacgctgctgcggctggtgtcgaacgacgcgcgcgacgccatccaccgctccgcccaccgcggctgcccgaccacgtccacgtccacgtccatgtccgccgacggcgccgctgggttcctccaaatctggtgtgagaaggcgtaggagagcgccctctcacgcttgagcgccgcgttttttctcgtctgcagcatagcctggatc

SEQ ID NO: 284267 - DNA, 563 bp, Zea mays
cagatgtttacagtttcggcatgctggtgttagagatggtgagtggaaggaggaattcagacccaggtatcgagaaccaaaatggggtgtatctaccagagtgggtctatgagagagtagtcactgggcaggacctcacacttagtaagaaaatagctgatcaggagaaagaaacagtgaggcagctggccattgttgcactctggtgcattcagtggaaccccaaaaacaggccatcaatgacaaaagtggttaacatgttgacaggaaggttacagaatttaccaataccacctaagccatatgcctagcctgaaagacatcctatgccataaaacatggaggatatacaccatgttttaggaagcatgaaaagcagttattcttactttcatgtgtgagcttagtaatgcttagcaatagattacacagtatttggatcattccactgtatcagacacatgaactgtgactattttaattttcgatatgtggtaacttaattagagacgtatcacattggatttgatttccagtgttgttcaattattgtgattttccgg

SEQ ID NO: 284268 - DNA, 430 bp, Zea mays
ttgtttttttttttttttttttttttttttttttttttttttttttttttttttttttttagtgaacacgcgcaatggcatgcacgttctctttttattcatcggtacaatacagtgagtacaggtgactcgactccacattaacaacacgtacaacaggccagtggccattaggcacaaaaacaaacatactcttttacacacgtacagtacagtagtcagtagtgtgatgaaacattgcattccttacacgtatacatgcatcgtgtgcaactgtgcatgcatcgtgtgcaagtgcaactgtgcatgcatgaagaaacaaagcatcgtgtgcaactgtgcatgcatgcatgccggccgcttatttatttatacgaagctcatgcggcctgcgtgtttatacgaacacgacagtacgacacgatcaagg

SEQ ID NO: 284269 - DNA, 395 bp, Zea mays
ctcgagattggctccagttcctcttcccctcagcaccaccagtccccctctgctcctcctttcagtctcagcccaatgacaaagttctaagcagagtagtgcacgggcagcacggcaacggcatagcacctccctccaccgatcatccagttccgcttgcgtaacgacttcccttcgcaagcaagcttcccgttcagcccagccgcaggccgccgtgctcgcgcgaccatggcgttgctctccgccacttcgcccgccaaggcgcacctctcggcgctcctctcctgccacgacgagccgcagcagcaccaacacgcgctcccggtcccgcacccgcgctgcttcggcggcggcaaggccaggcggcgcgcgcggggcaggtgcgcggcgtcaat

SEQ ID NO: 284270 - DNA, 398 bp, Zea mays
gccaggcaacttcgagcgccactggggcctcttctactacgacggcacgcccaagtacccgctcagcctaggcggcaacgcctcctcgctgatgaggccggccaggggcgtcaagtacctggacaagaagtggtgcgtgctcaagacgtcggccagcctcgccgaccagaaggtgggcgacagcgtcggctacgcctgcggcctcgccgactgcaccagcctcggctacaagacctcctgcgccggcctcgacgccaagggcaacgtctcctacgcctacaacatgtactaccagaccatggaccaggacgaccgcgcctgcgacttcaacggcctcgccaccaccacctccgtcgacccgtccgccgggacatgccgcttcatcatcgagatcgacg

SEQ ID NO: 284271 - DNA, 283 bp, Zea mays
gctgcaaattgctcacgatgtttctcatgggattgagtacctgcatgaaggggtacgttaacatttgataactattaaggttgcagactttggtctatcaaaggaggaagtgtatgatggaaggaagtctggccttaagggcacctatggctatatggatcctgattacatgtccacaaataagctaacaaagaagagcgacgtgtgtagctgcggcataatactttgtggactgagaactgccataaatccacaacaaggtctgatggagtacattaatctg

SEQ ID NO: 284272 - DNA, 476 bp, Zea mays
ataaagtctttttttatcaaatgctacagctactactgttgatttttttacaacgatttcaaacctcaggtcagtacagaactccaattaaggagagctctcattgcagccaagacatctttcaacgatctagctacctgatgctttcatcaaacagctacaacatcgccgaaccaagtccaaatctaactctataaagcaacctacatactagaacaagctcacgagttcatgatgcccttatcggcgtaagttctttgatgctagtgaggtcactaagctccacgtgctggtagtctatcctcctaaggacggtcctggtctcactcctcggcagagttatcgcatcatgctttatcagctggtgctgtctgagtcttgagatggcctgtgtgacctctgatatccaggggcgcttcctcggattcttgttaacgcatcggtaggcaacatcagcaagcatccgaacctcttca

SEQ ID NO: 284273 - DNA, 391 bp, Zea mays
tatttttttttttttttcaacatcaataagacatcctatcttgattcgaacaagggcaatggcatacacccaacacatccatctctgaatcatcaggtttatcgtttatgttcatcagcctaacatgttaatgtacaacacggagcctaagacattgcctgagtaacagctagaaaagatgaactgtaaattaatcctctatggaaaatcgaaactctcgacatgtgccaaaatgtccacgcatttgaaccggtgcatgacctcaggtctgtgtctttttgtatctaaactttgtactcatgaacacgcatccacttcgtcgatgaccatttgttgccttttataactgggcatccaccatgcaggcttgtgggatctagggacccatcag

SEQ ID NO: 284274 - DNA, 548 bp, Zea mays
caagctcaaaaccctacagtgtggccaaagatagtatgatggatgggaattacagccttcctgacaacgttgcgattgtcactttgcagaatcttgatgatggtaccacactactccgcttggcccatcttttccaagctggcgaggacccgagatattcagaggtagcagaggttgatctgaaaaaggtctttggaaagagaactatcaaggaactgaccgagactaacctctccgcaaatcaaaagaagtcagagatgaagcagctcaactggagagttattgaggacgctgaaagtggtcctgccccggtaaaaggtggcccagttgattgtcgtgctctggtcgttgcgctgggacccatggagatacgcaccttcttgctgaaattttaatcgcatttaccgtgcttgtaattgtaaagaaaaaacaatgataaatggagaacttgctatcgttatttccttttgtaaaaaaaagatgaaatacccaaatagaacgttaaatttgcgcaaggtatgtacaatctacatcatgtgttttctatt

SEQ ID NO: 284275 - DNA, 416 bp, Zea mays
ggagttggttctataaaagtggttagcctataactttcatcagaaacacagtgcaacgcaaagtaagtacaaatgttcagacaaagattttcaccaggcagtggaagtcagacaagctacatgaacaaaggtaacagaagctacaaacaaagcgaaatcacagatacatgggcacgggtaatggaagttcagcaaacttcacatgccctcgggtagaaatcccacctagcacccagccaactggcgaatgctacaacctttacattctgaatccaagaggacttcacaatacatcaacgaggtcaggtatccttgtgctcctcagcggcgtcatgaatcatgatactcggcctcctcctcctccggcacggggtgcagcacatcctcagcaccaaccgcggcgggcaaaccacctg

SEQ ID NO: 284276 - DNA, 522 bp, Zea mays
attattattatatacattagccagaagaaatgtatttttcccataagtataggaagaacataataataataagcgatgctatacatctcttactttattccctaatgatatagggcagttccgcatatgaaatgaccacctagatctacaggaaactgtaagccaaatcaggattagctgttttatttctttacaaaaaactgaaaaattctcataacatgatgctattttattcaccaaagtaaacaagctcgcttactaatacctactgatcaaaacaaaatcatcatcgtcgagaacacgtgcctcttgctgtcccacaaagtttccccgtccaatagcttcaactatccggacaaactcaatcctcttctcaagaggaagaggaacatacggcaacctgaaaacaggccttgccaccccaagctgagccagagcagtgttgagtgcgatgggattcggcagacagaacaaccatctcgtcagaggcaacagcttctcatttagcaacgcattctcccc

SEQ ID NO: 284277 - DNA, 491 bp, Zea mays
gctgatgtaaccccagtgttcaaccagatattgatggatgaacaagaagaatacgatggcccccctcaaaaagaaattcctgctttaattgtctggacccttggaggaaagaatgtatatgttgaaggatcatgggataactggaaatcaagaaaagccatgcaaaaatctgggaaagatcattctcttttgctggtactcccagcaggagtttaccgatacagatttgttgtagatggagaaaggagatgtcttcctgatctcccctgtgaaatcgatgcaatgggcaatgcggttaaccttcttgatgttaatgattatgtccctgaaagtgttgagagcgtggcagagtttgagccacctccttctccagactctagctacagtttccaggcacctgaggacaaggacttcgccaaggagcctcctgttcttccatctcaactccatctcggtgttcttaactcacagaactcggaagaaagctgcgc

SEQ ID NO: 284278 - DNA, 406 bp, Zea mays
gcgacgatcgccggctcgccgccatgaagcacctccacctctcatctcctcttcctctcctcctccaccgcccctccaagccccatctcctccaccatagccgccgccgcgcctccatccgcaacgccgcatccggcggcggctccggcgaacccacccccgccgcggaaacggcctcaggtacctctccgccagccgctgccaagcccgccggcgtcaaggaccgcctcaaggcgaggaaccaggcccgccgggtccggctggactccccgccgccggaggtggtggtggtgccgaagaagaagcccgcccccgccgcgtcgtcgtctcctgcgccgaagaagaaggtcgggcggaaggggtgggaggagatgagcctgggcgagaaggccgtggacctctacgt

SEQ ID NO: 284279 - DNA, 911 bp, Zea mays
cactcccagggtatactccatagagacctgaaatcagagaacatacttctgggagaagatatgtcagtcaaagtcgcagatttcgggatttcatgcttggaatcacagtgtggaagtggcaaggggtttacaggaacctacaggtggatggctccggagatgatcaaagaggaacatcatactaggaaagtggacgtgtacagctttggaatcgtcatgtgggagatcttgactgctttggtcccgttcagcgacatgactccagagcaggctgctgttgctgttgccctgaagaatgcaaggccgccactgcctgcttcatgccctgtggcaataagccacctgatcatgcagtgctgggcgaccaaccctgacaaaagacctcagtttgatgacatcgtggcgatcctcgagagctacaaggaagcccttgatgaggacccgtcggtcttcttgtcgtatataccacctccaccggaccacggccaccaccaccatcatcagagccttctccggtgcttccctcgctccatgcgaaggtctgcatctctgaaagtatgatcaggccgggatgttgcctctgctcatcgatgctgtgtacaatatgcaccccctttcgactttctttgttttctatgcgcgcgtcggccctctattatgcggcattagcatgctatatgagctagtttatgctctcattttctccttgttggttaattatttccgtcattgatgccttgagtaatgtagagatgacaggcaggcatgcagcttccggttattatctatggatgccatttgcttttggtgatgggaaacatgaaagagccccagtaaatgtaatataattaagctctccattcaattgtgtttgtgaatataagcataaaaaaaaaaaaaaaagggcggcc

SEQ ID NO: 284280 - DNA, 586 bp, Zea mays
ggagagtgtacaggggagtgctcccgaaatccaagcgggaggttgccgtcaagaaggtgtctcacgaatcgaggcagggcataaaggagttcgtcgctgaggtggtcagcatcggccgtctccgacaccggaacatcgtccagttgctcggctactgccggcggaaaggcgagcttctcctggtgtacgactacatgcccaacggcagccttgacaagtacctctacggcaaggacgacaaggccacggcgacgctggattgggcgcagaggttccggatcatcaaaggcgtggcgtcagggttgctgtacatccacgaggactgggagcaggtggtcatccaccgagacatcaaggccagcaacgtcttgctcgacagcgacatgaacggacggctgggggactttggtctcgcgaggctgtacgaccatggagccgacccgcaaacaacccatgtcgttggcaccatggggtacctcgcgccagagctggcgcggtcagggcaagcgtcccctctcaccgacgtgttcgccttcggggcattcatcctcgaagtcgtctgtggccggagacccgtggagcagag

SEQ ID NO: 284281 - DNA, 498 bp, Zea mays
gtaaaattggcaactctacagcatagcatactactggtgcgtactggcgccatccaatgtacatgctccagcaagacagcgcgctcgtcatctcccatcagagaggccagtcatagtccctatactcatcgccgtggacgacaacggctgcgtcgtcgacgccgacaggataaaggaatcgaacccttcgcgccgcatgagggccagcatgctaaagctgaggtgcgacggcgtgagctcagggaagggcatgtcgccgtcgagatactgcatgacctgccgcatgctgggcctcgcagcgggcaacgggtgcgagcacagcagccctagcttcaacgccagcatggcctcctcctcgtcgcaactccccttgagcttcgcgtcgatcacgtcggcgagggttccgttctgccagtgctcgagcacccagtccaccagcatgagccggctatcggtcatgctctgctccacgggtctccggccacagacgacttcgag

SEQ ID NO: 284282 - DNA, 413 bp, Zea mays
aagagcagacccatcggatgattgaacgtattgagttcagttcttcatgtgtaacttgtaataagggacactagaacgacacacagacacacaacaatgtatcgatcggcgtcttgtgccatggctgcctgcggacgttcacaggtccaagaacccggtctgccggagcacggcgttgcggacgctgcggaggtcgcggcccttgagcgtgcgcccggcgccctccagcacggacgacgaccgcgcgtggcgccgcgccgcgaccacgtgcggtggcaccacctcctcgccgtcctcctcgtcctcgtccgccctcctgccgcctggccacggcgccggcacgcgcaccggcgccgactgcctcggcgcggcgctcggcgccatcgccctccccggcacgggcacgggcaccc

SEQ ID NO: 284283 - DNA, 479 bp, Zea mays
tgaaaacttcagttggtcttgtatatctccttgcctgtctcctggaacctttcatgccttccttttcaaaagaagtgctacgtcaattaaacctgtccccagaagaaaatatttctttcagtgaagaaaatggcgaaagtgtgaaggcaaaacccccttgggatcttgtaccagcagggcacaaaatagggaggcctgtacctctgtttgaggaattgaaagatgaaaaggtgagtgagtatagggaaaaatatgcgggcagtcaagctgagaggaactcgaaagcagtggcttgacgctgaagccacaaaaattgctaaccaaacccaaagcatagcattatctggaggctcaaaaaaggaacaaaagaaacagtctggtaactcaaaatcaaaggtggctgaggcagaattatccgttgcaaagttggagattcgagtggggcttatcagaaaagcggagaagcatccagacgccga

SEQ ID NO: 284284 - DNA, 457 bp, Zea mays
tattttttttttttttacattccatggcaacccatctccaccacagaattaattaaacaccgtcgttttctctattgccaattttcaatacaagaaaattcagatccaaggagaaaatttacaacaaaaaaccaatcagctagtacttcagtaacatcagacggcagttaggccacggcgtcacgctgccttcaggcatcgcgtcatctagcggatttccccattcgctattgtctgtaccatgcagactccagccgaagtcatgaaggggacatcttggtagcaggccacaaggtcgccattgctacgcaggtcagccgctagcttctcccacaccttgctcttgccactgagagaagcctcggtctcaccggagtgcccggcaaaggtcaccctctcccccacggcagcatccgctggtggctcgaccagctcaaccctagtatggtcctcatta

SEQ ID NO: 284285 - DNA, 523 bp, Zea mays
ctggcccgtcgccgccgacgagaacaacaagcccgtgccgttcgacatggaaggcgtctggcacgccatggaggagtgccaccgcatcggccttgctaggtccgtcggcgtcagcaacttctctgcggccaagatgtcccggctgctcgccttcgccgccgtaccgccggctgtgaaccaggtggaggtgaacgtcggctggcgtcaagagaaggtcagggaggcctgcgccaagaacggcgtcgtcgtcaccgccttctcgccgctgggcgcgatcggcacggcgtggggatccaacgccgtcatggaaagcggcgcgctggaggacatcgccgccaggagaggcaagaccattgctcaggtagcgttgaggtggcttcacgagcaaggggtgtgctttgtggcgaggagctttaacaaggagaggttgaagcaaaacatggagcttttcgattgggagttgagcgtcgatgacaaggagaagatcatggggattccacagaggagagcatgccgtgcagag

SEQ ID NO: 284286 - DNA, 412 bp, Zea mays
  unsure (1)..(412): unsure at all n locations
ataaatgntaagaaaaagagcacgactttaaccgtagtgagtacagagtagcgacaggtgagtaggcgagtagcctaacattgttgagcaaaaaaatgttattttaaaaacaactccgacctgccggattcgaaccagcgacctaaggatttcatctgcaatccactacaggcctccgctctaccaactgagctaagggcggtttttaacacttccttggccttaaaatatttataaccgcgacatacaccttaaacactcatactgcaactagggtaacacacccaaaaaaaagtgggaaaccttgccctcttatttcttctgcatctttgctctagatcgacggctggctcccttgggtgcctcgatatggggtagactatcttggagttctttagtaatctctgcaaaa

SEQ ID NO: 284287 - DNA, 286 bp, Zea mays
acgcggggggaattttaattctccattccttggaacaagagctgattgagtatttagggacatggaatcaccctgaacaggcaagggttatgccctgcaggcagctgaagctggttttttccaaaaaaaaaaaaaggggggggggggcaaaacaaggggggtttggaaaagaaaagaaaaaaaagatgggatctacgggtgggtcatggggcaaccccagcccttgcttatgcaagcgggaaccacagcagctttttggccttgcccacgtacccacccttgggga

SEQ ID NO: 284288 - DNA, 418 bp, Zea mays
accgggcagcggcaatggagggacagccgctccatctcctcatcgcccagttccaccacccttgcctacgcggtctcatccccaactaccctacccactacctgcccacctcccgcctccgactccgcgtacagcgtcgcaagccgaagcagctcgccgcagtgccttcgaggcgtccatcgggcagccaagccgacgcgcctggcctggtgccggtgcctaacacggtggcggcgctggtgctccagctgaccgtgtgctcgctcctttttctcttccccaaccgggcccgagccctcgcgctcccgccccctccgggggccgctgcggtggttgaggcgacgcaggaggaggaggaggaggaccaggagtgggaggctgcgctgcagaagtggaagaccaagacctacgcgctctc

SEQ ID NO: 284289 - DNA, 364 bp, Zea mays
aaaaattaaagaaggctggtgcctttccttcctgggcgggctaaatctgcccatcctctgagtgtattgctacaatgaaacatacggaacgaagagttgccccccgaagtaaaaagaaaaaaaaaacttggtcaatcacagtacaggggctctaagatcttcttttgaagtcaagtacagctgacatcttctgcaacatgttcccaaacaaaccaagacgaggtctctgcacccgagacatcagccactggtagtcctccagcgccttacctgacaggggttccagaaactcgcacctctccaggatctcgggcggaggcactcccctgacaaggttcgtgtccagcttcggcttcctcttgtt

SEQ ID NO: 284290 - DNA, 506 bp, Zea mays
cgttcttgcagtagtccacttgcccaccacttctattgtctggtctgctaatgctaactctccagtttctcattcagacaactttgtgtttgacaaggatggcaatgcctacctgcagtctggaggttccacggtgtggactgccaatatctccggcaagggggccacctctatgcagctgctagactcgggcaatcttgtagtgtttggcaaggacggctcttctcctctgtggcagagtttcagccatccaacagacacacttctgtctggacaaagcttcatcgaggggatgagtttgttgagccattccaatgcacagaacatgacctatacacttgagatcaaatctggggacatgttgttgtatgcaggctttcagttgccccaaccgtactggtccgctctgcaggataacagggtgatcatcgacaagaatggcaacaataacatatactctgcaaacctgagttcaggttcctggtcgttttatgatcaatcagggc

SEQ ID NO: 284291 - DNA, 311 bp, Zea mays
gggccttccccaaaaattggacattatcgattcgccatgctaactaaagcagagcaatggacataaccatatcacctgggcccggagagccgcacagcagaaagcaaggcatcactattggagtctgacatcccagacgacgggccctcttcgctgctagatttgaaggcattcgcgtacagccggtatccaatatgcgaagacattggtggctggggcacgtcgcagaccccttccagcatctggacaaccttggacatggatggcctctgatagaagtcctcctggatgcaccacaaggggaccttgat

SEQ ID NO: 284292 - DNA, 555 bp, Zea mays
atttcaagtggagttagcacatggctgtatagtggtgacattgatgccgtttgcccagtaacttcaacgctgtattcattagacatcctggggctgaagataaattcatcatggcgggcatggtattctgatgatggtgaggttggaggctatgttgttgagtacaaaggtctgatatttgcaacagtccggggagctggacatatggttcctacctaccaaccccaaagagcgctcagcctgttctcggcattcctgaatggcaaactgcctcctgagtgattgaaactttacaagcatctactcttttgtggtttctaacgatgaaagatagactattgtttgtcagaaaaaaaaacagaagcatagtgatagtgtacttgcttctgttgagattattacaaagaaccaacattgtgttctgaatcatccaatttctacaaaaagtccaacctaaacagttctgatgaaatacttgtatcgagatggttgcattttttgtggcagatacagacttcttataactcatgattcttagacgtttcgcgtttcact

SEQ ID NO: 284293 - DNA, 748 bp, Zea mays
tttacaagtaactggaaagacaaaataaggtgcagccacaagggtggctcaagatatgaggctgaagttcgacttcgacatggaaagtactattacaaatttatagttgggggccaatggaggcattcgacttcgttgcctacagaaacagatgaacatgggaatgtcaacaatgtgatcagagttggcgacattgctcggattcgtcctgctccaagccagctacatataaaagacccatctgttgttaaggtcatagaaagggcgctaactgaggacgagcggtttttattggcgtttgcagcacgccgcatggcatttgcaatctgcccaatcagactgtccccaaagcagtagacgtgtcggtcgtccttctccgagcggaaccaggcgtcatcgaggatcagcgattttcgaagctacagaaaactcatgtatgtaacaacagaggggcttcttactgtatgtacccgttcacacaaaacctggaacgtggctaagtgtctcagcaatgggcacaatgtacacctctttgtaattccatggactgtatacctgaaatgaactccattttagactgaccctcttgatataatcggaggccggctcgcaaatggccagtgaacaggctctgcaatctacagctctcatgggatgggagagatgactactttgccggttgccctcccggtctcaaggtaggagaacgcctccacaacctgcgagaaggagaagggcccctccgggt

SEQ ID NO: 284294 - DNA, 394 bp, Zea mays
atcaacccaaaccctagcatcccctttgctcgagggagacgaagatggcgccgaagaggaagacgagtggcgacggcgtggtagaatcgccagctgacgagttcgcaaagccggcggacgacacgaagggatcgccagccgagttcgccaaaccggtttaccttgtggcggcgcgcgacgacgacccggcggcctactccgttctggagatcgacgccgctgccggtggcgacgagccgccgcgcatccgcaccgttgccggtctgacgggcttcatctccgagcctggcatgtccttcgtcgcggcgcattcgaagcacggctcctggattgtcggcgtcggcggtgggttaagagcgggcaccatcatcttcgacccgaggacattgaagac

SEQ ID NO: 284295 - DNA, 350 bp, Zea mays
cgcaattcttttttttcccgttcaccggagaaagaatggcgctgccgacagctaacccgggcttccgtctcggctgccaggagtctcccgcgatgggattgaggtcggcgccgcggttggcactgcgtcgtcccggcgcggtctccgggcacaggagtaggactggcagagggaagtttccagtggcatccacaagtctagatgactatcttccaatgcgaacaccgaagtgaaaaatcggacattaactggtgatatcacaagcctcagactaatcactgcagtgaaaaccccttatttgccagatggaagattcgatctggaagcatatgattctttgataaacatgc

SEQ ID NO: 284296 - DNA, 485 bp, Zea mays
aacaaacaactgagtctgaataactggaattcaaaattctgccgatacaatacaaaagtagcatctggcacactatataaaaaaaacatcgtagtagctagcagccgttcaatatgctaaggtatgctcgtcggcctacagtgtccaggaaagccaaggaataactgcagggaattgggctatccacgaaccggctactgcaagggagcatcaggatccaatcttttctggattgcagctgcagcctgaaaattgcccaacctgtattggtagttcatttcttcgcgtagacgggcctgctccttcatgtcttgagccagtccagcttgcatagagcgttttaaagcttccacttcttcctcctttcggcgctcacgctccttcaacaattctagtcgtcgctgttcctcatcattaaatacagtgcgttctgtcacaatcatttttaaacccttctttttctctttctccattgctttgtgatg

SEQ ID NO: 284297 - DNA, 446 bp, Zea mays
tggattgtactgtaagacgttggagaaatggcaatgctatagaggtttgggaagcgcacaaggttgcagtgcaaactgttctaaagctgcccacaggggaactcttcactggttcaagtgattccactattaagctatggaaaggaaggacttgcctacagactttctcaggacatgcagacactgttagatttttagcctcaatgccaggtctaggaattctttccgcctcacacgacagcactgtcaagttatgggcgttgtcaggtcagcccctgctggacatgatcggacattcttctcttgtatattctgtggatgcacattcttcaggtctaattgctagtggtagtgaggatcgctctttgaagatatggaaagatggtgtctgcgttcaaagcattgaacacccaggatgtatatgggatgctaagttcttgggaaat

SEQ ID NO: 284298 - DNA, 420 bp, Zea mays
ggaacacgtcaaaattggcaggtggattgatgagtttccctgcgctcggtttggggggaagcaacatcacatatgtacaaggtcagtttggacgccgcagcatccatccaggaacgagacatcagtccgcgagccagtccaggttgtagcactcctcggccacctgcacgcggaggtcagggatgacctgctcggcctcgcgccacagcagcgccgtctcctcgtcgcacacgacgtggccgagggacttgagcgaggacgacgacctggggaggctcctgaggcgcgagcactcgcgcatgtcgatcttctccaggctcgtcaggtggccgagctcctcggggaggtccgtcaggttgatgcactgcgagatgtccaggtacttgagccgcttcaggctgcacaccgacgccggcagcc

SEQ ID NO: 284299 - DNA, 987 bp, Zea mays
cgtggacgtgcgccgcgagatccagattatgcaccacctggctggccaccggaacctcgctcgccagcaggggcgcgtacgaggcccagctgtgcgcccacatcgttatggagttctgcgcgggcggggaggctcttcgaccggtctcatactagcgggggcattacagcgaagcgcaaggccgcggagctcacgcgcattatcgttggggtcgtcgaggcttgccactcgctcggggtaatgcacagggatctcaagccagagaacttcctgctctcgaacaaggatgacgatatgtcgctcaaggccatcgacttcggcctctccgtgttcttcaagcctggtcaaatttttaccgatgttgtgggaagcccttactatgtagctccagaagtgctgcgcaaacgatatggaccagaagctgatgtgtggacagctggagttattctttacatacttctatgtggtgtaccgccattttgggcagagacacagcaaggaattttcgatgctgttctgaaaggtgtaattgattttgatttggatccctggcctgtgatctctgagagtgcgaaggatcttataagaagaatgctgaatcctatcccatcagagcgcttaacagcacatgaagttctatgtcatccatggatttgtgaccatggagttgctcctgatcgtcctcttgatccagctgtcctgtcacgcatcaagcagttctcagcgatgaataagttaaagaagatggccttgcaggtgattgctgagagcctttcggaggaggagattgcagggctgaaggaaatgttcatggcaatggatacagataatagcggtgcaattacatatgatgaactgaaggaaggattgagaaagtatggctccacattaaaggatactgaaattcgtgatctcatggaggcggcggatatagacaacagcgggaccattgattatatagaattcattgctgctacattgcacctc

SEQ ID NO: 284300 - DNA, 431 bp, Zea mays
atgcattagccagcttgaaattcctatttatatcaggatgtcgaatatacacgtttacacgtagagaagtttttttttccgggatggaccagctacatacgaaaaccttgcaattaatggaatggcaaccgggaacgtttggtttcctcgccaagacgccaagcgcttgcctcgcctcgcctgtctggacaaaatccagactgtttggattggattctttaccatctgcctcgtttcccgtgccgtaaagatttttccatgcttgcccaggtatcaggtgagccgcttcagcttgcctcagctggcgagggtactcttgcccagctaggttaggtgaggcaaggccacaagaaaatcaaacacgcccgacgtctacgaacatttgcaatccaactaacgcataacaattcacacttctcatcgaggaaaga

SEQ ID NO: 284301 - DNA, 484 bp, Zea mays
  unsure (1)..(484): unsure at all n locations
gtggaatttcatttgtcggtaaaccgattgtttagtttgttttgtccttaaacacaccttgtatcacaaagatgggcaagggggaccgttcttcgtggaaggccacttattttatgaaattggcccaatatttcactgattatccaaaatgttttttggtatgtgtggataatgtcggctctaagcaaatgcaggaagttcgtcgctctcttcgtggtgatgctcttattctgatgggtaaaaataccatgatgcgtaaagctatcaagggagctttggaaaataatcctgctttggaaaaaattttgccacatattcgcggcaatgttggattcgtttttactcgggaagatttggtagaaatccgcgatcgtattttggacaataaggttcaagctccagctcgtgcaggtgctattgctcctttggatgtaaaaattcaaccacaaaactccggtcttggtccagacnccccttctttctt

SEQ ID NO: 284302 - DNA, 399 bp, Zea mays
tcttcgttgtcaacgtcggtgacgcgctcgagatcgttagcaacggagcgttcaggagtgtcgagcacagggccgtgatacacccgaccaaggagcggatttcggcggcgctgttccacttcccggaccaggatcggatgcttggtcctctgccggagctggtgaaggaaggcgacacagtgcggtacgcaacgacgacttaccaagagttcatgaagcgattcttcgctgcaaagctcgatggaaagaagctcatagagagattcaagctacagtagtagctacgacctctcagctcgaacaaaaaataaattcacttgtaactattaataatggccagttattgaacggtttgcttgtctaaaatgttaacgcgcgcaacctcgggtatgcattact

SEQ ID NO: 284303 - DNA, 732 bp, Zea mays
attgaccaggaactgtcacggttcattgcagctgggaagctgcactgcaagattgataaggttgctggtgttctggagaccaaccgacctgataactccgatgctgaccataaggacctcatgaaggatctctacgttgctggtgtcagagaaatcgaaaccaccaccaagggcaagaagaagaacgtcctcatcgtctacgttccttatgcctctcttcgtctcctctacagagttcaccccaagctcgtccctgaactcgaaaagagactcaagaccactgtcctcgtcgttgccaagagaactatccaatccaagtggatcaagagccacagatctcaacaaagacccagaaacagaactttgacctctgtctatgatgccgttcttgaagatttgtgccaacccgctgctatcatcggcagaagatacagacacaagctcgatggctccgtcatccaaaagatctatttggatcaacacgaagaacccgctgttagagaaaaggttgacagcatcgtcagcgtctacaagaagttgaccaccagagacatccaaatcgaattcaagcccgaatggcacttctacactttgaagaagaagtaaggaactcaaagattacctgaagagagctttataaatgtatgttatgaccctttgaaaaaagttgtttgtatgggtgtgaaattatgtcaacttgcatagataaaacaataagactgaatcgtggat

SEQ ID NO: 284304 - DNA, 466 bp, Zea mays
aaattagggttttcctattaatttatatcgtaaggacggaacataaatgtcaaactacaagtctaagctcttcaaaaccatcgctgccaagccttctgccattgaagaatctgtcgctcaagctctcttcgaagttgaaaactccgttgctgaccttaaggacctcttgaaggatctctacgttgctggtgtcagagaaatcgaaaccaccaccaagggcaagaagaagaacgtcctcatcgtctacgttccttatgcctctcttcgtctcctctacagagttcaccccaagctcgtccctgaactcgaaaagagactcaagaccactgtcctcgtcgttgccaagagaactatccaatccaagtggatcaagagccacagatctcaacaaagaccccgaaacagaactttgacctctgtctatgatgccgttcttgaagatttgtgccacccgctgctatcatcg

SEQ ID NO: 284305 - DNA, 630 bp, Zea mays
gaggagttctttgtaaaaaacttcatggaggtattttatatgatatcacattatcacactctcaataaaagtatacaaccagtaccttagcttatggcaaccttgcaatcttaatagtctgatacattaagagcacatagacacaagtgcattttactactactactactactcttctattgtatcgagttcagagattgtagagtaagaactgtcaccctcttcatcacaaaagtatggccttggaggcatttggatgccatcgacaccagcttcaagcatctctatgacttcgctcatcgtcggccgatcttgcggcttcatctggatgcaccaaagcccaatgatacatagcttcttctctaactcgtgcatatcaacaccttcactgatcctgttcgcatcaccctggctcagctgcctgtacaccaaggatgggtagtatgcttgactggagcttcctgcatgaggatctgcgtttcttcgcccgcccgtcatctccaatagtagcatcccaaagctgtacacatcggatttgctagagatgacaccaaagcttcgagataccatctctggagctatatagccaatcgttccccgcatagcgctcagtggcaccggacgcgtggg

SEQ ID NO: 284306 - DNA, 652 bp, Zea mays
  unsure (1)..(652): unsure at all n locations
ttgttattttttttttttttttttttttgttttccaactaacgcataacaattcacacttctgagcgaggaaagagcaggagttagagttaccctaccctgaattcctgaaacaaccctacaatgcttcaacagatatagcacccaaaaaatgtgggcagaatttcgggtaggaaaggattagaagaagctttccgcagcccgtaccaggcgttctctcatactgcaacaaatttcttggatgctcagacttcagagggcaccagcaggcgtatccctcatgcttatgttcaagctgtttctcattgttctcctcccaactcccatattgccctttgtcatcatggcaacaaattccccgtaatcaatgcgcccatcattatcctggtcagcttctttaatcacatcatcaagaaaagcagctggcatgttatgctctttgcacgcttgttgaagctcatccacagtaatgtaaccactgccatctttgtcaaaatacgaaaatgctgcaactagatgttcctcacgttccagtttattgaggtgcaatgtagcagcaatgaattctatataatcaatggtcccactgttgtctatatccgccgcctccatgagatcacgaatttcacnccacgcgtccgcggacgcgtggg

SEQ ID NO: 284307 - DNA, 560 bp, Zea mays
ttcggctcgagcttggtcgcattgagtatctgctttctgataagactggcacattaacacagaatgagatggaactgaagaagattcatgttggaaccgtttcgtatgccaatgaagccatggaggaagttgcgtcatatatcaaacaaggcttcgctatagctgacagcactcgtcagtctatgattacgccatcaacagttttcggtgctcaagttggtagcggtgctgccaccagaacgaggagagaaattggtactcgcgtaaaggatttgttgttagcattggctttgtgtcacaatgtcactccaaccacagacgaggaagacggccgcagagttatcaactatcaggcttcatctcctgatgagattgctattgtcaggtatactgaggaggtcggacttcgcgtggcttaccgtgaccgaaaaaccatcttgcttgagtcaacaactacaaatcaagttgtcgtccgtgctcagatcctagaagtatttccgttcacatcggagagcaaacgcatgggaatcatcgtccaattcgaccatagcacaaccggt

SEQ ID NO: 284308 - DNA, 484 bp, Zea mays
gcaaaaacaagctccgaagcttgttgttgggatattgcttctcggtgcaggggcattcttcttaaatagggctgagaagagtcaactatttcagcagcaaggcattgccacaagtattggaaaggtaaccgccacaacaaagcccatagttcttgagatacggcgaattccacagagagtaaagaagctaatagagctcttacctcatcaagaggtaaatgaggaagaagcttcacttttcgacatactatacttgcttctggccagtgttatttttgtaccattatttcagaaaatccctggaggcagtcctgttcttggatatcttgctgctggtgtcctcattggtccatatgggctgtccatcatccgtaatgtgcatgagacaaaggcaattgcggaatttggagttgtgttcttactatttaacattggacttgagctttctgtggaaaggctaagttcgatgaagaagtatgtcttc

SEQ ID NO: 284309 - DNA, 419 bp, Zea mays
gcaaaaaaaacacttataaagtaagatttaagataagagataagagtgagtaagagacattaacacaactcttgcacaagccttgaagatagtaacacaactcctacacaagcatctgttgcttcactttgccgtattacttcctccgttcttttttatttgtcatgttttagttcaaaaataaactagcggacggcaaatattcgagaatggaggtagtattgcatcccttggtagttggtatgcttggtgacactcttgatcactttgccgacttccagcaacaaaacatgaagtataattcccatagcagctacaacgcaactcgtctggtatacacgaggctggacatcttacaggtccagctcgtctggtattaagatctcattgtcagagtacactagtttcatttcatttct

SEQ ID NO: 284310 - DNA, 439 bp, Zea mays
gccgccagcagaacgccgtcatggctccatcggctgcacgccaaagggggtctatccttcccctcccacctcaacattgacgacctcctctacgggggccgacaggcccaaactccccctccccctccctcgcccctgccaccttcttcttccaatgatcacaacgacctcgtcgttgttgtcagggagtcgcctacaaaggccgccgctaagcccaagccgccggcggcggctcagcgtccgccccgcaacccttcgcgaccaaaccctagctctagcaattcctcgcagccgccgccgcaaccacagcttcagctcgttgccgtgatctccgatgtcttcgcggtcccgttctccgccccgccgggccccccggcccccaaagccttccgcaagcagtcccggccccgcccgagaactgacgaggaccagccgatct

SEQ ID NO: 284311 - DNA, 836 bp, Zea mays
aaaattttggtctatgaatacttgccaaacaaaagcttggacttctttatctttgatgaaaacaggaaatcgttactggattggaaaaagcgtctagcgataattgaaggaatagcagaaggacttctctacctgcataagcactcccgtttgcgtgtcattcatcgagatcttaaaccaagtaacattctcctggacagcgaaatgaatcctaaaatttcagactttgggttagcaaaaatatttagctcaaataacatcgaaggaagcactacaaggagagtggttggtacatatggttatatggctcccgagtatgcctctgagggcatcttctctatcaaatctgacgtattcagctttggcgttctcattcttgagatccttagcggaaaaaggaattccggcaaccacgattatggagatttcatcaatattctcggatatgcatggcaattgtatgaagaggcaagatggatggatctcgttgatgcctcattggtaccaatggatcactcatctgaaatcatgaggtgcatgaacattgcattgctgtgtgtacaagagaatgccgctgatcgaccagccatgttggatgttgttgcgatgctaagcaacaaggctaagaccctggctcagccgaaccacccagcgtatttcaatgtacgggtaggaaacgaagaggagtccactgctgctacggcgtcaggcagtatcaatgagatgaccgtatctgtcacaactggtagataatttttgtttgtacaaagtggttactgttgagcttatatatataattatccttttgataatgtgcaatgcagacatatttcatt

SEQ ID NO: 284312 - DNA, 564 bp, Zea mays
ttttatgcatcataacattagggggatggaattggaaaactaatcatatattaacacaggcaactccagtagaactggggctctactgagattggcaaacaggtaaattgaaaatgtcaagcgaggtaagataatgtctcatctcatcatagttttgggccccaagcagcccacccaatgtgcatgtcctcagctaaacaggttagtaccagatcagagcctacaggaaacacttcctctactaatccaagtaagcttacaaacgacatcaaggcattaaaacaaaacccgacgagaatgggggagaaattgatgtgtgacgacaaaggaatgtagccatttaggtagcttctgaaatagttgcgccttagttggagaactcacttgatgggttgctatgtacagatgttctcaaaataaataaaatgtgtccgatgctcattgaaactgtcacatatcattggcagtatatggacaggtcaatctgtgggggtattgtcttaatttccgttccaagttcttgctcaatcctatataagttgaaacggtctttataagtgatca

SEQ ID NO: 284313 - DNA, 869 bp, Zea mays
tggaccggccatcaccacccaacgacaatcaagatggtcaatctgcgaactcagaagcgcctggcctcagcggtcatcggctgtggcaagcgcaagatctggctcgaccccaacgagcagagcgagatctccaacgccaactctcgccagaccatccgaaagcttatctccgatggcctcatcattcgaaagcccgtcacccagcactcacgatcgcgcgctcgcgagctgaacctcgcccgacgagagggccgacaccgtggctatggtaagcgtaagggtaccgccgatgcccgtatgcctagccaggtcctctggatgcgccgcctccgagtcctccgccgtctcttggtcaagtaccgtgccagtggcaagatcgataagcacctctaccacgagctgtaccatagcagcaagggtaacgctttcaagcacaagcgtgccctcgtcgagcacattcaccgtgccaaggctgagaaggcccgtgagactgcccttcaggaggagatggatgccaagcgtgcgaagaacaaggctgcccgcgagcgcaagcaggagcgtgcggtggcgaagcgaaatgctctccttgccgaggagtaagattaaacctagtggacaatgacaacatttcggtcttgagaggaggctgcattcggagtctacgggttgggtctctttttatgcccttctggtttctacacttgtaccggcgggggttcaggcatgtagcattgaaaaaaaatggaatcgatgatgctcggatgcttggatgtttcaccatttacgaccttctcgtgagcacttgttccgctcatcacgacttaagtaccaccagcgttttaaaaaataatgtgcgcggtctggcttat

SEQ ID NO: 284314 - DNA, 511 bp, Zea mays
gaggatggtgaaacgagcagcaaagctaaggtgaacaaagcaacccgccgcaatgtgaagaagaagagttctgacggcgacaaagaagacagcagaagcgagtccgtggtgacatctgagtgccaggatggccatcaagccaacacggaggctgggtgtgccactccgtcgtccaagccagtctcaaggaagagaaagtgcgttgaacgaagccccgactgcattgcaagcaggctgcggtctcggctcagtatgccgtgatccccccatggacagtgatcagcatcatgagtctctttttactgtctgactgcaggctcgccttttgcgatgaagttatgctagtgaagatgttttgtttcagcaggtgattggtgcagcagttttttttgcagaccttaaaactgtgcttacaaccgtaatgaaataggctgtgccaatagctgtgttgcagtatcctactagcctgcaccttaatgtattattcatgctatgcgagtcataacatgtg

SEQ ID NO: 284315 - DNA, 279 bp, Zea mays
cgtaaaaccccactttatttagatcagaaaattcatacaaagtttacggaaccaggtactatagctcgatcgttccaaagaagccctcattattatacgatcacaatctttactgaactgaacggggatggaaaacatcgcggaatacacccccgaaacaccgagggcgaacggcgccttattattcacatgctcctatacggagcgacaccgaccggcggggccattttgcaggacaattcgctattgctacacaatattcacttccgcgggatcaac

SEQ ID NO: 284316 - DNA, 306 bp, Zea mays
gaatgcaatgaggctccatcataggcaggcttataggtttgtagtatcgttaggacgggcatcttactataacaatataagacacattttgtatatataacacatgtgcatatataagttatcgagatattatatgtttctggtgcaacgcacgagcactgacctataaaagtataacacacatttgtacatagtttaaaaaaaaaaaaaaaaaaaaaaaaaaaaaaaaaaaaaaaaaaaaaaaaaaaaaaaaaaaaaaaaaaaaaaaaaaaaataaaaaaaaaaaaaaaaaaaaaaaaagggggg

SEQ ID NO: 284317 - DNA, 505 bp, Zea mays
gctggaggagcacctcaccagtggacattgctccagtcccgcgttcgtctcctcccgcgaaataccttccttctccgggtacacagaagagagtccgagaccgctagctacattaacgctagtcccgcacacgcagagtacgtaatgatcccaagagcgccaggtctcttccgcctcgaggagggagtgggtgcccgtgcctcgacctcggcgccagcggcgatggcggcgcccgccggcgacccgcagctcgtcgggctccgcctcatcatccagccgtcgccgaggaagcagcagctgcccgcggtgctcaggaagtccgcggtgaggattgttaacccggccacggcgagcgcggtcaagtgccacgacgacgacgacagcggccggcgggtgttcgcggggctcgagttcctcaagcgctgctcctgctgccacagggacctggacgccaccatggacgtcttcgggttcaagtaagatatcgatagacgagtgacgactc

SEQ ID NO: 284318 - DNA, 291 bp, Zea mays
ataaaaaatctttttctttgatatatatctggtctgaaaaagatttggttcttcaggaagtgagcatgagctacccgttgcaagctgccagtgttgttcggctttcatactccacactcacagagagagatcgtgcctcctctcctattatgtatgtaggggtacaccgtagagcggacggatgagggccacatcaaaaaaaaaaaagttgctcccacatatatcatcgggcggcggttattttgcagcgtgacgcccctatcagatgcctgcatctggggcgccgccgcc

SEQ ID NO: 284319 - DNA, 215 bp, Zea mays
gtgtcatcatagttgagctccaaccactttgtcagccttgaaagaccaacttgattttagctttagctcagttagtgcttctttcacaaaagtgttgtgaagtttctccgctcatctgattcagcatcaattatgtgaaatattatttgcattatatagtcagtttattaccttaacaaagtgataaaaggatattaatggtatgttcaacatgt

SEQ ID NO: 284320 - DNA, 717 bp, Zea mays
  unsure (1)..(717): unsure at all n locations
cgatattctatttttctggtgtctttattagggggccagtgtgtgtattacaacactaggccaatacggcccactactaatacgaccatcatagggcccaaacacacaaatggattacaaatgaatcacatcttcccgcttccatagaacaagtcagtttgtcacgtccctgacataattgcaacaaaatagcaccctcaatatacaatatgtgtcatgtgtacttgttttttttttttttgaaaaagagctctatatttcaaacggaaacggtatcgcaaacaaccaagtgatggaacgtgagtgtctttttcagacaacaagaaatgcttgtaacagtagtgtatgctcacagtaaaatttgtatcctcgtgttccttggctcaaagtttgttcctctcaacctgcactgctgttccacataaggtgcctattcccagctgtagaaacgtcgtatcccctcaatccgttgaacaacttctgccattgctggtctcattgtggggttcttgtcacagcaatgaattgcaagtttgagaaactgaaccagctcctctaccacagttttgtttgtaaggagcttcttatcgaatgcttgggttgcccagtgctcatggggtattgataaaacccaatcgaccaaatctggctcgtctgtgacgattggtgacttgcttgtgagcatctcaagcagtatgacgccnaactgtacacatc

SEQ ID NO: 284321 - DNA, 519 bp, Zea mays
gaactagtctcaagttttttttttttttttttgatcgatgaagaacaggcactgcataaattcaagtcaatgttttccatctatcaggctaacttttgtacagtttccgatgttacattcacaacacggaaatggctctaaaactacccctcaaaaacggctcgcacctgtgcaagagccaagaaccatcaccatcactccttgtggtccctcctccaaccctctccccttttatggcctcatcatatatgcaataaactcgccgttccattgtatggatatggaaagtccagagagaattctcaatccaaacgatacgcacgctcgatgctctcctcacatgcagcacgacgaacttccaacatgtctgaggctcgctgtcatttgccaacttggctccaaaacttaggcagttacaaaaatgaataccagaccttcaggttcgatgcgacacgatctttcgtcaggtcactttgtataccaaaggaaagctatgcagatcagacatgccaacaggtc

SEQ ID NO: 284322 - DNA, 375 bp, Zea mays
aagaacaggcactgcataaattgaaggaaagaatgatttccatcgtctaactagctaacttttgtacagtttccgatattacattcacgacacggaaatggctctaaaactacccctcaaaaacggctggcaccagctcaagagccatcaccatcactccttgggccttctccccactaccccattttttctcccatttcatccgaatttatggcctcatcatatatatcactccttgggccttctcctcccttttcatccgcttttatggcctcatcatatatgcagtaaactcgccattccattttagggcttattcagttgctacctctgttcaattgactagaaagggatttaatcctttccaatcccctt

SEQ ID NO: 284323 - DNA, 435 bp, Zea mays
acacaaatgacgtgggcgcaccagatggaagctttgcgccctgctttaatatataggaagtatatattttgacagcagatagatgaaccaagcagtcatgactcatgacactagaatggaatgggatggtgttcgtgcatcacgcgtcggcgagcttgggcgtgggtatgtggctgtcgacgaaggccttcatatcctgcagcaccttggtagcctcggggagctccgggaagccgtagaagccgtggaacatgcctgggtactcggccaccagcacctccttccccttccggcgcagcacgtcggcgtagcgtcgctgccagtccatgagcgggtcgaagccgccgataatgaccatggcgggcgggaagtcgtcggcgaggtcggcgttgtcgtcggtgacgtgcgcggccgggtggtcgcgggtggcgccgt

SEQ ID NO: 284324 - DNA, 392 bp, Zea mays
gccgcagttggtgacggggtcgcgcgcgacgtggccgccgccgccgaagctgatgctcgtcgccgcacgccgcttcgcgccgccgccgccgccggcgggcagcgggaacggcgccgccgccggtggcggtgctgcggttgtcgttgtcgttgtcgccgggtactcatcggtcaccttccttttggcgtggtgcgccgcctgctgggcctgggagttggacgacgcgtggtgggtaaacgtcaacggtggcggcggcggcgcgtgtgtcggtgacaccacctcggcgtcgtggccgccgccacgcctgctgtagttgtttgactcccctgaggatatgtttccgctggtggtgccgctgtcgtagctggagagcaaggcgccgttcgacgcgg

SEQ ID NO: 284325 - DNA, 348 bp, Zea mays
ctcagctcaatcccgagacaaaggaacccacctccactcccaccagcaagctcaagcaagcagccaccaccagcagcgatcagcggcagccatggacatgggccggcaccagctccagctccagcacgcggcctcctcgtcctccacctcggcgtcgtcctcgtccgagcaggacaagccgctctgctgctctggtcccaagaagcgccccgcggggcgcaccaagttccgggagacgcggcacccggtgttccgcggcgtgcggcggcggggcgccgcggggcggtgggtgtgcgatgtgcgcgtccccgggcggcgcggcgcgcggctgtggctcagcacctacct

SEQ ID NO: 284326 - DNA, 434 bp, Zea mays
aggttcatccacttgtgttgctatttgaccggtaccgtaggagagcacagcactacatcgcaaagatttgggctacggtgacaatctccatgttctacaatcttgaggtcgaaggaatggagaatctgcctccaaatagctgtcctggtgtctatgttgctaaccatcagagcttcttggatatttatacccttctaactctagggaggtgcttcaaatttataagcaagaccagcatctttatgttccctattatagggtgggcaatgtatctcttgggtgtgattcctctgcggcgtatggacagcaggagccagttggattgtctcaaacggtgtgtggacttggtaggaaaaggagcttctgtatttttctttccggagggtactcgaagtagagatggcaagttaggtgtatttaagcgtggcgcattc

SEQ ID NO: 284327 - DNA, 480 bp, Zea mays
cactcttttcttttttctttttttttttttttttttttttttttttttttttttcattgaacttggccttaatttaattacaacgacatatagcaaatatctctggctcgcccgggttcctacgtactaccaatagagattagagttttatatagactgaaacctgttggcttgggtcctagcctttcaacgagatgtatccatttctaatcatccactcgagatcccaatggttgttggcattcttggccgtccaataggcccacccaaacgtggcctgtccatacacgttcatctgcgccgctgcgtacttctggtattcctccttggtcgcgttcggcaccttccactccgcaacccactcgccgacgaaggtgagcgggccatctcgggtggtgacggcggcgagctcgccggagaagttagtccggacgaagtcgatgttctgctgcgcggtgaagttaccgaacaagctgttga

SEQ ID NO: 284328 - DNA, 541 bp, Zea mays
aaaaatgcccgacgaagtgacaaacacagagatgtgtcgggcggcttttgttgcgatggcttccaagaagcaaaccgagcgacagctgtagaaaaaggacccccattacgctagtcgctgaaaggtcaaagcttgcaatggaaaccttctatgacaaggaaaacctttatccgcgttttggcatgcactttgtagtctttgttgacgactctattttgtcacgttgccaccacgagctccatgggccggcttttgtctcttgatgaaagcgtgagatccgactggcccgggctcaacttgcgcacgtgcgccaccgtcgtcgtcgttgacgcgtcctgtcggcggctgcatggtgagctcgatcccgtctcagtcaaacggtggacacgtccctccccgccgcgttctgcacctcactgctaagctggaaggtctgggtggtataccccgacgaccacgtgtaggggtagttcgacgacgaggacacgtcggagctagtgacccactgcgcgacatgaacgtctgcgtctcgtcctcttcc

SEQ ID NO: 284329 - DNA, 609 bp, Zea mays
caacatcagcgggggccacaacgacgacctcgccaggtcgctgttcccgggcatggatcaccagaaggcgatgcggttcatggatgacaaagaagctatgtccagaaagttggcgcctgggcagctgaagcccgtggatgggctgcaggagctgtgcggatggatggaaggccgcgacctgaagcgcgcggcggtgacgaacgccccgagggcgaacgccgagctgatgctgtcgctgctggggctcaccgacttcttcccggtgctcgtcatcgggagcgagtgcgaccgggccaagccgttccctgacccgtacctcaaggcgctccagctcatcgacgcatcgcctcaacacaccttcatatttgaagactctgcatcgggggtccgggccggtgtggctgccggagtgcccgtggttggcctgacgacgaggaaccccgggaaggtgctgaaagacgcaggggccagcttgctggtcaaggattttcaggaccacaagctgatgtccgtgcttcaacaggtggaggtcgaacccgcagcggcgaatgcgcaaggctgatgcgtcggtcactgcggacaactaagaaatgaaatgtcgtgctggac

SEQ ID NO: 284330 - DNA, 275 bp, Zea mays
tcagaattcaaatctgctggttcactctttctggcctagtttgaaatctgggtttgtaaaatctgaacccgcagtagaaagtactgcaagatagatactacagtccgacgatccaaatttgccaatttttttgtactaaaaggcatcaatgtttgttggtgtttttttttccccttttgctaaaaggcatcaacgcgaactcgaaaccttacacaggttggcacctgggcagctgaagcccgtggatgggctgcaggagctgtgcggatggatgg

SEQ ID NO: 284331 - DNA, 417 bp, Zea mays
ggctgattcaggttcggttaaccaaccgggtttcgtagtatgcgagcatcgttgttggtgggcccccccccccccccccccccccccccccctgatgaggaataatgaggaccccccggccattaccaagccataagaaacggctagattatcaagatgacggacgtacggagatcggactgcttcctactgactttcgctgcttatggtattactaagagatgagcaagaagctagagatatgtaggcctgaacgaaaaagagatactttgaagaagaaagtatagtaagtaatacaaagggcgcttagcatttcaaagacgagttcatgtaagattacaagccttggtgtgtttggggaggtgcgatccggcggatccgggtcgttatcctggtcatggtggtggagttcctgga

SEQ ID NO: 284332 - DNA, 508 bp, Zea mays
ggctgacttcaggttcggttaaccaaccgggtttcgtagtatgcgagcatcgttgttggtgggccccccccccccccccccccccaagaaaagagcatctgacgcccaccgactaggacacccgtccgtcttgtagaaccaccgacttctcgattcccagaccagatacactcgcctctatgccccgattcgcgacataattaaatgaaggaacggtgaggttaggaagatagccttaaacaaaccacagcatggtgttgttaaaatgcgcgcaccatggaaaagcgcctacattattaaactgctggtggcgtctcacataaaacgataacagagaattctcgatggcaatctactggttaagatgtattggacgcgaacttgatcaatatgatgccgatgcggccctcccggagggcctggaggatgagttccgatctggctacggactcgccgagattccatatgaggaaacagagaattaagaggatgatacaacggatgacct

SEQ ID NO: 284333 - DNA, 619 bp, Zea mays
tgacaagatgaaggaggtgatcaggtacatgaacagaaacaaacttgggaaggaaataagggagcagatcaagggacacctgaggttgcagtatgagagcagctacaccgaagcatccgtccttcaggatatcccgatttctatccgtgcaaagatttctcaaacgctgtataagccatatatcgaaagcattccactgttcaagggatgttccgcagagttcattcaacagattgtgatcaggttgcaagaggagttcttcctaccaggagaagttatattggagcagggaagtgcagtcgatcagctgtacttcgtctgccacggtgcactggaaggtgtaggcatcggtgaagacgggcaagaggagactctgctaatgctggagccagagagctccttcggcgagatctcaatcctctgcaacatcccgcagccctacacggtccgcgtctgcgagctctgccggctcctgcgtctcgacaagcagtccttcaccaatatcctcgagatctacttcgtcgacgggaggaggatcctgagcaatctctccgagagcgagtatggcggacgggtgaagcagctggaatcggacatcacgttccacatcgggaagcag

SEQ ID NO: 284334 - DNA, 340 bp, Zea mays
gttcggttaaccaaccgggtttcgtagtatgcgagcatcgttgttggtgggccccccccccccccccccccccccaactataaggaatctctcactaagctagatgcaacaattacagaatccgcagcgccggagattaacattaataggcacattcagttcacctcaccttcactcacagtactagcactgacgccccgcgtgagcgttcagctcagaatattatgatggagaaaaacgaaagaacatgtgcagcttgaggacagtaaactaactaagtaacatctctccggagccggaggtgctaagcgttgatgctgataggaaaacgccttagttt

SEQ ID NO: 284335 - DNA, 532 bp, Zea mays
gtcatcattccaggcagcaagatcgcatgacacacagctgaagctcggctttggcgcttcttggtgaccgaagcacgcgcagcatccatccgccatggagagtgccggcggacgaccagaggcggcggcggcggcggtgctcaaggtcaagggaagagacgccggaagaagaccgaacggggctcactcgtcttcttcctgcctgcaacaccgacactccagaagaacaacgagcgcgtcgtacgtaaatgctcccgacgtgtcgccgcgactctccgccggtcacatacctgcggccatcagtcgcagtgaggtgctcgacgacacaaggcgttcgctcgacctccctgaccagtttcccgagcatcgcgtcgccgcagccacagagagagctgaaagaagcggttcgaagtctgccgcggacctggcctgggagatagccgtcctggaggagcaagtcgtccgcaaggagctgcacctgctgtccctgtacagagccgcgttcgaccagtacctcggcgtctcccctcgc

SEQ ID NO: 284336 - DNA, 556 bp, Zea mays
gcgcacttgcgcgcttcgtcgagcggtgtggtgccccatctgtccgtggtgaacacgctggcgccggcctcgacgagcatcttggcgatgaggtagaggccctcggcggcggcgatgtggagcggcgtgcggtggtcgtagtccctgcagtttgggtcggcgccgtaggccagggcgcgccggatgaagtccgagtcccccttggcaactgccgtgcacaggtggctgccggcgttcttgaggctcagcttcgcacccttggcgaacagcagcgctgccacccgttcgtgcccctgcttcaccgcctccagcaacggcgtgttcccgaactggtcggtaaggtcgatgtcgacgccttcgttgatgaggaactgcacgacgtcctcgtaccctctggaagccgcgagatgcagaggggagcggccgtcgtagtcggtgttcttgggatcagcccctgcccggatcaggcttttcagctggtgcaggtcgccatagaaggcggcgctgttgacccgcagtgtgagtccgcctcctgcttcccgatgtggaacgtgat

SEQ ID NO: 284337 - DNA, 631 bp, Zea mays
tggtctgctagaataatcactatgggatggggactgcggagtggagagctgccaagagtcctgcttattatatgcgtggggattacgtgcctggcttgaaggttgatggtatggatgttcttgctgttaaacaagcttgcaaatttgcaaaggaacatgctttgaagaatggaccccttattcttgaaatggacacttatagataccatggacactctatgtctgatcctggcagcacataccgtacacgtgatgaaatttctggtgtgagacaggagcgtgatccaattgagagagtaagaaagctggtattgtctcatgatattgctgctgaaaaggagctaaaggacattgagaaagaagtcagaaaagaagttgacgaagccattgctaaagcaaaggagagtccaatgccagatccatctgatctatttaccaatgtctatgttaaaggttacggagttgagacatttggtgctgataggaaagaagtgagagctactttaccataattcagaactttgtcctttgaatatcttgccaccttgtcgtagcagactattcaaaatagtgaagaataaaaggttctacagagggtcatctctctcccctattcgttgagtttctgccc

SEQ ID NO: 284338 - DNA, 466 bp, Zea mays
cagtccgggtctaccagaagcttcgtggccgaatgcgaggccctgcggagggtccgtcaccgctgcctcataaagatcgtcacctgctgctcgagcatcgaccaccgaggtgaagaattcaaggcgctggttttcgagttcatgcccaacggcagcctggacgactggctgcatccggcatctggagcacacccgctgaacaagacgctcagcctggctcagagactggacatcgctgtggacgtcttggatgctctggaataccttcacaaccagtgtcagccaccgatcatccattgcgatctcaagccgagcaacatcctgcttgcggaagacatgagcgctcgggttggagatttcggcatatcgaagatcctttccgacgacactagtaaagttctgctaaactcaatcagcttcactggactaaggggctcgatcggttatgtcctccagagtatggcga

SEQ ID NO: 284339 - DNA, 339 bp, Zea mays
gctcacactgattacgttttattgacattacttaatcaagatgacgatgtagacgcacttcaggtgagaaacctgtctggtgaatggataacagcacctccagttcctgggacatttgtatgcaacattggtgacatgctaaagatttactccaatggtttgtacgagtccactttgcatcgggtgataaacaacaactcaaaatatagagtcagtgtagtatacttttatgagacaaacttcgatactgcagtagagccattggacacacataaaacgagggcaaatggcaacaaggagttcaaaagagcagtctatggagagcatttaactggcaag

SEQ ID NO: 284340 - DNA, 281 bp, Zea mays
gcccaaccccggcgtggtcgtccccaacaccaacctcacctacgacaacatgctctacgcccagatcgacgccgtgtacgcggccatggaggccatggggcacaccgacctcaccgtcaggatctccgagaccgggtggccgtccagaggggacgaggacgaggtcggcgccaccgtggccaacgccgccgcgtacaacgggatcctcatgaagaggatcgccatgggccagggcacgccgctcaagccgcacgtgcccgtcgacgtcttcgtgttcgcgc

SEQ ID NO: 284341 - DNA, 434 bp, Zea mays
gctcaagggccgctacccatggatgagggggtcttcttatgacccgtgcaccgaaaggcactccaccgtgtactacaaccgcccggaggtgcagcgggctctccacgccaacgtcaccgccggcgccggcgccatgaactacacgtgggcgacctgcagtgacaccatcaacaacaactggggagattcacccaagtccgtgctccacatctacaaggaactcattgcagccggcctcagaatatgggtcttcagtggagatacggacgcggtagtccccttgacagcgacaaggtactccatcgacgccttgaaccttccaaccgtcgtcagctggtaccgttggtacgacgccaaggagcagaagcagcagcaggaggttggtggatggaccaggtgtacgaggggctgacctggtgaaggtcgaggggcgg

SEQ ID NO: 284342 - DNA, 650 bp, Zea mays
gaacctttgcacagcaagtttcgtcttcaggaaacttttaggagaccacttcttagttctgatccagcaattactgtccaccaaatacagccaactgataagttcatcatttttgcatctgatggactctgggaacatcttagtaatcaggaagtggttgacatggtccaaagtagcccgcgtaatggaatcgcacgaaagttagtaaagtctgcagtgcaggaagcagcgaagaagagggagatgcggtattcagacctcaagaaagttgatcggggggtgaggcggcacttccacgacgatataactgtcattgtggtatttttcgattcaaacgccatgacaactgctgcctggagcagaccctcggtctctctccgagggggtgggtttccaatccattcaaacacccttgctccattctcggttcctacagagctaaacaactcctactgaaaccacgcggtatgtgaaggagccaggcaagaggataaaaaaaaagtaaaggaaaacggagaaggaaaaacagctgttgtgatcagttgtagtgtatttcaccgttcatgttcatttaaaacattttttagattctcaagtctcaacctggtgaccagtgcactgatagcaaggtataagattagattattctt

SEQ ID NO: 284343 - DNA, 323 bp, Zea mays
gcgacgctgcagaggccgatggtgcggaggaggcggagacggccctgcgggaggcgttcgacgtgttcgacggcaacagggacgggctcatctccgccgaggagctcggcaccgtgctgcgctcgctcgcctgcaccgggcagggccgccgccgattgccacgacatgatacgcctcgttacaagggcccagtctttggtggaatccgtctgtctctctcttctccatccgtgacacgtccagcagctctatcgaggtcgaggactagccgccgccgccgcacctgcacgcacgccaagggatgggagagcgagagagggatc

SEQ ID NO: 284344 - DNA, 412 bp, Zea mays
ggctcgctggtgaatgcaactcttggatggaataccgaactactacagcaagcatggccagcgttttctagaaacaacttcattcttctctttctctctatctattcattcacgtttgggagttagaacaggtaagggaaaatccaaagaaagaaaggaaacggaataattcgatacccctctcgtctcgtaactaaccatggcagcgttccgatggaagagcttcgaggagaatgaggatcgcccagccaagcctcgtcattttggcgtcaccgagattcaaagcccccactgcactctcttctcccacaaccttcttcaggatatttttgaatctatgggagactatgtagatgggttaaagttttctggaggttcttacagcatgatgccaaaggctactatcaagcaa

SEQ ID NO: 284345 - DNA, 466 bp, Zea mays
gcagcaagatactcattcaaatcagtcgctatcaccatggacaaatgtcgaagttcggctattacaatggcaacggaatatctttcagcacgtcacataaaaccatgccatgacacttgtcacgaattcagtattccacacaataatgacatcatcagtaactaacggcttcgcattattagcaacaaggcaactgcaatcacactgcatttacattctacaggaagcacggaaacctaaatcaggatctaacgagtcacaagcaggcatacaggttcctagtagatgccgccagtgggctctaactgtcaatgccaggtccggtttgcccctgtgtctgcagctgacctggcagttggggctgcagctgcgcttgtgagccccccctgtgattgtagagatgtacctgaggttggggttggggagggtctgctggactgatgactgcaactgcacttgtgggggc

SEQ ID NO: 284346 - DNA, 296 bp, Zea mays
ctcgagccgtttttttatgtccagtaataatagttgtgtgtaaagttttagtcaccggaaccaaacggtagattttagtgactaaaatttagtcactaaagtttagtccaactaaactttagtagtaccgaatccaaacatggccttagactgaaggcgcgcgataaattatttttgcatcattaattatgccgagaatacaaatactactacacaacagttccgttcttaggcggcataggtttcccgcgcaagaagtgcgaaacaggatgagcgcctgcctcgggcggtggaga

SEQ ID NO: 284347 - DNA, 516 bp, Zea mays
ctctccaaaatctttagtatggagccactcccggagatggagctatggagctgttccatcccaaactgggtctggaaccaaacgctactgtacagaaagcagattaacatattagaaaggtaaagaatgcaatgccagctatgttccagtgtatcataagctattatctactgtacgttcggctgaatatgaataattcataaaagacaggtcctaggagtggtaagcctataatgttacagaacaaacttgcatattcacaagtattacaccatgcctaccggggagttactcttccagagatcatgccgctgctcgcatcaagactcccagaggcctgtgacgagacgaagagggtcctggtcgctgaagatgactacgacttactgacatcggtcgagtctgtttctgaggtttccagcagaatcaggtcctcttcaggcatcatcctcaagatgagctcaagttctctgacaatctcccacatggaaggcctgtcatcagtttcatcctggc

SEQ ID NO: 284348 - DNA, 464 bp, Zea mays
tgtggactattcacaccctttgattcagcagtgcttcatgcgttgattgatgtgtatcaacattagaatttttgtaagcttcatggtagatatgttccgagcacatgctccaactgccacacggaaacattgtagttaaatcagttggcttttctctcaagttacaatctctgacaaaacatcagtggatgtctatagcatctgtagttgatggaacacaacaattgcgtatctctagccacaggtaaacagcacacgagctgagactgctatgcagtaggctgctacttgaactacatccactacacagatcataacttgcgaccatcgatgtaattttcccattttttatttttgggtgagacatagccacagaatggagatggtgtagaattgattttaaattattgatgtgttacaacaagttttgtgttacctatccatatttattgggtgttaaagac

SEQ ID NO: 284349 - DNA, 435 bp, Zea mays
cgcgactcctcagcttcctcctctccttccttccttagctgtcccccttcccgcccccggccccgaccagatggagtgcacgtcggccgccgtcaccatcgtcgcagccgccgccgcctaccaccacgagccggccaggcgcatccgggaggcggagcgcaagcccaaggtgtcccggcgattcgtccacgccgacccctctgacctcagcctcgtggtgaaggacgggtaccagtggcgcaagtacgggcagaaggtgaccaaggacaacccgtgcccgcgcgcctacttccggtgctcgctcgcgccgtcgtgcccggtgaacaagaacgtgcagcgcagcgccgacgacagcgccgatcctggtggccacgtacgatggcgagcacaaccacgcccgcccgccgcagcacgacggcggcgccaagaggtcgt

SEQ ID NO: 284350 - DNA, 461 bp, Zea mays
gcagcgccttcaccagcagcacgcggcggcggacctgtcggagtgcacctccggcggcgagccgccgtgcaagcgcgtcgtgcgtgaccgggcggaggaggtggaggaggaggaggagtgcaggcccagggtgtcgaagctgtacgtgcgcgccgacccggccgacctcagcctggcggtcagggacgggtaccagtggcgcaagtacgggcagaaggtcaccaaggacaacccctgcccgcgggcctacttccgctgctccttcgccccggcctgccccgtcaagaagaaggtgcagcgcagcgcccgacgacccctccgtcctcgtcgccacgtacgagggcgaccacacccacggcccgccccccccgcgcgcgcgctcgggttcgggcgccagcagcaagaacgccgcgaagccgccgtcgccgccgcgccgccagaagactgctgtcgcggtgact

SEQ ID NO: 284351 - DNA, 339 bp, Zea mays
agcacggacaccgcgccgcccgcgcacagctactgcaccagcactacccggcggtggcgccggaccagacggcgtgcgcctcgggcgagccgtgcaagcgcatccgggacgcggagtgcaagcccagggtgtcgaagctgcacgtgcacgccgacccggccgacactcagcctggtggtcaaggacgggtaccagtggcgcaagtacgggcagaaggtcaccaaggacaacccctgcccgcgggcctacttccgctgctccttcgccccggcctgcccagtcaagaagaaggtgcagcgcacgtccgacgaccccaccatcctggtcgccacgtacgag

SEQ ID NO: 284352 - DNA, 577 bp, Zea mays
ctcaccagggtacagacgtgctcctccttctcccctccccttgtccacagcccccgtagaccatggaagatgcatggcttgagcatctgcatggttcttgagagttaaagctgcacgacgatggatagtggaaacagagcttctcaagaagcattcgttttcgtggtgcctttcctgacctccttggtggtcagctgaggtgcgcacaaaccggcaagtcacaatacggcaatggcggactccattaggagtcgtccttttttatttctttacccctttttacattctagttctgtgattgtgtcaggcggaagctagaagacaaataacctaagtattcatgtgtgatggattatatacgtatacattggtgagacaatgtttgtctcatgtgtactccagtctccagaaacaagctgctataaatgaattgttgcttatcatctgcttgtctttgcccccgctagtgtctacagattgttttctcatgcatgctaggagtaaaaaaatgagcttgtattgttgatggcatatttgtattgatgttatttcaaattcttttaatatttgctgttgc

SEQ ID NO: 284353 - DNA, 296 bp, Zea mays
attttaaaatttcaaattttaaattttccatacgacctcggatggtaaaaccacaaaatggaaagttttaggttttcaagagttatgaaactttgtagctaacaactttttcatttgaaatcatttgatcatgcaaaactatatttgaaattcaaaatttgagattttcaaacggcctcaaatgaaaaaacaaacaaaatgaaagttgtagatctcaaaaagtcatttaacattgtagttgacaaccttttaaatttgaatcatcttatcatataagaatacatttgaaattttca

SEQ ID NO: 284354 - DNA, 459 bp, Zea mays
aaatattcagcaatcactggtgaaagcttttcttgctagctatgtaaagctagtagttccctgcaatgctgatgcttatcagagtgcttctgttccatctcaaggagtattcaggactgaattgactcagctaatgacccagctggctgcttttctgagttctagtggggctccatttgtcgtcaatatctatccattcctcagtctttatcaaaattcagatttcccacaagattatgcgttctttgaaggatctactcacccagtagtagatggtccgaacgtgtactacgatgcatttgatgggaactttgacacattagtttctgctctcagtaaaattggctacgggaacctaccaattgcaattggtgagattggttggcctactgagggagcaccaagtgcaaacttaactgcagcaagggcattcaatcaagggcttatcaatcgtattac

SEQ ID NO: 284355 - DNA, 274 bp, Zea mays
ccggccggcaatgggtctcgtcgtctccgccaccgcgtcctgcagccccatcttcttcagccgacgccgctcctcaagtccgcctcccccagccgcggctagcactcccccgcccacgtacacaataccggagccggccctcgtccgcgtgttccgccacttcgacgcggacggcgacggccgcatctcggcggacgagatgcgcgagttgtgcgggtgcacagccgtggaggcagacgagatggcagctgtcgcggaccgcgatggagatggg

SEQ ID NO: 284356 - DNA, 759 bp, Zea mays
tgtgaatatcagatttgctgataccaaaagggacacagcacgcacatcctcattgtggccacggagaatatccagattgaatcttcccatgaaggatttgctcctaaactcccgctccacgaaaaatgttttccaaaacttcccatctagggggacacccggcagcaagggcccattcagggtggtggggaggtctggaagcccccacctttcgcagtataacttcttccatccctgatgatctgtggctaaggcgtgcaggagggtggagacacaggatacaattccaaggtccttcgcatcgagacgtgcaaggacctcgcagaccaacgaagctggcagatcagtgaagcacctgaagccacacagtgaggcagttgcctcatcactcgcttcagcatcctgttttggatcagagccactcggagcagattcataactggacttctggttctccaacttgttgaagttctccaaacgtttaggcttccagtagtgagataagggatttgcctggacgagagtgccctcggtgcaaatgcgggagcaactgtcaggcgaagaaactcctctttccttgttgcagtcaaaggccataaaaatgtgaggtccaacctcgagattaatctccctggacctagatcctcccctgaaaccacgagaatcagaacagggtcacctcgaggctgcctccgagatcctcgtcgaatgggtggggggcaatctatcctctcgtcgaatgggggggatggggtgacg

SEQ ID NO: 284357 - DNA, 551 bp, Zea mays
gtcagaaacagatcacagacatatcagagaaggagaaaagtggtatgcgtggtcatgaactagaattgtactatacttgcgttgcatagacagcctgtggaggagaataccttgattgttttaaaacgtggatcactactacaataaaaagaacacctctctaactgcaaaattacctgaatatctacacactgtgcaatataacaaataaggcactcactcaagggtgatcggtccaatccatcatgttctcagctagtatacacctggaagtcggagagaaggctgtggcgatcatccaccccatgagattgtaggaagaactgaggatgatctcgagcccgcaagtcctcacagcaagagaggcctccgccgagtttggataccacacgagagaaaaaatgaacacaaaaatccatcagaactcgaccaacaacagtccaggagtagcagaagcattccgtggctgcacgcatacacttttctctcctcctccacttgagggaagacccagaaaacgcaaggttgaacgactacactactgcccagac

SEQ ID NO: 284358 - DNA, 404 bp, Zea mays
cccggcgcgggtgccgctggactacgtgctcttccgtgttccgtcccaacgccggtgtcgccgacgcccgcacggggctccgctacgacaacatgctgtacgcgcaggtgtggacgccgtgtacgcggccatccaggggctcgggtacacggacgtggaggtcaaggtgtcggagaccgggtggccgtcgcgaggcgacgccgacgaacccggcgccacgcccgagtacgcggggacctacatccggaacctgctgcagcggatcgagatgaagcagggcacgccgctgcgcccggcgacgcccgtcgacgtctacgtgttcgcgctcttcaacgagaacctcaagccagggccggcgtcggataggaactacggcctcttctaccccgacggcacaccggtgt

SEQ ID NO: 284359 - DNA, 529 bp, Zea mays
gccagttatgagaacatctttaaaaagtggatacctgagctgagacattatgctgcaaatgtgcctatagtgctggtgggaacaaaactagatttgcgagatgacaagcaatttctgattgatcatccgggatccgcacgaataacaactgctcagggtgaagaactgaagaaaatgattggtgcagtcacttatattgagtgcagctccaaaacacagcagaatgtgaagacagtttttgatgctgcaataaaggttgcattgaggccaccaaagccaaagaagaaaccacgcaagaaaaagacctgtcctttcctctgatatttcattattcagttatctttcaccccaaatcatttatagagcagaagtcaagtccaatgctttttagtttttgtgatctatatatataaagagcctgtgggtttttggataatatctgtgaagaactttagattcctcttgaattgtaaacgatggcaaatgagcttaagtgttacattgttcaattaattattttattttgcag

SEQ ID NO: 284360 - DNA, 1909 bp, Zea mays
cttataattgggggtataaccctgtggtttggggcgttccaaaaggaagctatgcaagtaacccagatggtccaagtcgtatcattgagtaccggctgatggtgcaggccttgaatcgcttaggtcttcgagttgtcatggatgttgtatacaatcatctatactcaagtggcccttttgccatcacttccgtgcttgacaagattgtacctggatactacctcagaagggactctaatggtcagactgagaacagcgcggctgtgaacaatacagcaagtgagcatttcatggttgatagattaatcgtggatgaccttctgaattgggcagtaaattacaaagttgacgggttcagatttgatctaatgggacatatcatgaaaaagacaatgattagagcaaaatcggctcttcaaagccttacaattgatgaacatggagtagatggttcaaagatatacttgtatggtgaaggatggaacttcggtgaagttgcggaaaatcaacgtgggataaatggatcccagctaaatatgagtggcactgggattggtagtttcaacgatagaatccgtgatgctataaatggtggcagtccgtttgggaatccactgcaacaaggtttctctactggattgttcttagagccaaatggattttatcagggcaatgaaacagagacaaggctcacgcttgctacatacgctgaccatatacagattggattagctggcaatttgaaggactatgtagttatatctcatactggagaagctagaaaaggatctgaaattcgcaccttcgatggctcaccagttggctatgcttcatcccctatagaaacaataaactacgcctctgctcatgacaatgaaacactatttgatattattagtctaaagactccgatggacctctcaattgacgagcgatgcaggataaatcatttgtccacaagcaagccggcattatcccagggaataccattttttcatgctggtgatgagatactacgatctaagtcgcttgatcgagattcatatgactctggtgattggtttaacaagattgattttacctatgaaacaaacaattggggtgttgggcttccaccaagagaaaagaacgaagggagctggcctttgatgaagccaagattggagaacccgtcgttcaaacctgcaaaacatgacattattgctgccttagacaaatttattgatatcctcaagatcagatactcatcacctctctttcgcctaactacagcaagtgatattcaaagggttcactttcacaacacagggccctccttggttccaggagttattgtcatgagcatcgaagatgcacgaaatgataggcatgatatggcccagatagatgaaacattctcttgtgtcgttacagtcttcaatgtatgtccgtacgaagtgtctatagaaatccctgatcttgcatcactgcggcttcagttgcatccagtgcaggtgaattcatcggatgcgttagccaggcagtctgcgtacgacaccgccacaggtcgattcaccgtgccgaaaaggacagcagcagtgttcgtggaacccaggtgctgatggatgcctttcgctagcgagcaagtgcattcggcatccaagtcgaagcaaacgaatgaaataagagaaggccatcgaataaaacgaagtatataaatagattgaataagacgttgcccaagttgccaaggcacgctttgccatatgtatgcgttgaaaaataaataaataaataaataaatgatgttatagaggtacaaaagcattggaacatttctttatagaggtgaaccaccctattttccagtttccatgtgtgaattgtgattagcacatgtatggaataataatataaattaattttatgc

SEQ ID NO: 284361 - DNA, 767 bp, Zea mays
gttgtaacacaagagtatattcaagagatggaaaagctgtcctttaagattttagagcttatagctttgagcttaggccttgaagcaaagaggtttgaagaatttttcatcaaagaccaaactagctttattcgactcaaccactatcctccatgcccttatcctgaccttgctcttggcgtcggtcgacacaaggaccctggtgccttaaccattcttgcacaggatgaggttggaggacttgaagtgagacgtaaagcacatcaagagtggataagagtgaaacccaccccagatgcttatatcatcaacattggtgacactgttcaggtttggagcaatgatgcatatgagagtgtggatcacagagtggtggtcaactctgagaaggaaaggttttccattcctttcttcttcttccctgcacacgacaccgaagttaagcctttggaggagctgataaatgagcaaaacccttcaaaatataggccatacaagtggggcaagtttcttgtccacagagggaacagcaattttaagaagcaaaatgaggagaacattcaaatttatcattacaagatagcttaaagggtaaattgtgtatgatattatcaatgatatgaggcaagggttgatccaagacaacgttagtgatatgaataagtcggatcaggttcactgctaaatttcatagtgcgccttacgtattgaacaatctctgaataaaaaaaataaataatttccaaaaaaaaaaaaaaagggcggcc

SEQ ID NO: 284362 - DNA, 487 bp, Zea mays
gcggcgacacgccagggcggagagcacacaccgaagcgggccgcggcggcggcgcaggcgcaggcgcttacatgggagtagaggcgggcgggtgcgggcggagggcggtcgtgaccgggttctacgtctggggctgggagttcctcaccgccctcctgctcttctcggccgccgccgccgccgcagactcttactagctagctagccaccttcttcctcctcctccttgtaggtagtagtagtagtaggctacacaacaacgaccacatatatatatacatactaggtactactagcaggcgagcgagattcgtgcagtaattaaggccgcagccagttaataataattagtcgtcggcgagcgagagagatggtggaggaaggcgccaccgcggcggcgtcgaggagcgggccggcgccgttcctgagcaagacgcaccagatggtggaggagccgggcacggacgaggtgatctcgtgggcggag

SEQ ID NO: 284363 - DNA, 599 bp, Zea mays
cctaccaaaggagtcgatgaggttcaggaagaactcaagaagtattcatctggcatctccggggtaccacattttgtgatcaatgataaatatcaactcagtggtggccagcctccaaatgtattcatgagggcgtttgagatggctgcaaaagatggagcttaatggcatttaaaaggagctcctccagtagtcttcgcatatgttaaaaaggaataggagccgaatttaacaataaagttccagcacagctcatcgctgatttgcgaaaaatatgtggaatcagttgtatttccgtagttctgatatggtgataattagtggtgaagatggtgtggatgttcacttttgaataaaattctaggcgatcggatatggcatatgggttagaatgccccataaacagagcccggtctgtatttacatttggttcgataggatgtgtgcaagatatcagaaaacagcaaaggtcagatttgatattcgaaaggaataaaaaaaagctagcatacacagctgcatttaaaaaaaaaaaaaaaaaaaaaaaaaaaaaaaaaaaacaaaaaaaaaaaaagaaaaagaaaaagaaaaaaatataa

SEQ ID NO: 284364 - DNA, 639 bp, Zea mays
gccattctgggcacgaactgaatcaggtattttccgctcagtgctgagagctgaccccaattttgaagactcaccatggcaatcagtatctcctgaagccaaagattttgtcaaaagacttcttaacaaggattacagaaaaagaatgactgctgcacaggcactttctcacccctggctgcgagatgagcaacaacaaatacctctggatatgctagtattcaagttggttaaagcataccttgtttctacgcctctcaaacgggcggcattgaaggccttgtcaagagcaataacacaagatgagcttatctacatccgggcacaatataacttgttagaaccaaacagtgcagatggtcgaatatgtatcgataacttcaggatggctcttttacagaactgtactgatgctatgaaagaatctagaacacttgagatcttgaatgcgctggagccactcgcgtataggagaatggactttgaggagttccgtgcagctacaataagcccttaccagcttgaggctgtgccgcgctgggaagaaatcgccagtactgcattcgagtactttgagcaggaaggcaaccgtgctatcacaatcgaggagcttgctcaggagatgaatctttctgcagc

SEQ ID NO: 284365 - DNA, 417 bp, Zea mays
attcacttctctctctcaaaacatgttatggtagtatttgtcattcatttcacaaaaccggttcacctttggacccatggcttctaaaacccctaccttattccactctcgtttcttcctcttcggcttctattgctgggactgggaatttctcaccgctctcctcctctttagttcttcttcctaattaattaaattacatacaccttttcttttttttttttttacctaaatttctcattactacaacatcaacaaaagaggcataggttttttttttcttttcttcttttattaaaataataatagtttctgtgaggtaggtggagggtagatcgggaagaaaaaaaaatgtcacagcagcagcgttcgacgccggcgccgttcttgacgaagacgtatctgctggtggatgac

SEQ ID NO: 284366 - DNA, 909 bp, Zea mays
tggaaacttactaaaagctcttgggacacaggttgcagagccattaagggcaatggtggtgggagctccattggaggatgctaggcatcttgctcaacgttatgacagaatgcgacaggaagcagaagcccaggctattgaagtttctaaacgccaggcaaaagtaagagaaatgccacccaatggagagaatgctatgaaattagaagcagctgaagctaagctgcaggatctgaagacaaacatgaccatactggggaaggaagcagctgcagctttggctgctgttgaagcacagcaacagaggttaactcttcagcgtcttatagctatggttgaagcagagcgttcctatcatcaaatagtcctacaaatacttgatcagcttgagggagaggtgacatcagagcgacaacgaattgaaacccccactactcctagtctggataacagcatgccaccacctccgtcatatgaagaagtgaatggtgtctttgcttctcaggcacacaatggatcaacagatagcatgggttacttcttaggagaggttttatttccatattctgctgtatctgaagtggagctaaatctatcagttggtgattacgttgttgttcgaaaggtgacaaacagcggatgggccgagggtgaatgcaaaggcagggcaggttggtttccgtttagttacattgaacggagggagcgggttcttgcgagcaaggtggctgaagtgttttaacttttaagattttcctgttgggttggtttcttaacctgcgaattttgtatgtatgttttgattttgtaaaacaaattgatttgagatatagatgccaacttttccttttgtgatcatcttgtagaatttataaatgaattttttgttatccatttttattttattcc

SEQ ID NO: 284367 - DNA, 486 bp, Zea mays
cataattccaaatggcttcgtctactctcatctgtgacactcagcaatggagggagttaaaggctcatgctgaggatgtagaaaagactcatttacgtgatttattgagcgatgatgagagatcccagtcaatggtggttgaatttgatggaattctattggactactcaaggcagcaagccactcttgaaacaagggaaaaactcttcaaattggcagaggttacatccctcaagcaaaagataaaccagatgtacaatggggagtatataaacagcactgaaaatagatcagtacttcatgtagctcttcgtgctccaagagatgctgttatacagagtgatggaaacaatgttgtcccagatgtttggaatgttctggacaagatccaggagttctctgagcgggtccgcagtggatcttgggttggagctacaggaaaggaattgaaggatgttgttgccgttggtattggtggcagtttct

SEQ ID NO: 284368 - DNA, 416 bp, Zea mays
aggttcggttaaccatccgggtttcgtagtatgcgagcatcgttgttggtgggccccccccccccccctagaaaccaaagaactggcccgaaaacggaagaaaacacctatgaacttcccccccattagacgacccgaaaagaaaacctaattactactcagcataatccagcgaacaatcatgggataaagaaaatccctaattactgctcccaagatgccacactatctataccctcaatactagccctacggaaccaaaacacaaaaaaaacaagaccggcgaaaaaatagatccaaacgctattcaatgtatccttaatacgatggtttagtcgctgagcctggctaattcacgcctcgaagacatgatcatcagctaatccaaatggcctaaggttccgcggcccctctgt

SEQ ID NO: 284369 - DNA, 450 bp, Zea mays
cttttattgcttcctttcccattcttcatcttcttctctctgaaccgtactcaaactcactttcccacttatttatacaatgtcggcttacaaagaccaggatccccgtcttcatggcatcaaaactaagattcgtgtcgtccccaatttccccaaatccggtcttatgttcctagacattactactctattgcttgatcccaaagcatttaaggactcaatagatttgttcgtggagcggtacaagggcaaaaacatttctgttgttgcaggaattgaagctcgaggttttatttttggtccccccattgcgctggctataggagcaaagtttgtaccattgaggaaaccaaagaagttgcctggaaaagttatttctcaagaatatattctggaatatggaagggactgtcttgagatgcatgttggagctgttgatgatttgattgc

SEQ ID NO: 284370 - DNA, 447 bp, Zea mays
cacacctggtgcttttgtatgtgcctcagtggtgtgatcttgtttgaggcacccctataccaaaagacagcttcaggaaaacccttcgtagagttgatgaaggaaggaggagttctccctggtatcaaggttgacaagggcacagtagagcttgcaggaactaatggggagactactactcaaggtttggatggccttggcgcccgatgccagaagtactatgaagccggtgcccgttttgccaaatggcgtgctgtgctcaagatcggcccaaacgaaccatccgagctggctatccatgaaaatgcctacggtcttgcccgatatgccgtcatatgccaggagaatggtctggtacctattgtagagcagagatcctggtggatggacctcatgacatcaacaagtgtgctgaggtgaacgagcgcgttcttgctgcatgctaca

SEQ ID NO: 284371 - DNA, 753 bp, Zea mays
agaggaatctcgtccattataaaaaataatattaaaaaaacgaaccacaacaaattacagattattgacatttttaaaaaaaaatcaaacatatcttgttctgctaaataacttgtgaatcattacactccaatgttacagggataaatgctttgctatcattaaaagaacgcgaatatacatggtattgtctgttttagtgtagcatgtgtgacaacggatacttagtgagagatttacaaatcaatagttgtggccactgacaagagactggtccaagccatattagtgatttcgtgtaacttagaacaaatccaacgcatcaagagtgatattttaaacgcggaaatggtcaaaatgctgagttatgatgattcctacactgtcagactgctgcagagatcatgtggttggggcctgttaggacctgggaggaagattcttgtcgcgatgaggagatacctctaactggggtggcaagagcttcaaaaagcttccttgagcaggttgatcatttgcagacgtatcggacgcctctggtgtttcgaaaagtgacttgatggttggcctctttggtttggactgtttcttcttcagttcagccatcccgggaacttgataatcatttacaatttcaaagttcttgtaagtgtatccaacaaaattcaaatccttcttagatgaaagcatcttcctccatggaccagatcttgaagatgattgagtttggctgtcagactcatcaaacttttc

SEQ ID NO: 284372 - DNA, 465 bp, Zea mays
gtctagtgagattgtcagattttggactttgtaaaccattagattgtagtacacttgaagaaaatgatttttctgtgggtcagaatgtgaatggatctacacaaagctcaactcctaaacgctcacaacaggaacaactgcaacactggcaaataaacaggagaacacttgcttattccacagttggtacaccagattatattgctccagaagttcttttgaagaaaggttatgggatggaatgtgattggtggtcacttggagctattatgtacgaaatgctggtgggatatcctcctttttattctgatgatccaatgttaacatgcaggaagatagtaaattggaaaacttacttgaaatttcctgaagaagctaggctatccccagaagctaaagatcttattagtaaacttttgtgtaatgtcaatcaaaggctggggtcaaaaggtgcagatgaaataa

SEQ ID NO: 284373 - DNA, 360 bp, Zea mays
agggaaggcacttgtatatatatagacataaattaccatttgcatgatggtatggtagtaaaaattcagcacccatccactaaataaaaatgggatcagttattaagtgaattggggccccgacccgtcacaaattacgctccacctttttggggttcatccaaacccgtcatcggaataactgggtgaaccggaaccggacccgaatttggcacggcatgatacacgtgctgtttcaaaccgtcatgaaccaccgccgtggtggaggggctgtaaggttgcagtggggtcatgtgcctcacgcccgctccatatacttgacccgaacccggaaccaaaggatggtacccgataggaacc

SEQ ID NO: 284374 - DNA, 437 bp, Zea mays
caagcgccgccagaaaatttctacttgatatatatcctattttatacaccaagtttccaaaacatgggtttttaatttaagaactcatcataataaagtatggtgtgataaattgatggacaccctcttgatttcacagggaaaaagaaaacctactacatccaattttttaaattaattaataactctctcttcctttggaatattcaattgaaatgttgctgctccaaccatggccaaaaccccgattgatcatccatgccacaaaacatgttgcttaggctttcttctttgaccatttggtcaatcttttggcatgatggaaggtctggtcttgaagaggtttggaaaagctgagcaactcctgcaggcctagcagaagaaggaggaaagaggggtctgctttgctgatgtgtagaatgaggactgtcaatagc

SEQ ID NO: 284375 - DNA, 400 bp, Zea mays
ggtcaatgccgaggaagttttgtctgatgatggatcacaagcaggggacaagaagaggaggctcaacatggagcaagtgaagacacttgagaagagctttgagttggggaacaagcttgagccagagaggacaatgcagcttgcaagagcacttggcttgcagccaagacaaattgctatatggttccagaacagaagggctaggcggaagaccaagcagttggagaaagactatgatgttctcaaaagacagtttgaagctgtcaagtcagataatgatgcacttcaagctcagaaccaaaaacttcaggctgaaatattggcactgaaaagtagagaaccaactgaatccataaaccttaacaaagaaacagaaggatcctgcagcaatagaagtgag

SEQ ID NO: 284376 - DNA, 453 bp, Zea mays
gttttctttcaatctcatgcttgtgaatctttagaagggaattctaaccaaacatcttcagccaccacattgataaggaaaatgggagtctcaggcaacaatgaagttttagtgacaacaaaggtagttgttgactatgatagagcaagtgagctcaaagcttttgatgacacacaagatggtgttatgggacttactgatgctggtgtcacaaagatccctcttatattccataaccccaaaaattctcatcatgatgaatctgatgatggttcaggtagcacacaactcagtgttccttcaatagatcttgttggtgttgctgaagatccagctacaaggaaagtggtggttgagaaaatcagacaagcatgtgagacatggggtttcttccaagttgttaatcatggaataccattgagtgttttggaggagatgaagagtggagtgaat

SEQ ID NO: 284377 - DNA, 429 bp, Zea mays
gaattcctaggcatttttttgcatctaccaaagtacattctatataatcaaggacttaaaaatttctgcataaacatatttgaataaatacaaacatacaactacacactcatggaaacaactttttttgtcttgaaaagccaacagaaatggaatttattaagatgaaccaagacaggtacactcatgtaatcaactaattggtgttgttataaaatagactgtatgctgccatgcataattgatcatcttccatcatccaaagcaatcagtacatgatccctaatgctatcatacccagcatattgatggctgctgctatcaccaagctcataaatgctagatgatgcctcgtgaagaaggtgttgagtctcctcaacattttggtctgtattaatccagggatgcttctccattatccttattccc

SEQ ID NO: 284378 - DNA, 576 bp, Zea mays
gagtttaattcgaaactttctgactttggtttagctaaggcgggtcctactggcgatagaactcatgtgtccactcaagtaatgggtactcaaggatatgcagcacctgaatatgttgcaactggtaggctttagcttcacctaaatcatgagttggtggtttaatttcggctcatcatactgataactggtgtctgggttttcatgattttccttatgagttttagtcctcattttcgtttcaaaccaggcattttgtgcctcaactttttaggatcatcatgttttttatgttgtactactccctctgtcccaaaatgattgatgtttaagcctttgaaaaaaattctacattgattgatcttctcacttttcaatgaaatattcaaacatctatttcaaatttaccctgtaataaataatgttgtcttgaaagacttaataatacatttattgaaattaagagagagaacaagaatattttagtaaaattgtctactaaccatcagtcattttggaactgagggagtatttcataggatgaggaatgctaataacgcacactcttaccctcta

SEQ ID NO: 284379 - DNA, 841 bp, Zea mays
tttttttttttttttatgcaatcatattgtcttataaatatggcaaagtatatactacagaattcttaggtattcatgttaaaacatccttatacatatatcaaagatataaaattaactgaacaaaaaaaaattatgagtttaaatctctcatcaacaaaaactaatatatttaaaactaatatttgcccataaaaataataaaatccttatacatgtatcagaaatctttaatcctgaagtgtggcagaggagaagtcccatcaaggcctcttcccagggaataggaaacatagccttgcactgtagtttccctgtacttcggaggattatcttctgatactaaatcctttatggggccataaagctttgttgatggctgaagacttgtgctaaaaaagcttgcaactgatactcttggacctacacggtttgccaccactctgtgctcaacactcttgaatttgtcatttgttataagctgaagaagatcaccaatgttgatcactagagcacctggtacaggggacacatccacccacctgttttcatgaagaacttggaggccaccaatatgatcttgcagaagcacagtgatgaagtcattatcagtgtgcttggttgcacctaaagtcaattctggttctggacatgcagggtagcaatggcaaacaagtgtaagtccctcattgcaaccaatgtcattcaaatagtttggattcagctcaagggcttctgataataactcaaacaacacactccccagcttcttaacttcttttgcatattccagcagtatgtctctgcacactgatggcaagtcttcgggttttggtggatg

SEQ ID NO: 284380 - DNA, 751 bp, Zea mays
gaaaagcccggtggtgctggcgagtttggaaagtactttagcttgcctgctctcaacgatcgtagaatcgatagacttccttactctgtgaggatacttttggaatctgcaatccggaactgtgatgagtttcaagttaagagtaacgacgttgaaaaaattattgattgggagaatacctctccgaagctggtggagattccattcaagccagctagagtgcttctccaggattttactggcgtgcctgctgttgtcgatcttgcttgcatgcgagatgccatgaacaaacttggtggtgattctaataaaattaatcccttggtaccagttgatcttgtcattgatcactctgttcaagttgatgtggcaagatcagaaaatgctgtccaggcaaatatggaacttgaattccaaagaaacaaggaaagattttggtttcctcaaatggggttctaatgcattcaataatatgcttgtcgttcctcctggatcagggatagttcaccaggttaatttagaataccttggtagagttgtgttcaacacaaatggtgtgctttatcctgacagcgttgttggaactgattcacacacaactatgattgatggcctgggtgttgctggatggggagttggtggaatagaagcagaagctgcaatgcttggccaacccatgagcatggtcctaccgggtgtcgttgggttcaaattattaggcaaactacgagatggtgtcacagctactgac

SEQ ID NO: 284381 - DNA, 460 bp, Zea mays
gcaaagaacaaaatactgcattcacttgcatactcacatttgtagcatgttaaaagaaagaaaatggaggtggaaccttccagagcgtacaaatttcaagacttctgattgcgggacccccactggaatcactctctctctctcctaatggctctaatgagtagacatcccaacccctatccctccaataggagatataaactgctggaacttggtgcactctccaataatcctcacctccatttggacgcagggctgtaataaattcttcaggcatatcaaaaagctctattgattttagttttgttaggtgctcaatgcctaatggtacctgcttcaatgaatcacaccgctggatgatgagctttttaagaccaggcattgctccctcctccacagtcatagatttcagtccatctaaataatcaagtcctaacaccttaagactaggaaacccctt

SEQ ID NO: 284382 - DNA, 452 bp, Zea mays
ggcggccgccctttttttttttttttttttttttttttgttttcaaaaaatgttcctgatttccttaattctcaagagtcgggaggcagcaatagaaggcaaatgtttcctaaaaactcaactgtaaaaccagtaaaaatgtaacaaggaattttcatcctcaatgaccaatagaatttttgaaaaagaaaatcacatttcttcaacaaacgacagtcataactcttcctcgtagtagccatctagttccttggtttattgatacaatagctgaatagcaatggatttccttgtagcaggccatactagattattaagaccaaagttaagaatcagcgccagtgagtgctatcaattaaacctgcaaacttggtttatatctgattcaatgtttagcattgaccatgtttctgatgacatattgtaagatgcctccatggttgaagtaagct

SEQ ID NO: 284383 - DNA, 923 bp, Zea mays
gattaaaaaaaaaaaatagaactcaatcatgttttccatgcaaggaccattacatatggcactctctttttcttttccttttccttttcatctttttcctgtttcttattgccttgaaggctcgttgcacttagtactagtacgtggcacactatgtaactctaataattcacctatgtacagtaaagatctatatgtgtctactaacccatgcttcgttgagcttctgatgcattgaatgtatcaggtgaattagacccactttttctaccatttcggtgttcatcattctgtgactgatctgatggcattggtgtcttaggagatttaagtggatgatgcctatgaccattgtggcgatgatgatgatgacgtcggttatgatgatgaccattttccctcttcctctccttaggtgtttcactctcttttgcgacttcattgtattgttgttgttcagctggaacagtgtaaacaaagggtccaattggaacatcatcaaagtcctgaagtggctcgagaacattaaccacagtgctcatcaagggtctactccttggcctgtggctaaggcattggtaagccaatgcagctgcttttcttgccccaacctcagaatactgaccctcaagccttggatccattattctgctaagtttccgggaatcattcaaagcagacctggcccattccacgaggttctgttctctttgtgggcgccctttgtccactgaccttcgtcctgttagaagctccaagagcacgactccaaaactgtacacatcactcattgctgtcaagtgtcctatacggaagaagaaaaaaatgtacacgtgtgagatttgagctagcaatgagttaaaaattaaactccaagtcaacctgtcattgttttttacttcttgatgtgaaattatttacct

SEQ ID NO: 284384 - DNA, 297 bp, Zea mays
atacggcatcgttaccatggtcaacaagaatgaaaattgcagctggagctgcaaagggtctagcctttctacatgaagcaaagaaaccagtcatctatagagatttcatagctgcacacgtcgtgtgagaatcagcaagtgatcgattacgaggaggaggacgagagagaagcagagaaaaacaagcataagcaggctcctccttctctcttccctattagtgtgagaaaggggtttagtggtgaaagagtgaagagagatgagtggagtgaaggggcagtgtccaccctacttgag

SEQ ID NO: 284385 - DNA, 427 bp, Zea mays
atacggcatcgtttccatggtcaacaagaatgaaaattgcagctggagctgcaaagggtctagcctttctacatgaagcaaagaaaccagtcatctatggagattttaaagcttcaaacatcttgttagactcggggagtaatcaattactagtcactttctctgacatactctaattaatgcaccgtctgggcaatttcactccttaattaatcaattatgaactcactctttttaattattcttccaggattataatgcaaaactttccgattttggcttggccaaagatggtcctgaaggagatgacacacacgtttcaactagagtcatgggcacacaaggctatgcggccccagaatacatcatgacaggtaaataatttcacatcaagaagtggaaaacaatgacaggttgacatggagtt

SEQ ID NO: 284386 - DNA, 932 bp, Zea mays
aaattccaacacaaaattaatcaataaaaaaatgatgcactgcaggtttcaactgctccatcccacagaaatatctgggcaaaaaaagaaaagaaaaactacattttttaatctgaatcctggtggcagatattgaaacatcctttagtatctgttgtaggagagctacaatcacattttcttcttcacttgcaagccaaacacaatttgaaacattgattgcaccttctctttcagaagaagatacagaaatagagggaaagaatattaggattgaaaggaggggaagaggaaaaaaaaagagatgctgcccatccagtaacaaaataaggtctcctgccaatccaggaatttcaaaacagccacttctggatcctttttctaaaagctctctgaagggcacttgtagtgtgagagttaatagtgtatatgtatcctccaacccagtgtggttggtaagatgggaaaagaagaagccttctccacagcaatatgatgtgaccatgcagatacacattgcgccttcaatcatctctctttacgcatagtacatgtacaagctatttgcagcagcacaagcaattgaattctcacttggatgccatgctaagtgcagcaactttgttgtgaaatcaaaagaattcccattagcatccactccaggggcttctgctccccgtcttacaacacgtgttatactatttcccagtgatctcgaaggccttgaaggggttggaacttgtcgtctcattggatttttactggcttctagagttgtagcctcagcacttccaggggcacaaccaaacacacgaaatagattactgtaagaaccagttgctacgcgcaatccatcaccacttagacaacattcgaacttatcgaagattgaatcattttcatataaatcacaaagcttgggtctcaaatac

SEQ ID NO: 284387 - DNA, 418 bp, Zea mays
gtgtgagtgagtgaactcaattcaactcaacattcttcaatcaaatcagccatggcagcagaacccacccgccccgtaaaaatcatcgccgccgccgatgacttcggcactcctctcaaagacgccctcgtcgctcacttgcgcactctcaacatccaagtcgaagatctcggaacctcttcctactactccgccggagccgaggtcggtcgccgagtctcccaatcctcctcctccgacatccgtggcctcgtcgcctgcggcaccggcgccggcgtctccatcttcgccaacaaatatcccggcgtctacgccgccacgtgcctctccccctccgacgccgtcaacgcccgctccatcaacaactccaacgtcctcgccgtctccggcaagtacacgtcgccagaggccgcagtcg

SEQ ID NO: 284388 - DNA, 391 bp, Zea mays
gagcaacttcatttgctgaggctctccgcatgggcagtgaagtttatcatgtattaaagggaataatcaaggcaaaatatggacaagatgcatgtaatgttggagatgaaggaggatttgctcccaatgttcaagataacagggaggggcttgttttactcatggatgccattgacaaggctggttatactggcaagattaaaataggtatggatgttgcagcttcagagttttacactaaggatgggaagtatgatttgaacttcaagaaacagccaaatgatggagctcatgttcactctgctcagagtcttggtcaactatataaagattttgttaaagaatttcccatgtgtgtcaattgaggatccgtttgatcaagatgattggg

SEQ ID NO: 284389 - DNA, 420 bp, Zea mays
ctagtgtggttttttcccttcatcgtcttcctcttgaaggtattgaacttgttttgttatgtgtttgccagagggagagagagagccatggcactagaggcagtggtatttccacaatcacaagacccttttggtggtagtggttacggatcagtgaataataaggacttctacaactgcaccttgttggctgctacttcacccaactcatggggggactatgagcaacacatcaacatcaacaaagaagaagaacaaggtggtgcttctatctccacttttcaaccagagagtaattacccttatggaaattggaccagctcctcctcatctatgttaccccacttcaacaatgaacttcaagaaaccactactactgaccccagtaacaccttagatagcttaaacactcgtcccaag

SEQ ID NO: 284390 - DNA, 516 bp, Zea mays
gccaaaaatcttcggctctcattttcattcaattttatttttgagatgttctcaatttcagcttgacaaattaatggctttggcttatggttgaggtagacaagacctaccaatttcaaagctaggtaggcaaaattgaccaagcactagaatatgtctcgagcaatataatacacagccttctccaccccctaccccagagaaaaagagaagagagagatagagagagattaaaaggagctcgtgagctacacagacatacacaagaaggaataaaccaaaaaacttcctccaaggagcccacatcaaggcaccatcagtagattaacaaagggtgaagtgaacagaagttgcaataattaggtacatcttgaaagaggaaaatagcgagagacaatgatccaccatgaagtaaggtgttgacatgaggttaaaaaccaagtggggcaaggcaaatttggtcaaggtttgatcttaattcaacattgcctcttgctgaattttatctagcatctg

SEQ ID NO: 284391 - DNA, 454 bp, Zea mays
agtaacttcaactggtcttgctcctgaaattgcttactttcatactgaggaattttctgaagaaggtcatgatggaggaaataagagctcggaatttgttaatgacatcataataaaacctgctgaccgtcataatcttttgagacctgagaccgtggagtcattgtttgttttgtaccgtatcacagaagatccaaaatatcgggaatggggttggcaaatctttgaagcttttgaaaatcacacaaaggttgatactggtggatattgttctctggacgatgtaactagtgttcctcctcatagaagagacaaaatggagactttctttctaggagaaacacttaagtatttctacttgctttttgcggacagctctcttattcctctggataaatttgtttttaacacagaagcacatcctataccaatcaatttgaagaaatgagtataa

SEQ ID NO: 284392 - DNA, 472 bp, Zea mays
gttgcaaatgaatcatcattgctgtagacgagaacaggtctataaagtgtgtaaatagctagttagttatacattacatatctacatcaccttacatcaaggtacttaataacaagagttaaatattgaacaaggaatgcaaatttcttgcttccttcactttctgatttagaaaaaattaatatggtttggtattatttccaaagtgttaagtgttggatttatgtgctgcggcaagttcaacagataagatgaaagatgatttgcctgcttcccttatgtaacgtacgtctcccttcatgagctttaacagctttctgctaatcagcatgctaataccctcctcagattcatgtccatcacgtccaaacatctggttcagcaatgtttccatcaatgatgctgtcaagatctgagttatccagaattttgctaagctggcgttgacactgcgtgctcgtttgcagaaatt

SEQ ID NO: 284393 - DNA, 736 bp, Zea mays
attgagtaaaactgtgaaggcattagatgaaactgtcaaacaattacaagctgttcagtttttcatgtttaaagaatacaagatttgatttagatacatatatactatatgtgtatcacaaaaatttaaagagacacactctcaagtaccactttatcaattcttaatgctaaatcttgagtcgatcattggccccaggcagctatattcagtaggccaagctccatttcttctattgctcaaagctttttttctgcaaaattaccttgatctttcagttgatacaaaacaacgaaggttaccggtgcactcaaatcatctgggatacttgctagaaagaaataaccaatggcatgatgcgcttatggtttccatggtgctggtggtggtggcggtgttggaaacattgggggaacagcagagaaaatggtatttttgtcaatcgatgtgcttttgtcgcctgacaatgccactagtgctgcaactaaaccagcatttccagcaagagttggctctgtgtaattgtagtttgtacgaacatcatggaagccatcatgcttgtcaggaccagcaaccatggcaccaacaattgtatttgggtttggcttagaagtgtccctccatttccatccacccttacagctatacttgatcttgttcttcggtatagatgctcctctatggtgaacatgttttgggtaatgattaccaaaacctacaacatagctcattttcc

SEQ ID NO: 284394 - DNA, 168 bp, Zea mays
aaagaaacatcaactatcccatttaaaagccaaacgacgggtgtttatcgtcttaatatcacagtgcttgcttgcacaaacaaaaaatcattacaccaaatcactaataatcccaaaagaaaatttgactctaaagcagaacaagcaaacaagttgcagctcgagccg

SEQ ID NO: 284395 - DNA, 689 bp, Zea mays
agctcatcacaaatttggctgattgggctccagaataattagtacagaattgctgcataaaataaatgaataaattatactacaaaaatcttgctaccaatgaactagggctatatggagccttccgtgagtaaatcttgctaatacggttttgatgcaattttcttcaaaaaaaaaacttggtaggaaaaaaaagaagtatgaaagcttaggtactgctttaatttcttgcttatatttgcggcataaacctatctctatctgccttcattgttcattagctgggaaaacacttggctagtacttacatctgaagaacagttataatgatccctctctgtccttctgttggtagaaggattcccaggaataattgcatttgtcacactcacaaattcttcactagcatgtctattggcatgtggctccctttgttgaccactttcttggagctgaagtgcatattccaaattccacaacacatcacccattgcaggcctgtcaacaccatattcagccaaacatttctctgcagtctcacaaaattttttcaaggagttttgttggatctgtccaacaagatgaggatcaacaatttgctccaccatgcccttttgcagccattcaagtccccattctgccaaattcacttgttctcttgcaagttgtggatcaacagcaggtcttcc

SEQ ID NO: 284396 - DNA, 1120 bp, Zea mays
tttttttttttttttttttttttttaaatttcatttaaagtttgtatattgattgctaagtatcacataaatatttctcatagctagtaagatcttacaagtttgttcccattacgtgcctttaggatgttggtctttaactaacatatcctatgtttcttaaatagaaggaatggttcaaagttagtttggatgaatggcacaagatcaaattgcctgggaaaaattgtacaaacaagtatatctataactgcaattagtcctcttaactccacacaaaattgccacaatgcaatatgaccttccaaaataaggaacccttggatctgctcagtcactgccttttaaaaaaaaacgcatacctttcaagaaactagctaggtgttcatcacttgcgtatggaaagatcaatgtgaagatatgccacggaagccacaaaaaacaagaaaaatgcagataccagcatcaatggctcagcaagcatgaatatggggttaaacctgtagtatacctggaaaggagtattatgctcaggaactgcatttcttttttctagaaccaccacagttctgccgacaacatcaaggtatgaatacttgatctctagatgttgcttcacttcaaaaggaatctcaacagtgggatctttggatccctctggcagcacaacttttacaatcaacttgtcaaccactgtctcaacaagagggcaaccaaaagtaaaattgaggtatcttctgccatctggagactcaaaaagaaagtcttgcaatggtagcccataaccaatgacaaaggttgatttccagcctccaaatagaggataccgaggttcaatttcaagttctgacttccaagaatctgtacgtagatgtgacgacgaaatatttcctattccatccctgtagtatactgagtgaaccctagggggtagtttcgctaaaagatgtttaaatgaagagacaccagtaccacctggtttagtttgatattcaacccttgaaaaaacacctttatgtcgagcaccagcatggaccaagctatatcgctcagtgacttgaacgcttcaacagtgagatatttcaatttcccgttctagctcctcaacagcagcaaaggc

SEQ ID NO: 284397 - DNA, 277 bp, Zea mays
aaaataaacaaagcgtaagaaaatgaatttcacttcaccaagcattttttttcacagacacgaaatgcaaatttcccctccgaaaaagggcaaaaacatttaaaccgaaagaaaccaaactgaacctaaaattatttactaaattggccaaataacaaattcatagaaagaaagagaagattgggatcaagagagaggagccccggggggagagaatccaggggcctcttcttcgtccaaaaacaaatcattggttttcctcaacgccgggggcgcc

SEQ ID NO: 284398 - DNA, 480 bp, Zea mays
gttggtttatttccgtgatagtgcaatattattgacttatttctactgggaaaggttccagagaatgtgtcaatatgtaaagcacctctagtgttgtggtttcacctttacttaatggagttaacaaagttatagagaaaaacttagttccatttggtccatcaggtagctcggcagatttgacacattctctggaacctttcccagtagaaataagtcaatcagagtcacagttggtttatttccgtgatagtgcaatattattgtctccctatcatgtcaagcaacagacaacttttattaagactccaagcactcgggtagaatcattcacagtgatggaccccactaaacgtgctggtacagagttgaaatacgggccatatgaaaatcatcccccgtattcatattctcctgtacttattcattttgaaaataacaatgcctttgctgttgttgaggagctagaacgggaaattg

SEQ ID NO: 284399 - DNA, 1180 bp, Zea mays
attatattaattaatagcattatttgttaactttatgtgcacttacaataataacattttattaattagcttccacaacctacccttaattaacttcttccaattcttagagatgaatcaacacctttactgttgacacttgcaaagatcctagcaatctctaattgtgtattggcaataatttcagttctcttgaggtccatttcccctctcttggcctcagcttcaactctcatcctctctatctccttcattgtgtccattcttgcttgttctgaccttatcatagcttcagctagccatcttaaactttctgctatctccacatattctttccttcttcgtcctgtgttgtgatcaattgttttcttcttcctcttgttgcttcttaactcctccttctggctataaagtgctggcgtgctgctatctgtgtccaatggattcttgctagatacttgatcagatgacttagttcctaacccatcttccttagcaagcttctcatcaaccccattggatccatgcgagttttgtgcattagcaagtggccctgaaggagccagcggttgcgacggttccaccggcgacagaggcggcatgggcgcagccaccatcagcggccccggcggcgacgagaagacgggcccagttcccctaagaagaagatcaagccgtgaataaagaggccaagatgatgatgcatgatctgctgttgctgattctgatctgtacctcttcttcatggactccaccttgttcttacactgcgttgaagtctttggtgacttggtgcagttggcacgtgacgacacgtgccgggccacgtcctcccagtcatggcccttgagcttggctctgtttcttagcccccatttggcctcataggcctcaagtagggttgacactgccccttcactccactcatctctcttcactctttcaccactaaacccctttctcacactaatagggaagagagaaggaggagcctgcttatgcttctttttctcttcttctctctcctcctcctcctcctcctccatctcttgttcatcatcaactcccatgtactattaagttttttcttttatccctttgggtgtgacatgatgaatgaatatgactctatttgtgggagagagaaaaccactagcattgaaaaaggggtgaaaatagt

SEQ ID NO: 284400 - DNA, 366 bp, Zea mays
cgagtaccaccaggaaaccctcgacaacctccgcgccgccatcggagaccaccggtattctctgcgccgtcatgctcgacaccaaggggcctgagattcgaactggttttctcaaggacggtaagcctatccaactgatacaaggtaatgaaataaccatttccactgactatgacctaaagggagatgagaagacgatttgtatgagctacaaaaagctgcctgaggatgtgaagcccgggatggtcatactctgtgcggatggcaccatatcatttacagttttatcatgtgacaaacaagcaggcttggttcaatgccgatgtgagaactctgccactcttggcgagaggaagaatgttaatt

SEQ ID NO: 284401 - DNA, 468 bp, Zea mays
ttcttttttttttttttttttttttttggaaacggactcagaaaacttaagcacaaaggatttatatacacaaacctccggggaaaataaaggaaaaaaaaaaaaaaacttcacatcctccaaacgctatgtagttctccaaacttaaaatcttcaatttttacacttgacaagaacgatggggagaacaaatatggaacatggaaaagtttatataaattatcaacctcaaataatcgtaagaccaaaaactcactcatcactttcaacctgccacttactacaacgagcgacttagaattttctcttttaaatcccacaaagcatgtagagttagtcacagcagccaaccctgcttcattcgtgctggagagaacaattaaatgcaaggattactattgtcaaggttcttcttccgcaagctgcgcattggatccatgctttatatctggaggaaaccaaactttc

SEQ ID NO: 284402 - DNA, 1208 bp, Zea mays
cattatccagaaggggctagttttttggttcaccaaaagcctcgtacaaaatcttaacaaatgaaaacaagtggctactcgccacaatgataaggcaaatgtaacaaaaaaaaaaaaaaccagtaatatatgatatgtgaaaaacaggtaaccgatcctaataaatgcttttaattgaagtttgcatccaatgtagatatgaagaggtatatcgagacctcttttgcaccatccaaaaaatttgccataaacagcagaagaattccttgtaatgggggtgatcatttcacagtcaagatcttgatgatagatgcagtgcccacacgatgcagtgccaccactgaatccccgttgtggcagagacccttggacttggcatgttgcatggcgaattctattgcttcttctgttgtttcagcatgagaagctctagcagaagctgcactcaacacgggaaccaacccgcggaatataaggctatgtctcgcaggggcctcatcactgcatgcccaatcaaagctatcagtcttgagctcgggaacaaccacggaaagaattggcatccctggcctgtatttcgccaccaattttgcagtactccctcctctagttaaaaccaagataagagccgctctagccgagttggctgttctaacagcagaagaagctagactctctaatgggctcatgggtaccggtgagtgctccataatccttttgaacacatcaccatagtcaagggtgctctctgcttcaatgcatattttagccattgtttgaacagcaaggtctggataggctccagcagcggtttcaccactaagcatcacacagtctgtgccatccagaactgcattggcaacatcagtagcttcggccctggttggcctgggagatttgatcattgactccaacatctgggttgcagtgacaactggttttccttggatgttgcacttgtaaatcatcactttctgtgcgagaaatatcttctctattggaatttccattccaaggtcaccacgtgccaccataaatgcatctgaatttgcaaggatttcatcaaaatttgcaaccccttcttggttttcaaccttagacatgagcataatgttcttagcatgttttcccagaactttcctgacttccaccaggtcagaaccttttcgaacaaaagaaagagcaatcatgtcaattttattcggaat

SEQ ID NO: 284403 - DNA, 473 bp, Zea mays
atccttacaaaaattgcctgcacatacatacaaccaatcatctgtaaaatattacaagcgaatatatctacacatatctacctgtatattttgtacggttttgtgatttacatcacttttttacgaacaatgggcaacaagaatgaggaagaaaaaaagtagcaaaatcagcagcagcagcagcagcacagcataggcttttttctctttcagctttgttgaggtacacctctccagagatccattaaaatcatcaaatatttttttgctagatttcatacgacaaactcatgcagcaaatggggattgccaaacctgtgttgttgctttcctgaatccgtgaaatgataatctagcaaatcagtctccggggaagaggccaatgcttgattacgtcgtttgcgtatggcatcatcagacatggcaaacccatcactttcacagttcctcaactccaatgcaagggaaacgtg

SEQ ID NO: 284404 - DNA, 459 bp, Zea mays
gttgccgccttcaaagagggagtttaaagatatttatgtagtctttgagcttatggagtctgatctccatcaggtcatcaaagctaatgacgacttgacccgcgaacaccatcagttttttctttatcagatgctacgtgcaatgaagtatatgcatacagctaatgtatatcacagagaccttaagcccaagaatatactggcaaatgcaaactgcaaactcaaagtttgtgattttggattggctagagttgcattcagtgatgccccaacaacaactttttggacggattatgttgctacaagatggtacagagccccagaactatgtggctccttcttttcaaagtatacaccagcaattgatatatggagcattggatgcatttttgcagaggtgttgacaggaaagccactgtttcctggtaaaagtgtcgtgcacaattagatttgattact

SEQ ID NO: 284405 - DNA, 323 bp, Zea mays
gctgatgatggtgttggtcactggaaaagagagaagcaaccaagaatgggctaagttgatttcctctgctggctataacaactacaagataactccagtctttggcttaaggtctctcattgagatctatccatagttagttaatgagatgtgccagcactctatcattcatatatgtaagggctataattcttctgtttcgatgcatgagtgaatggtgaataagtaacaatagcaatagactgaactctcttcatcataggtgtgttgttggaacaggactgtcaaggaaggagagagaaaagatctgaggataagtatag

SEQ ID NO: 284406 - DNA, 437 bp, Zea mays
gtgagtgtttcttttttttctctctctctctgaacttgaactcaacccttccttcgttccgcgacaacgatgaccaactacggcacaattccaacctcctcctcgccttcgaccaacctcgacttcatctcacgcgccaagcagcgcgtcaaggagggcctcggaacccgccgtccatggaagctcatgttcaatttccgatccttcggtctccccgccggggtcggagacgccgtcgcgcgtgtgagggagaacatctcctacttccagatgaactacgcgatcgtcgtgctcatcgtgcttcctgagtcttctatggcatccaatctcgctgatcgtgttcgtcgtgctcatggcggcgtggctcttcctctacttcctccgcgacgaaccgctaatcatcttcggaagactaatcagcgaccgcgtcgtgctta

SEQ ID NO: 284407 - DNA, 445 bp, Zea mays
atgagcagcaaaggatcactgatgttgcttcttcctctaactcttcatctatgtcatcttctaaacaatatgatgttttcctgagctttcgaggtgaagacagtcgaaggagcttcacaagccatctatatgaatctttgaatgaagtgaaagtccaaacctatatagatgatcgacttgaaaagggagaagaaatctcacctacactcaccaaagccatcgaaaattctcgtgtatctattgtcattttctcagagaactatgcttcctcaaagtggtgcttgggtgaactcatcaagattatggaaagcaagaaagaaaaaggacagattgtgattccagttttctacaacatagacccatcccatgtgaggaagcagacagggagctatgagcaagcctttgaaaaacatgagggagaacccagatgcaacaaatggaaaac

SEQ ID NO: 284408 - DNA, 475 bp, Zea mays
ggttccaaatttggaatgttgtcactagtcagtgtcaaactgttactggtgaaaagtacatattggtagaataataatggttaaaaagaagtaaatatagaaacaaaatcaacacatggaatgtaaggcatgtccaatttaattatcttgctgatggaaggcaaccatttgatacgtcagggctctcaatttcaagaaagcttgtgagtaaagttttccgggaagaatgtggctttgaactactactacctgaaaatgatgatgaagactttagcttattcgctgttcctttttcaatcttgatagcatcttgtatagccaaaatgatttcttgcatccttggcctggaggcacccatgttgttcaacacattgcatggcaatttcaaccaccctccaaatggactcagttttggcatttccttctagagaagggtcaatgatgctcattgcatctcctttatgagttaaggatc

SEQ ID NO: 284409 - DNA, 350 bp, Zea mays
ggggagaaacaatcaatttttttattaatcaattaaaggggggccatggaattcccaggggggcaatctgaaagcaaaaggggaaaatcttaccagacctaaacccgtctaaaatttgatcaagttccttccttcctcccaaccccaggctttagataaagcatcctagtttttggatgcatctcttttaaacctaacaacctatgacaatccatactgaaagctccctgaatgcctgggagcagcaacagctactgctgcagccccaactccaccaaattgagattgggcctgcagtagttttgcatcaagggaagcaaccggatcatttaagggacccctctttccct

SEQ ID NO: 284410 - DNA, 319 bp, Zea mays
atgagatgagacattaaaattggatccaaaagacaaatataaaggagcttattaatgaacagaatacatggcatgacacatgacatgatccaaactgaagtagtaattcacttggctaatcctaactccttatcaatagcgtttttagcagtgtcgagatcctcgtcaaagaacatatcccaatggccatcccacttgatgaaaaattcagtatcctcatgatacttaaccctatgcacatcccctgggggagggaataaataatccccaaccggcagaacatacctttggtccttcggaagattccaaacgctttttt

SEQ ID NO: 284411 - DNA, 432 bp, Zea mays
tgaatggaaaaagatgcttcctcgggatgaggataaaggggcttgccggaaaatataaaaaagaaagaaagaggtggtaacacgaaaggcgcgtggcagccgctggtttaaccgaaaagaaagcaactttgtcctacatcagaggcaacggaaaagaggatcctttctgcttcttctcttctcttccacacaaagacatcgtttcattgctctctctcttgtgcggacacaatttttgatggggatatacctcagcactcccaaaacagagaaggcctctgaagatggtgagaacgacaagcttcgcttcggtttgtcttccatgcagggctggcgtgctaccatggaagatgctcatgcagctcatccatgtttggacgagccacgtcatactttggtgtttatgatggcatggaggcaagcagtttcaaa

SEQ ID NO: 284412 - DNA, 1053 bp, Zea mays
aatagagatatcaacaactctcactcacaggaagactggagccattaccagtgtaatcgttgcaagcatctttatgaggacatggattgaaggcccagctgtgtctttgaatgggtctcccactgtatctccagttatggctgctttgtgagcctcacttcccttgcctccaagagctccagtctcaatgtacttctttgcattatcccaggcaccacctgctgtgttcagaaaaagtgccataagaataccagacactgttgcaaacatgagcaaagcagccacaactttggccccgagtaaaggttgccctgtatagtagcccaaaattcggaacagaataccaactacaataggtgaaatgattgccaaagcaccaggttttatcatctctcttaacgacgcagatgctacaatagcaacacagcgaccataatctggtttctccttgtaatccattataccaggcctctcaatgaactgccttctcacttcgttaacaacttcttgtgcagttctgccaacagcagcacaggcccaagcactaaaaacaaatataagcatggaacctagcagcccaccaacgaaaacttcgggaatagcaatatcaacctgtttaaaaggttcatgagcaaatgcagaaacctcgtccatataagcactaaacaaaaggaaagatgcaagagcagcagaaccaatagcaaaccctttggtggtagctttggttgtgtttcctacggcatcaaggacatcagttatctctcggacactttcaggctgctgactcatctctacaattcctccagcattatcagctattgggccaaacatatccatggtaagaatataggcagcagtgctaagcattcccattgttgccacagctgtgccaaacagcccaccagttgggtttcctgtttcatctactagtccacaggtgtggcccagccagaaagctgagataattgacacactgatgacaaggacgggaagagcagtagattccagacccaaactgactcctgcaattatctcgagccgaatcggctcgag

SEQ ID NO: 284413 - DNA, 399 bp, Zea mays
gttttctttcaacgagaatttgtttagtttttgaacttaatggccaagaaaatgaaggaaactgatgcagaggaagatctcaaagaggctttcaaggtgtttgacaaggatcaaaatggctacatttcagcaagtgaggtatatgtataaacttttattctttctattcactttttattgtaactttctttctctgacggcaatgaccaatcaaagtattcatgagatttctgacaaagtaaggttccttcaaacttgaacaaaaagcaagtagggtcaagatgttgcagagtgcaaactagattacaactcttgaatcttcccttttggatttttttaatactttttctataaatgggggcgtttacttttctgcctacgtaatagaggctgcatatg

SEQ ID NO: 284414 - DNA, 308 bp, Zea mays
catgtacatgatgtctgtagacccagaggatgctcctgatccagcagaatatgtggaaattggattagagtcggggcttcctgtttcagtcaatgggaagaggctcccaccagcttctttacttgctgagctcaatgagattggtgggaagcatggaattggcaggattgacatcgttgagaatcggcttgtaggtatgaagagccagggagtgtacgaaactcctggcggaaccatactgtttgctgcagcacgagagttggagtctctgacacttgatcgtgaaacaatacagagtcaaagattca

SEQ ID NO: 284415 - DNA, 371 bp, Zea mays
gaggggaagtacttagataacagaaacacagagatggaaccacaaacatctctgaactttactttgatgctgactttcttactttatctgaacttggttatgggagtgctgagcgttgatcattatcgcagagttgactttcctgatgaattcgtttttggttcaggcacctctgcttatcaggtggaaggagcttctaacgaagatgggagaactcctagcatctgggatacctttgcccatgcggtgtatgagcatggagaaaatggagatctagcctgtgatgggtaccacaaatataaggaagatgtgcaactcatggtggaaacaggtctggaagcctatagattttccattttcttggtcgagac

SEQ ID NO: 284416 - DNA, 1258 bp, Zea mays
cactgctttctctctgtctattccgttcaaagcgttgcgtacaacagagaaaaagaaagtaccaatttcttgagagagaaaacccgaagaagagtcatggcttccaccttcgacgccttcaccgtcgacgacgaccacttcgccgccccctccgccgctgacaccttctccggctacggcgacttctctactttcccctccgacgatgtccccgtcgaccacgccgccaccgcggcgtcgccggagatcttcggattcagcgatcccgatccaggctactccccgtctcccttcgagcaagtgcacgagaatgggaacggaaatggaaccgtaaacggctacggcgacggcgttttcgtctccgatggaccggtgcttccgccgccggaagaagtggagccggaggaaggtcacgcacttcgggagtggcgccgtcaaaatgccattcagcttgaggagaaggagaaaagggaaaaagaaatgagactgaagattattgaggaagctgaggagtataaggtggctttctatgagaaaaggaagcttaatgttgagactaacaaggtgcaaaacagagaaagggaaaagttatacttggctaatcaagagaaattccacaaagtggctgacaaaaattactggaaagctattggggagatcattcctcgagaggttcccaacattgagaagaaaagaagcaaaaaggatcaggagaataagccatcaatcacagtcgtccaaggcccaaagcctggcaaacccacagatctttctaggttgaggcagatattgttgaagctgaaacatacaccaccagctcacatgattccccctcctcctgcacctgctaaagacgccaaagatgggaaagatggaaaagacggaaaagaaacagcatctaaagccaatggatctgcaccagacgccgcacctggatcacaaccaaaggatgccaccactaataacggtactgcagatttaccccacaaagaagctccaccaccccctgaggagcagtcttctacataactctgcctttcatgcatacttaagctctcacaatcttctgcgattacttttgccccccgcagttctttacggatccttttgccatgctattagtttctattgcttttttggtttgcatttatttctatcattgaggttttgtatcaattataccctttactgactattatgaccttggaaattcaaatgttcatgggttttaatacaccatttaaaaaaaaaaaagaaa

SEQ ID NO: 284417 - DNA, 732 bp, Zea mays
cggaagcaactaaatcaacattccaacaaagaagatacttatacatgactttcctcttttttttttttctttttacagatgaatacgagcattacatagcttttgacacgaatgacaatgtcatatttaacatttaaactacaccttttaaacaaggggctataggggaaaaccaagatacttgtttgtcacctaggaccagaaagctccatggcttcaactacgagggaagattcctctattaaatctgaatatctttgaggctcacaagaccgaaaccttggtgtttcaatcctctgggaggcctcccatttttcagctaagccatccccttctaacatcttcaatacttctgacatcttggggcggtgcgaaggattgaattgtgtacacaagagtgcaacctgaaccatttcttctagttcaatcagatcgaagttgccctttagatctttgtctaccatttgactcaatcttccatcctgggggagcttcttaacccaatcaagcattacacctttctggtttgccgctcgcccaaaatctagagccttatgacctgtgatcagttcaagcagcaagattccaaacccaaacacatcagttttttctgatgattggccagtggatagatactctggagcaatgtgaccgacagtgccacgcacagcagtggtcacatgcgaatctctatgatccagaagcttagctaaaccaaaatcaccaacaaca

SEQ ID NO: 284418 - DNA, 477 bp, Zea mays
aaaaagaacaataataatttcaagcagcaagctaagttatcaaacaatttcacatggatcccacatgtctttgaaaacaaaaaacaaaaaacaaaaaacaaaaaaattacccagttgggaacatagagagccaaaactttgattacagtaaatctcatctcacgttgacgtgcaccatgtcagctataactcttatttccaatcaaaaactacttccatggctataaaatgtagaatttttatggaagaatacaacttccatctgctactctcacagggatgccagggtgttggtataagatgttgacattgcagctagaacttcggtaaccgacgccatgacgcttagagcagctttcaaaacctcctgagggcatcctggcttgacaatggttcgaacctgttcaaggtactcctgaagtttcttaatgcggcccatgtagtcctggtcttcaacagaaagagttataaccttgg

SEQ ID NO: 284419 - DNA, 1327 bp, Zea mays
gaaaaatccacttcaatattccaaccgaaaaatgtcttcatattgtaccccaagaccttattcatctgggttacagtgagatcagatgtcccattaaaacataatttaagctcataattttattctaggaatgcaggcatcaattacatttagccaaatatgcattccatccttgaagacgatattcacgagctatctcagcagggtttgctgctttgatgatgccacgtcccacgatgatgatgtcactgcccctatcatggatcacagaatatggagtgttatattgctgccctaaagcatcgccaccagttaccatttgaactccaggggttgcctgaatgaaagaaggatttattggtgcccctggccatgatgcaggattgactgagatgaagccaattacaaagtcagaatgatcctcagcaatttttactgcagaagttgtataatctcccttggcaaggttaccagctgagctcatttcagcaagcagtaatagacccctaccacgaggtaaacccttcaattttaatccatcaacaattccaggacctgagattatgtgagcatttactatatgagcccaatccaatatacgaaaaacccctccttcatattgcatggtcactgtgttgccaatatcagcaaatttacgatcctcaaagattaagaagttatgtttttctgcaatcgagagaagcttagagccaaaatcagcagtaaaatctggaaaaatatccacatgagtcttcagcaagcatatctcaggtccaaccttctcagcaatttcaagcaattcagctgcagttccaacatcagcagccaaacatagattactctccttctcagccattatctcaaacaacctctttcccattggattcttcgacagcttagccctctccccaaatggcaaagctttgaccttagttacaggcttctccacctttgccaaagcagcaaccttacgattatcctctaagaacttcgtaacaacccctaccatctcttcatcaagcttcccgtgattgcccaaaattttcaccatttcagtcaatttaataattgcatgcagcttgatgccattctcctccaagttttctctgccaccttgctctctatcgatcaacacaacagcatcactgatctttaatcccacagcacgcaatggcgccgcagtttccaaaactgacgtgccactggtaaccaaatcctcaatgattaagcaactttggccaggcttgaaatcgccttcaatagctttagcagtgccataatctttgatttctttgcggcgcatgaccatgggaatgttctgagcaag

SEQ ID NO: 284420 - DNA, 374 bp, Zea mays
gggagataaagaagtatcattgacattgctgttaaagcagcacgtcatgcattcgacaacggtccatggcctcgccttcccggctctgagagagcaagaatattgctgaaatgggcagaaataattgaggaaaacgcagaagaacttgcagcactagatgcgattgatgcggggaagttgtaccatatgtgtaggaatgtggaagttccagcagcggcaaacactcttcgttactatgctggtgcagccgataagattcatggagaggtgttgaaaatgtctcgagagttccatgcctatacattacttgaaccacttggtggtgtgggacacattactccctggaattccccaataccatgttctacatcaaa

SEQ ID NO: 284421 - DNA, 467 bp, Zea mays
gatgctacctccttttttttattttcttttctgtaagaaaagtgtacataatttggaaccttcactgcaaggatcatgtaatttcgttacatttaccacttatttgcattatcctatccaaattaactcagtaacaccaataatgacaatagtagtcacgacaaacaacgaactgtgtcaatccacattttctatggacaattatatcaagtacatgttgagaaatgaaatcttagatgccctgctcaagcattgctcgaaccttcattggaagaccataaagccgaatgaacccagcagcatcagcttgatcatatatctgcccactctcaaatgatgaaatgtcttccctatacaggctaaagggactcattcgactagttacaataacagaacctttgtacaatttcaaagtcacagaacctgttgtggtctctgtgatcttctgcataaaggaatccatggac

SEQ ID NO: 284422 - DNA, 348 bp, Zea mays
gcgttcattctgttttcctgttgaagtctttccctagccaatggccaccgatcgtttgacccgggttcacagtctccgtgagaggcttgatgaaaccctcactgccaacaggaatgaaattttggcccttctgtcaaggatcgaagccaagggcaagggcatcctgcaacaccaccaggtcattgctgagtttgaggaaatccctgaggagaacagacagaagctcactgatggtgcctttggagaagtcttgagatctaccacaggaagccatagttttgccaccatgggttgctctggctgttcgtccaagacctgggtgtgtgggagtacctgagagtgaatgtg

SEQ ID NO: 284423 - DNA, 819 bp, Zea mays
gtgaggaaaaaggaatttctggacgcactaacagtaaacctggatactcgtttcttcggggtggaaatttaatggatgaaaatactacttgctatattacactctcggagttgaaagaagctactgacaatttttcaaagaaaattggcaaaggaagctttggatctgtctattatgggaaaatgagagatggaaaagaaatagcagttaaaagtatgaatgaatcatcttgtcacgggaaccagcaatttgttaacgaggtggccctcctatccagaattcatcacagaaatttggttcccttgattggatattgtgaagaagaatgtcagcatattctggtttacgagtatatgcacaatggcactttacgggatcacattcatgagagtttcaagaagcagaagttagactggttagctcgtcttcgtattgcagaagatgcagccaaaggtcttgaatacctacacacaggatgcaatcctagtatcattcaccgtgacataaagacaggaaatattctcctagacatcaatatgagagcaaaagtatcagactttggactctccagattagctgaagaagatttaacccatatatctagcattgcacgaggaactgtaggctacttggatcctgagtactatgcaagtcagcaattgacagaaaagagtgatgtatacagttttggagttgttctgctagaactgattgctggaaaaaagcctgtgtcatctgaagattacagtgacgaaatgaacattgttcactgggcaagatccttaactcataaaggagatgcaatgagcatcattgacc

SEQ ID NO: 284424 - DNA, 373 bp, Zea mays
aaatcatcatcattagtatcctttattaggtcccttgcaccatcaaaccaaacaacgaaataccatgaaagagccatacattttccatgatgactaagagagtatttttctttgggttctagatctggctacaatagttgtttcttaaaaggtaattaattaacaagaatatgatatgttgtactagactagggtcttcaattccttggcagtggcagcaatagggtagtcttggcgccctctcttgcggcatttaccaattgaattctctttcccattttgacccttcaaccaaaccccaaatagtttcaaactttctccattgtcacctttgggtggtggttgttgtggttcacactcacctaccgcattt

SEQ ID NO: 284425 - DNA, 475 bp, Zea mays
cagatatgatgtatgaccttatccacaaggctcaatcacgcgatgagtcttatacagctgcattaaatgctgttttggagaagcacagtgcaactgcacatgacatacttgatggagataatcttgctactttcttgtctaaattgcatcatgatattagtaaccttaaggcgatgcttcgtgcaatatacatagctggtcatgcaacagagtcctttacagattttgttgtgggacatggagaattatggtctgctcagatgttgtctctagttattaggaagaatgggactgattgcaaatggatggatacaagggatgtccttatcgtaaatcctactggttctaattcaagttgatcctgactatttggaatctgagcaaagacttgaaaaatggtactctttgaatccatgtaaggtaatcattgccactggattcattgcatgcacacctcaaaacattcctaccacac

SEQ ID NO: 284426 - DNA, 425 bp, Zea mays
attaaaaagacagttagcgaagttaaaaattataataaattctgtttacttccgttcctttacaatgtaactcacaatcaaggttaatggagttctgttccattcccttattattcttccagacaaaagataagagaaacaagcttacattactacaacgttataagaagcaaataacctacgaagaaaatcaagataaataaatagatggtacaaatttgcatgtgttcggatatccatcgacatcattcatttcgatcaaaattcacgttttggacataaaagcaattcttcgtcgcttcagataatgcgtgtcgtggagcagaggatgcaaaaccatacatgcagaaaattatgcttgcagaatgacacttacgatggagcaccaagatactgaggcaagtcgtaaaatatcactaaatatt

SEQ ID NO: 284427 - DNA, 292 bp, Zea mays
ggtgttcggatctgtgcactcccacattcttcgagttccctttagaactgagaagggaattgttcgcaagtggatctcaagattcgaagtctggccctacttggaaacttacactgaggatgttgcccacgagcttgccaaagagttgcaaggcatgccagatctgattgttggaaactacagtgatgcaaacattgtcgcttctttgttggcacatagattaggtgtcactcagtgtaccattgctcacgcacttgagaagaccaaattccccgaatccgacatttactgg

SEQ ID NO: 284428 - DNA, 888 bp, Zea mays
agaaattttattttttttttagacgggtctttgtgaacctatgatcttgtgaaaacccagaaagcgatctttgatgcactcataggattggccgattcagtcgcgtgttcggtggccgttgatttcgtgacaaatgaacggtggcgatgaggtagtggcagctccggcggctccaccgcaccctctggagtggaaattctcgcaggtcttcggagaacgcacggcaggggaagaggttcaggaagtggacataatttctgctattgaatttgacaagtctggtgatcatcttgctactggtgatcgaggtggtcgagtggttctctttgagagaacagatacaaaagatcatggtggatcaagaagggatttggagaggatggactattctattggtaggcatcctgagttccgttacaaaacagagtttctgagtcatgagccagagtttgactatcttaagagtttggagattgaagagaaaatcaacaaaatcagatggtgccaaacagctaatggtgccctgttccttctttctacaaatgataaaacgatcaaattttggaaggttcaagaaaagaaggtcaagaagatttctgagatgaatgttgacccttcaaaatctatggggaatggatctattgctagttcaagcaattcaagtagttctaggccatatcttgtaaatggaggatctccagatagatacaattatataagcaatgacttttcatttccaccaggaggcctaccatcactaagattacccatggtaagtagccatgaaaccagtttagttgctcgatgtcgtagagtgtatgcacacgctcatgattatcacatcaattctatttcaaataacagcgatggtgaaactttcatatcagc

SEQ ID NO: 284429 - DNA, 297 bp, Zea mays
ctcgagccgcggtgttcgcaacctcgtttgcacccttctcccaacatcacaggttgttgaagaacaagctgctgcaacggcctaatcttttcttccattgacaagtattttcattttttaaattgtacataaactcttcctatcattcaggcgttgctgcttgacctttgcttcattatatcataatgatgatgatgtaagtttcattcagccacataaccatacctaaacacagcaaagaaaggtatccaaaaaagaaataaactgttgtgacttgaaaaaaaaaaataataatat

SEQ ID NO: 284430 - DNA, 413 bp, Zea mays
aagaatagctctttctatcaaactggatggtgctgaggatctattgagctatgcttggcaactttggaaggatggaacacctttggaactgatggaccccatattaagagaatcctataatcagaatgaagtcatcagaagcatccatattgggttgttgtgtgtccaagaagatccagctgacagacccacaatggcgacaatagttcttatgctagacagtaacactgttactctaccaactcctacgcagcctgcatttttcgtccacagtggaactgatccaaacatgccaaaggagctgccattcgatcaatcaataccaatgtctgtgaatgacatgtcgattagcgaaatggatcctcgataagcttgatcgcttggaggttctaatatgtattattatccatgta

SEQ ID NO: 284431 - DNA, 330 bp, Zea mays
gtggagccaaagatgtaattttattccaaaaagagatgagaagatgagcccaaagggggggtcatacaaatgcattaatttgatttggtcggtcctactacaagctagaattgtaatcagaaggggaaagcccccactggaagacacatcatcgcccaaatctacatcttaatattctttggcccacttcttcataatcatatatccacatattccaccaacacgcacaagggcttcccgttcaaacgttcacgacccttcaattctgggaattcaattacacatgcccactccactacttctgctcccacacgttctaacaagtccata

SEQ ID NO: 284432 - DNA, 1141 bp, Zea mays
taggtgtctctcactctcccaccgaatccacattctaaagtaatacgccggagaatgacgtcacactcccactacccacccgacttagacgccgactccgtcacctcctccccacgctccgatcacttccacgacgcgccgccccgcatccgcttcatgtgcagcttcggcggcaagatcctcccccgcccccacgacaaccagctccgctacgtcggcggcgacacccgcatcgtcgccgtcaaccgctccatcactttctccgccctcattctcaaactctccaaactctcaggcatgagcaacataacagccaagtaccagctcccgaacgaggatctggacgcgttgatctcggtcaccacggacgaggacgtggagaacatgatggacgagtacgaccgcgtcgcacacaatcagaacccgcgatcggcgcggctccggctcttcctcttccccgaaggagaagactcccgcgccagcagcatcagctcgctcctaaacggctcagccaagcgcgaaaactggttcctcgacgctttaaacggcggcgtttcgggcctcgaacgaggccgctccgaagcctcttctatggtctctgaagtacccgattacctcttcgggttagacaactccgaagaaataacaaatcaccaacgcgacccgagacccaaacccggacccattattcaagataacgtttccgtttcagatccgggttcgcccgccccggttgtctcgtccccttattgttccacgtcatcagcgccgcccgtgccctctctcccgaaccttccctatgttaaaaccaaacctttaaacttaaatccggttcctgatactgactccaaggaaaatcaaaccgaacctgaaacggaacctcacccgaacctgaacctgaaccaaaacccgaacatgtattcaaataaccctgttgttcactaccctccagaagctgcttattcggcgcattcagtaaacccggttccggtttactatgtttccggtccggttcgaccgggatccgtgccggttcctatgcaaaccccttatcactacgttcaacaatcgtatcatgctgtggtgccacctcaggttcctatcgggtaccatcctttggttccgggttcgggtcaagtat

SEQ ID NO: 284433 - DNA, 928 bp, Zea mays
caggaggttaaataataacagccttacaggatcctgccctcagtctcttagcaacattgaaggtctaacccttgtggacctctcctacaacaatctgagtggttccctgccaagaatatcagcaagaactttaaagattgtgggtaactctttaatttgtggcccaaaagcaaacaactgttctactattttaccagagccactttccttccctccagatgcactgagaggccaatcagactctggtaaaaaaagccatcatgtggcacttgcttttggtgcaagttttggtgctgcttttgtccttgtgattatagttgggtttcttgtttggtggcgatatagacgcaaccagcagatattctttgatgtcaatgaacattatgatccagaggtgcgtcttggtcatttaaaaaggttttcattcaaagagcttcgagctgcaactgaccatttcaactcaaagaacattcttggaagaggtggctttggaatagtttacaaggcatgcttgaatgttgggtctgttgtggctgtcaaaaggttaaaggactataatgcagccggtggtgagatccaatttcagacagaagttgagaccataagtttggctgtccaccggaatcttctgcggctttcggggttttgcagtactcagcatgaaaggctccttgtttatccctacatgtctaatggcagtgtagcctctagattaaaagatcacattcacggtcggccagctttagattggacgaggcgaaagagaatagctttaggtacagcaagagggttggtttacttgcatgagcaatgtgaccctaaaattattcaccgcgatgtcaaagcagcaaacattttgctagatgaagactttgaagctgttgttggtgattttggtttagctaagcttctggatcatagagattcg

SEQ ID NO: 284434 - DNA, 461 bp, Zea mays
tgtcagtcaatgcgttaaccgttgcgtatgattattccaaacaacaagatggccagattacggctgggcgttcgcgccatgaagacctaattcgcaagggcctcttaggcgcggcagaagaacgctatcttccgggctggaataacacgatgaataagcccaaatacctctttcaagcgcccaaccctcttgggaaaatgaaagaagctccgcagcaccccaggatatggagcccggccgggcggatactgagctatattggaacgatagcgcttcaaaaaaatggacgactcttgagcctgccccttctgaatccccttctgctgcccctcggcctctaccacatcctttcccgcctcccttcttgtacacatagtgaaggatgatacaccgccctactcgaactaagaccactacggatattctgtcgccttcgacccaaaaaattccccgaccgaaat

SEQ ID NO: 284435 - DNA, 591 bp, Zea mays
tgcttcagtggctgattcaggttcggttaaccaaccgggtttcgtagtatgcgagcatcgttgttggtgggcccccccccccccccccccccccccccccccccccccccccgctaatgaagcaaacgaagaccggaagaaataatacagccacagactagcccggcgccccccccccccgcccccagatactaacagtatgaccagacatgcacctagagtaactagaactcgacacccatagacccaaagcagaggccccaaagaattttgcacatcttaaaaggaatacagcctccctcgaggcattaggataaatgcggacttgccgaagcagtatctaataccggcgcaccaaacgctaacacgccctattgcgagaataggtaaaggccttctcccgaacggcgctctattggcgggacgcgcgatgcaatggacggggccgcaagacgccgaacagccgctagacgccttttgttctgtaattacctaacctctcagagaatatctgaaggctaaggacccgccgcatccgaacgatacgtaatcctgggcccatacgccctcgcaggaccctagcgaacgccg

SEQ ID NO: 284436 - DNA, 489 bp, Zea mays
gtgcttctggatgactattgtgaggctgttgttggagattttggccttgcaaagctccttgaccatgctgattcccatgtcacaactgctgtccgtggcactgttggacacattgcaccagagtacctctccaccggccaatcatctgagaaaacagatgtctttggatttggcattctcttgttagagctcataactggaatgacagcactcgagtttgggaaaacagtgaatcaaaaaggtgctatgctagagtgggttaggaaaatactacacgaaaagagggttgcagtgttggtggacaaagagctaggagacaattatgatagaatagaggtgggggagatgctgcaagttgctttactgtgtactcaatatttgacagcccaccgccctaaaatgtctgaagtggttcgaatgcttgaaggtgatgggcttgctgagaagtgggcatcttcacataattacggtaatcaagacatgaacccc

SEQ ID NO: 284437 - DNA, 453 bp, Zea mays
gacagttgatttgaagtatctgacagttgatttgaaagatggtggctgcaaaatgttatccttagaatatggactgatctcaaaagtgaagctgcgagcacgagggagcatacggctcatgctgctcatctctgggaattctaagttatatttccacaggaatgtgtgatcttgatcaagttctctcatttggttcttccagtcgaaataggattttaacttatcattgttgggtagaatgtgtttgccataatcagatacatagtttaggcagtaactaaaaggacggtttctgcgtttaatatcattggtatctggcagttggaaaacgacacacagagcgaaaccaatgagcctatcatcactgcaaaaatttagagaaccggtatgtatagttattgaatgtcccttgccatgaaaagggaccaatgaggaacttcactccctggaaaa

SEQ ID NO: 284438 - DNA, 445 bp, Zea mays
ccgagcattacagggcaaaggactattctcttgctcatgctcccttctcaggtagcagttatgctgggggtcagtgggctgcaggtgatgaaccactttactatattgtatctctgaaggatgtagttattgccaaaccaagggatactgaagatcatatttcatggcttcttcagcatgggtggcatgaaaaagctttggctgtggttgaatctggtcagggacggagtgaactacttgatgaggtgggatctaggtaccttgatcatctgattgtggaaagaaaatacagtgaagcagcatctttgtgtcccaagttgcttcgaggatcagcttcagcatgggagagatgggttttccactttgcacatcttcgtcaactccctgttttagttccttacatgcctactgaaaaccccagactacgtgatactgcttacgaggt

SEQ ID NO: 284439 - DNA, 400 bp, Zea mays
aaaaaaaaataggggcgcatgattatattgataaaaaaaaatgacaacaaaagaaaccacacatgctcgttgtgcatggaactatgaactaaaacattaaccatgcaaacacaaactgtggacacatacaaaaacacactcaactagcagcagtagtacacaatatacaacgcatacgaggaccacccgatttggcttcttcatcgtcatcactagcatcatcgtcataaccattgtaatcatcatacgtttctgcctctagggtcgtggcttggacctctttcttgttactactagtgtaagatgaatccatgagacaagttgtgtgataaccatgacagcaaaagaaaacaatgaccgagacagtctgtatagaaaacggatcaaaacatatacaaca

SEQ ID NO: 284440 - DNA, 349 bp, Zea mays
caagatccaagagtttcagtacagtgacctcgaagctgccaccaatggcttctccgaccgcaagctcctcggcaaagggagccacggctacgtctacaaagccgtcgtccgcggccgtcccgtggcggtgaagcgtccatcgcggccacaccataatgttccccgaccggtctcttcttccgcaccctccgagatcacaaacgaggtcgacaacgagatcgacatcttgtccaaaatccagagcccgaggttggtcaatctggtcggtttcaccaataatgattcaagagacaggcttttggtggttgagttcatgagcaatggcaccctctacgatgttcttcatacc

SEQ ID NO: 284441 - DNA, 1028 bp, Zea mays
agaaaaggaaactcgtcaaacttagagagaaatactttcagcagaatggtggttccattttgctacagcaactctctacaagtgaaaactcctcccgaattactcaaattttcacagaagaagaactaaagaaagcaaccaacaacttcgacgagagcttaatcattggtagtggaggttttggaactgttttcaaaggatatcttgcagataacagagttgttgctgtcaaaaagtccaaaatagttgatgaaagccaaaaggaacaattcattaacgaggtgattgttctatcccaaatcaatcataggaatgtggtcaaactcttgggatgctgtttagagagagaagttcctttactggtttatgaatttgttaataatggtaccctttatgattttatacacactgaaagaaaggtaaataatgaaacttggaaaacccatctgaggatagcagcagagtcagctggagcactatcatatcttcactcagcagcctcaataccaattatccacagagatgtcaagactgctaacatactcttggataacacttatactgccaaagtgtctgattttggagcttcaagattggtaccaattgatcaaacagaaatagccacaatggtgcaaggaacttttggttacctggatccagagtacatgcgtacaagccaactaactgagaaaagtgatgtctatagctttggggtagtgcttgtagagttgctaacgggggagaaaccttattcttttggcaaaccagaggagaaaagaagtcttactaaccactttttgtcttgcttgaaagaggatcgcctgtttgatattgttcaaattggcattgtgaatgaagaaaataaaaaggagatcatggaggttgctattcttgctgcaaagtgcttgagactcaacggggaggaaaggcctagcatgaaggaagtggcaatggagatggagggaataaggataatggagaagcatccctggattgatcagaccaaaatgttgaggagactcaacacc

SEQ ID NO: 284442 - DNA, 398 bp, Zea mays
aggttcggttaaccaaccgggtttcgtagtatgcgagcatcgttgttggtgggccccccccccccccctaatccctaaccggcattgaccccccctgacgcaggaaatcagaccgcacacaacgaattagccaaaaacccgctgacaaagacaccctaacaaacagaaagactgaagcagagagcgacttaaagaagccccccctcgcctaaaatggaagataaacttaacccaccaatactaaggaatagattcagagcgactcaacgaagcaaccttctcctccacaaaacatagctcactgctggactgacaacctacgacgccggacgacggaaatgaacgatcagactacgggcatctgcacgacagggatgacaccttcttgctgctgcacg

SEQ ID NO: 284443 - DNA, 449 bp, Zea mays
ggctcgagggaatctcaaaaactactccttccagtttatctattccatcatacagtgaaaaaagcaatgcctcaagtcttcccacaccaaggtctgagggtgaaatcttgtcttctcccaatcttaagcccttcacattcaatgagctaaagaatgccacccgaaattttcggcccgatagtcttctcggtgaagggggatttggatatgtctacaagggatggattgatgaacacacatttacggcttcaaaacccggatcaggaatggttgttgctgtgaagaggctgaaacctgaaggttttcaaggtcacaaggagtggttgactgaggttaactaccttggacaactgtaccatcctaatctggttaaattaatcgggtactgcttggagggagagaaccggctattggtgtatgagtttatgcctaaagggagcttagagaac

SEQ ID NO: 284444 - DNA, 476 bp, Zea mays
ctctaacctaatcttatcctctcctctcaaaccaattcccacttttcctctcttcgcctcccctcagaaaccaatgtccataatcaccccacgccgtcatcctcaaacgacacccttccgctagcaaaacgactgcggtttggtcgtcgtcttccccgaggcatgctcttgggatattattattcatcatcgtaatcacaccctacagagacgttgactttgtgctttttctgggaggggaacaaatggaccaagctcttctggacgacataatcaatcgccttctcgaagttcgcagccggccggggaagcaggtgcagctgtcggagtcggagatccgccatctctgtgccgcttccagagagattttcttgcagcaacctaatttgttggagcttgaagcacccattaagatttgcggtgatgtacatggtcaatattctgatcttttaaggctttttgagtatggtggacta

SEQ ID NO: 284445 - DNA, 494 bp, Zea mays
ctttcttcattctcctcggagctttgctcgttattcttctttttcttttctttttttcgtttcgttcggaaaacgcgtaggctgtgccgtcgtttttagtgggtggatgggaacgacgtcgtgtgagtacgtgagctgggaggaggtgtttatgtcgaacgacaaggggaggagggaggttcattacttgcttaaacgacgaggcggtggctcggatctggccgttttgggaaaagagaagagcctcaaacacatgtcgtatcgctacgccattcgaaacacgtcgtcgtttcggccttactttaagctcaggtcgcgcagagaggttgttaattggttggattcaattgtttcagattcgtcttctggggatgcggctatggtgggaaaacatggttatgaacctgaaattggagccttgaaggataatcaattgcagaggatgcgcaattgtacaaaagaattctcatggatagggttgccatgggcgtgta

SEQ ID NO: 284446 - DNA, 494 bp, Zea mays
aaaagaacaagaaaattgctactcttatagaaagttttacacaaattacattggatcattttatatgaaaagaacacaatctatcctataagtcaaagccacccttggttattccactacgttacactttttcctatgccaaaacttgtatggcatcatccttgcctccttggcttcgatgccacaaaccacaaaactaatgaaaggtgggaaagaaaaagactaacctaagataaatttctctgttatcaaaggaaatggacgaagagaatagatactggacgtgaagatctggacaagacaggcatcgaaaagatgcactaaggtttaggggctaaatacatgtacttaaaagcaaaggagtgagagaagtaaagaacccggaaactaagatatgaatcatggagtcacctacacataaccatgttagttaaagaaggcacaactgaagaactgaagatggaaggatccccaacatacttgcagtcatcatg

SEQ ID NO: 284447 - DNA, 483 bp, Zea mays
catcattaaaatgacaataacattattaaatgaagagtgtgctttttagtattcgcactcaatggtgccacattcaccaacccatacaccttggccactttgcttttccattggacatagatatcattattccttttccctcgctcttccctttgttttctttttttcctttgtctaaaaagaaaactcacacacacacacacacaatcttccaaatattctcgtgtcttgagagccttggatgcacaaccccgtacacttgcataatgtatctgccaagctggggccccccatctcaagtgacccccataaagtaaatgaaactttctgaaagaaaaaagacaaaacaaatcactagagaacagtgttttggttttggggaccaaaaatcagcatcataatatacccaattggcctaagtgttccaatttccaaatgttgaatacttcaattcttcaattcaaccccaacactcaggtgtta

SEQ ID NO: 284448 - DNA, 420 bp, Zea mays
cggctcgagcttcttcactcttgattcttatctctcacactgaacactcttgtagttaatcgaatttctcattccgcagaaaccttcaacgatggccgctgaaacgattccctaccagaacggcgtcgttgccagctccaacgattccaccgccacgggcaagaaatcgcgggagaacgaccgccgccgccgccgccggaagcagaagaagaacaacaaggcatctgaggccccggttcctaactcttccgaagagagtgacgatgcgaaagagaacaacgattcaaaacagcttgttgaacaaattgaaattgagtacgtaccggagaaggcagagttagttgaaggcatggatgaagagtttagaaaaatctttgagaaatttactttcactgatgccactgctttggaggatactga

SEQ ID NO: 284449 - DNA, 497 bp, Zea mays
atatagaacatgtgaatatgaaattccattaaaatattaaaattacaaggtcctatttgacattgaaggaacattgaaattaggcttttcaaactgatttgttaaatgatagacaaaccaaatgattatggtttttcttgcataggtacaaataaaatatttgttaagagttacaataaatttaagagattggaagaggagctccattccactccccaaggcactccataagaggatcaataattttcccttggcacattgctgtgaataatttgtcaaactcttcacctggtgacctcaccttttctccagttagcaacccagtccctaattcctctctcacaaacttgtacagtgggtaagatctgcattcttggatcttgtttggaattgcagctttgccactctcataagcagcccttgcactttcaacctcttttggcaagagattcttcaactcttcctcaaagattgctatcttttgaaagatggacgag

SEQ ID NO: 284450 - DNA, 456 bp, Zea mays
attaactttctctctctctctctacataaacttagctctgtttttaattattccttgcattctcttgtattaagatggaagcaactaccatcaccaatgggagccaaaacggttcgttttgcttgtccactactaagggaagtagtgatccgttaaactggggagcggcggcagaggcgatgaaggggagccacctggacgaggtgaagcgcatggtggccgagtaccgcaagccggtggtccggctcggcggagagacgctcaccatcgctcaggtggccgccgtagccggacacgacctcggtgtggcggtggagctctcagagtctgcgagagaaggagtgaaggcgagcagtgagtgggtgatgaacagcatgaacaacggcactgacagttacggcgtcaccaccggcttcggtgccacatcacaccgccgaaccaaacaaggtggtgctc

SEQ ID NO: 284451 - DNA, 478 bp, Zea mays
ctgccatcagatgcagattgtggtgtcatcttttgacatggttgctggctgtggagcagcagaaccatataccacacttgccttaagaacaatttctcgccactttcggtgtttgcgtgatgccatcagtggccaaattcaggtgacccaaagaagccttggggagcaagaaggaataccccgtctccgctatgtggatcagcaacttagacaacaaaaggcacttcagcaacttggtgtaatgagacaagcttggaggcctcagaggggtcttcctgaaagctctgtttcaatactccgtgcttggctctttgaacattttcttcatccttaccccaaggattctgagaaaattatgctggctaggcaaacaggcttgaccagaaaccaggtggccaattggttcatcaatgcaagggtgcgtctctggaagccaatggttgaggaaatgtacaaagaggagtttggagactccgag

SEQ ID NO: 284452 - DNA, 415 bp, Zea mays
gaaaaagaaaacttgtattgcagtgtttaacagaaccagcatcattgcagggataattcaatgggatcttccaatgaaggatcttcttcttccaccctaacctccggaagggtcatggcccaaccatgttttcttgagttttcggggtgatgacacacgcaaaggtttcactggccatctttttgcttccctagagagaagggggatcaaaacattcaaggatgatcatgatcttcagagggggaaattgatatcagtggaactcatgaaagccattgaagggtccatgcttgctcttatcattctctcaccaaactatgcctcctcaacatggtgtttggatgagctcaaaaagattctagagtgcaagagagaagtttttccaatcttccatggtgtagaccctctgatgtga

SEQ ID NO: 284453 - DNA, 342 bp, Zea mays
caaaggagaaattgatggtggaacaaccaaggtagcaattaaacgtgggaatccactatctgagcagggggtgcatgagttccaaactgagattgagatgctctcagaacttcgtcaccgccaccttgtttcactgattggctactgtgaagaaaacactgaaaagatccttgtctatgactgtatggtctatggaacactcagggagcatctgtacaagacccataaaccttcacgtccatggaagcagaggcttgagatatgcattggagctgcccggggtttacactatctacacactggtgctaaacacactattattcaccgtgatgtgaatacaac

SEQ ID NO: 284454 - DNA, 465 bp, Zea mays
catatctaattaaggaaattatacgttaaacgcgactatcaaatctgataatctttctccatatatgcaataacacaattcaattggtcgaaacaccccgttcatgcagtgccatcaatgtcataatctcaaaaaggtgacgggtacggggtaccccacaaccaaaaccatgaggcaatggccaagatccatcgatccctattttcaacactgggttatattttaataatatttccctattattttatataaaaaaaaattatttagtaatatttaattttatacgatacatcaattcaacatctcgaaaacatccaaaccaacaacaaatctctaaaacataaaaatatttactctatcacccaatctccaaataatatataaattaccatacattgtcagtacttttttgtatttaatgacttgcatttttgaaaaaaaaagggttaatattaaaccaattag

SEQ ID NO: 284455 - DNA, 481 bp, Zea mays
aaggattaacatgacatgtgtcaatcaagaaactggagcggttgagccacatttgtttcctatgcttgctaattggaaacgtgagcatacaatggaagacgttttgattcaattgaagagagaaatgatgtctcctcaaaataggaagctaactcagcctcctgaaggcaatgaagaagccagggttgatcaaaagggcctggtggtgagatgttgtattgtgtaattccatggagaatccaagcataataataataataataataataataataataatgtaaataactatattcaatagatgatccaagttcacggacttatgcataatgcatttataatgtaattatggaccacttccgtatgttacctggagcaatccaagatatagtagttactatatgtcttatgaaatttttattgtactgaagctgtttttacagcggactctaatttcgaattttaagatcctttttaactg

SEQ ID NO: 284456 - DNA, 655 bp, Zea mays
ctcgagccgattcggctcgagaaacaaacctcacaaggcaaatgacttgagatgggaagctatccaagcagttcgaagtagagatggggtgttgggtttaggtcactttagattactgaagaggctgggttgtggggatattggcagtgtttacctctctgagttgagtggaactaaatgttactttgcaatgaaggtaatggacaaagggtctctagcaagtcgtaaaaagctacttcgtgctcagacagaacgagaaattctgcagtctcttgatcacccttttctcccaactttgtacacccattttgagacagaaaaattctcatgcttggttatggaattctgcccaggtggtgacctccatactcttaggcagaagcaaccagggaagcattttcctgagcaggcagtaaaattttatgtggcagaggtcctactggctttggagtatcttcacatgcttgggattgtctaccgtgaccttaagccagaaaatgtccttgttcgggatgacggacatattatgctgtctgactttgacctctccctccgatgtgctgttagtccgacccttgttaaaacctcatccacggattccgagcctttaagaaaattctgcttactgtgtccaacctgcatgtattgagccccc

SEQ ID NO: 284457 - DNA, 502 bp, Zea mays
atgccatacaaatttgaaactgtaaattagccaacaaaaacaaacatacaattcctcatcatatcatatctgttcctgaaacattgaaaaacagttcctccccctctttaacagaaaccatttgcaatcaatatattgtctccaccctctctctctctctctctctagaagaaatcaaactccagataattatcagaacctttctgattagctattgagatatggttagcagccttttcaccaccacttgatgaagctggtgagggtatcttctcaaactctacagccttggggatctcgggtggggtggcacatctgatcaatgcccaattcacaccttcaaaaaaagggtgttgcttgatctcggtagcgcctcttttgtaagccaatctgtgctgaggttcctttacaagcaaccctcttataagatcccttgctgcaaaactcacaacgggtgcttctggaaatcgcagtggctgaccgaccacgttaaacaacgtag

SEQ ID NO: 284458 - DNA, 914 bp, Zea mays
cgagatcggagaaacgcacgtggaaaccgaagcgcactgcgccgtgtgcaaagaagcgtttgagctgcacgcggaggcgcgtgagttaccgtgcaagcacatctaccactccgattgcatcctcccgtggctctcgatgcggaattcgtgcccggtgtgccgccacgagcttccttccgatttggaaactagggttcccagccagatcgacgaggagacgatagggttaacgatttggaggcttcccggcggcggattcgccgtggggagattctccggcggccggagaacaggcgagagtcatttcccggtggtgtacacggagatggacggtggactgaacacgaacggtggtgctcctaggagaatttctcgttctgttagaagcaatagggttagggaaagtcgagggtttggtagagttattagcaatttcttttcattctttggaagaattggttctagaaactcttcttctggacatgggtctgtaagtagaagccgtagtcacgtgagttcaatcttcaatagaagctcgcggagacatagcaggacttgggttatggatgattaattggtgaatggtgatggcaattttgcaaagaatagtaatactttcttttttttcagctttgggttatgagattcatttcatactgtaaatagcatgtaactagcaactatagaagcaagttttttagttttccctctctgggaatctttaatatggtttgattcaacatcaatggaaggaagagtgctattttttagctttgtggatcaaacattgtgcgttggcaccagtaactgtagcagtggaccgggcatgcattgggaaacaagaatgatgctttgttccccgtgaactgaattatttgatttgtttatattatatctttcatgttagtcttaat

SEQ ID NO: 284459 - DNA, 487 bp, Zea mays
caacaaatgacttcgatgaggctctacttataggcactggtggatttggaagtgtttacaagggtagctttgatggtggggcaacttctgtggccataaaacgtgccaatccaatgtcacaccaaggtgtttcagaattcgagacagagatcctttggctctcacagcttaggcatgccaacctagtctcacttttgggttactgcaatgaagatggggagatgatattggtctatgacttcatggacaatggaactctatatgaacatcttcatttgaggcagagagatcaaccccctttgtcttggattcaacgtcttgagatatgcattggagttgcaaggggtttacactacctacacactggcacaaagcacaggatcatccaccgtgacataaagacaaccaacatactcttagatcataattgggtgccaaaaatttcaaattttggtttgtcaaaggcaggttacccttccatactcat

SEQ ID NO: 284460 - DNA, 436 bp, Zea mays
accaattaaaaaaattactaataattcagtacacaatgatttctggttagtatctaacctccgtaacattttcataaaataggaattactaatcaaattatttgaaatggaaatgtcttaatatctaaaacattaaggctatttgtttcgagtagatcacattcaccgaccaacaggcatcatgatttcagagaactcgaccccaggtgtcaaatctgaattaccctgtaaacccagaattatcatttctttgaacatttccatcggggacaacaccaccctttttctgaagatgcatcgctaaaacaaggttctgtagcacttcaccaatggatggcctctccacccctctttcagccaaacatttcattgcaaatcctaaatataactcaaagcactcttcaactatgtttcctttcaagttggggtcaactat

SEQ ID NO: 284461 - DNA, 813 bp, Zea mays
gtctctcgaagcctctttctctcttttctaggttcgtttctctctcctcctcgttcttgtttcttcggtgattttatgtgtgtgtttgtgtataacggtggtcgtgtgttttgagtagcttgaaacacgtttgacgaacgatgttttactacgttgttgtgtcttgtttattttaaatcatagtcttgtaagttcgtagatcgtgaatttgcttatgatttatttcttagatataaaaaattatggggttttgttggggattttatcatgataaaataaaagctttctcttttcttgaatgaaattggctttttttgtaacttttgttctgttttgttatgatttattggttagcaccttcctattgattcctgattccgggagtttgatgattggccttcattaggtattataatttgtggatttgattataaatatgatgaacttagataccgtttatattcttaggtgcttttttggtactgttttttcaatcataattggtgttcacacactggtaatctagataattagggttgcaaaattaattttgataccgagttgaaactctaattctgatcagagaacaatacttgaagaattgtttcttagttttgttcatgtgtttcaagtttgatgcatgattcattggttccccaatatggtggatgactatagccaatttatgaactctttgatttcttcttgtattgtaaaattgacatggaattttggtggtttgttcctttgcagaagctatctgtgtttggtgttactaagtctccaacaagcaaagtacatggttgatttgga

SEQ ID NO: 284462 - DNA, 408 bp, Zea mays
ctgaaaaccgaattatcatttattaactgtaacttgctttggaacaattcaagttcactaacaacatccatgaaatccaatcattaaaaattggaaaaccaaaccaaaccaaaccaaaccaaacttattgcaacaccactcatcaaacagaaaaacaatccaaactttcaaaactcacaaactcaagaacaacttgaaattactactaacaaaaacaagaccaattggtcaaaaaccatgaatcttgatctggtccttcctgacaaggccagcctgaacgaggaagtgggagacgttcttacgctggtcgccttggagttggatgatcttgccaagctccttgtcctgcaccacggttccgttgcagcagaactccttcttgaggtccttgaggatcttctcgtagct

SEQ ID NO: 284463 - DNA, 468 bp, Zea mays
ctgtttgataggattgtggcacatgataggtactcagagactgaagctgcaggtgtggttcggcagatagcttcaggattagaggctattcataaagctaacattgtccacagggacttgaagcctgagaattgcctcttcttggatgtgaggagggactctcctcttaagatcatggactttgggttgagttctgttgaggaattcactgacccaattgttggtttgtttggatccattgattatgtttcaccagaggctctttctcaagggaagataactactaagagtgacatgtggtctctgggagtgattctatatatcttgctctctgggtatccacctttcattgctcagaataatcgccagaaacaacaaatgataatgaatgggaatttcagtttctatgagaagacttggaagggcattaccaattctgcgaagcaactgatttcagatcttctcact

SEQ ID NO: 284464 - DNA, 228 bp, Zea mays
ttatcatggcttcgggatcaccttcctcttcctcttcctccaattacgatgtgttcctcagcttcagaggggaagacacacgtcttggttttactggccatctctacaacactcttcagagcaagggaatccacactttcattgatgatgaggagcttccaagaggggaggaaataacaccagcacttatgaaggcaattcaagattccagagttgccatcactgggc

SEQ ID NO: 284465 - DNA, 380 bp, Zea mays
gcaaggaaaagttgtattcatatatgcctgattgattattacatggatatatatataagagtttctaataacagaatttgtactcttctgcctacagaatattctatacgggtatctttgtctaactatggggaacaagctacaatcaagcagtgtatggtgatttctgggctgatgatgcttcccaatttacccttacgcgtagtccttcaagtaagctggccttctaacctttcttttgggcttctttgctatctgcacctcctgtactttcttctgcttcacgtctttgtttcctgatgccatgcttgttgcctctgatatgctaacagaagcatagtgttcagagagcacagtgatggcaactctggaatcttgaa

SEQ ID NO: 284466 - DNA, 421 bp, Zea mays
gccaaggggaaggaagggttgggtcaaggcgtgattttatactgaaagactatgcaactgatgaagttattggaagggcaacacgcaaatgggtaatgatgaatcaggacaccagacgactccagaaggtttctgatgatgctaaagaagagtatttggttttctgtcctcgagagcccaggttagctattccagaggcagatagtaatagcttgaagaaaataccaaaattggaagaccctgctcagtattccagacttggacttgtgccaagaagagcggatctggacatgaatcagcatgttaacaatgtcacctatattggatgggtgcttgagagcatgcctcaagaaatcattgatagccatgagttgcagagtattaccttggattacagacgagagtgcggacaacatgacat

SEQ ID NO: 284467 - DNA, 509 bp, Zea mays
gaacaacatagagtcctaccctccggttctccgccacctagaccaccaccaactaccaccaccaccaaaccctgacccggataaagacccgacccaacaagactcggatccaatacccatcatagatttttcatgcttaaaccatgacaagagcaagttggacgaagcttgcaaggattggggtttttttcgtttggtaaaccatgggattcccatgacccttttgaagaagcttcaagaggtggccaaggaactcttctctttgtcctttgaagcaaaagaaggtgcatgcagtggcagcccagtgtcctacttttggggcacccctgccctaacgccatctgggacaacaacgagaggcccccaaaacatgaattgggttgaaggctttgatgtgccgttgagtcaactcccacacttcaaccctcatcagcttcccacgcttcgagtccatcaggtaagacacaaagttttccaaccaatataaactcttgcattattattgattt

SEQ ID NO: 284468 - DNA, 1118 bp, Zea mays
ggggctcgagccgaatcggctggaggcgtagacgacaccaccttcgtcgtttggcgtcctcctgaattcgccagagaccttcttcctaactacttcaaacacaacaagcttctccaggcttcgtttcgccaactcaacacctatggttttagaaagattgtgccagaccgatgggagttcgcgaacgaattcttcaagaagggagagaaacacttgctgtgcgagatccatagaagaaaaacggctcagcctcaacaaggaatcatgaaccaccatcaccaccatgctcattctccgttgggagtcaacgttaacgttccaactttctttcccttctccagcagagtcagcatctctacttccaacgactccgacgaccaatccaactggtgcgactcgccgccacgtggagccacctcattggtgaacggtgcagcagcagccaactacaacacttccgtcacggcgctttcggaggacaacgagagactcagaagaagcaacaacatgctcatgtcggaactcgcgcacatgaagaagctctacaatgacatcatctacttcgttcagaaccatgtcaagccagtggctccaagcaattcttactcttcttctttgctactatgcaatacaccttctgccactccaataagtagtgccaataatgtttcaatgatgcaaaggccaatgaaccagcttctggggtattattctactaaccctaaacaaggagctacacaaattactcaacctcagacctatgttgtgaactctcccaccaacacatcaaggagttctataaccatttttgaagggcctgccagcagtaacattaatagctgcaagaccaagctttttggggtgtcgctgcagtccaagaaaagggtgcacccggattgtggatctaatccagagaccaacagggctcgtttggttttggaaaaagatgacttgggcttgaatctcatgcctccatccacttgttagttccactactgatgattaattctaagaaaaagtatgatatcccaagctagctagctacttatattaattttcttttacttgctttgatttgttttcttttttcttttttaactttttaaatcactactctc

SEQ ID NO: 284469 - DNA, 522 bp, Zea mays
cggctcgaggtcaaaagaagcatctcgtgtatcgtctcctaaaaaaaatggaattgatgtgtcattgttcgagctttcttcttccgccggagaatcctaacacgacgtgttcgctttctctaaagtacgctctcgttgttctcaaccaaagcctcccgagatttgctcccctgctttgggaccacgctcaagtgcgagtttgtgctgatggaggtgccaatagggtgtatgatgaaatgcctcttttcttccctcatcaacaaccttcccatgttcgcaccaggtacaagcctgatgtaattaaaggggacatggattcaatcaggacagaagtacttgacttctatgcaaagctgggaactaagataattgatgagtctcatgatcaggacaccacagatttacacaaatgtgtggcatacatacgtgacctcaccccaaatattgatggagcagaactatgcattcttgttgctggagcacttggtgggagatttgaccctgagatggaaatattaacgt

SEQ ID NO: 284470 - DNA, 759 bp, Zea mays
cttatgagcgagaagatcagaactacattgtatcaactcgtcattatagggctcctgaagttatccttggacttggctggagctatccatgtgatatatggagtgtgggatgtatattggttgaattatgcacaggtgaagctttgtttcagactcatgaaaatttagagcatcttgcaatgatggaaagggtacttggttcattaccacagaccatgatgaagagagtcgaccgacatgctgagaagtatgttagaaggggtagattagactggcctgagggtgcacctcgagggagagtatcaaagctgtaatgaagcttcctaggcttcagaaccttgtaatgcagcatgtagatcattcagctggcgatctcatacatctcttgcaggggttacttagatatgacccctctcaaagacttacagccaacgaagctcttagacattccttctttatgagagaacactttagaagatgattcactttcttaactgctgcatcattgaccttcctaaggatttgaagatgtgggcaaatgaactcacctgtgtgatggctagtttttctgcagctgtcctctccccaatgctatgctgaaaaatccttatgtaggaatttttgaatggatctggattcgatgtacagaagaaaaaaaaaaatgctaatgttatggtgaaaattgtagattttacgggcatgattcatatggcatcctgagctttgtgtgcacgagtataagtctccattcgaggtttg

SEQ ID NO: 284471 - DNA, 407 bp, Zea mays
ctctcttcattccaattttggctctcacaccatgccaaccctcaaccatgtcctcacattcacattcttccttctcctctcttgccattgccacctcctcaatggccaagaggacacctcatttggccgtgccatagacagaaaattgttaggcctaaagagaaaagaaaagctcagccacttcaaattttattggcatgacatagtgagtggccgcaaccccacttcggtggcggttgttccgccaccgccgaaggtgaacacgaccacagcatttggcttggtgaacatgattgacaaccctttgacgttcgggccggaattgagctccaagcttgtgggaaaatctcagggtttctacgcgtcggcctcgcagactgagattgatcttctaatggctatgaact

SEQ ID NO: 284472 - DNA, 292 bp, Zea mays
gcatccaacattattattccaattatcacaccagccacaaattcataattaaatagggaacaaattttaagatgggctttcaagaacaaaccccacctctagaaaaggcaaagctaattaagaatccaaagccacaagtgggaagaaaaaaagacaaaaaaaagaaacaaagagtgccaattgccaattgctaaagcaaaagctaaaagtttaatctcttctatataacataattattaaatgatcaatcaataatgcataacataaacattggactcaacaatagcatccc

SEQ ID NO: 284473 - DNA, 510 bp, Zea mays
gaaggtttcaacatcatgtgtcaaagttggagatgaaaacgagatactattctctgggagctcgttgctgattccttgcagtggttcgacctggctcgaggtgttggagcttcaactccctggaaagaaagtaacaaaggcacaagatttttggaatggtttgcgtggtcagaagctgatgaaattgccatagggggatatctgcattcgcagcacaggagtgtgcctatatgcatagcaagggttattgaggtcagtcattgcgcgaacataagcagggtagtgctataagcctatatgcggagatctcggttttatgactaccttttccttctggtaaacttggtgctataaactcgtaactcagttacattaggcatgccatttgtattgcttcctcaatttcagaaaacacactgctgtaactatttcagttattcaatttttcactgtcataactgagctacaaacatttgagaaataatacagttatgtggtgagtaataagac

SEQ ID NO: 284474 - DNA, 484 bp, Zea mays
  unsure (1)..(484): unsure at all n locations
tgctcgctgccgacgagatgaagcggctggtggacgaggcgaacgaggagcacgtcctggtggagctcgcgcgcatcgaggccgagcgggagcgccgcgaggatcgacgcccagcggtgtgccgaggccgagcggttcgcccgggaaatggaggccaccagggctaagatcgaggcgctacggaaggacctgagccgcgcccgggaaatggaggcgaagctcgcggtgacgaacgctgacgtggaggtcctacaggccgagatggagctggtccgtgccatggagaggaacagtgtcaagaacgacggcactgcagacgtggaggctgaggacaaggcgctgctgcggactgcggaggccgagctggatgccgccaagaaggagctggatagcatcaaggccgggagcntccagttcatgacgtccatggacagcgcgcgcccgagatatggcgggtctcgaggaagtgaaccggctcaggcgc

SEQ ID NO: 284475 - DNA, 508 bp, Zea mays
tgttcatcaccaccccaggccagctcacctgcctcatcaacgactctgccggcgtcgtcgcgaccaataccgctgccatgcagctcgccaacgcccgcgacaagcgatgtgtggcgttgttctcgtcggcagagaaggcaaggctgttcctgccatacgtggagcgcaagagcagctgcacggtcatatcttcggcgacggggaacctgatcgacatcgacctcaacgcggtgaagaatgtggtgaaggacttggagcccgctccacagttcgcattggcacagaagtagcagctgcgttccaacatcacccccattgctttgtacatagttcaaacagcagcaacgctagagagaatggtgcagtattacaaactacaaacagcacacatgccgtgtattccgatgttataaataacatctcatatcagctatgcaacgaataaaacttagaacactaaaaaaaaaaaaaaaaaaaaaaaaaagggcggccgctcgcgatctagaac

SEQ ID NO: 284476 - DNA, 254 bp, Zea mays
gagtgggagacggagcacggatgctttatccctgtgacactgccgccatggtggcgagtgaggcgctgctggtggtatgcaggagctaggaggtaggcaacaaccatacgaaggcgaaggcgagggcgagcggaccagaggcacaccgcgcgttctgcgccgagcagcactgcccgatctcgcgcgggggaggggggattcgtgagcgccggcggcagccatgccggagtcctggagacccgccgaggcggatg

SEQ ID NO: 284477 - DNA, 853 bp, Zea mays
cactgtagcagaagctgcggaagattggatacttgatgatatcaaaggtctccttggccgttgcaacttcagggatgacatgctggatagaaaagttcagtttttaagtggtggagagaaggcaaggcttgcattttgcaagttcatggtgactccatctactctactcatcttggatgaaccgacaaaccatcttgatatcccatcaaaagaaatgcttgaggaggcaatatcagaatatacaggcaccgtcataacagtttctcatgaccggtacttcataaaacaaattgtcaacagagtcatcgaagtgaaagatcagactatccaagactatcaaggagattacaattactaccttgagaggaaccttgaagcccgagaaagggaacttgcccgcgaggaagagctcgaggagagagcccccaaagtaaaagccaagtccaagatgtcgaaggcagagaaagccgtcaggaagaagcagaagatgcaggccttccagcagagcaagcagaaatccaagtcgcttaagaactcgaagcggtggaactgagattttttcgtcgttcgtagaggcggcgttggcgttcgtcacaatgcagaatgccatctgagacaccttgcaatgcagataccagtgtttgctactctgcctgctgtgccgtatgctataatagtcgccatatcagcagaagcactgcaaatacatcatcagaaagtagccctagtagcaatgaatgtagaagatcgtgaaaaaaaaaatactgtaactataagcaggaagcgttatgtgaccttgtacataatacatgcactttcggatggaggaacggcttattttttggatgaacgg

SEQ ID NO: 284478 - DNA, 456 bp, Zea mays
  unsure (1)..(456): unsure at all n locations
agcgaacgccggaggatacgcgatatggtttctgacgacgagaaggtggaaggccgtcggcgcaggcgggcaagggatccggacgaccgccgtggcaagcaagaccgggagaggaacagacggcgccaccggcgccggagcccaagctcggagtcagggtcctcacccaacgaacgtcgccaccgccgccggcgccgagacgagggctcgaggcggcgggatgaccgcagtcgaagggaggacgagctccgtagaagccctatgaagagggagctgaccccgccactgtcgcccccaccgtcgcctccttccggagatgatccctgggcgcacgggtgggatctacatcccgcctttccgcatggcgcagatgatgcgagatgtggaggacaagtcgagccctgtgtatcagcgcctcacctgngatgctctcaagaagagcatcaatgggctggt

SEQ ID NO: 284479 - DNA, 416 bp, Zea mays
gtgttgttctcccgtgataaataaacccgggcctgtgcaggaggaggctccgcgtggaggcgatcaggacgcagcgggagaagcagcggacggaggtgcccgtcgaggagtccgcccccgccagggacgccgccgcgcccctggacggaaacggagccgtagcggacggctccgtggttccttcctcggacgacagctgggttatcaagctcgagcagtcgttcaacattttcgctacggattcggtgattatggtactcaagggcgtgtatggtgatcggtactacgccaggttctttgcgctggagacgattgcgagggtgccgtacttcgcattcatatcggtgcttcacttgtatgcgacctttggatggtggagacgagctgattatataaaggttcactttgcgcagagc

SEQ ID NO: 284480 - DNA, 705 bp, Zea mays
tgagtatctgcacagcacaaggacgaacaagccggccctcgtccaccataacatctcagcggataaggtcctgctggactacgcgtacaggcccctcatctccgggtgcggcctgcacaagctcctcgtggacgacctcgtcttctcgacgctcaaagccagcgccgccatggggtacctggcgccggagtacaccaccgtgggccgcttctcggagaagagcgacgtgtacgcgttcggggtcatcgtgctccaggtgctcaccggcaagagcaaggtgacgacgacgcatgcgcactgccggacaaggacgtcgatgagctcgtcgacggcaacctgcagggggataattactcggcggccgaggccgcccagctggcgaagatcggctcggcttgcaccagcgagaaccccgaccagaggccgacgatggcggagctgctccaagaactgagcaccatctgaaatctaatggaggttcgacaatcatccactgtaactgtttcatgcaagagtcacatgccttttgtaacctagctacgtacgtaccctgtctaggatcaccagtcagtaatcgctgatcttagaaagaatctgagctagtaggctctactagttagctagtaatcgctgatcttaggaagcacatgtgcccatgatcatgggatcttgtttgctaccgatgtgtcgttaccaccgcttttg

SEQ ID NO: 284481 - DNA, 484 bp, Zea mays
ggctatgaaactgatgaatgttattgtttctgatcagtcaggaacaatagctggggtattggctgaggatgggaaaccagtcagtgtagacatgcctctttttgtaatagttccatgagtaccggaagggaccttacttcaaagttgatatgaaatctccctagcttgttggatagcagcatggtatttgatgtcagattttctgttcagaaatttcttgagtgataatgtttgtctcattttaagaaatccttgtcttctttagcccccacccctcctcttaatttatcgagatattttggacataaaagtccccagcatatcagaatgaatattggacatttcagttctaagcagatttgacatttgtagtagtatttatgttttctgtttatgttttctgattgccccctctttcttgtatgaacatgcttgctgcactgttcccctatcacagtaatatattatataaaactttgtaacc

SEQ ID NO: 284482 - DNA, 259 bp, Zea mays
gcaaaaccatcctcttttttttactataacacggaaaaccatattctttttttactctaaccaggatagaagtacacctttcactatcctatcattaccataaccgggctgcttgtactaaggacgcactgaatttaactacactctgggctagtttgaaaacttaaatcccctccggtttccctgaagattgagtgggaaaatagcttattttcccactcaatcccttggaaataccggagacgatttaagtttccaa

SEQ ID NO: 284483 - DNA, 785 bp, Zea mays
cttgtaggtatatgcttagttgctcaggctctaatatacccctgggggagtttgtacaacaatgatgggcctgtaagtaacgagtcatgatgagactaagcagctgggacctggcacggagtggatgtaacagttgaggaaaggacagttatgatgctcccaacaagttttggtggatgatcaagacactatgaaaagttgaaaaagtctgcatacttaatttcaacatagtttgaattttgaagtacaagaccaaatgaatttgtctttcactatcatttcttgccttggtgacttgttggtcatgggttcgaatccagaaacagcctctttgcatatgcaagggtaaggctgtgtacaacatccctcccccataccttcgcatagcgaagagcctctgggcaatggggtacgaagttttttatcatttcttgcctgtggactgtagtgattgaacaaataaaagtgccctgtcctgggatactgacaggtgacaattatcagcactgtttatcactccagcctgcctatattggaggattgaaagtgattttccctttattggaatcgggaaagtaaactctccccagccttgaggatgtttcttgcttctgtattccagccaaatgtaagttgggatcctgatattttactgccggcggttcctaacttgtaagcatctctgagttgctactcttttgacatgttgtatctccccttatagacctactacacgaaatccggaatatacaagttttatgcatttcaaaaaaaaaaaaaaaaaa

SEQ ID NO: 284484 - DNA, 474 bp, Zea mays
gaacagatgaacatagctaacgaggatgcattgtatacaaaattctcattcgaggtcgagctaacgaaaatccggttcgtccttattggatatcggcgcttggaggaattacacataataattgacatttaaacataacaataggctacggtctaccatacttgacgggatcgaagcaacgggaaagagaagggagatcggaaacaagaacgaacacaggccgatccggccgcgggagtcaaagtgttccatctcatcacgccggcgagaaccttggcccggtcgctaactgcgattcagcgctcaatgacgtctagcttcacccgtgccggcgagctcgagggagggtccgccatgccaggggacgtacgtgtgccttgatcggcgtccagaagccccaaccacccctccctgatcacggagcggcggcggcggcgacgcgccacgccgaggtggcgatgagcgggcgcgtat

SEQ ID NO: 284485 - DNA, 747 bp, Zea mays
agaagaagcaagcatgtgtgtttagcaatcatcgcagatttcatacctcggcagggtcccgggaccctcacagcctccgaactctggcccaagcgcagcgaacctcaacctcaacctcctcctcctccagttaagaggcagaggaaaaacctctacagagggatcaggcagcggccctggggcaaatgggccgcggagattcgcgatccacgtaaaggagttcgtgtctggcttggcaccttcaacaccgccgaagaagccgccagagcctacgacaaagaagcccgaaaaatccgcggcaagaaagccaaagtcaatttccccaacgaggacgaccctctgccgcaatacggatcttgcaagagcctcaacttggagttcggttacgatctcaaccaaacagggcttttcccttcttctaacgctgatgagaattgcgggtcccacgtggcttactccgttacggaagccaacaccaaagtagagaagctttccgaggagcttatggcgtacgagaatttaatgaggttttatcagattccggaaaacgtcgttggggatttgtgggcctttcctgacacctctccacctctctgatttctgtcacatcgtttcttctatcattaattctccaattctgttcttaaaatatgatatgtacaatcagcaatttcaatttgcatgtatttaactttcagactcttaggagatgtttggttcggttgttccctgtttcccttttcactg

SEQ ID NO: 284486 - DNA, 505 bp, Zea mays
ggcggtctatctccacacacacacctgcaccgccaccgaccaaccaccgtcgtcgccttgaagctgaaggcgctggagctgagtcctcctcccttatttacacgcgcacactccacttcatcaccggatcaccagtcagcctacagctcgtcacatctctctctccgcccggccggcctctagactcactctagccatatggccacggcgcacggcagcaggctcatcttcctcttcgaggccacgctcttctcggcgctgctgctcgtcccggcacgccctgctgccgccgcccgccgtcaccgccaactgcccgccgcctccgccggctgcggcgtcgtactcgtacccgacaccgccggggccttacattccctacttccagcctgcggcgggtggtggtggcggcggcggtagtggggggtacggcggctacccgcagccgccgcccccccaccccatcctgccgtggtacccctggtactacaagacgccgccgtcgtcc

SEQ ID NO: 284487 - DNA, 869 bp, Zea mays
ggaggatacaggaactggaacgataacaacgaaagaaggcccttcggacaaggaggaggcaggacacagtgttccgacaggaatgccaacaaaggaagaggcgaaggaaatcaagctttctcgaagagcaagcccagctgggacgcgcagaacgcctctggtggagatgaccaggcaggaaagaagagtgacacagacaactcctggagccagaaccgatcatctccatctatcctgggtcagccaagcggtgatgctaataacaagtctagcgcttgggacggcgctcccaacggaggagctggcaggggaggttcaggttcttggggaaagagcgacgaggatggctggaactcgtcgtcgggaggatcagccagagagaagccttcgtggggtggtggggcagaagctcctcccaggaaggaggacgacggcgcatggggcaaaggcggcgaggggagccggagcctaggaggaggaggagagggtggtagcagcagttcctgggataaaccggcagatggtgcatggagcggcaacaacaagggtggcagtggcagtggtgggtggtaactggtaagcttgcgccttattggcgctgactgcatgtaaatattgtgcccgcgctgtgtgaactgttctggtgcgtgtctagttcgtatcagttacttggccatgcgtactctaaactaaaataaaacatggcttgtgactgtggctagttaaatgtagcctgttgctgacagtaattaggcgccttaactttcagaaactcatttattagcatcctcgattcctagaccaaaaaaaaaaaaagataaaaaaaaacaaaaaaaaaaaaaaaaaaaaaaaaaaaaaaactcgagccg

SEQ ID NO: 284488 - DNA, 789 bp, Zea mays
gtcggggctcgcggcgggatgggacctgcgggagctccgcttcgacgtgtccacggcgttcgcatcgggcccggcgctccggctctcgtaccgccccaacgacccggcgctccccttcgcgctcgccgtgcgcgcggggctcggcccgctggggtccccggcacgcgcgcctttcgcgctcgccgccgagttcaacctcgtcgcccacgacccctcctcgtcgcccgccttcttcctccgcctcaagccgcggctcggcgacttctcgctctctcacacgctgcgctcccccgcggcggcgccagcgccacggaaggccggggagccgggctccgacggccggcgggaggtgaagcctctggactacatgccgccgttcacgttcaccgggagcgggctcgctgccgacgtggcggcggcggggaccggcagcggggtcggcgcgctgctgtccggcatgcggctgacgaccaggagcgtgctcccgctgtggggccgggcgagcctgcggttcaactggggcctgcgcgtgccgccggagctgctcgccgccgacggcaagggcgcgcgcgcgcccgtcagcaagatgccgctgctggtcatgagcaaggtctgcatcgagcagtccccgcgctccgtcacgggcaccaaggccggcggccgagcacctggacccgccctggcctccacggacgcggcgtcggacggcgacgcggcgttctcgctggtgaggcggcagctggagtcgctgagcgtggacaacatgctgctccggcgcgccgtggagga

SEQ ID NO: 284489 - DNA, 509 bp, Zea mays
atgcttcgtggctgattcaggttcggttaaccaaccgggtttcgtagtatgcgagcatcgttgttggtgggccccccccccccccccccccccccccccgatgacctgcgctccttggcccacccacaggcagagaactccgatccgcgcgaatcgcgaagggaagacgataaaggaggcaggattaaccgaagctgcagagcctccgctaagaatacaacgcctctaacatgctccactcgtgctaacaagaaaaagatagccgaagcctgcaaagaaaattacatctaaagggagactagggcctcgctccctttgccgagactgtccttatctactgaacgcggcgccacatagctgacggatggctagttacacacacggtgaaattaacagagctcccagacctactctacttctctaaaatgcctacatctctgaaaatgcctacgtctctaaaatgcgcgagaacgtaatctgaccgattgggccgaccatctgacgatctc

SEQ ID NO: 284490 - DNA, 451 bp, Zea mays
cgacgacgacgaggaacatggacatggagaggacccgccgcaggaagctcaacgagaggctctacgcgctccggagcgtcgtgcccaacatcaccaagatggacaaggcgtccatagtcagggacgccatcgcccacatcgagcatctgcaggagcaggagcgccgactgctcgccgagatatccgttctccagtcttctgacgacggcaccgccgccgccgccgccgtcaagacggaggacgctgccgccactgggggtgctgcgtacgacgtcgacagcgtcccctggaggaagaagccgagggcggtgccactgccgtccgtgtatttcaccgacaacccgacgagctccatctcgtcatctccgccagtccgaatcctggaggtgcaggtctcgcatgcaggggagagggtggcggtggtgagcctctggtgcagcaggggcaggga

SEQ ID NO: 284491 - DNA, 444 bp, Zea mays
cgtcaggtcagcgcgacgtctggcgaccgccacccccaccccgcgccacgtgccgagggcttcgccgggcccttcgccgctcgccggtgacgagcacacaccaggagcaagaagacgatgttgaaaacatttcatttccaaaaagtttggtggagagcaactagattatccttttcatggaatcatggatgaacatgaactgttatttgtatttatttatgttctatttctggtggacagcaacagcatggatgaactgttctgtaatctactttttagtttttggatgaagaactatgcaaatgcaactatgcaagtatctgttctgtttagactttagacaatatatgctatcatgttggcatgctggcatgctgcttattctggacttgagagtatctgttctggacaatatatgctatcatattgttttatcatggagat

SEQ ID NO: 284492 - DNA, 344 bp, Zea mays
catgcaacaaaaaatatatatttatataaaaaaaaaagagagagagaagaaaaaaggactacaaagtatcgttttcctccgacttctgagaaacttctgggaatcggtcccaaacggttaaacgacgcacgtgacgtctccgcgtgccggtctcggattccctacgccactacgtaatctaatctaaaatgtttcctttgcttaaccgtcgccgcgtgtcagttgcacactctttgatttgtcctgtaacacggactcaaccacggcgttttctgattctcgcgatggttctggaaatccaacggctcagatttcacgtccgcagaacccgagtgatgcaggcg

SEQ ID NO: 284493 - DNA, 744 bp, Zea mays
gtacatctctctacactgatcccatccagaagcgatgatgcaatcagccttgtgacgtcactttgttcatgggatccctgcaagagaccaactgcagcagaggttcttcaacatcctttttttcagagttgcttttacatccctccatcccttcgcaccagagctgtaaccagaactccaccatctgctgggaccaggggatcactggatcggctgggcctcaagagatactctggtgctttgcctaatacaaaaatcaccaacaattttacttccccaaaagtacaagcttctatagcttcaggtgtgcaaaggaagctggatatggcaaatgaggatggaattaagagcaagaaatcattgaagactactcaacaatcaaaatatcgattaccaggaaaaggcagcccaacttctataaacaaggggcggactgcacgtggggtttcagaaacagctgagaagttggtcaatatgtcaatcggtactcgaagactgtccttgggacaaacccgtccgcctcccatgaaggctggagtcaattggatttctgaatctggaaacttgctcaggtccggacaacaaattccaactgaaagaactttgacaagaaaagttgccgggtgagatgatgatgagaagaagtatttgctgactttggactttggggaattcttatatgatctatattttcagtgtgctaatacgaagcttctaatgatgaatgatatatgggtttgcacc

SEQ ID NO: 284494 - DNA, 422 bp, Zea mays
ttttcatttctcggtgttgttgttcttcatccatggcttttcctcagcaccacttccaacagcactaccaaacccaacagcaacaacagccacaaaacaaatccttcagaaatctgcaaacaatcgatggtcagatgtcacagcaggtggcgttttacaaccctactgatttgcaagatcaatcccaacatccatcctacattcctccatttcatgttgttgggtttgctccgggtcctgttcctcctgctgatggcagtgatggtggagttgatttgcaattgcaatggaattatggtttggagccagagaggaagagactaaaagaacaggattttttggagaacaattctcagatatcttctgttgatttccttcaaccacgatcagtgtcgactgggttgggcttgtcactagacaat

SEQ ID NO: 284495 - DNA, 407 bp, Zea mays
ccaaaattcacgggtctcaagcaagggaaattcattttgggcaaatccatcttaaaaactagttccaaggggtcttggcccttgagacacacgcttccatgaaggggccacgtaatagaaacctgagatttgagatttcccaaggggaagttttctttgcagttacatgtagacctccatgccgttaaatttgggggattgacatagaggacagaaacttagcttactttcacaatctttacagaggcaaagatgcttccaaggtaacaaaaccatgggcacttcattgactctgcaagccttgcatgtcatcatctctttcatggcggggttctcccttgaaagcagatgaaaatggagggaacggccattgcagcaagaagctgtatcgtcgacctcactgtcac

SEQ ID NO: 284496 - DNA, 593 bp, Zea mays
gagagtcttcggaactcaacatcttttctcagttctttggtggtcaagcatgctctgaagcacatgaaagaagggagctgcatcataaactctacttcagttaatgcatacaatgggaatccagaagcgttggactacactgctaccaagggagcaattgtggccttcaccagaggtctttctcagcagctagcgagtaggggaattagggtgaatggtgtggcacctggcccagtttggacgccaatacaaccagcttcaaagcctgctgagatgattcagaacttggggtgtgaggtgccaatgaaccgcgtggctcagccttgtgagattgcaccatgttatttgttcttggcaacttgtcaggactcttcctactttactggccaagtcctccatccaaatggtgggatggtcgtcaacgcttaagctatagtgtgccttcacctatttcctattgaactggtttttctagcttacccctcctgaataagcagtgttacgttcggatgcatattttacgttgaaatacattgtgtttgtagcatatatgccttgagatgaataaacctttacgtgagttatttatcttc

SEQ ID NO: 284497 - DNA, 595 bp, Zea mays
cagaaacccatttgccagagctggaggcaagagatggaatttccataacaatggaagacattggaacttcacgtgtttggaacatgcgctatagatactggccgaacaacaaaagcagaatgtatttgctcgagaacactggtgactttgtgagagccaatggactccaagagggagatttcatagtgatatactcagatgtgaagtgtggcaaatatatgataagaggagtgaaagtgagacaacaaggtgtgaaaccagagaccaagaaagtaggaaaatcgcagaaaaaccagcatgggacagggacaaatgcatcaactacagcttgtactgctgctaataatggcacgccatcgtcaccgaaaaccaaagctgaaaaaagtagtaaattaatataatacatagaatatgtatgtccaatatatattatattatattatatataataaaataagaggctctgaagtctgaacacggtgctcacataatgttgaggagttttagcatgccctgcaatggaggctgtcaaggatttgtataacagtattttgggtatatttcttttcataatttattttgcgaatgttatgtg

SEQ ID NO: 284498 - DNA, 335 bp, Zea mays
aatcaaaattaaatacatataaaatataaatatcaatagttagcaatatttatctagatgttgacaaaatagcttgtcattttgatataacatgcgggaatataagctaccactctaattggaatgtaattgacctgaacttgctaatgaggaactaacggtgtacttattacctgtatagtcacaaaatcgttgatgacgcaattcatcctgaaaaatcaagagctagctacagtcttgcataggcattggaatcatatatgcgggtatcttggaaattgatgcaacgtgagagtgcagctgcaaggttttccaaatcttcccttgtatggact

SEQ ID NO: 284499 - DNA, 528 bp, Zea mays
gcgccgctacttccagcagctcgtttcggcagttgcggttctgccaccgcaacggcgtggcccaccgcgacctgaagccgcagaacctcctcctcgacggcgacggaaacctcaaggtctccgacttcgggctctccgcactgccggagcagctcaagaacggcctcctccacaccgcctgcggcacgccggcgtacaccgcgccggagatactccgccggagcggcggctacgacgggtccaaggccgacgcctggtcctgcggcctcatcctcttcgtcttccttgccggacacctcccgttcgacgacaccaacattccggcgatgtgcaaaaaaaatttcccgacgagattaccagttcccggagtggatttcaaaaccagcccgttttgttatccacaaattactcgacccgaatccggaaacccgaattagcctggagtccctgtttgggaacgcgtggtttaagaaatcactaaacccggaaacggcggaagaaaacgcgttggggctgagttatgtgaag

SEQ ID NO: 284500 - DNA, 461 bp, Zea mays
catgtatacataacaacaacttttatttttcaaaccatcatatataaattaatacacctataactaagcttcaacacaaaatcaaaatcaaatcacaaaacaagcatcatcaaccttgtttgtttcttctcatcaggacgagcacgatgtgagtgtgcatgtcatgttctgcaattagtccttcaacatcaaacctcatgtagatccttcacttgagaagaactaactatacctatcattaacctgatgatcacgattcttggttgtgccaagagagcacgagatcttgcaacgcatctttccaatccccccaatgatgttcctcaaactccaacgcaccctccaccaccttaaccgccacaaaaagaagttcatgaggcacaatctcaagcacctcaaacaccaaagccaccttcccttacaccaaagcaattgcaccgttactcttcccaacctcaatc

SEQ ID NO: 284501 - DNA, 568 bp, Zea mays
aacttcttaatgctttcatttcgcaaaccccccttggacggattggagaagcagaggaagtgtcttcattggtggcattcctctgcttacctgcagcctcttacataacaggacagaccatttgtgttgatggtggattaacagtgaatggtctctatataaattagagaagtactaccaacacactctctaacacacttctcttgacacatattctaccataagttacaaataataaaaaattacaaaatcatgaaaataagatctaggacccatatatttttgtgatatctaaaaaatttcaagcaataaaaaaaatgtattgaaaagagtgtataagataatgtgttgttagcatttttatataaactatgttaagagcaaggtctgatgcatacgttgctagtttttatattagtattgagaataaatagctgaaagtcccttggttcaatctatatcatttgggagggggaattttttgggaataaatttgtatgtccacgatccaatcatcatgtaatcaattttaattttaataataaagtattattttattttcattgtc

SEQ ID NO: 284502 - DNA, 392 bp, Zea mays
gagaatttaccgaatggctttcagagctgaatatgaattcccagaatggatttctccgcaggccaagaatcttatttcgaatctcctcgttgctgatcctggcaagaggtattccattcctgatataatgagggatccttggtttcaagttgggttcatgaggccaatcgcgttttctattaaggagtcttacgttgaagacaacattgatttcgacgatgtggagaacaaccaggaggaggaggttacaatgaggaaacctgccaggccgttttacaacgcgttcgagataatatcgtccttgtcgcacggctttgatcttaagagtttgtttgagacgaggaagcggtcgccgtcgatgttcatatgcaagttttcggcttccgcggtgt

SEQ ID NO: 284503 - DNA, 460 bp, Zea mays
aaaacaaaataaacggtcacataacattaaaatcttcaagaaaaaattacagaaaatctgtcattttactaatttctattcctcctgttgccagaccttgccaacaggacacaaaaagaacaccttagtaaaatgtacaagcaactcactgctctgtctttataaaatgaggagccagcagttttgtaacggtgaagccagtgaaggagtcgacatcaaagagttctttcagcttctcgtcacatattattttcctcttgtcagaaggatcctgaaggttgtttcctttaatgtaatcccacattctttttatgacatcagttctcgctaactcgctttctccagtaccaaggaagtttacaagggcatcagatagctgaagaggagcaagaaaacctgatttccctcctcccttctgccagttttcctttttttttgcttcatctgaatcatcatctct

SEQ ID NO: 284504 - DNA, 503 bp, Zea mays
gtttatgcaacaagtaaagctgcaattaatcagcttacaaaaaacctggcttgtgaatgggccaaagacaacataaggagcaactgtgttgtaccatgggcaaccagaaccccacttgtagaacatttgttgagagaccaaaagtttgtggatgatattatgtctcgaactccgattaaacgtatagcagaacccgaagaagtgtcatcgttggtgactttcctttgcttgcctgctgcttcttacatcactggacaggttatttgtgttgatggaggattaacggtgaatggatttcaacccagcatgagaattacctgaaattactttccttccatctttgtgggagtagagcaacgattctcatttgatttcaacatgtgtgtgacaagccatgtcaatttcgttttttctcccttcaagttgcatatgaaaatgaatggccttatttaattcatatgaacaacttatataataaatggaacatcctatttaatagtact

SEQ ID NO: 284505 - DNA, 343 bp, Zea mays
ggactttacatattaacgagcgggaatcgtcgaggtatttattcaaataggtataatccacggaattgcggaaattttagaaatcttaaaaatgaaagaattcgagataataactataagtatacgaaaaaaaaagaaccctttttttgtaattcctatgatgcaattggagcttatcaacaaaaaagaataaacttcgatagtcctttgtggctccggtggcgactagatcaacgcattatttcgtcaagagaagttcctatcgaagttcactatgaatcttgaggttcctatcatgaaattgatgagcattatctagtagtaagaagtacaaaaaaagaaa

SEQ ID NO: 284506 - DNA, 391 bp, Zea mays
tttttctattgtttttgaatttttttttaccgttcttggtgtgttaaccaccgcgctgtgtcgggatatcttatccatttctccgggaaaatagatatccccggaaaatatttttaattcaatcttttttttttttcttctccaatcggaccaatccccttactcgacttcttatatttaaagtgattagtgtatctacttcaacgatactattgttccgtaccattatggaagaagattctggtaaaatttgcccttcctcggggaatgaaaaaaaattgatctactttaatttggtattttgtcttaaattctttaactccttgatactcaattaaaaaatcctcttttttaaaaatggaatttatacctatagtcctatatttagtaa

SEQ ID NO: 284507 - DNA, 408 bp, Zea mays
ggctcgagcttcgcgaaggtgtaccacgcgcgccacctgaagacgggaaagagcgtggcgatgaaggtggtgggcaaagagaaggtggtgaaggtaggcatgatggagcagatcaagagagagatctcagccatgaacatggtgaagcacccaaacatcgtgcagcttcacgaggtcatggcgagcaagtccaagatctacatcgccatggagctcgtccgcggcggcgagctcttcaacaagatcgccagaggccgtctccgggaggagatggccagactttacttccaacaactcatctctgctgtggacttctgccacagccgcggcgtctaccaccgtgacctcaagccagagaaccttctcctcgacgacgacggcaacctcaaggtcaccgacttcggcctc

SEQ ID NO: 284508 - DNA, 321 bp, Zea mays
acctgaatcatcatcgacaacaactcctcgatgtccatttcggttcattactgctttcgccttttcaacaattcccctttctgggttaaagacgacacaccccagaggccaaaacataacaaagaagcaagcaaataactaaaatatctcagccctgaaacaagaattaacaaaaactactacaaaggaacgacatttagcatgggagtcttggttgttcttcaagcgagtgtaggattctctgcaggagaagtcctccacacgatatctttaagagctggacgaagctccttgctacagaaatggttatacccaaggtgt

SEQ ID NO: 284509 - DNA, 620 bp, Zea mays
cgggctctaggatggcagaaactgggcccagataccaccgtgacctcaagccagagaaccttctcctcgacgacgacggcaacctcaaggtcaccgacttcggcctcagcactttctccgagcacctccggcacgacggcctgctgcacactacgtgcggcacgccggcctatgtcgcgcccgaggtgattgggaaaagaggctacgacggcgccaaggccgatatttggtcttgtggcgtaatcctctacgtacttcttgctggttttttacccttccaggatgacaacctggtggccttgtacaagaaaatttaccgcggtgacttcaagtgtccgccgtggttctcctccgaggcgcggaggctcatcaccaagctcctcgaccccaacccgaacacgcgaatcacaatttcaaaaatcatggactcgtcgcggttcaagaaacccgtgccgaagaacttgatgggaaagaaaagagaggaattggatctggaggagaagattaaacagcatgagcaggaggtttctactacgatgaatgcttttcacatcatttcgctctcggaggggttcgatttgtcgccgttgttcgaggaaaagaagagagaagagaaagag

SEQ ID NO: 284510 - DNA, 663 bp, Zea mays
gctacttgccatggtggtccggctgagatcattgagcatggtatatcaggattccacattgatccttatcaccctgatcaagcttcacagctattagttgaatttttccaaaagagcaaggaggacccaagccattggaagaaaatatctgatggtggtcttcaaagaatttatgaaaggtacacgtggaagatttattccgaaaggcttatgactttggcgggagtttatagtttctggaaatacgtttccaaattagagaggcgtgaaactcgacgatatcttgagatgttctatatcctcaagttccgtgatttggcaaattctgttccgctagctaaggatgatgcaagttaactagctatataatttcaccaaaggcttgacagcagacataataagagttatttatgtaaatataatagtctgcttctcgtgttttgaaatctagtgaggcgacctagaggagtttcatggaagacttgtcttgtctatgttaacttcgattatgtaagagatggcgagcactggttgttgaatttggatgtctcttgttttcgtttgattagtagtcatcaatgatatagacctggaaattacctgtgactgaggattgttatccttactgatgggtaagaataaagcattatgaatcaatggcct

SEQ ID NO: 284511 - DNA, 823 bp, Zea mays
gttagatacttcgttcatcacggcggtggacagatcacaaccacgagatatccacttccgctgatgatggtaatgattctctgaatggtcacatcatatctactacagttggaggaaaaaatgggaagcccaaacagactaaaagttatatagcagaacgcattgtggggactgggtcatttggaattgtcttcctggctaaatgcttggaaactggcgagccagtggccattaagaaggttttacaggacaaagatataaaaatcgtgagctacagttaatgcgcttgatggaccatccaaatgtgatctctctgaagcatcgtttcttttccactacaagtgcagatgaactttttcttaatttggtgatggaatatgttccagagtctatgtatcgagtctcaaagttctatagtaatactaatcagagcatgccacttatctatgtaaaactttacatgcaccagattttcagtgggctggcttatatccacactgttcctggagtttgccacagagatttgaagcctcaaaatatactggttgaccctcttacacaccaggttaagatatgtgattttgggagtgcaaaagtgctggtcaaaggaaaagctaatatatcacacatatgttcacttttctatcgggcaccggaacttatgtttggtgccactgagtatactacttcaattgatatttggtcagctggctgtgtccttgctgagctgcttttgggccagtggaccagcttgtagagattatcaaggttcttggcacacccgctcaggaggaagtttcctgtacgaatccaaactacaatg

SEQ ID NO: 284512 - DNA, 404 bp, Zea mays
gagacaactcgtaataggattatattgttcaacaatcaacatgataaaacttaaacgtaactatgaatatctcactttaacaatgttaaacttattatttttttgttcatagagcaacctctaaacctggtttcatcaagacagaaaaagtaacaacttcaagaacatcgagcccttcttacatttttgcttccatcttcattataattcttaattcctgagaggagacgaaaggattggtaagtataaaaagcaaatcacactcttagggttgagcctatttccttttcatggaatggatagaagatgtttgggaattgtagcaccatacatgatccaccataaatacaggacgtacatacccaaagagtaccaaggtgtacccatattcagtacttaattta

SEQ ID NO: 284513 - DNA, 395 bp, Zea mays
gcatgggccacgccgttcacgtgcttagagttccctctgccgagatcgtatactggaatcactcagcagaaactctgtatggatggaaggaccgtgtggaacttggcgttcgtggttgcggcagggaccgtgctggttttgagcgcgagcgatggtgcctggcatgcctcgtcagtgcaagacaggattgggagcagcagtgggaatttgagtgtgtcttcgagagagggttctgcttctgcctctgcctctgcgcagtatgtgtcgttgggccaactcgatgacgagagtactagtactcaacttgtagcagttggagttgtctgaggatgataggtcacatgtgaagaaaatttctgttatatgtaatctctggctgaaggaaatgcttaatg

SEQ ID NO: 284514 - DNA, 778 bp, Zea mays
cgggagaggacggcccaacccaccagcctattgagacgcttgctcacttccgcgctctgcccaacatgatggtctggcgtccagctgacggaaacgagacttctgctgcatactacgtcgctctcacttcggagaagaccccatcgatcctcgcactcacccgccagaacctgccacagctcgagggctcaactatcgagaacggaatcaagggtggttacgttgcagttgaggcagagggcgctcaaatcactctcgtgtctactggttccgaggtgtccctctgtttggaggccgccaagtacctgaaggacaacaagggcgtcactgctcgtgttgtttcgatgccttgcatggaagtcttcgacgcacagccaaaggactacaagctcaaggtcatcccagacggcatcccatctctttctgtcgaggtcatgagcactcttggctgggagaagtactcgcacgagcaattcggtctcaaccgattcggtgcttccggtccttacaaggaggtttacgccaagtttgagttcactccagagggcattgccaaagcgtgctgtcgccaccattgacttctacaaggaagtcaagcctctccgatctccattgaaccgtgctttccagcagctcatctagatgcttcacaggagcgatgtaagagtttgcgctaccattatgggaatggctagcaggaagcggaatgcgtttgacgattcgggctcgccgaggataaatgaatatacctctgtagatgaaaatgcgttaggatctg

SEQ ID NO: 284515 - DNA, 842 bp, Zea mays
actttgttatggaatatgctaaaggtggagagttgtttaagaaggtggccaaaggaaagctcaaagaagaagttgcacacaagtattttaggcagctagtgagtgcagtggatttttgtcacagtcgaggtgtataccatagagatataaagccagagaacattctgttggatgaaaatgagaatttgaaggtctcggatttcgggttaagtgcgttggccgagtccaaacggcaagatggcttgttgcacacaacttgtggaacaccagcctatgttgctcctgaggtcatcaaaaggaaaggttacgatggtgccaaagctgatatttggtcatgtggggtagttttgtttgtcttactggctggttactttccttttcatgaccctaatatgatggagatgtataggaagataagcaaggcagagtttaaatttcctagttggttcccgcaaggtgttcagcggctattgcgcaagatgttggatccgaatccggaaactaggatttccatagataaggttaagcaatgttcttggtttaggaaggggccaaatggtagacagaaaacacaagaaggggaaaacctgtgtgtctctccttcagttacaaatcattctgaacaatgtggtgatgaaagtgatgatttagcagcagaagcaagggaagagcaagttgtgccagtaagtataaatgcctttgatataatctccctttcaccaggttttaatctttgtggattctttgaagacagtattcagaaaagggaagcaaggtttacttcaagacaaccggcatcagtcatcatctccaggctggaagaaatcgcgaagcagatgagg

SEQ ID NO: 284516 - DNA, 498 bp, Zea mays
aaaccatattaagtaactacttgtacaaagtagagtaacttttaaggaaacagtaccccaaagtctatgattacgtacacaatgtaaaagggtcacaaatagaagttttaggtgcatacaatacaaaacaatataatacaaaattttacatcttcaaagccacaaacctgggctgttggttcactaaaactttcacacagcctccttgtgacttattcctaagccctattaccacaaggatgttcaacaattctcagtgcatcagcactgcagcctcttgcacaagaggctgtgtaacatgcacaaaatgctcagcttccctctccacctcttcccaacacttgtgtgcactcttcccttctttcatcttcttcacaaaccccacaaacttcctccagttatttggttcaaacaaatgcggattcatcctcaggtatgtgaaggacacatctctctatcaccagactcaccatcaacatccaattgtgatgcccttat

SEQ ID NO: 284517 - DNA, 808 bp, Zea mays
gggaaaagcttgggtaggcctggtggtattgctgtgtttgattgtcacggccatcgccgaacaatgcggtcgtcaagctggcgggcagacatgtcccaacaacctatgctgcagccagtacggttggtgtggaaacaccgaagaatactgttccccttctaagaactgccagagcaactgctggggaggcggcggcggtggcggtggcggcggcggcggtgaaagtgcttctaatgtccgcgccacatatcattactatgagccagagcaacacgggtgggacttgaacgccgtgagtgcttattgctcaacttgggacgctagcaaaccttactcatggcgcagtaaatatggctggaccgctttctgtggtcccgttggtcctcgtggccgtgattcttgtggaaagtgcttgcgggtgacaaatacaggaacaggagcaaacacaattgtgagaatcgtagatcagtgcagcaaccggagggttggatttggacgtgggagtgttcaatcggatagacacagatggaagaggatatcaacaggggcatctcattgttaaactatcagtttgttggattgtgggaatgagctcgacctcaccaaacctttactctccatcctcgatgctccctaattaatactagctctctgtaataaacaataaagtgaatgtgtgagttgcagatctagagtctttctattcggaaagacctatatatagaattcatactcacgtgctctgaataattaatattttgttgtctccatcactatttttcagaatctatatatcaaagattgcagg

SEQ ID NO: 284518 - DNA, 544 bp, Zea mays
tgggcgccgccggcaagcctcctcccctcgtctgcttcaaatggccgtggggccctaatcctatcccatcggcgagctccagccccagcccctgcggcgacctcgagctcccctggctcttcaagtccatccgcaccctcgcgcagggcctcctcatcgccggcgacatcccctcccccgcctcttctcccagcggaggagtaaggggcgttcagaggcgcacgggtgccgcggtggtggaggtggaccgcggggacgctgaacagcgcgccctggcggcatcgctcgcgagcgggaggcccgccacgggtgctggagttctactccccgcgctgccgcctgtgcgcctctttgcagggcctcgttcgcgagctccaagacggtgccagtggctccgccagtttcgtgctcgctgacgccgaggacgaccggtggctccccgagcttctgcattatgatatcagatacgtcccttgcttcgtgctcctggacaagcacggtagagctctagcgaagactggagtaccaaccagccggcagcacg

SEQ ID NO: 284519 - DNA, 366 bp, Zea mays
gggaccaagaatatgaatgactgctgatgaatgaacaagaaaaaaaattatcctagaagatctatgagacaaattccaaggttatttcaaggcggatttcataaaaaaaataccacctgccttttgcttttgcaccaacttcaatctgtacttaccagctaaagaattaacgcatcaatgtttgcccattgttcatgcttgcaaaaacaaaaggcacattctgaaaatttttctttgtcaatacaggccttgctcaggtatttgggcttcatgacggaggcgcattctggtttccttccagtccggatggctgctgcatcctcaggaggggatggagaccggcgacaacgtgctgccggctggttg

SEQ ID NO: 284520 - DNA, 363 bp, Zea mays
ggctttcctcaccatcctcctcctcgcgcgcatttccagctccattgccatctcgtccaactacatctcaaggagcgccgagcagcaggtcatcgccaccgtcgcgccggccattgttcctgacatcgacggccagggcgcgcagccgttcctcacctcgccctccggatcgtacgccgcgtacctccgccgcgccgtggacggcgccggcggcctcggcggggacgcgtgctatgtccaagtccagcaagatggcgccagcggcagcgtatgggagtcggactgcaccccggtgggtggcgctgacgcgtgcgacctggcgttctcgccggtgggcctcgagctcttcgccggagggcactc

SEQ ID NO: 284521 - DNA, 449 bp, Zea mays
ggctgattaggttcggttaaccaccgggtttcgtagtatgcgagcatcgttgttggtgggccccccccccccccctgaacaaatgcagcgagggccccgcataagacaatcatccagaatcttgaaagaaaacccgaacaataccgagaagccttctcctcacactctataatttacattgctttcatcgagagaatattgacgcgcatccccctcaagaaagacccccccgatctagcttaagaaccgcacggatccgaggccggccgctgacctaccatgctgtataattgtccagcgtcctagactcgttatcatcgtactttgagtgttgccctacgctcagctgctacacggatttatgcaagcgcgcccttaccctaatttatccgatatacgctaccgacagctcctactccttagactcgcttaggctggcggctgatgct

SEQ ID NO: 284522 - DNA, 495 bp, Zea mays
caggttcggttaaccaaccgggtttcgtagtatgcgcgcatcgttgttggtgggccccccccccccccccagcgctaaacatcacccacctggaaactgccgtcagatagcgcgaatcaccgttatccgtaaacttccggaaacaaccacctaaagaagaccacgagagacaaagaccaccaaggttcggctactagctactcctggcttgttgcacttccggcgcccttctggatctggctctgctgcccgctgcgtaattcccttacggcagcattcaggctaactagactagactgggccgatgccgatgtgctgcccgctgcgtaaatgccttacggcatctgctgacccggcgcggagatcaacctgggaatgcgaaaagagggacgactaagccccgtggaactgaagggtgggcaccccctttatattagataattcagagtcatagacagaaagaaaggacagccactcctcctggctgacactcag

SEQ ID NO: 284523 - DNA, 681 bp, Zea mays
actaagattgaaatctcctcaatccctcttaatctatatggattgaaatagaacctatatgaattggaatagaatcggacatggcctaataggtaaaacatgaatgtgaaaaagtagaccaacagagtgcaatctacagtttacagcctgaaccacgtaggcgtagcccgtaaaatctagttcaacatgttagcgcaagctgatgggcacggcaaagctcaagacctggagtgctcctgtgatttcctcaggacatccttcaacaccgccgcgatcctctcagccatgtggtgctccatgaacatttccttcaccctgccatagcccttttcccccatggagaccctctgctcggcgtggcttgcgagtctgacgatgttctttgcaagaggcgccacgccctccttcccagcaggatgcagaaggccagtcgagccgtccaggacgatctccgtggtccctccagcagccgtgcccaatactggcaacttgaatgccattgcttcaattgttatccttccaaagcattctccacggccctgagaattctgaacaagcacatcaattgctgccaagtaaggggccactgccaatgtcttgttcacaaaatggacacggtcatgaatcgtgttcttcaccacaaagtcacgtaactgagtctcaaatttggtctgagcatta

SEQ ID NO: 284524 - DNA, 740 bp, Zea mays
gaataatagagtcaaagttcaaggaccttgcagtaaagctagagtcagccgaaagatctaactcttcacatagatatgaggtttgcatgctgcagaagcaacttgagattcgaagcgaagaaaggaaatttagtctcaaatctgctgacgctgcacacaagcagcatcttgagaacgtaaggaagataaccaagctcgaatcagaatgccagaggttgcgttcaatggtacgtaaaaggttaccaggtcctgctgccattgccaaaatgagaagtgaagttgaaacagtgggtatcgatacaggaatcacacgaatgagaaagtcgaattcagtgacatcacagaacccctgtgctttagtacaaaactctcatgatacatcacatggaaattctccgttacttgcaaggctacatgcaattgaagatgaaaataaggtcataaaggaatctctttctagaaaggatggtgagcttcagttttctcgcactatgcttgctcgcacaacttccaaactttcccaagttgaaccccagcttgaagatttgtcaaaaggtcggactactgcagaattggtaaaaggtagccctactgttggttgaaaatcctctttcatctatctctgaggatggctttaatcaagataatgtgagttgttcaggctcatgggcatcagccttgctgtctgaactggaacacttcaagaaggggaaacacacagcacattctagtaagagcac

SEQ ID NO: 284525 - DNA, 681 bp, Zea mays
gccatcaagaagctgcaggccggcggcgggcagggcgaccgcgagttccgcgccgaggtggagatcatcagccgcgtgcaccacaagaacctcgtctccctcgtcggctactgcctctacggcgaacaacggctgctcgtctacgagtatgtgcccaacaagaccctcgagttccagcttcacgggagtggcaggccaacattggactggccgaggcggtggaagatcgcggtcggctcggccaagggcctcgcctatctgcacgaagactgtcatcctaagatcatccatcgtgacattaaggcggcgaacatccttctggattataactacgagccaaaggttgcagattttgggttggccaaataccaagcagctgaagtaacctctgtttctacgcgtgtaatggggactttcggatacttggcgccagagtacgctgccacaggcaaagttaacgaccggtccgacgtcttctccttcggcgtgatgcttctggaactgatcactggaaggaaaccaatcatgacatcttcagagtttcagcctgtggcattggtttcttgggctaggccattgctgacaagagctgtcgaggaggaaaactacgacgacctcatcgatccgaggctggagaccgactacgacgcgcacgacatggcgcggctggtcgcgtgcgcc

SEQ ID NO: 284526 - DNA, 559 bp, Zea mays
aattggttatatcttgcggactttgcatcattcaagccaacgtatatcccggatgacgacccatctgatttctcattctacttcgacaccggaggaagacgaagatgctatctagcacctgaaagattctacgaacacggtggtgagtcccaagttgcagcagatgcacctctgcaaccatctatggatatattttctcttgggtgcgttcttgctgaacttttccttgaaggtcagccactttttgagctttcccaacttctggcttatcggcgtggtcaatatgaccccatacataccctagaaaagatacaagatactggtatccgtgacatgatacttcacatgacccagttggagcccaaaaaaaggttaccatgtcgaagctatctgcagaaatatgaaattgttgtgttcccattttatttctcaaaatttttgcacaagttcttctcagatattgttccacttgactccgatgctagggttgagaagactcaagaaaattttggaaagatacaggaaataatgatgggtagttcaacaattgaacaaattg

SEQ ID NO: 284527 - DNA, 450 bp, Zea mays
agctgcacgtgatgtcgccggtcgtcccgacgcgcgagttctgcttcctgcgctactgccggcagatcgagcgcgggctgtgggcgatcgcggacatctcggtggacctgcagcagcacgacgcgaggttcggcgcgccgccgtcgcgatcatgccgcctcccgtcgggatgcctcatcgccgatatggccgacggctcctccaaggtgacatgggtggagcacatggagatcgaggacagggttcccatccacctgctctaccgcgacctcatcctcagcggcgccgcgctcggggcgcaccgggggctcgccgccctgcagagggcgtgcgagcggtgcgcgtgcctcgtcccggccggtatgccgcaccgggacattgcagttgcaggagtgacgccggaagggaaacggagcatgatgaagctgtcgcagcggatggtgagcagct

SEQ ID NO: 284528 - DNA, 458 bp, Zea mays
gttaaggaacaatcaaagcagtgacagtgacatttcccttactaaaaagaaggagagaattaatgatcattgaaggcttcacaccattagatagaagtcaatacccgaaccatgcatcatcctctgctgcaaactacagaatgggagcgagactgcaaatcggcggcagaaactaggggaggggagacacaaagaggaatggaattaacaactgatgagcgtgacggcagcaagaggaatgagacgagcatggtgcgttcttgactcccccgtttcgtgcaaagcctcgccggcaagcaagcttcaaatcctgtaacaggaaaagttatcatgcatgcagagaaaggggttgaggttgagagagagagacagagctgaatgatcatgggccggtgatcggacggcgcagtaacagcggcaggtgaaccccaagcgggcgacaccatggcagcagcccc

SEQ ID NO: 284529 - DNA, 422 bp, Zea mays
ggtggcgccgggcaacttcgagcggcactggggcatcctccggtacgacgggcagcccaagtacccgatggacctgagcgggcaggggcagaacgcgatgctggtgccggcgcgcggcgtggagtacctgccccggacgtggtgcgtcgtcaacaccaacgccggcaacatggacaagctcgccgacaacatcaactacgcgtgcacgttcgccgactgcaccgcgctgggctacggctccacgtgcggcggcatggacagcaacggcaacgcgtcctacgcattcaacgccttcttccaggtgcagaaccagaaggaggaggcctgcggcttccagggcctcgccgtgcccacgcagacggacccgtccaccgccgcctgcaacttcaccatacagatcgccaccacctcggcgggtcacc

SEQ ID NO: 284530 - DNA, 360 bp, Zea mays
ctcccccaccaggatcttcctcgaggagacgtccctggtcgcgcgcccggggctcgccatggacgacatccaggagcgcatggccgcgcgcctcaggcacctgggtatacgcgtccgaagcgtcgaggaggacgagcgctgcgtcatccccatgggagggccgctgcccgtcctgccgcacgcggtcgtcggcatcggcggcacggcagggatggtgcacccgtccacgggctacatggtggcgcgcacgcttgccaccgcgcctatcgtggcggacgccatcgtaaggttcctcgacaccggcaccggcaacggcatgggtggcctggcaggggacgcgctctccgccgaggtgtggaa

SEQ ID NO: 284531 - DNA, 373 bp, Zea mays
  unsure (1)..(373): unsure at all n locations
attcacacacaacagagaatttcagagttatccagtaatacagaatgcaattaaaatgtagaacagtctattcttgatatacacatggtctgagctaggtgtggtcctatcgttgtattaacagcatatggacggagttacttgtgcaagatattacaccaggagtccaggaccttatagactattcctaatagtcaatatttctcttatagcctttctatttaaggaacaagtgaaaatcatgtcactttcttatgacagctcatctgccagctgacaactcaatggcttcctggatgttttgagactcttcactgaagttgaatagtttgccctgttgcctcatctatgctgttgtncgtcgttggagctc

SEQ ID NO: 284532 - DNA, 483 bp, Zea mays
cggcggacgggcgggaggtggcggtgaagcggctcttcttcaacacgcggcagtgggcggacagttcttcaacgaggtgaagctggtgagccaggtgcagcacaagaacctggtcaagctgctgggctgcagcgtggaggggcccgagagcctgctcgtctacgagtacctctgcaacaccagcctcgaccactacctcttcgacgcgttcaagaagaacgcgctggactgggagcggaggttcgagatcgtgctgggcacggcggagggcctctcctacctgcacagcgcctcggaggtccggatcatacaccgcgacatcaaggccagcaacgtcgctgctggacgacaggttcaggccgaagatcgccgacttcggcctcgccaggaacttcatggacgaccagagccacctcagcaccggcctcgccggaactttgtgagccgactttcctgaccgagatgatgcattcagagacgaca

SEQ ID NO: 284533 - DNA, 354 bp, Zea mays
agagcctggatgataaaaatataaacaattaaacattaagtgatcaaagcctaaatccttaatttatgagtaaatgtattacttatactatgcaagggtaccgaattcctcacctaaataaccagacatctttccattacagtagaagatcaatctaggcccttgattatttagcatgatatattggttaaacagggtcattgtccctcaagtaagcattccttgattctgccatctttattcatcattccagttagatcatcaagcattttgtagatgctcagagcgtccggatgatgtgtgtcctgtacaacaaatacactttgtttgttacccactgtgatccaactacac

SEQ ID NO: 284534 - DNA, 552 bp, Zea mays
agataaaatacagatttacaaaaactttccttttgcccatttgacatgcccgagcaacactggtatatctgctgtgaagtttgctagctttggaaccccctctgggtcatgtggatcttacctcaagggagattgccatgatcccaattctagcacaattgttgagaaggcatgcctaaacaaaaacgactgtgtcataaaattaactgaagagaatttcaaaaccaacttgtgtcctggtttatcaaggaaacttgcagcggaagcagtctgtagttgattaataaactaacatactccggtgccagagactcgtcactttgtgactgtagttgattaattttactgtcgattcaggaggaacgttgcatctcaccatctattctaccagcttggctacatcaaaaaagcatatgaaaattttgcatgtattaattaatatgaatattgtcagcaaggtctctaatgtataatttatggcagagaattatgctgcaaatgcgttatatattaacccatcccgctttcacatgggggtgttagccattaggt

SEQ ID NO: 284535 - DNA, 438 bp, Zea mays
aaaaatctctcgtaatggttagcttctgtgatactgttgaaatgcacgacatgatccagggcatgggtagagaaattgagcggcagagatcaccagaagagccagggaagtgcaagagattattgtttaccaaatgatttcattcaagttttaaaagacaacacggggactagtaaaattgaaatcatatgtctggatttctccatatctgacaaagaagaaacagtggaatggaatgaaaacgccttcatgaagatgaaaaaccttaaaatacttattattagaaattgcaaattttccaaaggtcccaattattttccagaaggtttaagagtactggaatggcacagatatccttcaaattgtttaccatctaactttgatcctatcaaccttgttatatgcaagttacctgacagctccattacgtcatttgag

SEQ ID NO: 284536 - DNA, 665 bp, Zea mays
tgcacgcacgctcggcaccgagcggttcgcggtcggtcactgcatacagaagcactctttgtcttggcgagagcaacaaaggaaggcgacccaccaacgcgagaaggatagatggaaggtctgatcccgttcgtgatcgacgtgatcaggaggagccacgggcgcggcggcagcggctaccgctccgtctcgtcggacggcggcagctcccgcggcgggggcagcaggcgccacctcatcgactactcggagctgcctgacgccgcagccgcttccgcggcgagcgtctgcgccgccgactggccgccgtccggcacggtgcaccgccgcgcgcggtcggagtacgcggactcgacggtcgtcgggcgtcgcagcgaggagcacgccgggccggcttatcgccggaaatgagggggccggcaacgcgcatgcagcctctcaactttggaggatccatggtgagcgtcagcagttcagcatgtttgggttgctggttaattagttggcaacaatatttgctctgtttgttaactcgtttagcactgcattgtaatttaagcaaaggtacaaacttgtgagcgaaaaaaggtgttaattcgttattgttccgaagggggtataaaagaggaatgtatatacgtttaaatatacccccctccttttat

SEQ ID NO: 284537 - DNA, 355 bp, Zea mays
gcccttattccctcttttctatggtctaactccaactggttgatcaagctggggaactctgctgaaccaagtcattggtagttgacctttgaagtcatgatctccaaatatgacatctgtgattccctgtgcttcagtacctggcaaccatgcagcaacaagagcatctatcttttatcctaccatgtaccattcatgcatgtatgatactgtcagttaccctatttgaaatttgtataactaatgaactttgaggatggccataattgaatgtatgtattgaatattttcaagcttcttgactgacctagcagcccttcccatgttgctgagaggacatgtcctttaccgtttc

SEQ ID NO: 284538 - DNA, 478 bp, Zea mays
tgaaaccaccaggtcatgtatatcttttagcgatattgtgccatgatataatgccccctccgctgaagggtgagaaagaaattggggagaaaagaattatatcctttcatggggctggcatatcagtggctccagcattaagcttttctgaaaccactgctactagtgaaaatcctgaaaaggctaaggagttattctcaaaagccctgtacgattctgtgaccgagcaatataatgtgctgaaatctgcgatacatggcaaaaaaggatttgaagcatcaactcctgtagtttctttgtcacagccatggaagtagttgaaattggcatttcttcattacaatttgctctgatgcagaagcaagttacaagacttcagtcaaacaatttcaactgatttacttctgagggactgcctattactacaccggtcaccgaatgatttgagcttgatggaagtttgcagtcaaatacatat

SEQ ID NO: 284539 - DNA, 935 bp, Zea mays
ggagaagaggagcaggggcagttgcagcatgaccaggaccaggaccaggaccaggaccagcaacatcaggaggagcaggggaacgtggaggcggaggcggaggatccggaacagcaggaggaagaagaggagggggcggtggaggacgcggacatggaagatgcgggggaggtagtcgttgatggcgatgcggaagaaggtcagggtgaaagtgaaggtgttgacccaaagccggaggaggaggcgagttatcctgatggaattgatgacaagaacagaaaacttaatgaaaagctggacgccctaaataaaaagaagcatggccttgtgcagatgctgaagcaggtcttaaatgctgaagaagaaatccgaaggcgcaacatgcaggcttcattgcgcgctgcaatgccccagccatcagaaaacgcaacagatggaagttctgtttctaggttggcccctagaatgactgttgatgtcaattttggtgatgttgctggcagattcagatgctggttccaaccagggcactcctggacgccccttgcatcacttccacagtatctctccttcaacagcctcttttgcgaggtcaccgtttggttctctacagggccacactccaaggagtccggcaacattctctacggcaagtccatcacgcttcgccacaaatatacacccaggacaacctcctgctctttattcagcatcgttgccaggaagtaactatgtagccacatcaccttccccggccgcatctggtggttcttcctcggtgttcagggaccctcggccacctaactctacataggttctatgctttgctcggagttctaatcattgataatgttgctaaagtctcttcgggcaacactagtggaaaaacaaattcgtgtctctatgtgtcaactccaaataacgtgatagcagtg

SEQ ID NO: 284540 - DNA, 752 bp, Zea mays
ttgacttatccgcaattcggttattcggttctgtcccgttcgaactcgggacaaggccgggtctatccacactgaatttggatagtaactctttagagggcttaattccttcgagtttgttgagtaatgggggtatgggcattttgaaccttagtcgaaacgggtttgaaggctccatacccgatgtgttcgggtcacactcgtatttcatggctttggatttgtctttcaataatttaaagggtcgggtaccctcttcgttggcttcggctaagtttatcgggcatttggatcttagccataaccatttgtgtggatccattcctctcggagcacccttcgatcacctcgaagcgtcgtcgtttactagcaatgattgcttgtgtgggaaccccttgaagacttgctagttatagtgggtgacccgggatccgaatacgtacccggatagatacccgatttgtttacaaggtgtggtgtaataattttattttattttgttgttaagtggtgtaagtgtaatataacgttttagtgagaaagttgaaagagagaaaggaaaagaagtgagggcataggcatctgcgtgcacgtgcacgacaagacaagggtttcaaggaaggaattcatgtttgtgtgggaggtcaagcttatttgaaaattattcctgtgctgcatgtgagcttccttgttttactagtataatgtaaaagaagatcacctggcccatgatttcattactgttcttcctt

SEQ ID NO: 284541 - DNA, 510 bp, Zea mays
actcaaaagaacaaattacactttggtttggttagttgaatgcttcttctagactaggtaagacttaattataggaagaaattcataatcaagacattttatgtaaaatgtaaccatacaatatcatgatcctagcctgccaaaaacaaaattaataacaattattaactaatagcttgctctctttagggaagtaatagtaacggaagaacccaatggagaagttcccacttgaatctcgaacgagtcgtagcggagaaaaaactccacgacgagaagcctcgaaaccaaggtgacgaagtcttttccggcgcattgcttgttcccaattgtcggagattcggtctcagggccattggaccacagcacgtgtttcagaagcttttccccttcctccccgacgaacctgtcccccacaaactcctcggccctttcgaagatcctaggatccttcgtcgcaaacggttggtatccgaacagcatttccccttccttcacctgaaatgcgtg

SEQ ID NO: 284542 - DNA, 484 bp, Zea mays
ctgttcatacttgttttttcaattttatttcttttattacttttcctctttgggttccaaggggccactgttgaggttgcacaacaaacaccaacaactgtgacagaaaatgaagcaaccgaggtaaccaagattgaggaaactaccccagaacaaccagctacccaggttactaccaccgaagaaccaaaggaagaaaccaccaaagaagcaaaagaggaagaagaagccccagttgagactaatgaggcaacagaagtgacagaggaagtgaagcctgaggtagaagagaacccatcacctgagagaacagaagaagaagaagtgaaagaggaaactaaagaaaccgaatcagcaccagtggaggaacagaagcaagaggagaacaaaccagctgaaaccgttgaggaaaccaaaacagaacacgtttctgttgagaagactgaagcttaagcccatggatacggtattattgaagtagatg

SEQ ID NO: 284543 - DNA, 642 bp, Zea mays
ggcattcttcttgaggccagacaagtgtttccaagtatcgaaacatttggaatttgtatcacagttggtttggaagaatggcacttttctttgcagcattgaatatagtcctggggatgcgagctgcgggagcagggaatgattggaaggcaggctatgggttccttcttagcattgtacttgtcgcagttatcgttctggaagtcttggcgtatttgaaaaggtcagaaaagcgttctcttcctcagactttccaaatggacccagttggagatgctaacttcccaaccaatctagctaaagggtgaatgtgttggctcctagttttgtttgcacttgtacaagctgtgtcaattgtctcattcagccacttcagactaaacctcattcatcctacactactgcatgtgaactgagttgtggagctttcttatgtagaaatatgaccctagaagtttgccaagatggacaatcctagtttggcttcctccctgaactagattacctttttgctttcttcattggttgtttttttgcatccgcatggtcaaaatggaagtactacatttacatcataaattgtaatatctaaaaaaaaaaagcgccccgacagtagctgtgacccgggaataattccggccg

SEQ ID NO: 284544 - DNA, 408 bp, Zea mays
tggctgattcaggttcggttaacaaccgggtttcgtagtatgcgagcatcgttgttggtgggccccccccccccccccataataacaagaaaacacacacatactcaaactcatcatgaccggacccgctaggactgttactggaaaaaagaaggaactaataaatgaaaaaattccgaacgcgaatccgattctattaatggaaagtcgattacctcggacgccttgaaagccgcattcttgcagacacgcacgcagacgaataaatgcggagaagcgatccgagactgatcatctcattactaactattcccatcgctaatcttgctaactatagaacctagagatgcctcagaatctgaaagaaaagcattatggaagagaccgagggcccatgcataccttcct

SEQ ID NO: 284545 - DNA, 471 bp, Zea mays
gaactgctgaagacaggcttacgacacatctttgtaaacattgatcaaccaaaggacatgcatgatatggcacatagttcacgtgaggtgacttcatcagcagcagggccaggacattattgtcaaacataatactcctactacatgatatgacaaagcatcaggtcctctctttacaaccaggtgagagcattttgtagtttggacaggtacatgctacaaagccacagccaccggtgtacactcaacagcacaagctcacagcatcacaaaagcaggtgcccaagaaacataccacccactgggaccagagcagcgtgtcgccggccttctctccaccctggtggcactatgacgcgcaaggcattctggtgccagctacctccttggacattttcaggaacaggtccaggttgtggtggtaccggctctttatgccatcatcttcagctgccccactcccatggatgc

SEQ ID NO: 284546 - DNA, 591 bp, Zea mays
gaggctcaacaagactcttcttgtataatgatcgtgtgatttatgatacaaatacaatcgtgacgacgctaacagccgtggtaaattagtcgtggagactctgaacccaccaaaaaggctcgaccagttccgtgtactccctcgtatgcaggcggccattcactgccttgacactagtattattaaaatctccctctctctctctctttttcacaagaattacttacacagccattctgctcgttccgacgcagtatcatttgtatcacacagatccgatgagaagcgtgtgctccctctgccgtcgtgctctccgcctccaagcttttaccccgaccgtttcaggtaggccatcacaccgagcccagcaaccagagccgcccctgccgcgaccgcgctgtacgcagaagcccatgctgcgtccttgccagcgtactccaagtccgaaggaccaccccctcccttccgcggccaacgccggcgtaatccagatgcaaccttatgctcttccaaccgatctttctcgcatggtccacagcggctacaagggcactgtccgacgaaagcacgaccttatcacggtcctcgtct

SEQ ID NO: 284547 - DNA, 558 bp, Zea mays
agcacaatatgttgtgacgtcacataaatttttatttgataaaatgttaagactatatagaacaaaataaataatacaatgccgcaagggtttcatcaaacaatgtcacatagtaacaagtatgtcaccatataaaacgaagaacatgcaaaaactctattcatgtaacccaccacaatagagccagagataaatgttcatgagttcgaaggcattgtagtgaatgtatgaatgagcctagaattctgattaagatcccttggtagtaaaaattatctttcttctcgccatctcgccacaaggtaggacaccgattgattcccattctaacgtgaaaacaacatcagaggggttctggggatctatgtcaaaagatttgatagcatatgctttagcaagcaattcaaggggtctctcatctccttgtttgacaattgcaaggatcccatcctctaaacacacgtcatcactggcaaaatattcttctttcctcggatgaccactctaggttcaccttggatcaccatgtattttcgacctccaacaaaaagacaagtt

SEQ ID NO: 284548 - DNA, 822 bp, Zea mays
ctagatgtgcaataaaaatggtgtacttagaaaaagcagagggatttacaactagagatgggcttcttgatgccttttctacattttatcacgcttttgaaagaacgagggactaacatgatttcctggtgaacgagattggagcagcgtatagtataagttaatacttcggatacaagcaataaaaagtcggccatgctctcaatgagacagcttctacatacggacttgaaggctgcatggcagagaacattgttgtcaggaatgttcgaatgtgtctgtacattacacgaagcccgcgactcgaggcgtgctgttacgatctgggttgttacgccatctatgttttgatcagcagccttttcatcacaacggagggtagaagtaggatgaaacagaaaaccctaggaagagaacgcctccgatcgtcgctacagttcgctgcgagatcttggacgccagcatgctccctcctaccacggcgagagatgtgcacaccgtgtgcccaagtgacgctcccactgcgactccgattgcgttctggtgtgttgccagcgcgattgtcgctatttggctccggtcgccccattcagctaagaaggttaagatgaaagcctccaaaaagattggtgtacaaaatcttgcaaagaacctacggatggttgatttcccttgacccgactcaagcttctcttctacttcttccatttccttcttctgggatccctttgggtcagatttccatgcaatatacagcaaccgtagtccaaagaacaagtacaaaactgtagcagcactattagtgcccaacttgatatcaag

SEQ ID NO: 284549 - DNA, 471 bp, Zea mays
  unsure (1)..(471): unsure at all n locations
tttcggccgcccttnnntnaattttttttttttggcagagaacattgttgtgtggaatgttcgaatgtggcgggacattacacgaagcccgcgactcgaggcgtgctgttacgatctgggttgttacgccatctatgtttcgatcagcagcctgcggggaagtcacaacgtttcttacggcaggacatgagacaactcaagactaccataccatccaagtgggagcggttgcgagtaccttttcatcacaacggagggtagaagtaggacgaaacagaaaaccctaggaagagaacgcctccgatcgtcgctacagttcgctgcgagatcttggacgccagcatgctccctcctaccacggcgagagatgtgcacaccgtgtgccccagtgacgctcccactgcgactccgattgcgttcttgtgtgttgccagcgcgattgtcgctatttggctccggtcgccccattca

SEQ ID NO: 284550 - DNA, 655 bp, Zea mays
atcgcgagcagccgccctttttttttttttttaaataaactttgtgtgatgttaaaactcaaaacggcgtctgattacatccttaaaacctaaaaaaatcgcttatgggcagaaggagctcttctcatggaaaatgcctccttcatacattatttatactcataattgatatacaagaattctgtacaaattggaactctagattgacaggcgccttaggttaacataattgcagcaaatcctgatgacgatgagcatctaaagcatgcaatcattgtcttttccttgtacctgttatttagtcatccaaattggtgccaatctgttgctcatctttattatctgctgctgatcttctcctaagaatgaactggatcaaggagacaactgttatcaaagctatctcagcgtggtctgatgtgctagttctgacgctgagattgcccaaatttctactatttaggttagcgctgactgatatttttgatccacggcccactcggaagtctgactgaaggttggccccaattacggtttccttttcaaatgacaaagcagagaccgcggcagtgacactcccttccctcacagggtaatctttcccccttgctgtaatctccacaccacctccatgtgccacctgcccacagccaga

SEQ ID NO: 284551 - DNA, 595 bp, Zea mays
atcaggttcaacatcatggcgatgaattactataaaaccgaaggaaatccaacatcacaggtaaaaaaacagggtacacaaatgcggggttcacgggcaagccaagccttgcagctcttgtccctcgactcagacttgcctcctacagtacattacagagcggcaacacaaacaagtaaacaacctcccgtcgactaacctcctcaccgatgatgccgtgtgcagtctcctcccaatggccatttaatcagttcgtgtagagatgaaatcaaatgttagaaatgcctaagaattaaaagggtcagaactccgtcacgcaggctgcttgccctggcagtattgtccaagtcatcagccaaaaataagatgacgtagtagagctttagataccatcatgtgcttgcaccgtgtcattaaccaagtgggatctgatcgtccagacatccagctacctatcttcagtgttcagagttgcccccttctcctatttagcagtctgcgcccaccgcatcttccttgagctccgtgataaccttaagaaggtccactggagttgcggcggggtccagctcatggcaacctttcggggcgttgt

SEQ ID NO: 284552 - DNA, 301 bp, Zea mays
aaggcatcaaaaataatttacatgacagataaattatcctggtgatttcaccacaacttgcacaattaatacaccaaatccagatcaacatacaaagaatcaacgcacatgttaatggaagaataagaagaccaaaaaaaaagaaggaagaaaacatccacagaatctggaaataaaaaatcatgatgcaatgttccctccatgttaatggtaagtcggactgcacatcgggcacgcatggactggctcgctagctcatgagctccttttcagcgcgcaccaccggtggtggcggcccatg

SEQ ID NO: 284553 - DNA, 708 bp, Zea mays
ttttcttattttcttttttttttttttttttttgggtttttttaaacaaaagattgtgggcctatgatgcaccccaaatttacaaaagcactgtctcgaaagcggttcgatcaacatttccaggcaaacagaaagcagctcgatcatctacaggcaacagagttggataccactagtataatacattgtacgccaacactagctaaaagcctaaatctttatataatctttaaatatttacagggtatatatatatcaatcaagatacgctgctggaccacaccaatgcaggttgtcggcagaaattgatagcgccattgggatgtttgcccaccttaagtcgaggaagacatcgttctcctgaaatcaaatgattttagagctgattctggtaacgggctgcttccgggcacccacaaaccacctccgtgcggcagcacaatctgtttgtttatactcttatcaccatcagccgtctctgactctgctgtaagagattccttctttttcttcacaaagtcaaagaactccgcaacttgccgagcatattgtcgtttggcttcgatgtccttgttaaaatcaatgtcatgttcacagtccaggataagagcaggaaccttctggatacttgaatgcatgtgcactggtccgccagcgtccgagctcgggacgcgtggtgacccggaattcggaccgtactgcggctac

SEQ ID NO: 284554 - DNA, 439 bp, Zea mays
acaatctgtttgtttatactcttatcaccatcagccgtctctgactctgctgtaagagattccttctttttcttcacaaagtcaaagaactccgcaacttgccgagcatattgtcgtttggcttcaatgtccttgttaaaatcaatgtcatgttcgcagtccaggataagagcaggaaccttctggatacttgaatgcatgtgatctccttccaagtagaataccctatctcgtatatccgcatgcagggagccctccatatgaactggaagctgactgatggacaacacgccagaacctcctcccttggatggaagtaaccagctctcatgtttctcatgcaaacctcgaaggtaatcaagagtaacaccagcctcctctgatctttttcgcaccatcattcttttgtgacaagtatcagggctagctcttagataaa

SEQ ID NO: 284555 - DNA, 383 bp, Zea mays
aagcaatctgtattttttgcactttacggcaactatgcggggaaccgcacgcgccaggggaaacatcatttcacctaaccacctgctccattgcatcatggaagattggaaagagtacataaacctcagtgcatttatgcacaacctagatatgctactatccatagcaccaggagctgcaccactgagcaaacgttggtccggagcgaatcccccaggaatatgcagcatgaatataatcttctgttcctaagatacattactcagaggcgcaaatacgctggccagtacacatataatgaaactccatggacagatccctggctaccttgttcagatttacttgcgggctttcactttcctcgacgatcgtcttgtagccc

SEQ ID NO: 284556 - DNA, 461 bp, Zea mays
gatcagtcccccgcaaacagcgaagaaacaatcttattttacaacgactcgattcttttcaacctttttagcatgagtttttgattttcagtactgcacccaaaactgcataaggggggcaaaaatggaattacagaatggccgcaaccgtactattcgcaaaccagtgtctgctggctttggaagtacacacacagcacatgcagaaatgtatatggtcccataaattagaaagcaacctcgaggacagacttctaaaaggcaagtctctcaccatatgtatcaacatggcaaaccggaacccattagtctctctgcgaggttcgaattcattgttcaggttcagactcggatactctgggcgtcaatgtttgcggcttccctctgcccatgctgaatccccgtgagccatccggcatgcgaggacctggaggctgtttgttagccgctgtgaggggctg

SEQ ID NO: 284557 - DNA, 395 bp, Zea mays
ttcttttttttttttttttttttttttagagtggctttttttgttttaggttttgccaatgcttattgctaagtgatttatactcccaaaacataagcagttcgacccattcaagcgtgcatcgcccaagccattttgcatggcgctaaagcagctgagcaggccgtgatcaacataagataaagacggcaataacctatatatgaccatgtggtcatttggacagttcagtaagcaccgcaagcagcaaaggggcaggcaaaagcagtaataaagctcgtagggatctgtgaaggtcaggacacttctcaaggcaatggaatgaagcactggctaagacatccatgcaggatagcagccgcccggcgctggcactggctgctggttcatgtcca

SEQ ID NO: 284558 - DNA, 386 bp, Zea mays
gaaagtgaatgttcaacggatacattcatttcaattgaatacagtcaatacagatgaccatgaatcgacaaatctggcctagcgaaaggtaaaacttctgcagaacatattctgcgccattctccccccttgatcaaacctttgcaccagaccatccttggcatatgatgaaaagctgctttgcagcagcaacgcagtctagtcagtaggatgtatatcagtccctctacagtagcatcaatggggctggggaaatctcaacacacacaaaccaacgctacaacatgcatgattatggcaccacagaagcgcccgtcattggaatcactttacaacaacaacatacaaaccaagaccaggaactgcctcttctaggctcatctggg

SEQ ID NO: 284559 - DNA, 379 bp, Zea mays
acaaaagaattaaatgaaattaacattcgagatccctgaaattagtactgaagatacctagaaaaattttgcaatcaataatgtacatcctgacctagaaacttacagaacattttcctataagttacaaggcaacacttgcattttgctgcccccagtcccttatgccagatgttacatagaagttgggacttttagatgtaacactatccaccttgtaagtgctaatgaggcctaagctgcatggcttggccggaagacgttttcctttatttgggcatgatttatcaggaaaaaaagaatgtctttctttcactactacaactccgacggctgaacgtggaatcagatttctgccttgaccccatatgtgcatatt

SEQ ID NO: 284560 - DNA, 710 bp, Zea mays
aaaaaaggaaagcttttgcataaaaaaatgagattaaaatagtaattcggttagcggttacatatccagccaagagtatgtcgagctggtagctggatttcggttcatgccaactaaaaaatgtcttacagttgcaaacagttcagaaactgtaacaccagagcgagattgcgctccggtggagcggtgtgtacttgcaagttggaaccactacaattgttctgtgttgagtccacgaaaaatgggaaatcagaagaaattaacccagtccaaaatgattcgttgctcttagaaggcatattcataaatagcctgtgcaactccatcttcatcattcgtggcgccaattacatttgccgctgcttttgtcttgtcagatccatttgcaagagcaaccccaaacgaagctagttgcaacatttcaatgtcattttctccgtcaccaattgccattacctcatctggactaatggaaaggtggttcaataggaccttcacaccattgcctttcgaagttgcaggtggtcacaagttcaagcatatcaggctgtgcctgaacaacatgggcccttccctctatcgcctttgcccagtacggtctcagtgcagacgaaatcctctcaggagtttcaaggaacaatactttctgtatctcaagctgtttctaaaagctgaccaatagatggcactattttagccttaggttcatg

SEQ ID NO: 284561 - DNA, 436 bp, Zea mays
ggcccagggtcttctaaaaattgcataatgctactactaattaattagtacaccgacagaagcaaacatccgagaaacgctccctatgtacaacaacgcatcaccgtgcccgttcaattcgaaccatgaaccaagtgctgaaggcgggagggagactctcttaatccccccacagcttctcagcacacgctgttcaaatacttaacaatgtcatcatctactactcggtacgctctcaactcaactcaactcaactcagtctcagcaaactaaaccctcgtcttctggtccgtctggagccgccgcagctcgaccacgacgacgctgatgttgtccctgctgccgcgggacaaggccagctccgcgagcagcgcggcggcgtccgcggcggtgcggccggccacggacccggggaacctggaggccgcgcgcccgc

SEQ ID NO: 284562 - DNA, 558 bp, Zea mays
gaacaaacagttaattttttatattcacagcatcttctctcttttttcaaatgcacaaggtaaattagagtgtttataatacatgaaacctgtatacaatcgaaatatacgtgttttttttaaaataacctacagaggataagacagccttcagatattacgttacagaaaatcttttcacacagatctaaaaaatctcaatacccttatctcagcaccctagtccgaccactatggaagccagaatttaacgtggagcaaaagcggatttttttttaacgtcagcttcaaatttatttcaacggagaatctaactcggaccaggccttttcgcgaattaggtgatttaaaccagacggctttagagcacctgatctgtctatctacagcatccaatcttaacttctgcacaaacttcaccggttggaccatgaatccctgcttgctacagggtacaagttcagctatcttcagcgaagaagttgggttctgctggcttttgcaacagtcttgcaggtactctttcctgcaaacggccctttctcgtacgctgcatca

SEQ ID NO: 284563 - DNA, 498 bp, Zea mays
ttcgctaagggctagaatgtttgccgctactacctgtccacctctccagatgaagtcaaggggagttaactgacgacttagcaagggaatgctcccttgctcagagcacaggtctggcttttacatgcggcagcttcacacagcctaaatatcagtcagcgtcgaatctgggtccccagtcagcttgcggagcctttcctagaagccccgtgccgtcggttgtgtctggctcagaagccacttgtggtgccacagctggagaagccggagtcagatcgtgctgctcccctaggatcacagcgtcgcctgttgagtctggtccggcgatgtgagttcctccttccagaggcactgcgggagaaccccaagtctcttgtggaacctctgcctgaggggctggaggagtgccttgctctgtctcagctgcggttgacggtggaacctcatccggggcgcctgatgctgtcccaacatcagctggtggtgcctgcctgcgac

SEQ ID NO: 284564 - DNA, 579 bp, Zea mays
aaggggcaacccacgctatgggggaaaacctgggtagtattggtttgccatagttgggtgacagcgagaatagctgtaacttctccaagatagcagtgttaaatacaaaaaaaaacctacgcgtctttacaatccatacatcaatctccaactttatacatgaagattgagagccacaaatcagatgtatccttatgtgataagctgcgggaacagaccaacctaatgcatttcgatctcctgcacaggaacggtgttctggtctgattggcgggcatcagaagtaccagacgagctcactatctcagatttgcacagagggcaaagtgcatttatcttgagccatttatcaacacagtccttgtggaaacagtgtgcacatggaagttcacggagctcatcattgtgcgcatattttgcaagacagatgcagcaaactgcgtcttcagcagagagtgatcgctccttgtcagttcctgcagccaatatccctccttcctggccttcagtttcactgcctgaaccatggcgacgtttcttgatgttgaatttatatgtaggcaaagcattgatagattc

SEQ ID NO: 284565 - DNA, 417 bp, Zea mays
aaccctcgaatcaaatgtttatatttattatatgctcaaactgttataatagttaccaaatatcagtggccaaaatgaaacttataaattcagcaggaaaacagacatacatagttattattggggctaatcatagagtaaagcaacaacgacggctttaatacatgcgatggtaatggggcagcttcttggtctttttaggatgcagaagcacggagctgagtgtggtacgactcagcagcaggacagccctctgtagctccataacctggtccattgttagtgtaatttctttgaccacaagattcgacgtctgaattttggaatcactaacaatcttaacagtggatgttaatgagagtggaagaacacgcaggtcatcagtaaccaggaaatttgtcttcccgcttacatata

SEQ ID NO: 284566 - DNA, 317 bp, Zea mays
atcaggagaatgcatgtttccctttcccaccggttcttcggggatgacaatttacaagtgcacgattcattctcattcaagcaaattacaatcacccaatcccttgcctgagggatgacaatacttccaacagtcagagtgtatatggatctttctttctttttttaccttgtttatattaatagcgatggaaatgggaagagaagagaacagagaggacgtacaggtacacagtaggacggcggcggcggcggcggcggtgccggccgagctcgctcgttgtcgtcgtagccatagcccggaggtcaaagcttgac

SEQ ID NO: 284567 - DNA, 488 bp, Zea mays
atgtcttgaccgaccagcgaccagattctgttcgacggaaaaagccagagactcgagtctcaacactgactggaattacacagaaaaaagaagcaaaagagatgcctaccaccaatgcaaaaaaaaaatcatgtatctacaaagcagagcagagcagagcaggagaggaagaagcacaggcaaagcagagcaggagaagaagaagaagcacaaggttgtgcacatggacgacgatcccatgtactgctttcttttgtacctacagcaacgaatgtgcgaaaacaggcaagggagggaccgggagacgagagacatttgagagacacatggatgcatgcattgcatgcatccgatcaccggccatcggccgatatgaaggactctgcgaagccggcggagcgggcggggatgctgcccttgctgtcgtccaggctcatgacgctcccgccgccgtccgtcatgccgccggcctccgcgtcctgccagct

SEQ ID NO: 284568 - DNA, 574 bp, Zea mays
ggacaaactgatatgataaattgattaaggaaatacatgctacttcacaaaacctgaaaagatcaaacggttgtacaaagaaaagggcagatcacacgttactgatattctcgtaataacagtataaacagttaccaactcaacaagatgtagcgccgtgacactgacaaattgcacatttttccattaaacatagcgcgaacagagcttacaaaacaacaaagggattcccaggaacaagtcgagttggtcaccaatcaccactgtccgttgttaaggggcaacaaggaacatacaacatgggggagaaaagttggccttcaaactatcttccggtgtccactgaaggcccaaatcttcaaatttttgtcccagcttcctgtacacaatgcactcccatcagatgacatcccgaggcaacttatacggccatcatgggagttttgcaggtttcccaaattaagtaccacctcggcgagaaggtgtgtcccacacataacagtcaccattggagtaaccagcataaagtagccttcctgatattgaaaatgcaatagatgtaacagtaggtagt

SEQ ID NO: 284569 - DNA, 404 bp, Zea mays
attaaacaccaaaattcattgatcaaaggttatttttccttacaaaaaccagacccaaacacccttgtccttcaaaggctgctcaagtcttcaggatcaaaatggtaagtacaatccattttgctataagtacaattcaaaggctgctgtaaatttgaaacttcaagctaattcgcagctatcttgaacgaagacattttgctataagtacaatccaaatggagctcggacaaaataacaacgtattgaacaaatcgtacatcaatcgcatcatcaccctttccgaaagttgcacaaattctaaagagttgagctgcgcaagggttgattgtagaattgatatttgaagcatgatggttacaggttacaccaccactacagtgttttagcacataccaaataca

SEQ ID NO: 284570 - DNA, 411 bp, Zea mays
gggcaaaactgcaaaatctataccactcactgtcttttcagttttccatacccacaaaaaaacaggggggggaagccccccaaatcaaaattaaaaaagaaataatttttcgagggcaacacagtaaaaacctcgacctactttattctgttttactagaatacaaatcgttcaccatgtatgtatattgaatagctgctcacttttcttcgcctctagttgagctgaaacatcactccgttacacccagagaaaaggttgtactccttgacattggtctcctccctggagcacagctgggctcgagttatctgagctggtggcagtgccattgacggcatcgctccactttgctcttctttggatgttgccagggtgggaggggcaataggcaggttgaactggaacaag

SEQ ID NO: 284571 - DNA, 510 bp, Zea mays
aaacacttctcgtataaataagtaacattaatcacaaacacacgaaaatgaagcttatgaactgcccagctggccagctctcatttctcacgctagcactaaaagcggcagccatgcggtgggcagggaaataaataaaacaatctatagacggagatccagccagtatccgtccctcttggctcatcgctcatccaactgggccggggtgggctgtgagcaatatttacatacagaagcacatgatcctacgcgagagaatggcagggtgggctagacgaagcaaattactcgcaggcggtggaggagaactgagagaaggatcgtcatctcggggagaagatggtggccagcccctggtccaccgtcagctggatgggcgggccgtacgccatcaggtgccccggctcgtcgtcgccggcgcgggagtcggacccgtcgcccctcgcgatcacctccccgtccgagtcgatgataccgccctcggtgctgctgcccacgcgcaggccc

SEQ ID NO: 284572 - DNA, 374 bp, Zea mays
caggttaattaaacaccaattttgcaggaaaacagtccactgtttgtcaagggacaatcaacaacacacacaaggtgaaaaaaagaataggagctgcccacagcccacttgtcattttctcacgctaacactaaaagcggcggccatgtgggctgtggccgtgaaaagaaaacaatctcttgacggagataaaggatctgtccctcttgtgttttggctcatcgctcatccactggagtggggtgtgaccgtgtgactaatatttacatatagagtcacatggttctactcgagaaaatggcagggctaacgaagcaaagtcctcgcaggcggtggagaacagatagaagaatcgtcatctcgtggagaagatg

SEQ ID NO: 284573 - DNA, 333 bp, Zea mays
tttctttttttttttttttggattggaggaactgagggggggcccatttaataatgctcccgggcacgctctgataagtttacaaacagctacattcacctgcagaacagcagaagtggagcttcccgcagctggtgtgccggaagcagaggtcgagcgggtgacacgcacgcagcaccagcatgtactggacgaccgaagctccggctcacaggatcacgcatttctggccacgcttgccggcgtcggacggcgccgccgccggcttcttcttgccgcgcgtcgccttctcctccgtcctcttgctccttcgcttggccgtcatgaccttga

SEQ ID NO: 284574 - DNA, 532 bp, Zea mays
agaagaagaatgccattgccaggtggagtcaactcgtcaaggaaaagaatgaacatgattcttgttcgcgtgtagactgtagtgtatgtaaaacgcactatccaagctggtgtttctgctgcactgctacggttgaaaccaaaaaaaatacaaaccaactcgattgcaaatttgaagcctccttcattccctctctatctctcatttttctttttttctagcgatagtactgtacttggcaggagcagcagcagctagctagcctccacagtctcgggatggccggtcggcaatggcgaattcgaggaagacgaacagtagcaggaatcacggtccctcactgctgcagcttgtcgagcgcctgcagcagcacgggccggaacatagtgaggttgacggtgacgtcctgcttcatgacggtctgggcgagcgcctgccacccctgcttgtggagcgccatggggtcgctgaacaccacgtgctcccgcgggtacttgtccttgaggctcgtctcctccgccccgacgtagta

SEQ ID NO: 284575 - DNA, 587 bp, Zea mays
tccttttttttttttttttttttttttttttttgatacgtgggacccaacacaaaacattaggcagaccagaatcagatcaaataaatcatcacaatctacaattctacgtggtgaaacatcctaacttggcaggatcaccaaaagctaagcccccaatgaggttggcactccaatcaaaatgagcacatgaaaattagataagaaaaatgactacaggtgaaaattaggtgggtatcactaactaaagaaaggctcattacactagtgcagagtcataagtttgatgtatccgcagcacctcctctcttcatccaaggaaggctcccggcatccgaacattcatccgaaccagcaggtagcttgcccttaatatgagaccattgccaaattttcgacacagagaaactctcccctttgttgcgtgtacagatcttcttcccctccataatatcagcattgatcgaacttaaaccaggaggtcttcccatcattgcaccaccagtgccatttctaatacggccaggctggagagctactcggagctcagaagtgccaagaacatactgataggtgcccatggagaag

SEQ ID NO: 284576 - DNA, 543 bp, Zea mays
aaccaagtaaccaacatagagaaaggagcaattaaagtttccggtactaatactgttctgaatacaaacatcgtatatcagcaaacactggtcctggacaaatcaactcgcactatctagaagtttgagacgattaaatttcctaagaatctactcaatattgcatctgtctgttcaatactccgcagatatatcagacccactaccacttccaatacaactgttgtttcgtctcttccttttgtgtcaatgagaactgaacaaatgtgacatagcttcagtcccagaaccttagcgatgcacaaaccacacttgaccacaacacaactgctagcatgggaagttcgactgctcttgaacttcaccaacaggaagttctactgcaaagttagcttgagcatcagcagccgaattatattccctcaaaacatgtctgatttgaaataaatgaaatgttccctttagctccttcactttcttgcagaagctagccatattatcattcttaacacgccagatatcttggacctggttacaaacaag

SEQ ID NO: 284577 - DNA, 428 bp, Zea mays
atcacctgaatgcccgagccaacaatagacagaatttggaaataagtttaccacctcaatcccttagacatcccttagaccacagttaaacttaatacacactataatgagttaaactgagttcgacatgacaaattacaactttaagatcaatgccagaagagatatatgtctgcaattgctgcctaaaatatgcctacggttaactacactaaaaaataacacaatcttatttgggcttcatcatggaagcagtatcggcaagctacaatgcttctgccttgatcatctcagaacctagcacctcatttgcaggcggggaatactggaaccagtcttttgcacaaacaagggcctgcacagtcttcggacgaagagagcttctggagacattgagcatgcggttcccatttccagcacaaaatatg

SEQ ID NO: 284578 - DNA, 431 bp, Zea mays
acaaacgggggttcgccctccatttgacatataccctaaacatcacatacaattgagcaactagcaatggtaactagtatgagcccgaccttatttacaaaggcgcctaaaatgtgcctgtatttgggctctagagtctagtaaacctgaaaaaccaatctaagcacacacttacatcttctaccacacaaaacaaaagaaaatcatctgaattgccatttgagcaagtcactcagcagctaaatctctgccttttcatcttcaggtcgggaacgtgggcttactaaccagggcttcagacttacacttcatctgagtaggcaccatgttcaccgcctgcgtccttgctcacgctggaatgcgttttcccttgcagctcggcgcacacgagcttgctcaagaggagcccagcgaggagagccgccgccatc

SEQ ID NO: 284579 - DNA, 427 bp, Zea mays
ttcctttttttttttttttttttttttttttggggttttgctgcaactgcaaactgcaaatatgcaattgaatgatcgaacatggaaaaggacacaataactgcgcaggccgcaggggaaactcagggaatttttcacaaatccaaggaaagaatcaagagaacagaacaatgaactcgaagctaggatgtgcaatggctaagaactcaggggctctgctcaatgcgtggccggcgagtccgtgccaccaccgtccgctgctgcgactggcagacctgcgccgggaacttgcacccgaaccgcttcgtcactatcgggccccaccttccatccgccgggggcacagacggcgctcccctatccaccggtgccccgccttgccggtccatcttggcgatggctttcctcatgctcgggcactcgcgct

SEQ ID NO: 284580 - DNA, 610 bp, Zea mays
tcaaagatacggcgtatggtagatcgtacgctttcatgaatgtccagccatttaacttggtgctccttctcgaaccccttgacgaactctggtgtgttcatatgattcatccttccgatataattcatcacagtgaaatgggtctcgtactcaaaaaagctagtcttctccaaagtgtactgattgtttgctaacctaacccagaaaacatcagacagaaatatttccaaagggcggatactacggactaaaacaatgtaccgaagatcaaacttccttccttggaaaagtgcagggcgttcaatatatttttggcatatcttggggcctgtctccataagtctgatgatagcagacaaatcaccagtaactgtggtatcgattgttctcgccatgttccaaggcttcatgatccataaattgtccatgccatctcgtttcctcacacaataatcaccaatgagtggagacaaatgggtttccaggttatatgtaggttgaagccattcaggtgagccccaagccttgtggatggtctccgcaaggtggtgcttcatgaccaggcaagcttcaaaaggaaattggtttgtgtattgttggtctgtgagcc

SEQ ID NO: 284581 - DNA, 299 bp, Zea mays
catctatccagcggaacgagtttgctggggagatggcaatttgtttgtatacacaggactccatcttatctataaccactatcatcactttacacttcattacaggctgcatcttcttcctctttggagcaaaactcgctgtatctacttacaggaaaaattacgccccatgtgccctttaatagctgggcatggtcagttcagatttgaacttaccaacgccaaatatcagcacagtttgctatggctcctaaagctacaggtatgcacacttcacggcccacaaatctggcgatctg

SEQ ID NO: 284582 - DNA, 413 bp, Zea mays
ggagccaaatcacattccattccttattgaacatgaccattcgttgttttgcaacctgggaaaacaaaacatctttactctgttgaactagagcataccgtctactgaacaacaaacgacactgcatcatggcaggcagcaggagaagcaggacgaggcccgaacctgcacctcctctccttgcttgggttgaaaatgagatacggtgcttcccagacgccgaggaagaagcaagaaggaggacatgtacaactgggacctttttttttgcagggacatctgtagtgtagagatcttgttatttgaacaaaccctcaatgtgtcttcgtcaggatagcctcacgcattaacctttctggagctgtcatgccccccgtgaaaagcttaaactgaaccatcactagcctgattag

SEQ ID NO: 284583 - DNA, 423 bp, Zea mays
gagacgatcaataacacgtcgtcactcgtcagagggagaaacaaagaatactcccaggttaatgtagtatcagctgaagcactggcatggcttaaaaacaccctaccatttgcttgcatcatacacatttcacaacacgattagccagatcattttagccgacttagatttattaccactgggcaaaactgaactagagaaaagagggaggaggggggtcatataactattgattgaacaaggaaactgaggaacaattctttatatcactgctatggggaactattacaattacactcagctcagaagcgaacatcatggacttaaccacacattattgtcaatgcaatcattaatactctcaatgcccattggcagggcgatacgatgggtacctgcttgatccattcgcgagatcccaca

SEQ ID NO: 284584 - DNA, 307 bp, Zea mays
agcacaagttgagcagccttttatgcttggtatttcctttttacataagatttgaacaacatgtcgtcacataaaacaagagaactgacatccttatcactcattgatgctcgttcatctacttctgcaacatttatatgacattcattcttagctacagagaaaattcggtgctttcgaacaagcatctgcccgtagggagtgaaaaaaaaatcaatctgtctgccaagctgcgcaatcgacatttgaggcaaggctacagccagtaaataaagaacctaagggcttgttcggttatatcccaatc

SEQ ID NO: 284585 - DNA, 441 bp, Zea mays
gacagggaaaaaaaactatctttaatcttgcaaattcttggttcataggaacttgctttataactttttttttgctagcaagttaccgggggccaggacgatatatttagatcccgacaccttaatgaaccaggatttataatggccatttaacagccgtcagcaccccatgatgaaccaggatttacaggggcctctcgttgggaaccatttaagccagggaccgatttttccgagttgtatttacatacccaaaacgcttattctgtttggtccttttttttctctgccccgagtggtgatcaccagaccccagcctgctttgctttgattaccactggttctttcctttcttctttttcctgctgctgttgttgctgctgctaccgctactcttggcattgcttccgttaccaggagaagtcgggtcgccttgtgccc

SEQ ID NO: 284586 - DNA, 600 bp, Zea mays
ggaacaaaacttggttctctccccatttcaaattttaggcatagtttaacagccaatctccaacaataataggctgataactggaataacctaaagtaattttaaattatcgcaacaatggttctgaattataatactagcattttgccctccaaagcgaagagtcagaaccaactccaggcaagaaaagacagcaaaagtaatgggtatgaagaattgaagatacagctgcagcgaggcagacggtaaccaccaatcttcagcacacagactggctggtaagtttccttgccacaaaattgttagatatagagaaacggcttgcaacaatgcagtaccattactccacccctatctgcctatcacaaggggccggactgtctctccattagccaacatatagggctattcaaccaccatctcttcttgatttttgaacatcaggaactagttttgggatgacaaccagcagaaaaccttaagattcataggtgctcaatgtccccacatcagagtaggcgtaattgttgaaaggataaagttatatcgtacgaataaggaactcaaaagctgaactagcgatgtaggtgcctgaagtgg

SEQ ID NO: 284587 - DNA, 441 bp, Zea mays
aatgctaacaaagaaaccggttccctattattataccatgggtaacactagactttcaccaattcccttaatcagcataaactatgcaaaacaggaggagctgcaaacaaaacaggcaggaaggagcaagggcaaccactacaggttaatgcagccaccgtcgatcacaagtcatatacaaccaccgaccaatatcatcatgtacaagacacaagaaaaaacaagctgccatcaagccaagcccacctaatcttcttcatctctttcgctcgcaagtcacaccacatcccataatagacatatctctatctatttcaacttcagctgccttgttcttctcaggcacgtaatctttcttttcattcaagcttcacaaatcatagacgagactgaacctcctacattccaactggctcgacccaaaactaaggttcattctgg

SEQ ID NO: 284588 - DNA, 492 bp, Zea mays
gcaaacgtaaagcagatattttaggaaagaatatatatatttggcatgccgcgacgacaaggcagtgcagtgcagcgcagcgcaggccgtggcgccagatgatgacagcttacaagatcacagacacacaccccaacagttgatttatacatgcaaataagcaagagaacatgggaaagcagaatggttggtattcatgcacgcttcactggcgacaaaacacatcaacaaaaaacggaacttccacatcgtcgacgactgtccatggacgcttctctctggcaaggaatctgagccatagggatccaatgtaaccaaatagagaagcaaatttgtcggcaagaataaacatcatgcagtaagggggccctctgcattgtacgcccattgagctgctctgggtggatcttcttccccaacatcttcctcatgacccgacttaattttcttgtcgctttcagtggttttggtgttggcttccttggtttctag

SEQ ID NO: 284589 - DNA, 544 bp, Zea mays
aactaataaccgctagaggttcctgtttcacaataatatatcatatcgcaaccatggcatacaccaagctaccaaagttagtgctcatcctgcgacgcgtgcacttcagtcgcctgtacactgcagcacgtatgtgcgcagccatgacgatacgcatagcttccaaaccatacatctctcacgggacggggggaaatgagctgaaaggtacatgtcaattatgttgaaatggattaaggccttccagagtgtctggagatctagagcaggcactagtacagacaaagcaggtgcaaattctagtttcattcaagaaaactctccatcttgacctcgttggctgcattgttaatatggcgcagtcaccagctgatacatccctgatcttttttgaataagggaaccggcaatgttcatcttttctacaagagtgtccaagtctggaacttgcaagctgatcttatcagctatggtgtaaagttcagttctcgagaagcagtccttttgctgcaactcagattccttgtttaatgcattcagaaac

SEQ ID NO: 284590 - DNA, 514 bp, Zea mays
cagttgagattttagactacatcggtcattgataaggatgttgcgatacatcagtaatctgcattcgcttccaatcacattccttctgtggatctcatttgcacttgtcaaacacacaaatgctacataaaatttaggaagcgctgtctttctcttggcacaaagtactagagactagcttgacaagatcattgacacgcgaaacacgcgattgcagctcttccttctctctaatgagctgagcagactcctctttgtagcggcccaacagagtgcatttatggaccaaggcccctagggttgactcattctgcttactcagctcctcgatcatctgcttctgccctgcgctcgcaaattgaaaatgcacatatcaagtgtacaacttcaatgacaagagacgatataactacctttgttctcatctttgagcttcatattttcttctattattttgaatgtctcctgctcggctttcttcatcctttctgttaagagccttctgccgtctttg

SEQ ID NO: 284591 - DNA, 426 bp, Zea mays
gggggcctaatggatgatcaattacttgattattcaaaatggagaatagctcttctcgaataccatgtcagggtgatggacttactacaagacatgagctaaatctacctacgatgctacctcggagtctatggtcttgagcactcctagcaataaatacaaatgacagtttacgataagtaaccaacaaaatattagtcactctcacatagaatgctgagttgctgaccaacaactttcttttggttgagggcttcatccacatgtaaatgcaacagcagatcagtgaaaagtcagaacatcaccaaatttgttgaagcaccaaccacaaatggctccatcagcaaccgggtcaagaagtagaatgtcactcccagcataatagagattgggagtgcaggaagtgcgtgccggcatatggaaagc

SEQ ID NO: 284592 - DNA, 540 bp, Zea mays
tttttcttttttttttttgacgtacaatctatgaaattatttatttaaaaaatcaaatcagctcagtacaacaataccttactgacgtaaaatcctatatagcattcttcatcaaaaaatgaaatgagttcagtataacaaagcgattctagatcctgaactacgccttcgaggcgagtaacttacacaacgatgaggctgctatacagcaatcagaaactacagataaaatcttttcggccctacagcatctagtgttcctcaacacctacatagcctcgtctttcggtcgtcaaataaaattttggaaaaaattgagcaaccaaaatttatcctcaaactgccttcttgtagtacatgcgtaatgcgtcgtcccgacctgttcctatggattctgtctggttctcacaactcgtcatgaggttcaggttctgaatcactagtgttggctgatgcagactgatccttttcttgagccttagattcctgagacgtttcggtgtattcaccctcgttgggtgcagattccgtataggtggt

SEQ ID NO: 284593 - DNA, 463 bp, Zea mays
ggctaaaatagcatatggggggcaaaatcaagtcattaatgattcgggcaatgacaacaacatttcatatctacaaaatcaaggtagaagtaatcttaaatctttcagatatgttgccatgaatacccaaaacttgcatggggaactatgctactttagagagagagagttttatattagtcatacaacactgatttgtaaggtcaagccgccgttgcaccggacacacaagtacccattgctctcagattcagctggtatgtgaggccaatagatgtgtggtgcagaagatgctttccaaccatttgcatctacggttctccacaactcatttgcaacaacatccttgagtagtagcatgcagtctgcaggtaagcccatcagtaatactctgtaaccatattaggtgcttttgcgttggataccgtttacaatcttgcttacgatcttttgaacaaggagt

SEQ ID NO: 284594 - DNA, 481 bp, Zea mays
gtctgtatgcttgccaattggcaagggtatatggaaacaacaccgcgggacgaaaaaagaagatcgcaaagaaaaaaaaaactgagtactcaaaaagataaaaaaaattctatcaaaactcaaaccaaaatctacctaattaaattacaccgcctctccacttattccccatttacaaccccttcccagttcccaccatgcatgaccagctaggcaggcagctacccgcctaccccgccaatatggaccagatatcacacacgagtacacgaccttttttttctctcctcccttgctgcatgcactcgccagaattgtccaaataaattcctttcctccgatatttctactcactacagtgtcgatcgccatcgtttgtgatggacgatgatcgatcaatggaagggtgggtggtcggcccacggccagaacggcggcgtctcgtcgacgccacacaggaggttgccgaagctgcggcggt

SEQ ID NO: 284595 - DNA, 704 bp, Zea mays
aaacgccagctgctttggaatttcgaaagttaaactggacaacaagatacaagacaacttcgtttcctgccacttgtaagtaacagcagagtctcaaaaacagtcacagtttcttgatgagcatagcatgcctatctgaactcagttctcggtcacggtaccctcttcaggagattcacaaatgccggacccaaacatagaacaacccagtgcttctcttcccctcgcacgcatcagtagcccttgagctggccgcccagtccagctaacgcgatccatttctccaacgccgtcgcggacgacacgaacgccgacttggaggattcagggtcgagcttgctcactgatgtaaacagtgtggccagcgagctgttgaagctgtcgaccacgttcctctgctccgggcttgagctgagcttggagaaagctgcattgatgttctgcacccactgggcgtctgagcttggtcccagcacgctgctcgcggctgggaggtcgtcgttgtcaatggcctgcccgactttgctgagcctgtagatgaggtcctgcaaatacccggtctcggcgccggaggagctgatgatgccctgcttctgcagccgcttcttcctgtcctccttcacgcgctccagcagttcgatgtcgtcgtcttcctcgaggacaagcgcccgcgcggggcggccagcgcgggcgccacgcgtccg

SEQ ID NO: 284596 - DNA, 389 bp, Zea mays
ggtggagtgacaagaaaatatctcctataggaacccgtcataccaaggttcactgcatacataattcatcacaacttgctgtacataattgtttgaatcaaccatctagaccgtctaccatcaaataaaaaaaaactccctaatcattgtgcagttgaaagcaatagttgctagtattggagtaacggaaaggatggcaatgttgctgtgaatctgataattgctgactacgtatatatgcacattcatacatcaaaacctggcatcgcaaactgtgacgcaaatgcctcaacctgatttcggagttccataacatccttattgttctgtaggcctcttagagactccttttgcactttgccatgttctttcagaacattgttagcaat

SEQ ID NO: 284597 - DNA, 440 bp, Zea mays
aaaacaatggtcagggcaacactgacagcatgctgagatatcacggcagtgcaaaagcatagcttcccttaacttgtacggacgacgaactctttgaacatctctttgtatgatgtgagaagggtgagacaatatggaagtcattttttttctcggcccatgcaaaagcacaagcggaaaccaaatctaaggggagtgagaaaatgccccagtgatttttcctgtcagtctattttgggtctagcaatgaagcattgcgtatgctactagctctttgaaccgtgcactttgttcttcactgcaagggcagcagctctgtaccatgcagctgcagccattgcaccaggatcagggattgaggccgggagatctggagcgatgtatgatgaccgtccagccttcgcttgcatttgtttgggggattcaacgccagctgatgc

SEQ ID NO: 284598 - DNA, 605 bp, Zea mays
cacccaatgaatgtatatttaatctaaaacgaattatattttagtacggagaagactacgatatccaaatgattagtacagaccaaggtaacattgcaggccacctaacatgataagactcgctacacaaaggcttagacagctgaacaggaactaacagacacaatacagattatatttcacctgaccgaaaaaaaacggccagggagagtgaccaaggccttgctgagctcagtttgcaccaatataaggttcaaaataagcggggctgcagacatacatactgatcggtgccacgggtcaattttactaccattcccttgtcataactaccacaattagctacacaagctaatcactacgtcaaagctttgcggtagccggttagctccgaggacctgcatcatcatttctgatttttcttcttcctcctgtagtcctgcagcacttcagaccgctggtgcggtgaggctgatagcaaccacttgctaaattcaaggtcatccatacccatgaaggatgcgatgcagctaaactctttctttttctgctccagtgaataagatcttgccacttcccttttctcctccgatgaataagatttt

SEQ ID NO: 284599 - DNA, 193 bp, Zea mays
ttttctttttttttttttttttttaacttgaatgcaggaatatattcactgcagatctgagctttgttctggagaacatgttttacattacacgacgagtgaatgcattattacctcgttgtttgggcaagactgttcccgaagttatcctaaagggctgcataaattgattctgagattgttcccaaatcac

SEQ ID NO: 284600 - DNA, 356 bp, Zea mays
  unsure (1)..(356): unsure at all n locations
ttttncctttttttttagcagctacacatggaggttgctattttgttcttaagagggtggataataggcaaatgacaacgacgacactgccgagtacacatgccgggcgcgtcgagtttatttcagcctgttctacaagctgacttctgcacatcatcatatataggcttgcgcatgtgcaggaaagcaagacgaccgcactgtaggccaggcaggtaaagcacggtggcgacagacacgggacgggagctcacatcaccgggtagtttgcccactcggctataccgcaggtgcccctgacgtccttgacgcgcctctcgaggcgaaaccgcgaaagtatcccttctcgccccact

SEQ ID NO: 284601 - DNA, 468 bp, Zea mays
gggacccaaacatcgtcaattcgctcataacagacaaaaagtatgttcacagatttctttacaatgcaggtgtttgtcattgtaacaaaaaattctaagacatcttgttgctctatcatatatgaagaattaacaagtatatatagacgcacgattcagagcctcaaagcagcaatagcttcaggcctgaagtcagtcctaagtcctaacaccctccgcacctctgcaggtgtcaacagccacgtcagatggccagcattgtcaccccagaaatccagtatctccgatacccgctcgaagttcaaaatggtcgacatctgcgaaagcctagagaacttgtctctgactggtctctgggacatctctgagaaatggttgatcagagagcggacctccttatcgagctggagcccgccgagctggctgaacctcttctgcatcataatcacctcgagcctcttgacaatg

SEQ ID NO: 284602 - DNA, 830 bp, Zea mays
cacaaggaacatatacccatttcgtggaaaccgagagaactgcaaggcgccgaacaagaaaaggggttcttgccacgttccaacttccaagccaaaagttggtgctgtgtgcactaacatttcacaagataatctagagttctgtagcgtgggcgcgcatacagactgctaccagtgttctggatggagcagaaggtcagcagcagcactgcaacaacattgcatctagggaataatactgacagtacgcaggctacaactaaagcgtgtctcgctgcatcccagcaagatgcccctccaagcaaaatgccaacgagagcacacagaaatactacatagaatcagttcggttcatttgcaaggccgttcctgcatattcgagcagcatccctcctcaatccctcatctctgtggcaaagattcggtactttctgctgtcccagggattgtttttgtccatatagaatgatgtcaagcagcaccatatccaaggtggattcctagtcaagggggcaccttcctcgctgtcctctggttctgggataccaagtagcttgttcatcttctttgttatcgcttcttctgtcagaaaaccaccgaagaattggaccagataattcttatggacgtacgcatgaattctcgctgtaggatcctcaagagtcaaccgcagatgaatgttaccagttgacagcaaacggagaccactagcttgacatggatacgctcccacaacacgggccaaggttttgagtttgtgtgtcacctctttatgagttaaagactgcattaacgttgagtgccattcttcctcatattctacatctgat

SEQ ID NO: 284603 - DNA, 427 bp, Zea mays
gggggcaaaaaatatatatagcaacggtgcatccgcattcattcagttaaaacctcagagcaaacatccgccaagcaaactccgatacctacaccaccctttttcgcctatatccttttactttgtgcacatgtcaatctacagcacacacatcaatgcaatgcaatgcaaatgcacggcccgaaccagtcacccccaacaaaccaggtttcatccaggggccgtgccttccagccggcagaaaaccgcgcctccaccactccgctcacttcacgttaggcttcggcgagtagcggaacggagacgcgcggggcccgtcagagaggctcctcacgggaggcggctgcccatgccgcccaaacgggctctgcgtcttgaagccgccgttcatgctgctcctcccgttcatgctgctcgagtgcgccat

SEQ ID NO: 284604 - DNA, 405 bp, Zea mays
gtagaagtcgtttttctcttcaaaaaatcatagatgtatctttgatgataatgaagactgtccataacgatcttcgaccaaaaatacctaacgtatgtcctgtctagtgttggagccatgctgccggtcaccggtggactcaacctaaaattttaggaagggtgaacttaaggaacaaactcacaaacatcattcaaatattgcaatcgcacaaactatatcaattgacaaagcaataaactaaattatccgtcttctgggctctggcgcggagatacgcgtcagttacggttatccatctgaaatgttctcggattcctgccagccttcgtcccaggaccccaatacttctcaggatttggcatgaatcttgcgcgcttccgggtgaccgaggcccccagtact

SEQ ID NO: 284605 - DNA, 288 bp, Zea mays
cggcctccctttttttttttttttttttttttactgaacataaaacttccatgtacgcacattttgatacacggcacatgttccagttttctgaacctgctgattatgcggtatatatactgactggagacttcctatggtgcatactggtaacttccatcaggaaaataaaagttacaagaccttccagaaacaaggctattcattattcaacaagatatgagctaatggaagcaaggggattgcagagcatttgcctttttagatgctactgaagcatctgcgctt

SEQ ID NO: 284606 - DNA, 505 bp, Zea mays
gggggccagatgcataaagccaggggcattgtataaatccgagataactcatccctcaacattgtaaagggggggaatgtcaaattccaagctaaatagcctactctattaaatagattctaattcctccaaaataaacggatccaaacgacacctaaacgaaaatatgaaatgcagaaccgtgagtccgtgacccctgcaccggccagtcaatggactagccgactagctaccgctggctctgcggctgccctcagctctgattggcgacgatgctggactgggccatggaggcatggacaggcttcagttcaacgagaaagagatgatggcagacttgggttgccttatacttcaaggccttactacagcttgcattggttcctgcgcgcatccactcaaaggtgtggggcatccttcactccgtttcgtagtttgaaaccgcatctttgcaatttcttcttaaaccttgaatgaagtattctcaaaacccacccaccgtccg

SEQ ID NO: 284607 - DNA, 272 bp, Zea mays
tttttaataattttttggcaatgcaaccagtacaccgtggttcgttcaactatcccaggaacacaagtaggagcatttacaaggaggaagatttccatggagataacaggaatagcaagcacacgcgagtggcaatggcgcccagtgtcgcctcgtacgttgttgctactagaggcatagatgagagacgaaacagcgatcatcgtcatcactaggcgcggtcgcggccgacgagggagaggaggaaggtgcggtagttgccggacgtctcg

SEQ ID NO: 284608 - DNA, 480 bp, Zea mays
aaggcaaaacgaataaatcaattactacagcagtccccttagtagcgaatagaatacacaagccactgaatatatggctacctccagaaagtattcgagccctatatatgatacataagaaaaattgcaatggtctccttactgcaaaaaaaaaaaatcacagctagattaagcctttacatctttcattgactttcagatttaaaggcagaacgggaggcgagggcgactctgactgcggatgtagcgcaccaggtcatcgctatagttcttgtggtaaacaatggtgtcgctcagttgcttgatggcttctctcttctcctgcactctagctgctagctcgtcttctttctcgtccaccgtcttctggagctggagcatctttgtctgtgcctcagcagcactcttcaccatttctgacaccaccatttctttctctttgaacctaatagccagctcgttgttcgcattggcaagttc

SEQ ID NO: 284609 - DNA, 332 bp, Zea mays
atgggcaaccaaattacatgagcgtcgattataggcaactacacctgaagtggaattacatattaacagttccttcagttcccagatttaactgtttgccgagtagcggcgaaagtctgaggacaagctccaactcatgaggatagctacaagatagtcaggccagtcatggttaggacttattaggaccataaacatacactgctacctcagctccaaaatgcctactactgcataaactggggtgccaggactgggatcaacaactgtaccctagcctgtccattaggattgtcacaacaatagtcatcagccctatggatgattacaag

SEQ ID NO: 284610 - DNA, 370 bp, Zea mays
aactgaacggggagcgacccggtatacattggatgtattttttcaccagtacatgtttttcagggttacatacaacaactatacacacgtgtgatgtaaaggttacagattccacaatttacacggtttggacagagaaacccacccccaaaaaaatgttctcaaaagagttcagcgcaccaaaaagggtaataccctgtttttcctgccgactttgagacgactaccagctccctttgaactttcctccgttcataaaaaactgggcatgcaagggaaatacacttgactccactttcaacaatccagtctgcaccgccacaatggccacatatagcagcaagatgttggatttctcgctccaactttg

SEQ ID NO: 284611 - DNA, 327 bp, Zea mays
aaagggatcaacgatcaatataactgtattgtttcgtttgtacagacacacatggagagtgaactgaaacaacctcagcatgcatctagctccttttgtgccgctaataacagatcgaaaaaaggacccctggttgtcctattacagaaccaaagccgcacacatccgttgcatgcgcttcgatgcgccagccaagctcatccttcggcttggggatccctccgatccacggcggcgcctaccagaacagcaaaaataattaaacagaaggaagaaaagaaaagaaagaaacaattaataaggccaccatgacgttcgatcgacatg

SEQ ID NO: 284612 - DNA, 356 bp, Zea mays
gatccatgcacaaaacttgtgcattataatagtagagatcgtctatggattagttaaataccgctacatttaagagataagtcgttcctttttttacatgcaccaaataagttaattgattcctgctggaacagtaatgataatttttcagaggcacggcagagcagtgtcatgagtcccaccccatcagcatgttggtgacttcatccacgatcttgctccgcagcgcagacgagagctcatgctcctcaccaaagtgcaatctgtagacttcccactccctatcttccacaacatgcctcccaatctcagccaagaagattcgtttctgaagattcttgagagcaagggtgatg

SEQ ID NO: 284613 - DNA, 312 bp, Zea mays
gtaaacggttaagcttgtgctagttacttatccatgtgataatcactgacatatagtaattaattcaagtacaaaaacttggctgtaccttgtaaaccatctcttttgggcatcaaatcacacatggtgacattctcttgtagcttattgcgtgctgaataaacttccagtactggaacaactcttgaggaggaaccaatcttacaaggttcctaatttcatatgttgctctcaaggttccattagtcttcggcttctcaattttctcagagaatgcagatactcttcaactagcttctcgagccggttccg

SEQ ID NO: 284614 - DNA, 428 bp, Zea mays
tgttgtaggcgcctccggcttccccgacccacgccacagccgacgtccccgtggacttgagcagccgctggaggtcgctgaacgtgctgaccatcccgtcgagggttgacgggtcgaggatcttgtcgatcaggtgcgtgtcccttcctggtcctagattgtagacgtggtgcgtgaccacgctcagtagatccggcccggtcttgacgacaagctcagtaaaccaggcttggtcgaagaatcctccgggagcaaccaccagcggcttcgatggctcgctccggtacacgtcgtcgactagcgctttcagggcgatcacgtctgcggcgtactggtccgcgccaacccgagctcccactccagtgccgctcagttcgttcccaggttgagcaggccggcgcggccccaggcgcaggtgccgtagtcgc

SEQ ID NO: 284615 - DNA, 513 bp, Zea mays
aagcgccgtacaacagaattggtcatttatgcagcattacatgattgttcagtgcagatcacagtactacacgcacgctaaagacttgcagggaagatacaggttcgtagaaaggtggtcagattcggaggctcttttcgctttacaacaggatgaaggagagagagagatggtctttcttgtgacgcacttgatgacacgaaatgacagcacatatacgggagtgacttaaaacaaatgtgatcatgtagcagtagtaactagctaggtaaaatgcatggttgtcaggccaggagccagaagttcttctgccaccgggtgctgatgaggtacccaccgacgcccttgctctgcttcctcaccgccagcgtcaggcactccgcctggttgatgcactgctccacaaactcctcgccgctgctccgcaggaagcagcttaaccagcagggagatggcctgcactggctgagcaccagcacggaggcctccagcttcttcacctggctgagcacg

SEQ ID NO: 284616 - DNA, 357 bp, Zea mays
attaaaaaaacgtcttctaatttggaatggggtacagaatttcaataatggacctgggctcaaaaacattatagcccaaatgctacgatcaattgagtcgatgggtctgaacagccattttattcccttaaacctagctgataagagcttttcattggaacagcacgccatcaaagaactcttaactgaagatcagggtatccagttctgctcttgtatttctcgaacagatcttgcatcgcaacaacgaactgtccgtggacttggtttatctcatcaatggtaggttgaggattctttacaacctcaattggccttccaacaatcacatgcattggtgttgcaaaagggatggga

SEQ ID NO: 284617 - DNA, 438 bp, Zea mays
atagaaaatagttaatgcccatttcctttcagaattaacgttacaaactttaataacactgacatgtcttgcaagacataagcatacaacaactttataatgttttagaaagcaaataagacaatgcacttataaatttcttcgcaaaccggatatggaaacagaagcacgacatgttaaacaacagtaaatttagcaaaaactaaatatgaactgctgcaaatgttttttgcgctccttcatcatactccatacttctggatcgacctcgtcttcacgagtacgctccagcatctcgagttgttgttcggccatacttagttcttttaatctcaattcccttttacgaatgcttaatttttttgcttccaagtccaacctcttcttctctagctccatgtcctgttcattgtacttatatttcttctcacccttttc

SEQ ID NO: 284618 - DNA, 481 bp, Zea mays
gtgcaaacagaaaatcagtcgaatgaaaaaacaacagaccacagaatccagggggtccccctacaaacctggcacacctgtttacagtacagcagcagaacacggaaactcttcagcaggtaaaattcaagatcagcccgaaaatttctacaagaaactggagggcagcatttgggcacttatggcataaataaaataagacccctggctcagattaagttgggatacaagtccacccactggttgctagttgctaccagtctctggggagttacagaagcaaagggtcaagcctaagtcggatcagtttctccgctccatcttgaagggtccaccagaggagaaatcggttccggaacaggggcttgcaggacctgttgttttgactcgaagcaggaccaccagaagagggtggctgatccacggaaaaaagaatcagcagattcggcttaagatagcttccaactaatgaagcaaattc

SEQ ID NO: 284619 - DNA, 389 bp, Zea mays
cgtgctgcgcaacgtcgagggcgccaatgcccatgggcaagcgcatggcggccgagcccacggggctccggaaggccggcgccgagtaggtcggggaggggctgcagcgctgacgcgccgaggggaccgggcccgtagccgttgttggagccgacggcgagctcgaggccggagcagccttgcagggacgacgacatggagctgccagaggagattgggcggccgaggaacttgccggcgagggcgcagacgcggtccagctcgtccttgagccgcgcgttctctatgcggaggtgctgctcctccagcgacacctccccgagcacggccgcgccgccacagttggcgcagatgggggttgcgcatcgcctcccggatcgtcatgttct

SEQ ID NO: 284620 - DNA, 422 bp, Zea mays
ttaacctttggtgttttgtttgcgtctaccaacgctcactcgtcgagcacgtcgggccgtattctcaattctggtccctgctgctgctgacatgcaaacccttccaaatggggtcaatatgccccctctccaagagctagtgctctaacaaaagcataaatagaaaacctgtattttctgctactaaaagacacactgaagaagggcgtaaatactacatcactgcatagaccctgtggggcatcagctagaaccggatgaaaaaaaaaggagttcagggcaaaattttattgaactagctcttgttcagctccagggtgagaaattgaacgtggacaccaaatcagatatggttaccgggtaattcttccgcatacacgccaatatgctccggggtgaaaaagggaccttttaaacaccca

SEQ ID NO: 284621 - DNA, 440 bp, Zea mays
aattaacaacagcgtatgtattactttacatgtgtgttaaacacttcaaatgtactcatcacatgaacttttatccgctgctaatcaacacagcaacatgagaatagaaagggggaggggtaacaccagatgaaatgcccgtaagaatttgcatctgcagactatatatagacagtaattaattcacactgatggactgtttcttgttccgtggtttctttgcattgagtacgtgatggattactggactagcaccagttgcttagcccgccatggacgtcgaagtgcaccgggacgtcatccttgccgccgtagacacactgccccggctgcagggcgccttgctggctctcggcggcctggaaggcactgtcgaagtactccgaccacctgagctcgtccagcgcgccggcgtaacagctgccgacgacgtggccgcc

SEQ ID NO: 284622 - DNA, 505 bp, Zea mays
gtccttgctgtgctccccgtggcacgggcaccgtcccgacgaacccgccaggaggccgctctcccgggccatcgtcagctcgtcctccaggctcgcctgcagcacgtcggcgatggacatgcggccctcgcggtgcgtgtcggacagcgacgacgccgccctcaccgccggcagcgcgcagtcttcctttatctccgcattgccgctgccctcctccgatctctccgggcaatccttccgcgccagtgcatcctggccgtcgtcaccgccgctgccgctgaccgcattctggctctggctctgcggtgcgccacgcactgggtccgaggaggggccgcccaccgtcaggaccagctcggggttgtctctcctccagtcgcggtcctcccgcggggcgcggcgctccggctccggctccggcgacaccgccccgacgccgacggtgacgaaggcgatgttgcagcggcagagcgggcagctggagtgcgacttgagccacgtgtcg

SEQ ID NO: 284623 - DNA, 491 bp, Zea mays
  unsure (1)..(491): unsure at all n locations
tttntttttttttttttttttngagctctaaatcatactggggatcttatttcttatttcaaactagtctataaacagaatctacaattcaaagcaatattttacaagctcacatccagctccgctggagatggccttagagggtacttcactcgttgtatataaatatttatcatcagggacagaaagtaattccatccagatctgcaatttacatacagctacaaagaaccgtaactggctagcaacttcgaaggctatctagattcacacgtacacatgaaccatagtaacaaaactgttacaacacacacgctacggctgcaaaggacgcagcagcatttcaccaatcaagaaaacattggctgtagataggaggaaggaacatagctggggtggaaaaaacaaccgctgctcatctcccgcgttggagctgctacgaatccaaacttaattcagaaccacagataaagaatcaagcgttgatctcc

SEQ ID NO: 284624 - DNA, 362 bp, Zea mays
gaacaaaatattttaatctgactcattactagctcagaggtattcagaaggttctacaccgcagacaaattacaacttaagggctagttcggaaccccaaatttccaagagatttttattttcccaagggaaattagttcattttcccatgggaaaatataaatcttttgggaaattggggttcccaaactagccctaaaatccggtttatacagggggaaaggactgccttcttatccccaggaaattgccccgagtgagtgacgagccaagcactttaatagtgcttttactcacattctagaatgccggacctttgcagtatcctcaggggtacagtatacttctctagccctgcgctc

SEQ ID NO: 284625 - DNA, 439 bp, Zea mays
gttcaatgttttggcaaacaattgcaccatgtgattaaacgattacacgtatacctgtaactataacaaatgattatttgtcagtgtcgtccttgtcttgtttgagggtcaccggcaggtctttgccgcggcgctccttgccgcccggtttagcggacgcgttcccgtaccacaccatcccgaggacggcgagggccatcccgaggacgacctggaggctgaggccttccttgccgaagaagaggaagccgagggagaggacgagcacggtcttcatgtggcccaggacctggaaggacacggcggagaagcggccgatgcagatgaactggctcaggttgaccccgatcgcgatgaagcacgacagcgcgaggaacaacagagcgagagacgagaagctgaagtggtccaccctttgccctgtcagcaggtagtcaac

SEQ ID NO: 284626 - DNA, 414 bp, Zea mays
gggaaatcatggttagactgtttgagacagttttataagaaacaattttgctttttaacaccagcccccaatggatagatgcttgtggttttactccaatttacacccaggtcaggtcaaaagctgcatgattttgataacatgtaatcccctctaaaaatgaaaatgaagtaccgtggagaacttcccacagtttttgccttgaaaaaaaaacttcgacaacaagttccagcgatcagatatgaggccactcgccaccggaagagccagattgtccgaacgggtactgttgttcagccaaggagctcttggatcttgtgctcgttccgtcgtccggtggagcatatctgttaataccagaatcctgtggtccagtgggacccgagagcccataggaatacttgcctattactg

SEQ ID NO: 284627 - DNA, 451 bp, Zea mays
gggacaacttcagtgctttaaaatgaaaccagagacactgtaaaattctgtgcaaccttccaacgtcgccttgacaaaaatcaagcttggcaatttaattaaaaacaatacaatcaccataatgatgaataccagcagtgagtctactttgcatcgtcgtcggtgccgctattctgtgacgaatctgaatcttgaccgaatactgtttcatcatcatcttcatcttcctcctcttcgtcagactggaaagcagcatcctgcatctcccctgatgtcggctcagacatgttactagcagccttgtcgacctgtgctgttattaaccgaagccgcccagaaagcttcagcaaatcttcagtaactgtgtatctttctgcacacatcttctccaggttgttaatcgattcctcggagcagataaaacggccatgaatgactaacaggcagtata

SEQ ID NO: 284628 - DNA, 465 bp, Zea mays
aaccaattaagaatgattgggttgaaccaaaactggcaataatgtacatacctcctcacactgcatatgaatacgtagtggcaaaaaaaataatataggcttacatatacatacataaatatctaacacgggtttgcacagcaataacatctggagcaacaaaaacattgtgtgcatatatatgcaacaacaatatggatggtgacgtgattaaagagcacggtacaccagctagctagctaggggcagcaagcgcaagaagatgaacctgctgaaccctagctagctaggccttgggtgtctcctcctcggccttggccggctccgccacggcaggtgcaggtggagcctcagcttctgccgcggcctccgcagcgggctgctctgtagcagctgctgcatcagcaggaggagcagtctcggcggcgggcggtgcaggggtgtcttctttcttctcctcttctt

SEQ ID NO: 284629 - DNA, 320 bp, Zea mays
ctaaaacaggtgaagcagtggtcttactttataatattgttagagcatgaagtccaaaccactgtaacatgagtacacgaaaagtatcttggtagagacatatggtctcccctctcgttatataaagccctactattaaatcaggtgcgtgattaagcagctttgtttgaatcattaagcaactctaatttggttttttttctgggtaggaaatggcaaggctcatcaatcagggcacaatatacctaaacgtttctagaagcaccagaacagtccatccgaagattagggccgtgcttgaagctcgaggatgatgtgga

SEQ ID NO: 284630 - DNA, 446 bp, Zea mays
gagaaacttcctttttcttttggaatggtatcaatctccactgatgcaataagatacaataacatagactgccatgggcagtacaacaactatcaaggacaacaacataaaggagctctagagttctctgacaaggggggaaaacgatctctaggattcatgtttacagtttcacatccttcagaagccttgcagccatagccccacaccttctgatttcccaatcatccagactgccgctcttagcctctggtgacgagccggaacaagattcgctcttcactccaggatcttcgtcttcctcttgattcgcagcaacctcaacctcttcctcgtagttcccattgtcggcagcctcaatctcagggatcaatggtgccttcaggtccatcatgtagcagatgtatgctaggatgttgatatttcacatccatcttcgatctaga

SEQ ID NO: 284631 - DNA, 285 bp, Zea mays
aaacgcattccctcaagatatacaaggacaattattcagaaaaaaaaggggaacgtgcaaactgataacgctaatctagcaaacagaacataaacactggcttcgctaacatttgcagaaagatctatcctacgaggccttatgatacaaccccaaaatcttcatatttggctggccaaatctactaacatttgcacactttttttgctagcgggtcgatttaactgtaatcccaagtcatgtaaagcaggaatattgacaaactgcaaccggttctcctatctg

SEQ ID NO: 284632 - DNA, 409 bp, Zea mays
tcttcaaaccagatacattactcgtcggcgaacagggaaagaggaaaacagcacaattagtaattaaagtaactaatcttacacatgtatcacactaccatgatgaaccaagtccggaaacacacaccacgccaccgctacaaatgcttctctccaccaggggggacacacatacgcaatccataatccacaacccacatgacaataaagaaaaaaaagcgcaaaaaaaaactaacatggcagctagctagctaatacttgcggcgtccgaagatggcggcggcctgcgcgttcttgtaggcgctgcagccgacgaggtagaggatgacgagggcgacggtggcgacgaccagggcgacgttggccttgtgccactgggcccggagcgcctccaggaggcccgccttgc

SEQ ID NO: 284633 - DNA, 411 bp, Zea mays
gacaagtcttttacctgaaccgctcaagttcttcgttccaaactacgtggtaacaaacacagttaccactcatcatttactactgaccacaaccggtgacaagtcgtcaactggccaaatatacaggccgcagcagtagtattagcacaaacatatatatacagtcatatacatacacgaaccaacatcatcacagcacaaccgccacaactgtacaaatctaattttatgacgaacgcatcgataatgctcccagcaatgggctgggaccattgacgcaagaaatgttttatcagtgttgccttcattcagctgggatatcagagctctggcctttctctgggttacgggaagttattggatgaccttcacctatgctagaattatcttcattcccttgattgctccgtt

SEQ ID NO: 284634 - DNA, 318 bp, Zea mays
gggaaaaaaaaccctaaccctaatcagggttggggggggttttaatagacttagggaattggggctggcccctttcaaaggggggagaaggtaattacatggggaagacaccaaacccttgacgggtaattttacaaaaacatccccagcactttaaactacaatgctgcagtttcattctccgcctttgccgtaattgattttgcctcaaatgaatggggggtttactcaatctctttttcagctcttgaacaaaatccttcctatcaacctttttttcctggttggcttcaacatccttaaatttaacacttccct

SEQ ID NO: 284635 - DNA, 269 bp, Zea mays
aaattataatgatgtaatgtcattctccccctaattgagtttgcctcaaatgggtgtcagaagatgatatcaacgcctaaaatccccctcttagggtttactcaatctcttcttcagctctcgaacaaaatccttcctatcaacctcttcttcctggttggcttcaacgtccttcaactttacagttcctttctgcagctcagactcgccgactagcaccatccacggaatgcttgattgcaaggcatacttgatgtggttcgccaccc

SEQ ID NO: 284636 - DNA, 452 bp, Zea mays
cacaaaccaaatataactaacagttcatagacttaacttcatgatacacaaatagaaaagccagccctatgacataaactaaagtccttaaaaagtccagcccttgcagtgcttcttcaaccaagccatccttcctgcatttgaagacagtcctaggaaaacatgtctttgaaatttgcagcttgcaaacagttgggaagctacgaagaactcgtctgtctcctcagtagccccacattcctttgccagtgccaaacacaggtctatctccttgaaatctgcagcttgctgctcctttctttttggctcaattatttcttgaatctgcgtagctgcatctacgtctttgctactgccagaatctaatcgatcaagcaaacccttcatgcacctaaccattgcgttcttattcttctttggcggactagaagcagtgtccgtattgctcgaag

SEQ ID NO: 284637 - DNA, 485 bp, Zea mays
agcggaaaataattgtggatctttccttatcacagcaagttcatgaggcaagcaattgccgttaacaaataactaatcgattgaattgcgaccacaccacgaccgatgtctaaaccatcacttcccaacccactattggcccccacagctcggtaatgcatacatgacatgaataatttaggatggaatcttctgattattggcctcaacaatttcttgaatgaccctgtgcagggcaaaatcatccgtgacgatcgtagaatgctgggccttattgatcttgatggatttgaactgcttcttctgctccggctgccgacgcatctccttctcaaacgccaagacgctgatcaaattgatcttgccatctccgtccccgtacgccgccacctccggggccgcgtcgaagtcttcgccccagaacaccagcccgagcggcgtcctgttgccgaccccgctgatgtacgtcatgggcaccatgggcg

SEQ ID NO: 284638 - DNA, 454 bp, Zea mays
cgaataactgtctttagtctttaatcagaggcgaacaaaccaacaaaggtctcgagattgtagagttgctccccccacgagtccacgacttttgcatataacttcgctcatctcgactatcgtgatccacacaggaactaaacgcaagtcctctaaataataaaacatggaggacaacgctagatagtatgtagaagtaactcttggctcccggatgaatcttcaaatcatctcgaggagacatcgacgcatacacacacacactcttcttgatctcgccacacacgtttcaccccactttcagttgccgccacccttagcgcccttgcccgccttcccctggtgggccttgcgcgcgcgcacgaacgccctggcgaggccctgcagcctccggctctgcgtggcgatgactcccggcggtggacggcgcctgcgggaggacgacctcgtagcc

SEQ ID NO: 284639 - DNA, 520 bp, Zea mays
agccaaaagcaaaatgttaagcaactggcgaattccttgggcaacataaatcagcatgttttaatccctttgctccatcacatcccgcaccccagaagctatccaatcaggctaagacaccggaaacagggcagaggtaaatcaccttggacacttaacacacgactactgtgactgtaaaaacgacggcattgaacctattacaccattacaacacgagcacccctattgtccaattagcaatcacctgatctcctagttattggttgtatggagagccaagccaattattggattcacattgcagtatacatcatcgatgctagccaaatgttcgaccagcgacgatagtcacaattaggacaatacacccggcatcaaagaagcttggacgcccacattcagatggtgatcaccacacacctttcgtcaagtcttcctccaccaatgggcctacaaagggggtaaccaagaactcgtccacccttgccggggggtccacatccatggggatcgtgct

SEQ ID NO: 284640 - DNA, 885 bp, Zea mays
aacagcaaaatgagcatctttttacttcaatttaacaccatcatgccacaaaacaacaaggccaaaaaaaaaaaaaaactccctggctctccaagttcagctcctccataaaaaaaatcggggggcctacaacatcccccattctaacgcagacgaaaaccaacttgttcattgtaacaacagcttgatagcttccaagcgcccgtgtgcaaacgcaaccccccccagtaaacaaccacaggggggctactaacttatcacacataatctttgtcctcggtcctaggcgcctccagatatcaccaccttcgttttcccactattctgcttcatctccattccaccaactgccccaaatcttcatcgctacccctgaatataacaaggtaaaccaaaatcttacctgaacgccagtaaacacgttcgcttgtcagtctaatacgcctctcgcctcccctccaaaagttgccaaaaaaaagttaccacttgtgccctgtcattcgcgcaccgacaaaacccctgcagtcatggtgtgaatccaaaccactgccttgttgtaactactgctgatcagagctgtcctcagctactgcagcctcttcattaccagaaggcgatccgttctggaccacatcattatgcttcggctccacagcgccagcagagctagcagaatcctgcagatccatgcctccaagatgtgccgtcagattattgacatcaggccttggtacagatgctgagcttgacgggacatcaggattgctctcacgagggatcacccatttcacccagtcatcatgcttcctgatcttgttatccttcatttccagaatagatgaggcctgcaccgtctcttttatatattgcaggtccttctttagc

SEQ ID NO: 284641 - DNA, 545 bp, Zea mays
gcatcccagaaaagaaaaatatatatattatcccggggcctaattatggcactcgttaagctcgagaggaacatgttcttttcagtgttaaagactcaacttggttcaacggtacaatgaaaaattcggaatgcttcctcctttctcagagacacaaactgctcagtttgaagaccacaagcacatctgcccccaacttccatgagatagagcaggagcagggcagttgagccagcctccgcacgggtctatgttgaatatgcagcagtcagccagcacaaaacagtttcagctatccaactaacagctttacaacaagcagtgaatgcccataccatgtcctatcaactaaacaaaagctgtgtctaaatcccctgacctaaaatttagccgactcctttccgggtaatacaacaaacaattcaacatcgaaaggtaaattgtgggagggatacatggaaaccctctgctgctatcaccaagagccagtcgtattctctccacgcacattaaacccttggcgtgtggatttgcagcaacccagt

SEQ ID NO: 284642 - DNA, 450 bp, Zea mays
tgcaaaatctttacaggggtgtttgatggcgtcgagttcttttacataacagatccttaattaacatcgtgcaacgttgtgagaagcagaacagagcatcaaaacagatgcctgacgatacaaattctgcacccagaattcagagatcttgacatacatacgaagcatcacaagcacaacgcgaacttcctcaagcctcacgcaggtcaagagtactaaccgcatttcctccacatactggggatctcccacgcgggctaccacgcaagaagaaaccgccaccctaacttctcatcaaatatactacactaggaaacaagactatcttcttctgcaaccaattgacatctcaactccgacctgattgcgatcgattaccttgctgctcagcatagggccttacgaaagttctcctccaccaaaccttaaaggccttctggagattggggc

SEQ ID NO: 284643 - DNA, 374 bp, Zea mays
aacacgaaataaactctttccttgcaatttaacacctcgactactgtgctgcgtacaacaattcttccaaccaccatgcccgaattcaaatctctggtcggtacaacagaggcatttgcaacggtttataaggaaacaaaaccctacgagtaatcgtacagggagacgctcttgtcatccgacgcgctagccagacgccctgcccggactccggcaccgcctggtggcctgaaggccacggcccacacctgatcggagtggttgctcatggtctgcaccgaggtcctcatgctgacgtcccagagccggacggtgcggtcgctcgaccccgtggccaccgccaggccgtcggggctcgcgtcgatgctcagcac

SEQ ID NO: 284644 - DNA, 525 bp, Zea mays
gaataggctggtatcaatttttagtgtagtattcgattacagttggactaaaacaaacatgatttaacgttattcgttacccattacgttacaaatttgtgaaccaaacggcaccttggttccagcattggattctcgtttcctagggttcccgtctgttatttattttctccattgttgtcaaatgggagctcacttgatctgaaatccagattcaagatcaacccacttctcgatgtctctggccaaatcctccgctagcccagtgtaggaatgcggggttagcttcgaaagcttcgctcgaacctcctccggtatgtctagaccatcaatgaattgctgcatgctgtccttggtgacagcttggcctctcgtaagttccttcagcttctcataaggttcaggtattccatatcttcgcatcactgtctgtattggctcagcaaggacctcccaagtttgctccaagtcttcagctaaacgcgcttcattcacctgaaccttgctgattccacgtatggtggc

SEQ ID NO: 284645 - DNA, 531 bp, Zea mays
gcaagcaacttttttagctcgttaaattacctccaacatacagttagcataattccttgaggcgcattttacatgtgccaaaaatatcattaatgagaaccacgtaaatcatcttggtcgacaattagaggccacgacgcacccgtctgttattttttttctccgtcgttgtcaaaaagaaaaaaatgtggagaagattatccttttaaaaaggaaggtcacttgatttgaaatccagattcaagatcaacccacttctcgatgtatcttgccaaatcctccgctagcccggtataagaatgcggggttagcttcgaaagcttcgctcgaacctcccccggtatgtctagaccattaatgaattgctgcatgctgtccttggtgacagcttggcctctcgtcagttccttcagcttctcgtaaggttcaggtatcccatatcttcgcatcacctacaatgagtaatagcagtaacatgatacgtctgatgcacgcacaataagcacttgctgacagcaaccaaaacagaat

SEQ ID NO: 284646 - DNA, 415 bp, Zea mays
gcattcaaacacacgaagtgtgatcgattacggacgaaggcaatcaaacaccaatgtaccagtaaacacggtctgatggacacccgtcgaagcatacatagtctatacaactacaacgaagcaagtacatttggccaagaaagacaaaacagcgatgcaaatacatgtgatggccgtggaatctacccagatctggttaaatgaagcccgagcattcgagttcgagcacactcacagccattcacattaacccatgaacgaatcttgtcggtagcatcacagaagcaagcggcgagcaggatggttccgcgtggagacaagcgagacgtcgtcgacgacgggtccgcagagcgtgccgtcgggcttcatgatgtagcccatgctgacgaacaccaccctggtctggtccgcgacc

SEQ ID NO: 284647 - DNA, 377 bp, Zea mays
ggggcccggtccatcttcccgcggatcagctccgcgatggcggggctcacggtgagcgcgggggccacgccgctgccgctgccgctgccgttgcccgcccgcgtcgcgtcggccagcagcgacggccgcacgtacagcgtgtccgacacgtcctccagctgcagcttcgcggacgacgccgacagccgcaccaccttgggcccgcccgccgctggtggcgcggcttccactccgcctccgccgcgtagtccaccagcttgtacaccaggcacagcaccacgtccagcacgtccagcgccgagaacaccacgaagctcaccgcgcagttgagcgcgcacccggccacgcccagcaccgacgccaccttcgcgcgcgcc

SEQ ID NO: 284648 - DNA, 544 bp, Zea mays
ggcaccagcacgtacacacacgcttgcatttattaggatatactccaatatatatagagagagagaaacacacacatatatagtacacgatacacatctagctctagctaggcactactgaaaaggaaaagataactgtcacgctcatctcatctggtgcactacactaacaggcacatatcacatgcatgcatgcaagctggtaaagttacattacattacacacgtaggcatcaaaccggcgctgcaggtggtactactacgtactactgccttccactagctgctagcatcatcatatatacacagtcgactctaaagcatatggcactcgggcatgctctttttcttcttttacacatctcatccatcgccgccgggccacgttacgttctctgctacaaggtaaacaaagctaagataagacgatcgggcaactcctcctccaggccaacgtgtccatcctcgtcatctaacccgcgtgacgtggcaccaccctcgctcaggcggtgcagccatctacacgacagcctcagcacctgac

SEQ ID NO: 284649 - DNA, 453 bp, Zea mays
ggcggcaccagcacgtacacacacgcttgcattaattatgatatactccaatatatatagagagatacacacatctagctctagctaggcactactgaaaaggaaaagataactgtcacgctcatctcatcttgtgcactacactaacaaggcacatatcacatgcatgcaagctggtaaagttacattacattacacacgtaggcatcaaaccggcgctgcaggaggtactgctatgtactactgccttccactagctgctagcaatagcatcatcatatatacacagtccactctaaagcatatggcactcgggcatgctctttttcttcttttacacatctcattctcatcatccatcgccgccgggccacgttacgttctctgctacaaggtaaggaaagctaagataagatatatagtacagtacaatctagacagacgatcgggcaa

SEQ ID NO: 284650 - DNA, 425 bp, Zea mays
gccggtgctccaagatgatctttatttcacacacgcatatattgtacataagttacaacaatgaacaatcatgtgtctctttacaataaattcagacatcgttagaatgttaaacattggaatggaggtatttttcaaaacagtggacattggagaaatgtattattctttgtgggtgagcattgtacaaatctgacatccctcttcagccaagcatcaattcatctagaacttctcctagtcttttcaaagatctgctcagggatcagtgtgccattgccattggccttcttgatctccatgttatccttctggtagaacccaatgcctctcagagcatatgtaatgaagtcattgaatccaatggcgatggcagcctctaccttagccccataaaccagactcttgattcgggagagatgaac

SEQ ID NO: 284651 - DNA, 403 bp, Zea mays
tttttttttttttttttttttttttttttttttttttttttttgtttattttttttttttttttgttttttaaaagcaattcaagaaaatgtattgctaccgaagtcggtttttttttcaattacaaaagcaaagaaagccttcatctttgcatatgcccggaacaacacatcccagcagcggcagttcagcctttctggaaaacctttagtacagagtctacagtgtacaggctataaaagctcatgccaaccatgaaccagggaaaggataatggcacagctccggcaacaggataaggaacgcccccaattctacaaaaaaacacaatgggaccgttggagttccacaatagcacagcgctgaacggcaatgggtatgtacaggtacagtgtctgttgtc

SEQ ID NO: 284652 - DNA, 512 bp, Zea mays
ttctttttttttttttgtttttttttttttttttttgaatactttatgacttgaataaacataaggggacatagtcacattactcacaaactgaaataacacttaagtttgcaataccaactccaatagcaaaagtgcaagacaataaagtctgccaactccaacagttacactacctcagtattcagtaacatcactaccatttccaacagtaagacaataaagtctgcaatacgaatgcaactacaaattctcaagtctaaacagggaagagataaacaaaagaagttaagaaccatgccacagccgcacaacctaacaggtgacagcccacagttacacatatacaagtggcatgcagcttcctgcatccaatattccagagtcaaatgcctcttgctgtgtgctcatccatgtgtgcatgtccatgactgatgactgatgagtccataatccatgcgacttgctatgtgatcaaccatccaattgtccaaaagatatcaagatctagt

SEQ ID NO: 284653 - DNA, 442 bp, Zea mays
  unsure (1)..(442): unsure at all n locations
ttnccttttttttttttttgccaataactgacggtgttaagcgatgttaggctttaccagcctgtaactgatgtgtttttacagagtacatactctggtgctatgccccaacatatacatgcaagttccaggaccaggacgaacaatagacagtaagaataaacactacacaggagcagtgtagtaccactgctcttgcagtacgatatcagatattctgttaatatctttacagaagttcgggtctacccgtacgggcatacagctgttcagtgctccatatactggcatgctgggggtgtgaccttcgtcttttcgctataagctccgcgaatctcaacttcccgccattcttgaacaagcgcgcagcaacaacacagcagatgtgaaggaaagtcgtcacagcagccttccgcaatgtccaacttttgacgaagctttc

SEQ ID NO: 284654 - DNA, 479 bp, Zea mays
gccctcctttttttttttttttttcagttaaaaatttaacaaggtggcaatctctatttcgaccatctcaccgaaccaaaacggtaggatatgaatatcctcaactccatgaaaaagaatgtgctgtttcatgtgcctgtgaaattgtaggctcgggataacatacatcacaagtttgttcttgttacatcactcgacagtcgccactactgtaatggacaagggatcacgattcacatagggtaaaggtaagaaagaagacctggtttgaggtaagcttctgcgctgcaaaaaactaaactacaagtgtggtatcaaaagcaaggcacgttctccgttctcatgaccatgttgcaggtcgagtagatcgatgcggcagcggtttgcaccgcccactcgctctcggaaatatttgggttcttcagcttccatagttcagccataggtcctagcagaggagctttacaggccatgtgttt

SEQ ID NO: 284655 - DNA, 459 bp, Zea mays
gtagcaactcttttaaatatgtaaacacatgctccgaagactcgggcatggtgcgagtaatttactagtaaaacatgcacccagagggcagtctcaaacagaacaattagcagtcggagcatagaaaacattacagagttgcaaataaaatcctaggtagcatgtaacagctgttgcgacgcctactgcttaatccactagactgctggttaagtacaaatggaacatctttcaaacaaggtgctaaggttgtccaacagcgatctaaggtgtatatttcaaacaagctctcctttccagctcaaactaaacactggttcacctcgatcatcaagatggcatgttggccgacgtgtcaatctgctcaggcagctcctttatgtcaacctcaaacctctcctgcacttgattgagaacatcagaatcagatgaagaaacaaatgttattgcaagtccctt

SEQ ID NO: 284656 - DNA, 571 bp, Zea mays
  unsure (1)..(571): unsure at all n locations
agtactgaaatggggggattttactaacagcggggtcactgaataaattagagtgaggaaaacaacgagttgaaactttcagagttcatacccaggagacactatgatttattgtccaatgaaacagaaatagaacaaatagggtattgtcctccaatcttcacatgtaataccgcggagaaaacaggagtaatataatcgtattgaagctttctaccgagaatatactgtgatatcggccaatgaaacagaccccgaaaaaatttcctctccccatggggtatcgtaagcttcttgaactaattcaatctgcctaacatacacagaccaatcctgctgcgttgttgaaggctcccaacttctcttgagcacacacttgtgatgcctcaggattccctcttgttcgataaattctgcccagcttccttggtactcgtgctgttcccctacgtttcttcgatgatcttgccatattttccacagtcgctccccgacaactacgatgcttgggncgatcagcgccacgcgaaaccacacaactcaacgctaagctgagcaagtccctgaccac

SEQ ID NO: 284657 - DNA, 340 bp, Zea mays
atcctttcgctaagaaccaacaatcacaaccgagcaactttagacgctagcaatcctctggttcaattacgcaagaagccttaaccgcctacacatcttgaagagcatttacagagaatttagtaatttaaaccaaatcattggacttgattctagacaaaagcattggaaaaccgtgcgcctagttcatataaaacaatctaaaatacagggtcaatgcaggttgcaccacacaacgatcttgagaagatcgatcaaatccgttgctagatctcgttgagcaagaagacccaaagcgatcgtctgaaaaccagcagacccaaacacaggcaaatcaatt

SEQ ID NO: 284658 - DNA, 418 bp, Zea mays
acatgaactgcacatgcatttatagatgatttatttacacatgatattgaactacagtattctcagagaaattacaggtattacagaattacatgaaactggggtaattgccaaccaaagtcgcgaggaaacaaagtgttctttccttctagccaccttccaaatatggttcaaaagcaccatatacagcagccccgaactggacataaatgatagcataaaacaccctggctgcacatttacgagcgaaactaccacttagcaattgtggcaactgagatcagtcactgatataaagtacctgtacttgatgtcctgctcacttgctcggctcatgttgcagcttcacccgcagcaaaaacaagtgctcccttgcctctttggacatggtgcgctttcatccacagccggcgcgtgt

SEQ ID NO: 284659 - DNA, 318 bp, Zea mays
cattaaagtagcatactaaaagcagatttataacatagaaatgacaagctaataaatcatagttctattatataatacatgagaagagtgatggcttattattgtatatttacaatttgaaacaaccctgaaagatcggttgactactattcagagccatcagaggccgccgcctcctcattatcgccgtcgtcgtcgtcctcctcctcctcgtctgatgatgatgatacaccttcaactgcagcctgtagcactagatcaagtaattctatgttgtcctcatggtcctctgatgagccttcttcagctgactgttgc

SEQ ID NO: 284660 - DNA, 590 bp, Zea mays
aaaaaaccatttgacaagagcagattatacctcaaatcggagtattcagatagaattacaattaccttccagagaaaaaaagaacatatttatactacaattggtgctaactctatcagaaagtccaacatacactgatcagggggtaaagaagagccattgtaccaagaataacttaccacagacagaagcattgttcgaccactaccaatccaatagggtgcagtgaaggcagaacacaatgaacagaagtgaagaatcaaaccacaagaaataaaacaaacatgtttagtcaaaggatgcgcctcttgctgtagtcagcctgactaggttcctgggatgcccaactaggtgcagctgaaggccacacacttaaatcgccccaatcccaccatgcagagttgatatattttcacaccagtgctgcaattaaaatagcggtcttgttctatgacgaaaaggggtcttactttcgcgagctgcatttgttagtgctcagtacactcaaaccttatcaactatatgaggggaaaggatgttactaatttgtgatgaagttgcatcttcggtgaagaatttcatgatgaaac

SEQ ID NO: 284661 - DNA, 390 bp, Zea mays
aggaaacccaatcaggtaaattcatatccatttgttgagataaggaaatgtgagtatgtgagtggcatatgactcacacgatacactagcatatggtacaagtacaacaacttttccgcacatcgagattgggcaaaactaatattaagattcaaacaggaaatgtcataacaaatattgcaactgctccatgaacacagcagcctactgttcctccttcatagcctcttgaaccgcctttagaactagtggcattaaatgcttgtttgttgcaataattcctctgtcacgatcaagatatctacctttgcaaaaatccaaatcgtttcctgcggcatcttttaccatgccaccagcttctgtgacaataattgatccagctgcatgatc

SEQ ID NO: 284662 - DNA, 405 bp, Zea mays
ggaccagcgaatggtttcagatgattcaatcaagggttccaaagcgtctcgctacaacatgccgggttcccagttcatatatataggtagatatacatgttgggaagtcatagctgctgctcatattcatatatatggctattcgtcacctaggggatgatcacccatcctgagatggtttaacaaaaagcacgaatggtttaacaattattgaagatttgttaaaccattccagcggggataatcatcacctagggtgatctgccctctctatatatatgagggggagataaacaaaaggttttgagctacagaacccatcagctttcagatacgaatcccttgcatgggggcatcttatacaggataataacgtagctctggatcctactacaatcagaattt

SEQ ID NO: 284663 - DNA, 544 bp, Zea mays
  unsure (1)..(544): unsure at all n locations
tgcttccaactaataggttctntatacggaaaaagagacatagttaaattacactactattatgtgatatacactcttaatttgtcagattgaggcatgtgtggtcactgattccatgtgacacgaaaatacaacatgtaaaacagagacgaagaactgaagcaccacaactacattccctatagcctacactgttattgttccactcataatatggactacatgatttccgggggggagtgtgtggagaagaaactaaaggagatgcacatgacaggatcagaacagcaggaggggcaaaagaaagaatagaaacactgttagctcccaagccagcctctggcatcaatcaattcgttgcgccctggccaggtgaggagcaacacctgtgtgtggcttcggctgcactgcagagaggtcggttaatctgtacagggcgccctcttccaacttctatgactgcctgcatctttcaatgacttcggtgacagctgaatgtgtttcccttgtcatcatgttgagctgcaggtgaaatgacacaaac

SEQ ID NO: 284664 - DNA, 473 bp, Zea mays
aactataaacaaatatatttattattcagaaataaattcttgaattacaatagtatccacatacaacgtcatttttcttgttctgtacaaagattgtaaagggaaacaatagtatcaaagccatattgaaatctaccacctatccatcctccatctctagtgcaacgaactcttcactgatttgtgctcatctgttcttagtcaacaaatgaacttgcttcacattactgcttggtgataagaagacaccaatccaaaggattcatccagcttctttgtcaatcatgccagtttcaagatgcagagtttctataaaattgtctgcgttctttactaccttcaattcatccatacattgctggttgtcgtgctacctgagtaattatatgtatccattcacatagaaccaagcttacagtaatagattaatctttcaatagcaaaattacctactgctaagcagaacacacaag

SEQ ID NO: 284665 - DNA, 398 bp, Zea mays
gttaagccaagtatttaacaatgttatgctcaaaagcaactgccctgatttggggctcactctgactacagactacagtagatccaacgaaaacttcaacaatacttaattcgttcgaacttggggaacactaatcccatcatcattattatttcatttcaaacaacgaaagatcgtccaatcttgaaaacaatggaagtgaaggagaacgacgaagaactagtgaagcgtggagcgccagcagtgggagtaatcagccagctgctgcttgacgatgaatcgatgatctgagttcagttcttggttgggtaggaggccatcttgttgatgccgcagaggccctggcgcttgccggtgcccctcctcatgcggatgtaccccttctcgccccagctggg

SEQ ID NO: 284666 - DNA, 493 bp, Zea mays
aaaaggtgcacaactaaagtctagcaaaggtaaacttggggatgctagataagagacaacatatgctctactattgcattgatatggataaaaaatgaccagaagatgccctttacagctgcatattttcaccaatgtaaaaaataatcagtatggcaaatgctacagagatacctagccaatatcctgtcccccgtaaacaattgataaagaaccacctatcccactagcgcttttaagaattgtacttattccaagcctccttaagaagatcaaacaccttctcacaaatgtatttctgtctgattgcagcacctctttgctgcactttatctggatggacacaaggggctgccttcctgtatgccttcttgacaccagcagctgtgataaggtctgtgaggggaactgcctgccagccactgtctgaaccaagtttatattgcattgtggacagcaatgctcgcagatttccttcttttccatttgacca

SEQ ID NO: 284667 - DNA, 386 bp, Zea mays
gataaaggtaatgcttttattgaaattttattcattcatttcataaggaacacaagtatcccactgccgatgggcgatggatgaccacaagattcaagaagccgatatcaatggattattcgtcccattccagtcgcatgtgctgttggctccaacgccgtcagactttgggcacggcagcgagggaggcctccagcttctccgccgggtgcgagagatcgaccatgtctcccctcaggtacttctcgtacgcggcgaggtcgaattgtccgtgcccgcacatggccatcaggatgaccttctcctccccggtccgcttgcactccagcgcctccctgatcgccgaggcgattgcgtgcgtcggctccggcgccgggatgatgccc

SEQ ID NO: 284668 - DNA, 487 bp, Zea mays
  unsure (1)..(487): unsure at all n locations
ttttntttttttttttttttttttttttttagaaccaagcagttcggatttaatatatctgtggctatgtactatacaacgagtatacggatccagcgaccgtatgtttccacaaatgtaaacatcacaattcagcgattatttcagcactataatctcaatacttattcctcaataagcctgtcgaggcatttgtttcagctgtctattcgcaactttgattctgtctgatagtgtcgtcccaggccctgccagccacgccacaacctattttctgtcgtcgcctccaaactctgtcgagttcccgttccagaaaacatttctttcatcagacggaccatgatcctcgctccccagagtgtggatattggcaccaaatggtctaggccgccttcgagcgtgtttgcagagtctgcatcagtcacttcatggcccctattgccaagaggccgtggctcactccatggaccagatccatgtctaagct

SEQ ID NO: 284669 - DNA, 635 bp, Zea mays
gactaacgtctccatatgaggttccatataagcacttccacgcctgcagtgtgctttacaagctcaaacggggaacagattcagacgcgcgtgacaaacgtcagcatactctgtttttgtacatttggttcctttcatccctacagtgttctttacaagctcaaattggtaaactagagagcaatacaacatcacaattcacacatgacgagttcacaaatctggttgcttttgacagcaagcaagataccggtttgaatctccatgcacgtctttggagaggcatgctggtggctacaattctcaaagtgctcaaaaacaacgatagtattgaagccatgttagcatgaaaaccaagtaacagcatcaaaacagcaacgctatcatgttagggcggatacaaaaggtaaggatcaacgactgctttgataataacattactaaaaacatatgaataaaagaccaaaaaatggaaatcatgcactaatgatgatcacattgatatggactaatggtgcagccttacagttccgaaacaagatgtatttgtcagcttactgtgattctgaagtatctttatgttgaatacttgactagatagttaaatttaaatgtgctagatccttgagtttgct

SEQ ID NO: 284670 - DNA, 348 bp, Zea mays
ataataattggggttctgatacaaggtagaggatctactataaatagcctaagagggtcatgcccatccctatttaaattataatgttacatggtgaaccgggaccaagattcctaccattataacagtactctcaagtggatatgcatgtataaatgatttcagaactaagtatttatttacatcggacggaaattacataaataccaagatcatatgtgagtagctgtttacactggcaccttccttgctctaatctgtcgaacgttatcttttgtgacaacatcagttaaatctgagctattctgcaaattcaccaactccagtgttctcttaccctttttctta

SEQ ID NO: 284671 - DNA, 489 bp, Zea mays
gcgtcgtccccctcttctcgtttcattccgttccgatccgattcattcctgtagagagagagagagaggaggcaggcagcgctttacacggctttcagcaagcctttactacatttttctccacctttcagttcccacatattttttttttcagttgctgactcttttcactgctgtttcggtttcacagcggttcgagagaataaagttttaaaaaaaggaaaataataacttggaagtttgctactgataagaacagctgctgcgcgttcgtcctagaagatcgattgacggtttgggagagtatttgatggctcatgcacgcccaggagctactgcatccggccgacccgctcggcggcggcgcgcatgacgccgtcgacgagctgcggcatgcagaggtcggccccgccggcggcgccgcacccggcgcgcacgcccacgctcgccatgtaccgctgcacctccgtgcggatcagctcctgcatc

SEQ ID NO: 284672 - DNA, 413 bp, Zea mays
cagcaagcctttactacatttttctccacctttcagttcccacatattttttttttcagttgctgactcttttcactgctgtttcggtttcacagcggttcgagagaataaagttttaaaaaaaggaaaataataacttggaagtttgctactgataacaacagctgctgcgcgttcgtcctagaagatcgattgacggttcgggagcatttgatggcaggagctactgctactgcatccggccgacccgctcggcggcggcgcgcatgacgccgtcgaccagttgcggcatgcagaggtcggccaccgccggcggcgccgcacccggcgcgcacgcccacgctcgccatgtaccgctgcacctccgtgcggatcagctcctgcatcgcctccatgaacacggggctgaacgg

SEQ ID NO: 284673 - DNA, 463 bp, Zea mays
gagtaataacaaataatctgatcagagcaatgactcaagagtcttctcaaacaatttttcactagctatgctcactggttctaatgtgaagagacttataacaaaggtggcattccatctttttgtgtgtgtgaaataaaccaacccaagaacttccattctggataacagtacccaaaaaaaaccactaatatacgaccaaacagcgctaactaacaaacaatctaaagatcatacgaacaaaacactgcctgatgatcactcttgcgttgttttccttcttccatttctgcgacctggtctcaagaaggacgtcacttttgcacagattaagggtgtctcgggaaagcaggtggtgcactgcatggcgtattggtgatgctagtcatggcaggagttagctgagctcctcctgctcttagcacttggaagatgcttgagggttcctcttagtcttaatctc

SEQ ID NO: 284674 - DNA, 323 bp, Zea mays
gtcgagttttttttttttttttttttttttttttttttgctgtctttgttggaaggtccaagtaacaatcgctggacagtttgattttgtcctctaggtcctggatcacaatgcgtttgcaaggatccaacaggtccacaacttgtccacaaagggacagtacaacagaggatccggaaatttgatctactagctatgctccatgccattgtacataaactaccgacacgtaaaacagaaatcatcaaccaatgcaaaagtctggtcagcttctctgcgatctccactctccactagcgaatatggtgtgcgttcactatcag

SEQ ID NO: 284675 - DNA, 487 bp, Zea mays
agcggcgagccgtcgtgggaggagctggccttcgcccaggacgcggcggggcaactcggcggctgcgtctggccgccgcgctcctacacgtgcaccttctgccgccgagagttccggtccgcgcaggcgctgggcggccatatgaacgtgcaccgccgcgaccgggctcgcctccggcagtgcgccccgccggatcatgaccaggagccgatcgccgcgcctcttccagcgccggaattggcggatcaccagcagcagcttctgcaactgcatggatctcccatgaccaaggcggcagtattattctctggccgccctgctgctgcttgctgtactcatcagcaaacttattgcaataacaacagggagggggagggggaggattctcctgctcggtacatatcaacgacgacgaccatcatcaaggacagcaagagcaaggtactcatctccatacctgcagcaacgacagcaacggggagcaaaa

SEQ ID NO: 284676 - DNA, 520 bp, Zea mays
gaggtactaatatctgcaccatatgcattatcttatacacaaaagtgacagcttcactgttcgggtgattgctacgtacgctatcgtcggggtggctgtgttaatcaatcaaattaatcgccggatcgaaaacgttcaaagaaatcacacgatcgcccaccccctggttcacgctacggcgagcgaagaactcgcctctccaagggcaaggaagggcctacatgtacggacttgctgttagctatagcttcagagcttccgtccccgccgccgccaccgccgctggtgcttttgtacttgtacctcgagtcttcgctatgtacaggtcgctccctcggccgtcggcggctgggtgtcgaggcccgatcagaagaactccatcttcatgtggccctcttgtggttgaagctggccatggaagctttgtgctgaagctgaggccccgtgctcctggctctgcccgttgtcgtcgatgtggaacacgctctgcaggtcctcctcctccccgtcccagtagttc

SEQ ID NO: 284677 - DNA, 520 bp, Zea mays
attaggagtgggctttttatgaaccgtgcatttgtagactatgccgggccagacaaaggttgcggtcaatcaggatgaattttttttcattgaactcaaaatggtgactgcgtgcacgccctttaatggatttgcactgatgctacggcgaaacgtaatacggttcgtggggaattacagctgaaaaactcgtgtacaccccttctttcctaaaagcatctatcatctctagaactgtacaaaaattcgtgtgaagtcttgtttgagctttccaaagaaggcgacgggagcaccgaacagtggcacactgatttttacgcctttctcaattttccacatactattcacgatgagtatgaaatctggcttggaagaaaataatccaatgtgtatttcttccatgcgcacatcatcatgagctgcttgcaggctgactattctccatcaatcctaaacctctgtagcccaacgtgttcacttgagctgcctgttgacaggcccctctctttgttcagtccag

SEQ ID NO: 284678 - DNA, 529 bp, Zea mays
ttcacataagcgggtatagggacccacaagagtttttttatatcattaaacatcaatacatcgtatacaagcgaatgaacaagaccgttttcgtaggattacacatttacagtacaaactagatctacaaatggttatacaacacgctgtcttggggtttgttctctcttctcgtagagcatgtacagtcgctacaaattatagtggttagttgtaagtagggtaagcaaccttcggatgcaactgtgctagtgaacatttgggatattgctatctaaagactgcatccagattattggttcaggaacctgccagcttcagttcagaatgatttaatatcaattctgcgatattcccttgggttgttctgtgccctcaccaacgaagcctgatgcttcagccagaacttcaagctcttggtcaccgctcagaatctttccgttgatgaaccatgttggaaaaccttcaagaccagcagcggcacattcagcggtcattttctttcccttaccagctccatttgggaaac

SEQ ID NO: 284679 - DNA, 752 bp, Zea mays
aaagccaaatagctcacaacatagaataaatgaaagccaacttttgtgcctagaaaagctaactaaaattgtatcctttctaagacaaaaggaatagaaactaacagcaagagtttcagggttaagttcatgttacactcaaaactttcatggtatgagatggataccactaccataagtccaacaaaagtatcgacaagacaatgtaccatcgaaggcctggcacttcaattccaaaacataccatgttctgtcaaagccaaacagccaacgagggagacagataaacatatcctccctgcaagaacatcagctcgtaccaatgccttccatcatagagcatcagctgcccagtgcaaaataaaaagaatcaagtaaacaggttatttctcagatccatcaggaaggtcgtcgaggatgaacggcccaagcttccctgatcgaagagagttaggagcttcttggaggtagggccctgcgtttcatcgaaaggcttatggggtatcctgaacaccttgcggagctccacaagctgcatgtctatgagggtttccagctcactttcttcctcgatgttgccagtgaagttcaggaacgtacggcatagtgccctctgcacctccgtcactaaatcctgaacatatacggcatcagagttattcaaccgagtcctccgtaatgaattgtcttttttattactgctgcatatctcttcacaccactcttcttttctgtgcaacaaccgctcccat

SEQ ID NO: 284680 - DNA, 485 bp, Zea mays
ccaactggacctgcaaagctaggccatgccacaatattattgcttatcatccaaagttccagatggtcccccgaccggtttccacgctactacaaggcgacaagagaacatacacaagaacaactagagatttgcattacaatttacaatacaaatgagagagcacagctgcacaggacatcactagagtccgttgacggcacaaggctgtcaagtttcagaggtttctcagtctgaaagccaataatcagagaactatcttgggcaaggtgtctccaagccttcccaaattataccacctttctacagacccagcatacccctgcttgctcccgcctcccacctctgtgccgaggcagccactgatccagatggcgttggtgatctcatgaacatcggtgccactatccgttggggggctattgcagcttgccccgtcactgccataccattggtcagtatgtcacggttagcaacaggggcag

SEQ ID NO: 284681 - DNA, 379 bp, Zea mays
gattaaaaaaaggtttcagtgggaaaaatattaatacttcaagactgtcccaaaaattcagaagtcttgagatatcaacagtacaaaatttcccaagtgactcttttgacaagtataattctacacatgaagtactccaacacctcaaccccttaatgagatttcccaacttacaataatttggaatatatgaaatgtccccaggaaattaacaagaaaagggctatctggaagtaacagcatgggtaaccaaactcctcaattcagctagatgttcatcagttgagatgttcagtgttaaccttaggttagtcaacaaagcctcttgctcccagctaattgacccacaagcatacaaggctaacattgtcgcacgata

SEQ ID NO: 284682 - DNA, 1194 bp, Zea mays
agaacaagtctaataagatgatatatatagactatgtgaaagggcctctaaccgagtttgttatgtgaaaaggctcgccgtggactattaaacttactctaagcacgagtccatgtcaacgaaatgtaggccggaagtagcatctgcggaattactgtcccagtgtttctgtacaccaaacgtgggcctgaaggcggtcaaaattgatgcacagctctatgcagagatcggttacggctcaagagcactaccacacctcggttctttgtacaacgtgcacgcctatttaccatggtccatggtacgccttattagcaggtggcagaaggcgagcccttttatcacctgtccggctgcccgcttattcgttgcccctgttttcgatgaagctcagtagaaacccgctgacgatcctccgggctatggggtggggtaatgttgccggcacagccggccatctacataggcgaccatgcccgagacggcaaacctcccgacagtccacaaggcctattccgcttacacaggacgccaccagatgcgggcgagtcgccttcgacctcctctccggtcggtttcttcactctcgacatgactccagcgatggccttgctggcttcccggtgcagcacacgcacagcgaagctcacaaaaaggtgctcgcagagggtgagcaccgttggggcaatcctccattcaggttcatttcgcagatggcgcatcggtcgaactgtggaagaatctcctttcaacagtgccttgctcacaagaaagcttttgacgttgtccacgatttcgtttatcagggcgctatttggtggtagattcttcagtataacctggtcatcaatcaccctgacacggaggtattcttgcttatacatgacatccaacatagcctgtaggtacccttcaatgtatagctcatcaagtccagggctatgatcaagtttgatctttctgtcaggacctccctccattatagcctgccctaagacagatggctccatcgccaacctcaacatgccctggtggaaaccagtaaccatgccattcaaaccatttgtttccgctcctctaacaacactatctgaaatttctgtgacagcagcaaagagagcgttcgaacttgcagttttaacagttttcccgagatcaccaaggtaccgttttgttccagaaaaaccacccgac

SEQ ID NO: 284683 - DNA, 591 bp, Zea mays
tttttccctccttttatgctggttactttactgaattatcaagttgactcaatgcaagtacagtacaacctatctgacccccttgctggaaaaatacagcttcttctcaaaccggcaccacctcgcctggcatcacactacacttaaaaggtcaaaacaaaaacagcttctacaatttgagatctgttctcacttctccgattcatggttcagacttatctagtagtcggtttgcagttctgaatcttcttgtgagcgcgatcgatcacctgacctcctcctctgaatttcacacaatgattcgccatgtattcgctggaattactgtacacagaacggcaaacgggttcatgcacgaatctccagtcttgagtactcgaccttgctgccttcttcgtcggccggctcgcccgcgagcagcccggcgcggacatcctcgaggtcggcggcgtcggcgtcatcaggcgccgtggctggtccgtgggagctgtcagcgtgcggcacgggcgccgtgaactcggcccacgggcgcgtcttggcctgctccacgacgatagtactagcgcgcccaccgtccgcggacgcgtgggt

SEQ ID NO: 284684 - DNA, 386 bp, Zea mays
atgctggttactttactgaattatcagtgggactcaatgcaagtacagtacaacctatctgacccccttgctggaaaaatacagcttcgtctcaaaccggcatcacactacacttaaaaggtcaaaacaaaaacagcttctacaatttgagatctgttctcacttctccgattcatggttcagacttatctagtactcggtttgcagttctgaatcttcttgtgagcgcgatcgatcacctgacctcctcctcggctcctctgaatttcatacaataattcgccatgtattcgctggaattactgtacacagaacggcaaacgggttcatgcacgaatctccagtcttgagtactcgaccttgctgccttcttcgtcggccggctc

SEQ ID NO: 284685 - DNA, 484 bp, Zea mays
tcctttttttttttttttttagacagtaaagagacaatagtatttgcaatagtaaccatatacataagaagttattgcaaagatatatacatgtataataaattgacatcaaaatcagctggatcacaaatcaggcatcaatgttttgtttagccatatgttacacaaattgcttgggattcatgtgtaccaaaacttcatggttgtcagttttaaataccagtggtccgaaaatagcacacacacacatcattcattgcaaattcgagcatcatattagtaagtgttgcctctacataaaagtaagaagttcatttcttcggcagcaacattagcaggagatagcctgcatcttcgctggacacaatagcaacatgttaagaaagaaagcttcgctggacatgttaagaaacaaagttttatcaacagatgtttcataaagcttataggaaatgtttcatgagaagcagcctcaaacttactg

SEQ ID NO: 284686 - DNA, 509 bp, Zea mays
ggggcactaatctgggggcgccccctttttttttttttttttttaaagtgcagaactatcatatataaatataaccatctaaaacatatctggtatgatatatataagagtttgctaagagctgcatatggacataagtattatctgaatcctaacataagccaacataccaatatgtacatgaacaccattcagtgacactaccctaaactaagctagaactgagataacttgaagccaccaaaagccatcagaccatgatgttcatactaatattaagatagtaaactatactaggctactactgagagaacttgaatctgtccagatgggagaccacgaagctgtttctatttagtcgatggaatattaggtaatgcagtacaagagagcgaatgtcctctgaattatccggatcaatgactgcattcatagctccaaccatgtagtcgtagttctgcatatatctcatgacaaagaatccacaatcattagaccccaatttcatt

SEQ ID NO: 284687 - DNA, 501 bp, Zea mays
atccacaactaaaaaatcggattgatcatgttcaaatttcgatagtatcaaaaggacgaaaagtatcctttccctgattacacatcacgacagggtatcatcctcagccatctttgcttcaaagaaatgcgtgagccgtgagctgaaaatttaaaaagaagtaaaaatcggacgatccatcaacaaaactagaacaaagccatgttgcagcgtagctatcatgtatacaagccgaagcaaatctatccccttcctattatttacatctgatgaccaaaaggaggcctgctcagtatctgttggtaagctggcggaggtgcaattgacgttgggaagtgtggtcgcgagaaaggctctacctttggctctcctggcatcataagccctgggtacccctgcatagctgatggatttccaatcatttttgtaggggcaagtgatcctagagagggcattgggatcgtcgcgcctggcggaaccatgccgaagcggaaattacca

SEQ ID NO: 284688 - DNA, 439 bp, Zea mays
agtgcttctcgtgcgtcctcaggtcggccacgatggagaacttcttggcgtggcgccggccgcaggtgtggctcttctcgcagtggctccgcctgtagtggttcttcacgcacaggatggtcttgaggggctggaagcttttgtgcagcttgttccgcttgcaccccgcgaacgggcacgagtaccgccgcttcgccggctcctgctccgcgcccgggtccctcggcggcttggccagcgccgccgggctcttgtactcgtcgccgtgccctcgcatgtgcatccgcaggttcgcgtcccgcttgaaccctttcccgcagatggtgcaaaagtgcgtgtgcggcgccagtatctcgtcctcctccagctgcagcagctcgtacgagaggctgtctccgtccttggtttcctgctcctcgacaagaacgccgtcgtcgtc

SEQ ID NO: 284689 - DNA, 462 bp, Zea mays
tttctccgtgtacgtgtccttctcgtcgctgctgcggcggtcgcgggaggggaccgccatggagccggcaacgtttcgaaggctccgaagccagctgctgtgccgccggtggcgcgtagccccgttgctggagtcggagttggacctctggatgggggtggacgcgccgttgttcgagccggagctccccacgttatcgcgtcgcatgagctcctggacgataggcgagcagcctacgcagaggtcaacaaactcctccatggtgaagtggcggcccgggccgacctcgcggagctggaactcctccttgaccacgaactcggtgccgtcgtcgaggttccggattaggcacctcgggccagcgtcctccccttcgggcgtggcctcggaggagcccgacgacgcctggcgcgaccgcccgcccagcgggggcttggtcgacgagaccggcacggcgccgtc

SEQ ID NO: 284690 - DNA, 381 bp, Zea mays
ggacctgggcgagcggccgcccttttttttttttttttttttctctttctacataggcaacacaaagttacagcttagctatgaagtacatcgaccctgtcaaacgggaaggtttggtgtattagatactgatcctaggccgctatttagaaacaaagattaatttaagcagaaaatcaaaaataaactttgggtttttatggaactgattgataccacctgcgctttacttcagttttcgaccgaacctccctgagcctcccatcggttccatagtctctctccatcaccaggttgataccttcttcggagtaccacccaactccgatacagagtatgccgttttcgctgatgtcaacataggcagtgacgccaccaggt

SEQ ID NO: 284691 - DNA, 447 bp, Zea mays
gtcaaccatacaacatgaataatataactcaaccatacaacatgaataaatagcaatactaatcaagctcaagatacaacatgaacaaatagcattactaatcaagttcaagatacagcatgaatacatataactagcttatgttttttcctctcctcccaagttctcttgagccatgcaagcttcccttctggaatctttagtgtgagaaacacatctcgatactccttcttgatgagaagttgagtggcatagaaatgtcatcacttccttcaactatcccagctgagataactgattccatcatttctgttatctcttgcctaacatgatcattaggcgaagatgttgcggaagacttgcttgaactagctttttccacaaatgaatccacaaaacgcttgaactgcatatctctaaaattcttctttgattttttaattgggg

SEQ ID NO: 284692 - DNA, 432 bp, Zea mays
gccctccagcatctgttcgtcggagcgcatggacggccgcatcgacggcgtgcggctggtgcacagcacggcgacgcgcagcacgcggactgcctcctccctggcccacccttccacgatgcccgggtccaccagggacatcaccttctcccggctctccagccgccgcgacacccagtccaccaggtcccggctctccaccaccgccggccgccccgtcaccagctccagcagcaccacgccgaagctgtacacgtcgctcttctccgtcaccttgcacgtgtacgcgtactccggcgccatgtaccccagcgtgccggccacgacgccggcggacgagtggccgccgccgccgcctgccgagctgaggatcttggcgagcccgaagtcggcgagccggggcttgaacgactcgtcaggaggatgttgctg

SEQ ID NO: 284693 - DNA, 597 bp, Zea mays
aacttgggcacctatgaaaaaggtttgcaatgatcatgtccgttttgctgatttcttcttgatgcataatttgtagtcacaggttacaccactgccagacattgtaatcggaggaagcagtaatgtgagatggacactgtaatgcaaacgtatttcagctgcatttctcatactgcttgtctagactatcaccgaagagcctatatgatcaatgatctcttttggcaatcggcctcaatagctacacttcggcagctcgggtgggccgatgacgagctcttcctccgggaaggcgcacggcttgccctccgcggcgagctccgggcacggcttgggcgagacgtgggaggtgacccccttgacgttggtgcagttccactgcagctccttggcgtccggcgcgaggcgggcggtcacgttggatatgcagatcccggtgtaggggtccttagggatgccctccatcctgccggccatggtcacgttctcggcgaacacgtcgctgtagttgatgccggtgacctcgggcatggcgttcgggtaggacgtgttgtcggggtacagagagtagctcatcgctcgagccggcgaaagagc

SEQ ID NO: 284694 - DNA, 438 bp, Zea mays
gtaataataccttgtgacttgtcatatagcaaccacgtgctgaacaaatagttcgccgccaatcatcaaccagatggttaccattttataccaaacagcatctgacattagtctatccaacaagaaacaagctaataacaatttaactacattgtccattaggggggattcgacttcaacgcaggctctatgacgatcaattagggtgactgcatgtcactcgaagaatgaagaatatcaatcaggatgctgcagagaaggaagcggaaggcgaagaagacttcgtcgaaggcaacacatgttggcaagtggagatcgcagagcaaagccaaagtcggctcaacgtagcatttggcctggtcaattcacttcctggcgctcactaacttgggtcctctgaaggcatgataacgtgagtagggtgagtcattcagtcat

SEQ ID NO: 284695 - DNA, 318 bp, Zea mays
agacgaggatgagcatcatatattcattcttctaatttgatctgataggataacccattacattgggagtcctcaaattcgttgctacatgcatgttgcaaagtagtgaaccggctccgcaaacgcaaggactcctccctaggatacagagacggagggcgcccttgcaggagttggtcgaagcctaaacagtgtccacggggcgcgtattttacggattccggtgtgacacggagcgcgttgctggagttggactaaggtgcaggaggctgggcaaccaggagtggcctccgtataaccacaaagcggacgcgtggg

SEQ ID NO: 284696 - DNA, 406 bp, Zea mays
aggagaagagaagcccgtacaagtacaagggacatacaggggggctgaaaatgaatggacacccatgcatggaaaaagagacggagctagaagctgccctcgtccctagccctactgggcttgccatgctatactagcatgaatgcacacatagtacttgcagcgggctgccgccgaccgagccaggccagagatgccgttgccctgcctgcaacgcatgccaacgcccaacggtcacggggcccggatcagaaggaggcttgcattctgccaccgccgcccacgggcgccttgatgacctgcaggatctggaccacctccgccatggacggccggttggacgggatctgccacacccaccatgcccagttttagaaccgggaccaccttcttcttcgggacgtgc

SEQ ID NO: 284697 - DNA, 442 bp, Zea mays
gcattccatccaacaatacgaagtaccttagtcaatcatcattaaaaaacatcgagtacaataaataatctagcaagctggttgtgtaacccagcattgggccttacatccatgaaggccacaccgtttctgttagattgctactattactaagctgcaaccagggcctacaacaaccgtatctcgcatggtataaaaaaccttgttattctactataatggatctgctgggaccggcgctagcgtgcgctctgcaccagtatccgaatattatggctgggagaaacttccaaatatgttggttgcccgccaggacggcagcccttgtgccagtctgaactccgtgagcttgcatgctggggagttcacctcctctcgaagacccttccacaacacactaatggaaaccagcccacctaatggcaattggaggctattctac

SEQ ID NO: 284698 - DNA, 473 bp, Zea mays
ggagagggggggatggatcaatacagcctcctagtaagttagaccaccaaagaaaaatggggaggggggataaagaagaggaagaagctccgctgctcttgcgtcacatgactttttttacagctaacaacaccctagctactgagtcccatgttaatctcctgcgctgcgtcccacaaaatgtcagtcaaactactccccctgcaatcggcctcactcaaggcgcctcaccgaacgtctacgtcttcccctacaccatgttctgcgagatggcctcgccgaacttgaggaacagctcggcgtccgaggtgctggacgagttggcgcaggagagggcgccggtgccccgcaggctgacgtactcgtcgacgtaggccggcggcaacggctgcggcggcagctggtggtgcgcgtgccccttctgctgctgctgctgcggctgcggcggcggctccgggttcaccaggcagtca

SEQ ID NO: 284699 - DNA, 413 bp, Zea mays
ccctccttttttttttttttttttgtattatttttaactgatggttttgagatggtacaaccatacaaccgacgactgcatttaatgatcattctcggttcatttgctatttttctcgtacaattatgctgtatatgtataacaaaaaaatgttctcagtttacctgcctactaagaggaccttcctcagcaggtcatcgataaaaaaccaccgttcacgctcacattcaacaatgctgcattacagttgccattgcatttcatctgctatactttttttgtatattaagtaaagcaaacaaatggccttattggacctattggtgcagtacccttccacaatatgaagagaacattcaggtggaatggaagcaaatttatacggctgcccctttcacttgtcggccaggaaa

SEQ ID NO: 284700 - DNA, 711 bp, Zea mays
ttctttctttttttttttgcataaatataatatcgtatttctcctctttcgaaggttccacagaatgaattagagcgaagagcgaaggtgctttagagaaaagattacacaacaattgtcctgccctccaaaaggtaatttatgcaggacactattcatctatttatagagaatcgtacaacttcgtacgaaattacatttacacccacaaggactacacacatgatttacaaataatgcaagggcaacattgtcttttgcttttagcattcaggatgactcttccttgcatcgtctccctgtgtcgctatgacaaagttagcttcgtcgcccctctaatgtcctgcatcgaaggtgttctagtgccgaagctcctataatacttggcaaccaatggttaaacgtgtttttaaggacctttaaaagaccaaggccccaacaagttggttattcacctttcatttatttttgcattattcttctagtattgagtccttatattttccttgtcgaaggtggatgagttggctaagaaacacaaagaggcgtagaaaatcaagttgaccaaagtaaagaaaaaaagatgagggtcattcagtgtcgcccgctgactaggtgtaaagcttgtacactagggcgttgacaaagattcgttatggtggagatatctcaacctttgattccgctaaggacccatcaccaggagctaat

SEQ ID NO: 284701 - DNA, 401 bp, Zea mays
gatcatcacatacacttagcaatatattatcatagatatcattcatcaacaacaaaataacaaaatctgggggctacaagaccaacattgctacttctacacgtatagcatcaccaccatggggggttctcttggggggggctccaagaacaacatttggaagacaatccattgtgtacataaggttctgcatttttctggaggacaaccaatttctccttaacaggaatccatttcttcaataatgggaagtaataatgtcaaccaactgttagcccaagataaaacaaaagaaattgaagtacgtgaacaaatgagcattaccatcttagcggtctcaatatgaggtttatcccattaacatcttgttgataccttttatacataaggtcctacatttt

SEQ ID NO: 284702 - DNA, 569 bp, Zea mays
aagacaactctacatatatattcatttaggttgggaaccaagcaaaatataaaaagcatggaccaacaagataaacgactaataaatactttttttcccattcctctgtctgtctgctacctcctgctgttttctacaagggtgaaaagatgagcaaaaggtgaaagaccaggacaaggagtgcttggtgcatgctcctacgattcagagggggggtccctgcagaattgctcatgaggtgaagtggagtctctctgcacccgtgagtgctctggtcccagcagagtacacccctctcgtctcggtctcatcacttttccttgtgcagcagcactgcagctgcagcagcaccaagtctgtccggccaaggattttgtccacggcacctaccaagtccgtttcctttggatgtctgtatgcagccatgtcacttcactacaactggctgccaagactagctgtctagtttttactagtactacgccatctacgggtttaatcacttgaatcttgatacccgcaggagctactaaaagactattattatttatattataggactactatca

SEQ ID NO: 284703 - DNA, 526 bp, Zea mays
  unsure (1)..(526): unsure at all n locations
ttttnccttttttttttttttgacagtataaaacagttttttaagtaaactttatgtagaccgctggagacgggctgcatgctaccgcggcccgcgggtgacagcgcacgctttttttaaaaaaaaatacagagacaaatcaattcatggacgagtgggtggaccgtacgtagcatgatcgctctgtacagctagggggttggttccattccattccagcacaagacaagagctatcccggggtccattctcctcatcgcatcgcatcgcatatccatccacgtggccagctcagtgaatgatggagcggcttcctgaggaagccatgaggaggaccatggcgactgtgaacatgagtagcatgctcgccagcagcggtacgtgcgccgcgacgaccggcggtactcgccgaagagggcgacggcccagaacgtgctgaccagcggcagcgcctgcacggagtcggcggcggcgtaaccggcggcctgccctgccatgaacgtgagagcgttcccgagcccgcaca

SEQ ID NO: 284704 - DNA, 520 bp, Zea mays
ccaagtatatttggattaattctgaaggcttagtggtttccagtcatagtactcagcagtcagaactcagcaggatgttgtcaatacccggcagaagttttcccaagacgatactactaaacaaatctctcaaggcatggcttgggggaatctaaactacatcactgctttacaacacagcaacatggaccagagtaaccaaaaccctatatttctgccttacaatacaaaaaatgatcaaactcctagatcaacgttaatatatctttttttcttcccggacactaacctatgttaaactatagaaacgtggccacagtcctgcacttcaaatattgatattaatcaaatgcttttcttttattgaccaatgatattcttccatgtttttgaacaaaagccataccagctgggtgctggaataaactacaactcagccagaccatcaatcatctatcgtcctcccaccccggaatgtttgcggtggcctcattgaccatcttcacaagggtgaccacac

SEQ ID NO: 284705 - DNA, 412 bp, Zea mays
gaccaaccaacaatccctttttcctccttgaaataatacttctgaagttcaaaagcgctgctgtaccagatgggagatctgaagcaggcacaaaagcataagccagtgtaacattttcctagaaacttctatattacacacaagccacaccttgttctacttgccatgctgctgatcaggaagctaccttacatgacacaaaaccgcagttgcattcctcgcaagcatcactaggcacttccagtttgcaatgctacccctgcatagtacccctacacactacacactgcataaactacaacagtacaggtgcactgcgtcagatcagactaccagaatgaaccggccattggcctttctgacgacatggacggtcatcgtcactctcctctcgcctttcatcagttcgaag

SEQ ID NO: 284706 - DNA, 465 bp, Zea mays
tcgcgaccttgtgctcgaacggcacggacgggtacagcctcaagcattcgctcagggcggcgtgcagatacaccaggccgctgccgagctcgtccgcgtcgaaggtcaccatgccgctggccgcgtctgcagcagcaccgccggctctccgccgtgaagcgacgatgggcgccagttcgtccagtagtttctgctccacgcgagggttcttggagacgaggtagaagaaccacgacagcgccgcgcccgtggtgtcccgcccggcgagcaggaggttcaccgtcgtgtcccgtaagaacacgtcgtcgtcgtcgtcattttcactcgagtcgtcctcgtggcagatgaaggatgacagcaagtcgaacgagctgcagacgccctcgccttctccttctctgagcttgtcggccctgcgtttcgcgacggtggtggcgacgaagcagtcgatcgtcctccgagccg

SEQ ID NO: 284707 - DNA, 478 bp, Zea mays
aaaaaaaagaatagctgcactatttctttcgacaatgtgtgcttgatcttgacatgaataacacactagacacttttttcctgaacggaatagcatgagcacttcgttcgacgtaccatttacatctatttcacatgtccggatcaaggtatacaagccatacaaaacacctagaatcaagaaaagaaaaaggctatatcagacagtagtgttagcagtaaagtacgagttgatggtctatgccaggagtcagggcactgaccgatccatctcacaatgcatctgcacccttaccacctctcttgctaaccacctcgcagagtcggcaaggcagcgtgtcaaggctcatctcgcgtgccctgccgaagttacccaacgcaccacaacgccttcacgcgtggtattcagcgtaggctacggggtcatttgccagcgtcttcacatacgatgccagctttctgagtgaactgaatttgga

SEQ ID NO: 284708 - DNA, 445 bp, Zea mays
ggagaaaaaataaacatgaccttgagagtgacgaccgtggtactggctaggggggtccttctcggagttgaaaataatgttttcctgattttatttaagggtactggccagtagggaacaaaatccaggcctttcaatcccgcgacacacagacgacctgcttgccaacatttttaccgctgaacagaccgacgaaggaagccggcccactctccagcccaacgctcatgtcttccacatacacgatcttcccgtctctgtaatgcctggtgatgtcatcgacgaactgcgggaacaggtgcacgtaatcgctctggatgaaccccttcatctctatcctcttgcttatcaaggagaacaggttgtggatcccggcaggggcagtcaccccgtgctgggaaaccatgccacataccgcaatgcggccatgtactcgcatgttgag

SEQ ID NO: 284709 - DNA, 500 bp, Zea mays
ggttgcttaagcgcttttcttgaagcctaagcaaaggataattattttaaaaaatatatcactgggttctgcttgtttgtacagatgattatcatgacagttgtctacgcaaaataataggggtactgtatttcaaatccagataatacttccaacttgacaacggcagcaatttaccctgccaacaagagcccctcaatagaaaatatttctcagaatgttgctatcacgggatcccttttccatcatcagaacaagacatctgttgaggctaaacaaacgccaaatcgtccatgaatccttacaaaaaacaccgccaaaaaaactcatccatgtatgcaggtttgttgaacctttcaagtaggatttggtccatcgtgccaaagtaaaaatatcagagtcctcttctgtagagccctttgtccatcctcatttcccagaactaaaaatcccaagccttttaggcgagtcggtattaccaggattaccatccaacttcg

SEQ ID NO: 284710 - DNA, 620 bp, Zea mays
ttccttttttttttttttttttttacgcaaattctgaacatctcttgaccaaactgcatcggatacgtccgatgtccagaacgatgtattcttcgcaacaggcaccaaaatctcgtcaagcagcagctatacaattctagacagacaaaagaaacgcgaggtatgcctgccgcggcaatctgctgcgcacggtcgtcgggccgccggctacatcaagtaaccttcgacgctaccgtcgtccgaggggcgaccgtgctcgctcatgctccccctcagcctgtagaagctgcccctccccttggtgcgcagcgggccggaccagtcgtacatcgccagggactcgatcttgtccagcaccgcgctcgacgccgaccgtggcctgcgctcgtcggcgccggcagggtccgagccgtatcccagggggagcgccgggcccggagtggccggcgggtcgtcgttccacgagctcctgctgacgtcgttccacggggactcctctgttgcgccgcccacgaaggagccgctgcaggtctcgtcgccgcctccgccgctgtggatcagcttcagcgcctgcacgacctcgcccatgaacggccgagagcgacgcccggacgcgtggg

SEQ ID NO: 284711 - DNA, 460 bp, Zea mays
ctggactaccaaccattattaaacgataacagagcagcacgacaagcaacagagtacgtaccctagttccattcttcgtgttgtagtctgttccataaactatgagctgaggtaacctcccatcagcgacttgctgcacgcacgggttgttcgggacagtatgcgcctaaagacgccaacccaactggaaaacgtaaaatagaaaacgccctatgacactacgccatcactcctcatcagcttcacttgtccagcgctcagctctgaacatgccccccacccagacacacacagaccttcagatactgtttgtaccgaaacagcggcattaggataccgcttaaccatatagtaatcttcccgagtcgacgagtccaccgatagattggaccatctgatcaacacttgtggcaaatggctgaaacctcctgcacctccttcttgatattatcatcatccc

SEQ ID NO: 284712 - DNA, 594 bp, Zea mays
gagacgcaaactgttaaatctttaatatgacccttttaatcgacaacctgaatagacagcatgtaaatatttggcaatacgcacctcttggttgggatcccaatatcccataccgatctcaactatttctaatacaaattggacgacaacagtaataaatatttgaatttcttcaaccaaatggactgctcagccgtttaacaagtcatctgcatggactggtggcatagccaaactgacaacattagtgggacaacaatatagacatatgttgtacagaacacatcgaagagctacgtagtcaaagatgtcatcacaatttgctggatggcaccccaacaccagatgccctaaccttcttctcgacaactttagagagtgccttcacttcctccttgggaatatggcgagggcgactcaaccaaagacctccgtcaacaataattatagccccatttacatattttcctgcatcagaagctagatagagtgcggccattgctatgtcccatttctccccaagcttaaataatggcatcgtttctcgtttccccttattgcccatttcttcaggtgcaagtttcctcattcctg

SEQ ID NO: 284713 - DNA, 287 bp, Zea mays
ggtgcatattattatatatttatatacagctatttcaatcatccattacaagaaaaaaattgttccacgggtgatcgtagcacacgtggtcccatccagatgtggaggcggtttatgttcaggaaactagacaaatattcgcagcaaaccaaagtttcttcgaagtgaccaaacaaaaactattgaccaccatgagattcgtggtactgctgctcagtagtagcttacttgaagctcaacaatcacccttgacctgtacaaagaggttctcttcccctgaggtatgg

SEQ ID NO: 284714 - DNA, 531 bp, Zea mays
atatttttttttttttttttttttaaaatcacaataggcaaatattacacgtcacgcatgtgttctcaaacaattcaacaaatttaaatgtatttccaacatcaagtgtcgtaggccacttgtgaggaaaacaaaaaagagcatttcggccaccataatagtttttaacctcattttccgacttacacatgtgactacctttctggtggatgttcaacgaagggttaatatctgaagtgaagatgttctgagactgcaacgcatcggtttctactgtacatgaactggacaaatttgtcgacaactgctagaggataggtcagacgctttcaatgtgaattattatgcttggtgtgagattcaagatatgagattgcaaggtcagcagccttgcttcctgaagctataacacttccaacagcaagcccatccttgttatttcctgccgtagaagaaccctggaaggtttttctccatcttttctatagcttccaatacagaactataatcatggccatacaaaggaaaagc

SEQ ID NO: 284715 - DNA, 413 bp, Zea mays
cccccaggactagggttttaataggacaaactttttgcgtgacagaaaaacatggttttcatgcagctgcacatagatgggacgaaagcgcgatgtacgaacttgttcgagatacaagtgcccccctagatcctcaagcacaaggaacatgacaccgtacagctccggtgatatataaaatgacctgacctacaacacaaaaaatcagctatatatgccccagaataggagagagaatcgccagacaaggggtaagaacagatatcttggccatcaggactatttggaccatgcaacggcatcaatttcggattgggcactccggtacagctcgagcctctttgcaaggttagttctgcgttccatgactgctgggtcttcgtcaagaagtttggaaagctgcttcatctctc

SEQ ID NO: 284716 - DNA, 481 bp, Zea mays
gttaaaagttgtccatggaattcagatcctaatgcaagaggatggaattcagttcctaatgcaagaggatgtcgtttgactgaaaaacgcgtagtatgcaacatttttgttctgcttagcaccgaactaatcccatagcaccaagattacactgggggttgggaaataacattacagctcagaaccgttttgatacaacgctcgttctaaaatgctccttagtctacactgtcctggtgagtcttttctgtctggcacagtgaacaaaggtatgggcgccaaaggagcttgttagaagtgagccagactgtatactatagtccacgaaagcaggaaaagggtgaatgaagcgaaaagaccctcctgaagaagcgccccatggcctccatattccttctgggcaaccttcagcaagtaggtgtagtaccaatagatgatgccaggccagatggccataaatttgcaagggggatgcattata

SEQ ID NO: 284717 - DNA, 502 bp, Zea mays
attctattacaccaaaccaggttgactagtacaaggacagaatgcaaatatcagttgacactttttgggattcaggcccacaaaatctggcaagaaaatgatgtccaagaatcgtgtcagagaaaatacagggaatcttacgtatccgaagctttgttccttcctatctatggtaaacacaacatgctactaagtgcagcgatacatccctatggagttcgcagcgcagaatgtataacatgaatacatgatggcgaagtagccagcactttctatcctcaggttctatctgtctcgaactctcttcgaatggtttctagcaacatctcattccatgtgtctactggtcctggcatgcaccagtgcaaacaatcctgaggtggaggttttccatctggccctctctgggtcttcttgtttgggtcaggacttctgtacgggccaggatgaccgtcagccctgaaggcaaagggttcagtgatatccatcaatttcaacctag

SEQ ID NO: 284718 - DNA, 513 bp, Zea mays
ggggataaaatactacgggatactcaaaaaccatggtaaacaggccttcagttgttatctgctgatctttacatcggaccacagttgttagctgacaatctcctgtgttttgcaatttgttacccatcgcagttctagttatctggggagtttttgcagatggtctgctgtgactttttcaactttcagtcgccaacgctcgacaaatacacacacacacacacacacacgatgctttgttgaggctacaaaattggtaacacagctcactgggctacaaaattgggtctctggacactaaactaacactagggtcgactagcttgaaaaaatggccaccttcatgaccttgaaaaaatgtcagggagcagtaacacagcaacatctggaacctatctgtccagttacctcgccttgcatatgcagccatggtgccattgatctcagacacggagacttcgtcccgttacaccgaaacaagtccattgtttcctatgttattatgccaccaat

SEQ ID NO: 284719 - DNA, 404 bp, Zea mays
gtcggcgctgtgctccaccctccgcagcccggtgccgttcgggtgcaccatgtagatggcgaagctgccgccgcccgggttgtgccggtccgaggcgaacgcgatccactcgccgtcgggggaccagttgcacatggtgtcggaccaaggacccttggtgaggcgccggatgccgccggcctcgccgtcctccgcgttcatgatgtagaggttcttgtgcccggaccgcccggaccggaacaccacccacttgccgtcgggcgaaggggacgggaacgcgttgttctcgccgcccacggtgagcttcttgatggagacgctggggtcgtcgcgcgttcgccgtcgccgagcgacacggcgaccacgttcacctcggtgctctcgctggcgaagtctgggccgac

SEQ ID NO: 284720 - DNA, 367 bp, Zea mays
gatgcaaagttcatctcaaagaaatacataggagatgaaattggtatttcaaggtactcgaacaaacacacagattgagatacatacaagtacaacaatatcaggtttaagggaatggaacaagtacaacaagatcaagtttaagggaatggaaccaattctggaaagtaagttgaacctcagggtaccaacgacagccatgacacccgcgtaagcctaatcccttgcagttgcagattgaggatctttccttggtggcttgtagacactgaagtcaccaaaatcccgccgtccactgtggttaatattccagccagaaggtaaataacgggggtgaacagcttcaacaaagatctgcctccacctt

SEQ ID NO: 284721 - DNA, 469 bp, Zea mays
gcaggaacacctattcagcctcccttgtaatctaagggctctcagttcttacatggtgaaaaaaaaatccccaacacaaattctttctaagcaaaagaaaagggttgcttcaaggtaaatctatgcttaccgttgagttccatgttttccaatctaaacaacagtagcactaggagacgtaatcatgctagtgtttgcagaagtttaacaggcggccttttcaatttcggttactagggaatactgatgctacccagagcactatcccctgcaacctgcacagttcagttcacccctgaatgtacaaaacgccatcagtccatgctccagcatcatctgcataggatcatttcttgcctgactccagcccgagctactgcggctgcgaggaagagtgtgcataccctgcaggatcagacggaagggaaaaacttgttgaggttgaagggcagccagtagaactcctcgc

SEQ ID NO: 284722 - DNA, 402 bp, Zea mays
ttttttttttttttttttttttttaacctcaggaatattggcactttaaatttacaagaacccgttagcgctttaaacatcacgggtacacaagttacaagaatttccaagcactttacccgccacttgttccatgaatgctttcagcactacataaaactagtaattaactgctgcctaacaagggtggtcagttagactggacacactagccaatttgcatcccatcctaaaggaaccaaagaacccagagaaaggctcacattattatctccactctagcctgccaacactccatcatcagggatttcttagagactgacaaatagcgaagaaactcgctagatgtactaagctagtatgcatcgacttctctaaaaaaatctgaagttaattactctt

SEQ ID NO: 284723 - DNA, 392 bp, Zea mays
aaaaaaactaaccatccttggttgatatgtgcatatacataaattcttattaaagggggaaaaatacgagcagcatacaatgagaagtacaatattcaagtgtaaaaggctagagatcaacagtagtttttacagtatatgcacagctctaggtacctcttttccatctattgaagattcagcttcacttgtgtttgacaatacagcataacagtgtctatcgtgaccatcctctctcaaataagatggaacaccgctcctacacctagtaccttctgtgtgcatcctgagaagctgaatctttctcactgctgaaagcatgtgcatgttcttaagcttctccagcacaagatcaaaggtcgcctgctgtggagtaaagcccttcagcacca

SEQ ID NO: 284724 - DNA, 342 bp, Zea mays
cttgcagactcccagaatagatgccaaatagtacgggttatacagcacgaagcgattacaaaatggacgcgagttacgtgaactgacagcagaaagaactgggacaaaatgaaagccgcaacccgcaagcataacatgttcagcacacatgcatttcgtgtttagcagactctaacgagtacaaaagcttaggagcttgtgcgaccaaaccattattcaaatcactcttttttttcctcaccaaaaacagatcccatcacacaagctgtccccttgtaaaactagaaccctctgcttcaatctcaaatcagctgcaaaatgcacccgccattttacaaccat

SEQ ID NO: 284725 - DNA, 511 bp, Zea mays
ggggctaaaatctcatctttattcaattttaaataagaagaggattttagccctgcaatccccataagggactcagattcttttaccactgatcatggaccacatacacaactgagcaacacagagccccgtttgccatctcctttattggcaccgaaataaaagacggcaattattgctaaacaagaccatgtcatggtacaacctaacacagaccccaaatgttcaaggactttgcgtgctagacacaagattgttacgaatatgcacatctaattctggtgtattatataagctagaccaagcctccgtctcctctcatcaagtctgcatgcatcctcacatctcaatatggtgcgcgtggctctggacatctccttggctgtccagaggcatgtactgggccatgatggcgcggatctccgagtccatgtacctccggatcctgtacttgtacaccgcgtaccctgcaattcctgctgcgacgaggccgaagacgacgacccacagg

SEQ ID NO: 284726 - DNA, 427 bp, Zea mays
tggcagcggcctccttggtgggcggcatagggctcgggggcgggggctccggccggaggctgccgccgccgtgctggacgcacgaggagaccctcgcgctcatcgaggcgtaccgcgacaggtgggaggcgctgcggaagggcaacctgcgcgccgcggactgggacgacgtggccaacgccgtcaccgcgcgctgcgggcggttccccaccgccacgcccaagtccggcgtgcagtgccgccacaaggtcgagaagcttcggaagcgataccgcgctgagcggtcgcgctccgcggggcggtccaaggggcccaagtggccgttcttcccgctcctccacgacctcgccggcggcggcgtgccggacccgagcccgaacgccatcgtcaagatcaagaccaagggccctgccccgccggcatcccc

SEQ ID NO: 284727 - DNA, 384 bp, Zea mays
ttcttatatgccagcccagccttagttctaaaatacacacaaccaataccaactaggatacgaataagcaaatcaattagacaatcaatatacactgattatcagtgattgatttgatcagctaaaacaaaaacaaaaaaaatctcattccgctctgatgaacggggaggagctcatctcagtcgtgctgtagaatgattcctcctggtagcagttgtcatccttctcctcctcccacttgagaacctccctaatgtacttgaatgcttcgcccacagtctggcgctcacgggcacgggcctgccacacgaaaagcttccggttcgtctgcgcagagtacaggtccttgaacttcatggccacgtagtagtatgcctgatgagc

SEQ ID NO: 284728 - DNA, 576 bp, Zea mays
gtgtcaagccagacttaatcatagcatactgctttgtagagtgcacggcaaacacaatgcccgaggaacctcggttccacgaggacactacaacggttacatttagctgaaggacaccagagtggttagtttcgcttaggacactagggaggttacatttagcggaaggatccatggtgagcacgctacactactttcatgctctcggcaaagcttcctgggttgatcgttatgctcttggtgcaattgtccgtcttgtaaataccaaccaacctgtcggctagttcaaacatgttgttcctcagacttataatgatgaattgcgcatctttggttctatctttcacatagtgtcccacaattgatacgttcttaaagtccaacgcagcatcaatctcatccataacatataaaggagtaggtttatagtggtgaagagcaaacaccaaagccagcgaactatgtgtcttctcaccaccagataaattggcaatatttttccagcttttcagtgtgaggcctccaaagaaaagctggaaacaacaccttcagaaggtgttgttttcagaaggtgtt

SEQ ID NO: 284729 - DNA, 477 bp, Zea mays
ggggctaaaatcttctctctattcaaaactaaatagaaaatagaaaataaatttaagtcacaaaaaggacaagtatttgcagttcacatcatatctatgacactatgaccagttaagttctaacactgcttcagcccagcccctaaaagcgaactgctatatcagagggcagctctattaagcaacaattccagcgccactttcttgcgcctcaggggatcaatgcaaagtctaactactgcacacacgacacaaccaggaagagttaaaacaactcggaccaaacaaaagcccccatgcctattctacaacctttttttttctaatcgtgaccattggtcctgctgcttctcttgcagcagggccagtcacgtataagctcgacaccaggtaattatggctaatgtacaaaatttagcacgaggtgctgccttttataagcccgccccgatggatgtcatgccaccatcgagtcat

SEQ ID NO: 284730 - DNA, 351 bp, Zea mays
gactcgcaacagtgactttctatttaccacttgccacaatttcccaattgaaggaaaacaaaaaaaaactttgcaggggccaggggttttacctaagcccttccatttccccctgttacaccttagggcttgttcggttagctctcaatccatgtggattgagggggattggatgggtttgaatcccacacaaggcaaactttttaagaattttttccaatcccatccaatccatgggttttgggaataaccgaacagggccttaggatacaaatttcctatttgagcaagtccagtccaaatggaacagcaaacaaacagagaacactactagctcaaggggctagaaat

SEQ ID NO: 284731 - DNA, 503 bp, Zea mays
gcacagctaaaaattactaatatattagaagcagtcttctcactaaggtaatgacatatcatagctcgccaagtactttacaacacgacagaacaaaattttttaattgaaccagacttgcaggaagaaggggtactcccggtacagcacgagcgcgagcttatagaggacacagttcccttacaatcgagcaaaataaatttagagaactgcatgaaacctgagacgttgccatggagtttctaggcccacttggagaaccctaggtctctatccccagtgtcgtcctcaccactgatctcgtgagagaagaaggggttgcgttgggagccgacgagctcgacgtggatgaacgtgtagtacaggcttatattaagagccctgcaagaagggctgaccttgtctcacttgtacaacaaccctccttatattttaacgaatcccattgaacttgattcaatagctagcatggcgtacttcatacattaagagccctacaagaa

SEQ ID NO: 284732 - DNA, 346 bp, Zea mays
ggaactcctcttcttatttatacgtggggggaattactcaacaagaaatcgtaaagtcgccctactgcacagctagctaatcgctaaaactctactactccacaagataatcacaatgacacacacttcagttcagatcccagaacggcgcgatactcacacatgtctccaccgatctgctactgctaccactaaactctaccaacccctcgtgtctaactctaacctggattacgcgcctccaacacgcgcgacgatcacagccaggcgactaggccagcaacgcggcggtgagggccgcgccagcgccggccacccttcacacgcctggcccgcccgcgccacc

SEQ ID NO: 284733 - DNA, 574 bp, Zea mays
catcaaaacttgttcttatccaaaaaataccattggaatttttgttacaattctagagaacatcgagagagacagttggttcgatagattgaagccatggaaacaattaacaggtattgaagtcaatgctttcatgagttaacagaagcgaatagaaggcaacacaggtacatgccacaccatgctgcaatgctttacaagatctaacagaagaaatcaaaagatagtcgaaaactgcggtataagcaaacaacattccacttccaaatctgtcatcatctcttttatgtatcagtatattcatctttaataacaggtatttagtgacatcgcatgaaagttagagattgctgagaccaaggaactctgtaaagctcggatacttgggctgccatccaagctttgcccgagttttggagttgtccatcctcttccccagcgaaccatcagtcccagtgaagccatgaaactgtgtgtcaaatttcctgcttctgttgacacggtccatgatctctagcctggacagaggctcgttgtcacaacccacaaagatgcagctccgtaatctcttttt

SEQ ID NO: 284734 - DNA, 403 bp, Zea mays
ttttataattttttttttttttgagtatcacaagagcccaagcatgctttattatgagtctgcatgttccaccacaactttgtaggcacagccgtacagagccggtagcatgcggccaagggccaactacaacacacggttcaagaacaagaacgaactacttgttacaaaggtggcacaaggataacgccataatggcgttcgagtccactgatgctgacactgcaataggagtgccagcttatatccaacaaggaacagatccacagggctgtatcgccctgttgattttatcacgaattaatactactgtttccaggttactagctctcgaactcatggctttcggatcaggtggtgggggaaaaaaagccaagagcattgagtagccgagagcttatcg

SEQ ID NO: 284735 - DNA, 406 bp, Zea mays
agcttagttatgttttgcttttcatctcttggtcgaaagagatagatagtagtacatagttcatagttgcaaactcaaaactctctcatctgatctgtacaaatccttccttcgtccaggcccaaccaaccgacgtgtgtaaattactaagaacctgctattcgtaacaaagtttgacaaatcccactttataatgtgaaacaaaacacacatgcctagaattaattaatggggtataccaagttttaattagcagccaaccaaataggaaggtaggtccttgtcaagatgccaaggcaagctccatagtcgtcgttagggctcccggcgtcccaatcgatacgccatcctttcaaggagatccttcctatccgggggagaaaccataacggtaatggtccccttc

SEQ ID NO: 284736 - DNA, 735 bp, Zea mays
aaaaacagagtaaacggtagctcagcgcagcattttatggaatgatctttttgttcacaatgtctatggaggaatcttcacatggatgactaggttgttacaccatttggatgttggagtacttgctctgatatattacatcgactagatacacatgcttctaaacatacagctgaatcaactacatctcgacaacaaataacagatacatcaggatataattgggggattatacatgtcattagaaaacctatgacctattgctatatatgatgacacaaatgttttaactaaattgacacctaaaatgcttaagttagtactttacagtaaacagttgtgacgaaaccaaaagacagccaccagtcctagactcctagctacatcaaagagtaccccttcatggtatcaacggctcagctgctctgaatcattcatgatctgtctccagtcagaaatacacaagctgctctgaagcattcatgatcagtctccagtcagaaatacacaagcgttattgatttttacaggttaccactgctaataagagctcagctgttccaagttattttagagcaaccatatcaatctgactcttcacaggtgctaccggatgattgaatggtctgcctcttcaattaacagaatgtacatcaaacttgcatgtcaatggctggcaacatataaccatatatagcactacagttgaagcctacggaggatctcgcactgaag

SEQ ID NO: 284737 - DNA, 399 bp, Zea mays
aaaaaacagtggcagattatcattgctctgaaacggcggagaagacacttttgagtgctatggacagacggtgcccaaagtcgacacgcttccccagaagcagagagctacacagaactaccgaagtacttgtacagaaggactacctgcacctgacgcgaaaaaaagcatgagatccctaagctgtcaataaaacagagttcatgtacaccaacggacgtgtcagcttcgcaaagagcacttcttttgagaatgcccaagaagatggcatcggccacactggacgatccgcttcggccgcttcatgctctcgatctttagaatcttcatcttgggtcggccaggaggcctccggatattgggcgggccaagcaccacatcggccttgctgaccgcacc

SEQ ID NO: 284738 - DNA, 831 bp, Zea mays
aagacaacactctgcaaagtgccagaactatccgtagatcaacatacaagcagagtatcatgccacttataaacagaaaaatcagtgctacaaacatggtaacatattacaacaatatgcacagaacaaattaacaagaacaaaggggaacaacatgagctgaatgaaataatgaactttttttctctctagatctcgaccctgtatacagaaggaatttgtcatatgaatatgatacagaagcgttgcctatgttagcatactgatcctaccagacatatcaagcatgcaacgatcgcggcagcaatcaggcaacaatgctggagacctatcctcatctagaaccagtgagctttctcctggcatgcaacgatcgcagcagcaaaatggaaatgcccatgcatgtacatatatacggaaagatggagctggctaaagcaaggactgcaacgtcaaaacacagcagacagcttcgatctaaaaaagaaaatcctgcaaagttcataacactgagggctacagcagcctttcttccacctgacatcatgagcctttaatcacctatcatgaatgtgtctcgatccaggtcacaacatggtagattcgcacatcctccgctgacagcaatgctttattgtgaccacccccaccaaaggttgcaggaatctaatgcacaagcaactgatcttcagaacatgcatctgcaccttgctgaatcttggactgttcagagctcttcatcaatgttccatgctgtaccagagttattgatagcaacactacttagacttctctcctaccattagaagcattgcctcctggatctgaccg

SEQ ID NO: 284739 - DNA, 502 bp, Zea mays
gatcggcgccaacacaatcaaagcaattacaattatctttgttattttcacaactcaactcacaacactcacccaacaaaaccaactgtaaaaatcgatgcaaccattaaagggagacacagagacagatgatccagaccttcaattggactggagttcaggtcaaaaacaatgtcgctaagctacaaggcgatccaagttaatttacatcatttttatccatgcaatatgtcagtacacagcagcctcttggacctcttcggcttcatcaactaccagctcgtccttgaacaggaccttcaggtgcggtagaaccttgggcacaaccggcagatccgcgaggtttacgctcatcaggtcaaaggcgatgcaggtcttctccatatcaacctcatcgataactgggatttttgggtatcgctggctgaagtgggtcagaattatccggtacgctccagcttgatgtgccgacttctatggcttccttggttgtactatggtt

SEQ ID NO: 284740 - DNA, 403 bp, Zea mays
gccgccttcgtaactgggggcactttattttgagaacggacgtccaattacaaaaaacacaagctgtctaataaagatgcatgataaacaaacagagggatgctgcattatgcgtgcgtggacacgactgacgacacaagctttaggatggatgatgcatgcatgcatcgtacatatatagagtactatatagaagccaagaaacatgtaacgtgcaaagcaggaagctagtgcgtgagaataggaccggagaatttagaagcagcggacacgtgtgtgcaagcagtcatgcacgctaagcttcacgttcacgatcacgggtgaaggcagccaccgccgccaccgagcccactgccaccgccaaggccaccgctgccgcccagacccgatcctgagccgccac

SEQ ID NO: 284741 - DNA, 430 bp, Zea mays
ggcgaagaaaactcaacacttaacatacacatgcattgcaaaatcgctgtccggagggcaattacaagaggatatcaggatatgcacaggcctactttacaaagctagctatgactcattttacaacaaacagcagctacaagatccgcgtatgtacagctgcaggttttcctccactgctcgccaggtatttggtacacaagggaactgctggttactggttagagctaatgtaacggaactttcagcgtcaatgtacaactcatgtactggacacttccttggtttttatgttctccgaaggctccaatcaaactcttgttatcgattgttcgctctccatattttgttcagcttacattggtttgtttctttgctttttttgagctcggatttgcgccgagttagcttgttaattgctcagtgacct

SEQ ID NO: 284742 - DNA, 469 bp, Zea mays
ataaaaaaaaaactgaagtaacactcatatgagctcagtcggtatgatgaactgaaggaaagaaccctcgaatgaataatacatcggcactgcaataatacaccaggaaagaacaagcaaattccccatacgataccagcacagccgtgcaacccttccaaacgtgaactacaggcaccaaaaccttctacagaaccaaaccctaaataagacatgatgttccctgctctgaaacattgcgtgcgcgatacacaaagagaacaatcacagtcaaactagtcctcgtccatcccgccaccaggctgggcatctcttcttggacctcctgccggcttcgccataacagacactggtcaacccgcagcacggtgcatgcggcatcgaaagaatattttagggcaaagaacctgtacagcaaaatcagcgaagtgagaaatctgccaagaggtcataacaagcaacttaaact

SEQ ID NO: 284743 - DNA, 724 bp, Zea mays
  unsure (1)..(724): unsure at all n locations
gggctgattgaaagaacccttttttgaataatacattttgggctgtttttaattacactcatggaaagaacaagctatattccccatacgataccagtacagtcgtgcaacctttccaaacgtgaactccaggcacccaaaccttctacagaaccaaaccccaagataagacatgatgatctctgctctgaaacctcacatacgtgatacaaagaaaacaactataatcaaactaatcctcgtccatcccgccaccaggctgggcatctcttcttggacctcctgccggctttgccataatgatctggtcaacccgcagcaccgtgcaagcagcatcggcagagtattttagggcaaagaactttgtgacataaaggtcccatattttcaaggtcgtgatgtccttgcaggcaccttcctccaggtcaatgccaactttcacattgccactagcatgctcagcataaagagaggatattacatccattgcgctaagtccggcattttctgccagggttcttggaaccatttcaaagctttcagcaaatttcgcaacagcatactggtccaaccctgtttccttcaaagagaactccttcaatctctttgccagctctatttctgttgcagcagcaccaggaattatcctactgtccctgcacattgactagaataaacaaggacagtcacaactcgaatagattagcaaaacagacntagtgcg

SEQ ID NO: 284744 - DNA, 383 bp, Zea mays
acaataaataaatataaataaaaatacgcatggtttattacacaatttctcgcaacacgctcatgatcccatccgggggccatcaaaacgaaacgaagatggacgaatcacgagcgcgagagggcgataaattcatattacaaacaggtgtgggtgggtagagggagcgagagagacagcacacagcagcagcgagagatcactgcatcctctgtagtcccacaaaaccatacccaacagtggggactgttaccgaataccgacccgcacccaccggggtggggttgcatgggcagccagccaaccaccggccagttatgagacgccgccgccgccgccaacttaacaggaggtggtctgtctccctcaggcggttgggggga

SEQ ID NO: 284745 - DNA, 399 bp, Zea mays
gactacaaaaacgtggttcaatttcatgtcagtgcttgttcgttttgttctcaatccatttggattggatgagttacaatcccaaacaagttaaaacatttccaatccaaataggaatataggatagaaataaccgaacaaggccttacagtttcacatcctttagaagccttgcagccatagccccacatcttctgatttcccaatcatccaggctgccgctcttagcttctggtgacgagccggaacaagattcgctcttcagtccattgtcttcgtcttcccccagatttgaaacaacctcttcgtcgtcgttcccattatcgtcggtagcctcaacctcagggatcaatggtgccttcaggtccatcatgtagagatgtctgtttgctcgcgtcg

SEQ ID NO: 284746 - DNA, 511 bp, Zea mays
gcggatcagttcccatctctgacactgtatgtagatagatgatactgatgcggatgagaaacaagagtaaaaaaaaaggcgagtgaaggtttacatcatcctaaaaccccgactcaaacagatcgtcaaattgtacaatcatatgaaccaccggattttctcctttctttttttcccctcattgttgcgatcatggagtaccaccatttgatccggagcttcagcttcctcacccatcaatctctcgaggaaccaaacccatccatccatccattccgtcctacgcggccccgttgcacgaggtcgacggcccgggcccggccgccgcgcccgtcagccgctgcagctgcagcatccgcgcgtagcacccgtcgggatggtgcttgagcaggtgcgagtgcgacccctgctccgccaccttgccgtcgtcgatgaccgcgatggtgtgcgcgccgcgcaccgtggccagccggtgcgccaccacgatggtggtgcgcccggaccccgcgcg

SEQ ID NO: 284747 - DNA, 430 bp, Zea mays
gtccagccaaaactatgaaccatcaaattacagtcgtataagtgagtcagcagaatccggcaaaaacgctattcaactgaaactatgccttagtcctacttgttttacagcagtaacatcagagtcaatgactggagagaaaacagtgaagttgaaggcacacattcactgctactccattagctcataaaagagatacaatagcgagcatagcagcaggagcaaggcccattcaatgttccaatctacagccatcccaattctgatgttcgtcagatctttccttgcggaaaattaactgtacaggcgcaaaaaggggtaactggaattttacttgagatgtaaaggtagctgcaatctatgtcacctccaatcatgcttccagcttgatatcgatgcattcagcgcttggagccaaacacattctgat

SEQ ID NO: 284748 - DNA, 391 bp, Zea mays
ccatttaaaatcaaaaccaacatcaaaactttagccgatgttggaaatgtttacatgaatgcgagcaccttctgagaccaatgatccttttagattacaaaaaacaacaaagctttttaatgatgtgatgatgacaattaaaccgaaaatggtggcccaccacaaaaatggaagtatgcaactatttgccatcacgtattcgggggcccaaggatagtgcctaaatggatcaaaggcactgtaacgagcaccaagcattgggccacggtcggaagatgcttaaaactccctgcacgaccaatagacctggaaacattgaagccacatcctatctcaaaattccagtacccaagggaggtatgcacttgcctatgattcctgtcaattccct

SEQ ID NO: 284749 - DNA, 427 bp, Zea mays
ttttcttcttttcttttgaagtcagaaccaatcgggaaacgtgctatacattagtaatactacaatacaaggataacactcactactggcaaggatacataacacttagcagcttaacagttaagacctctgtacaagcgcacaatgatcttctaaagctgcttccctaacataaataagccaaaaggaaattagtgcagtactctacaaacagttctgccagctcataccaaacctaccatctgatgacgaactccacacaaccacaagtactaatccaacaacccaccatcaccgcgggcagctaattgtacatgacagaaacttcccttcaaacccaaataagctctcaggaccgttcagacaacctacctgctcagacggacctacaaaatcagaagagcacccgcagacaaaatcatagttt

SEQ ID NO: 284750 - DNA, 553 bp, Zea mays
catacaagcacttgattatattttggcactattggtatcttccatgcctgcattgtttctttacaagaactaattgggaacagattttcagacgcgcgtgacaaacgtcggtacatctccgtttgggatttcatacgagcagttaattatattttctgtacatacggttgctttcatgcctacagtgttctttacaagcccacagatcggtaaactagagagcaacacacatgacgatttcacaaatctggctgcttttgacggcaaccactagactaccggtttgaatctccacgcacgactttggaaagaggcatgctggtgggctacaattctcaaagggctcaaaaaaacatgataatatcgaagccacgttagcatggaaaaacaggtaagcatcgtcaactgctttgataataacatcactagaaaaaccatgtgaataacagaataaaaacaaagggaactatgcagatgagatggtgaaattgataaagaaatgatgcatttgtcagcttattgtgattccaaagaatctttatgttgaatactc

SEQ ID NO: 284751 - DNA, 532 bp, Zea mays
agaggatgagatagaagatctgctaaagctagccttataaagtgaaatggtaacaatccttactaattataatataaagcgcgagtttcgtcttgtgtcgtcttactccctgcgcacgcatataacgtgcaactactaggagtacttgtcactaaccagtgcagcttatgttgttttttgttgtataaagaaaacatatatcatatatagaaaccatagtgtcggataactaactagtatcatctaatgagcacgcagagtgaattcatttttacaagcaagcagagtgaattcatttttacaagactaggttacactgggactcttgctatccggagcaccatcaccttgcacaaagcagttagcgcccagttatcttgaccatccatgcaccacccaagtataaaccaagcatgggaccagccaggagcatttgtgtcaacgggtccgtcgaaggtgtaagcacagcagcagcaacaacagcaccaacaacaacatatctccagatcgaaagcatttggtcactagaaac

SEQ ID NO: 284752 - DNA, 390 bp, Zea mays
agctagacaacaacaacaatggggggggggtggtgcaagatacatgtatacatatatatatgggcatagcaacacgacgccagtcacgctcacgccaccccgaaacagcttttatcttatcttgtttccgagcacggtgacggacactggatcaaacacaggaacatccatatgcacgaacaattagatccaatataaaggtcgggtccgggcgtccggccaatcacactgcatgcacggacacggaccggccgttgcacatatgatttggtcgacagcgaccggacgacgactacgggcgccagccgtacacccagccagcctgctccctctggccgccgcagaactgcaccatcacgtgggtcgcccggatgccgaggcacagcaccg

SEQ ID NO: 284753 - DNA, 576 bp, Zea mays
gatgcttgacggctcatgagtagtagtagtagggtcgttggcgtcgtcctccgaagcaggttctgcgtcacgacccagcacaccgtaaccaacagcacacatgagctccgactctgggctaccagcagcagcaggcatcaccggcgccagcgcttcttctccatccacctgagcaagccgtgagctcagcagctcctttgccgacggtctcgcctcaccagtaacaaccaaaggggtcgcaggaggtaacagagcatcgctcaggctcagccgctcacgcccgggtccaaccgccaggggctgccctacgccggcctccgaaacggactgcaccagcacttgctccatgcggcacttgaacagcgaggtggcctcgctcatggagccttcttctccttcaacgacgacgtgttcctcagcaccgccgtcttcgtcttcatcttcaggtggaggacgcagtactaccgatcgcgcattgcctgcatctgcggaagctgaatcgtccgcatcatccgacgcgctgctcgacacgggcttttggacatgagaggaatctgcggcgtcgatggaaccagc

SEQ ID NO: 284754 - DNA, 649 bp, Zea mays
aaatctagaccctccaatcccctccggttttacggctcccaaattatcccttagggttaatttgcatggtagcgttttgaaacagggcttaaacaggatggagaaggcaaacaaatggtagtgtaaagatgcaacgcgccgaacatgtattcctctacagaaaaaaaaatgcgtgtctgattgatcaagaacgcatagcatctacatatgtatcatttgtttctagttctctgtgatgatgggacgcacatcggccagacgagccagcaaaggagaatcccagcataatttacacgggtgaataagcgtggtcggcagtgtggagtcccggaaaggcaagtccaccaagattctctggccactttgggagcctcggctgtgaaaccgaacaaaggtgatgcgaaaacgaagcttcctcgggcgtcgtcgccttcagtttgatttggtgccctggctctgcgaatttgcttcgtagccgctggaacccactttactttggtgacagtaacgtgcgaaaacgaagcttcctcgggtgacgtcaactgagtatgcaagtccatatgtggctcaattcaaagttagccaacaacacatctctttaacagtgacaatttacaagagtcacatgagaaggttattatgcaaaagc

SEQ ID NO: 284755 - DNA, 414 bp, Zea mays
aggaaaaaaaatacaccttacgtgagctcagctcatttgtatattgacgattcagcgcccatgtttcccacatgagtacggggggtctcggtatcttacaacaagtacactagagcaaacacaatgcacataatgaccgaagaaccaatcagccgtaaccgtaatgggacggggctactaaacttttagccccaggcttagaaaacctaactacagtttctcctcaatgcagccggaacaagttctcaatggaagggccaatggacatgacttcatcagccaggccattgttggtgaccttgacacaaccatttacatgcagaaccagacagccattgccgatggccagcaaactgtggtcacagatgtgccggcagcggttcacatgcagcactcttagcttattgcagtaca

SEQ ID NO: 284756 - DNA, 497 bp, Zea mays
caacggtgtcaacgaaggtaatattataagttatttttcattggattcagacaatcgctcgccactcaaacttctctgcttgcagtggatcttgtcacctccgtattattattattacccatagctgcggactgcaggcccactactccactaggctgcaatctacaactacaaatgacatgaccaatcgtgggtattagctgggctgggctgggcatcgtgagggctttcctttcatgcaatgtaagcgcatggggtttttcttcttcaggccgaaacgtcacgtttcgctcgcctcatcatctccttggcaatggcaagctggagctctggggcctggtgacagacctgcccctgctgcccctgcggcccttggcggccgacgacccggcggggctctggccgaggcgccgcgccggccgcctgcgcgagttggcgccggcggcgttcccgagcgccgcctgcgcgacgctgtccttggccacctcccgcgcgcg

SEQ ID NO: 284757 - DNA, 408 bp, Zea mays
atgagacaaatagacaatttacaagagcatgggcaaaaattaaaatttacaccatttacattttacaaagatacacgaacgaactctttttcttcagaacaatcactcttatagtcttatgtttgggtctgggcctttctagacaaaagggtggacatctgggggaagaacgacttctttttccgcgatttctcgccggaaacaaactgatccatactaccatttgacttgggcaacttcggatctgtgggaagttcattttcttcccggtaagagcccttctgctcgacaagcatcctcgggtggagttctcacaggactgactggatgtttgtgtagcctcgtgggctttccggcgctgcacatgttcagctctccatcttctcagctcctgctcagcaccgagct

SEQ ID NO: 284758 - DNA, 403 bp, Zea mays
  unsure (1)..(403): unsure at all n locations
ttnnttttttttttttttttttttttgcagtggatgacttcatttatcattatcatccatacaaactccacatgccaacaacaactggtaccgataaatacaaccgaatcacgaatgaagcaatgatgattgtctcggccaaggatccagcttttccctcctagtttttttccccctaggtgggaggaagctacccttttaatggctagtttgggaaactcatttttcccaatggattttcatttttccaagggaaattagtttcctcccttggaaaaatggagtaaccctaaaccttaaaacaaatgccgctatggccccattccagttcttcacatagctgttttggggttcagaaataaccgccggaaccggcagatcttacacacgctggccaacgatt

SEQ ID NO: 284759 - DNA, 317 bp, Zea mays
aaaaattgaatcttaaaaagattccacgtgtcaaatgtctggtggtaattgagacaggccaacagcacgagatggtcggcgctcggcataatgtgcgcaaagacagaccatagaggatgcacacgtgtgtgtcacgggctagcctaactcctgtacaaaaagccttcaattgcatattctaccaactgtgagaccagtaccgtaccaacgatctacaacgctggccatggtatattttccgacctacccttaaattatcctaccatcaagctattttctgcatcgccactcgccagcagcattactgcaaaaaccct

SEQ ID NO: 284760 - DNA, 382 bp, Zea mays
atatatatatgacacgaggcatatttgtttattcttattaatatttggtacgaagcacgcacacaaatccagctacgtaggtacgacgtatacgcgcgtacatacaaatgcgtgcacgtgtaatgcacgcttatatattattgggcaaatccaaatcagaattattcctgcaaaatccaaatcactagcccatgcaaatgcagagcctattccggccgatcacgggcagaaggggacttggtagttgctgttgccgccacaggcatgggtcttcatgtcgggggggttgtggtacgcgtcggggcatccagggtccgtgcacaccagccgtacgccggtgctgcaggagaaggccatggcgaggttgtagccgtcgatgacc

SEQ ID NO: 284761 - DNA, 575 bp, Zea mays
ataatcggcggccgccctttttttttttttttttgtactgtatcagcttagcatgtggggagccaagcccaatatttggcatttaccccccactgcattatttgagggggcaacaaatgcaaggagcatttgcacaaatacctgttcatacagatacagtatccacatatatcatacagaccacatgacgaccaaaggcggaaggaatcacacatcgaacaaatacagtcatttctgtgacaaattccgggcagatggccagaggcagcaatgaatgtaatcggtaccacagtacagcccctaaactacgagctggtgcagcaccagtccatacaagattcgtggtacagtcctgtgacgcaacagtagcagagtcccagtcagaccatgtacgtcataccaacacgcatgatgttcgaatgggggaccttcagggttgcagtgccggccctgcagttcctcctgaggaacgcatagaaatagttgatgacgaacttcttcgtgaagactgattccttcctcgccctcacatctccgtgtgctaggagatacgtaaacccagaggccatggcttc

SEQ ID NO: 284762 - DNA, 300 bp, Zea mays
ggggggaaaaaaaaggccatcggggttttaggcctatcgttctaacaactttttttttaaacggggaatacttgtttcaggaggggcaaggcccagcaatgggggcatcgcaggtaatattactggggttggcacaaaaactccggcttttatttttttttttaaaaagaaggggaagaagaacttctaagggaagtacccctaaagctcggggaagcaaatgcaggggttccacgtccagcccacgggagggcctgtcagggccaccctgaaaaatcggaggggcaaaagggcccccgg

SEQ ID NO: 284763 - DNA, 344 bp, Zea mays
  unsure (1)..(344): unsure at all n locations
gnatagaaaagaaattctcatttcaactttagctgtccataaaaacctgaaacttttgtacataatacccctgcaattctaggggagaactacgttgcatactagcacctacagattctatcttccgaaagatcgtgtgtgtgtgtatgttcgttgaatagcaatttgtgcatacgcacggtttcatcgatttcagatcgtcgcctccaggctccaactacctaagtcagatcagcacaaacaaaaaacgtgtcttgaagaagaacgccgccggcccgtcttacaccggcgacatggagggacggccgtgacaaggacggcccttcggaggtgtagctcctgcc

SEQ ID NO: 284764 - DNA, 527 bp, Zea mays
atgtcgaaaatactgcagaattaagcagcatactgcatactactacatagataatacacgggccgcatcaaaaagcaagctccggcatccatccaaaacatcagaaatgctatgcgcatccctcaccctgtacaaacttcatttgattatttacagccgcatagcgaaccatagctgacaacatgcccatttacagctgaagaaaccagcagagcctaccagctgtgacaagaaacaaactaatgtacataatctctcgttctctaagcttatattcgcatttaactacacaaagacttgtgttcacttatttcccatgtttctttctccttgcaacaattctcttggtatagaaaatccatcctagcacataagacaatgttctccatcctctatatgccgccttaggcttcgatatggttgcaatgaagcctttcagtgcagctccaagatcttgtgtgtcgaaggacatgctgggatctacagtgctgtaatagctttcactgaatgagggatgggcgctgcag

SEQ ID NO: 284765 - DNA, 479 bp, Zea mays
ttttcctctgtttgtttttttttttttttttttttctttttgttttttttttttttttttttttttttttgcgagaattgcaatgccaataacttcggaaataaatgtagcaggacaagtctactatcacaatgaatatatcaactggcatgtctcacatgtggtgctgccagtgccagcaaatacatacattttcttttcctccccggaactgattgatacgagcccgtgcccttttgaatgaaaacatgacatagttgaatactaatcggagggcctgtttgaacctgtccgttggggacactgaacaggtcaagatacggtctcagataaaatgcggccgtcatgcttgaagacatgactacagaatctggttcttcgtaagaaactacttacgtgcagcgatggtggtggaagagccagcgtttagcaagctggtacaagcactggtcaagttctgctggatctggatcaccacg

SEQ ID NO: 284766 - DNA, 432 bp, Zea mays
aagctgcgcgtgctgttttatccgacaacggcggcgaattcacggcggctgagttcgcgtcgtactgcgcggatgagggcgttcagcgccactactccgcgccgtacagcccgcagcagaacggcgtcgtcgagcggcgcaaccagacggttgtggggatggctcgggctctcctcaagcagaggggaatgccggctgccttctggggagaggcggtggtgacagcggtctacatcctcaaccgctcgcccaccaaggcactcaacgggatgacaccgtacgaggcttggcatgggcgcaagccggcggtctctcacctacgggtcttcggctgcctcgcgttcaccaaggagcttggccacatcggcaagctcgacgataggagcaccccgggggtgttcattggctacgcggagggctcgaaggcctacc

SEQ ID NO: 284767 - DNA, 429 bp, Zea mays
  unsure (1)..(429): unsure at all n locations
tttntttttttttttttttttttttttgagcacagcatagtttttattcttcaagcttgactaaggtaatacctcagttcacgaatattcgacacccgttgactttttttcaaaaactttgtcttattcaattcaaaccaccgtttccagcatggtaaataaataattcaaaccaccgtttccagcatggtactgcgacgaatgtgctaactgctcggttctaacttctaactgctaatcagcggcattgcaatcatcaatacggacggtgccggcccctgcggctgttgttgctgttactaccatggtcatctcccctctgccgctttccgccggaagagctggatccgccaccaccgttgccactaccaccgaatcgacgaccaccttgctgtggcagaggtgaagtcgcatgcacaggctgctgcc

SEQ ID NO: 284768 - DNA, 395 bp, Zea mays
cacagaaggatggttgctccacatatataatacaatcgaagaccattgagaatcgatggaacgagttgggaaagaatgtttttactgacgggaaaaaaataacatggttaatatcgctactctctaatgacaatcatctcatctgtcccgaccctggggctcgcgcttgctgaggctcccttcctccacctagcttggagctgtacctatccggaccctggggacgacgaccatctctcccggccccgggccttttatcgtctcggaactggagatcgtccatttcgagcatgtggatcacatgccccatcttaggccgcttgttcgcgtcagggtccacgcagcggagcgccaccaggagcgcccgctttaacgttttgggaggaggcctcttg

SEQ ID NO: 284769 - DNA, 284 bp, Zea mays
  unsure (1)..(284): unsure at all n locations
ggaaccaaacaagacctatgtatgtactcatctgaagtcacaaaacagttatttaaaacggcaagcataaactaagctttagaacttactctaataaaggggagtaaaacattaactttgactcttgtttgatccatgccattgttcaaggttatcgtaaactctgaccaaatttattgttcaacattttaccgataccactggcggctccgaattgacctcaactctgtctcgtttcgtctgacagattcctcaatgccgncgcgttcggcacgggcgccgac

SEQ ID NO: 284770 - DNA, 271 bp, Zea mays
aagagcacaactcataacccatgatgcgtgtttcagagacttgttaaagcctaagcatgtgtgtcttttacgtactactactactactagctgtagttaactactatccctgctcagctctgcccccctccctcaccctcagtctcgatcgtaataacgctcccattttaatgatgtcactgatcgctcttactacactattggcctctgtagcagggcgccgccgcctgtaaaaaattcagagcccattggtgggagtgggagtgggagt

SEQ ID NO: 284771 - DNA, 240 bp, Zea mays
aaaaaaaaaggggcccccttcctgggaaaatgtcaaaagggcgacaaacttagcccccttatacacctccccaacaacgatggttctgcctgggtcggcccaagtaacatcaaaaaaaactttcaacaaaaaaaatgtaacataggctttacagggttttccccccaggacaacttattaccaggaaagggggctttttccatacacgaatatttgattttttaaattcctcacccattg

SEQ ID NO: 284772 - DNA, 519 bp, Zea mays
actagttctagatcgcgagcagccgccctttttttttttttttggatggaaacttccattttcttgacatagcaaataaaataaaaataaatactcttaacttgggagcccccacgatctaattcgtcatgacaaggctccacgcacgcatactcgagagaaagagagaaacactgctggagctggacccatcgcgccggacacaggctggcatggcaatggcatcatctgtcctcgcctttgcctttcgctcctccccagacccggcagggcccaccgcttaattaccccatctaatcattctcccgctaattaaacaccggcttgtcattactactgacaaccgtggctaacagggcacggttagccagaaggcaggcttaggctaggctaggctagcacttgttgggggtgaagccgacggcgcccctggcggtgtcgaagtgacgcgggtgccctgctgctgcacgttcccgatgatggacacggccgcgttcgtcggcgcgaaggccaggcagt

SEQ ID NO: 284773 - DNA, 488 bp, Zea mays
aactaaacagtttgcataatgccccttccattattattccgggtatgagatgatcaaccaccaggagtatctccctactacaattcaattcagacttgtgcgaatcaactgaacaaaattggctttgggccgctttgatgcgtttcagatctgccttttctatacatacaaaattgagtcaacgacctgtttgtttgatcagaacataacagaacagttcccctacctacactgctgcctcctgaaattcctcggcgacagcgtcttcctgagcatggccttgagccgcctggacccggcgccgggcttgacggccccgcgcctcccgggctcctgcgggttggagcagagcgcggcgccgccgttttggtcgccggcctcggagcaccagccgccgtaggcgaagtgggcggcggggtcccggcggcggaggatgtccctgtcgatgcggtccacacggggtcgccgtccctgaacttgcgcgcgaa

SEQ ID NO: 284774 - DNA, 582 bp, Zea mays
gggggcagatgaaaacattacattcacgtcaatctggaacatgtcaatctgaaaaccttacgttcatgacagttcgattcatcctttatatacacgtcaatcaggaacatacagggtaccaggggaggggccgcctgaaaattaagctcagaagttttgcgtgggacacgattgagttaaaagaaccaacgaacatctcaatttttccactacccatttcagtcgcgaaacacacagctggggcaacctaccgagtgtcacatttacagggcggggaactggtgcaccagaatacaacctaccggatttcttattgcttgggtacaatctttacagcataagggcgcgaggtcttgacttccagcttcagttctctgtaccctctggtatcttgaagaggaactgtggtagcgaggcaatgcgggggaggttagtcagcagctccccaaacgaatcctttcttgacatggctggtagattggtggcatctgtaggtttcccagttggtgcagagctgaattcttcgtcggaaccatccgaggcttcaacaccgatgtgtcgctgtcatttggctcaggtttt

SEQ ID NO: 284775 - DNA, 419 bp, Zea mays
aataataacactaaaactttattctatgcaaagagatgtctttacaatatgtgccatatggatttcattttaataacactacaggtttattccgtgcacagagatgtctttacaatatgtgcaatatggatttcatttttgagaagagcatacacagacgggatattgatcgatgaagcattcttcgcttatgagtacatcaatgagccctgatttcttccaaattcaaggtactgggagggggatatgggtttaggacccccaaaccaatcaatcaagaatatgttttcgatttccattttgaagattttgaaatgatgattctttggccaatccttcatttcaggatgtttggtaaaaagtgctgacttggccaaatctgcttcagatgactgaaggtcaaccatcttcaaccaaat

SEQ ID NO: 284776 - DNA, 442 bp, Zea mays
ggagactcaacaacgatgtaaaagtcgcaggttgcagaatatgcgtggcctgctattttaatctggtcattatcgcaatctggagcaagtgcaggtacctgagctgcatactgagctacagtaacccacaatctcaggttagcaccgcatcgggctagatctagatcacagcaatgtttggtagtatatgaatgaacgggagttgggaagccaccaggcagttcgcatctggtacgagaactctaacgacactagggcagaaattcgacatagacatgagtagaatcgagctcttcaaaaaaggaagactatggcttccttcctgcatttctgtcccatcatcagtacttgctccactcatcaacgacagccagttacaacagtggttgtagcaaatggtcctatttctttggaagacgatctcttggatgatgaaatttgc

SEQ ID NO: 284777 - DNA, 483 bp, Zea mays
gcttacctaatcataactatattatttagcatgagcaaatggagagggcaaggaaacaaattttctcatatactcctaagtacaatagtggaatggccattatatatttaagcatgtatgtatgtataaacatctggggcatctgctagaactcgggcgctgctagaagctcgcctcatttcttatacaacactaagcagacttgcaacactgctcgaatgctcccccggcgccgggcagcacaccaccggagatcttcggcgatggacctgtgcgtgcgtctttcagccaccacgcacggggcgcgccatgtaacgtctcaaccgaaacaggcatgcataatttcctcctatgccgccgctctcatttggagacgtgcagcgatactgtcgcgaccaggacgcacagaagcgccagcgccagcgccgcgccgccctgccccgtcgtcgggggggcgccgacgtcgttgtagtccgggggaga

SEQ ID NO: 284778 - DNA, 380 bp, Zea mays
gccgaatattattaaaccgagcgagccaagagttcaagacccgttcgctgtgaaccgcgacaggtttccttagtgcctctgtacattgggacaggacataaattattcgatcctgatcgtacatacacacatttgggaacacgtattttatcaaataaatttgtgtcggcctggtaccttcacagtatcaacacaaatttattcttcctaattcctggacaaagaaatttacggatgataacaacacaactgcttcatcctcaactgtgttcttaacagaacatcatccttgaatcctttaatcagtatagtacaagagcaaggatttttcacattccccacaaatgtgtacttttcttctacgagaacatactcataga

SEQ ID NO: 284779 - DNA, 265 bp, Zea mays
gggacccctaaatttattcttataataaatttacttgaaaaatacaaatattggggatatttcttttataaatcccgctaaatttgataaactttaatcaacggaaattctttcaacttctttgatcccctgaaaagggaccaaagggggccattctggggggggggctactagagcaaatccccttgggttaaataaaaaaatcctttctagaacgaagtttttccatcaaaaggggtcgaatcgggggggccccggaataaac

SEQ ID NO: 284780 - DNA, 482 bp, Zea mays
ggcggggaaaataaacatatgacggatatttactttcaatggacagagaccaaggcggtaatctatttgacgttctttaatacatctcaaaacacaccagattcgaaatatccagctgaacgacaaaaatgcagagagaatgagagagtacagacgcccataaaaaggaatgagcgactcagctcatacaattacaaatgccaaagcaacgccaagcacatttagcaggtcactgtaccatctcaaggtccttgaagtactcgtgctcaagtgcttgcctagctgtgattcttttgcttggctcataccgaagcattttagagagaaggtccaagccagcaggttctagatttgggactattgttgccaggtcctgagcttgccacctggggaaagcagtcttgaagtcaggcaaacaactgactccaggccaaccttgttcattcggtgtacctagcaccctgaatatcttgaacagttcg

SEQ ID NO: 284781 - DNA, 430 bp, Zea mays
gtgtccaatggttgcgcgagcgggaccttctactaagacggtgaaaaacggtacacatataataggtgcataaacgaaaagttacacaaccatatataaatcatacaattgggttgatacatactgatctcataacgggtacgtacactagcttggtgcagcaagttcatcccacatgagcagcctcttttcagcatgcttgaacacctccttcagagacttcttcaccacatcatcagcaaaaacaaactgcactgcatcctgggccagctggaacagctcggacttgctgaggccgaaagttgttgcaacgaggtaatactcatttgagaggcttgtcgaaaacaggccggaatcatccgtgcacagggacaaagggtgcttcgcattgtagaggtagcaaagtggtgaagcttagggaaggagcacc

SEQ ID NO: 284782 - DNA, 415 bp, Zea mays
acgaagacacccaaatctattcacaacctcagattttacaggtttacaaatagaggttcacaaaacaagttcaaaaaatacaaacaggttcacaaacgcagaacaggagatcttcttttgattatgtgccatcttttttatcatacgaacgcttgagcatgttatcacgtgggtttcaaaagttgcaactactccacctcgcaaatttgccttggactgctaggaggtcctatgattgctccatcctggctagcaggacctgtgactgcagccccttggctcctgtgactgctccaacatggcaaatttgccttggactgctctcccctggcaaccatgctccggtatcaggactacgagagtgacgacaaatgacagcgaggaggcagtgtgcacatgataggaataacaatca

SEQ ID NO: 284783 - DNA, 440 bp, Zea mays
ccaggaagcaccacatgtgcatgtagataattattgagattatatacaggaagatctagagtttacatctcatcattctgcctatgtgattgaaatgatccaaaagtgaaggaatctctatcacagcagtagtgaaaaagaataatattacagaaagctagtcctagaacaagcagaaataataataaaagaaaaagaaacttacaacaatatgtgcaggcttccttaaacaagttgagcaacttcgatttctgcaatagtaacctcagttcatgtgcttcggttttgtttcagggcctccatttttgacaataactccccaatgctagctaccatcctagttttcatgctgagaaattcatggtgtgtcctttcaattacttggagttcttcaatccttcgcttgcgccgctcttgtaactcatttatgtcaagatcag

SEQ ID NO: 284784 - DNA, 545 bp, Zea mays
ggacacattgcaatagccttcacagtctgcatacatgccacaaaggcatcaaaagaattctctgcatttcgtcgacagatttccttttttttttctcctcagacatattatatgctggccgtaatgtacatggagatgggagtcatggaccaagcctctctatctgtggctggacactgcagtgaccatatgcttggcatccagcatccccagtcggaggatgatcccctatctatggctgctacagatggtacaggcggacacaaaatgaatttgactacctctctctctctctctctctctctctagggtctaggcacagaaagaatgacggacatgtactatggcatggcatggcatggcacggcaaacgcttctggttaaggcggacaattcttgttagctagccaggccgtcaagaggaccactggtccgggacggtgaggaagtacttggacatggctttcctgaacctcttcttgtactgcattggagatatgacggtgggggattcgttcttggggccaccaagaatgcccgaggca

SEQ ID NO: 284785 - DNA, 487 bp, Zea mays
ttattggtctccgttatttacagaacaaaatcgcagctgggaatgagatagatagcatagcacacgtcgagcgagaagaactccagttcatactccatagtttcgtagcctatacaaacatgcggtgtgcaagtgccgtagcctagagacgctatacagacatactctgtaccatggtcgcaaaattagccttcttcaaccccgaccccgagcagcacaaagagcgttgccgccaggccgctgctccgcgctactctcccttggctggaatcacgagggggctcctcacgatgtagtcgtcggagacccacttgaggttgccctcggcgccggcgacgttgggctggccggcccaccgcaccgtcaccgtgaagctctgcttctcgtccagcgccgtgaaccggtgcgtcggcggctgcacggtcaccgacacgtccttgggcatgtccaccaccgcggtgtacacggagctcgccttccccacgtt

SEQ ID NO: 284786 - DNA, 433 bp, Zea mays
gtcacattccaatttttcaccagtctggcagatccattgccaggcaagcacattcaacatgtacagcgggagctgtttcaataatgtacaactgctagtggtacaaggcgtctcaatcgccatgagatcaagcataccaacacactgaacgaagaacaatggatacatcagcaacgaactacctctaggtccacttcagagatgaagaacctgggtcattcgctccgctcctgtgtgcgcccgccctctgctcaacgcacactgatggagcagagctcaggattcacttatctgttccaactcagtcacacccaccgtagttgcccctggtgttccaagctatggcggatgtcaccgccgacagcgatgacctgcttcctaagcgctacagcagcaggtttattgttatatttcacttggaaccttgcgcttt

SEQ ID NO: 284787 - DNA, 482 bp, Zea mays
aaacgacaatttcaccacgtgtattttttttcttacaagaacatgcaatggttcggaatagtaatagcgaaaggtggggttttagcggacagatgaattatctgcagtcagctggtagtgttgctctctgtagggctttctctttcgtgtacaatttaggcctcagggtaaataaattccaagtttcgcagtacacagtgtatgtcagatgaagattctgatctctagcatgcacgccaaggaacaatcagacccaatccctgaatagtgtgaaactcacccactatctcctatctatacacaaactacactcctgaatggcagtgactattatcttacgtattcatattcatgctatactcttacaggaaaacccaaagttttgaaatgttctgatttgacctccacggcctgctgtgacaatcactaggccccaggccgaccgattcaaagcttgatctccctcgttggcatggcaggta

SEQ ID NO: 284788 - DNA, 928 bp, Zea mays
cggcggccgcccttttttttttttttttacaaattaaactaggaaactttgtaacaaaaaaaacaatcatcagatacacctccatgtatttctaggggagaatgtttctcaaacccttctaacttctaaatgagttgaactgccaaaaattaggttgtccaattgtatgtacagtgccataaaaaatgcaaggaatgagcagcagaaacacctgggctaaaacaacgtcagcagggcggagtaaccaaccagatcgcatatttggcacaaaatcttcatcccacgtaacgaatcagttccatcagcacaagtcgtccatcagcccagccacgattgacgtgctccgtggtagaagatttcacatgatgacatgatgaatagtagaatcactgcgattttgcaaccctccacaagtccaacaattgcaatggcttaactaacaaacatgccaaaagcctacaaggaccaaatatcccaattgacatgataaatacaaatgaaatgccccgacataatcagattggggttgttgaaaataaaatttacaacgaaataaagaccccgcgccatcttaagggcgacataaaatttcacttaggacatcagtaacgcttgtttcactgagttcatgggagtctgaaattgttgaactattaaattcaacacagctgggcaaaggggacgtcgaatgtcattattcatgggggtttaacggtttctttgaatgtgcagagagagaacataaggatacaagtgtggcgtcagagatgagaaaagaaacttaattgttacagtaaattaacgattgtaccttaagaatctcgttgtagctccatgtttgtttttgttgtagatctccgtgttagatgcagaaatccgaagcgtgtaggtgagctgagatcgcaaaccacgcaaagaccaatgcaca

SEQ ID NO: 284789 - DNA, 513 bp, Zea mays
gcatcgggtaatgtcaataaacttttgattatctggcaaacgtggcattaaaaaaagatggaaatgccgcacagctttgctcatgctggttcatcaaatttacacagaactctccttgccgaggacatggcctccctcaaaagaattacgctattgtaagcatgtgttatgtgtaacacgcgaaaagaacacaataattacatggctcaaaacttacaacacaacacaaggtagtgtgtactacccaacacggtataaaattatgaagcagcagtagtgcacaagacacagcgcatgcgagactggcctgatggggaaccatcctcatcgtccatgcctccgtcactatcctgaccactgtttgatctcatcgagtctaagccaccttcaaggcaagacagatgatacgcatggcagcagtagaacacgatgacagatatgtcctggataggcaaaggatcgaagcacaaacaacaccgggcaccacatcttgttctggacttgatatctaga

SEQ ID NO: 284790 - DNA, 493 bp, Zea mays
atacaagtgacaatattgtgtattcataacaaaaaaaagtatatcatgattataatttaaacggggacagagatccccgacgggaatttatccccgcgagagaacggggaattaggaagagttcgtagggatccccgcggggatcgttttctatagtggagccaaaacccgacggggaattctccattggcatccctactaatagccaaaggaaatgaaaaatgtgtgcattcccagcgagagttctggaagcatgcaaggtaagtaaaaaaacatgaaacctaatgcaaagaaaaaacttctactcctagagactagtacatttctggtgcaggaagctggatcgactcgaaccatttcttggagaatattgtccctgtcataaactccttttaggaaatagtatagatctatgtggaacaatttttacagtctccgcaaatcactggtcttcctatcagttaatttccactgaagggaacagcggcatgat

SEQ ID NO: 284791 - DNA, 401 bp, Zea mays
ataaaaagccaaatccttttatggggggaatgtctttattttggggtgaagaccaaacggcatccatttcgtacaacaccacgagctgctaaaaacatttaaagaataaaaaacaaatactgctacactacgcataatacaagctcatacagcgaatggtgcacgaacgaattgagatatttacagggagcagtcaattccgtttaagctacccaacagaatcctcaaccatagcctcctcgctgtcgctgtcgctgccatctgaacctgaatctgaatcaccttcctcgacgccttcatccgtctcagcgtcagacatcggctcctcgtttccagctccactcctggacatttgcttcctgaattcaggatcaacaatcccaatcatggcactaagaaca

SEQ ID NO: 284792 - DNA, 398 bp, Zea mays
ggaaaaagtaatggcctggatggcatttcaggacaagggcagacacctgaaaatacattttaagaaaatgaggtccggacgacaagtagagagatcgtcctctacttctaattcttgattcaatatggccgtatctaagcaactgattcaacgtagccgtatgaaagctactccaatcaccattttttgtccttgcaacctgatagatggagatttctgctacatttcaacaatatcaagctcagcaagatccacgctggagaccccgtctgggctgaggatccccaacactgggaccctcttgtgctgaggtatctgactaatcttacgcctgtcttcattggtcagttcccaatcgaagatttccacgttctccttgagcctatcccttccgaaac

SEQ ID NO: 284793 - DNA, 523 bp, Zea mays
tcaaaacatagacactaaacattagttagggaaccaaatattgcagcttaatgacaagatctccatgcagacaagagtgcagctttctcatatacttcctttacatattacagttcgggggatacagttacaacagttacagaaatgattacaactgcaagagcaaaaaccgcagctaccgtggtaaacaggtacagaattactgagttgccatgacaggtgaggggcaacaaattgtacaatagttttatttcacacacattactactagcgtacacaagatgtttctttcccggcatagtggaataggacgtactgtatttgagcggcatgccaatgcaacatctcatcttggagatttttgtcaaaccagttttcattgggtgcagaacactcatgtttccacctcattgcatgagtttccacctcattgcagtaatccacttctctttccccaacccatggctatgatgtacaaaatcacgcagccagcaacggtcccaaaagtagtttcccaaaattt

SEQ ID NO: 284794 - DNA, 404 bp, Zea mays
tcggcggccgcccttttttttttttttttttttttttgtggcatatatgaaacttctaacgtaattcataaaagttttgctgtcacaactcgctcgtaactgaatccagctcctgaaaccataagctaacatatggcttcgagcctacaacagtacagtgtggggaaaaaaacacacaaataaaagtcacaacaacccacgtctgttctacaggactgacaacaaaggtggaatgatcatcatccatgcgaagatcacggccactcaccattaaagggcacaggaatgatcctctcttcgtcggcggtaggatacatgcatatttcgcgacctaaaaggctagctcgtaaaattatcaggacttcttggcctagtcgcttccaccatcgtcaccaccagggctc

SEQ ID NO: 284795 - DNA, 557 bp, Zea mays
gggcagggacacgcagcaaagaaaaatattatgattagccagagagatggcattctccttctgcacagggcatggaattccacacgagatccctgctctggggacaagggaaataactgtctcccaactggccaatggcagacactgaaaataggcaacactcaggttgcaaactcaactatgaatgtttctgccgaatcgggtaatatatacatatactcagctattgaaaaaaacaaacaaacaaatggaagccaatgacacagatttaggagcagctaactgacaccacactcacgcccaggacaatgaccaagtattgtttctgacatctgcttccaaacggaaccaaataattttccatgcgccgaaaaccagtcttcaaacgcccttatttcatggggtatataatctaaagctgctaacctgcaaaatggatagccagacgactcaatgtacatgtaccacgcgagccgtttagtgggtcctgcggctgttggccgatttcgacggagacgaaggcttggtcttcgcgaagtcgaccaggtccttgaaga

SEQ ID NO: 284796 - DNA, 550 bp, Zea mays
agatggcagcatactacgctgacgcgcacctcttgcacattccaaatgttatacattgaagccgaataattggtcaaaaactggatactacgaagaagaaaatgcatcttttgagaaagagagaaaagcatgtccctagtaatctcttcttctttaacagcgaacaacgttacccattatcgatactgtcaactcgtagtggcggctgcgaaggcaccaaccaaataaaactacgatatttggtcgaaacgggagcaccagcggctgaatctgaagtctgaacgaacacaaaacggcatgtctgagttttttttcatgaccacggccacccagcgtccctccaaacgcaccacctcttcgcgatgtccgcgtcgcccttgccatctacgtggtccgtgatttcagctgtcttttctgcagttctgcttctccggtcgttccgctcctgccgctgaaggtggcagcaagaggtgcggagctcaaggtcgcgctccagcgcttcgtccctgtacctcgggttcagatacctgggatggtccaggaacttgac

SEQ ID NO: 284797 - DNA, 424 bp, Zea mays
agttccaaagtagctttcgttcaccaaaaagcaagtttggctcccaatgaactagctcaaaagtagctttctttcaccaaacgcaactacagtatgcggtaacaatcaggtgcggataaaatcacacaagccagcctcgggagcacgaccccgtgtctccgcattcctcggatgaagcaactcacgacgagcagcttcggtttgtagagatggtcacagattgcagttgctgcaatagcttggccatctacacgccagcagaggcattccaacagggcccccagggcgtgtgctcttgcaattcatcagtgaagcacttccatccagcaagagctacagattttccaaggctgaggtacaggaagtgacgatggacgatactatcttcctctgcaggtctttgtagtccgatgcaagcttcaca

SEQ ID NO: 284798 - DNA, 459 bp, Zea mays
agggacatatatagtaagaaaacaaaacacgaaccacatcagtttggattttctaacaggaaccacatgtgtctcgagatccttggaataatggatgaatgtatttaccgttccagaaaattttcactatcgtgctgttaggctatctccagcagattcactatctcatcctctatcacattccttatttcaaactcctctcagtgtcatatatagttccgtatcttcctattctgcatagtttactagagacagtctttaggtgccaataagtcactgatccaagaacaacaatttacactgtagttagtacgcaatccattgatggccctgaatgaagttctccgttgaaaagtgtttgacatactgttctggtgtctgactgctccactcaacccttgctgtgtggtttgcaccagggcctcgactgtcaaactctccataatacagtgtactgag

SEQ ID NO: 284799 - DNA, 400 bp, Zea mays
aaatcatatattcttaggattcccttcctttataaggatatttgatacatgtaacttcttcattggcactgatttaatttctagaatgccaatattacagaaattcttcttcctttttgtattatgaccctaacgtatagctacaagcactctttaaatgtgaaatctattatccacacggctcacagctttcagtcaagctcgaaaccaatccacagagaaatatggggactcactggttctgcgaccccgagtacctgcagaccctggcgtccgtaaacacgagccccggcctgcagtagtacccctgctcggggctgcagtgcctgtcctcggagcacacgcaccggccgtccagcgcgcacccgtcgcccttggccagctccaccccgccgacgac

SEQ ID NO: 284800 - DNA, 456 bp, Zea mays
ttttcttgcacccttagctattatgcaaacaaaaacaaaaaaaaagcattggaaactactaacaaaacaaggctcctcgcgttgcatcacatcctgcagcagctcatttggtcgctgtgccaagtgccaacacgcagcccactgttactgcactgcgcgccatgccatgaatgcacgcgaccgccgaaacagacagaatttccagccatctatccaggcaacgccacaggccagcgccacgagcttttcctcagttccttctgaacacgataaaaaaacctgaccgatgcagcagcacaggcacagccgtgggtcgacgcggttcaaggcgtcgcgctgagcaggcgctgctgctcccggcaccagcaggcagctatacgcggccccctgcgcgcccgcacgttcgccgatcagatactcctcagatggaagaagccctttttttgcatcttttac

SEQ ID NO: 284801 - DNA, 421 bp, Zea mays
  unsure (1)..(421): unsure at all n locations
tttntttttttttttttttttttttttttttttttttttttttttttttttttttttttttttaggacctcactggagagtatgcaatggttgcccatcaacccgcattagtttactttaaaaaagccctggggctcaattgtttacaatctacagaaagattactggcgcagttctgttttcattttatcaatctatcccgacccaatttacatccagcaataccaagcaatttctccactcctttcgaaatagtttacgctgagctctgcaagattcaaagctcaccacaacagaagtaggagaaacagccctcttgggcggcgtggcattgccaaaatcacagtccacaaccaacctaaccacaaccatttttctgctctcagttaccagcaccaccagcaaggatcagaaggacggg

SEQ ID NO: 284802 - DNA, 399 bp, Zea mays
ggggtctccaaaaaaaaagaatggagttcaaatggacggatgaatcagctttttttaaaaaaataaacatgtccagcctttttttaactttcagtcagtacctaacccttgtgtgctaacagcctaaaatcatttcacggcacgttcacgctgtatatggcgtgttggttgctgcctgacaggcagctttttatcaaaccaaggcgatcaaaatcctacgcctagccctaatggcaaaatgtggcagcgagtaaaaaagacagccccccacggccccaccccatcagatcgcgggcttcgctctgtcggggccgtccggcctgtacgccgcgatgctcatgggctccacgagcagcgtcagcagctcgtcctggatgcacttgtacatctccccgcaca

SEQ ID NO: 284803 - DNA, 454 bp, Zea mays
ggaaagagacacatactagttaattaagatggcataaatgctgctgagttttaagtgtttgacaggctacgcatatgctggttggacgatgattgttgccccggatttcagcaagtcctacagatttgaatcgagccaatccatccaggcaccgcgtgcagtgcaaatgcagtgagtcagtgtatgcaccttcctccctggaacgtccagccgatcttccccatctggcgctcccacagcgggcgcgccatgtagcgcttccagtccacgatcaccctcttgaggtcgaacagcttgttctccagcccgacgcagcaggtcatgtgcacggtggcgatgcggttgaggtccctgcccagctggcagaagccgctgacggtggcggcgtcgatgaaccggatccggacccccagcccgtccgcgagctcccgcttgatctcgttgaacacgaact

SEQ ID NO: 284804 - DNA, 392 bp, Zea mays
aagattgaagttactgatatgcccttttaatgtgtaactaaatgtagccctacacgacatgtttttctaccacagagagagagagaggggtaacattattttacattgattggagcttgagtgcttgacacaacaggataagggtatggtgtcgggtaaatggtcagtccaatcacagcccgtgtgacgccttcagctggagctcagcagggtcttgaaccactggaccgagttcttggggtacctcttgaggttatccttgtagtccacgaagtagagcccgaatctggaggtgtacccggcggcccattcccagttgtccagcaacgaccacgcgaagtacccacgcacgtcacacccgtcctcctttatggaggcagcaacgttgttga

SEQ ID NO: 284805 - DNA, 430 bp, Zea mays
caagaccttccctgatgatccaagccgaacgtacgtcataattttagcaatcctgtcaagtactgaaccatccacactgacagttaccatctcctctggaactgggcaatcagctttgctcctatgaagagttgttggaatgtcattggttactccctcctccatgttgtaaataaatgacatccgaccaggaagaaacaattcattctctttaattatgctttgaggctttatgatccactggtagacagactttgcagttgcagtgcggaaggagactgcctgatcttcttttgttgcccttgactttgcatccttcccatcctctgcctcaggtttcttttcaatttcactccgtactttgtgaagtagagcatagcccaggcccttgaccagatgtgtatgctccaaatcacctataaataagcag

SEQ ID NO: 284806 - DNA, 678 bp, Zea mays
gggaactcaacatgaccattattcataaaaccatgatctgaattgaacatggtccatccaaataaatatttcaagttacattcacaattaaatggcagaaaatactacagcctatccaaataaatattacaagggtcatttcacaactaaatatcagtagtatcagctattcgtcatcactgtcaacatcatttgtagcaccttcttcggtttcgctgcaatactccaaaattggatcgtcatcatcttcttcttcactatcactcccatacactttttggccattttcttgtaccaatggagcaatttcagcagcttcaaaaataagaccttgttcatcatctctacttaaaggcttctcatatatattatcggaaactgcttgtcgactagcattctcttcacaacactcattttcttgatatgcaggagcattatgttgtgcaatatcattttccggacgcgtgggccagaatgaggtgttccaacgcctgccagggtcagtgtatcaaagcattgaatttgcctctaatacacttacctatgacagttgttgtaaacagggatccgctgggcattcaaatctaaaggttgaaaatacggagggtgctgggatttcagtactgctgcagaagtcaagcagtaacaaatggcctgttatagaagggcgacccttag

SEQ ID NO: 284807 - DNA, 469 bp, Zea mays
tttatttttaagttttttttttggacccttggtttacaattgtattattcagcgacggagcggtgaccctgctttgggcttgccaacaaagttgggaagaaacaaaataaacagttgacggacggagtcaggcaggcaggtgccggcaccggggggcggggggggcccatggtttctacccccccaaaaaaaggaagaagaagacttccggtccctcgccggcgagaccccgcttgctagacagacgttttcgccgggatcagatcaagcatacagcacaccgcgcgccggggggcgccacatgaaacatgatcggccgctggccttttagccaggccgtcggtgtagctaaagtctcagacaaaaaggttcagcagctcgggctccctccctccaccgccgccgccggcgtttgttgttgtcacggactccttggaggtcatggacggggtgccgggccgccgccgcc

SEQ ID NO: 284808 - DNA, 492 bp, Zea mays
gcactattactatatggcataaacatgttcttatctgcacacattaacatacattatgatgccaacatttgatggacaagctggaaaagatacacatttcacacgtatatacattaagggataggactcggggtacaaatatgtgccgtttcgttcacatatttgtaacgggataagtaaccgataaacattaaattatgtttgtttaaatccaaccgtaatcagataccacactaagaactaatatcgacctatttaaacttgttaccgttggttctcgggtcgttggcactcgggggtgaattattatcattaccatttatgttaccaaacagcaccatagaacgatagctccaatggtagccaaggttcgccactttgctcagcaagcaaaccatgtttggatgtcgcaacgccatttctgtcacaaaattatccactcgatcctacagcatgaggttcgcaaaatactgctcaaattcttgatcgatg

SEQ ID NO: 284809 - DNA, 494 bp, Zea mays
atcgcgagcggccgccctttttttttttagttgtcttttcttttttagaagaaaatccactaaatgaccaagggctatcaaaatttattacaatttttggagaaaaatagcagtagagatctagaaatcgaagttcccatgtttcccttgtagactcgatgtattcctctctgaacgtttggtgcgttgcttaccatcactgtcagctctagcacctgctttggtacttccaatgcctagtttcggcaagcctcgattcaatccatccagcaagacgcatgctttgcataatttctgactagaaatgtagccacatcgttcacacgttccttgctctggcatccttgttgttgtggagattctgaaattttcaccggattttatgatgtctagtatagctctaggcctcattctttctaaatctttaataaattcacgagcaaaaccacggtatgcatttggtgaatagatgcgtttggaggaatgaagttgag

SEQ ID NO: 284810 - DNA, 463 bp, Zea mays
agcgttcccaagacataatatctgcttggtgcaaacagcaagccactgcttggtagtttacaaccaagctgtctattattggtgcaaaggttgaggccaaccaacaagcttacaggtaaagcttattattggtcatacaaatatcacatgtaaatgtctaaatagttggttattagtataatgcttatctaaagagcacgctagcgccaccgcaacgcatcaagggcctctttgtggacacgggcatccccaactgctaccacattaaaacttgggggttgggattctgcagtaacaggccaatagagcttgtcccctctccaatcagttattgaccctccagctccttcaatgacaggtaccagccagaggaaatcatatggctcgagaaggtggacaacgattcaaaaattctggctccggtgagtacctcaaggtgatggagaatgattcataaatccta

SEQ ID NO: 284811 - DNA, 612 bp, Zea mays
tagcgccaccgcaacgcatcaagggcctctttgtggacacgggcatccccagctgctaccacgttaaaacttgtgggccgtgattctgcagtaacaggccaatggagcttgtcccctctccaatcagttattgaccctccagctccttcaatgacaggtaccagcgagaggaaatcatatggcttcaaaccagattcaacaacaatatccacaaaaccagaagccagaagagcataagcataacaatcacagccataaagtgggactttcaccttattccttacacgaataaatgcatcttcagcatctgcttcaaagagatgtgggcttgttgtatataagtaagcttgtgcaagtaaattacaagagcgaacagatatttcttgtccgttcaaagttgtttgttttccatccaccccaatccatctttctcgcaagattggctggtcaatgacaccaataaccggcttcccattgtgcaaaagtgctataagcgtcccaaaaagaggcttgccagttatgaaacttttcgttccatctattggatccaaaacccatacaaaatcagcagaattctctgcacatctccaaccattctcctcgccaaaaatg

SEQ ID NO: 284812 - DNA, 399 bp, Zea mays
accaactagaagcaattacacattgcattactatcaccaccaattcacacaccatcagcgcacactcatcaccgctgctaaaacgaaagaattcatctgagggcgaacaagcgtcaagagacgcatgaaagaataaacagcacacgacaacgcccctacgacaagcgcaagaagacagaacagaaagatctcttctttttttcccccttgttcagaaccttccgtcagtgacaataacacaagtgatcggacgcggacggacctcagctctgacggatcgatccggtggtcctcagcggccggtcgtccgcctcgtccacggacgcactccggccggaccgcgccgtcgccgtcgacgtcgacgccgtgccgccgagcccctcgatgcgcgccacgatc

SEQ ID NO: 284813 - DNA, 241 bp, Zea mays
ggatactagtaatcaagatgaattaatcttagtggtgggaagtacatcgaccgagcctttccgggggaaaaatgccaaatacagaggcttttaatctctactctcccctcatcgatcacgactagagcgacaagaaccaaaacataataaaaagagagagagaacaaacagaaccatcgacctaatccaaatggattaaaaggccactaatcaagcacagctcctcattctccgtcggccg

SEQ ID NO: 284814 - DNA, 321 bp, Zea mays
gatcaactcatcaagcaagaggggggctgtggtgaccaacaacatacgatatggccacacagggggagtgacacaacggtagcacgttctcgtgagacgcagacagcagatgtacaaagctactcacatactgcctggcgtctgcgaaatctgtataccacaggcaacaaatacctattccagcgcgcggggtggaacgaacgaaccagaatacagaaaattcggcacactgctaaaagagaatcagaaatttttatacaccagaaacactgggtggaggtggcaacgatgcctctgctgaagatggcttatccgtcaact

SEQ ID NO: 284815 - DNA, 431 bp, Zea mays
tttgctctccaaatctgaaactcaagttatcaaaaggaagaacatcttcaattctgaaagttcagcctgggaagctcaatggtagttctaccaaatagcagatggactgcactgtacataacacctccacttacatatggcacctgctctaaaataagttacacatggcatcatggaccttggctattatactgatgatcgctaacaaaactgtagccggtggcataacagattcaggaacaaaaatgggggcgtgaaaacttctgaaacagcaggggggaagaagcttgcaaagggtcttggacaccatcatctcatctcatattttgctcctatacctgaccagctttgccagcgtctcctgagcagctagcgtctgggcgtggccgtggcccagcatgacagtccggatgctgatgcaggtcctgcac

SEQ ID NO: 284816 - DNA, 392 bp, Zea mays
acagaaacttgtgcgactggcatcattttatgcaagttttagaatgaatacagtaacaaggtactacggcgcgctgaccaaatctgagaacaatgctatagcttgtgtgctgcagccggctccaccataagctcctacagtcctacacctacaatatatactagcactaaattaacccctccctaatttcatcatgtttttatacaggtcatccagctgacgagctcaggtaacccagcatacagcggagtgcccgactgacaagaccacgacaggaaaaaaaaccgcaacaaagccaaaaccactactcagttcggctgacacatgttctccacattgttctacgacacaaccagaggggaatagcgtttcttcgtcactctgcttatgat

SEQ ID NO: 284817 - DNA, 444 bp, Zea mays
cccagccaaagggatattcattcattatactttgtatgaatcttccattgattaatcttttgtgaagaccattcattatacttaactcatgatcagcattctactctagttacaacttacaaggcctttcattaggcagccctagatatatgtacaataatgaagggggtataaaactatttgagacattctccttgaaacattcacacagcacgattaacttcttcgagctacatgatcatttttttccctttctttccatcggttgctcttaacagtcatagcaagtcccgcgcacctttagcccaaaagaagtttgcatcacgatgaataggtaccgtcttaaaatgccaaacacaaaaatggaggtgaggccatcatactcttggaaaaaaaaaaaactttagtttgcttgtgagtttcaagcaaagcttccaataacca

SEQ ID NO: 284818 - DNA, 483 bp, Zea mays
aaaaaaaatggaaacggtttataattcgcaatagaggaatattacatatccaatattataagaaacaaaagggaatgacttcttccctgactttctgagattcagaacagggcgtcgtagtaacactagagctggactaattaggctataagcaacggcaaacgggaacatcttagcagtcgggagcaaccccgttcgcctttttggtgtcgctgttgtccttggtcgccaacagcggctccgtctccttgtcaggcatctgtgacaccgggagggcgtcgcctgcggactttttcttgccctcacgcaccgagaagatggagtagagcgccatcccgaagatggcgacgaggatgcccaggatgttccgcacggtgaaaggatcgtgcagcagcgtgtacccgaacgacagcaccaggcacgtcttgaggtggcccagcacctggtacgtcaccggcgacgtcgtcccgatcaccaggaacg

SEQ ID NO: 284819 - DNA, 444 bp, Zea mays
aacaggctataaaccctaagtcatgcttgggcatcatagggcgaagttgggcaactttttcggttcacgagaccgagacacaccacaccacagcctaaattatttggccggggggccgggggctacaaaccgccagccgtgggtttacatccatcaagcggacaatacattgggctcttgacttggcaataaaccatacttgatctctcccacccacggtatctttgcgacaacacagtcttgtgacaaacaatagggcaatcatcataagtcgcacaccagaatggaatttagctcagcatcagccgctccactgatcgtgatgccttggtgtctaacgctcatcaagtaggacagtgaatcatgggttactacctcgcctggaatcagaactgggataccaggtggatacgggcatattatctcaccacagatttcaccaag

SEQ ID NO: 284820 - DNA, 293 bp, Zea mays
gaagttccaagtagtgaagctcgtcggtgcatgcagcagacaagcacaaagtttacactttactctgtggtaatggacttccattatcttgttcgtactgacatacacagctgttgatgacgaaatatcaacaaaatacaggcagctcttgccctcaacactccggcagagcacaatccttcgtgtacttgacataaacaggagggagaagaaaaggttacatatcatacatgtggacacagcactaaaacaagcggtccacacagctaagcacggcactgatcactctgtct

SEQ ID NO: 284821 - DNA, 446 bp, Zea mays
ggcctcgttgtagtccggggcgccaccgccgaaggcgtccgacacgggcgacgcgctggagctccagacgaacatgtggaggtcctcgcccttggcctgcccgttcgtcgccgccttcctggcgcccttgggcggccgcggccacggccgggttcggcgcggggtagcgagccgcccccgccccggacgtcgcattcaccacggggagagggtacttgggcttggacgcgtcgtcctcgtagttggacgggcgcggcgtggcgccggtgcggatgccgaacgcgtcggccgcgccgaagttggagctgcggccgaccatggagtagaagtcgttgtggttgaagctggagccccgcggggtcgggttgcgcgacgactgcagcgagtagatctcggcgttggtcaggttgctggggcgcggcgtggtgctggagaagcccatggag

SEQ ID NO: 284822 - DNA, 452 bp, Zea mays
  unsure (1)..(452): unsure at all n locations
atgacatacagcttcccttcgaagctgcacccgaagcagccccaccttggtctgcgcaggccctcgatcagtgtccacttattctgttctgggtcatacacttcgacgctagataaactctcgccgtttggaccaaatccaccagcaacatatatcaccccattgacctctgcacaggcgaagtcgcaccgagctacattcatcttagcaagcacagtccacctgttgaggcaagaatcatactgataaacctcatctgaagcacagtctttcccatggtcagcggcatagcccgcaataacaaagagcttaccaccaataacaaccacaccaaaccccgctttggttagtccaggcatgcgtggaagagggctctgcttttgccccgaacactctaaaatctnccagtgtgaccccttcgccccagcatctggaaccaggacatacaccca

SEQ ID NO: 284823 - DNA, 268 bp, Zea mays
aactataattgtatgtactgtattcataataaataaactgtaatttttctattgaaggacaaaaactgttgtaagaatatacgctcgctcactattctatgatacaaggaattgggtaaaacaaaaggcgtccagaatttaacgagaactttatgaaatattccttcctgggatctacgagaaaaaaaaccatcccctctatctgattgaacaagggattatacccgtcaggcccccccccaaatgacccacaagaactaaattctac

SEQ ID NO: 284824 - DNA, 399 bp, Zea mays
ggccgcctgcagcgccaccagttgctgctccagctgcttcacgtagtcgatcgcgccacccaccaccgtggcctggtcgccgcgcggggtgtagctggaagggatgagggagcggagcgaggcgaggtggtcgttcatgaggcgccgccggttgcgctccacagcaatgtgcgtcatacgctggctctcggcctcctcgggcttcttgcgcttctccggcggcggcgcggcgcgcgcgcggggcctctgccgcttcctccgcctctcggtcctgccggccacgggcgcagacgccgccgctgcgggagctaccgcctgcgtgacgcagctctcgagcagatcaaggtcggagacggcgcgcgcgaaggcctgccgcttgcgcccgtcgtggtgctgctc

SEQ ID NO: 284825 - DNA, 331 bp, Zea mays
aagaaaaatcactagtgcatgatagcttcttaacaattaggacagcaataagtgaacagctgacatagtcacatatacacccaaatcagtactaataatggggccaatgccttctaggcacacaatctaggagaatagccgaagacctacacagtaaacaagctgcagagaaatacaggtgtgtcaatattatccactgcacaggcatgccctatacacatgcttgctccgcttcatctgacttcttcatggacctactcagctgaaacacagggtgcctgccgagcctccctacccctttcctaaatttaaacttggcaaagagaccttc

SEQ ID NO: 284826 - DNA, 806 bp, Zea mays
ggttccaagagaacgatgacattttatataaaataggggtccagaaatctagatgatcacaatcagactaactaccacaacaacagataagcagtaaacatgtgcagcactacatcatcttagcagttgtctaaacatgaaaccaagaagaagaagaaaaaaaagaaatggaatcgaattattgaagctggatgaatgaatttctccagcacagcatgaatccgcctgactcatgctgcgtgatcgcaatgtgcaatgaatgttacctcagctccattgccaagcctgtttttctattgaatacagatacccccaaaagaataactgaggactccaagtctgataggaataagatttccacaacactgcctgcttgcttggaaatgaaaaggaactcctcacatatggacatgaacaaacaatagccattgtcttgcagtagaaaacttgagcatcacaacaaacccaccaaaataatgggctgaaccctcatggagctgaaccttggacctgaaaattagcagctgcagttgccctctgctgatatggaaaactgtccgcgtcaagcaaccaatggacaatctcatctccagccatcaccatggggatgtcttcatgttagtagaatcatgcagaagaccccaaaactccactatgcggtgtaatcgttctcaatcaccggctgtgtccgtgtccccaacgccaccggtgcttgtgtccgcccaacatgcgccatccgcaatgtctctccaacctccgcattccgttccatcacctgaagcttcttatcccttttatgcctcacc

SEQ ID NO: 284827 - DNA, 459 bp, Zea mays
tttttaataatttttaatcacacaacatgctacctgggtcttagataggaagagatgggcgcaaactacagagaagggaacccaacagtctaaactttccacccactatgcagttctcaaattcccctctttgccttccacaattcacatacacatacactgcactgcctttggtctatcctcaacttttgaacaacggtctatcctgatcaggtctaagcttctagccagatctaataggcacatcaccaaaccaggggcacttctgccccgaaggacctataccttcgcccgaagctacaaaactttccaggggattgacaaaaaaaaaagagaaggtttcaccatcatgtgtttgtccgtcgtgtaccaccgtcgccatcctatttgtcccaacggtcttcacgcatgccgaactcccatttctgagggagggggccatatatggaggaaaagttt

SEQ ID NO: 284828 - DNA, 601 bp, Zea mays
gaaaaaaaaactgctcaagggtgggctcgcatatatataagcgggggcttcagagtaaatggttaaacccaaagagaattattatacaaaaaaatttggaatatagaagacaagaagctgaacctagagcaaagcatatttgcccgggaacaaaaagaaaacagatctcccatctatggcatattgggcctcagcttttttcagcttctgagcttgcttctataagaattgacctggtaaaatccattcaaaatcaacataaacacataatcgaccgaacaaccaaacaggcctaatgggtttcgtattcctaatttcatcccttctgccaagcttcagcggtggttgctgctgtatcaaatttttttgtcacagattgtagtgcttcagctcaatagtgatcaataacatcataaccatggagtactgaaacgaactatatcgcacaagttcgataagctctgattgtgcctagtatctactaagtgtgcttgagcagttcactgtccagtgaccaggaaatgaagctgaagaccatagccattttgtaccaacgatttatacagagcagtccacattaacacatcgtataaatatttca

SEQ ID NO: 284829 - DNA, 449 bp, Zea mays
aaccctaaataagatttgtctacagatgcctcaacaaaaataaatctgaaggggctggaataagatgtagacgtccagttcaccctgttaaaacgtaaaagatgatacaagagaggagccacgagggggaaaaaagagacagtttccttgatctgctggggtatttgctagggcaaccagggatcagaagaaggtgcttgttgtgaaagcatggctacagaggccaatcaacttcattgcatcctctgcaacgccgcagcacttattggaataacaccggacgatgagaccagagcatcaataggaacatcagttgaattgactgggatgatgccctcgtccataatttgcaccgagtacgaaagagcaacttcaaaatgggaaagcaaaattcaccatggttaatttagtaacaacagatggctttcatgtcacatactgtattacca

SEQ ID NO: 284830 - DNA, 490 bp, Zea mays
aacaagacgaccaaactccgaataccatgtcaaggttactgactgttttggtcagctcgacggtttacattataaatttataaatctgaagtggctggaataagacgtagacgtccagttcaccctgttaaaacgtaaaagatgatacaagacaggagccacgagggggaaaaaagagacagtttccctgatctgctggtgtatttgctagtgcaaccagggaccagaagaaggtgcttcttgtcaaagcatggctacagagggccaatcaacttcattgcatcctctgcaacgccgcagcacttattgtaataacaccagaggatgagaccagagcatcaataggaacatcagttgaattgactgggatgatgccctcgtccataatttgcaccgagtacgaaagagcaactaagagaggctggttccaccctttctgttttgcaagttcttggtacttcagcaagaatgtatcatagtaccctccgcc

SEQ ID NO: 284831 - DNA, 460 bp, Zea mays
gaatcggagtcgaattactgcattctctaaatatgaacgtttcaaaccatgaaacaaagagaaacagactgatcatttagaacagttaacataactcccgataagcagatcgtgctcaaatctaactaatggcaacaactgcatccagccatggcaccctatttatttcaagtactgttgatagaagacaccaggggtatattttttccatttatctgccaacatttctctcaagggtccaatttcttcgccaattatccactgctcttttcactgtagccctggcctctaagatctccgcgtctgtgaatttgtgctccacaattcctattggacccggctggagaacgtggattacagtctcaacatcttgctccacctgcctgataagttggggtagcctttgaggcaacagtctcaggaaagacatcaacctaatctggggcctgtgacagggcgc

SEQ ID NO: 284832 - DNA, 774 bp, Zea mays
ctcataaaacatgtctggattcagaatcagtagcagagtagaaactctggactctagtacacacttgcatacaagctacggttccttcttcccatccatgtccatgggcacagcaataacggaccggtagacgagctgagagaagctaagctgcaagcagctagctaaagctaactaaagcaagacacaaacatacagcatgggctaaacgtacgtatgcctgcatcactgcatgcatggaatggatggatcagaagcactgggtctgggtctcatatattccagctcccggcggcacgggcggacggtcaccatcgtcgtcatacctaccacaccatgttgtgctgtcacgcgacgaggacgtagacggcgtagatgatgcccgggatgtagcccaggatggtgagcagcaggcagatccagaactcaacctgcagggcaggcacacagtagatcgcaagcaagcagttactttacttacacacatctgatgagaacgacgatgcatcaattaatcagatgctaagctgagtgttaattaccccgatgccgtagcggaggaagacgccgaccggcggcagcaggatggccagcaggatctccacgaacgtctccgaccccattgccgacgccgccgccttccaagtaggagcagctcaatctcagcgcaaagtttcgctccctgctctgctctcagctcagggccccagctgggaaggagacacgccggtggcagcagatgaggaggcgtggtagcaagcaagcagacgctgg

SEQ ID NO: 284833 - DNA, 312 bp, Zea mays
cctaccacaccatgttgtgctttcacgcgacgaggacgtagacggcgtagatgatgcccgggatgtatcccaggatggtgagcagcaggcagatccagaactcaaccccgatgccgtagcggaggaagacgccgaccggcggcagcaggatggccagcaggatctccacgaacgtctccgaccccattgccgacgccgccgccttccaagtaggagcagctcaatctcagcgcaaagtttcgctccctgctctgctctcagctcagggccccgctgggaaggagagacgccggtggcagcagatgaggaggc

SEQ ID NO: 284834 - DNA, 621 bp, Zea mays
ttgtgataggcttatatttgaactttggaaagttatggaatgttaaatttaaagttaaatagcctactttattaaatagattataatttctccaaaatgaagggatacagacggcccctaagatggcaacaagatgccaagaagcaccaaaggataatgaaccatctcaaagaacattatggcacgaccattccattccattgagaatttttcagatctgatggcagatgctctggaaccaagtagctccaaaaactttgaacaagacttttcctatgcaaagcacagttagtttggagggatcaatcttctgggattcgccatcttctcaaagccttctcaagtgtctcagctcgttcatggacatgtgctgcttcatcttccacccaagttcttagcattgtaagagcttccttctcagcttcaagatatgatttagcttcattgacagcttgatgcttactggtcatgtcagacaactggttttccaaagtttgctgatcagccatgacctcttcattctcagttgccaatctatcgtacatgccatcaacttctaaccttaaatttatgagttcctggttcttgcgttctaaagctgctcgttctttcaacaagact

SEQ ID NO: 284835 - DNA, 506 bp, Zea mays
gtgagcaatgcgcgttttaacgggaagtcgggaaccattggtagactgcactgtagcaaaatcggccggcgtccatcgctgctcgacggatactatagcaccagccagccatggggaatggtaggcgaatggaattgtttagaatagaatagaatagcggcctgccctacagtcatcggcattgttgttgagagcactcctgctggaaccaatggcgttagatccttgtgtttttattattccttggagttgcggtagaagtcaacgcaggtctggcagtcgcagtccttgaagcggcaggtctcgcagccgatgcacacgcacttcatgcagcccgtgcaggacggcgcgcgggagcagccccgcaggaccttgcggcttgcacgctcctcctcgtcgtcacaggtgaccctggcggggaagaaaataacacaaagtgccagatgaatcaagcagtactgtatagcacagcaaaataccctgtacaaagcaaccatcatttctcc

SEQ ID NO: 284836 - DNA, 267 bp, Zea mays
gaagcggcaggtctcgcagccgaagcacacgcacttcatgcagcccgtgcaggacggcgcgcgggagcagccccgcaggaccttgcggcttgcacgctcctcctcgtcgtcacaggtgacctggaagcctccctgtaactgtagcaaatggtaccagtccgtggcctgattcaaatgaacagttcgaaaacaacagaggcccacgatagctgagatgaatctaaagcatgcaaaactaggcgagtaaaatacatttctgccggtcta

SEQ ID NO: 284837 - DNA, 357 bp, Zea mays
cagtccttgaagcggcaggtctcgcagccgaagcacacgcacttcatgcagcccgtgcaggacggcgcgcgggagcagccccgcaggaccttgcggcttgcacgctcctcctcgtcgtcacaggtgaccctatcagttgtcaaatccgcacaagtccaactagctttggcaagagcgtcatggtaaacacggcactcttcctttgaccggagccgaaacctcctctccttgccacatcctgcgcagcagatgaactcgtcgcggtgtgacggacgtccgttacggcccttgtgagaaccgttgcctgacttgtgcgccaggtagtagtatttgagcagagccgtctttgacagtggc

SEQ ID NO: 284838 - DNA, 464 bp, Zea mays
gaactcgtggagggcctcgggagcgttagtgttcagcagatgatcgacctgtgctgacagctgacatgcgacaattaccaactgttacagtggtgctgcaatgctactcctgtcagactccagccatttgtattcattaatggctgctattcacgctgattagttctaatctgaatctggttagttcttatctgaaatacactcacacttctgactgggtcttcatcatgtagttgagatcttttataatttggcaaagactacattgatctttggtgggggtcatcaagatataatctagttttatcccccagtactggcaatgattagaatactctcaattatgcaccagacatctatgtgaagttcaatgtgctttgcagcgtggcatgaagccatccatccaaaccattgtcctagcaaaaacttttgttctccactcctaggcatggatgcagcaataa

SEQ ID NO: 284839 - DNA, 384 bp, Zea mays
ggaataaatggtggggcttaattgacgaagcactcgcatacaaagcatatattgatagtacattctcggtacctcatgtttcacgcctgtacccatacactggattggcaagtaaacgccactaccaaacgagttgcacgtagcaaggcatggaacctgagcgtcaagctcctcaggcggtcgcggctgccgcgagcttggcgcgcagctccctcctcaggatcttcccggacgccgacttggggatggggggggtggaagtacaccttgtgtagcctcttgtagaataccacctgcttggagatgaactccttgatggcgtcctccgcgatgtcggcgtcggcggcgcggaccacgaaggcgacggggacctcgccggcggct

SEQ ID NO: 284840 - DNA, 470 bp, Zea mays
ggaccataatgattcatgagcaactggtgtatcatcatgaagatgagcattggccaatggacacacatgtttctatttctccagtatatttatgatcagagcccgcatttggtccaactcaccaacatgagtgggattaaatgaacaccaccaacaacaataacggcatcaaaactaagcaacacgttccgaatttcataagcctttgtgaagacgaacaccagtgtctcggcgacctcagtatgaaatgaatggatttgtaacacaattgtgatacataatgattcatctggggtagtttccccatgttggcagcaaccatccttcggtaaaatctgggggtagtttctctccaaggggagcgccttatgtccatccaatacaaatgagataaaaaaaatcatgcttggcctggttgtttccaactcatttgtacaggctgagtcccaggcctcccaaccacgcgtccg

SEQ ID NO: 284841 - DNA, 487 bp, Zea mays
ggggtatagaatagcaaaatgggcctggggcaaccaaacgcaagtaacgggtctctctggtccggagttgattgcgttacaaaacgctgaaccaaacactaaatacatctgatcttaacaataacctatatttggtaatacggggctaatacacaattataaaggggggacaataagctgccttcaagcaaacatcatgcattcattgggggcagtactcagcttcaaagggcaacaacttcccaggggcctcataactgttgactcattgcctcaggatcctcgccaggaacttcagcaaagcaaacagggcataccttgtttatgccaagccatcttgtcacgcagctggcatggtatacatgctcgcatggaagtgtcatctgcaaatttcctctcctgtactccatttggcaaatcacacacctctcacggcgtgttttcttccttgaaaaaaaaccacacttatacttcgcggacgcgtggg

SEQ ID NO: 284842 - DNA, 394 bp, Zea mays
  unsure (1)..(394): unsure at all n locations
ctgnagcgcagcctaaaaaacacagtaaaggcttcttattaacatatcacaagaaaccacggtgtatgttttaaaatatcatcagcaccacatatacatcaaatgaataacgtattcagattgcaataatactatagttcactgacaggcacactgggctgtttccatttcaggtggagcaaccatgaccggcaatcaggatgagcggctgttcggtcatcagagttctccaggtttacaaagttgcagacagaaaatcggttcagctgacacttcccaagtctccatactatacacatactggtgaaatggcactactgctcaacttatctgccgttcatcagcttgtcgagaaccacgttcaggtccacattctgcccattttccgtcagcc

SEQ ID NO: 284843 - DNA, 565 bp, Zea mays
accaacaagaataatatcaggtttgttggttcaatcaccaacaagaatcgtaacacgtgtcgcagtcgcagcaacgggtaacagctaacgacaatgaggagccgagatgactacaaacaattacagctcggcaatgcggcacagcacctaaaatcgcgacaagaacgcagctactgccttcccaggagtatcctgaggctattgagcccttcagcagatatgctcctctccaccctaccaggacggtccactctgatccgaggcggggcctccaggtggaacgagaccagcactgcagtcaagttatcagtagccccccgcctgatcgcctcctcgacgatttccctgcagcacaacttcacatcgttgtgctcctggaggcgcttccgggcgaagtccaccgagttctggttcgagaagacgtcccagatcccgtcgctgccaattatcaagaactcgtcatccttcgtcagcgtggtcatcttgagctctgggtcagcactcaggggaccacctgtcgcaccagctcctttcatgccctcgagatgccagtcaccaagtgctc

SEQ ID NO: 284844 - DNA, 503 bp, Zea mays
  unsure (1)..(503): unsure at all n locations
tttcttttttttttttttttttttttacaccaagaacaagtttgcatgggagcggggtgcccagatgccacttgcgagtacccaaagcacgcagcgctggtgtggcaaaccaagcacagcatccgttggaacctgacaacaattttgtatacatcatccgaacctggcgggagcttaagctcgtcggccacttcatcaatttgtcacccaaacaaacacacacaagacagcagcagcagccgcagggacctggtacgctaccagggatgaaacaatagcagcaagcttgtgcttaggatttatacattacagaatgatccagggccttacccggagcagcacacgtggcaacaaacacacgggggttcacttggagacatcgccaacacaccatagttcctccttttctttttatcattttttgggttaatgtgtaccgctccaggcaacattgttgctagcttccgnggngcgcgcattagccatttgcaccgccgacgctt

SEQ ID NO: 284845 - DNA, 791 bp, Zea mays
tctagctactgggaaatgggaatggccttagcagttagtgcaaaccgaaataatgcccccctagccccctgcacaagattacgatattcattgcaactagaccttatagcatcatcaggccaacaaaccaacggcaaataaaaacagaaagtgctaaatttacagtagtggatttgagactcaacatgttcctggaacacaaactaaatttctagctgttttgcagagagcactaccaaatggtgattatagtttcataggcatcagcgttagaatcaaattgtatgctcagtacagtacaaaaggcaccgaggcctaccgagtggagtgtgtaggtttggcaaggcttggccgaaaccagagttgcccccacacacacactaacgtccagaagagcatgcaatatcaccagttcaatgacggaggtaatcgaattcagccttcgcgagtcagtgggtacccgcagagaggaaggaatcaggaatagcagcaggatccagctcgtagaagccacagagctcgccacccttctctgttgtcagctggaaagagggtatccggtgagaaaacagcaagtcatcctttgttggcacctccagaatactcctctcattgtctggcttgaatacagttttgtagccatctacctgagtcagaaataagactttcgtgctagcttcattgcgctcagttatctcgccaatggcatattcgcaggtatctttgctaggaacccagccaggtgaccaattgtggtagatcgcccaaatttcccctacttctgggtggat

SEQ ID NO: 284846 - DNA, 647 bp, Zea mays
tttttaaagttaaaagcgccgctttttttataaccccaacacttttgacagtgccttttacagctattcatcgaccaaccgcctgctgctgctgatatcttccctcctctcgcgcatccaaccaaactactacacagcactgtcagagagacacaagacaactctgacaagtgcccagtgcccgcggtttttttaacagcacagcatccaaggccaagcaaagcaaacccacaaccacaagccaccgcatccattaattatgactaacaaggcggctcacttgattaccagctaatcactcgctaattaattctctctctcctcgctcgagagaggacgggttcaccactccggcctgggggctcagcagcctttgggcgcgaaccccacgcgctggccgtcgccgtcgaacaccacgcggaacccctgctgctggatgttgccgatgatggacacgccgccgtcggtgcccgcgaacgcgaagcagaaggtgcccctggagtccacggggatgaggtagttctcggggggcagtgcggcctcggcgccggccgcgaagtgcatcgacacggtcggcaccttcaccaccctgcgcccgcccaggtcgtagcacgtgtcgaacagcgagaagccggcgggggagagcc

SEQ ID NO: 284847 - DNA, 513 bp, Zea mays
taaaatgcccgtgggcagaagttcccatcaaggagtaatcagactcagcagaatttgccttctttatccttccttttggtcaagatgtacagttgataatgtagtagccctggtatgtcaacaactcatcacggcacaattgtacacaaagcttccagaacggcgggtgccaatgatcttccaatctggctgttcattattgggtacccaggaacaaatttcaatcaccccgctaccaccagcactcatcgcgccaattacaatgagcatatctccacaactacgaaaagcaatgccccagccatgaactgatgtatacctcccaggtaacacgtccaagagtgatccatgcattattttccttggcatacttcctaacctccttggttgcatagtcagcagcataaagctcattattcacaacagcaacaagaggcggagcaccgcttccccgattaaggccctgcgccatgtccgggatcaagtgccaggagccattctccaaatcaaact

SEQ ID NO: 284848 - DNA, 336 bp, Zea mays
aacaaaaagggggagatgctcctatttctatttggaagtatttatgacttcagtttttggacatggatacatgtagagaaactagagacagacacatgccagtagggaaagcttctacagatgggtggaccaaacatcggttgagctctgcagctttatttcctgggactaatctgagctgccacaggagctcccatggacctcagctacctcgggcaccattagcctgaccaccggctgagccgtcccggagccagacgacgctgacgcgcctgacaaccgccgggatgacgtcgaggcacttctggaagttggggttgaaagaaaagagcaccc

SEQ ID NO: 284849 - DNA, 443 bp, Zea mays
ggggggcaaaaacagctgcaacgtttgttattatgaaaaaaacaagtaaacagttctttacacataacctggacaggttgcttgtgccgaacacaaagtcagcacaaacgtgacgagcgttttatccaagcaaatctaaatggggaccacggcaccaagcaaaagtgacatgactgcaggggtaagacagcacaacatgatgcagctcaccaccgattatttgcaaacttaaccagttcactaccgttcagactccagacttcaagttcaatggccgacctgtcacccaataacccatctgaggcccacatccccaagttcgactcgggcaacaagcttgtgtgagcaccgacagatcacacgcccagaaccagcaacagggttaaaatgtcctgtgtgaaacagctaatgacacaataggatgaaaataagagaaaaagaaa

SEQ ID NO: 284850 - DNA, 509 bp, Zea mays
tacgtgagtgttgcatttcgaaatttcaaatacgttaaagaggggatgcaaccggtgcaccaattgaagagatgtcagagcagaactttgtttagctcgaactagtatcaaatgtttttttttaccgtctagctatctttgttcagtagagcattgtcagcgacaacgttccatgaaacttgtgcaactgcagtgcaaagagatacagccctcgcattctccgcgcgctgttcgcaaggaatgctcatgggtcatttacttgtctaggccccggctaccgaatgtgcacagatggctcccaacttctgagatcacatccaccagacctccgtatccagcaacagctgctatcccagttgagtggatggagacagaaaacgccgactgaggggcacattttacttgtgaaaggactgtcccgtttattgtgagacgggagagcagaggttcagcgccaactgctaaaatatgattcttgtcaaacaataaatcttgaacaggagcatgac

SEQ ID NO: 284851 - DNA, 398 bp, Zea mays
ctgactattcccgttcatatattaaaacaaaatcatctacaaactacctcttccacctaagtggactgtaacagattttttgctgtttcataggactgttcgggctattccaccactaaccatagaagaagtgccaatacagctttcaaaacatgggcttcaagtaatatggctgttgtggccaaacaaaagtgattgtcacgattatcagcaccttcttcacgggaatgtcagattctctaatagcaagtgacgattcagcaaaatccacctcatcatgcaacaatgcacgaactggagggctctcttgaatctgaggctcgtcgatcagttcgagctctttctctactaaaacggtcttcgactccttcactctggtacccatcgtttcagtctca

SEQ ID NO: 284852 - DNA, 380 bp, Zea mays
agctgaacataaaacagacagctgatcgaccctcattttcaacttttgataattggtatgtatgtatacacacaaggccgatcttctaatgttgagtggcttctatctaataacaagccacacaagacagtttagaactggcaacctcctaaatagtttttcaagtcagcattagcgttggtgagcccaccaaagcctctgttacatcatttaccacaagcctgcacaacttcaatcactcatcattcactatactctgaagaatatgatgatgtaccacctccatcctcatctccgttggctgctccatctcccaccgtcgtcgtcatcatcatcttcaatgtcatcatccccatccatctcaatgtcatcatcctcat

SEQ ID NO: 284853 - DNA, 432 bp, Zea mays
aaaggaatataatctgtgggttaatttgtttttacaaagggggtattacaatttaagtatggagttgtacagacaacaatcttttatcaaatatatgaacaatatcagatgggcaataaaaatattatgtcacacttacgttttcaacttgacactagatctggaatatggcttggtttgagagtgttcgtagctcgataactttgtagttcaagcgggtatctggaccaacatgaacaagctcatgctctggcataaccgacaaaagccatcttcttgttaactgggcagatagcctcgaatagcaggcccgggtctgtgcccatgagatcgatggaggtgtagtcctccaatgccacgatgcccaccgtgttgcgtgccttcagatagtaccagtcatgcacctacagcgtcttctggatgtaagatgat

SEQ ID NO: 284854 - DNA, 447 bp, Zea mays
gattaaaactcgtataaccattctaaaaaaaaccaagaatttgagccatccaatcatctctacaagaatttaatccaatcacctcgaaacaatagtaatctaaaaaccctacggaccacatactcgcttggtgccctggtgcaccaccaggcctatcccaaaaatgcgaatcaaaataaaaataacgctacactttcactctcaagagacatgaccaaaacaaaacattgctgcacgtactgctttagtggggccgtagacgtagatgcagtaaaagtagggtagcgtgcctaggcacctgcacaccttactgattcgacgattttgtacaaaagtattataccatagagctatgaagtttaagcgcaactgataccatttgcagagtactgctttgtgtccgcagccttcaaatcacggagcacggaactggctgccaactttttg

SEQ ID NO: 284855 - DNA, 472 bp, Zea mays
tctttttttttttttttttaaaaaaggcaggagttgctagtgcctcatgtattaacgatcagttaagaatccaggttagttgatgtatcccggattcatttctctacccagtacacaaaacgaatgcgcatacagcaactaacctggttggtggttgaaattacaaggcacattacaaataacctttgaggacgtcgtacaaaactcccgaggaattcgtctcatctattcatgggaatgctttactcagtcaccaacaacattatgaattcgtctcatctatctaactggagaaattcatatatttggtacattgctcccactgctattttcacatgacaattcgagctaaatgaccacagacgttcgcttggttgctttctccagcatgcgctgaatagacgttgatgataatcaacccaacaacgcagtgacaacagactgaacttagccactctgcctatggcacatg

SEQ ID NO: 284856 - DNA, 471 bp, Zea mays
cttttcgctcttttgcgttttttctatagagacaaaattattatataagcagttacagattaaggccaaacaaaccgactaatgtgacgaaactttgtattaagacggctctaacaactcttccgcccttcttccggaaaggaagaattgtagatatactaatcatcatcaagcttgtactagtacacggcccacatcacactggccaacttgtcgacaaggaacaataaattggaataaatttgagcagtaattaaacggcagtctgctgggcagcagcaagagagcgacgttggccgttaggtcttatccttctccttctccttctccttgttcttggacgggacacggccgttcggtgccagcgagcatgccgtacttctccttgcgcgtgatgggacgtgcactcgaagccaagctgtccgctgagcgtcttctggatatagttggccaccttgatgggcgacttgc

SEQ ID NO: 284857 - DNA, 386 bp, Zea mays
accggggccccgggagcttgccgtcgcgtagcgcggcgtcgtacaggagcttgaggtggtccaggtcacgcaggcagtccgcgagcgcgcccacggactgcaggaggtcggcgcgggcgcggagcgccgggatgtaggcagggtccagagcgagcgcgcggttgcagtccgcgatggcgtcggccggacgcccgctggcctggaacgcggcggcgcggcccacgaggcacgcggcggcgaacgggtgcggcagcacgccacggcgcgcctcgaggatcttggagaaatggcgcacggcctcggccgggaggccagcgtccagcgccgccatggcagccgcgcggcgccggagcaggagcttcacgtgcgccaggagctgggacacg

SEQ ID NO: 284858 - DNA, 513 bp, Zea mays
ggagctaaccagttgttgtacaaacttgataaaaccacagcttatcgacgcaaggtcttcctttgttctaacaaaaaaaaaggaattggtacaataacaaatgcaaagtaaattcaaatgctgtcaaacacagtactaaaaatgctgaaaaataattgcgcctcattaactcgctaaccaatgtttcctaattttgctgaccgcttcacgtatacgcctcagcatccaaatgtctgtacaagaagcatagatggatcagaatggcttgttaaaatccgcatgtccaacatctctgcaactttttatcaccctctgctgagtccacgcgtagagaatgctgaaccctcagcggcagcattaaatgcatggaataacgaattggtcttcataaatcctctagaagaaatgaagtaaggcagtttcgtgaggcacgtgcatctcgtcgaatggtcctctacaatccagggccacaatgctccttgtatcgtcgtcaattgccaacttaagatgacc

SEQ ID NO: 284859 - DNA, 594 bp, Zea mays
aatggggcaatgatcctttggttccatatatcctcagccgagaacagaaaatgggctccaattttctccagcagataggaatcaggcgcaaaccagcttgaaagcgcattgatgcaggaaccagtaaccagttccgggtgaaatttctggccgaaatttttgaacactttgtaaaattaagagtctcgtttgttaattaaacgcttttcattcaaagcacgcaagctagcctacagcttagccatccgccagttcgcacacggggtggaacaaagccctgaccgggcggtgatcggagagccggtagcaaccgcagcgctcgtaccggacctgcttcatccccttcccgcgccagaggatgcggtcgcaccatgccggcgcgcggtgctgcttctcgcggccggcggcgacgccgtcagcgcaccagtggaggtggtcggagttgcggctatacttgtaggtcggggcgaaggtgacgtggccctcgtgccagccgtggaactgacggccactggagagctccagcagcagctcgtcgccctccagcagcatgccccatttcctggccctcaccagctgccgtgcttcgtcatc

SEQ ID NO: 284860 - DNA, 432 bp, Zea mays
gtgctccttctccacttgtgcttcccaagctgcttcgccggaagcaatgcgagggccctgccccggtggaggcgtctcggcgtcttttgccccgagcttcaacggctcccgcgccatgatctggccggcaacagtaaattgcacgagacggatccgcatttcattcatccaaacagccaaaacggggccgttccgcgcaggcgacagggctacgggaggaatttgctatgctagccaggcggctgaattgctgcccactttgtaccctgaaatcgtggtccgagacgcacggctcgaggactgctgggaagtggctgacactcactgcagctcgttctttcctggttacaagttcccgttggaccttgttctccggattggatcgatacattgctctcctctctggattttcagttccacccggctgcatga

SEQ ID NO: 284861 - DNA, 388 bp, Zea mays
acagggaagctatgtttcgcgtaaaggtaatcaaacagtagcacgtgtaaagtcaacgcatacccatcagacggatagtaactccacacagactggcctgcaatctcatacaacaaatctaaggattcgggtcctctccactacaataaaaacccaaagctttggttctcgcggatgaaaggcagcaggtcattaactgacgtctcctcaatgtttggcattgacttcgaaatatcttcaagcgaaaagggtatgctggaatcatcatccagcaggaccgaaaagctggagacgctatttgattcttcgcgcagcatagctctcatgcttgacatgaactcggctgaagttacatttgttccctttaaatcattccaatacataccga

SEQ ID NO: 284862 - DNA, 430 bp, Zea mays
ggaccaaatccgcttctcgagagcgagcatttatttcatacaactctagaaaaggaatccttgtacaaagggcacggcactccaggtctgaacatgctgagaatttatctctaggaaatgcagaaccctgacaatcaccaaagggaagccagtccattggggttcaaaaaccctcgtaagaggcatcaccagttggatctaccagccacgctattaacactaaggccaaacgggaaaaagttactgcaacgatccaacgacgacaaattggacgagacggagaccaaatttcagttcttcttgggcggcacgaatttgaaacctttcttcacctgcatatgtgaggacaccaatatacctgcatgatgctccatttaccggtcctactcagatgtcctcctcaatacagcttcagtaagaacttcctcac

SEQ ID NO: 284863 - DNA, 487 bp, Zea mays
gaaacaagatcacacgtggcgtgcattaaaagcgtcccagtatgatgacacgatgtctaagcgtccccacatttcagcgagatggatagggaagactctttggggggggggattaacataaatctcgtatacctctggggctttcccaccactccactcgccgaacgaacaacctcatctcacatggacgtaaaaaaagaaaaatgaatggtgaaatacaatgaactacttgataggatcgcttgagtctgctcagagctcgcgcacgcttgtcgttgaagcagcagttgctgttgctgctagccatcgtgcctgtggccgccgtgctggtgatgcccactacctctggccatcgcacccttctccatggagatcgttactgcgatgttcctcacctccttcagcaccttggccctggccgtcgtcgcactgtagcgctacaaaggagaagaccaacctctgatgtatgattgatcataggtttgcc

SEQ ID NO: 284864 - DNA, 296 bp, Zea mays
ctactagcattccaatatgcgccttcgatgttctacaggtatcgcgttttattgctgaccaataataatgaaaatgccctgcatcatctgtatcctgaggccaaaaatactactatcttacacctcaggcccattaagttagaacctactcatcaaggatgatcatgcctcgacactatctatagagtcaggcgctgatatccagaatctacaatgtcacttaatctagggagagactttccttcattgcctcatagacgggataggtaatgctggcagctggcaccactttaaga

SEQ ID NO: 284865 - DNA, 840 bp, Zea mays
  unsure (1)..(840): unsure at all n locations
cccccgagtttttttttttttttttttttgagtttttttttttttttttttttttttttttttttttttttttttttttttttttttttttttttggctgcgaaaacaaggggcatattattatacaataagattttcaacacacgcgtcaatcctgggaaacaacatgatgaaaaacagtccacatatatgagactgtaatactagtgtgcacttcagactgcttaagattaacaatcagaagatacgatacgatgcatccaggaacttcagaacgcctctgatatatgaagaaaaaaatgcagtgccgccacaccagaacaccacatagaatgtatgtttgatcaatctgagaacctttccgacacacagctttttgccgttgagttagactggttcattctatggtccatggcaacagcatcgcaagaaaagctaatgctatccctgcaaattccacccaagttccttgcattgctgttcatccggctgcagtgtgtttggtattgcaccgaacacacaacgcacagcttcaaacccagagattgtattatggaaaaatgccgatgcctcttccatgttcttctgcagttcatctggggagatgcgcatgaaatgctgtgaggagggtggtggttgtcccacaggcacagttggtgcaatatcagcaaccctaataaatctttctgttgctgcctcccaggaaagttcatgccgcaaatcatctgacagtgggataggttcttctgccaaagctttcattgttagtctcacaaactcttcatcagtattgtacatgtgacaattaggaaatcttttgaataaatacatttganggat

SEQ ID NO: 284866 - DNA, 319 bp, Zea mays
cactgccgtggtaaatagatattacattggcttttcattggcactgacagggacacgcgtccatatgacacagattacaggttctcaattaatcaagatacatattggctgccacctaacacagcatacactcgttggacgatcactattgatttacgatatgaggggcctcagtctttcccatacagaactatatcaatctagcagagatcgaattatttttgtttttgggtaacacccggtcgatccatagaacaggtccaaccaaacagagggggataaatttctttcataaagaatatgagccattaactttcga

SEQ ID NO: 284867 - DNA, 527 bp, Zea mays
gtctcaataatgactactctgcatatatgcatgttcacgatacaatatcaagttatacatgcttataacaagattttacaccacagaacggcatgcgcgcatgtgcgcgctatacactagtgtatgattattattcaacaaatcactcgtcgtatattacaggtaccactcaacaattattctaaagtcacagaacagaacatctccatcatccagacatcaagcaaatgtactcaatgacttgacttaacttcatcgttctcaagctgcatgcacctgctgctttctctctagttatccgagctcaacgaagtttcgccaggcgaatcgctttcatcctgcatgcgcttcatctcatacgcccattctaacccagagcagtaatggagggggggattgaacctatggtcattcatctcaggaggaaggaatgctccattctcaatcaggaatctcacagccttcttgttcctttccttggcagcaatgtgtagaggagtccagccgcatgccaatattgatgctcg

SEQ ID NO: 284868 - DNA, 286 bp, Zea mays
caacaaaagcgtggacggtcactcttccgaagcagcccagttattacattgcacaaatcaatagaactgcaactgctagcgtcacaaaaccgtggattattcaagcgcgcgcagttttaccggcgacctccacgagttcccatggcgacaaggccttcttcttttttattattttctggtcgttcagaacacaagcaaaatcccgctcccgcgttgcagagacgacgccacagaagccacgtctgactgatttccacgcgccaaccgggggcacgggggcgctccc

SEQ ID NO: 284869 - DNA, 407 bp, Zea mays
aaatcttaatcccttttgatattacccacttagcttcacaatgtacaacaacgttagtacttagtactcgagcaactcataccacaatcccatttgatactatagcaattactactaagaatgctgatgaaatcttagggctactaaatgacttccaagaaccagtaaaagttgagcccttaaactgaagtctcacataatcattaactacaaaagtcgacaaagcatcctccctttattctttcaacttaatctcctcttccctgctaggcaccatctccaagagttcggttccaaggctctctgcctgacctgcttccaataatggtgaacagtcagaggaaactcgagcagctttgtagggattcatggtgctccccgcagcatccttcctctatgcacctgac

SEQ ID NO: 284870 - DNA, 386 bp, Zea mays
aaatcttaatcccttttgatattacccacttagcttcacaatgtacaacaacgttagtacttagtactcgagcaactcataccacaatcccatttgatactatagcaattactactaagaatgctgatgaaatcttagggctactaaatgacttccaagaaccagtaaaagttgagcccttaaactgaagtctcacataatcattaactacaaaagtcgacaaagcatcctccctttattctttcaacttaatctcctcttccctgctaggcaccatctccaagagttcggttccaaggctctctgcctgacctgtggtagtcgcccttcatcttgaggtagaataccttggactcggtgacattggttgaatggaatcttttggt

SEQ ID NO: 284871 - DNA, 531 bp, Zea mays
  unsure (1)..(531): unsure at all n locations
actaataatataggaggtactacaggtctgtaccatgcaatcatccttgcattgtactgctacctcaagcacactgcatgcatcatttgcagctggcccttcctcgagttgcaggcataatttttttacatgaaacacaagaaccattcgcataaacgaaaataaacatgcacatcatattctggaacgaagagcagagcaggtagctgtttcagcagcagacattgctcaaaagcctggcccccctccccaagtcccaaccttgaaggccaccccgccaatcattcattccctgttctccgacgctgggcacatgcagagcagagagatgcttccgatcacgatctccgactccgtcccctacctgttgccgttgggatcgatctcagacgaagctgccgtcctctgctgccccgtgcctctgcaggaatgtactcttctccccctgcaccggctgttgctcaagngagcagtcgcgcgtaccggcgcacgtgtggagccacgtggcgccgccgacgggggcctggctct

SEQ ID NO: 284872 - DNA, 438 bp, Zea mays
  unsure (1)..(438): unsure at all n locations
tttnttttttttttttttttttgaggagctgaggggggtttgttcagaccatcctttagcgtggtgtccaatacatcacgatgaatttgaagatcacatcgctgctggaataatatacaatatacttagtacaggaaaactaaccgccggaaaaaacattttctctaagcaccccgacaaatccccagaataattaaaaaatgaggtagagggtaaaacaaggcttcgttctatatgcctgtccccgacacgtcatagtttacagaaacggcctatagtccagaaggaaaattgctgacttggccttgttccaatctgtcctcgccattcactttataagacatccggatccgcattgcaagcggtttctgtccctgttggttattggtgatgttgagcccttgtgtgactgaaccactttcattagctggaacagtg

SEQ ID NO: 284873 - DNA, 400 bp, Zea mays
tgcatctcaagcaaccgtttgctacaacatcattcaaaaaaatccttttttttgggttctatattccaaggccagatttctaaacaggcctaggaataaaacaactcatcaactggacaaacagctcaattgaactaatagccttactacaaaatctccaagcctcaaggcaaaccagtctaggaatgggattgatccactggacaggtcctcaaaaagcggacctttacataaccagctaaacttaacctcctggcacctttcatgtacaaagacaagaacggcgtgattgcctgtgggtcctgcccccgtctgcttgcatctatatacaccatccaggtcaggcagatatcagcggaacttctatttcacaatgcttccagcacagtgaaagcaagca

SEQ ID NO: 284874 - DNA, 339 bp, Zea mays
gtttggttaaaaagacaaggacgacggaaaatgggtcatttttatctcccttagagcatctccaacaatgcctcaaactaatgcctcaaatcgaaatatagggctctacacaggaaaaaccactccaacagtgcctcaattcaataaattttgtcaaaaaactatagggcaccctctcaagtgcctcaaatatactaaccgtagtgggctgccctataatctagatttggggctttactgttggagcggggtgctttgttggtgccctaaattctataaaatttacttatttttaaattataagacatttttataggtcacgttgttggagatgctcta

SEQ ID NO: 284875 - DNA, 398 bp, Zea mays
ggagccagctgcgcctgcagttgcccgtagcccccctgctgctgctgctgctgtgggggcaggaagggttccacgtacccgtagcccatcggtaccaccaccgcgcgtaacagcctccacagcagcagtgagccgtgcccacgcgcgcaggcaggacgggatctgcagcgccgcgccgtcggccagatctcccggccgccgggcgcagtcggcagcagctcagcggactgcgggcgactgatgagcgcgccgtcgccgtcctccccggggtctcgcggcgcgccaagatccaggcctccccacgcgagcggcgtcggtggcgcgcgccagatcacgccgcgctggagtcgaggccgcccgccagtaggcgcggaaagcggcaccaagtgaagcacgcg

SEQ ID NO: 284876 - DNA, 366 bp, Zea mays
ggaatacaactataaatacgtaggcccaaatagattgaactgatgttgaacaaacattatctttatcgcacaaattatttcaaaagagtcaatataaaattcttaatgataggcaaatatcatcagaagattcacttccatggttgaacctggaggataaatttgacctcggtgtgctagccttccacctcgtgcattccacgttgttcctcttcatcattaagaatacattgataatatatttataatatacactgatataaaaacactaattatttgtgatagcattccagacatcctcaatgcatgataaagacaaccattttctgcataatgtacaaggttaacacaatgaagagataagct

SEQ ID NO: 284877 - DNA, 502 bp, Zea mays
accaataatttttttcttcttcattgaacaaaagatcggatcggatcaggtgcgaacaaaacagaagacgaaaataacccataccacgcaaccacatgatatccgccgggggaaccacatgacccatcagcaacagatggtaaccatatttattctagcacaaggcaaccgcaacaccgagagatagtaacgcgtacactaatgtacctagaacaccaccctcttgttaaacgctattctacacccatgaaaaataaaaccataggggagaatatgggagaacatagagtacacaatttacagggaaactactctgcggcgacgcctatacaggtgggtgggagggcagggagaagacacaaatgaggtgcaaagaattagttggcaggccagacccagccagccatcatcatatggggctactgaaacctctactaattacacagctacggaagccagcagctggctagggcggaggagagcgccccagcactggctagca

SEQ ID NO: 284878 - DNA, 482 bp, Zea mays
ggggggtttttattttttttgtttgttttgttttttggtgtttttttttttaatttttttttttttttttttttttttttttttttttgattctttctgagggtaaccatatttattctagcacaaggcaaccgcaacaccgagagatagtaacgcgtacactaatgtacctagaacaccaccctcttgttaaacgctattctacacccatgaaaaataaaaccataggggagaatatgggagaacatagagtacacaatttacagggaaactactctggggggacccctatacaggtgggtgggagggcagggagaagacacaaatgaggtgcaaagaattagttggcaggccagacccagccagccatcataatatggggctactgaaacctttactaattacacaggtacggaagccagcagctggctagggcggtaggagagcgccccagcactggctagcactggggtggcaatctc

SEQ ID NO: 284879 - DNA, 330 bp, Zea mays
aacggggaaaaccccctccaaagggaaggggaaaaaaccacgggcgccggccggcaacttctcactattttcggggggttacagatcgcaggagatttacaattgagatagatatctcctgcggcttacaaagatatttatagagggggccgccttcttcagaatttggatcacaaactcaacaccttcagctgctccttgctcacggggccgccaagcagccccgcaaagattgctagaatggcgccaaaggacattgacgcgaccgtcactgttatgccggcgtacattgtgccaagcgtgaccttgccttcctcctccgtgcgcccg

SEQ ID NO: 284880 - DNA, 351 bp, Zea mays
gtagaatagtctatgcccagcaatcacatacgagagggctagttatccagatgtttcgataccaaggttactatcgtttctcgccatccacctttgaatatttacattacaacagcaaccttttgcaagcacggcatagctacaatgaactggggcagcgctatacacccgtttatacactcttcggagctacagcctgtgcacgttgtacaacctagcgatcaggtgaactaatgaactatgttgaagtagcagcccgcgtcatctggcttcaagaatccactgcacgcagtcctgcaggagcgggaacttttggctcaccgccaccttcaggaacacccgcattttgct

SEQ ID NO: 284881 - DNA, 345 bp, Zea mays
atccaaataagtgacagatgtccatttcttgcttcatgtcaacaacgaagagacggagttcataagtaataaaatagcacaagaaatgaagaaatgttaatgtactaatctatcaagatcacatggagtaagggcaactatcactcgctctccggccgtgagttcacaaaatttctccgactaaacaagacgcttatccaaccacttggatagctctccctttttctcctatatatatccacataagctgcgtccctttgatgtcaaaacattgaatggcagagccttacaacttagcacctcatggaggtcccttcgtgtcacaagggagatttgcaataaacc

SEQ ID NO: 284882 - DNA, 410 bp, Zea mays
agtaataaaacatcaatgcatcttatttacacgttctcaaatcaaaatttacatgttggtgactaggaatccttaacacaccagttagccttttcacagaagttaattaggagatccaacagagaacagtgtgtcttacgaacttgaattctactgctgtatgttatctggaactcatattgcatcacgaaaacaatatgtcagcagatgctttatccagtaaatgttaggaattctttttgccacttcagttgtgtcacatgacactggattgtcagaattctagtgctgttgcagaacatcccatgaactccgaagtaccaggccgcaggccgtatagtttacatgccagaagctgccctcaaatataccagtcgtcttctacaaccttgcaaaaaaaaaaagaacgt

SEQ ID NO: 284883 - DNA, 347 bp, Zea mays
ttagtaatttttttttttttttttttttttttgggttttttttttttttttttttttttttgccgggggttaccatttcatggaccaggatcaatcaacaaatctacacatgaaggcccaactctctcagcgcgcaaattctgctgcagtggcagtttttgcgccgggtctacatgaaaaacaaacgattgtttcgtaacaaacagagactggaaattcctgtaggggtataggcatggggacacgtatatactgcagacttcttaacagatcgccaaaaggggaacctccagctgattttttatcaattcttgctgctggggtgggccaccatcctgcgagccact

SEQ ID NO: 284884 - DNA, 417 bp, Zea mays
aagggtaacacgagcaatataatgccagtacatatgatggcatgccaatgttttagttcacataacaccaggggtgttacattctccatttgtaccttcacaaagttgacctcgtcctcctcatctagattgatcaacaaagcacctcttcatggcttggaggaatgtttgcgaacatacggaagatgttggaccacgctgatgttacaacgatgacaaacacctctagcagctcgtgcaacgaccgcaactgaagaccaaaatgcccaagtcggggtatgtatccttgcttgacaagttcctctccgtcttcggtggctcttccatgttcacggatgggacacagtatttgggctgcgggagcatcaaattcactggacaaatcaatcaggctaaaatgaccaagttaagcgaaca

SEQ ID NO: 284885 - DNA, 541 bp, Zea mays
gggttggttggttaaagtctccagttataaatgattgaactagctgatacttcgaccggaaaacacggtaatcacccacaaatggcattgctacataactttcgatacacgaatacaatagtctcaataaactattgtattagctaaaataccgataaatatataagtttaaaaggaggggaacttttttaagcttgctcgatcactcgttaatcaccaacaaatggcgttgctacataacttaagggaagcgttgagctgtgtgtattacacacatttatttaatttaacgcgatagcctcgccgatcaggcggaggagctccactggccggccctctcgaagccgttcttgccgtaggagtagtcttccatggcctgctgtatctcggcgtgcgagttcatgacgaagggtccgtgctgcaccacgggctcaccgagcggctgcccggcggcgaggacgaaccttaacggcctggcggacctgttccacacgctgacgccgtcgccggagccgaggactaggcagaaaagagccgtggc

SEQ ID NO: 284886 - DNA, 414 bp, Zea mays
ccggggacgccgtgtgggcggccgtggccgcggcgggggtgctgcggccggagcacccgcacgcgctccaccagctcgtctactactccgcctacgccgggtgggaccgcgccgcccggggcccgccgccgtactggttcccgtcaccaactgactgtaagcaaacgaacctggggagattgatggaagcaaatggaccaaagctgttaggatcatcatacagggatcctatatcaagttttaaccacttttacaggttttccgtagagaaccaagaggtctactggtcaatggtgctaaagcaactcgcagtcaagtttaagcaagaaccaatgtcaattctaagtacgtcagatagatcatagaaaggggggacatggcttcaaggtgcagtgctcaacatcgctgagtgct

SEQ ID NO: 284887 - DNA, 454 bp, Zea mays
aacacggcaagaactagcatcactacagttgcaacaaatactaaatcgccatcgatctcgacggcaaattatccgctaatcatcttccacctccagctaagttctctgagaaccatcattgcaaaatgtgctgccacaagcatgcaaacattactcccgccataagcatgcaaacaaggacatcttttcttatctctcttgccccccatctgtcacggcaatgggcaaaatagttcgttctcctgctcaccgacgcgagccaatgatgctccttgttctccattctccaccgccaccgaacggcggtctcgccataggcaccgtttccggcacggtgcgtcacgcggcgcaggtggacggccaggcgtcgcggctctcctcgtcggggggtagctgatgcgggacctggaccgggggcgcgaccccggctgacgccgacgccgacgccgacgcc

SEQ ID NO: 284888 - DNA, 326 bp, Zea mays
gacaggatttcggatgtaaaaaaacgattgagttcaacaacggacaggcaatgctgccttattcaaatatatacaggtcctacatcaagcgaaattggcttattgagaatcaaggcatttctttagcgcctactcctctataggattgatctccgagacatcaaccgatgtgaactcaccttccggcttgaacatgaatgagaagccagaaagcttcttctgcgggatccggctgatcttgaccctgtcctcgtcagtcaactcccagtcgaagatctcgaggttttccttaagcctctcctttttgtaggtcttaacgacaaaac

SEQ ID NO: 284889 - DNA, 286 bp, Zea mays
atcaagacattgtacgctaaccattattttcaggaacaaacacaaatcccctatttcatgtgtatagactatgccgaagcttcacccgacccctcaaaaatcaatgcctacaagatgatacagatgcaagattgaaccagagacatgttaggtgttgggctgagacaatgaagatccaatctgaagcatgagaggatacaccggactgaattccttgtctcctcgagatctgaccctcatctcgtagtcatctagggttgctttgacccccttccagatctggtcc

SEQ ID NO: 284890 - DNA, 692 bp, Zea mays
cgcctgactttaaaatgccttgtattctttttgttttcaagatccaagcatcacatgcttgtaaagtacaagcaaatatgactggaaaaggtattaaattgctgattctggtttcttttacatttacacatcacacactcacatgaccctaactaaaatccttttttcacgggtcaggaggacatcacctcttgtatattgcaatgtcagataggctaataacagctaacacggagtattgtacagttatcgatgtacataggtcattcatgcttccatgttattctgcagtagaacctgtacaatagcagtcctcatccctcgcgaacttctcaatcaatgtttccatcattttcttatacattggcatgtagtggtcattgatcatggtatttgagagtcgaatcttgctgtaaagatctctaggggtctcatatattccaacacagcactcgtcagcagcaaccggatcatctgggtcagcgtctgtgggaggcattgcaaccatgtgcatgattctaccaggggggtagaattgctgcctctccaagctatctggtgtgaaggactgcctgtcatctacaccttttagcacagcactttcctcttccattatttctttggctgcagctgcctcttcctccgttgttcgtgcctccatttcagcttgtcgatccaagtccttctcaaac

SEQ ID NO: 284891 - DNA, 397 bp, Zea mays
acaaccattagtatcatggggacgtatatatatgtgatgatagagtgaccatacgttgcgacggaacacaaatcatcatgcctccggagtcccttgcggactgctcataacattctggctagtcatcatgaatatcccatcgtagccaatgatgaggaactcgtcatcttccatcaggatcatctagcggatctctggtttagcaataagaggcgatggcgagccttgatgtagtttcaggtcccagtcccccaaagcctaggtcacaggcagtacgccgttgaggtagccatctttgatgcctttgacgctctgcgtcatatgtcggcgttgtgatcctttgacatctccactgttattcctttccaacacaggactgcacgacaatccccaacat

SEQ ID NO: 284892 - DNA, 453 bp, Zea mays
tatagagccagaaaatgtgttcccttgcaaagaccatataaagataatttacatatttcagatcactgcttgcaataattaaaccaaatacatttcttgctttgagcgttgaaggccgccacggcgcggatgttgctcaccccttcacctgcaaccatactgctcttggcatgtgcctttgccgcgtcaccagcgaagcccttcattgaaagttgctgagcaaagttggcaagcacaagcagagggaaagtggccagaataagtattgccactctccactcgatgataaatccaaccacgaaagaagtcataagggaagtcatgttctgcaggatgactgaaattctctcggctatagccgacttcacatcagctgcatcaacacctagacgcgcagccacaagactagagttgttttcttcttcgtcaaaccaaccaactcggacgcatggg

SEQ ID NO: 284893 - DNA, 452 bp, Zea mays
ctattaaaaaatgtcaataaattacttaacaatcctccacggtacatagtgaaggaatatcttattacatgcaacacaatcaccatgaaaatttgaaacaggcattcagcttattatatgtacaggaatctccacggaaacagcccacaacaacctccaactctagaaccacaatgctatttcctattgaaagaattgaacactagcttgagaagtctactgatctgatcacaaggtcagcattcttccttgattccaggataagctctgcattcggtcggtcgttgtaggagatcctccatgctgctacatctggctcttttccggttgcaatatgtctcttgagcactctttgcatggagatatcaatgtcaatgtcaatgaaccatttctcatcaaacaagtctctaatttcggtccaaacatcttcttccagtaacagatagttcctt

SEQ ID NO: 284894 - DNA, 487 bp, Zea mays
aaacccacgttcatctcatccgggcattctttcaatagccttcattcgtctgagtacatctatatctgccccggcccccagccccaagagaaaaatagaaacaagaatggctgaattgacctgccatcgtcccccatctgaattcattatctcccgtatttttttcccttctacagagagtcgaagccagaacataaaatactaatgtggcattgtggcccttgtaaccactaagctacacgctcttttggatcagagcggtagttttataccttaggggctagtttggaaacctcattttcccaagggtttttcattttcccaagggaaattagttcattttcccttgggaaattagaaatcccatggaaaaatggggatgccaaactagccctagatttagtttgtcccacatcaaacaatttatatacaacagttcctcactccgcctgagaaccatgagcacatttcacattcagcaacttct

SEQ ID NO: 284895 - DNA, 639 bp, Zea mays
aaaataatatataaatatattttatataaaactgaattagcttaattaatatatgccaaaattactattgttaaattctaatgatccaaacgggtcgttagaaaaatgaaaatcccttaaaaaatggggtagccaaactagccctagtatatgacaaggaatatcagcaaagtaagtgcagaacatatttctcaagccaagggtttatacatgctatgaaatagttccgtgcaatagcaccaatgactgattggaatgtctgatcagcaaaaagggagaatatctacttctagctgatgaatagagaagcggggctggcaacaatgaacccaattgtctcaatccagttccatctcattatcttgtgtgctacttctgcatgaccaaatttttatcgtacgatcaagcgacacagtcacaatcttctgtccatctccactaatatccaaactagtaaccttcgactcatggcccaccaaacttttgattggtttgtaatcacgagctgaccacagggctgctttggtgtcataggaagaagtcgctaaataatacccttcttggggttcaaatttcacatgtgaaataatactcttatgagctggaatagaatacaacatttgccttttcctcaaatcc

SEQ ID NO: 284896 - DNA, 330 bp, Zea mays
cgttggtacggcccattttatccttaaacatcattagggcaaacataatttaaagcgtaggcatacatcaaacaaaagcggctccatgggtttgaaatttcgcagtatacagtagtcatacaggagcaggcgcagggccgttatcaatcagaatcggaatcgggcctcctcttctgcttgtctttgcggggccgctttgatctgtcctccaagtcgtgcctcctctcgtgcttgtcccgcctcctctcctttccatcaccatgcctgtctcgtttccgctccttctcccctctcttctcgtcacgtttacgtggccttttccccttccta

SEQ ID NO: 284897 - DNA, 448 bp, Zea mays
atgtggaagcaacaatacataagtattttcaatccaaacgaagtggtcttgaggtagattagacatacaagagtgaataaaatgaggttcctaacacaattaaacaagtagattgacaactagaacttttgatcctagaactactctccactataacacttgctcattcattagttgcatcttcagtcttctaaccattcaagtgcgcttctcagtagttggcttcacccttttaagatgtgtgcgaggccaagcaacacacatgcccacagcatcctccaaagttttaagatctccgtgtggtcgaggtaatctttcatcttcaacattgttaagataatgaaccgcaacagcataatatccatccccaagtacagttcctccaatttcatgagtagtatctctagatataagattaccaacagcaaaaacttggcctagttttctt

SEQ ID NO: 284898 - DNA, 467 bp, Zea mays
cccggaaacatcgttccgggtcattacaactggtctaaatcatccagactggtcataatcatacagccttgttaaaacagccttcatgtttaaaagaatgagaagggggtccatttgatttcgtttatactcacctaaaataatccgcctaacccattttcatcatttgggcaaaaaaatttgggcccctccatttttttgagaatttagcccagagaagcaaagtttgtaaagacttttgtctagcatcaaatgaagtccaccatcaaacatccatgttgaatgctttcacctacgtcagcaagaactgaagcttccggtggtgtcaatgttgtcgacatacagcattatttcacttctgctaatacaaaacttccaggatagtaagaacagaagtcagacctcttcaactttagcacacaagcgcttcaggtactcgtagcatactatcattgagtaccccaagc

SEQ ID NO: 284899 - DNA, 430 bp, Zea mays
ttcatgcattgaaatggtctgctctagaacatgtagcttttggtttaatttagatccactgcatgtcacttgggcgaaatcttctgttcattgattcctttcatctgtcttttaaagatgtactctctctgttcttttttatttgttgcattttagttcaaaaatggactagcggaccacaaatattcgagaacggaagtagtatatgccaatccgtgtcattttactaattaaattcttggtattatttgtgttcattctcagatggctgttatattgtatatgcgtattgcttaatgggttgaatgtcttacgaattgcttcacatgatgtgttgaaactggctgtgcaatttatttacccaataggtatgcttattccttaacagtttaatgcatggccttatgtgtttactgcagtggtttgcatt

SEQ ID NO: 284900 - DNA, 437 bp, Zea mays
caaaaaacccggttcttcatgctcacaacactatggtttaggatcacaggcagcaacagactactgtggtacagctacaaagctccatttgcacgaagcaaaaggttgcatccactcgtgtgcagattacaagagtcatgtcagagatcaactaaggcctgcctcgtcctctggacagacaaaggtgctgtttcagcgaaggtatacacacgtccgaagaggaaggaccgcctccagtgtacgttgtatgccgtgaatctgactggcctctccacctcaagcctttcggacgatcacgtggcgctctctcttgtactccacctcgtccctttgatgcatgatcagaagggctcttctgacgatggattcattcatccccatccggtttagatcatcaatcagccgtcgctcggatatgtggctgccgatgcccattc

SEQ ID NO: 284901 - DNA, 350 bp, Zea mays
gaactagaaccatataacagaactgtatttttaccaccagtcaccagacggacaccgttcttgagaggttacacaagtgctagccttcagacacgcaatgcatgcttgagaggttacgcaggtgcaaccaccagacaggtaacaaaagaccttacccagtcaagagccacaaacatccactaactaaccacgaccgcaaaatggcaaaagctatagttctctctgaggctaagcaactttttaagttttgccccatggtctagcacccagaagacccaaggcacccccttttgtttcacttcgttacatgtgaattccgaaggcggacatcgaccgtgcaattgttctcg

SEQ ID NO: 284902 - DNA, 528 bp, Zea mays
tcatttacccgtggtgtgctcactgttcagcacgtctggtaattgataaacaaaacaggaataaaaattacaaaacattacaatatcagcaacggtagttttaagttagctgatgactcattataatcatatattcatactgtgtaatacacgtaataataatggctcatatgattgcatagctgttccagtgccactctgatcctgatggagctatcggttgaagaatcatgtaggccactcaacaaccaattacagcatctgttggtacacactgacaactgtagatacaacaagttacagatagctgggcacctggtctctgcccagctgtgcctcgaaaatgggggaagacgaagagaaaaccggccgacaaaaaaagggaacctcacgctgttgcagatgacccatcagagggatctgaaactttctacaggatccgagtcctcgagcattgaggccgcctggaagcagtcggcggcatcagctagcctgccgtcctgcttgtgaacctcccccaggtagaac

SEQ ID NO: 284903 - DNA, 549 bp, Zea mays
gatacagaagtatattaaagaatatggacatgtcaatgcctgctaacgtgcatgatcaagctaaacatggtacaaaaaaatttatttaaagaatgaactggccgtagtgaatacaactgtggtattaacaggaatggaagctcgacttttgagctctaactaaacttattctaaaatgaatgtaaacaaaaaatagggaaggatcaatatataccaaaaacgggggtaaataagaaagaaagactgtcagtgatcctctgacatctaagcgaactaattcatgaatttccggcagttagcagtctggcaaaggcatggcacttcgcgttcatcaccctcatctggatcaaacaggtagtcatacgttagctcatcaccagcacaaacatttttcttggctattagaacaatacgactttcatcatgtccaacactcataatcctcgcatagcagtttggtgtgcaagaatgattgatcagtcgtgccatgtttcctttgtctgtggcatcaacaaccacttcgctcactgtatctgtgaagaagctgtg

SEQ ID NO: 284904 - DNA, 403 bp, Zea mays
agcggagaaaatgttttatttggagaatgaactgtccctagtgattacagctgtggtatttacaggaatggaagctccacattttgagagctctaactatacttattctaaaaacgaatgtaagcaaaaattgagctctaacatataccaggaaatgaatcatcgagagggagaaaacccgggggtaaataagaagggcggggaaattatatcagtgatcctctgacatctaagcgaactaattcatgaatttccggcagttagcagtctgacaaaggcatggcactttgcgttcatcggcctcgtctggatcgaacaggtagtcatacgttagctcatcaccagcgcaaacttttttcttcgctattagaacaatacgactttcatcatgtccaacactcat

SEQ ID NO: 284905 - DNA, 331 bp, Zea mays
gggggcccccattttccaataggcagaaaaatgaaaacaattcggtcacaataataacctccccacctaacttcagttcatgccaaacaggctaagatctcgactagctctagctacaagcctacaagagttaagagttactgatcatgctaactactaaattggcatcagctcaaagccacacaagggactaatcacaccactcccaagcagcagttttctcaaagattctctttggagtaaaataataccataaacatacttgcatctctttacatgactgacagtgctgcattcaacctacctaaaccaccattttatgccagcattt

SEQ ID NO: 284906 - DNA, 588 bp, Zea mays
ttccttatttttatttttttcctaaaaaaaagagtgagagcagggcttaacaagacgtcgggtgttacaggcgatctcgacaggtgcaagtttgtgagtattcgcaacctctctgcagggagggggtgattaacatacatagggcacgcactaacacttgacggccccaaaaagggttaacctgcagagtgtggactttacaacgctgcatctccttcgcgtgtacatcttgagtccttctgagcacataccctagttgccccttacaaaacatcacaacgccaacaaaaagaaaccaacagaaagagggaaggaaaaaaaaaacctgctggaagggaccaagacgaccatcgggcaaccaccggtccctaggaacgtcgtgcaacgaaaaaatccagggctcagggaggccggcgccagtggcagcccccctggagaacaatagtcaggctcctcctaacattgcttgcgatcgcctgcctgtctgacacccgcgcgctactggcccttgctggcgagccgccgcttgtaccgcttcagcacggaggccaggctctccttccccttggggaaggcgacgtcgcccgc

SEQ ID NO: 284907 - DNA, 431 bp, Zea mays
gaactagtccgagttttttttttttttttttttttttttaccagaacaaagcatttatctttcaccagctacagtcccagtatggccacaccccgaacgagatggaagaaaaagggaaaaagagtagaagcaaaacttacaagagagtgaaagagaagagagaacaatagggcagagagctcttctctaccgcaaggcatggcgccccatgaaccggcgtcgcatcctcccataaaaaaaaagaaaacacaccgacacggattcaaacctcgtgccctagcagcaccaggatcctgccaaccctacctcctatagctacatacccctctcctcccgccaaatgcccatgccgctctgctctgttgccttccaccacctctcgcatgtgctccagcctagcacagcgacggacggtacggtggatggaggcc

SEQ ID NO: 284908 - DNA, 441 bp, Zea mays
ctcacgaacaaaagtggactaatttgcattcacaaaaacatatgtttcctacctttgcaagggataagttaataactaagacaactatggggaaaatccacaaaaaatgcgaactcctttgctatagattcctaatgcagcatgatcgggagttgctcagagaaatcctgaattggtgataattctctaagctcatatgctgcctggaagcaatccgcggcctcctgcagcgatccttcagctttcaggacaagcccaagactcaaccaggcacggtggtttgtaggctctaaacggagggcattgcgcaagtaagttcttgcaattgataatgaatcccctccaatatttcggagaattcctgccatacaaaccatgcccgggacgtaatctgggtcaattgatagcgcgaaagagaatgccatcagggcttccttgtgc

SEQ ID NO: 284909 - DNA, 400 bp, Zea mays
aacggaagattggcaccatagctagcactattgatgctacatgcttatatatatcaaaagatgtgcttatatttaacaaaagatgtagcgctattgatgctacatgcttatatacatcaaaatatgtagcgctgttggtgctacacgcttaagatttagcgctattgatactacatggttatatacatcaaaagatgtagcgctagcgctatcgttgtttatcgaaacagaaaatatagatatattactttagtcaagatcttttaaaggctactactttactttgtcttcttaggctatcatgcatcattttttgctttttgcttgagagtgggtactcttgattttcttgaattgtggaagatcatctttgtcatcagctgtttcctgttaaaaaaga

SEQ ID NO: 284910 - DNA, 332 bp, Zea mays
aggacaatctttatatagggtattatatataaaataagagaagaccaggcggcttagtctgcagcgcagacagaaaatgagaattacagacgaagctccccttctgctgctgctgctgctcgagcctagagaaatctaccggtaaaaatgatcttttctcatggttatggacgatgcgctatctgcaagacgacgcgactctggagctgctgatcatcaggtgttcattcctccggcgtgcggggcggacctgagttcgtccagcgccgccctcgcctggtcttgcagcaggtcgatccgacgcaggtacacctccagctcctggatccgcc

SEQ ID NO: 284911 - DNA, 410 bp, Zea mays
gggtagatgtgccttgcgccattcaacaaagcatacataaaacatgtcatttgattgattaatcatgtatgtttgctttctctctttttttcacatttacacacaaaacaaacctataaaaaaacaagcgcgatctgatcacgctgaaaagtgcacgcatcacacatgcacacacaagctcccaaatctcaacgggcaaagaggaaaatcgcaatgcgcttcagactgctgtacacttcgccgtgcagaggcatggctgtgagacaaaccgtgcccaacttcatccacgcaaacttcacagctctggagatctgctgaacctagacttctgttctcctccacacgactacacgagaaacgatctccactgcagttacacacttggctatgcggtagcccatgctattctg

SEQ ID NO: 284912 - DNA, 365 bp, Zea mays
gctgcaggaaataaactgtaatccccgatccctttgcttggtgatattcgtataccttacacttgtgaaaacaaggaaagaatggtacatttaggccagcacttaattcttgctgccccctgctggattgtgtatgcgtatttgtatctaggaccatttcaaggctaattctattaggatataaaaaaatgtcagaaatgattgggcggtcatgtgttggggtcagagacaatcctttcgatctcttccaccagccgctccttctcttcggccaaatcctcgttttgcttctgaagctcctcgatctgcttgggctggtctgaatctttcctgttcatgaaagacaggttaagttttagtgatcg

SEQ ID NO: 284913 - DNA, 352 bp, Zea mays
  unsure (1)..(352): unsure at all n locations
gggttccatttcaatcgttttggttctcaatccagcaattttcagtaatccggggccttctacatctcccatctccacctttgcagagacagcagcaagcaccccggcaatcagaagccaataataccccccacccgaaacaacacatcacatcacaattattactctggatcctccaccttccgttcaagcatccggttataccccgagctgctcgacgccgagcgagaccgagtgcgtgagctcgccgatcatcagcctgtgctcgccgacggggacccgccgcacgccgttccggtccgcgacgctgagccggtcgcacacgccgatgcgcatntccacgcgcgccacg

SEQ ID NO: 284914 - DNA, 309 bp, Zea mays
  unsure (1)..(309): unsure at all n locations
tttnttttttttttttttttcatagcaattatcagactggtattgaaaaattgtggttttaaaaactgcactcccaaccaggggcagggggatgtcaagcccaacactgtcgttattcggaaaaaaagaggggggggggggggcaaatccttggtatgctacacttgtctactaatagccatagctgggagggtaggtcgggccaccgtagttcccaccattgtactgcggaggcccagcagctgcggaagaaccataagaaggagctgctccatatgggggtgggtaagagccatagcttggatcaac

SEQ ID NO: 284915 - DNA, 300 bp, Zea mays
cccaacactccttaggactttatttaagaaaacaaaaggtattacaaaagcatactgaacgcccaacaatgtttcacttctcccatcgatctcttaacaatacccgaaaccgaatcaatttttccaaacacacgcagctgaagcacggtgaaattaccggatcgagaacaagttgtctatcggacaggtggcaataatgggacgcgaacgatagaatacgccacacggggatgaaatgcctagagctagagcgcgacgctgacagtctctccgtccgcgcccgtgcctgcgtcggcggcg

SEQ ID NO: 284916 - DNA, 327 bp, Zea mays
attaacaaaactttaacctttaataataatattattattaaaattatactgcatcatactacgcaaggtcccgacccaggacatgcacaacaagcaagccagaagctacagtagccgaggcatgcatgcatgcatggacacacaaacatatcggcataacactcatcagtcttcccactctcgctacgggatccaggcatcaggcatgcatggaggctaggctaggaggccgcttggccctgaaccctgggtacggccttgcacaccaggggggtggccatctccagcgacatgctcaggcgctccgacaggtcgacgcccccgccg

SEQ ID NO: 284917 - DNA, 676 bp, Zea mays
  unsure (1)..(676): unsure at all n locations
tttntttttttttttttttttttttttttttttttttttttttttttttttttttttttttttgggggctgacctactgtataataatgctaacaccgtatagtagccaacaattttgcacagtttttacatgactgttatggagtacaaagctccacaaaaagcttacaccgacaaagctaacatacatacatgtagcacacaaaattgttatgatgcttcgacggttgtttccttgggcaaagttacaacaatcatggtgtcagctggaagaggggggattcctaccatgccacatgcatcagatgtgggaggaaggatgaacagtattctcgtccacatcgccttcacagcaggaatcctaatcacgccagcgcattctttctgtaccagatagcttatgaaatcccggaaccctctctgatcaccatttgaacaaggcacgagccggcagacctctctcttattaggcggtgtattgttgaaagttgtcttcacatgctggaaagctgtgcgctttgtcacatctagcgctgaaggccattctgccggttcagaaacagtattttcatatctgcaggcatccaactctattctgcttgcatagattctgcagtaatgcaagctactttttaaaagaggaccctgccattgaggatgagaacttggcttttgt

SEQ ID NO: 284918 - DNA, 334 bp, Zea mays
caacagatctcatcatacagaagcagcgcgtttccaaaaccaaaactccaaaattcgaatttgcttacaagtttggttcactgaagcccaaaaaaaaaaaaacttcggagacaagtatgtttacagccgaagtagcttatgaaactgccgatgggtgaccaactcagtgaattcctagctaaaatcaagcgtaacacattttccagtgttggaacaaattctcacagcaccccgaaccaaccaggcagtttgtccttggaactaatcaagtgtaacagcacagggaggatctaatcatcataatccaagccatcttcgtcgtctagctcggaac

SEQ ID NO: 284919 - DNA, 567 bp, Zea mays
agtggatactttcttgagcagcacaatattatagtacctcttcccagtagctggtaatgtatagtactcttccacagctgtcacgtctgtcccagctcctctgacagcaaggagggagcaattttattaccaggatatgttagattcacggccacgtttggctgaatttgttgtactggcatacatcaagtccttcaaggtaaaccgccacgccaaaaagcaaagaagcttaattacagctgacaacagaagcatgttatgacgcggtggctcgatccaaggcaaatttctagccaacaaggtcattatgtgaggcaaggtaaccacacttcgcccgccccaattggctaaaccgccatgatcagaaacactagctagcgtcttcagaaacgctggccatgctttcagtctcgtcgtgtcagcagcatcatattcactgccggaactatcttcctcgtcggattcagaaacatcaccgatgtgaagatcggagaaatgattcgtagccaggtgaggctcttggcccttccctcgatccaatccctccattttgagcaaagaagcttc

SEQ ID NO: 284920 - DNA, 282 bp, Zea mays
cggccttccttttttttttttttttttttttttttttttgcctcggatggccttttgtatttttatgtggtccacttttatgaatcaaatgttacaattcacactagtgtacaagttagtacaacaacaaacagtggcgctcctatcccttttgggactagtttgaaagcaagggaggccaaatacagggaggaaaacctcacataaggaaataaatgtctaattcaaatggtaccccgatggactgcttcctcaccccgagaaaaggcagagatcccaaag

SEQ ID NO: 284921 - DNA, 450 bp, Zea mays
caaccacacgttccatacaagaaaaaaaaaagggcatattgcattgtattgcaagatattgtttgagcttcttgtcagcataaaaagctagaagctaatacatcattcaaaactcaaaagttatcattagccctcctcccctcgcttgctagttgctacaaagctcctcacggttataaccagcggccatggtagttgagctctgatatgcacgatgacagcgcctccctcaccatcttgttgtctgcttccacatacagcacatcttcgaacaagctcttcgcctgctccagaagccttatcttctcaccgttgctccgaggccgcagatgggagcgctgctgcaacgcagtgccccatctgtagagagcttctggagcataagtgttgctcctcgacaacatggcgtcgaacttgtcgattgcagctagatacacccggtcagcgtcg

SEQ ID NO: 284922 - DNA, 536 bp, Zea mays
gatccaaacggggcgtaataaaaataaatctcttcctcgaatgtaccaaacaattccgttgtgcttcccaagatgatacagaaaagaaagaaagaaaaaggacagctcttgcgcaaagcattgactcccggattcttgcaacttttacaagatcagttagatatgcaatggcacgcttctacatttggatggccacaacaatggtggaaacgtatctgatcttgtatataaatcataacaatccactaatcttgtgggaggtgaaatcagcctatttgtttattcttccccttgcctctctatgtggtttacagttggggaacctgtgcctgttaatccctgcatcttcttgcagacatagacataatgggagtcaggatcctctgggacaaatccatcagggagtctacccctctcggtcagtggaacaggatccagtacacgcctcgttatctttccagtgaacacaggtcttgctgcaatacattaaaacagcactgatgaagccagcataaaaaatattcacttttttttac

SEQ ID NO: 284923 - DNA, 495 bp, Zea mays
agctaacgggcaaacgcttcactatttcttcagacgtagtataggagtgttaccacccatcgaatacaggtattattacccaaaaaaaaactttgagacattcctggtacgtggctaaaagctcaagatattcttgatgcatgctatgcatgctcagagaactacactagtatagtatgctaacacaaaaccacttccaccaactccttaatgcccttgactcattccctgtaccccctcaactcctcaaacgttcagaatagcgctagctttctaatatttcacttttcggcatcatcgacaagtaagcctgctgcctgcctcaccggcgacccataaaaatctgccggcgtggtcgacgagtcagcctgccgcggcccccaacggcgtggagcaaagcaacctttctcagttgcgggctgcctagtagtgtggctacgtgtgcgtcgacctcatcgtgtattccgcgacgagcttggagaacagcgacgactt

SEQ ID NO: 284924 - DNA, 523 bp, Zea mays
ctaatggcgtacagattatacccaaaggcagtgtgtcaattggtgctaatcgcaggcgggagagtatgaaatggagagctaatatgagcagtttgtgtgggtgccacaagcacagacacattcatcacagcaatgcatgcaactgatgcagatgagacgtcgacgacgagtgcgtttgttttatttttacagtaccaagcaagcattctctctcgttttggttttggttggatgagacgtcgacgagtgctcagttcaggagttgttgttgtcagcggcgtgcactgcgtaggacggctccggctccgcagcgacggcgggtggtggcacaacgccaacggtatccactttgccgtcgttcttggggatgatgaggccgtatccgccttccttcctgcggtagaggatgttcacctgccccgtggcctcgtccctgaagcagtagaagtcgtggtccacgttctccagctgctccagcgcctcctccaccgtgagcggcggcatctcgaacaccttggtgcgc

SEQ ID NO: 284925 - DNA, 551 bp, Zea mays
tccacgtcgcccctgatcttggccaccgcctgccacaccagcgccgacacgagctcgaaggtgccagcggccgcgtcctggcgcccattctgctgctggtggagcttcttgagcaccgcgtcgctgacgtggaaggagtagcacgccatgtcgcggcccgcggggaccagccagaggtcctccatgggcccgacctgcttgacggagcgcggcgccgcgggggactggccctgcagcggctggttcggcggggtgaggacggtggcttccggcttcttgccgctcaggatctgcgcccacttgttgaagcaggtggcggccgacgggatgtcgccgatgaggtgcgcccagctgaaccccagcgccagcccaccgcatttgaagtttgtgatctggacgtagagcagcggcgagaagaagagctcggggccgagcaccttgtcgtagcagagctgcctgatcctgccgggcgcggcgtcgcggatccactcggccatgtcgcggtcgcacctggcctccacgatgcgcacgccgcagtcgttgcacttgat

SEQ ID NO: 284926 - DNA, 407 bp, Zea mays
  unsure (1)..(407): unsure at all n locations
ttnatttattttttttnnnaanannnnatttgtttttttttggaaaagaaccctcatttattgcaaaaataaggaagatctaaattaatcattcagaagcaaaaactgaggagctaacataaacatctgagatgggttcctcatttattataatatcgaaatatctcgatgatgtctggtcactaatctaagagcaggctatgctggaggtgccacagtccagtttagtccatcttccctgccatagcgatttctgtttggttgctccttggccatctggactaaatttaaggagcaatggcccaagaaacagtgtgaacagctgcaagttgttccaagagttaacggttgctggattctgtcaatttcttcacgtaggcgccaattgcttcgatgtaattgtctcc

SEQ ID NO: 284927 - DNA, 284 bp, Zea mays
ggcttctggcacctgctctttattgtctgccaggggctccattctaatggatgaccaggggcctcaggagcaatactacagagtagaaaaagccacaggaagaggatttgagaaaagctggctggcggaccccaacacacgtggctgcagtaagtatgggcaaaaaggagggggctgccatcaggggctctagcacagggcttttggagttggggagccaccattcactctgccctttggagcagggctcaaatgccactttccaggaagacagaaaatctcaa

SEQ ID NO: 284928 - DNA, 433 bp, Zea mays
gaacggaaagtataaaatctgtatatactgtcttgctctgtttctttacagtgtgcggcgtggtggcgtgagcggctgcgagatttacagctacagcctgacccactcggtgccatcgatgaagctgagcgagatgaagggcttggcctcgtcgtcggtgagctcgtgcgaccacgccacccggccggcataggtcgcgcccgggcccgtgcacttgtactgcccgtagaacaccgtcagctcgcggttggggtcgccccagttgaaccacccgttggggacgatgatgtcgtccatgtgggtgtaggcgaagacgacgcgggagaaggtgccccaggcgcggcccaggtagagcgcgccggaccccgtcacccggcagttgacgaacgagacccccgtgtcctccagcatgctctgccggttctgcgccgtc

SEQ ID NO: 284929 - DNA, 334 bp, Zea mays
cacaggaactcggtaggattctactagtaaattcttttccgattcatggacatgtacaaccacaacggggaagcatggtacagctggaagtccaagacacgctggtaacgctatgcatttttcactgagcaaatgtccaagaaaaaaaaatgagcatcacatcgatagcgtctctcactcacagtcgttgttcattcagggcctatactgtgtgcttgtagatatctaaaaactaacaggcagacaggctcgtcttgtgcttcctgtgcttcagctgcggcccgccatccccggcggcagcggcaccgcccttgaccacagccaacttgtcatc

SEQ ID NO: 284930 - DNA, 550 bp, Zea mays
ttctttttttttttttttttttttttccagacaacaacatgcacaggcattggcattggcattggtagtgtacaacatttgtttttttaatatatatataaggcacatcaactgaagtatttgtatcccacaggacacaatacaaacagtacagcgtcactctggctacaacatggttgggcacttggcatcgagaaactccttgagcgtccgcgcagctttctgaccacccattagctccgccaacctttccactggaagcagggccagctcggccaagctattgcatccatccatgattgctcggtagttggaatccgtcaccccaggaagccttcttaagaactcaatggctgatgtgttgtaattttcagacctcacatcatcctccacgataccatcctcggagggcacgccaactcttgttgcttttttctcatcaggttcatcctggtttgttttcagtgacataaatatttctgctgtagcatgcaagctgcgtgaccagattatgcgaagccgaggaaaatgcagcactagcagagaaagc

SEQ ID NO: 284931 - DNA, 638 bp, Zea mays
gggtggagagagtcttagcacctattttcccattgggcatatgctggcttaaaagaccgcttgagcggcatggcctttagagtttagaggatagatagaccacttgagcatcgaggaattattggagtgccgagcacaaactacctgaaaactacgctgcctttcagagttcatacgcataaatttattcttccacaggcacagtacgccttgccaggggccaaattccgtcactcagctcctcccagtcaggacagttgttcagatctcgccatcccaaaactcctcgatggatttgaacacgccgtcgggatcaacaaagaagcccgcacgaatcagccgttcctgctcgatctcagagaacttggcgagcaggtcctccggcaaggaccagccgaagacgtcgagattcgccctgatcctcccctcgtcggtgctcttcgggagcacgctgtgccccatctggacgccccagcgcagcgccacctgcgccggcgtcttccccagcgtctccgccgccgagacgacggccgggtgctccagcaccgcgccggccttcaccgtcgccgtgcccggcgagcccagcggcgagtaggcggagaggtgtatcccttgggaggcgcagaacgcgcggagcc

SEQ ID NO: 284932 - DNA, 353 bp, Zea mays
ggccctcgggaacccaaagtatccttagaatattccccaggggaggttacagaccgtctttacagaaaagacttttacagatgaggcccgtaacacgcttattcttgcggggcccgttacaggggaccgaatttcccttgggcttccggaccccatgaggacgtgaggctagcaaacattgtcggagtcttgcctttgttttgcaatggaaaagggcgaaggacccccccgaagtccagtcgcgaagtccttattggaccgacgtttttggcatcgttggtgaagcgagaccaccaaggcgacgaaggcattgagccaagggtagcgttttcgcctttgccccaacattatta

SEQ ID NO: 284933 - DNA, 383 bp, Zea mays
ggctgtagaaatatgcttgcatttagacagctcttgcattaagatgtgagattcttttcagcatttcttttcctcagctctaaaacagcacacaaacattaaacaacctaagataacccatttccccccctaacgaactggtactattgcataacattggtcaaaaatttcaggtgctcgctcaagataatcactctgctattcttgaaactttaacggagccttcgtccacgagactgctccgtttcctcttactggacaagctctggaaaccgctgctttcgtccacaaactgtgcggcagttctctcccgcagttcttcgagtgtctctccttcctttgctcgctcaatcaccaggtgtcgaccatagagatgagtgctt

SEQ ID NO: 284934 - DNA, 519 bp, Zea mays
gcccagcagtaaacttaacaatctttattaactcttttcgttttagatgggattggggatcatcgtcccagatcccagtaatcccttgtgacatagcactactgcttatactagtataaccatcaagaggcctatatatccatgaccgtgatgggccatgcatgcacgcctattgactaacctcgctagttcatttttaaactaaaacacgataaataaaaacgaaaagagagagtagtataataagtaaatactaccacactaatgatattatattcctcttattactactactacagatcatactcgtggtatagtagtgtgctactcttcgcggtcgattcaatttcagtctgcctaaatacctccgatcatctgctagctcctgcatcctctcttctgtacacgtgcaacctccagggtccaatatatattgcatatgacgtgactgaaatctgcatgcatggcatgcacaagcaggtcgtagtgactagctagctagtctttgctggtgagcct

SEQ ID NO: 284935 - DNA, 406 bp, Zea mays
cgaatcggtaatcatattcgtcagaccttttttcacatcttgatacgactgtcaatccaatgtagagtatgtacaaaggggttttgttgctggtatccactaaacactggtgaaggcagggagccttctcatgtgtcgaagaatggccttactgcacagttatccaattgcttccaaccaattcactacccaaattcgaatgtatttacaaggtgaggcaaggtatgcaagaaagaggattatttcccaatcttgtcgaacaattctgacagagctttgtacagaggagaggctgcgggcggcttcgccattgatcctagaaggatatcagatgccttgacaggacctccggaaaatcgagcgttctcagtatctcgagttgatactatgctgccattcaacgcac

SEQ ID NO: 284936 - DNA, 467 bp, Zea mays
agaaaaatcaaaaacacaatgaaacatcactaaaaatctaaaaaacatgcacccaacatgatcatctaatatacaacaaagtttaacttaaatatcatctaatatccaagaaagttaatctagtcatcatcacatcacataagatcatctcaattcacacgtagaaatatgcactagatgcacaaataaaaacccacaaccatgtatcatgttgaactttgacactagaaagtattatgagtttaactccttttttacaagcttcatgtggactcgtcgttccattttccttctccatgtgagcttcatatgttgcttccacttagcactcttccaatggcggctcagtggacgacgatggcacgacggtggagcggatggcggcacagtggacgacgatggcacagcgacggagcggatgacagcggtgtgggcgatgctggtggagatggtggcggtggagtgca

SEQ ID NO: 284937 - DNA, 413 bp, Zea mays
ttttttttttttttttttttttttttttttttttttttttttttttttttttttttttttttttttggaagaggaaatcgatcccatttatccaaactacagtcccgatggggcctttggaccctaacaactgtccccccacaacctacttaaaagcaaaaccttcccccaaagaaggggctcgggatttctgaaatactttacaacatacatttcgctccaaataatttcccaacaatgccttcctattccggggggcacagggacctacagcctgaacccccccgagctacatgaggggtatattggtccataccgcccctgcacagaagccccaacctgaccctggaggtgaagtcaaactttacataaaaaaaaaaagcttcccgacctgggaaaccagcctacaaaaa

SEQ ID NO: 284938 - DNA, 574 bp, Zea mays
gatatatattccccgatcctgcagcgttccaaacggattatgaatacatgcatctgtcaacttgacattcctaactgtcagaccaacgatccaagaccgtgaattggacccaaaattcttacttgacatccctaactgccagaccaacgatccaagacagcgaattggacccaaaattctctcctaagttctcgtctacgctagttatcttcactacgacgtaaatggaacattactctgcaaaatccaccaattggtacgatctatacctaatctgccctctcgagtaatctatacaagtttaactgtacacaagtttacagcaagatgccctcaaagctgcacggatcaactgctgatgccattctttgaggagacataaccgctcccacgttggacattctggggttctgcttgccccgaaacttctgccgggagtgtcttggggctgctttcagcgccttcatatggcaacacgaccacaggggcagcatgtattgattcccaccgttccttcacgaagttcatgaaggctctcaccgtttccctccggaattctagctcccttgtgaaa

SEQ ID NO: 284939 - DNA, 523 bp, Zea mays
ttcctttttttttttttatgttttttcttagcccagaagaaagaatttctgtactactcaatttgcgacacctcatcatctccggcacgcacagtactctgtagttcactaaaagactacaagactacaactagcatccattaactcattcaacttaacacaaactagctcgaacacgcgggctacgctacacggacttaggaagaagcagcgcgtgctatactacattatttcgaatggtaaagttactgcggataagaaactacagtgcacacggcgattgtgaacaatgccaaacaacgtgagcagtgccagacggatcgcatggcggcctccgatttattcgtggacgacggcgatttctccgtgttcgggggatcatattattctggccggagatgcgggaacgacgacgctgcccatgctctccccgcttgcggtggcacaccccttgtcgtcgtgcttgtgcaaaatctctcgcgccagtttctgcaccgacacgtccgacgacccgccgctggcc

SEQ ID NO: 284940 - DNA, 792 bp, Zea mays
tcttttttttttttttaagataaaattatcgaaagcttcagcggccaccctgaagttacaaacccatgcccaacatgaatacaacggtggatcatcgtcatcctcttaacatctactacaaattgccaaactagggccttatctttaaatctaaatggacctatgggggaaagacaagcctttccccacaaaaaaataaatcagaatcaaagctgcttcccgggaatgatcgagtcacttcctcttggactctggacagctctatatggcaccgaaaagaactgcatctgactggcacaagatacaccatctccccagcaactcctggcttcaaatccaccaggagctaaaagtgtctttctcaccgggagcacccgccataaatcctgtcgctctgttcatgtcgctcgtctatgcatagtacatgtacaagctattggctgcagcacatgcaattagattttcagatgggtgccaggccaaatggagcatctttgtgctcagatcataagaatttccgttgacatctattccagtgctttctccacctcgtctaactgtccttgtcagagaacttagggatctgcgtagctctagtgggattctggagctgcctccttgtagggtttcgggttgcttcaagtgttgtcgcctcactgttaccagtaccgcaaccaaacacacggaaaatgttgctgtaggaaccagttgctactcttaatccatcaccactttgacaacactcaaatttgtcaaaaattgagtcattttcatataaatcacataacttag

SEQ ID NO: 284941 - DNA, 417 bp, Zea mays
tctttttttttttttttaaattaaaaatgtacatacaataaaatggcggggttttttctattctaggggtcgcatcaaacatgacgaaggtcctggcattcttcgaaaacaaggttccccacgcaagggaaaaaaaaataaggtcgatctgtaagataaaactatgaaaagctccaacggccaccctgaagttacaaacccatggcaacatgaatacaacgggggatcgtcgccatacccatcccctttaacatcgtctactacagatgcccagatgttgtcaagctaggaccttatatttaaatctaaatgaacctatgggggaaagacaagcctttccccacacaaaaaataataataatcagaatcaaagctgcttcccgggaatgatcgagtcacttccttttggactctgga

SEQ ID NO: 284942 - DNA, 490 bp, Zea mays
ttatattttttttttttttttttaaaaaatcgtagcaggagaaagggggttcctctttattgcacatttatgagaaactattaattgaagtcgacagcaaacaattcgaaacgacgaggccctgatattatatgcatgcatgtgcagttgtgcaccatatagtccgatccatagcgctagtgcactcttgcttgtcggtgtactaacgacccggccgggcacatgcacatgcattcacgtccgtttctaactacacacgtcgtcgtcgtggattaatcatcattagccacccggcagtcgcagcggacctctcccttggccgggtcggtgagcggctggatgttgcccatgttgatcatggactgcgcgaagctgctgaagaaggcggcctggctggtggcgaactggtcgacgacgttcgcggtgacgccctgcgcctgcggggccgacttgagctcctggtcccagccgaggaagccccggttcacct

SEQ ID NO: 284943 - DNA, 667 bp, Zea mays
ttgggtaaccatatacgatctaactctgaacacagtccccgttggcttaacctcattagattcgggatttgcaatttcgtacactgaaactgagaaaactcaggaggacgcaactagcagaaaaacacatatttcagcaattcgaaaaagtattacagcacaaatactgctgatgtatagtaactaaatatacaagattgggctttcctattgcgtccactacagttggtacaacgccggcacctatagagccttgtccagaaggggaaaaaacagcatcaatatcacctctccccgcatcaatagtcaacatataccccacaaattctgatgaagcatctgtatctcaacatggttgcaactcgcaagcaactagccgaatagtcaataagacaaacataagccacaataacctccaggctgcgtctgcagtggtcaaaatattacatagtgcacatgtgaagcttaatattccattaatgctgcatcagtctctgacaagggtgcaagtagatcctcatctgcatcatggaacaacgaagattccatcaatagaggagagaatacttgatccagagcatcatcagtgataaaggactgatgtgccagaccaccagccgggtcaaggaaactcatggcactgatcgaatcatgtccattgagtcac

SEQ ID NO: 284944 - DNA, 461 bp, Zea mays
ggaggccacttgttttttgatgaatttcaggcagaccgtgataacaaaagacacacacggcgaagaatctcgtgattgttaagaagtcaaaaggtttctgcagaggaagcggcagcgagcaaatgcagcctcagaatatgctgtttgctgagcattttcacatcgatgcatcgaaacaatcgtgttagacgacgactggcagagcagtaacgagcaacagacggtacttcgtctatgcaggtctccagtaatttcacctcgcagccagaaaagtctaccaaatgccatgaatatccggtcccgattcacgaagataccaaagtgatttcttccgacagcgggtttttttaaatgatgctacaacctcgccttcgtttgtaacgttcgggtctttcgcattttaattccgggtcctggagggcagcattacaatccatgctgcgcgccgcgtgactgcaatc

SEQ ID NO: 284945 - DNA, 429 bp, Zea mays
aactcagagaagggtgttatcaactaacgcaagtttacatttgacacacaaaagtaaaataatgtttcttgatcaaccatccatcacattttctaatttgtcacatacatgtgtcaaatttaagagttgagttgcaacaaaatatagtgttgtccctcgaaattacacagtttactaatataacaatcagtctctctgtatcatctgtcttatggcacatacctggcagacagaagaatctcaatttgtcaagtctcatggccaatgttgattattgagatgtatttaacagttataggcagtggcggagcttgacaaagatgtgtgttttaaaactggggaggagacatggcctcctttttaagatctgccactggttattacaagcattgaaatgtccaaactttggaatcctgcgttcgatatact

SEQ ID NO: 284946 - DNA, 477 bp, Zea mays
ctagttctagatcgcgagcggccgccctttttttttttttttttaggcccacgacaccatgaagagattttatattagcattgcgaggggaccccttgaaagaaattcgttcggccattgttagggacttcacatgaacgaacagctgcctgccgcacttcacttcatcatagtcatagaggctatgacacaaacaggacggacgggatctttgtacatgaagaacgatcgatcgcctggtggctacttcctgccgaacaggctgcgtagccttcctcggtccagcttctcgagcagcttcttcgcgccggccacgtccttctccgactccgagagcttcttcaggtacccgatagcgccgtgggagatcatcagcttcttgcaccgcttgctcgtcgaaagcgccagcaggcaggagatggcgtacttcttggccgtgttctgggggctcgggtccagcagctgcaccaggttggc

SEQ ID NO: 284947 - DNA, 457 bp, Zea mays
  unsure (1)..(457): unsure at all n locations
ataatattgaaattttgacagtgaaccttttaacggttgaaaacagatttcatcattcaattacagcaaattctgatatcacaagactattgcagtaggaataatggaatatctaatcttcaactgatgccactagagcatgacagaagtgtgcacatttgacagaataccgacagaaaacaagcttagcttcaacatagttccaacttccaggttggattgaatgatgtcacgatggattaacttagtcgacattcatcgcaccagagttgtagttgtcaagttcattgtccaattgtttggctgatttctctgcattacccctgcgcacatagccacgtccacggctctgaacaaagctactgcggccacggccacggccancggtgcgcacttgccctcgccctctttgaggaaaactaacacgcccttgtcctcttcgaacaaagcctccacg

SEQ ID NO: 284948 - DNA, 362 bp, Zea mays
ccgttaaaactcctcattttttatagccccatagggaaaaaaaatgtacatagctatatgacgtctggagcagcatacatagtagactgtacacatctcatcattctgggctaccttacgttcccagaaactgatggagcgatgggagcttcagcacacaagcatggaagaagccaaaccggacggacagatcagcatcagtcccgatagaacgtcgccatgaaagaactctggttcagcatgaacttttttggtagtactatccccaaaagaagacctcttttgatagtattatggcgaagatagattcatcatcatcatgcaaccgtgggttaaagaagtcccgattgttcaaggatatc

SEQ ID NO: 284949 - DNA, 510 bp, Zea mays
ttttttttttttttttttttttttttttttttttttttttttttttttttttttttttctttaaaccaaactccagacctgatagaccattgcattcacgctatcggctgtcagcacttgtacatttagttgcgttcataaggtcacaacctaaaaaacaattttacagaacgtaattacctaataatattgttacaatatcacaacccgctacaacgaatctgcggtgctcaattcggcagtacatgctgagttcgttggaattgctaatgaaaatattagctgtacaataggcagtctctgaaatgccagcttcactactcaatgtcaaaacaggaccagttctagttttctgcaaaaaaaaaacacagcttacgacgagcttagcgagagagcaccagaggcaaatagaaggttcctccgagaaaaccgcaggctataaacaggagttgattttgtagggagagctttaaagcagtctgagttcggttagctgagctgcctttggta

SEQ ID NO: 284950 - DNA, 364 bp, Zea mays
caacaatactaccatacaaaataatttcttttcaaaagtgcccataaatgtaaacaaaattcaccattctcagtatttctatgacctccaactttctgatcattgcccaatgagcatatagaggtgccattatcaaataatctagaattgaaaccataattccataatttacatgcatcagtagaacctccagattattcatattctctgtaataccttatctggttgtccaacacgtatccttttcatgagatgttatgaatctgcagattggtaaccaatgccaggtgcacttgtaggggttcaagccgctaggagcaaacagaaatattttagaaagacaaaacagtgcatgatgcaaaga

SEQ ID NO: 284951 - DNA, 497 bp, Zea mays
gaaacatagctttaatgtattgaagcaagcagataaccaatacagggactatatgcaagttaaaacaaaagttgctttgataatgcagcctgtatatatcagggcagacagattactttgactgaagctccacctacagacacttaatcaaactggtgtgagctaaatacatctagtatacagaatttacaggaccttccaggtatcaggttatcacaactcacacgattccgccatgcctaaaactgctatcccctccatcaacactggaatccaaacctggtgaatcataccattttgttccggcgtaaaatccttctacatgaatacctaccaaatttgggtcagttaccatggtatcgtcatgcatcaacggcttgatgaccttggaatcctccacgccatcatcatccccacagttaagaatactctttgcatcaaaatcacccacatcatccttaagcatccacttgtcacactttgggctatcacccatg

SEQ ID NO: 284952 - DNA, 541 bp, Zea mays
ggggaaaaaaaataaaactgcagctccccaaaatacacaacagataagccagagggatggaatttcctgtcacaaaccacaacttttggcgatggtcagtcaggactcaacggacccatggctcatgggtgagagactaagcgtgcgtatcattcttacatacattaacacatttttttagctggtaagctgtatcatgaacatcatcgattcatcctcaggcagatcacagcttaagcccgacaaaataagggaactgcgtgtggcgtatggcaatgccatcagcgacatcacgcattcgggcatgtgttttagacaacttataaagcccaccagcgtatcaggtggacaatggcaaaaaagggatgaagcagggtcggcgcttctcttcacgataaccatgttcagccccaaaggccatccgcgggctggctatcaggcacaatggtgtcgtcgtctagcagctccatttgcctctttagtgccttcttgtagctacgggagccacggaggatggagctaatatgcaggcctttgaaac

SEQ ID NO: 284953 - DNA, 570 bp, Zea mays
cagatcagctttttacattttattacaacacctgcagaaaaaaaaggtaccaggacacagacacaattgcaacaagctgagaggatacttggactttcgtcatcataatcattaatactagagaaaaaaaagcaacaaaacagtacacggtatccgttccaacaccacccagcgcccttacataccaatcagtacaactttagaagatggcgcatgtaatatttgcgccatatctagtacacaatctacttttaatttctcgaggtcgatcacatcacatgatctctgtgggaagaaccgagatgccatacatgcagcattatcacggaacgaaatcagttcgcaggcctagactctaatgatggtcagcttcggacacacagagagagagagcgctttgcttgccacaggtcttggtacccacctatatacaaaaatatcaaccttgggaggatcaccagggactagaactcaacctttgtctggtcagcatgtaactggccatcaaagctgggtactaaaagcccatcctcctcctgtctttgctcactaccggtaggcaaggcgttc

SEQ ID NO: 284954 - DNA, 370 bp, Zea mays
acggtacttggagcttccccgggcgaaccccgtgctctggcgccggagtatgtgcacgaactcctccttggtccaattcctcatctgcttcaaatcatcctcgtagtcgctcagactgaagttgatgtcagcgtcgaggccgcggaacttgatcgcagctcgatcgtatgccctcgcggctgcgtgcgcagtgtcaaaaccacctaggtagacttgcttcccgcaatcccagatgtgcgattcccagcggcccgtcctcctgtagaaggtgacgcccctgtactgcgagctccgcgacctaggcccgcgcctggtcttcttcgctggcgccaccggcctctgggccatgccgagatcctcggcgcgctgc

SEQ ID NO: 284955 - DNA, 437 bp, Zea mays
aactagtctcagtttttttattttttttttttttgaacataaaaacagatcatatttaaagcacacagaagtgaaaacatatgatgttcacatattcgcaacataaccataagtatccagccaactaaagttcacagaaagaacctgggtaacacccctaagacaaagtagcatgacaattgttctgaaacagcacatataaggaagcttcctacaattgttaactgacaataatggccaaaataccacagtacggtacattgcccacaccattgcttagttctgacatatttcactaattgcgcgcaaacataaatctctggatatctaatggaagtggcaacaccttgttgatgcgattgaatgtgagttgatgaagggcatgagcacgtaggtctcgggaattgtctagttgattgaaagaagatatgacacct

SEQ ID NO: 284956 - DNA, 384 bp, Zea mays
cctaccacgtgtgcaagttctccatgaaaaaaaatattggccaaaacggacttggatatttcttgagttattctcccaggtgtctatgcacttttctagaatttcaaacatcatacaatatattccaaagtgtgctagctacatcaacggaaaatagctcaaacaacatatctaccaattgacacggtgctacaagtatatccgccagtgaaaccagtttcatttcctctatcctgactgaggtccaaggctgttctgcctgttcatgtttccactaagagtaaggattgcacactttcatagccccattcagtgtccttcagaaatgaagtttttgcagggaaacacagtccatgatgttcagctgtgcagttttactaggat

SEQ ID NO: 284957 - DNA, 436 bp, Zea mays
accaagtctagaaacatactttttgcctgtttaacacataaagagttcaaaacatttgtgttggatacttaatcaccaaaacacttaggccccgtttgtttcttttcattttggggaattagaatcttactattagaataggctatttttttagaatgggacattccactactttccaaagtcttctacaactattaagactcacatgtagactgcccccgctctcccctcactcccgtggctcccgcgcgcacaaccgccgaggatcccgcagccgcaaacaaccgccgccagctcgggtggttcccgcgcgcacaaccgcccgttctcccctcgctcccgtggctcccgcgcgcacaaccgccgaggatctcgcagccgccgccgccagctcgcgtggctcccgcgcgcacaaccgtggaggatcccgcagccg

SEQ ID NO: 284958 - DNA, 392 bp, Zea mays
gaggaccggtgatgtattttactgtttttattttatgatcacgggaaacagatgggaatatggaacagttcaaactctggtgggatgaatcgacccaatatacacacgtattaacatgataccaccatacttactcgtatcacagtcgctgaattccaatgctgcgcatgcatgtgtagcatgcatctagagctctcccagcctcttggcgcactcgacgctgcagtccagcgtctcctccactccgtacttgaatctgaaccccaagtcctccagcttgctggtgttgggctgaatcctgacaccttctccggtcacctgagtcagctgtatcttgaggtcggggtgctttgcggaaaagtggtcgaccatgtcacgcatgttggggtacc

SEQ ID NO: 284959 - DNA, 339 bp, Zea mays
ggctgaccaagagcatcagatgttcagacggaacagcaacatccggagacttcgacaggcaggattcgcctaatgcttgctcttacaggtaagctataaactcgttgccaaatacattacactggcgctattgctaaggtaaccttgtggagcggacactgggccctgcatcacccaccctgtacatggccaaaagatttcacacaacagccgactgtcctcaccacctcagctgcttcgctcctttcttcttcacagcagcgttgaagcgcccgtcgaccatgctgatctgatccataagggacctccggacgtgtcccggcggcgtctctgtgatgc

SEQ ID NO: 284960 - DNA, 296 bp, Zea mays
acattgctgaatatgttggatataatgggtatagttgactgtttccttcccagaaataaccagggcaacacatcgagccaaacagtgttcggatgaatggcctaccataccactccagcagcagctcaaaaggtggaaaagtttgggtcagctcgcgcaaacatccaaccgtggggctcttcagctgctgagctgcatggttctcccacagagaaagtcaatggcgaagcaggtccagcgaaagcatgctgattttgctgtatcttcgattgatgcaaagtcctgaaaatttcaca

SEQ ID NO: 284961 - DNA, 700 bp, Zea mays
aacggaacgtgtgcgcttctgttctgtcccttaatacagtgattaacacacgtgacgctcttactgatcaagccaagttagataaacacgtacgtgatgccaaattctatacattactgggagcatttacatcactatacaacaacacattctcaccaacttgctcggttgctgtggcctcactcagttggacccgccgcagcacagctctgagcagcactcgaagcatcccaggcacgcgatggcggcgcaggcctgcgccatgacgatggcgcactggtcgttcatcttgctgcacgccttgatgaagcacatgcagcagcagcagtccgccatgcggctgcagcagccagcggccttctccaacatcacaaacttctcggctgctttcatgtctccgaatcctgttgtcaggttctctgttgttgccgcgacgtcgccaaatccgaccgctaggccacctagcggcatcgctggcagctcatctgcgctactgctctgtttcgttggtttattcttcgcctgttgtgctggatctattttgtccagactggtttgaagtagtaccatgcgtgtgtactcagaaggaaggctattttgtatgcttaatttcacaacctttcgctcaagctccttgttctccataagccatgcttttgctgtgagaagatccatctgttgctttgccaatactttatca

SEQ ID NO: 284962 - DNA, 345 bp, Zea mays
ccggggagacagattgcctaaccaaaccatgaattttggccaaacataggtttagagactggaaacaaaacaggctttgtagctagagaggggaaacaaaggagcatttcttctgaacggggttggggtgtttgttttcagggcctcggggcaaaccatgcggacgtagtcgactacttcaaccgaagaggagtctctgcgatttttcttttcagaaggaacctgctccgccagttggtttcacaggtggcgaacaaccacgacgggttacttaagcaactaaacggaacgcacaaggcccatgtccacacaaagcgtggggttagtaatgctagctaagaaacg

SEQ ID NO: 284963 - DNA, 628 bp, Zea mays
ggggcatatcaaacatccatccacctttgatctttgcttgtaaactgaattttgtacacatggctcttaaatcctttagtctaccaacacaagacacatcaatagcagcgaaccgtaaattacagtgcacattcggctctttctctacatccgaaataatctagtagtgcacttttagcaatcagtttaagtatatacacccaaaaaaattaaggattaaattgcatgcttctaaacaaacaaggagagccatactcgtccttacatggaggccttatttcttcaccagaaagctctccttgagaatctcagcagccaatattagtagctccaccatctccatgcctgcagaagagagcgggtctactttcccagacttcgatttaggtgaatcagatggatcgcacatagcttcatatttaattgcatctgatgaatccccggaccagcttacaggaagaaccacattaagagctgtcttcataaggtttgcttcagttataagactgttgagcgcttcaaaggtactctccaaaggatcagctgacttgatatcatcataagccttcaaaagcacaatatgcagtctatgcactgaagaagtgagatgctcaacagtaccaacacc

SEQ ID NO: 284964 - DNA, 508 bp, Zea mays
tgctgactgggcgtaggggtcgtagagctccaccggcggcggcgtgacgagtccaggcggccagctgcaggccgcgtctgcggcggcggggccagcgatggcgcccgccgggaacgcggccgacgacgggtgcggcagcagcacccccgggatgctctccaggtagccgaacttccggcgcagcatcaccacgtagctcaggtcctccgccaccttcttcatggagccaagctgcacgacgccttctctgacggcgatcagagcgatggtcttgatgccagacttgaactgagcctcccatgtcctcggatgagagtcggcagggttgctccaggaggagatgaggttgatctcgtgctcctgggcctcctggaacacccacttgtggctgtggtcggctgccactttccctatcaacccttcaccgtagttgtagatgtcgtgggacatcttgaagaagagctcaggctgcaggcccttggcggcctcctgcccggcagcagcacac

SEQ ID NO: 284965 - DNA, 354 bp, Zea mays
ggagcttgttataaagaggatttttttttggcaagtctagattgcatactgatggcaaagatagtaaaccatgttttcggaattattatttcggaaacaatcatctgacatatgatccacaaatgcaccaatccctaatgtctaactgcaaacttgatggattttgaagtggatacagttgcattctaggacacttttactacagctaagagcaatcacgtgtgacaaacacaaaaacaaagcttctgctgttaggtacgtatctccagaacatgctgtagatccttctgcattccctccatgtcccatcgagccttgaagttactgtggagacccagaagccagagctttttc

SEQ ID NO: 284966 - DNA, 411 bp, Zea mays
gattggaccgagcataatccgcattaaagttttagaccatactttaacgtgttccatagtaagacggtcagggctattacagcctgaaactgatcccaaataagattataggatcgaagtctacgtttatgggtcgcaagttagggataggtaggcagctacgcgggaggtatatacatagtacggagagctgatgcaacccacatagttatgcacataaatcttacacaactacaattgtagcttcacgcatccacaaaagccaaccacaaaagcgaccaagatgtccatccacaaaagtaaccaagatgtcatctgtcatacgttcaaacttcaggtttgtcgaggcttcctcaagtctgctagaattagaggagcgtcactcctacatattacagatgttcccatgaa

SEQ ID NO: 284967 - DNA, 641 bp, Zea mays
caatcacatgtcacatcagattttcatcctatgtggtatgtattaaagagtgtgacaccatgtacatggaatagccttaataaaactggcatgcacccgctagcagggaggagctagaattccagcatattgacacccagcagatacaccactcgctgccaggggtaatcatacatagcacacacgatagcaaataaataaggaacttcacttcttccagttcttatcctaattttaatcccaggaataaagcaagttagatctagatgttcgccaacataacagacgatattcacaagggagtttgttgctgctgttcacacgcaagtcggttttgtcactgtcactttggtgaggttcatatcttcacctccctaacgtcgttttgtccgaatggggttccacagccaggacattttcggtggcgaatctcgaggtttctctggatgcatagcgagcagaataggtggaaacatttggtgatcacaacctctttaggccggtcaaagcatacaccacacttgagaatacccttgcattcttttatttcatcctcaagtttccggacagtagtctcttcagtctcagaggtcagctccataacttcatttttcacctcttcatattgttcttcaagccgc

SEQ ID NO: 284968 - DNA, 516 bp, Zea mays
aaccgaataaagcctaatagataaaccagatatgatacagccgggccacaccgcccaatatagatccggcccatgggccaacaaacctcttctggcatgtagaacgacaatggattgtaggctctttcaatttcaaccgacattggcaggcaagatagacattgtccagaacgaaggtgaccattattctgtttgccccgtaagaattacactgtgatacaatgtagcgccaaccatatccaacgggaggagaatatcagttggaaccaaatgatggtcaagtttacagcacaacagtctgatcttgtactgtcatttgtattcttggaagttgacgtggccagtggcttgcgcatgttccacagcctcctgttgaccgatgacgccgatctggcacaccccgcagcgcagagtgaagtttgcagtgtcagtgtagctcctcttcctttgcgcctccctcactaagttgagggcaaggccttctgctggaccaatggaacggtcatgattaacggg

SEQ ID NO: 284969 - DNA, 743 bp, Zea mays
aagtcaacaggggccagtggcgaccgatctaaaataaataaattcaagccataacaaaaaaaaagaggaattgatatattaaccgttcctaaagtatatcttgtttgtccaagtaatttagaaatcttgacataaatagccagaatgtttctggaatcttgtaactggaatggttagccagggccaaaaacacatcaagaacaaatttttgtgattcaggtttcaacaaagtgcggattagcatggcgctccaagcatctggagccaaattgatagcttggcggaacgattgcacagtattcaccagcctcctgatcatcttacttctctctggatttaggtcccctatctttcccactttcgcatatacatatgggaatgtcgcttcttgaaggaacacgtctgaagcattaacgatgtcctggacaaggaaaacccgaacccgccatcctttcctcgataaaatgaaatcaaataggtcttctgtagctgcaatcacagaatgcatatcaaatgatctccactcaggacttccattggcgttctcactggagtcagctcctgatgcgcttgaagattctgatgactgttcagatatagctgcaatctaaaaaccaaatgttgttagtaggaacaaataaaaaacaaatatctgtaaaatttctcatcacactaagttactacccaaacccaacacaagaattagaaccaacaacaggatagagaccatgacccatttccag

SEQ ID NO: 284970 - DNA, 516 bp, Zea mays
ggtaacccaattttagaccaacaacttgacagcatagagatcatccaaaagtcatacacaggcaacagcaaattatttttttaaattagtacagggaaacccgtttacagtagaggctcatttccttcctctaggggcgaggtacacatgcagtgggtaaagcctgttggttgtaagctggatggtgtcaaccttgtcctcgtcgccttcctcgagcctccacgcaaactcttgcacggacctcccgatggctgtgcacgcgatgttcactgcctggatgcttcccgcacaggccctccttcctccgccgaatgccatggtcttgtgcttattcaccgtcttcgaagctcccgtccagatacctctctggcctccattcgtcgggcgcgtcccagtcgctcttgttcatgttgcatccgtacagatttatgatcatctgtgtcccggctggaacttcgtagccagccaagttggtactctcatggacaagtcttggaggcaccagcggaactggag

SEQ ID NO: 284971 - DNA, 462 bp, Zea mays
acgcaacgacagcattaagttcaatgggaagtaaagagatccaaggtacatcgtcatacaccacatacaaacttttcacttgcttgctcatcagaactaccggggcctaccgcttcacttctgaaaatatgtgattgcctgtccagcaaagttgaagggcagctggctttgcacaaagtaaggtggcaaaataagtctcagtctctcctggcgcatatttcaccaagaacaccggctacaatatctggattacaaaacgctagaacagtaaaaaggtatgcatcatatgcacaagacgactgccaaattactgtacagataacctgcaacttttccttgatgcaaggccaaactatgtaatcccaacaattttgtgtctacatagaagtcggctgcaagtcaggaaaatccaagtttcacggcagcctgaggtctccagatgggtcacagttgggcattctg

SEQ ID NO: 284972 - DNA, 546 bp, Zea mays
aataaatgatgggtaaataagtgatataaatattgtgccttgccctgataaactaccagcgccacagatccactattgccctgccttaaattacattccttcaaaagacaaggctaacagaaacatctttcaaggttcgagccaaactctactaacatttcaagttagtctctgtataggaaaggccatcatgcgatgatgtgtttgttggataaaaatatacacaaagatttatgacatcaacttgcaaaattcagttttctcttatctttgaaagaaacaagatcgaactcttcatcctcctcttcctcgtaatcgtcatcatcatcctcctcatcaaaattatagtcatcaccagctctgatcctaccatttacatgatttcttgctcgtgtgtcgtctagcaaacggtgattttcggcatcagtttgtataacttcatgcccatcgtcaccatccacctctccatcaggtttaacttccagctgaactggaccattccctaccaaatcattcgcttcttgttcctcttctggtgtcttggca

SEQ ID NO: 284973 - DNA, 511 bp, Zea mays
atggtagcatcacatatactgtatatatagtatgaaattatataaccatgtatatatatgtagtatgatttgctggttacacactggtaattaataacggtagagtgacagtgggcgggagagcacacattgcatattgatgcttgcctcctccaatttcccccacatgcatgcatgttcggtcggcaacggcagccactaattaaataaagaagaaacaattaaacgcttaataaacggcaagcaatgaccgaggtcgatcattagtactggacgaaggagcggtagtcgacgtcggggatgtagttggccgggatgacgttcttggccaccagctgcctgccggactcgttggtgatgcgcatggagaaggggccacggagcgggcggttggggtcgatcctccagatggagccccaggactcgtgcatgggctcccagtggccggagttgctctgcatgatgtccgcctgcaccacgtcgccgtccttgttctcgtgctcgatgagca

SEQ ID NO: 284974 - DNA, 479 bp, Zea mays
aatcaaaccacctttaatatttatttctctttaaattaaatcaccgaagtttgtcctggcttcaatcatcatgtctagaggtggcagactcagatcacattggatgggaattgtgttccagcatgattagccaaaactgcattcagagggaaggtggatgctggttcccacacaaccattattacacagaacataactgtaaccattcaatgccttgtttttcttcctcagaaggttcttaggattggagtttatctctaattacaagccatttatgctggatagaatgaacagagcacacaccgttgcttttagatgaactactagcttacgggatgtcagtgggtttttgaagctcacacccaaccagaaggacattgcatgataggttcaaaagaagggcgggcggaagtgcacggtgcattcatccttgccttttcagaactttacaaggttaatgatgagaacatggataacac

SEQ ID NO: 284975 - DNA, 401 bp, Zea mays
aatagaaaatgaataaataaattattggagcaagggcaagcagccaagcactggggctcacctcggcgagcgtttgggcttgttgcgattggtgacaaaagtttggtcacgacggtgtggtgacggtggcccccatcagcagcagccagtggacaccgctcgtgtcaatggccaactactcgtgttcgcctggagttggggtggcgactggcgaaaccggcctagtcgtgtacgttatagtgttgaacagccagcacacctgtacggacctctttagtggtggtaggaggaggaccaccacatcaacaagtgtcctggttgctgcaagagctcttcctctgctgttggagaagcccccacatgggtagtaaggacttgcatgcagtccactctgtgtaaga

SEQ ID NO: 284976 - DNA, 533 bp, Zea mays
gggagacattttcccgttccagtgggtacggatttgcagttctacaaataggccggcggcctgtacaaacagccaatgggaattcacgccccctccccttttatcctcatgccagcattcacctcagggaagaattgaagatgaagcagcagttggtaacacccttatcccgtataccttcaatctaagaaccaaagaacatgcggggtcgagatcatggtttctggcattagtcatctgagcagatggtcgtatggaaccgaaccaccgaagccaggcgaatggaacgaaggtctgtgcacctaggcggctaggccaccatttcccccctgggggcctcatgttatctgtagttacagcagtgcgctctccccgctgacagcttctcccagaggcacagcatctgcctgggggactggtagtgcgccgtgaagtagttgtccacgcagccgaactggcagaacctccagctgtggacatactgcacgggggcgctggcgctgtagtccttcacccacatgcccatgctcacg

SEQ ID NO: 284977 - DNA, 492 bp, Zea mays
gtgacgaacaaatataatcaacgacttccatgggcagtgttaacattgcttcctgatcaactagtaagagccaatcaaaatccatttacggatgctgagaagaatatcttctgtcctaacacggtttcactaagaacaagctgaaaggcaccatcattctcaccacactgcagctccgttcgaacgtccaaacgtttgcagtaccagagttagacaacggactgtctcctcttgccgttgagcacccgcagcgcgttgccggttctccccacaaccatattctcacgaagagctgggtcaaagatgcccataccaggttttgcccgaacatgtgcaggcgtaactcttttctggatgctgaagcacagcttggctgcgtttggaggacctcccgccggtgccattcccatcttccgctgcggggtgacatccggaggagggctcgggaacttgctgctgctgcttcctagaacaaatctcctgaactttgct

SEQ ID NO: 284978 - DNA, 586 bp, Zea mays
aagatcaaatatatattaatacaaataattataatacagaataactattatcagattaatctcttgttggacggaagtacttacttccctattctagattcaagcttttcttgcgatcacaatagacggtattgttttgtttttactatgtacacaatagatatctacacgtaactagagctactgtacgattaggattagtcaccaagaaactttgtcacaaagcattcatcatctagacagctgtaacattttttgtgtaaattcgaaggtatattcctccctgatatttacatcttttctctgctattgtcaacctatctacatctgttatttgttgacctccggaaggggaacaaaaacaggatagtaggtattcagttcaaggtgctccaggatctgctgggcagctgacaggtaccaagaatggccatcaacaagcccggtaacatccacgttctcaacaccaggcacatcaatggcctggatgccagccagtccttgggtaagcaggtttgttcaccttgctcggaaggttacaccgagaatccagtcatctctcgagtacacattcacaaatctccct

SEQ ID NO: 284979 - DNA, 370 bp, Zea mays
acatgatgctataacagaagtggcatcgcaacacatctcgatgccttattgcaacaaacgatcgtcccacaaatgaacacagtttatttgctctgtgcaggattcaaaggtatccataaccaggaaaaaagtatacacaaataataatcgaggtccaaaagtgtgataaatcactattgagagctgccaaagtttctcctggacatcgtcagggtaccccaaagagtactgggccacgttctgctttcaagaattggctacgcagctacctgcccgaaaaggctctgacgaatctctggcagcttctttctgaaaactacctgcaatctagcatccagtgtgttttcacagacaatctttcctcgagcct

SEQ ID NO: 284980 - DNA, 360 bp, Zea mays
  unsure (1)..(360): unsure at all n locations
tttnttttnttttttttttttcttttttcttttttttttggggtttttttttttttggaacatgtactgcctatttacgccgttgattcagtatctaaaaaggcaggggggagcgctgacttcggcagagtaccctcgcacgattcgctaggacatttcgggccattgcactttggccgcagaatctccttcccagcatcgccgggtggcactagctgaagcgccgcattcgcgtcgcatgtaccgcgctctggcagcgaaacagggaagcctcgtctcccgccatggcaagaagtcctccagttcaggagaagaggacgtggagcgagccgttcctggtggtcgcgcaaacggggcacg

SEQ ID NO: 284981 - DNA, 345 bp, Zea mays
agcacaaagcaaggatggatggtttaatcatcatctagaaaaagaacatcagcacctccttgagcaaggagggtgtaatagcctctcgtagaaggaaacaacaccagaactgaacaacaagataatcatcactacactactatcatcataattctgaccatttcatagtctataccctctggtaacttttcccttcacatcaatttcttacaagtaaaactaacgacatgggcacactgccacttcagcactgctgcttaggcgatggttgctcggcatcttcccattcctcttctttacaggcctttagatagtagagttgccgccttaggtgcaatatctctc

SEQ ID NO: 284982 - DNA, 409 bp, Zea mays
aaaactcatcgtattctccttttccatttaaaaatcatcaggcgaacacccatcttaatatcaaagttacagaattagttatgaacttctatttagacataatttcctaggaaaaaaccaatactatcaatgttaatgcactgaaaaaataaagagagaaaatttgggggcaaactatagttcatatttgtaccccaacagatgactgaattccatgaagcactcatggcttcagtgcgatttctgaaatttgaaaagatacttattggttttgcttcatctcagaggaaacaacttcacaacttggggcaggaaaaggtaatttacagtcttgagaactaagagatcattatccaaggtagctcccaagtcacggtggtactcccatctacataaacctgcataacaa

SEQ ID NO: 284983 - DNA, 588 bp, Zea mays
gatggaaatcattggtcttggatctctgatttgcatgtcccttattacaaagtgaagccgtgcacctcgtcctcgagcatgcttgctccttcgatttacacttgcaaagttacacagccagaaacagctgcagctgcagctgcagcgtggccatcgcggcgagcgacacggggccgattcattgccctctgctatggcacgcctgcctgagcgccacgggcgggtccgagagcgcgccggcgacgatctggtcgaacacgaacttgttggcagcctcggtgaagtgcacgccgtcccagctcaccctcttggagggtttctcgcacgacttccccaccaccaccgacgtcccgttcacctgcttcttcccgccgcagccgacgctcaggtctaagttgtaccggccgccgccgtacccgcagcatgtcagcagagggtcgtcgaagccgagcttcttggcctggctgatgagcttgtacgttggcggggtagacgtcgacgtaggtgaacgcggcgtcagggtgcgtctgccgggcgctcgccacagtcgccttgagcctgaggttgaagtagtgcgcgaccttgttg

SEQ ID NO: 284984 - DNA, 402 bp, Zea mays
gttatacgaattgcttagaaatatatgctattttctgaacgttgtttcaaaccagcgtttctgtggattttcgtagcaatggacaaatcaaatgtcaaccatctaaaccacacaacaacagagtaaggatatgcaaaaagtttcaaaactatatgtaaaaaatttcaaaactaggcctataaactcgattaaacaaatatacttcagaggtcataggttgtagactgtagatgaatgaagtcaagggcatcaacagcggcaggagatcacgtcggagcagcggcggcagccgtcatgagcatgagccgcctcctcgcgtgagcgtcagcggcattccctagagcagcaagatgaagcatccgcctcttcctcgcctcggctgccatcgccacggcactggca

SEQ ID NO: 284985 - DNA, 443 bp, Zea mays
ctgaaaccgggggatgcataaatttctcaaagtaaacatggcatgctcatacaaatgtacggttgacgagatctgttgacatccactcaatcagggctacgataactgagaactcatttatgacaacaaaccaaaaggcacaaacacaggcagacgggagcaatgatccattatcctttctgaactcggggcctgtgtagttgagaaggggcatggcagcaacaacctcttgtctactataggccagccgcattttaaaaatgtacatgtattgaaatctttaaccaccagtctatagattatggtatatgcacagctacagaagaaaaaaaaatgaatccctgctagcagctcattcttcgtctttggtttccttgtcgtcgctgctagcagctctcttgtagttccatctgtcctcgccattgttatccccctcttcttca

SEQ ID NO: 284986 - DNA, 409 bp, Zea mays
agatccaagtagacttttgtcgagatactacagtcacgtaacatgcatgggggctacatttggacgttacagggggcttttgtcgagacactaatcatgtagcatggggtctagattttttacatgacggccggcatgcggctgataaacatacggatacagtggctaaaaccagaccaccccccgcttaccccaaaatacgagcatatgcgcataggatccgccacttcaacacgtaccggacgattctcctcacagccagattctcctcacagctggtcagaaaaaagctaaaccaaacagactaccgcatgaagattttggcaggccacggaaacccggcaggcgccaggtcatcgtcgcgcgaccgcgacttgtccgttcccgcttcccgggggcccgaacggac

SEQ ID NO: 284987 - DNA, 372 bp, Zea mays
agcaaaagcatgaaaggctgccctcaacacggttctatattgcacatttctttgttcaatttcatccgatacactccggggcttatacatacgacaggacaccagcagaaacaatacaacctgatccagtccgccgcctttgtcacaatgcacaagttccttttaaatacagaatttgtaaaatgaatctagaatacgtattctaactggggctccttaattcgggcatgcatggcccaccgcagggacattttctggccatgtcatgggggcacattggcatcacgtgcgttcggggaccctcgcccgccttaatcccctaatttctcctagggggaatccacacaggaatcctatgccggccgccaacca

SEQ ID NO: 284988 - DNA, 419 bp, Zea mays
aacaagtcacatatgacccttcgaaatactcaagtttatgcactgcacaaaaggttaagcctatacagggtagattctggacttaggattacacgatacatcttctttttctatcacaattcacgacacctaggatggctgtgcagtaaaattacagtagtagagtatatatgctacgtaggctgcgatcgttcgtacaacatgcatctcccagctgcgaagcacaatattaagaaggttcaatcaaaatggtccgcggagaaatcgggctcgtcaggcttctgcagcctgcggatagcgacgtcctcggtgcggaaccttctggaagcagaggcgagcttgtgcatatgggcgatggcaccttcagcgatcgtcctcgtgccgccgccgccgctcgaggtgccctcctgcctcggctt

SEQ ID NO: 284989 - DNA, 500 bp, Zea mays
agataacagacaaccgacagcaccatataaaatcattaagtctttagcggttcatcaacaagaccggaactgcattttcagttttgctctttaaaaataggagatgttacatgacaagaacccaaaacagcagctgatcatcacagatcctttgcatccttcttgcgagcacacaagcaagatgtcctctcttttgcagctacgcaccatccttttccaatcttttccacaacagatgtcaacttgaaagtgagatacaagccagtggttagagacgaaaataggcttccatactccttgttcaggaaaaaacggtaccacacaggtgtaggcaataatgcacgatacaaaagtagaaaatattccacaatcgtcaacatttgaccctgcctacgatagctacggcctctgctgttcttatagtacatcagcagtaaacatttgacaaccatagcagtttggcgcaccattgtatcgttcaccaagatgatgaatattgc

SEQ ID NO: 284990 - DNA, 432 bp, Zea mays
ctggaaaggaacattccacgattttctctgtaacgggttatcgaaatacaacacgtaccctgttcactaatatcactacaagcatttttacatattttcagggcaggtactccacgatcgtacgtttccactttgaggaacaaactcaaagacacacagtctagtagtgatgcttgttcatctagcagcgatgaccaccaccaccaccacctttgctgtctgctcccggtgaaactgtacagcacaggggttcaaaccgcccaccacgaaacacgttgttgggttcatcatctatcctggctggggggcaggaggacacttttcgcagaccgatcaacgcagacactcagcctgtatgtatagtcgccagacggtcctcgcatccattcaccgcgcgatctcctggagcctctggagtacctgcctggcgct

SEQ ID NO: 284991 - DNA, 475 bp, Zea mays
cgtcctatatattattcctagcagatactcagaacttcatcgatttctatacagaaccatacatatgttatgtacacgcacgagcttgtttgggagcaagaaaaataaaaggaatttgaggggctaaaatcctcttgttactcagaattaaatagcaaggggattctagcccttacaatcctttcccccttgctaccaaaacataaacgtaaggttccccgtgcgtcgtatgttacgaaaaaagagagcccatgcatcctgaacaggatcgctgaagattgagggctgattacaacctgacttttacaacgagatatagagtgactgtgtggtcgtggggcacactgattttctaggaacagcaagctctcaacacatcctgcatgtcaggatcatctccggcttctttgtccttgtggatgtacaggatgttatcgatacctggacctgcaacaattaaccccccttgatacca

SEQ ID NO: 284992 - DNA, 745 bp, Zea mays
gaaaagagtgaacaacgtcctttttcacattagagtacaagaacaaccaagttggatattatgctagagttagacatctacctatactgaatcaggaatgctaagtgatccgtgctaatcatctagaacatttaagctacttttactacgctacataggaaacaccattcaaacagttctgacatttgcatatccctgctcctcgtgcgctcaattttgtgtagccagcaaatcccatttcaggcatcaacagtttccaggcaccattttctggcatgtcaatttttttgccataatgtggtttgtttgttctgtggtcgaggtaggtgatacacagatgcatgttaatcttccaattccaacaactaagtagcaatgccgttccattccccaggaccccagcagaaccccttcggtcttccatagccatatcttcagttaccactatcgctatcagatgcttcatcaagtctggcaattgcatcaagtaatgactgctcctgatctttcagcagtttccttgccttctcgatttcaggcatatttggattggccaacaccctctccacctcagtaacaacactttcagtatttggtatgtcaatataatcaaaattcctattgatgtcattttgaggtggagcatagtcttttataggctcatttatcgataaccttcctcttcccctgattgaacctgccatagcaccgttgttggtcatgtgcctcttcagcatagggccag

SEQ ID NO: 284993 - DNA, 472 bp, Zea mays
cgtccacgaaataatgacatatacaatatcatgtaatacagccttttcagaaataagggttaaataaaaaatataagagagatctctttgcaaagagtctctctacactacacattgtctattaactatatttattatgtgattaatattgaagacatctcattatatcatacagttttttagctcttaaaaaaccaattctcatcgcacagtcggggtagctcgtaaaataacaattcaaagactcaggttgtagatgtcctaaccaactacagctgcagaagagaactcccaatacggccatgatactcccaatacggccacgatattaggcatggcggtgggcgcgtttggtgaggcagaatcgatcatctgaatatacgaggttttgatgacagtgcacatattaaagagcacccctctatcaaatgcacatgaacggaacaattgattcagcatttgtctggggggc

SEQ ID NO: 284994 - DNA, 836 bp, Zea mays
ataattccacactaaagcgatcccatgtttgggggaagctgagaaaaagagcactcacgcttaactttgctcatatgctctgcggcggagcaccagccaaatacagtaaatattaccagtgggtcttctccacaccatggtacaattcataaaccacacccaactcaatttgcctctgccaccagcaagaaccacttcaaagacctatataactctatctctgtttcttcacccacacagctcctcataaaccgaaatggagcagcatgtatgtagattaccaaaaacacggtggaaaaaggcacaaacacgcgctgctccgataacaccgggaaataaaccaatgcacgcacggacctgacttgtacaaatagcgtgcggtagcagaccggacaggacacatgttttgcccccaaagcaactcttacaaaatagaccgaccaagaatgaaatgcaaagacaatgcaagcggccaaagggaaaagaatgctaggaaattcacaacctaccagcagcagcagggaggatatgtctgacataaatggacttggccaccctgatcgatacaaaaataatcctgtgacaacgcgattcgagcccgctctttcttactggagcagcaccaagaaactgcgccttttgtcccacgtggccatctgaccaaactttgatgcatgggatggatacaggggaggaaatgatgggccacatatcataggcatgccatgcacaggaatctgtgagcatgtcatgcgataatagaacctcatctcacctccaataagacatgaaggttgcagatgcatttggcgaaagttagcgggcggccaacttga

SEQ ID NO: 284995 - DNA, 523 bp, Zea mays
ccaatacagtagattgcaatgataatcaggacccaaacgatgggttaaacgaaagaatgttgacagcagatctgttatcacaatgaaagaagacaagcggtcgcttctcaatattcgacgtcagagcagccgaaatctccaaatcttccaatcatccctcctgttagatcctgaagagtatagcccttttcacccactcacagcataactttaactcccccccccccccaccaatgctatcacctacgtactatctatgcgccgctcctgcctttcttcgacttgttcttgttttcttgggtcttctttttcttctcttcaggtgttgtccacacgtaattggaaggaatggcgaatgggtcctggatgtcctccacgcggctgcttgggccaggtgccgtcgacaagttctggaggtagggcgccttgatccactgaatccaggaacttgaagaaggctgcactgctgggctcttgctgttgtcaggacttgagggtggtgtggtgaactcatctagcggct

SEQ ID NO: 284996 - DNA, 386 bp, Zea mays
ccggaaatcagaaattttataaaaataatgtacaaatcgtacaggatcatattcaatagtacaggtcaacactacacatccttagccactaatttctatccaaaccatcacccttaagaaagtaacagaagttaatcaacatatttcatggtgcaggcaacggcggcttgtatttcgcaaggctacactggggacatatgtattccatcccatccgccttcgagtagtccttgaaagtagcctagccctttccgtctatcgcagccaaggtgggcccattctccacataatccacagttcacccagtcacccagagcaccactgtggcaaatcaagcaacattccccatcaatatcgtcatgtgcaagttcatattcaagcaagta

SEQ ID NO: 284997 - DNA, 531 bp, Zea mays
gggcagacagaacccacacatttcatgcaaaaagagaaagagagagagatcttacagggattcagatccacaacaaaagaagccaaaaagcagacaccaaacctagatgcttgcaggaatggggaaaaaaaagagagaaaagaaaccaacaagactcatatttcgcagcagctgacgatcaagctcttctactcaggccctgtacacgttgaaatgcttcgcccatcgccgtgccatgaacgggtcatggtagtcccccctctcggcgcagcagctcctcctctcgccgccaatgctcagccccatctctctcattccacagtacccgttgtcacctttctcttcgaaccctacgttgatctcacctgtcctcaactgctcctctcttccaccgtcctggtaactgtaaccaacgagtatgaagctacaatctgccgcaaggtcgagcggtatcctccgctcctcaccacccctcagctctccaagcctgaccattccgccatgctcccctatcctcagctgggtgtcgct

SEQ ID NO: 284998 - DNA, 503 bp, Zea mays
tcgtctctgccgccttgcgccactgctcggtctgcacgcgcaggcgccgcagctcgccgtccagcgcctcccgcgcggcctccgacgcccgcagctgctcgcccacccgggcctcccgcgctgcgccctccttcagttcgtgctcggccttggccgccctcgacgcgggcccctcttcggccttcttcgccgcctccgcggcctcctctgcctgcttcttcagctcagcgttttccgccgtgagggcagcgatctccgtgtccttctccgccagcttcggcttcagctccacgacctccgggctctccttgtcggcgccgtcagattccaccgccgcgctgttgtcctccccgatcattttcttagtctcctcttcctccgtctcctcattctcggccacgtccaccgccgccttaccgccgccgcagctaacgacctcgcagacctcagccgcgctctggttctccttgtcccccgactcggcccggacgacctcaaacaca

SEQ ID NO: 284999 - DNA, 359 bp, Zea mays
ggaatataaagagactaattgcaatgggatgcatgggatacaaccaacaatatccaactctcgacaaattcactgatcaagaaaacacactcaggcagcacagcacacgccttgcttgtgggtgccagctgccgacaacttcaaatttgggctcaatctcaagctactgcacagttcttcagcatgttaatcaattccgatggacgaagatgcgcaatggcacagcatttttttttctcaattgccagacaaatcatgaatggaacctacgaattcgactgacctactcaacagtatttctgtcaaacgcctaatcaacctgcaaacagcagctgaccacaagctggaggcagatcttg

SEQ ID NO: 285000 - DNA, 385 bp, Zea mays
ggcgaatgtaggttaacagtaaagacagtggattgaactgttgtggtagataaagattaaaggtggctgatagcatgataataccagatgtgacggtcgataaaacgagaataatacattgtatacacacgccctcaggtcccactgcaacggccaacggcctatgttgcatttatgtcagaatttctccagcctttcccttggatcagcgtccttttactattagcaaatacattagcttcaattgaatcaaatgaatcgatcaaaccttcagttgtgcgcaaaatggcgccatttttccgcctcaacacgtgacctaagaacatgtccaggagtccaagaccacgggaccacctcttatgaatcactccttgcaccacatgcc

SEQ ID NO: 285001 - DNA, 565 bp, Zea mays
ttcttttatttttctttttttttttgccgaaaccaaccactgacatagtttgcatgtattcttttgtcgaaatctataagttttcatagttttcatggtttcttttccatttgttttcatgctgctccgtgtttcaatctccatatcacgattaaccaaaaaaaacatatcctatcaggataaagagtatcatcaaagccggtggatatatggctggtccagtcacattaaccaatacaagaagctttcagtcacttcgcattgagtgatcatcgacgaagaggaacctaggactgcacatgaggagtctgaaggaagagaaactcaaaggatttccccgatctctcatactcgagcatactgagagctacttcacagctctgcgagactatgggctcaggatcctttgcaaactcctccaaaagggcaatgctttcttggtctgcgattgagccaagggcttcagcagcttcatgcctgaccattggatgctcacagacatccttcaggactgtagaaagcgcatctgagcggctttgttttgcagctgacctaacacataagc

SEQ ID NO: 285002 - DNA, 495 bp, Zea mays
ttcttttttttttttttttttttttttacgcaaagttactcatgatgatttcgttgatgtcaactagattaatggaatatgggcaaaactttgttttgtttttttacctatcctacaactgacccgggtggctcaatgcgacattcagtcatcagtatgcattttgggggtatgtgatacttgctaggcactctttggtacaactaggttacattccagcttccactcttcgacatgcagaatctcacctgcaatggaactctttcagcacttctcgcggaaggggagatgtattaaccgtcctagttccagaagggcagtaggatcttttggcagtaccagccgacagacaacacctagctttcctcagcttttcagctcttctgaggcagccgaaggtatacaatgtgttgtcagaatatcttgagttgcagcctttgcagttttcgtcttcaggacaaccacctgatcgaagtccagatcaaactttaagaa

SEQ ID NO: 285003 - DNA, 393 bp, Zea mays
aggggtgtccttttactatcagcaccagcgtggcttgcaaaataatacatatttcttttaaaagaagaaaaaagaaaaacaagcgctcctcagccggaagaaacctactctactggtctgggacctgggttctttcttttggtagctggcaccacacgtgtaacttctccagcacagacagatcgtgctgcacaatggccatatgaattcggtcatgaccatgggagacttctcttcctatcttgtacttgcacacactccagcagctcctaacttcgccgttcatgcgcgcgcgcgtacgaggccacgaaaaatcccaatggaactttgcagcctcagaaatcgtacttgatgaccgattgcaggcttatggcagatccatctggagtttcg

SEQ ID NO: 285004 - DNA, 466 bp, Zea mays
ctagttccctaggacaacggctttttcaggaaaagatagggaattgactcttatttacttctctctagcccatctttctcagcccttcaaacacactccacgcttttaacatttgagaatgttcgacccgggcacccgccctcgtagagttcgtaggcctttttgtcgaacacactgtgatacatttacaggagccagttataggcagcattccgaagtgtcaagcaaatacaaacacatggcaattcgggttggaacgggactcgaacggttcctgctcagacaccggtcagtagcgtggccgtagcgtgtttttgggggcgctgatccacggcgtgccggcaatcgcgaacctccacggcgccgggacatgctcgggagacgcgtactcgatgccaacgcggggaccaaccaaaacgctctccggctctggcccgtccagtacctccaacccaccaggcgcgta

SEQ ID NO: 285005 - DNA, 451 bp, Zea mays
tgtatgtaatgcctactgccacaacatcaagaaacatgtcatcaaacttcggcctctgaacgctaccgttcaaaaaaaaagaactggctaccatgtgaaatgagtgttatttacactgcttaggcctgaagttatcaggttccaaaagtttcaacagcaacttctctagcttggccgagcctttggtcggcctgagaataaaggaccttcccaagaaggtacacggatctttcccgcctactgagctacccaggcaccatccacccggcgtgaagcggtcaggtgctcgccccaacaacttggcgtcgatcatatccaggactgagttatcattggcaaatgagtgtgcaaacggcgccccgctgtctgccattgcatcaaaatgctctgttgtgaggttagcagggcgcgtcccaggtgggttatcccatgccatgaagcgcagatcact

SEQ ID NO: 285006 - DNA, 431 bp, Zea mays
gaaaaatggaatagctattttttaaagagtctataagtaaacctcctctacatttcccttgcaataacgatgtcaagaaccggctataaaagcatttcatatccactcgatttttcttaagagctggccacggaaaccatttcgtactctctcgtcctcctgttcttcgaacagaggaagaaagctcctccgcgccactgctggaagaagaggagcgccgacagtagcagtgctccgcaaggtatgacgatgtcccaagcgaggctgaagaggtcgtcacgagggcctgcatacatgtaagatggtctcaggcttggaacaaagtgctgtctcctgaacacatcgtacacatgaggcaggacacggatcaaggtgctttcgatgtagaaccctggggagagggctctaactttggagtctgagaacacgtt

SEQ ID NO: 285007 - DNA, 391 bp, Zea mays
agaaaaaaaatcttgtacttaagacgggtttttttttacgaagggagcgtgtatgacaattaacaagacttagtgcacaagcacaaaggccacagaacaccacacaacatctggcattttacagctacgtgacttggctggcaaaactgaatggaaatttgtacaaaaggacgctgcatcctttccttttccttttcatcgcataggacagaaacaaaacacgagacaagcaacactagtgcaaaaaatcatcgtctactctgcaggagtgcttgcacttgtagctcccctgctttcctcagcgacctgtactgcagccgtatgctttctccgctatcaactgccttcacaaggtaccagccattcaggcactgtgatgtcaccactggct

SEQ ID NO: 285008 - DNA, 546 bp, Zea mays
ggagggggagacacctgacggaagcggccattcaagatacaaaaccatgagacgggctgggatacaggcttaacgacaactcggtactcgttacagaggggtttacattttgccatatgtttggtgccaagaactggcgtcatggaactgatctcaaaaaccttgtttcaaagcggcgaaaaaaaagcttaagccaaaactgagggagcgaaaccgtctcactacaagctcacactggtactgctggtagccacaccgtaaagcctaaccgaaactgaaggagcggaaaccataacactacaagttcactggtactataaccgctggcgacggggcggcgctcttcagccccggttgctgactgaatacgccactttgacaggcctgccctgcagtttcgactggttcatcgctatggccttctcgagcgactcgtcgtcttgaaattcgacatggcagaagccacgggaacccccggttcttttgtcgacggcaaaccttaccgatgcaatcttcgacggcccgaagaagcctcgcaagtcgttt

SEQ ID NO: 285009 - DNA, 321 bp, Zea mays
agtgccggatactttggcgtgccttgcgcattgatcaaagacaagtttctctactcaaatatgtcattgcgcctacaaaaacttccagagttaggtcaagaaatgcttaacaatcaaaaagtactcgctgttgtcacaattggttcttctgaatggcaccgaccacacctaaaccaaatgaggaccttcgacctgaactgatgctatggccactacagcaagtctcgccaacgcaggtgcccataataaccactctgccgtctcctttggacactcagatttttgacaataatttacttgcctgaggtaataccaactacc

SEQ ID NO: 285010 - DNA, 403 bp, Zea mays
gccgcggtgatgaggttgtttatgccggagtactacgcgctgtgcgccggcggggggatgctcgcggcgggcgccacccacctcaccatcaccccgctcgatgtgctcaaggtcaatatgcaggtgaatcccatgaagtataacagtatattttcaggactaaatgttcttgtgaaagaagagggaccttcgtcactttggagaggctggggagggaaattttttggctatggtgttcagggtggctgcaggtttggcctctatgagtatttcaagaagaggtactctgacgtgcttggagacagtaacaagagcaccatatacttccttagcagtgcctctgctcaaatcatagctgatgttggcctgtggccgtttgaatcggtgaaagtccgtgttcaga

SEQ ID NO: 285011 - DNA, 312 bp, Zea mays
tttattattttttttttttatttttaattatatacatctcatcaaattaatagtagttgtgggctagtaatatattgacagaaagggatccaagaccatacatgacaacacaacaacacttcagttacatcacataatgtaggagagcgagcatgactttacctaaaattatttagagtcaagacacacttattcttttacatgattagaaatgcatacacatgtatagaagttcctagcttattttttcccgggcaggcagtaaattctaggtgggaagaaaccaatgaaaaaaaggagggttggggtgtt

SEQ ID NO: 285012 - DNA, 543 bp, Zea mays
gtgctggaaatctgtatatatttacaataatactaaatccgatctcgaatatttgtcgcaactaaaacacgacaaataaaaaagaacggacaggacagggtataatacaatacaactagtttctcacgaactgcccgaggaagaattctcagtacaggcaactgaaaactaagcaagaacgccgccatcatcacatcttaacattgtcccaagtccaccggagccatgcaactcggttcttcggagtggtgatgcacctaaatgccgcgcgtcggatcggcgacctaaacagctcagtagctatgaagaacagctcagatccctgagacacgccgtccttttctacgagctgcagcaactctaccacctcttcttgctcacgcctgatggcactgctgctctcgttcctgcttccgagcatgctctcggacacgccttcggcatagtaccccgtgttcttaggcttcttggctgggcggctgccgaccatgtggatgtggtggtcctggcttgaccatggggacgcacggccagacctgtaac

SEQ ID NO: 285013 - DNA, 446 bp, Zea mays
cacatgaaacgagcaggggaggcagaaaattcgagtcaaaagcaacataatcctaaaccaggataatttacatggccagatccaaggagtcacggttaaacaaccaggcgtccagagcaaacagggatcataacaagtttacacagaccggtgcagctggtggacaagattagcagaagaaatacatcaatccacacccccataaatatttgaacaaatggtgggagaacggccaccatgccgtgcagggcaacagaaattctacagtttgacaacaacttgctgtcttcacagtacacatggcagcaattggaatcatcagtcatactcatatcatccggagactaagaaaggatctagctgaaagtggtttgtatgattaaccacaaagagcaaggatcttaacccatcaaaatagtccacggcagttttgtgatccacacatg

SEQ ID NO: 285014 - DNA, 401 bp, Zea mays
ggagaaactgtggagggttgccattcatcagcctgtgatttactatgtgttgcttgaacagttacaattgaacatagctgttgaaatcctaaactcactaaactgcatgtctgaaagaaaagcagtttctaagctagggcacttcatacaagtgattgtttagttttccacgaaaggatccttcaagaccaccagagtccagaggtcattgtgtagggggtactattgtagccgcttgcaaataaattcatatgggggaactttgtcaacatttccccagctagccattgtgggttgcgtagctagcatcttcctggcaaatgttgcaacatcatctagagtaatttcttccatacattgaaggaagtagtcaataggcttcctgcaaccataagataaca

SEQ ID NO: 285015 - DNA, 506 bp, Zea mays
ttagttcaaaatttggtggattatataatatgaggagattataattccaggcaacatatatacaaagcggtaggattatcaggacggcatatactacttcaattagaacttaaaaatcgccactgctggctcatggggacggtgaacagacgaaacagccagccagcagtgcgtggcgggtctcatctcatctcagttctcacgcgttctcgatggtcgggggcaagtacagcttgatctcgccctccgtgtgagggacgagcacgatgtcgacggcgctcgcgccggcgagcccgaggtcggcgagcacgccgtcgagggcgagcgtgaacttgcccaccagcgtgccaccggcggcgttggagctgggcacggcgctgaagctgccggcgtactcgctgtccttaggccccaccctcgcggcgtcctcccgggctacgttgatgaccacgtcgaacttgttgttgatctgggggtcgtactcgatgccctcgcccacgcgtccg

SEQ ID NO: 285016 - DNA, 458 bp, Zea mays
ttttgaaaaagaggggcacagtttgttttttttggaaaagcttctcatttgtgaaccagggttcatttcagtagcaaagggaagaaaactaggttctagtacagttttcattagctaatgcgacgagtatggcgaaccactgtgacgacctaaccaagtatacgaaaggatgaaatgggacggtcacagttactctagtggttaaatgggagtcacgtagggacgaggtaaacaccagagtagtttttttgtagcggcgtgatcccaaaaaattaaaaaattgagagcacggtgtcgcccccgtcccatcccactttaacctcaaaccaaacacatttactgcaaaccctgtcacccagtggctcaagttatcctcccaccgctggcagaccaccaccaccgctggcagaccgccacctcagttatccttccacttgttgacgtacttgaggaatgcc

SEQ ID NO: 285017 - DNA, 258 bp, Zea mays
acccataacctttttcgatttcaggggacaaacaaaaagggcggattcacacgttagggacctaactttacggatacaggggatcttggcgggggattcccccagcaaagcagcaagaacccgcttttgcactagctcgggaatgagccttagggggaaggacccctcccggggggagaagcttggggtccctgccaccgccacgggagccgttttcattcttttgccaaccacaatgcccccgccgtcctgggagcc

SEQ ID NO: 285018 - DNA, 444 bp, Zea mays
ttctttttttttttttagtccaaagtgaagcttacgtgtggaatcatcaaacaaccgataaactgacatccaaggctacccgatttttacacaagataagaaagaattgggtaaggacgctcacattatgctttaaatacctgctccaaggggggaaaaagacatgatccagctgttataggcttagggcgcatcaagcctcccagtcacacaaccttttccctttctatcaatgggtgctacattcctctttgtacaaacgggcatcgctgccatagtatataatacgtagctactgtatgtacaggtcagatgatatcggaacattctgttagagagcgaccgcagaactcggggcagttgcaaatgctcatcagcatcaatcaccttttctccaggtaatggaagaacggaaccaggagcattcagtggttgtgtcaagtt

SEQ ID NO: 285019 - DNA, 636 bp, Zea mays
ctaactcacctccttttttggcaggggttattgttttgtattatgctgatgtacaaggtatgtaatatcatagaagtaaataagcccctgatgaaggtacagctaattcataattactgtccagcggcaagtgttttattgtctcattaacagtttcaacagcccactgttttttgtttatccagtgtgcatgacaaactcacttattttgaacaccctgtcactacttttaaccctgaatcaggctggggcttcattagaagaagcgaatgcctgcacaacataaactggatcgccaaccttgatgacctttccttcacctgatagagattccttgcagactaaattctgcccaaagtacacctgtcgtttatttttgtggcttggacgaagcacttggtcggaccgaaaagtctgtagagtttcagttggttcagtaccaggtactccatcctcttgattaatggttggcaccttgcagcggttgcataacttcacacctaggaatgttaggttgtttatctttatggttttccacaggtcctctgagtatgggtggcatccatccactaaaatatttggtctgaagcggttcattggtacaggttctttaagaatctcatttagtgcatccag

SEQ ID NO: 285020 - DNA, 455 bp, Zea mays
aatacaaggttaaactaaattataagcaatgtgttctcaagtctataagtgtaaaaagtttataaccatcagttctgttttacagatctccataatgtttactctcaaaagtttacctacaacaaaagaattattggagaagttacaaattagctgtctggcttgaactactgaaccatacgaaaaaagttcagagaagcgctagttacgcggtcaaccacatagtgttacaggtagcctggctcagccaacaacatataacatacttcctccgttcttttttatttgtcgagttttagttcaaaaatatagtggacgacaaatatccgagaacggaggttgtactaatgaagacaatttacagcgagagatgcgaccatctcatgtcatctcaatgctgtgttgaagtgggtgagaaagaatcggaagtctggatggtacacttggcgatggcg

SEQ ID NO: 285021 - DNA, 424 bp, Zea mays
  unsure (1)..(424): unsure at all n locations
tttntttttttttttttttttnnggacaaaatgatgacgtgatcctttttaaaataatgggggggacaataacgttcaagcgacctaaatggttgctgtagtttctttcagggaaaaaaatggttcctacagattacagaacatgctccaagtatacatagataagcaagctagcactacacaatcatactatggtaaatcacctttgtatcccagccatcaacaacaaatacatccaaacaaaagccatcagtcgttgagaagacatgagcttcacggatgttcagtccaacttcagacaacaaagcagatagctgagcgaggagctttggtttgtcaatggtagaaaaaataatttcatgaacatggaggatttctacatctcccctcgaagaaccggccacatagtcacccacaacctttt

SEQ ID NO: 285022 - DNA, 389 bp, Zea mays
cctctatttttttattgggcgccggacagttcaaatttaaactaacaaccgtcagataaaaaaaatggagggagtacaacactacacccaaacaaaaatgaacaaaggagctacttggattaggcatccttatataggcttaacagaaagaatcagcatgtggctagaatttacaataatctgatgaagcgctgcaacgttgggagccttgtgtgatccaaacaatctgatgagagcttatatatgggtctatgtcagcttcgtcaactaaaccactgcgcctaacattctgcttgttacaggtgcccagcgttgcccacctgccgttttccttgatttgccgccatataatccacgtggcaagttttcctgttgtctgcaacgcgccc

SEQ ID NO: 285023 - DNA, 605 bp, Zea mays
tgggcttcggcacaagataaagaaaagaatccgtgcttgagccgttaatgcaataactgttttttaggcagctcgcacgtccccaagcccaagttcagacgcactagcagtaaagttcgtagactacacaacagaaacttgtgcggggagaaagcttgaacaatccacagacaaaattacatggtcacaccatgacacactcgatcaaaacagccactacgacagatgcaacgattcaaggcggggtgacattagcaatctctagcacaaaggcgtggcagcacacagatctcagagcctctgcttctcgatgtgaaccaatttcactgaatggtccttgggactcgcatcccgaacccacgcttcatcttctccaccgttggtgcgagtttaccaaggcaataaagctcttcaccggatacttcgtcggatactttaccagaaatctcaactctgtatgatctatcaggagaatcgggaagccctcgacccacaagtaagtccatgtccttctggtgaagttctcggccgttgatgaacacaccagtatttccgccagcacagttcttaggcataggatagttaaattctgcaatgtatggggg

SEQ ID NO: 285024 - DNA, 220 bp, Zea mays
aataaaatatacgctccggtgcaacacactggcacattggggttcgctagtaaaacattaaacacaattaagcctgagcaacatgagctgctgagggcaaccgagtgaatcaacagcgttcattccaaatggaaagcaagtctacaagctagacagctaggcatatatctgcagacatcaatgatttggcgcttaccggacgcgtggccgcacgcgtggg

SEQ ID NO: 285025 - DNA, 423 bp, Zea mays
ccttcgtccacgacgagcgctccggcacgtcggagctacttgtggtcaatgccgccgacatgcggctggaggccacggtccagctgccgtcccgcgtgcccttcggcttccacggcaccttcatcacgggccaggagctcgaggcccaggcggcctgaccgagctccacgtttctcggaggagcaacagaggagccagaccatggaatccaggggagaagtcaccagagggagcccagatcagttccccggggtcttcctgtccccccacgcacaccagagttacagttggtagttgctttgctttgcctttttttttgtcattatttcatttgacactagtgtaagtaaattgggatagtggcagcttagagagagagagagagtttagtagaaaggcgcccagctcgtagctattcagctg

SEQ ID NO: 285026 - DNA, 557 bp, Zea mays
  unsure (1)..(557): unsure at all n locations
ttaatttatgtttttttcttttnaaaaggtataaaaaatggttatctctgacttgtagtcacaataaacagggcacccccaaggtacaaagcaaatcctgtagacatttatcgaacgctgcttttcttttgttgatgcgaaataaatatcaacaaaagatacaacaccataacggcaaggcaaggttatttcctcactcgcagcacttcactaccggtattcgaacaacagttacaactatactcgtacaaaagaaaatggcaaacgttgacaaacccatgacatcgatagaaaatacactcaagcacccttttcagtaaaagaaaaattagtaaactggttcataaaacctcaaaatcaataatgaatgcgcacttcatcagcccacatttccatctcccatcctttcacccttagatccctaaaaggcgatgttggaggccatgatccgaggctgtcgcaatcgatggcagtttccagtatccgaggcttctcgcgatcaacgacaaaccgaaaggtttccattttgggcggtttaaactatctcaatggttttt

SEQ ID NO: 285027 - DNA, 355 bp, Zea mays
ctctttcttttttttttttttttttttttgaccgaagattaccgtttgaaattttactgacgaggaataatgagaccgaagattacagtcatggctgcgggcctactaggctactacccatttacatcttagaccttactttactttaggtttaaaaaacgacgtactaagatcagtccagtaataattacttacctaggacgacatgaacttaagcaaaattttaaatcaaacgttactgcaccttctcctgattaattaattaactaaccatcatcttcgggttgactactgaatactgatgagggcgtgcgtggccgtcaccgtcagtcgtcgatggccttggcttttatgc

SEQ ID NO: 285028 - DNA, 524 bp, Zea mays
gcatgctcaagaaggaggagaatccactatcacctcagctgtcagagattgctgtgaggccaagcgaagatcagaacacccacaaaggtggtgaaggacatggagctgcagaaactccacgggaccatcaaagcacttcagaaggtggtgtcagataccggggtggtcctggagcaagagcggctcgacttcaacagcaacctccaggacgcgaggaagcagatcgagatgctgaagctgaaggagatcctggacagcgacgccagcgacgtgaactacgagcggatgatgaaggacatccagctggacctcgtccagactcctagccggcgagctgccgcctcacacgggcgccacaggaagaagaactccgtggctgcggcggcgcagtctgacgacaagatgctcgcgctgtggagcgtggacagggtgagcagcggcagccggtggcacgccgtggacctgctgctaccatagagcgaggcggccgacaacgacaagggcaagatagggtcgtcgtctga

SEQ ID NO: 285029 - DNA, 372 bp, Zea mays
gaaaggaccccttcctttgtgaagatgaagcatgcttggcagggaagttttttgattttctgagcgaagcagagctgaagaggcataatgctatggagcacggcgggcgaatgtctcgatcccagaggaatgctgcacttcagatacctaccagctttatatatcgcagaaatgagcaagcacaacggcgtggcagaggtagggggcgtaatgctctccatgaccgatttgacagtcatatctcatcatctgcacaaaacggccaagcaactgccgatcgccgtcttgatagtgtttcagggtcatttcagtcattaagcattggatctagctctgggggagctgaagatgcccaaggctcgaggactggac

SEQ ID NO: 285030 - DNA, 393 bp, Zea mays
ggatcacaaactggagatgatgatgatgatgatgatgctgtaaatgtctggaacctgcggaagtgtagtgctgctgggttggatgttctctctaatgtgtttggtgacagcatccttccaactttaatgccattgattgagcaaaacttggctcgaacagatgacaattcttggaaggagagggaaactgctgttttgtgtctaggcgctatagcagaggggtgcattggtggtctatacccacaccttcctcagattgttgccttcctaatcccacttcttgatgataaatttcctcttatacggagtattacgtgttggacgctctctcgatatagcaaattcattgttcagagccttgatcatccaaatggacgtgaacaatttgataag

SEQ ID NO: 285031 - DNA, 466 bp, Zea mays
cacgaaaaaaatttatgaaacaagtcattaacataggcactcagaacatccaccaaactcattagccaggaagtttggttgagctagtttgtgttttctagaacaaactaaactacaagcaataccacactggtttgtaaatattttttgggttttcccctacattaactcctcgaagaagcgcaaaaggggagatgattctgcagaaccgtgttggccattcccgcgtgaggattgtcagcacgctacacgtcaatgacagctttcttcagggcacccatgtatgtcaaaaccttctccacatgagatccgtagtaaagagagaatattgcctctgcttgagcgaatgtggctgcggcgcttgccccatctcccagggacagcataatcgaaacaagcttaataagctcgtgagcaatgatgatgtgttttgggtggtacagcttctcgaggatctgaattgatg

SEQ ID NO: 285032 - DNA, 275 bp, Zea mays
gagctgtagaactgaaacaacgggactatacccctaaaagtatctccacccttttgctttcattttttttcccttacatttttccttctctcgtttctcatctctttttacttctgccttctctcttggcgcacgaaagcacaggctgcgttgcagtggtggtgcttaatggcaactggagaaaagggaagaaaaaaaacaggatgtacatcatggcgtatgcttctgccaaagaactcggcgccattacacgatgtcccattcgtgtcgggagc

SEQ ID NO: 285033 - DNA, 393 bp, Zea mays
gcagtttacaggcagatctctctcactatattgaagatactaagcataatgcttacccctattctactggtttagttgatggtctgggcacatctaattcagttttaacatcggatacacaacctggaggtaacaacaatgacacagtgccaaatctcactggagatttcgatacaaatttgcataatcttctgtatgcacgggggttccatcaggacaatcctatgactcaattgtactatccaatgcccctgccaccacccctgcaatatcagaacatgcacccatcaaatggccatggcagaaaaaatccgtatggatatgctggtaggaatggggttgtccctggtcatgtttatccacctagctattttgtgtataggccattgtatc

SEQ ID NO: 285034 - DNA, 630 bp, Zea mays
acatgatgcattaaaatagatgtagaagctgaagagcgcaaagtgttaatggcaagtgtgatatcttaacacccgtcacaaccacgaatatgagaatatctataaactgcatctgcaccaaactgtattgtgaagagagagagagagagagagagagagagagagaggagatccagtacatagcagctgtcccaaaaaaatcaaacttgcatatctagtggcagctggaatgtactaaccgcaatgcaacatttgagacggcgatcctcgaccttcatttgctgcagaaccgattggttttctgaaattttgaaaccagtagcctatccttggcacatacagtcaggtgcaggataagtgtagatggattgcgttgcctttctcaaccggatttgcccgtatcttcctttgtgtcctgcctgtacaacctgctgaaactctggccactccatgctcttattcgcaaaggtgcgcccaagcagtgccatgtttggccttatggtcttcaagttctcatagcttcggtgagccaccaaagcattgtgcatgtttccaggagatgcagatatgaaaatgtcgctatgcatgctgatataatagtcaagagctgctagaacagaagccttcccg

SEQ ID NO: 285035 - DNA, 588 bp, Zea mays
gaaaagctgcaaaatagcagtgaagacactcagcaataacgcaagtttgcaagcacaaggcaataactgagacacacaggcacgtttgagatggtggctagacacaaaactaagggacacaaataaatctcaatttggggaatccaggatatatgctggataaatctgacaactgcagcaacagcacaaattacatgctaaattatggtttttgtatcccacaagagaagaaaaagaagcctaaattcagaggtagcagcatccgagaggccaacatgtagaggaagtcaatacccgaaccaacaacccttgcgtagtggtgactcattttcttgtgttgcgcgactgaaatatttctacccagaaattttagagaaactaggcgaaaaaagaactcgaactatgagcaccacatggcaaggagagtctgaggtgcgttcttgacttcccactgatgaaagctctaaaacttgctgctccttcaatgatgatgcaaggataagaagagtgtctgattcgacgaagctagctactgctgggtaacgctctcgccggagaccgccgccttgatgcgctccacggtgcggt

SEQ ID NO: 285036 - DNA, 342 bp, Zea mays
aagggacacaaatctctattgggcgaatcctggagactgaacaagcctgaacaggtgcagcagcagcagcagcacaaattacatgctaaataacggttttgtacaccacaagagaagaagcctaaattcagaggaagcagcatccgagaggccaacatgaagaggatgtcaatacccgaaccaactacccttgcgtcgtggtgactcgtttccttcggcgactgaagtgtttcttggaataacccccagaaatattgggggaaactaggcgaaaaagtaaaactatgagcaccacatggcaaggagagtctgaggtgcgttcttgacttcccactgacgaaa

SEQ ID NO: 285037 - DNA, 462 bp, Zea mays
cataattcaggcactgttaaataaacatagccagcggttttctttacattttagtgctgcctgtgtactagctgcatcacgtcacgtcacgtcacatcttttcttaatgaaaagctaattggcccacgaaaatggcccgtcaccgtggtatatttaataattgaagaccggacgtgggccaggccgagccaagccagtacagttttgtccaccggtgcagcgttccatttacaaattacaccctgtcgcttccccggccgttatccagcggcccgcgcggcggaggcgccgacaaggcgctcgctgtcggcgacaagcgtcagcggcccagcgtaccggcgcaggacgcgtcgcgatggtcgaaaagcacgtcgtaaccgacgctgctgacgttcctcaggtagcagccgccgtcgctggcgccgtactcgtacgtttggtgcatccgccacgacgcgccca

SEQ ID NO: 285038 - DNA, 677 bp, Zea mays
  unsure (1)..(677): unsure at all n locations
gcaccggcaccccgtgaacgcggcggcgcacgtgctgctcacctggcccatcctcttcaccaacctcttgatcctccacttcctgccgctgccgctgcccgtctcccccgcgctggccctcgcgctcgcatacgctcgtcacgcagctcttctgctggacctggcagttcctcggccacggcctcttctagaagaaggggccgagtgttagtgatcttcctgaggtgttcttgatggagccgttcctcatcttcctgcagatactgaacaaactgttcggctatgaaccgtatcctgggttctgcaagaacgtggacaggaagatcgaagccgatctcagggcgagcgagagctcaagcagaggaaggacaacctgattgattgggaattcgggagtgatcctccggagcggtgcgcgaaattgtaccatctatacatgtagcatattgcctgccatttgtgttgttttattcaggtatatgatatctgcgccccattatatagtgtagtaaacatcagtcatgtgtgttgaagtcagcttgaatcccgggaggaaggtagagagcggtaataatctcctcgtttagagcaactccaatagttatgtaaattttagctctctaaatcacagatttaacaagttgtttaaaaaaaaaaaaaaaaaaaaaaaaaaanaa

SEQ ID NO: 285039 - DNA, 488 bp, Zea mays
cagcggcctttccttccttccttcctgtctggtcgcgttccattgctcaccctcctccattctccactggtgtcgtcgtttcgttccagagagctgtgaaaggcgtaaggcgaaacgaagcacgaggggcaggatgccgtaggtggcgaccgtttgtgccgctccgatcgtcgggaggtcggcgcctgaggaggccgtgctttgagttcgactggaggagagccttggcgccggtcgttacggcaagtggcgccgtcgccttctacgcaactttgccaggcccgcgcagcctcacgtagtcgttgactattcaggccctaatacttccgccagctgctgaagcccgttgccgcacgccttccgagcaacctcaaacccgaaccaaactaaccgaaacgcaatttttggattcagttcctagcaatccaaacacaaacacagccagggatcaagcaacacgactcgagtggtccaatgcagggagaccc

SEQ ID NO: 285040 - DNA, 429 bp, Zea mays
aaaactcaaaaccctttcttttattatctcatttcctgcttccttccttcttttgctcacacattatatatctgaccactcctttcccaaacaatcataaaccacaaaccttccagcctcgcagcttacacacttcacggactatgggcagagatgaacaagcttcgccgttcaccccggacagacttacctaacctacgagatgcacaccgagaaaggctggaaaaaaaaaatccagtcgaaaactctagctacaggcacgcaggagcgtagaagctggggacgtgagcaaacacgatggagtaagggcccacggttatgggctgcgtcccctccacctgcacgggctccagctccgggatctccccgtcggcgtcggttgccagggcgttgccgttcagcagcacctgctggctctgcaggttcccg

SEQ ID NO: 285041 - DNA, 423 bp, Zea mays
atggggcgatgcaagcacagttttcagagtaaaatgccttgcacatttcaacaatgttctcactgtacacatcttacagtactctgctttcgcatctcttcgctcatggtggataatctgcatttagttacccttccacgcctcggatttatcactctacatacacgatgacataaacacactgtcaagtgatgactcagagctgactaatatacatgtacagaactctggcttcacctattgtctactttgatcttttcgacactcgtgacatcagatgagtaacggcactgccaccaacatgggagttcatcatctcaccaagcttttgggatcagaggcagattcttctcgcctgccctggcattcctggccactttccttgacccagtgtcgttgcaaaatgttgtggagattctttta

SEQ ID NO: 285042 - DNA, 860 bp, Zea mays
gcgccaaaaagaactccaagatgaagaggctaaaatgaaaagaaaacagagcaggtgttcttctagcagaacagtaaccccaacaacagaagttgggtgagtatcgagatatttgcagcacatccttttcagtgccatcatatcaatgtactgagcaaggaaatgaatgctgttcatctgaaccttcatgctctagccaggctaacaggcggcctttccattctagacacaaccgtgatgataatgttgacatgaatctggagaacatgatggttatggaagcaatttggcgttccattcaggaacaaggacatctagtaaatcctgtctgtggcagctactttcctgtaattgagccaccatcacgtgaaacgcaggcatttcttccggctgctcctctagaaatgcctcatccaggtggatactcttgtgttgcggctttggctgagcaccagccaccaagcatggatttctcttacatggctggcagtagcacatacccagtctttgacatgatccgccgaccgtgcaacatgtctagtggaagcttgtgcagcgtcgagaacagttcactagacacctggagcgggatggcaccaaattgcagcagaggagtggtaagagaggagggagagtgctcaaccgaccactggtcggagggtgcggaggcgggaacaagctatgccggatcggacatcatggtagatgcaggggccatgcaaccgctgcctttcgctgagaatttcaccatggctccaagccacttccgcccggagagcatcgaggagcagatgatgttttccatggccgtgtcactagcagaaggtcatcatggtaggacgcaagcgcaaggtttggca

SEQ ID NO: 285043 - DNA, 813 bp, Zea mays
tgactcaaacggttgccgatttacaacaatttccaaatccaaccgacaaaatatcaatttatatatattgctgtcttgatttacaataattggtacatcaaacaagcgcccttgatgttccaaccaaaaatgaggaaaaaacattacatctgatttctgaagcaaaccctgtgtcattgatttctgaccttccgaaaacgacaggccatcatcaagtcaagtatagacaatatccaataatagtcttgactcatcctatcggatatgtttgaagctgttgaacatcccagtgtgggaagctttggctgcaggcttgggcgtttcaggggttccaaaaacgttccagaaccggagggtctcgtcagcagcagccgacgctactgtgcatccatcaggactctgagccatgaagaggacgcgagaggtatggccattaagttcagccatcttcaccatcgatgggtacttccacaaggtgagttggttctgtgtgaatccatgtgagctcagcagctccctctcgttcttgttccacagcagagcgcacacctgtgatccggtatcaaccgagttcaggcacacaccggtgtgcgtgttccagaacttgatgcagcggtcgctgccaccgccgccggtggccagcaagttgctctggaacgggcaccacgcgagtgccttcacggcggccatgtggtcctcgagcctatgcagccactggttgcggccagcagatggcatggatgatgccatcgacacatcccaaatgtgcagaaggttgtcgttgcctccgctggccagctgctgccctgatcc

SEQ ID NO: 285044 - DNA, 656 bp, Zea mays
ggaaccaccagcgtgacaggttaccagtccaccaaaccagagatttatcttgcatatgatacagctgcatgcacatcggggagatgcttgcttgctattttcaagatacacctatattacaacaacaaaagttaccacagaaaatagaactgcagtattgacatcccttgtttcagagatgtttcctgtagattgggccagctccaattacaagaagatgggagggtcatgctaatagagttgacccaataaccataacgggaactgttagaacttgaaggccaaatatgccataaatcgaacatgtgttcatatcttctcatgtcccatcagctgagttccaatagaagtcacttctttcagtcgagtaaccgtacggcagatgaggcccataaacgacactaccgttcaaatatgtcatctggtccacttgtgaccctggctgataagcatttggaacatcagtttgaactgtggtgtttggaactgaatagatgttagtattgacatctatcgggttagcctctgtccggctccgggccgtccgtttggtgtcgacaggactgtctgcactgagtctatccatttgctgctgaatttcattcagtggatcccaacctaatttggattttgcaattttctttacatcatcgcga

SEQ ID NO: 285045 - DNA, 466 bp, Zea mays
tagagcggccgcccttttttttttttttttcacagagcaaactgaaatttttatttcattgcatggtaccttcaccattgcattagtaatgcaacacattacaaccaagttacttggagccgcacggtgacaagaacgataaaatgctacatttattcttctcttgcgcctcgagaattgtgcgatgtagcatcgcgttgtctttgctgagagcattgatctcagtcatcttttcctccaacgccgccttcagtttccctttctcaccgtccttgccagcaatgtgattctcgagttcctcgatttttaacttgagcttgttaccttcgaccttctcggacactagtgctttctggacagagttcttctcgtcgttcaggcgcgactgcttggcatcaagttcgtcgcaggacgttgcagctgtgacacagagagccggatcctcgccagctcatccttcagcctg

SEQ ID NO: 285046 - DNA, 540 bp, Zea mays
cggaccgtggctagttctagatcgcgagcggcgcccttttttttttttttttttttttttttacacaaagctgaaacgctgatggattattgccttattggcacgtactcatgattttatcagcccaaagcctgatgaaacaaatttctttacaatgggtgcaatggctcgccacggaagatggaaaaccaggcacagcataacagaaagctacacaagaaaggccaagcggccaaagcctacggaagggcgagaagaggctggtgcaacatggcgattccctgattggtaacggtctgacggagaaaagcgattccacagacgtcaattgcttgtcttgcatcgttgcgtgggtatctacagattgcacatcttctatgtaattgtaatgcaaactctgcaaagtatatatgactagagaagttgtgcggcgcctccgagggggttggtctgtggatgcattccatttactgccgggaacgcaccgaacccggcgtcgaggaaggggtttgctgcaggagcgacgcccgcgtgatgctg

SEQ ID NO: 285047 - DNA, 475 bp, Zea mays
cagcaaatacttataaccataacttcaaaggttcctattgcacatgtgggcggccttatcctgacccagaagctaaggagcaagttgaaatgatacaatgctctatatgtgaggactggtttcatggggatcatattggtcttaactctattgaagagataccaagagatgaggaaggggagccactctatgaggaattgatatgccacaaatgctcatctgtctgccatttcttgaaattgtatccagatacaatttgggcttctggtaagccgaatctggcagtggaaactgatgcaagtgaccctaatgtgatgaaaaaaccttcagggcatgctgaccctgagaaacatgaaaatggtgctcttgttgataatacggttggcgagaagacctctgttgagaatgattctacaaaagctattgcagttcctgaggaggccaatttgggtagcagttctggcaacaactgcaa

SEQ ID NO: 285048 - DNA, 338 bp, Zea mays
gacagggggggtttgatcctatatatatcgtgactttgaaattgaagggtacatacactcatagcacaggtgcttgcatgggaaaatcaggagacacggttccataaaaagagggtttccagacccaataattctaatcagagaacgtaatgacacggatacttcctaaaaatcgtgaaattgtaatcgcgggcagagtcatgactggtgaatattgcgtatggctgcattgatacttttacaatcgaagtccatgatcttcatccagttctcgatgtctccgatttccggggagaaggcagcggggagggtcgtcgacggggctgtgcaccgccgcc

SEQ ID NO: 285049 - DNA, 375 bp, Zea mays
gcaaagataacatagacgcggacctgtatatcacaatatgcgcacttgttcagttgttcgggtaccaccccactttccacatttctatctcctatttttctagcccttgcaatgccatccatcctaacatcctctgttaacatgaaaaatgcacaggcctcttagggtcacaagaaaaaaataaataaggggaccgtgtttttcactatccgtggtcaccatcttttctgccagtaatgtggacaactgaatgcacggccttcatcacatcaccaatcgaattcctgtgcatatttttctccgcgacaggatgtatcttgatttcagcagtactggttccttggtataaacaaaatcttcgtctaggtaggcttg

SEQ ID NO: 285050 - DNA, 422 bp, Zea mays
cgcctaacctagaccaacatcattttgatatccaaatggtgggtcccaatcatatcagcacaagctgaggacgaggtcacagcccaacacagctgccggggctgcggccagcagttataaacacgtaaatacctacggtataatggtgtccctaaacgcccaatatgtctcgcttatgtctttaccagaagagctagacaggtatatacatagactacctacagaaagcagttagatgatcggcagctcaggcatcaaacttgctgtgttgaggatagcttgaatggcagatttatttccaacagcaagcccgactccgccttacagcctcaaacgtggtgtccgctgccgatgtggaagctccggaccttgccttctcgctgaggaacttgccacagttcgcgcctttcgcggtgaactcc

SEQ ID NO: 285051 - DNA, 384 bp, Zea mays
acatgaagaatgaccctgcattaataacggacagtggtccgaactcatggtacacattgcctgcaaattagtcgctcgatagagctcatgccactcagtagttgccatcaatctatcaatcctagacatcgtagaagcacaatactcttgtactgtattctatatttagcctccaattatcttgggaggaaccaaatcactcgcacgacagccagtccattgatgccagccgcctcagatcttcttcggtgaccatgaacagcttgtcgttgtcccggatcacgtcgatcggagtcgatctccgctccttcgtcgctcacgatcaacgccttctccgcgtcaactttcagtttctcaccgacgatggctctgaattcttccatg

SEQ ID NO: 285052 - DNA, 418 bp, Zea mays
acatcactcgagaaatgatcgtgtgaaacagattctgatttaagccccgttcggttaggctggaacaagactaggaactattccaggttactaattgttatacaaattatacaattattccagctgaaatcctttctggagtagattcctgaataaccgaacgggcccttagccagaacaattacaagcgttttggagtcttgtccaacaacagaaatgtaaagacacagtcacacaacagcagaataaaaacgaagtgctacatcacagctcctagcagccccgatgacaattgtggaacaattacactggcatctcaaatgcttgaaggttgcaatgcttaaaatgttggataacatgtagcttttcaaaacttgatttccggaaaattccacgaattcaatacaagctaccctat

SEQ ID NO: 285053 - DNA, 478 bp, Zea mays
gggtccaatcgctctgaacacaactagagatgtcctgctaatactaagacgtcaaatgcgtcagtctcaagtccagggccaatatatcatgtacaacaacacatataccagatccaccaatgtctagattaacatagtacagacagaagaaagatgataacgaatccaaaaatgaactatccatcagaaagggagaaaaaggacacgattacagtagatgatacagacaaccaattcccgaagatcattttgcatccctgagcaattccaccttggcacattattacccaccctagctatgttacaggccacgttcaaatgggctaactaaaggtccatcagagtcaaccgccaccatttatactgtacaaaattgtcatctgagcaagcctcaggcgaaactgtcactgctaccaaatgtgtattccttcacatctacacgttaaccaagccaaaggccatgctgaatatgacagac

SEQ ID NO: 285054 - DNA, 306 bp, Zea mays
tacatatgtgtcttgatttctttgttgacagtcgatacagtagagataccaacatagcgaaactaccatcgccttttgaactgcaagaggaacaaaaagagaacatagctgaatgacgataagccaaataactcagtcatattccattaaccgggtagttacgttggaagctaatcataagacgaagagattactaagacggaattggcaattgagaaggtagaagtcagctaaaatcctttttatttgggaaagttgcgagttagggataggatgtgagaattttggatggacatgtaagtggaa

SEQ ID NO: 285055 - DNA, 467 bp, Zea mays
gattgtgaattttgggatcaactggtgtgcgcacaagcacaaaaaaaagtatccaaattcaaaatacagacttgcttaatttcgaaatactctcttgcactgctgcgcatttctaagcatcagctctagacctcactgaaaacctaatttgagcaaccaaaacattcagcttttctttaggatgtacagcatgtaaactcttctgacccaaatctgctccatttgcttacagaagagggtagagatcggcgaacacagaaaccactatctctgcgcttcgctagaaaccaccgaacgagcactatccctaccagacagtccacatcgagcacaggaactttttgtttctcgagcgaccatgatggtagtcagtcaagccagccacgacaaaactgatgcattaggaatcgcaaatctgtaagcaaaaagttgcaaatcctcgatccatccactgatgctcctaagca

SEQ ID NO: 285056 - DNA, 398 bp, Zea mays
acgaagcaaacccctttcaaaaagaaatgagaggcgtagtagcatccacaccaacagaaacttcaatgtcgccaaatacaacagaccaatccacacactcctgatgccactgttgcattacaagtcaaagggggcacacacaaaccactatcagtcacataacacaaccaatgagaagcgacaaatgtacacgtatcaagcggcaaaagctgcccgtcttccaaaccatactcagtttcccaacgacgaatcaacggattagacggcgaaatatgctgctgtgctcggcctactcatcatcagtcagatatgccacctcttgtctgcgccaccagacgcgctgagaggagaagggccactgcttttcacgccttgcggagcttgcgatgacaacaacc

SEQ ID NO: 285057 - DNA, 383 bp, Zea mays
tttttacaaaaaaaaaccttttgattgccacaaaactgttatcatcaaggtagtaagaggaagagaagggggaaaaaaagagggtgaaggagaggacatagcacagaggggcaaaacgcacagcacagctgaatactccttagtatctagggatctccttgacagggagcatcggcattgccgcgctcggcgaagagcctgcgggtgatggtgatccgatatgggcaccgctgcgagaagagaagccgatctcgtcggcggcgccgtcctgctgaagctggtcttccctgatcatagtgcggaacgatatggatcccggcttcgtcgaggtgttggagttgcgctcgagttctcggaaacttcggttggccacgagcgacgcg

SEQ ID NO: 285058 - DNA, 289 bp, Zea mays
cttcagttttgatccgtttgtttaccttgcttttgttttggaataacagaaactccctttggttgcaccaccatcatgacaacaacagcagcgatttgatccaaggcaatcacattgccagctattcccctacccaagatttacagtttacaacattctcatcgttcgccaaacctttttttttctcctggaccaattcttaccaccttcgtcatataagggagatcgagaaaggagtggacaaaaataataatttgcgagagagagaaagagagagggagaaaataat

SEQ ID NO: 285059 - DNA, 266 bp, Zea mays
tgcagccacgccgcaactacaattggcagagcttacaccattctactacggtttagtttaatcacctgtatcatcacaacagtgagatccatccatgccacaaacgagcataggagctgctaataaacgactaattaactactactactactattatttatgcctactactcactcactcacacttactatcatatacttatcataggcctaagagctaaaaaaacaacctagacttgtttctccttctgttgctgcccaccgtcc

SEQ ID NO: 285060 - DNA, 384 bp, Zea mays
tttcttttttttttttttttttagctagaggcgacacgtttgagttcctgtataacaacgctggaactggtttttgtctgggacaacaattttggcctacatctgtcaacgtctctatgatcaaacactagggtacatgtgaattgatgctctcgatttgaaaatctcggaaaattgcacagtattcctccaaatggatttgctggcgaccaactaggttttgcggaaaattggacagtattcctccaaactgagttgcagaaactagtcagcatagaatgtcaaggatctacgagccgattttccatatccccagtccataacctactttgatcagcaggagctcgaataccatgtgcatgatgctcgtcatgcgcactttgg

SEQ ID NO: 285061 - DNA, 357 bp, Zea mays
aaaccagaaaccagcagggatcatattgaaacaaaataaaaatacaccttgggattgaaagtaacccctcttgctctctcttcttccgatgggcgaaaaaaagtgttcagcactggttcatatcatcctctatctacacacctaaacacgatgtttgggagcctctctatctctcgcgcttactcctcatcttattgttctcgctgcaatttttcgctctttctgacggaagaagggcagggggcggcggacgcctctctaatggtactgttcgcaggtacctactgtgcagcagtgatcgccgacgaggaccggccgggccatgcaggcggtagcgctcctcctttgcggggcgac

SEQ ID NO: 285062 - DNA, 577 bp, Zea mays
  unsure (1)..(577): unsure at all n locations
cggccgccctttttttttttttttttttgntttttcagtctaaaaagacaaccatgtaattataatcatgtttatcatgacatgatattctggatgcactcagttcaccgattactgcacatacaggattatgtagctttagacttgatataccgaaaaggaatatatacgggcattacagcagagtttattgcgcccagttctatacacagctgatatctccacaacggacatgcgtagcaagggtatgcactgaacacaataaccatccattttttatacggcaagcagccctttgcctcaccaaagctgagagctcaaggcacgaattgcagatatcttgattttaactcagggtttcagtcagtggtcatagtgccacgcagaatatgctatctggtttggatcgtatactgcaggttcatcaacattttcttcatattggtaagaactcgacgggccaaatggccagagaaaggagaaggggacgtgactttcctggctatcgctgccgtagtttcctggagcaggatcgaaatctgctctggtgaccgcaggaggatacacccaccgtccg

SEQ ID NO: 285063 - DNA, 448 bp, Zea mays
tcgccctttttttttttttttttttttttttaactccggttaccaaagaaagggctcccatacttctcatagttatatgtatccatctgttaagtcacaccatgtaaacaagctccgaccacctacatgtgtcctgaagattttacatactatactggtagcaaggcctcggacagcacatgctcggctcctgctagtctagagaaagggagggagggagagagcaaaccatcgagctaggataaacaaaaactcccaagctagcaaatgattctaaaccaaagagacaaaaaaacttacaagctacaggacttacaacctacagcaaaacaagatattctgcatacaatcagaaagtcgctgagccggttctcctcagttggtacttgggttccggaagaggctcaaagaaaagtatattttccaactcctttaacgtggttagctt

SEQ ID NO: 285064 - DNA, 555 bp, Zea mays
cttcattctacaggtcatttattatcataatttatcaagttgcaaaatttgattgcctctaaaagaaacttatataatttaaaaccagctacaacgaatttgtaagacatacaaaacaaaaatattatcactctacagaagatatcattggtagtataaaattgctctatgcactgatctacagattcatatcctattggactgctagtcgctgaagatggtccatgaaaacctggaagctcacatcatctgtgaatatgacgtctccaccaggggaggggttgtccgagttatatgtcaccgatggatttagttcgccagtaaaaatcgagcctgagatccatattgatcacagactaccaaacggggtacaggaaatcgctcctttattattaaattagcttcctcatgtggagcttttaacaactgagcaaacacctcgtgaccttcttgatcttggtagccagcatttcgccactgcgcaatggttaccccatggaatatgacaacagtaaaataagagtccaataaaaggatcttgtcagaagcaattgc

SEQ ID NO: 285065 - DNA, 404 bp, Zea mays
aacaaataaacacttttaggggggattttagaactgtttattacaaatgaagaattgtttcggatgaatgctctatcgtgcttaggtcaattcccttgaattacatgacagctatacgactactttttacaccactgtcgggcaaggcagggagtctgaatacatatgtctgaacacatatgtatggcctggaacatacaagtgcatgaggtgctgctgtcgcacgagtacacgggattctatttgttaggcacgatctactgctttatttctgcctatgcaagtataactggtatttatcagtcgactccagaacagtttcagcaacacgagttggtgcctcagaagaacttttcatagtcttgaggttgctggtcccaaacctccataaaacctatgtcact

SEQ ID NO: 285066 - DNA, 417 bp, Zea mays
ccccgacgcacacgcactgttgtttcctgttgcggcaacatagctttcaaattttacaaaagtatcacaaacgacaatgcagcagcatagacacaggagcaatgtaaacaagctggctaattcatcaccgcagcaatgtagtgagtgggactcagccaaaagttgagccagccaccggtgcacatacaacacacgcaatcaccatcatcatctcgtctacctaacccaccctctggtcttgttcccgccgcccggttgctgcttggcgccgccggctctggagctcggagccgccgccgccgccgccttggcagccgccctggacgacgccgtcgacctcaccagattcttcacctggggaggaggctccgtcgacttcctcttcagcctcgcctcgcgctcggctggcaggctcct

SEQ ID NO: 285067 - DNA, 433 bp, Zea mays
gcaaaaccagcactggttaaatatggaaatagaaatttctgtatagaatacatacggacatgtccatgattgattaaacagcgtccacctatttatgttgggaagccctagttttctttactggcagttcatttttaaactaaaccatgacaaataaaaaaagcggagggagtatattgcagactccctccacacatccaactattttgagaaacaagtgtcttttcttcttccttttctttcttttcttttttccttcgtggcctcatggggcttccaatgaggccgagggttggtggtttggctctgggtgcctttaagctgttctctaacaactatctacactgcacaaatactgaatcccgaacatgatcaacttagatcaaaaccagcttctgagtttatcgcatacaatagtttggtttgcatctgc

SEQ ID NO: 285068 - DNA, 378 bp, Zea mays
gggcggccgtcctttttttttttttttttacacaaaacaaaagaatccgatcccaagtagatcaccaggcacttgtagacagacatttcatctttatattactagactgactgggctctgctgcaacataccaatcaatattctaaatttctaccactaagctacaagcctttttctatcctttggttgccatctccccttgctgcgatagaatcttatccatggccgagaaatacggccaagtcttcatgctttccgtatccttgctttcctcatatttctgaactagcgatgtccatagagatttgcactgtgccggagtacgacttactccttggttcaacatggtatcagaaatctccttccacagtaccattc

SEQ ID NO: 285069 - DNA, 553 bp, Zea mays
aaaattaaccacaaaattgatcgatcacgattctacatctgatctatagtgtactaatcatccacattaaatcgaataatcaattgcactagaaacaacttgtactaaaacaggagctgacactgtccatgacaacaacgaagaaacacaatatacatactatgcaatccaagcagaacgccagacacaatgtacatggaatgaggctgaaatcagcttaggccctccaaaacagagttatattcgatcattaagcctttggaaacaagttgtacaacagactacggccgacaagatacaccaccttgttgtatgaaacacaatctctccagggcttcgatgcatgtctgtccccctgagtgctgcagacccttcgtctagtgatgaacgatcaggtatttccacacttctttcagccaaatggattactaccaccaccaacggagccgtaggaaggtgaggtgtttgcctgggggtatccgagaggagcttcctgatcaaagcccatgttgaaggagcacaaaccttgatgcgttgcaagcatgctattagg

SEQ ID NO: 285070 - DNA, 451 bp, Zea mays
acaattccacatttggtatgtataaatcgaggcattttggggagaattcttcaattacagaatgcattttcataaaactgggaaggcaacaatgacatttggattctcttgtacaatcgatcttcacaccgaagcttaaaaacgccctaacagtagtatgttacaaaacaggttttttcgtgcacaagtatttgagaatacaatgaacaaatcggcgacggtatacagtgagtgaaaccagcagtatagacacgcaaagaatgggagacgaaggaaaaatacaaaattatacatgcgcgttaagatccaccacggtccaaatcgacctcactgcgctttcatggctctctctttgcatagctggtgccactcctgaagcacggcagcctggagagcgcggtgctcagcctcctccgcggtgagcttggaaagcgtcaaggggcccttgggg

SEQ ID NO: 285071 - DNA, 425 bp, Zea mays
gggttgggtcaaccagaaagggttaaggctacatctgggagaaaacctgcaaatacatccaaaacaagtgaccatgcccgcatgcctgcatgctggtcactaccacctccaggttccatggaacaaacctacctccttaccggccacatactagctagctggggctaccattacactacactactaccctcctcgttcctcaaagctacctgctaatcctgctgctatgacatggccggggtgcccgagccgatgccagtcttacagcgtcttaactaactgccttcttcctcggtgccgactttgaggtactcgccgtccccgctctgcgcgccggagctggttccaccccggacgtcaaccgacagagaggtcgacccttccttggcgccactgccgctgcggccaaagcccgagaacatgcc

SEQ ID NO: 285072 - DNA, 543 bp, Zea mays
actggaacaggtagggcgggggccttctcatagggtgatgttttcattagtcaagcaaactgagcacaaaaccttggtgggtcaattttgcaacccccgctgggcctagccatcacctcatacacgacgaaggggccaaaatttcacgaatcgtcgacgccagtcatcggctcattatcctccttggcttcatccccagcgtcttcgtcttcaccatccgcggcgtcctccatctggtaatccaccttgaaatcgtagtccgcgtccatgtcgttcagcacactgaacctgttcgccttgcgccgtttcttctctgctttcctcttgcgagggtcgagtatgccctcggcggtgtacaacttgtcgttctgtgtgctggcggtggctggcttgcttccttgtgggtcgttcgcgtcagacatttgctcctcccggttttcctgagcgggttcacttggtttgctgccatcctctagcatctctttgtcaattgccggtggagcattaggaggaatctcaatatgatggaaccggacgcgtggg

SEQ ID NO: 285073 - DNA, 281 bp, Zea mays
gcaactaacttcaagctgttgtttgatcattgcacgggcagatatgtacagataaattacagggacaatttctgtccagaatgagacctaataaggctaagaagaagaagaaaaaaacaagttcaccactgagctcggagctcgggcattggttcagttcctgtgtgccgggtgcgcaaggcactaactaactactacgccaagaacgtcggcccctcggcgctgcagggcgcgggcgccttccagagcgcgcggaagacggggcgcgcgccgcagcggcg

SEQ ID NO: 285074 - DNA, 449 bp, Zea mays
cgccgcctgcccttagcctctgcactgcactgcatcggccaacaacagcggcacgcaccccacagcactcgcgtcgcgccatctcagccagcgtgcaaaccatggcgcggatactcctcgaagcggcggccggctcgggcccgccgacggactccatcaactcggacatgatcctgatcctcgccggcctgctctgcgcgctcgtctgcgtcctcgggctgggtctcgtggcccggtgcgcgtgctcgtggcgctgggccgccgcgtcccggtcgcagccggcggcggacgccaccaaggccgccaacaggggcgtgaagaaggaggtgctgcgctcgctcccgacggtcacgtacgtccccgacagcggcaaggccaaggcggcggcgggggccgacgagtgcgccatctgcctcgccgagttcgaggaggggcaggccatgcgcgtg

SEQ ID NO: 285075 - DNA, 475 bp, Zea mays
gggaaattctcatccatcaaataaccatctcaatcataaaatttaagcgaggcaggcgcaatactggtgatgcaaagacaacagactatctttcactcccctcggggaactaatggtgctgatgtgttagatattccggttttattgtcacaagatatgcaaacgacaaaaaaaagggggaaatagaacgaaaaacgaccggccctttccctatcagaatttgaatgaacagatccagctacatttttggccatatcctacaaaccctacaggtggaacatgctccaacatatatctcttgcgcctctcaaaatgtcacgacagcaactcatgcacacgcagctggtatccgcgtgcctggatcaggccacaggcatttgcatggcctctggcgtttgcgcacacaacaagaccgtcttccacagatgttgataaggggggtggtcgggtggatcagtagctgtttggccacatc

SEQ ID NO: 285076 - DNA, 408 bp, Zea mays
tttcctttcatccatctccgtatccctgtctctctctcttctccccctcccccccaatctccgaggcgagctcgagctcccaaaccctaggcctcactggggagtcacctccgccactccagcgatgtctctcgccgcagcggcttgacggtgcctgcccccaaatctacctctccgttagagagcgcggcgtggttgctgcgtgaggcgcaccggggtctgcaaatggagccgaggcgcatatcggcgagcccgcgcccatgcagcgggcggcgggtagtggccaggaagaggccgaggcaggaggcggtggtgagcagtgtgcggaagctgcagcgccgggagatcagctcccgccgtgaccgcaccttcaccatgagcgccgcgcaggagcgcttccgcaacata

SEQ ID NO: 285077 - DNA, 670 bp, Zea mays
gttccttgtttttttattatgttttgtttaatttgtcttaattatgcagtatactgaaataacttacacaggagaaatttgaggtaaagtattttagaaccggacaaccttcagtttcagtattcagagttagacaatcacacttttccaaaggtatccaatatacaaatgcattagcctatgtgcgagtaaatgatccagtatatatagtcagacacatgaaaaaagccactttaaaaatcataagatttagccttattataagatagtatggcttatctgcatcttccagtataaaaatcatgtcactttaaatcattgcattgcagttcattataggatacatttcatctagagccttattatggagacatgccactgctgaatgtttagcttcaagttgttctctagagccttatatggagactgactgtttggcctgcaaaacatttctctgcagttttaacaatatatttagcattcatggttagtgtacaaagttactactatacacttgtgaagtggaacttgatgatatcttcattttttgactttttgtgctttaggctcctcttcttggatcgactgcagcagttagatctgcacatgtatatctttgtttaattatcgtctccgtattgtaagattaatttgagcttccattctactt

SEQ ID NO: 285078 - DNA, 478 bp, Zea mays
ttcttctaactcagtaatcgtcattactcacttatcatccaccaatccaatgcaaccagcattgacatgcactgtcacttaacaaacacggcagatacaacgttcatttgtcaagatacaagggcctcattttgtctctctccagggccacgaaaaaggcaataatgtttacagctgcatacccatagaaacaaaacagacaggcacaaggcatataaacctccattccgttctcacgaccagctcctgctggcattcatggccgcccggacaaaaccttcgcatgtcgcataaccactcgagaatacatccgtcaatgcccccatcacatcaaaggcctcctgcagatcacctgacgaggtcatgtcttcaagccatgagagcaggtccttggacagccccaccatctccttcatgttgcccagcttctctttcatctggatctcccattgctggaggctggcagaggattcatctt

SEQ ID NO: 285079 - DNA, 434 bp, Zea mays
atcgaaaaaatagtgtctgctttctgctgtatgaatacaaacaggcattgtatgttccaaaacaaaaataaaacaggcattgtcagtgttgcaattgtgcaatgtaaatgagcccagcccacatacacaacagaaagcacgacacatattcaacagcttcaaatctgctgcaagtagcagaccctactcatcttattcaatctctgctatgtcaaaaaccccccaataaaaagctttttgctacaaggaacaacagcagctcccatggttgagggcaaaaagttcctcctcctcattagtacctgcttcgccacgcgttccagttaagcttcagctgttaccacagaggagagacctcgtggactcccctcgacagccgaggatcaaacacgttgaactcacaccttcgcagggtatctaggaggacctaggcc

SEQ ID NO: 285080 - DNA, 476 bp, Zea mays
tcaaaaaatattgactgctttctgctggattaatacaaacaggcattggatgttccaaaagaaaaataaaacaggcactggcaggggtgcaattgggcaatgtaaatgagcccagcccacaaacacaacgaaaagcacgacacatattcaacagcttcaaatctggcggagggagttattcaatctctgctatgccaaaaaacaccaataaaaagctttttgctacaaggaacagcaacagctcccatggcacatttgaataaccctaaaccctaacagcttcaaatctgccgcaaggaggtattcaatctctgctatgtcaaaaacccccaataaaaagctttttgctacaaggaacagcaacagctcccatggctgagggcaaaaggttcctcctcctcattagcacctgcttcgccgcgcgttccagttaagcttcagctggtaccacagaggagagaccccgtggactcccc

SEQ ID NO: 285081 - DNA, 509 bp, Zea mays
ttttcttttttttttttttttttttttttttttgtttttttttatttattttggggggcattccaaaccattttttattcaaatatttaaaccataatttattattcatattacatgaaacagataaagttcaaggaacagctttatccacttcgacctacaaccaaaaaagcctccaaaactagtactacaaggtattaggtctagattttagcaccataccatgttcaccaaacaaagttgaaagactcaggaataaaattcctggaaccaaaaaacaaaaaaaaaacagtttggagggttaattaatcatataactttatatcttaccattgagatttttctggagaacatccatcacagaaccaaagtcagccttcacactgatcggtggattagcatactggcaaaccatgtctttgatgttttggtcatggtagtcaatctttgactgcgtgaacttcagcccatgagctgtgctaacaaccacagtgcggtcattaggccat

SEQ ID NO: 285082 - DNA, 525 bp, Zea mays
ggcagcatactgattagaacaacagcttttattgtttagcaagaaataaaaattgaaaaggtttgggtcaatgtgcaaggaagaaaatttgaaacggacaatgtccatgactgcaacattgtttgagtcgaatacaacatggtgagacaagatttgtagacaaaggtatcttgtatagacaagaataacctgttgactgctatacagcatcttattgtaaaactaacaaagaactcctattgatattttgggcggcaaatacccgtcctgtgagaccttttcagctcatatgaccaatccatcagcaattatcgcgttcttcagtacgacagtgatgccagatcgaatgtagaagccttcggaagttctatcagcttcatctacaccctgtgaaatgttacacccagccagatttggtttagagttgatgatacattctatgaagaggtatgcattagaaaaaaaataaaagagcaatgcgggcagagagaaagaagatcctacaacttgcgataaacacataca

SEQ ID NO: 285083 - DNA, 415 bp, Zea mays
aaaaaacacaggagaggcttttattatttactcccatcaagcttgccgaggccagcagaaattcgaaacagagctgtcactaacgagccgatcctgcttgatagcagtatagtaacctcacggaaagcattacaacgcactgcactcagctctacctaaaaccatccaccaaccctcgtacaaaagacgccggcaggtcgcagagcgatagtcagaaacaaagcaactcatgcgacatgggagagttgccaacagatgacgaaaccaatgactgattgttaacgatcgcatgatcatcttgaacctttttttaattcgatatgaagagaactcggataggcagacctactcatcattttcctgaacattttccagaacggtaacttgtacattatgtctactgctgccatttttt

SEQ ID NO: 285084 - DNA, 445 bp, Zea mays
ggcaacgaactctgacatcacgggaatttttctatgtaatccgattcaactactactaatccactacatcaagaaacttatttaagtaaaataaataaaaaaacattaccttcaccttctactctctctaaacaaagctaatggtatttacggtcttcttcggccgacaatacagctcaggaacccatcttgccggctggtttgcatccagcggccgagatcagcgcgggtcgtcttctcctggagctcgcgaaccacctccaccatggagggcccgcgtcccggggccgtcgccgatgcaccgcagcgcaagcgccgccacggtggccgcctcgtgcgtgtcgtactcgtctccgagcctccggtccactgcctccgctactcttccttcgccgagcgtaggacccaccgcggcggcgagccggcgccccgtgtcggcgcatat

SEQ ID NO: 285085 - DNA, 518 bp, Zea mays
cccacgcgtccgcccacgcgtccgagctgccccctcgtgacgttgaagtagtccacctggacgtccatcccgatgcggttcacgaacaccttccccgtggcgttcaggatcccgccgccgcccgacgcgtagttgacgccgttcaggatggctccgcccgtcgcgttgggcgccaggaacggcggcgagtagtccgcctgccccagcatctcgccgatgatgtccgcgatggtccgcccgttcgtgaaccgccccgtgggcgccccgcccgacgccgcgaagtcgatgccgttcggggtcatgttggcccgggacagcgtcgggatgtagttgttgttgccggcgtccaccagcgagtccccgaagatgaaggacgccccgccgccgaactcgtccaccacctccgctcccgccgccaaggtcacgcagagcaccgccacgcggccagcgccgccgccagccgacccatgctagctagctagctagtttctggcggtggacactagctgcttgcaggc

SEQ ID NO: 285086 - DNA, 634 bp, Zea mays
gtctttacttgtagttacagagacgaagcttcaacagtccgcagacagcttgacgcagaaggagacagagtgccagcaactgtctgaaaagctgaagttggccgaggaagaagcagcatcttatcaatcaagagcaactgcagcaacagaagaggtggaggccatgaaagtggagctcgaagcctttgaatcagagatttctactcatgaggccaccattgaagaactcaaggtcaaagtctctgattctgagtcaaacgcgcagcaggcattagctgagcttgcaatgctcactggaacaaatgagactctgaaagaggaacttgacgctaagctagcaatgcttcatgaagttcaggaacagcttaattctactcatgtggagaaggaagaagttgctgccaaactagctgagcatgaaaggacagtagagcatttgactgaggtgcacagtagaggtatagaactccaatctgcagctgaatcaaggaatgcagaaattgaagctcaattgcgggaagcacttgaggcagcaggacagaaagaggctgagttgagaaacttgaatgaaaagctggttgcactcgagtccgagattgaaagtttgacagatgtaaatcaagccttgaaacag

SEQ ID NO: 285087 - DNA, 566 bp, Zea mays
gaaatttcagttctcaatctacaaaaggtcttatcagagatgataatcgaagtgaagcatttgttttcatgatatcaactagagcaggtggtgtggggcttaatctcattggtgccgatactgttatattttatgaacaagattggaatcctcaagctgacaaacaggctctacagcgcgctcaccgcattggacagctgaatcatgtcttgtcaataaatttggtgtcacagcgcacaattgaagaggtcataatgcgaagagccgacagaaaacttaagcttagccataatattattggagaagaagacgggactgatgggaagggaggttgatccaggaattgaagctagtgacatgagatcaattatctttggcttgcacctgtttgatccagcagatacagctacagaaacaatcgatgaggatataactgctgagacattcagtgtcgagaaactggcaaagttaaaaacaatgtctgaaaaggttgtcatgatgcgtagccatgagtcttctgaaaaggatgaacgagcatttgagatcaatccaaatatgactgatga

SEQ ID NO: 285088 - DNA, 778 bp, Zea mays
gattttcggagcagctcagagacctgttacgcccctacacctgaatttcatggtcaattcgagtttcagttcagttcagatgcatttgatgtagcccaaaatgcaccctgtggacatcacaccatctctattcaagttccacttatcaaagacatgatttcaagcaagattcagcaactccctgcatatcaccatcccaaatttgaagcaaagctgcgtgcttacgactcagaggttggcaagtcatttgccactatcaaccaacgtcttagcaagattgtcaaaaagcagtacgacctagcagacacatttggagagttgattgacgaggttcttcgtgctgagataaatagtccagacaacaaagatgacatgatagaaccttccaatccctcagcatcagatccactaatgacagccacgcagctggagtcgcagatgatagtcactcaggtggaggccatatataaaagacaacaggaaatgtgccgagccttcgagagttctcgtgatgaatcagtcacacctcaaaacatccggggtgacacgacggaagatgatgctcttcaacttgactctggcctagttttggaccagattctaagtggcaatgagacatatatgatgcacaaaacacgacacgactctgtgccactcacacaaatggactgtgttcgcgcccttcgacaattcctgtgtgctaaggtcatggatttgaacagaaatgtcattgattctggtgaatatgtcggtacttgtcgtgatatacaacgatcgt

SEQ ID NO: 285089 - DNA, 532 bp, Zea mays
agctaatcaatcgcttggttagaccatcgcagattagcggtgggattcccaggttcaataatctcgtttcgggccatgccctcgatgtcattatctggcctgaggtttgtcgtggagaagcaaagggatgtttacatgtgctctattctaagtcttagggtctgggattaattgggtacgattcgttctagagcttgatgcgagtaagtgcttaagtgccctgctaattttttcagctacctctgatcgaatttgttgtctacctgtttgttaggcaagcatggagtattcgcttggttctactcaagaagggaatcaaggaattcaggactttatgcactgattgtaatagtccaacgaaagagcggatccacatgttaaaaatctcagcaagtgttcctttctgacagagtttcaacttatgtgttactaatgtagaagggatcccaattacttgctgcattgggtgatcgaacagtcatagtatggagtttaggaaacaggaaatgcattggtctcttgtttgggcata

SEQ ID NO: 285090 - DNA, 266 bp, Zea mays
cacacgcgctcccctccaccgtccgccgcgcgtccccaccggcggccaccgccaccggcccacctccccggcgccccttacccttctttggcgcgatggtaactcgcggcggcggtagccaggcctacggcttcccgatctactgcgccgcctggctcccgctcgcccacatcatcaagcccgaccctcccgctgccgaggcggatgcggatgacccctcctcctccacccccttgctttcgatggctgtcctcgagggcggcggc

SEQ ID NO: 285091 - DNA, 355 bp, Zea mays
tctgtgaggaagaaaggactaccatggtcgacgtcgctgccggcgctgccgccctgagtccacccccgatgaccaaggagaccaacctcttcatgcaaatcgtcggcaacccggacggcacggtcacgcgccccgaggtccccctcgtcccggcctcagccgtagccgctggcggcgtcgtctccagggacgtgcccctcgacgcctccgccggcacgtacctccgcctctacctgcccgacctgtcctccgcgccggccgccaagctccccgtcgtcctctacttccacggcggcggcttcgtgatcctctccgtcgccaccgtattctaccacggccactgcgaggcgatggc

SEQ ID NO: 285092 - DNA, 329 bp, Zea mays
cacaggctaagtgtgacaacaataaaattgaacccgggaagagaatgaattcatgtttggttgctcacaagtagcctacatcctcgtcggggggagtccaaactataatacacaccgctagaacagcaacatatactagcaggtcagcgcggattgatgctgggcataacgccactgagcaggttgctaccggagacctccatggacgaaatgtagtgatcatccatccgagaccccgatgctgtgggtgtgctggtgctgttggagcccatccccatgacgccagactctgacgatgcaatgttctccgtccccggcgtcatgcgcca

SEQ ID NO: 285093 - DNA, 390 bp, Zea mays
ggccccccttttttttttcttcttttttttttgtagctcataatatttcctttattttgacaaaatacaactaaaatagtacaatacaaacttacaaagtagctcttcctcagcttagcttgctactgacgcagtttatataccgtataaagtataaactatatatcatcatatacaattatgaccgactcaatttattgcaacattaactctttattctgtttactatgatcgttacgcacagagtacgatcaggatcgatcggtatatcgcacacatgctattagcttgactccacgcatgcctgaaactgcaagaggagtgcgtcgagcacttgcatgcacacgccatgcatggatgtaagaggttgaatcacacaccgccgccgat

SEQ ID NO: 285094 - DNA, 475 bp, Zea mays
gggtaggaaaaagagaatagaaagaaacatactttcctttgaggattgtatacagttgaaatggttctactattatacttacagtgatgtacatctagagcgacaatcacaatagtttcttgctgtacactcgaatcaacggtttaatttgaaccaaagaaaatgcacaaatctaatccccaccgagcgacagacctattctaggcacacgaccaagacgggaaaaaaaaactgagaaaaagaaaatgaacatatctgcactagtgcactacgcaggagcgcttcccataaatagaaggaagttccagccagcgtgttagaccccttcagattcagagattgtattgggctgatgacgttgcaagggacaaaacgcaaatattcagcatccaataattaatacttgccattcttgcgatcactaaaccatgctttctgcaattcttagtttgctgcaggcgactacattgcccag

SEQ ID NO: 285095 - DNA, 344 bp, Zea mays
ggggttccaaagaatgagataattattattttatggagatccattactacggagcacggtacggaccaaataaacagccagaatatacaagtgaaagcatttcactaacaactacactactacagcactaaacatatctcatctctctccctatacagagaaacccttcaactgtactagtgcattaaacaaacaaattatgaggcccaagcagcagcagcacaaacaaaagcgaaactaacgcatgccacctacaccgcgaacgcgaagagcaaggtgatgagcagcgtcgcggtcacgggcagagcggacctgaggctggaggaggccgacccacgcgtccg

SEQ ID NO: 285096 - DNA, 507 bp, Zea mays
ttcccttttttttgctctataacttctctctgcatcctgaactacggttaattgaacaacaaccgccaaataagggagtactgtcctaaactccaaataagggagctcactttgccaagccgtacactttgtatgttttctttataccaaatatatatgcatacttttttgtgtgtgcatacaacagttcaaacgagagaacgatgaaactggcaaaaaaaagggaactgaactgaaccgcactagtatcgatccgtgaggaaatcaacggtggctttaagcgcgtcgacgaaggtatccacctcgtcttttgtgttgtagaagtgaagactcgcacgaacacttgcgttgatgccaagggtcctatgcaagatctgcgcgcagtgatgccccgaccgaatcgtacgctatgctgcagatcaagaatctctgcgatatctgtaggatggacgttctcgatattgaaggagcacaacggagcacggtggacagtctgggaaggcgccg

SEQ ID NO: 285097 - DNA, 341 bp, Zea mays
  unsure (1)..(341): unsure at all n locations
tttttaatgtcttattttttatcntctccctttcacctcttttttgttatgccttttctgtatgcggtacaaatgagaaaaaatgcttctgtccttgccgcattggccagcagcagaaagtgcagggcatcagctgcatgaaaatatacaattaaatagccttgtgtgttgtgactagtggtatccctcctgtcctatacgaatagcatgctaccgacaatcccaactactctttatcttcatgtgtgctctgtacattggtgaccacctgggaggaatctcttcacagttgaggggtccaatctgcagatggacgtttggacatcacatgtatatgtaca

SEQ ID NO: 285098 - DNA, 495 bp, Zea mays
  unsure (1)..(495): unsure at all n locations
ttccctttttttttttctaaaccannnnttttttttttgttttggtttttttttatagggaaagggatcattgtattgcatagagaaggggttacaatatatagactcaaccctaaacctaatggaccggcagcccaacagtggtgccagcccacacacactcacacatacagtctaatagttatccatggtacacgcctcgctcaccagacacggcatgtcaactttgccgacgctacgagcctacgaccaatagttatccacagtacacgcgtcgcccaatgctacgagcctacgagcagtactgttgacaggtcaatctccaagaatgcacaatggctgcctcatgctgagctccaccttcagccgtggatacaacgctaggtcgttgcttgcgaccagcactttcagagcggcaagatgggccttttgtaaaataccaccatcgaccttcaatctagctattggaaattctggaagatgaccagattgctt

SEQ ID NO: 285099 - DNA, 366 bp, Zea mays
aaatcacaggattaattaccgagatggtatggtgctatcttaaccatatcactgtctccattcagcacaacattacttaccacgaaaagaaaagggggcaaaaccgaaggttaacttaaccagcgcaggccaccagcgctaattaccgacaccaagcaagaagccggcggcgggagccatgccatggccatggccatgcaagcatggacggcgacggtcacaacctgtcctacctgccgagccctgacggcgacgacgacgagcctccgccgtagccataggcgccaccttttccgcccatggccatctggtggtgcgggtacgacccggacgacgcggccggcggggagccgccgtacatgggca

SEQ ID NO: 285100 - DNA, 611 bp, Zea mays
gatgaatcatcactgaaaaagtattgtacatcaaggaacgatgcataatagtttttaaggatgtacgattccgtatggccaaatggggaaactcaaatatttcatggattaatctgagcatcgcataatccactcaaaagttgaacagttcaatcctaccggaatggcctgtgatacagctaggctccaaagcataacctaactaggaacgcttgctgcaagtgttcgatagtctaaactgatgcagacaaagcttggggcggtggactggttagagcgttgacgtagcgcggcacctgcctaagacagcctggggtgagtttcctctcacggtctcgaccgacgcagacgcagactccgaaattggctgcagctttgctacggtttgatgaagcgagctaactttccaagcacgcctctcaggttgcgtatgccagctcctgttttagagctcaccatcatcactgggtttaccactgacttattcctcttcaggctctcttggatttccatggcacggcgagcaacatcaattgggaaaactaaatcagtttttgtcagtacaatctggtatggcgtcttgtgcctttccattaagtctacaagctcat

SEQ ID NO: 285101 - DNA, 397 bp, Zea mays
ggaaccaaaacaacaaacggttcattttgactaggccagaatgaatacaagttcaaagaaatctcattgcctgttagaattactacagtacacgaacaaggagctcgattgcctcttcaattcagaagatgcaccaaggcagcaagcatccttatcaacaagaattcacactagactacgttagcagacccagttttaaacagcccaaaatggtttctgctctgaaccaggagttggattgcccttagggtgtgttgtctgtcacatcaataatcgccgtcattcgtcgtcatctccataatcaataagtttcagcaaagtatcagacacaggggtgccttttgttttttcctccttaggctcccttggtcgtcgttcagatggcaagactgatatt

SEQ ID NO: 285102 - DNA, 448 bp, Zea mays
ggaggaacctgcactgttgcaggtgcacaagaaggcatttcaaggaacctacgagtgttgcaggtgcacaagaaggcagatgcgtccgtacgcacaaagtttctgaaacggatcagaacagaatttcaaggctgataaattacacctatattctacgtacaaagacttacgttgaactatcctagctaactaatgtttatagattaataatatggcaatgctatggccgaatgtctggttgcactttccactttgggtcgccgaggaaggtacaaggagtatcgtgtagattcatggaagataagcacttcatatctgcagtcatcaatcatgtacctccaaatccccaggtcctctgaatatcgtcaattcttcattgggactttctgtagtgttatcattgcagtccgccgttttgcgaagtgaaaataggagtaaggtaattttt

SEQ ID NO: 285103 - DNA, 397 bp, Zea mays
ggttgggatggtctattgatattatataagccaataaaatttgaactaagtgacagataatctgagtagattattatctcaaacaaataccaagacacctaaaaaattattagatctaacgggggccaacttagcacgacccacattttcagaggggattattacagtatagttgctatgtcaccaacctagtaacaatcggtacaaacttgagccaaatttacaatctcgacggcacccctccagcaacaacaatggtttcagctgtgatgaatgatgcatcgtcagatgccaggaatgcggcagctgccgccatatcttccacggaacccaatctcttaagcatagtcctctcgttaagctttttcctaatgggctcgttgtctatgaagaaact

SEQ ID NO: 285104 - DNA, 454 bp, Zea mays
tttcatcgaagactaataaaatatataagtagagacccaagttacaacgacgaagcaactagctgtacacaaagcaaggcaatattatattctcttcacaagccacttagcccttcaaaccctcgtccgttctctgtttttttactcccctaaagtattacaggaggatgctccagactccacagatgtagatggacatctttttcagtgagcccttggcctttgaagttgttctaatgcagtcacaacctgatccatgccaggcctgcatcgtgcgtccatcgataagcattgcagcgccagtgttgccaccttctgagccgcgggaagggaatactgggaacccagccgtgagtccaggacatgaatgaccctcctcttgttggtgatgtaaggtctagcccactccaccagattgtgctgaccgggcgggcggttcttgtccagagcgcgc

SEQ ID NO: 285105 - DNA, 517 bp, Zea mays
accatatttctgccttggttatctctgggaggctttcaatgagtggagcttttacggggctggtgttccccttgttataagtggaagtgaatctgtgattcagtattatgtgccatacctttctgctatacagctgtatgcagaccctttgaagcttccatcgaggatcaggcatccttgggaggaaagtgatggggaatctatggatactagcagcgaaggtagcagtgaaactgatgttatccgattaagaagctcaaccgtggaagctccacatcgattggatggtggctttcaaagggatggcgatgaaatgcactcaccatcgactcgcccaattttcgaatatcttgagacagatccaccatttggtagagagcctttaacagacaaggtatcagttcttgcaagtagatttccagatttgacgaaattcagaagttgtgacctgctgccaaccagttggatgtctgttgcatggtaccctatctatagaatccctactgggaccacactc

SEQ ID NO: 285106 - DNA, 344 bp, Zea mays
gagcaaatgactggtggaggtgtttgggggagggtgcggcccatcgggctgtattcattcatagaccgaaacccgtcgcgtccgcttcgaagtaaacccggacgcgaggcacgcacacgcctgatgtgtcatggttcaattcaaaaacaaaacacagctgccctcttctgactgcccagcgaactcctccccctctagctgaccggaatcggggcgtagccccgcggttcctcggcgtgcgccggagtgactgcggcgactacgacgaaggcgccgagcagcacgacgacgagcgccgtgaagttgaccaggaacgcctcggcgccgtacttgtcgagcccccc

SEQ ID NO: 285107 - DNA, 252 bp, Zea mays
attaagcaccaagtgatgtccatcttgtttcagttgcagttgcaccatcattagttgccataattaccaacaaaatacagtggctacccgcgcttgcagatcaccatttccctgcccccaacagaggagagaaaagagttaccagcgcttctctctctctctctctctctctctctacctctgctgctgcgtgcgcagtccgatctattgccaaaagtaccctagacaggcccagcatttacaggaatgcca

SEQ ID NO: 285108 - DNA, 242 bp, Zea mays
aggacatcaacctgcatatgttaaattttagtattgtgaagctaaaaaaaggcactataaatggtttttttaagatcccagaacacaatatcacaatacaactactggggcaagtatacattcatggctttacaaaacttatgattttttgacaataaatggtaattgagcaggtttatctggacatgaatggtcatccaatgtagtcgggagtaagatcaatcaggtgaaattctcccttc

SEQ ID NO: 285109 - DNA, 497 bp, Zea mays
gtaagcaaaatgcgctcatcagataaactacaacaactatctacagagttccttcgtcaaacaacgtggtaccaacgtacgtaccaaccattagtaatgttcccggctcgttttcaaattgtacaatacatacaggaaaatttctgtaaaggcttccgatttttagaatgcaatagaagtgcctctcctcgaggaaaacccaaaaggctgcagcatctctcccagtaacctcttgcggtatccatatccatacctgaacactcgggcgcagttatccatcatcttgcgggttatccacagctgaattctcaaacgccgccactgtcagtcaacgtcctcaccactttcgtcgtcgtcgtcgtcataagccactagagagccaagcgttgcctttgtgtcgtctggttgcttctgatctgagccgtgcctatctgaaggccgccgctcctcgggagcaggtttagcttccgtctcaacctttggtttcttggcatgcg

SEQ ID NO: 285110 - DNA, 493 bp, Zea mays
gtgaacgaaggtagtattatctatcttcatgaagtcaatagagaagttattcaactcctatatgattttggtgttccaactgcaacatgtcttctgctgttctgcaatcattcaaggatgaataatccatgctatttgaacctttatcttctcctaccaacttcagatctttgattaccaatcatcttaaatgacaccagaattcccgtggcaatgcaaggggaattcgtctaactatatataagcatgtgctccactttatttaaagcataatttacctttgatttcttatgtgcagtttttctgactctttctccttataaccctcctttttgaaggttataagattgtctgcagcaactcaggatgttccaaggtctgtgatttgtaatgttcatggagttaaccccaaatttattgagattggcaaattgaaacatcagcagctatgccaaagagagcaagcattcttcaagggtgcatattatatcgg

SEQ ID NO: 285111 - DNA, 431 bp, Zea mays
ggaccgtggcggccagcagacactgccatgaggactctactaccggtggccgccggccgcgggaccgtcgcctgcgcggccacgcccgtcccccggaggtcgctgctcctctccaccgctgccgcaggtgcggcgctgcagccggagcaggtggctggaacgaggccgttgatgctgaccaggagcgaggccagcgccgtggcaaagcccaggaccttggccgacgaggccatctcgtgggcgaagaaagacaaccgccgcctcctccacgtcgtctaccgggtcggcgacctcgacaagacgatcaagttctacaccgagtgcctggggatgaagctgctcaggaagagggacattccagaggagaagtacagcaacgcgttcctcgggtacgggcccgaggaatcgcatttcgtcgtcgagctcactta

SEQ ID NO: 285112 - DNA, 503 bp, Zea mays
tctctgatgaaccctgcttccaacacagctcagttatcattatagcacggcttctagatttgggaagctgctcgacaaattcttgaaaagcactaagtttaactcttcccttaatctcaacaaagctacgccaaacttttaatgatggcttttcaccacttttgaaaatagcaacaacattagagagtgaagacacgttcagctgaattgcaccttcccatatgctctcacgtatcatagggatactggctgcctgatcctgatgaacagagtcaggattagaggcattatcagtcgtcgttttcttggcttcacctttgccatgggagggggaggatttattcagctctccatcacgtggttcagtaagatccgaatatggaaccgctgtatctcctggtgactctagcttaggctcgctgttaacctgtgcagatgatttatcagattcagattcaaatttctctggtgtagatgcattatcctctgtctctggaaggtcc

SEQ ID NO: 285113 - DNA, 286 bp, Zea mays
cttgcttgtgacttctttattttcaaataagcacccaccaagctacatcttggctcgaaccaggtgggtggaaaatgggaaaagaaaagagagacagtacaatgaagaaaatagttacaagggtggcatttattactaaactaactatccaggtgccagcattacacttattctgaccaatgagaaaaaattggaattctctaacatctaaattatctatcaagactgatacatgtatctgatcaacaggttaatggggggaaaatactattccagaacgagtggg

SEQ ID NO: 285114 - DNA, 411 bp, Zea mays
gcacacaaaggataatttatttcaaacaatagttactacctatgataacatggtgagatgacgatccttatttagtctttcatgaacctaggggcatgttcatctcgtacatatatatcatcttaatcataattccttacctcatgatcatatcacactcatgcatatatatatggcactcaccaactagtccagaactaagaggaaacaaagggcagtgctgatataggtcttagtagagatcttggactttctggggatggcacattgcaccggtggcctcatcaagattgttgctactttcacagggccctagaccaaaatgaatattcggaaaatgtgcccaattctttgctgcagtgctgaaggcttccctatggcttatgtccgggttacatgctttaatccttc

SEQ ID NO: 285115 - DNA, 387 bp, Zea mays
aatctgtaataagaccatgctgaataaaatattttgaagccacaataagcaagaggttacctgatggcacagcttcatctgaacaatgacaagatgcccacccaacctagtagctggcactcatactcaaattggacatcaacatgcacatacttcctcatgacacagactatgaatgagggaaagcttgctaacatctggcgatcctctcgcgtttttggctcagaaagaacaccatgaataacaaggttcttgagatttggacaccttccaatcataccaaacacccaggggccaaagggctcacttattactgtccaaccaagttccagaactgagacattttccagtaatgatgatccctgaaggctgtagtgaagtaaccca

SEQ ID NO: 285116 - DNA, 275 bp, Zea mays
tactacctcattcctcatacaaaatatctcgatataaccaggtactaatgacaagggtggactacaactgcatatcacaagactataaaggacagcactggtatttgggggacgacttggaccagcttaaaagggttctctcttcttcttggtcttcgattgcttggccaggagaacagaaagcccagtcaatgcaaacttcttcctcttccccgaaattcttctgcgagcagccacatcctctctggacagaacaccactcctgtttataatct

SEQ ID NO: 285117 - DNA, 296 bp, Zea mays
caagtgcccctacaggggcttcatctacacggcgttccaggagcgcgccaccgccgtctcgcacggcaacacggcgcggcgcgccatggcgctgggcgacgccagcctggccaggatctgcggcgccatcgcgagcgacgagaagcggcacgaggcggcctacacccgggtggtggaccagctgttcgcgctcacgcccgacgccgccgtgcgcgcgctcgagtacatgatcgagggagaggatcctcatgccggcctactacatgttcgacggccgggacccggacctgttccgc

SEQ ID NO: 285118 - DNA, 487 bp, Zea mays
ctagttctagatcgcgagcggccgccctttttttttttttttttttttgtcatactaggcacaaactactttttttctgaacattgcttttaccctgttcataaagatagagattttttccacccctggaacagttcctatcctatcagccaattgtcttggaaagaatataaatagttctatacatttgatcaatcatacaacaaccattttttttgtacatctccattccattgttctgaagatctcattaatggctggaaggaatggatttcccctgcttcacgaagacgatggatctttccgtggatcaatcgcaaggggaagggcttgcaacaagcagaggacgaacaagacttgcaattcactctgtgctcctgtgacctgacgaagccatgagcacggcgacagcggcgacgaacatgaagagcatgaagccgagcaggacgtaggtcttccgcgacgactagcggtactccccgaagag

SEQ ID NO: 285119 - DNA, 406 bp, Zea mays
cataggcttgtatataacgtcgtccactgaacagtttccgaatggtaccatccataacacttaaataactcggttcacacagaagagccatcaaactcctagcattagaaaacaaacctactaggtaatataccacataacacaaaggacaggagtactagcacaaaagctgcctatgctctttttatttttggttttgcattttggatttttttgtctttgggtatgctttttttttgtattatgcttttgccttttttggttttatttaacagctgtttttacatctcacctgagataaggtgtgcatgccgttactgtgaaaactcggcctgccattgtacttaacttctcttgaatatatagcctcaaaaggtatcgctcctgagtagatttcttgcagact

SEQ ID NO: 285120 - DNA, 295 bp, Zea mays
tttttcttggattcggagcgtataggacatctttcagtattatccacaaatccatattctcataaaaaaagttgtaccaaacatacggcctgtcaactctttcagtaacagcagcttcgaatgtgcatggatcaagccaaaactgtgctccaatgatcggaggaatcagcatcctaatctcgccagaatcacaattcgcactgtatgaaccgtatatatttgctaaacacacaccagatggcaatgacactcccatgctatgctagatcaggaaggtttccgtttccttttcctt

SEQ ID NO: 285121 - DNA, 405 bp, Zea mays
cgtcagaccaagagccctattccagggcggcaagcaaatggaccaacatgtggctatcacaattaccccccacataaaataaaataaaataaaaatcaaacagaattttgaatccatatgccccctacagagatgggagcacgccttaaactaatttcgcacccacatgtatgtataaactactaatcagcctcagcattccaacctgcttccatgttttggggggtacagcttttgccaaagtcagcgccgctacctacctggagctttacttcacaaaaaaaccaggctccgagaaatacctaccgcttcattattgctgccatggctacatgcagagggctcgccttcaccggggctcggcgtcgcggacggaacagggaatgtcgcccctgaaagtgctgc

SEQ ID NO: 285122 - DNA, 301 bp, Zea mays
ggttagaccccattcaataaaccttttattatcacaaggaaattgctcactccatactttacaaatctatatgggatcatatatatgttccttggaattgaagagcttaaatggaacaatccaattacagatacataatcacaccgacaataacatacatgacaactagccaagaagagttacacgatagggggctcactacagaagcacaataggatgctgtccaaactctttgagatcatgtcctcattttctcaaagtatgcagcaagaacatttctgttgcaccttattctcctccc

SEQ ID NO: 285123 - DNA, 288 bp, Zea mays
acctttttatactagaaagactggagtaatatgggtagcatatataaccatgaacaataatccacaaatgcaacatataggatgccatatatataaatggcagctactggattccaaatgcggtatccaggaggttttgtatatccatacttatatcaaacaatcttgtgtaatgatttcacggcatcctcaacgaaatcatgaaaccttttgtggaacagagcctaggttagatcatcctcatcctcctcctttttcttcaactcgttctttgccttcagaaggaga

SEQ ID NO: 285124 - DNA, 260 bp, Zea mays
acactttgataacgaaacagcaatctctatctccatcggctcatgctcctcctacctggctactcccgccccaccaaaacaagaggagggagcaagcaacaagcacggccacgagacgaaacaaagatcaaatgaaaaagaatctagacctaggatcatcagattctacaggtgctaactgcaagcagcagggagattaatccacaaggaaagaacaattaacacatctttttttttcctgttacaccgatgagggaacc

SEQ ID NO: 285125 - DNA, 486 bp, Zea mays
agacaataaaggagtatcttaaagattgtcattctatacaagtaccaaactacgcgtctctggagaaaatacattaaaacaatagtggacagcaaaaatgatggaatattgtcgggaatgaactatacagccagcagtgcttcctccatggagtctttaactgtctgctttatgcaaccatatgaaactaaggtacaatgaactaaaccttaagggggggaattacagggatgagaatatcggaacaccaggtatggtggcacctgagtctacaatgaagatgttgccagtcacatacgacgatgcttcatggatcagaaaacggaccagcgacgtcaatgcaggatcagtagcgccatgctccttaagcggcactatctttgaagcaacggtgctcaaccacctcttttgaaacagaggagcagttatctctgatttgaagagtccaggtgcaatcgagttcactctgatgcgacccaccgtccg

SEQ ID NO: 285126 - DNA, 497 bp, Zea mays
gttctcaaaaaggggtgatgtgcacaaaaaatgattagcacaaggattttaaaatgtatcccctctgtcgaagtcgttatcacagaaacatcaccagtgggcagggaatacaagaaaccatagtggaaaaaggaacagaactgcaggcaacgacagtggctgcaccttgccggccggcgaggcgagactagaccactgatcgggcagcttgcatgtcgctagttgggtatctccctcccggcaagccgacggcggccggattattgccgctgacgtctgacggtgatacatggtccgatcaagaagacaagaacgaaaacaaattcaaatacagtagaatagagaatagatccacatttattcttcgctatatatatagctggccgtcgtcgttcgatcaggcgccactaatggtccggccgccgtcgacgaagatgacctgcccggtgacgtaggacgccgccggcatgcagaggaacgacaccagggacgccacc

SEQ ID NO: 285127 - DNA, 345 bp, Zea mays
ctttatttttttttttacaaaagttatatgcatggcatagacacattttctgttctaaaaaaactctgatgtgcacaaaaactgattagcacaaggattttaaaatgtatcccctttggggaagtcgttatcacagaaacatcaccagggggcagggaatacaagaaaccattgtagaaaaaggaacagaactgcaggcaacgacagggtctgcaccttgcatgatcgggcagtttgcatggcgctagctgacggcggccggattattgccgctgacgtctgacggtgatacatggccgatccaagaacgaaaacaaattcaaatacagtagaatagagaatata

SEQ ID NO: 285128 - DNA, 381 bp, Zea mays
ttctttttttttgaacaccatataggatgaacaagtagctaatactcaaatgttattggggtactgtgaatttgcttatttgaatgatgatgcaacgctgccattcaaaaccgatttcgccagttgccacgaacgctcacgccacggtggcccttgtcatcgcaagcttctcgtcggctccgtcttcaacatcaccatcctccttcccggaggagttcagcccggccgccacctcaagctccctccacggcccgtcgaacatttcggggaactttttgcacaaaccgacaaccacccgccttgccgctcgccccttgccagcgtccttaagaccgcgcaccagcacacgcaccgttccaaggtcggccaccttccggcgct

SEQ ID NO: 285129 - DNA, 426 bp, Zea mays
aatataacaccaattatcttcttcatcctatctgggttcattaatcgtcctcataattaattgatactactaatccacatataacatcagcagcagctccggctgcttctgttcatcttcccatcttctactagccaccgttcgcggcctcttctcctgttggggtactcatatcgtttcactagccaacacgaaaacgaaaaaaaatggcataaacacaatacgactcaattacagacagacacgaggtcgtctgacgcctcagaagcgcgcgttctcgaagccgtgcaggtcgctgacccggttcatggacttacgcatgatggccaccttggccagctgctccgccgcgcgccacgccgacgtcggcgtcagcacctccccgcgcggggtccccacgggcgtcgtcgtgtccccgtctcccct

SEQ ID NO: 285130 - DNA, 441 bp, Zea mays
gaatccccacagctcacattctaaaacgatgtccagtaaaacgttcttagccagttgaagaacaggactacatggggggcgatacaaaaacgctaagatcggaatcaccatcaaagggaatgaactaatcagagagaaaccatcgacccttcctaacaggggctaactaacacacgcacacacacacacaatgaaggcgggggagaactgtcccataggaaaccaggcgggggccagcactgctggcatatgaacaattctcataggtaaggacgcggcctacgcctaatcctaatcaaacctacataaacgggggccgcctcggggcagaagtaacggttgccactcactctacggcgcgaacacgaaggatccggcgaggagcagcgccgtcgcgagcagccggcgcgctagggacaccgacgagcgtggcgccgcagc

SEQ ID NO: 285131 - DNA, 421 bp, Zea mays
  unsure (1)..(421): unsure at all n locations
tttgatanttctccttatgattacgaaatacagggggatttttataagtaaaaaaacaggtacacaaatgcggggtacatgggcaagcaaagccaagcagctctttccctcggctcgagcctgcctcctacattacagagtgagcaacacaaacaagtaacatcttcaccctccctacctccgtgactaacctcctcatctcatctcggtgccgtgcgcggccggcctcctcccaatggccatttaatctacgtggcggttggcttgtgtagggatagaatcaaatgttaggaatgcctaagaattaacaaggtcagaagtccgtcacacacacacacaggctgcttgccctggaagtgttgtccaagccatcagccgaaaataagatggcgtagtagagctttagacaccatcatgtgct

SEQ ID NO: 285132 - DNA, 469 bp, Zea mays
gacaaacagcacagcagccggagatcttacggcccttccatgggaggactcattttctcctatcctccatcatctgtacactcgtctacacagcaccttacttcagtacaacgacgacgacgccgacgtcgccatcaatccacgtggcaagggatggggtacaagtggtacaaggcacaggcaccagccttgttactgcctcttttacctcacaggactaccaagcatctctcctcatcatgcaacggtttcaggccgtccaccaccctccagccactctcgaacagaacacaatacacacggtacgcacgcacgcacgcaccagccagagactggcttagccaccggtcatcatctccttggttcttgatggatatggatgcgcagggatgagtaatggatggcgcatggctaggccttggggatcgagcgcgacaacaccccgggcaagagctttatgaaccccagg

SEQ ID NO: 285133 - DNA, 363 bp, Zea mays
gatttttaacttttcacagcatacagcttgcggcagttttttcacaacaaacaacccacacaagacagctgaaccaaccgctttttttcaacgcaaacaactcacagaagacagctgaaccaactgcaccggactcgatgaacaaacatttttctgaactaaagctttcctgcaactttgtcaggcacttagcctagggcgccagaattagtcctgtactgggctcgtaccgggtacaagttcaacgatacctcctaaaactcgaggatatacttactaccttcaatcaccggtacattttacgaacacacgcaggttaaaaactgactcagaacccacctgtcaacatgctcatggacctaa

SEQ ID NO: 285134 - DNA, 109 bp, Zea mays
cccacgcgtccggggtgatgtagaaggcaccggattactgaaaattgctggattgaaaacgaaaacgattgaaatggaaggaagacagaagaatgttgtttccctcctc

SEQ ID NO: 285135 - DNA, 468 bp, Zea mays
tgacaattgtactgttttccatgtatggaaagcaggtaatgttgcttcagtatatcatatgactacatattctcggtattgtgcccattacagtttcatgtattctgtggatcactgcagtttaagattgatccacaagattttcaagattcagaaccagatattcttgcaaattctgcttcatcgataatagaacggatcaaagaaaacagtgatcagtgtgccgcggctctcaggtcgctctgtcgccggaaaaagggcctcactgtcgaggaggcaagcttgattggcgttgacagccttggtattgatgtaagagccttttctggcttggaagttaagactgttcgattttcattcaatgcacaggcgctctctgaacgttcagctgaaaagaagatcaggcgaatgcttttcccccgttaccagcgtaaaaacgtgaaagcctctactgaagatgagtcttaa

SEQ ID NO: 285136 - DNA, 281 bp, Zea mays
gtccccgagggtaaactcttcacgagggagttctctgtgcagaggcttctctccgtcatcgacagcgtcaagaaaggcgacaacggcaagttcttcgcgtgggatggccaagaaatcccttggtgaacggtcatcgtaactcgcttgagtctatagcacagcacacagcagtcatcaacgcccctggttttaatccaacgttgttttttttttcaacaagccaagcgaacagatgcattatttctagctaaagggtcctctttttgtgttatccccgacct

SEQ ID NO: 285137 - DNA, 393 bp, Zea mays
cggacgcgtgggtccgtccgcatcggaccccgatcccaggggcatcgtcctcacctcctccgccagctgccgctcttccgtcctcttccgcagcttctgcgtcgggaagaggcggtggcggccgaaccagcgtagtcgtcgccgacgccgctgccagccgccatggaggcgtacatgctctgggtgcgcaggaacagggacctcgcccgatccctcgagtccctcgccaacgggctcacatggatactccccgagcgcttcgccaactctgagatcgcaccggaagcagtatatgcactactgggtattgtgagttctgtcaatcagcacataattgatgcgcccactgagaatcactcatttgcctccaaggaacaatctatcccatggggt

SEQ ID NO: 285138 - DNA, 541 bp, Zea mays
cagtagtacttcacacactcgaattaacaatattctggagaagctgttgaaatacgaaaagggtctcttcgatgacattgctctatgtgaaaatgatcattcatatataaaactggccgctggaaaatctgtgctgcaattagctacaagatgggattcacatatttcaccagaattatttcgtaacacacttctcatagcaagggattcttcatatactgttcgcaagtcatttatttgcaaactttatggcctcttgaagaaacgtgcaatcccgtttagatatgcatgtgcttttgcactaacggcaacagattgctccagagatattccgactgaatcggcaagttacttaagtgaggtcctgaaggagcaaagaaggttttttgtttatcagaacagaacaagcaaagaatctattgtggacaacccagcatatgctgtgatttttttgatccatactctagcatatgatggggcgctcccttccgattactatgtagacgagagtagctttcctgaattttgcagcccactttgt

SEQ ID NO: 285139 - DNA, 576 bp, Zea mays
ccctcgcgttcgagtgtttcgggcagcacttctgcctgcacttcgaggcgttcgtgctggggatggcgccggtgtacatggcgttcctgcggttcatgggcgaggagagcgaggcgcaggggttcgggtacagcctggaggtgggcgggggcgggcggaagctgacgtggcagggcacgccgcggagcgtcagggacagccaccggaaggtgcgggacagcttcgacgggctcatcatccacaggaacatggcgctcttcttctcgggcggcggcaggcaggagctcaagctgcgggtcaccggccgcatctggagggagcaagggcaatgaaaagcacccccgcacacattccgttgactggtggttatggtggtacaccgctgtgttccattccatcccatcatccgggggcagccttctgctcagctcctcgccatgattcaagaccccattccgtgttcgtcctgtgcatttgctgtatgtacagatattttgcatacctagcctggaactagaccgtctgcagacatgattaacacgtggggaaagccccggcaaaacctgccagtctggt

SEQ ID NO: 285140 - DNA, 387 bp, Zea mays
gcccacgcgtcagcccacgcgtccgcagaaacctgatggttcagccacagagaagctgcaaattttgtctgctgttaagtctctcaagagaaaccttggtgcattcaaaaactcaaagacaggtgaccgataaaaagagcatcatttttgttccggctattacacttaatcagtgaaatccctttgttggaaaatggtctcagttatatagtcttcgagatagtttcatggttatgtatgcttatctctgattctgtagacacgcgtccaatctttggattttcagttttgacactatccagattccagaatccaatagaacgattctgttcatttctagtgagataattggtttaatttatcaatttagtcacagcgcatttgaat

SEQ ID NO: 285141 - DNA, 378 bp, Zea mays
cgggaatcggaaagtacacgaacttgtttccgaaccatgctgtatctgtagatctcactttgatgtgtctagtgcattacaatatctgtaggaagctcaaactacaccgagtaaagtaaaatgtaaaagagaagacctaaaaaaatggcaaaactgtatgaagggtacaaggcacttgtggactgctgcagtctgtctgtctgaacctcaaatgtatcgagctgcacaatgctgcagtggctgaacaaattgggagagcctttttgtggcggggcggacggaaagaacgaaagaatctgcacaggttgatttgtccgtcccgttcaggaaatgttgtcaaggtcaggatacacggccgcaaaaggttcgatgtgtgac

SEQ ID NO: 285142 - DNA, 483 bp, Zea mays
ggaggaaataaatatctacttcaagctcttgattttttttacatttctctgttttacattccttttgttcctaacgggcagtaaagcaaacacaagcatcgggattagtacagtatcacaactctttccagctcagttgcatttacaaatacatcggcaaattttgccaaactcaaagctcgcctcattggtaacaaaaaacggctatgctacaaaagtttaaaggcacaaatgaaaatattggtcaaagcattctcgtggtgttcccaactctacattcacatgtacatatgctccttgactctttgaccaaacgttgagaacgccgaatctgcaacttgatatttaccagcttaccagcaatcattctccatgtaaggtcttctggtccgagaggttgggcaggacttgaatacagaaaatgtcttgaatacttcacaagattagactgaatttctcttattcttttggcattgattcctt

SEQ ID NO: 285143 - DNA, 334 bp, Zea mays
aaaggttaagaatatggacatacattaaaagatataggggtatgtgcccgtgctttgctatacaaattaaaaaccatccgatactaagcttgtacgactgtattgatacacctttgttgctttctctgcattttcagtctatgaaaatattggatggttttagccatttggtctacatacgaaatatactatctactctgtttggatttcgagtgttctggtctgttcaagcggcacatgcaggcaggacacgggaaggtatatatagattcgcttggtcttttcattttcgatccccttgacatcactgtatgctctcatattaagcaagtgc

SEQ ID NO: 285144 - DNA, 438 bp, Zea mays
tgccagagtggcctccaattggtgaagtatggagagcagccaccagtcgttgctgcagaactttgtcattccccaaccagatacgacccttataacgcagcagaccattagtgagagtaaagtgaggcacagccgaaggatccaaagctaatttggccatcaaggattgagcagccggatcatgactatagctgttctggacatcagtgagccattgtggaacgacctccgaaacagcattaatctctggagaaatccgacgggataacgcatccgctacccgattggaatggccttgccggtagatgatcttatattggagccccaagagtttagtgaacaccttatgctgccatggagtatgcaaccgttgctcattgagctgggacagactctggtgatcagtgagaataataaactcgccatgctgcaaatatt

SEQ ID NO: 285145 - DNA, 410 bp, Zea mays
aaacaaaactaaaatatgtataaaatacttgagtataacaaatacatacatacatacatacaaaatctagagcaaaatatgtctctaatataggtatttaagtatagaggacgctgctagagagaatgaagtgatttttttagaagaaactgtaaaaaaaaggatatagaggatgttgttgaagacaaactaatggattggatggtattgtgcaatcccacgccttggcggcagtttccttaagatgaacagcaccaaagatgagggtgcaatctcggccagcaggtagtaaaagaagttcaggattggatggttcagaacatcaagatcagcatctttgttaaaagcactcaagcacatcattatgcatctgatcaagaagcaaccaaagcaaatggtggtcacatagc

SEQ ID NO: 285146 - DNA, 456 bp, Zea mays
  unsure (1)..(456): unsure at all n locations
tttttnttttttttttttttttttttttggtttttttttttttgtttggtatcaacaccattcttgttgaccatgaggctaagaaagcaaggacgtgagagaaagacacgagcttaggccttgttcatttgtttccagctgatcaaagcctatacaaatcagcaagcaatcctaccagaaattgttccagacaacggttccatgggcaccaaacgggccctcagtctatttacactcacgcaggatacaaagtgaccacggattgtgggcagtccaacctcttaccagcaagagagccgtatgccagtatctgagcatgactatctacgcaaggttccccatcttctatcaaccgaccagcattctgggaactgggaaggtgtaaactctatgttccagaagggcctcgccatgagcatcaggtctcggcctgtttgagacgctttgtagccctga

SEQ ID NO: 285147 - DNA, 469 bp, Zea mays
tcttccgcggcgtgttcctgggccggggccgccttcttcttgccgcccacctgcttctgctcggcggcggtttgctgcagcttgttgcgcctcagcttccacacggcgctgggccgccccacgcggatgccgccgggccctgctgcgttgttgttattacggccctgtccgggcacccacctcctcaacatggacgtggcgctggatgtgccggcggcggtcagtggcgccgcctgaacctgggtggccgcgtcggcgtcttcttctccggctgctgcttctggcgctgcagttgcagtggcggtgggggatggtcggcacaggcccggaggactccccgcgggagttgctacgggagcacggcgcgctgctcaccttgcgcgggaccggcgccggggccggcggcgcgctcggggcggtggcattggcggtggtgttggcgttaacgctggcgccgccgctggcggcg

SEQ ID NO: 285148 - DNA, 376 bp, Zea mays
tttttattatttttccttttttgtttttttttttttgatatcagggccatccgcttcgatgactatagggtatgtacaaagaccagacggacaggagttcctcataagaagcaccaaaaaaacaagggctctagaacccattcatctccaggagataggtgcgcctcttcatcagcgccttcgcagcaaacctcaaggctccatcgaacgcgcctgaaacaaaggcttcaacttccttgcgattgccatgaccatcgctggcaggcttggtgacaagcaaggttgcaccttgcagtgccaagccaccaggcaattcgaggtactgagcgtacttcagcttcatgttgcatgccggcacctgcgtcctgttagaaca

SEQ ID NO: 285149 - DNA, 350 bp, Zea mays
gttcaaacatgcgatatgcgttagcttcaattaaagctggatgtttgtattgttacaacaacattgtaaaagtagtagaagccgttacggattagaaccaagcgactgactgagcctacacgaaatagcacaaatcaaacagaccagttcgctcgagagcaagcacagccgatcattgagcgcacccagtcaacaataccaccaccagtcgctagctctgacagatcacgcggcatagacgacgagcttcatgccgaggttgcagtggccgaaccgggtgcagatgaagaagttgtcccccctggcgagcgtcacgctgtcggcgccggacgtgtaggtccgcgaccccg

SEQ ID NO: 285150 - DNA, 503 bp, Zea mays
  unsure (1)..(503): unsure at all n locations
tttntttttttttttttttttttttttttggggttaccgaggttcagccctcgaaggcctagtccccattgaggagtccactaaggacgggtctcttttaaccctttccctctctccaccgttcaccaaggaccggcgagctcttcttcttctcaaggatcacttaagaccccgcaaggatcaccacactctttggtgtctcttgctagctttacaagcctccaaaactttggaggaagttcaatgggagtcaaaactccacgcacaaatgaacacaagatgtagaacacactttctctcaatgaatctcacaaggcactagtgctaaactcaaacgagtagctctctcttgcttgctctctcttttgtggcacttgtgttggttgtagtggtctaaattttgtgtataggatggatcaatgaatagagatggttgggagggcttgaatatgtcaactatatgacttggaatgttgcttgggctcccacaccttgaagtggcc

SEQ ID NO: 285151 - DNA, 564 bp, Zea mays
gcatagattctgagattcttactggggggatcctaaagacacctcatcgttagccaacggtgggtgctacatgcaatgcaggcagcctccatatacagagcccccgtcttggacgactactgcgcatggatgccaagtttcgcatgctgttataggttacactagacatgataactgatggcacggatagaatatcaggagggcacacaacatatactccgtgccactaagttctctagctacttcatgagccgatcacgcttcggcgcttgctgtcgatggtcatcctgttgacctgaagacgaagacgacccgaccttgctgaaaaccctgccgccaaagagctccttcccgatcctagccttgaaggggaactgcctcttgaagcggttgcggaacaacgagccgccgccgccgcgtctcggcacgatagcagaatggttcctcttcaggccacggtcactgcaaggaggcctcgcgccactgctgttactccctccagcgccactgcccagcgaaaggttcctgcgagcagatcggagggcaacatgcagaggttccgac

SEQ ID NO: 285152 - DNA, 428 bp, Zea mays
aacaatagattactgaaacatgaggactccagcagttttaataagggcacatggttgacagcattcagatggatattgggctcacactcacacacacaatgacacacacaccaccacgccgcgagcacgttttattgtttatccacgtacaaacaagcaaacaattggctgataccactcccttgtgtgagataacatgagtttagattagaagaagactacgccccaccagccgcacgttcacaggtagacagaccttccaagtacctgtccacaatatctagaccgcagagttctttcaccagtgtcatcggtgcagggacacccatctggaactccagcggcgagtgtccagatgacacggtgctgtccgcaaactccaccctcgccgctcggatggcttcccgcagcgcgcagtggacggacga

SEQ ID NO: 285153 - DNA, 685 bp, Zea mays
gtcaaatatcggcgtgtgtgaatatatagtgggcaaactgaacaatacattacgtaatcacatgtacaataagcatctccgaatcggcatgctggttccaacccttctcctttgatccattaacaattgaacattactgattcgtgaagctattatactgtacaaatcatagactggttcactgagcactgaatcctctggcgtttgacaaaccgggctgcttcgacaatacgagattaccgttgaggtccatctgatactgcaatttgctgtagtccatgacgattctgcagctgctccagtcttctgcatgcatgctgacgccaagatagtatatatggtctcgcacgctgcttccacttactgatctgcagcatgtagggtcttcaccagaatcgtcacagatcttttccacggggtacactagggttcctagtccaatattatggatccatacctctcttgggaagtgatggtaggtcttctgtgggaagaatgagaagtatggtggcaggtgaggcacgatatcgtgggcatgagtaactcggatcgcttgaggcaagtatgtcttgaaataagaagcaaatgcagcattgccaatacgaggctgcccaaacgtcatcaggtttacgccatccagtccgtagttaacaacaagatcgagcgcacagaatgaagccatagc

SEQ ID NO: 285154 - DNA, 373 bp, Zea mays
gtctgaggaattaatttataaggagtatagaggtcgaatcggatccagtctctagtacgtatgtttctttacaaatcgaggttgtgccaacggcagcagggcatcacagaatccacggtcaaaacatatgcatctcgtgttcaggatggaacaaagccctacatctgctcctgtattatgttataaacagatatcaagatctcaacactgatcaggatgatgataagccattccagaaaatccgacttcctgttctgaaggatctcctgaagaaacctgatgttgtgctcaacaaatttcaacttaaaatcaaggttcccaaatctctgggttagctcgtattcatctcgaaggtattcccagatctgagcat

SEQ ID NO: 285155 - DNA, 476 bp, Zea mays
aaaaaaaaaaatcatataaaatctacattttcacggcagcttgaaccaagttacttccattttttttacagtagacaaatcacaacaactttatttttttacagaacacagctcactacagttcacacttggcagtagaaccaaaaccacctttaaccttcgagtcacaactatacgacaacacataataagtaccactcgacgacacaaatttacacctcctaacggcaacttacaaatacaacaataaaaccaagggtaatcctcttaacatatatggacatgctcacatgcatctgattttatctcatgaaatgagcctacatatatggggtcgaaactcgaaaaccgccaccaccagtataacatagatgttgcgacacattcatgcagccattggggcatgaacggcatccaagctgctaggtgcaatccatggcgatgttcgagcataacatgccttctcaagtctccag

SEQ ID NO: 285156 - DNA, 460 bp, Zea mays
agaaaaaacaacagcttttagctagctaatttttaggggttttgaatccaggaacatgttcttagttcatttcttatcgatatcccgtatataagaatttgcttcctactggaccgataacagatgaggctcccgggcccaaactcaccttctctagttcaccgctattgcggtattgccacagcaagctatctagtatctacaaaaatagatgatggcatattaacctgttacatcattacaacacgggcaccctattgtcccaatcaacctgtgtttccaacgatctcaacatcctccccagccttcgccatttcaatcttaacggaaggtcctgccgaatcggcattggtaatcgattcgtccttgctagcagatgcagctcccttcagtccctttttcatcttgaccttctgagcccagcccaggacgccctgctgcacatgctcgttgaagatct

SEQ ID NO: 285157 - DNA, 386 bp, Zea mays
aacgttatcaattacccattacgttataaatatgtgaaccaaacggcaaagttctttgttgtacgatacaaattcagttctttgtttcatctctcgctcgctctttattactcactccctcgtgtatcaactgaaacccaccacacatgtctaacgtacacacatcttggctggcttccacatcacagagagagagagagagagagagagagagagaggattcagacttcagagcctcgagagcttgagctgctgctgcttgatgagtgggcggaggtactcgtggtacccctccggcaccaccgtctcgttcagcgggtccttccacgcctccttgtagagcgcagggtacacgtcgccgtcgtaccgccccagcacagacccca

SEQ ID NO: 285158 - DNA, 435 bp, Zea mays
gggtaaggctttgcttgttcagtagtagtgaaattccatatattattgtaccacaaagccatgagaggcatacacaagatatatataaatttatatcgctgctgtcgacactggaaacctgcaaccagcagctgtgctaagcaactagctacttaactaataaacaccattactactagcgaaacagggggacactgttactactagctagcactggtacaggcgaaacacaaacaattcctttgataaatactctaggacaacaaagcaaacgcccttattcatggagcccacggcaagcttcttttgcaagtaagaaaaaaggttgcaaacagagggacgagagagaggctctagctgcggctgctggtagccccccaccaaagcaagcaaaagccactcgtggatggatggagaaatgacatgttatctatc

SEQ ID NO: 285159 - DNA, 480 bp, Zea mays
agggtcagaaacttttcctcatgctttccactagtaaataacagcttatacatagtatagcacagctacagggagattcttggccatcaaaagggacacaagagtacggggagccatggtacacagactgcaagagagaaatcatcgtcatccaacccgaaaaaaaacaggggaaagacgctctgatcttccccccagtttggaatccgccgacacttgcccccagcccccaatgggttgggtacggtcctccttttttgcggattacaaaggaacacagccatacagacacttggcggaacattgctaatgtttcctttttgctgtaacataagaacccgccgcttctgagggatgtaacgtttatgttgtcagtgatggacccaacgagtataaatatcaggtgcaagctctctggctggctcctgttcactctactgagacgacttccagtcgtactggaggctattgaaactgttc

SEQ ID NO: 285160 - DNA, 338 bp, Zea mays
ctgactaagctgactaattaagttgattccagttctggtatcattaaaatacaagcgaaagatacctgactgagcgcttgaacaaaaggccaactctacaaaatctaaagcgcttgagtgagtaaataattcgaaatccatcgcaaggatttggaccaaaatcgcccatccaaacggccactcggtagcttcgaacggcccagttcatggcgatggcgaccaggtgtcggcgatggcgccgacgccgacggcccatcccttgacgagctgcagcaggatctcgttccacgtgtcgatgggcccgggcaggcaccagtgcacacagtcgttgggcatcc

SEQ ID NO: 285161 - DNA, 278 bp, Zea mays
gggtaaaaccgctgctcgggtctctgcagctgaacacggtttggtattcttatcatcatgtaaaatacgtacaacacattgcatgactcgtcatgctcatgcacgcacttgggctgcagctgggggtgcctgctttacatgcacgcgcgcaccgacgggcgaccggtggtgctgatcagaaatgtacacgcctttcagcctgtgaggcaggcaggccgagagagagagagagagagagagagagagagacgagatatttacacacgcacgcacgcacc

SEQ ID NO: 285162 - DNA, 391 bp, Zea mays
agcacctgcgcactggtcagcacgtcgaacatcaaggattcaaggttcattggttcacaactcacttcactcatcagagattttggaaatacccaatacatagtagacgttcagatatcctagagtacacacgagggtgctaacaaaaataatctgaaacatatatggttcagcataacagcgacaagatagtcatacagagccctgagatacctcactcgctaacagaaagagacccctgcctatgaggagacctgctaacaatggggcttgcactccttgatctgttgacagctggggaacgcgacaaagatctctcccgaggtcgaggagccggggaccttgaatagtgctttcgcttaggtgctggcgagtagcttcggctttggga

SEQ ID NO: 285163 - DNA, 552 bp, Zea mays
  unsure (1)..(552): unsure at all n locations
atcagcaacagatcaattaataaagtagcaaaacaacagggttgctagtggattagcccagcagacataaaattaagttattcaccctcatgtacgaattaaaccttataactccaataagacagctacaggaacacaaaaaaggattgcaccttgtgactgcccaatgccatcacgctggagatggctcgtccgtccctttattcacctcagttccgcctccaccgaggtttggcggatcactgccaacagcatcagacacaagagagacgnggccggtgctcgatgacctcgtcgatgagcccccattcatgtgcctcctccgggtccatgaacatgtccctctccatacactgctcgatgcggtcgatggcctggcccgtgtgcttggcatagattttgttgagccggtcccgcaccttaaggatctccttggcgtggatggcgatgtctgacgcctcccgtgacgcgccaccggagggctggtggatcatgacccgcgcgttcggcagcgcccgcctctccccgctcgccccagcggcgaggagtagc

SEQ ID NO: 285164 - DNA, 252 bp, Zea mays
taattttttttttttttttgaagaaacattgggatgaattaagcttagggaacatgaatgtgtgattagataaaagctgtaaataacagttcattagtttccatctcacatcatggtggcagaggattgccaaacctacgccggatcgctgacatgacactcctcatcctgttaatggtgtgaatcgatgattgtgtgccagcggcattggtgaggaggtccatgcctgtcatttgaccgcccacgcgtccg

SEQ ID NO: 285165 - DNA, 313 bp, Zea mays
agccgacgacacacagtctcatccctcccaatgatattattttcgtcctgattacacctggagaagaacaagaacccatttgggttgttttgccagtgtcgagcggccggatgatgacgacatacggtgagctgcacgtacacgcttacaatgaacatacactagacgaggaagaggaacgttccgtcgtcactggaacgattccggcaactgctgtccggcgaggaacgccctgaagaggccgagcgagcgctcgggctgcgagaagggcgcctcgtgggacgcgccgcgcaccgtggcgaaggacagggcg

SEQ ID NO: 285166 - DNA, 567 bp, Zea mays
cacatgaattctcagggaaatccagtattatgtgatgcgctcttacatgtcgacaaaaatacaaaagcccttcaagtccataaatctgagagtagtagttgcgaaaccaaacaatccaagaaaatattgaccgaagatgctacgatgacccatgaacaatcgcttttcagtcttccgcatgaagcacgttttgacagctccatcatagcaacctttgagtcacatggtctcaaaagtctcagcattgaccatccaatccaaccgatgttctcactagaatgcctaaattttataaaaaggcccaaacctaaactgccaaaactaagatatccctgaacagcagccaacaatttgactccggacaagaataaaaaggttccatgcgctctttcgaaaacatgacgtctaggattcacaaatcagaaagtccactatccttccaggatccatcaccgtcgccataagcgcccaagtttgctctgttcctgcacgcgccgctggtgttcctttgaacgctcaataaacttagcagcaacatcatgaccttgataggatgccagcactgtc

SEQ ID NO: 285167 - DNA, 330 bp, Zea mays
acagttatgcttcaaactgcgaaagcactccttttggccttgatatttttacagcaaaaaatttacaaaccctgcattgggggtaggtaacatctgctatgctagcattattttacaaaataaacgaattgctagtgctgtcgagattttcaactgccccctcaaaccaaagaaaaatgaactctcgaggagaaagttggtgcgaaggccattgcctcttctgattagtcagtgcggtgcccgtgtatgcctgccaaaatcaggtagatcaagggaaagatgtgcttgattaccagcgcccatagcaacggacacctctgtatgtgcacg

SEQ ID NO: 285168 - DNA, 338 bp, Zea mays
tttgtttttttctttttttttttttttttcgggggtctaagcatctattcatctgcacatggaggcagggagggcaacaaaagaaatctaactttcaaccaacaagatacatgtttgagcctcgcgagcgataaatcaggggccaaactccactgtaaccccttggaatcgaaggtggaataactgccacgcacacaatagcaacataaacatcaggctgacccatcaatgggctcattctggttctgtcaaaccaaaactaaaacaaaaaacgtaaacatactgcagggatattctatacaagttcatcactgaagggcagcagaacagtttgcaag

SEQ ID NO: 285169 - DNA, 407 bp, Zea mays
ttttgttttttttttttttttttttttttttttgggcctctaaacaaaacaaggggtgtaattgcacggacaaattattattcaagcagagtacggagcagcagcccatggcatggctagacagggaattgcccctatgagctagctaacactaccgctaagctaacaaaatacagaggacagaaggaaataggcaggggttcttccaaatgatgggacattgcacatacagttgtcccgaaggacccgacccacccaggccacattattcacttttgtcccagcccaggacccctacctcccggaagccaggtcatcagatgcctcccaactaattgtctctctcccagcttcgttaggcatttgctaaatttccgacagatttaaatgctggactttgaaggttc

SEQ ID NO: 285170 - DNA, 529 bp, Zea mays
ccagagcggggagccttggtttgctttggggctcttgctcctaaacacgccttatgtccagagccaaggtttgctctttttacggctcggcacaaaatcgtaggttcctatacaatctgagatgttcttacaggatgaaaataaaaggatcctacaatgttgaaatggctacatattacacaagcgatctccggggccacaggtgatcataagactgccatcatcactggatttgcataattttttatcctgaacagttgattaatcagcatgtgtactatactcattagaaggacgacattagattcataggctaactaaatgcaaataagtttactcaaattgagtaaaaccttatcttctagcacatctcacattattgggatggttgcaacacaatttcttgctcatctcgttgatcttttgatggaaccctaggagttccaaagggtaccttcggctcaggttctagagtcaaggggattgacgatattatttcttttgttgcttttgcaaccttggagcaatg

SEQ ID NO: 285171 - DNA, 359 bp, Zea mays
taaaactattataaaacagggatgtttatatgtttttggggtaatatcaccgaggcaaactgatctcagcacaaccttgtataatgtctatctctacttagcaactcttcagttagccgtataaacatctaccagcaaaagaaaagtatgtcacttgactgcgccaaatttaaattataccaatgttttagacaatgttgaactgctgagccaactcagacattggattctttgaccgtggattcaccttcctcagttttcctcttcttggccctaggaaccaatcttttaacgtacgaaatataagcatcaacgtcaaattttctcttgcaaccagcataattcatataacgtatctt

SEQ ID NO: 285172 - DNA, 566 bp, Zea mays
catggggaaaataaatacattggtgatcaacacacaaacccagatcagtagtagtagcaaacatgttttacacaggctccattccggggacctctttcacctctgttcaccctgtaaaaactagcactagtagacagtagtcgcaatagtatcactgactcagccctacgctactattgtccatggattggtggcttggcttccatccaacgcgtgtactgcacacccaacagctagctccgagtccgacgtcacaggtactgcgcgtgtattcggttcctgttctggtcccaccacaccttggccctctcctcgccgaacctctcccggctgaagcggacgcggcggagctcgcgggtgccatcgccgaactcgcggatggtgatggacacgccgggcgagtcatgggagatcgcactccgtggcctccaggtcgctcgcgttgctcacggacacggacgcctcgtccagggacgacgtggtagcgcgcgacgggtcgaggtgcggagcggccggtgccggcgccggcgcggagttgagcaggttgaagtggtgcgcctcgctgg

SEQ ID NO: 285173 - DNA, 423 bp, Zea mays
aaaaaaagggggtatctttactcctcggggggcaacaaattattttccccttacaaaaggacagagcaaaagaatattctaaacgtacatcgccaacgtgcaactgaactcccgtaacgtacacaaggtctacggactacgagaacaaaaaaaaaattgtgacatcttgcgttattttctgtttccgtggtgctgcaaatcagcaaaggcaggaaggtgacggcacaccatcacacggatcacctcctacaggctttacggcgtggcaggtgaggttgaaacacagatgaccacttatttctaacagacagggctcatcaggctgcaactttcttagcggtcaccgagttgataatggtggcgaaatcagggcccttcaaagaggcaccaccaacaagaaaaccatcaatatcttctttcttt

SEQ ID NO: 285174 - DNA, 495 bp, Zea mays
gaaacaaatagggtctatgttcaactggtcaagagtaaataatcatcattgctgtaatctagggcatcacggcgaacaacgatggatagaaatatagaatacatctttcggctggctcaacaaatcgaggaagcgtggagaagaatgcaaaggttaaaactcatgctaccagttatcctaaaccctacgccataagctacctatatttcattgttttttttctctcgggtagccgtagcagcaccgtcgtcactcgtctcggctgagcctctctgctggttgtcgaatcttttatcgctggccccgtcacgccggaaagaggacaaagactcgagccgccgacttcacacggccacgtcgggaacgaagctcagagcagcgcgacggcggcgagggcggcggcggctaggaggagctgtgacgcacgggccgcggcggcgaccgaggtggcgagttgctcgccgccgaggtagaccatcgagccgttcgtgggct

SEQ ID NO: 285175 - DNA, 568 bp, Zea mays
aggtctaataaaatactagtaaaaagccagcttcatgagtctctacagtctacacagatcgatacaggagaaaaaggtaaaggaggacagattgcaccaacagctagcagtgaccctgtagagaggtcatgccaataaagaccaaaactttacaccatttccatttggaccaccgtaagaggcccatcgccagccagatgcagtgccgaccaatcagtatcagtagaactgtagaagagtgagctccatggtacacatgacatgagccaggcactcaaagaatatcaaatctatctgtaccaccagccttcagttgccaagctgctactatgtccgagctgatccaagggttaccttctcaaaccgtttgatctcgccagccaatcgcttcatgttatcgtcgtatacatagggaaccccttcgaacatcgtcttgctgccgttcgctggcattggcacgaactcacggcaaggctctcccatgacgttgatggagtcgtggtagtggtagtatctgatcaggccctccgtcttgtgggtcgtcctcccgtagaggttctgcgacatg

SEQ ID NO: 285176 - DNA, 441 bp, Zea mays
aatggtatggatccaaatttcccaaaaaaaataatccatgtatatatcaaacaacctgaatgtgcatgcagccgatgatcattgtaattttcagatgaatgaaaagcaaacaatctaggatcgcggaagccgaagtatcgcagtagccgagccagcgttgatgaagtaggctgattattagagatggtgagagatagggcgatggtagacagcgagcgcgtcgagaaagtctcctgcacgcgcgcggaagccaacgatgcaggacccggcaggcgcttccaactcgaagggatctccctcggtcaccccgcgcgttctgtaggtcttcacattggtgacaaatgtgagcgagctgatgaccttggtcggcaggcccgcgtatgcgcccatcgtcccggagacgctgaccaggaactcgtaaggctccagctgaaggacctt

SEQ ID NO: 285177 - DNA, 480 bp, Zea mays
caatactcaacttaccatatctttgctagattaataaccagttactgaaatagacaagcattctcaaacaataagcaacgtcaaaactgcacctacaatgtgctgtgtttcatcacgacctagtagaattcaaagaaaagatacaacatgctcacagcacatacagggctttcccttgtcagtgccgaaagttccaaacggtatccattgcggctagtagggctgatgccggtttttggttttcttttgctgcttccacaccagtgagctagagatccaagatttgtttgtttctgcaatttcgtcagagcgccagcagcacaaacgaccgtcttcacctcctgtccatccaaagatgcccctgttttgcccaagtctcccatggattcctgaagaggggtacacggacctaacgactcctgtatggcctccttcgaggattgcttcagctgaacctattggtccatcatggtcatttct

SEQ ID NO: 285178 - DNA, 476 bp, Zea mays
  unsure (1)..(476): unsure at all n locations
tttnttttttttttttttttttttttttttttttgtgggggggagcaataacttaatatgtcaattcaatgtacaattatatggcattcatgctaaacaaaaagaaaagcatcaatagcttccacacaaagtatactgagtatactatgtgttatgcaactactgcacctataaaccatagacatcatgccaacaaaaggaagcctctagcactaaaagttcacttatacattggggggcaatgctatatcacaagcatccacgatcaccagtatgcaagcaagctgcccgttgcaccacacagccgagcccccaagatcttggcccatgctccctcagacccagccaaagtggatccagccaacatgttgcacttcgtccactatcttgtagcacagcacaagacccttcagaaaatgaagcacttaagctggtatcttgcattctgtcagaaccccgatattggaacttctcgc

SEQ ID NO: 285179 - DNA, 344 bp, Zea mays
gcggtcgacgacgcccctgtctgcgcttggcgaacgccgaggcgcgggagctcatgatggccttggccatggagtggtcgagcccgaacgcggagttcgggccgaccatgggcgacgccggcatgtgcagctgcgtgtccgccatggagctgtacgccggcatgtcgccggcctgcttgagcgacagcgcgtgcagctgggacagcatggccgggtcgacggagccgagcaggtccgcgtagtccggcacggccctggtgctgggcgccgcggcgggcagcggcgagcccatcccgcctccccagccggcccttggcgacgacaccttggcgaacagcttctgc

SEQ ID NO: 285180 - DNA, 481 bp, Zea mays
agtgactaaaatgaataaaattaagggactaattagtccttataaacccaacaacactcggaggaaatatgtgtgtagggaatcattgttcacataggaaagagaagaaacgtacatgtaattcatggcagacaaatatttggcagaagcaagtcgagtatcctgcctccaccgtgagtgatgttcgcaccagaaacactcaccgcatcatcatggctcatggtctggagtctggacgatctcacacagtcacaccattctccgagctcccctttaacagtcgttcgctagactttggctttttatggtgctgctcgcctgattgtacagctccattgaagctcccatcgctgccatcatctctcatgctcaatgcagcttcgttttcgaagccatgtgaaaaaggatctgaatggtagcggagaagctcatccagtaagggcttgttcggttattcccaaaacacatggattgaatgaga

SEQ ID NO: 285181 - DNA, 298 bp, Zea mays
ccccacgcccgctcctcttgtctgcatcagctgccgcgggcctcttcagcctccatggcgggtggcggaggcaggctcttcctcctgcagcgtcgcggcccctcggctccgtctctgacgcagctcccgtccggctcaccatctcccgcagttattctctgcgtgtggccaagggcaagaagaaagcacattttgacgatgaacacagccatcgagcggctaacatggcactatggtgcaacttcctcgttttctccctaaagtttggagtgtggatttcaacttcaagtcatgttat

SEQ ID NO: 285182 - DNA, 384 bp, Zea mays
aaccgaaaactgccgtcaaatatggggagttaaccaaactttacaaaacaatctgccttttagagtactttaaaaacgccttttccagcttacaaaccggcctttccaagacaacaaaatagaaaaaaaatcgacgacagggctacatgcctacagggcctagagcaaattagagaacacctaaacaaacttgtacagacgctcaacggagacagggcaaaattcttcatatcgccattcaattcacaccatccaggcgcggctgccgctgctaattggggctgactaattgctccgttggctgtataaatgcaaaacaatcaacaaatcgctggactatttttaccacagaggtatctacagaaggcatgagttatggttatt

SEQ ID NO: 285183 - DNA, 414 bp, Zea mays
gcataattgctttgtataccactagtatcaattaatcgcccaagctgtacctcgaaattacagcaccgaagtaaacattagctacggatacatcagttcagaaaaagagtcaccacttcttcaatatttctgtaatcaattgagcccacatcttgtagtcggaaatttacatcacaacgtttcgtgcatgaaacacctcagatttccagtatagttcttatctgctcaggagagtgcttaaccaacgaccttgggtcaggataattgttataagattctgctagagctcttgccaaaccatagcaggcatttgaacgtaaccttggaaccctgcagttgctcaaattcaggcaaaggaaccttctgttccagtcacaatgccaaagagtgacttcaagcatttataaaagcatt

SEQ ID NO: 285184 - DNA, 719 bp, Zea mays
gcgaaatagaaggtggattgattcgattgttccttacaaatcggccgtagacctctctatttatagaggagggagcctgaactctttacacaactgattccgagctaatcccgcgaatatagctaacaatcgtagcacaaaactcggaaccctaaactgctctgcgcatgcgcggaccgtccggcccacaggcgcgaactgtccggaccgcggaccgtccggcctcagtgccgaaccgtccgccggctcaaaagcaggctcaacacagctaatacgacagaatcccgacgaaactgatcaatgcgccgcgtgcttgtttccatgataatctatttatttgataacttttaaaaggactcttaacaacttcagccactcatggggtaatttcagggctcattcctctctaccgcctcaattgccgtgaccagcttcagcaatctttggtcgttgtgcagggaagtacttgatgcccacgaggtcaccaactctgctgataacatcgagggctttcgtcaggtcctccctagtgtgcgaagctgaaatgcagaaacgtgctcttgcgagaaggagaggagtcacaggaaacgccacagtgataacggcaaccttttgtctaaagcactcccgagaaaacgcaggaatcttggccggattgtagagcattatgggcatgacaggagagtcgttgtcaccaagaaccacaaagcccatcttct

SEQ ID NO: 285185 - DNA, 473 bp, Zea mays
gatgtggccggttggttttgccaggaactaccgctgacaatcgtctgccggccggcgcccgcatcgcagatgccagcgggcggctggtgagccgggacgcgcacgtcgaagtgcaccgtgtacaacctctcgtcccgagcggcggcggccttgtgcgaggtggtggacgagccgttcggaggcctggggcagcgggcgaggagcctctcctcaggcctcgcttggctttgtaacgacgacgacgcggcggccttctccttgttcacgtgcatctggatcacgtggctcacgtacacgtgggtgatgctcctcttccatgccttcggcgcgccgacgtttctgagcacagggtgcttgttctgatttccaggcgtggtgaagttagcggattcagaaattgtattggcgggagctgccagtttgcttgaagagggttttactaagtacccagctggggtacaaggcaacagagt

SEQ ID NO: 285186 - DNA, 283 bp, Zea mays
caaggacccccatcctttattatctatcaaggtttatataacattcaaagccccccgggtttgccaatcccgacataacaaaagcttcctttttccataccaattatacaacacccccccaatacatttttttttcgggcacaaagcaaaagacaatgtcgcccggctaaaaagggggtcagggcacagggtcacggcctaaaccataatttccagggtccaccgatatagctcctgctccggcccgggcaggttgacggacacaaggccgggggcggcattg

SEQ ID NO: 285187 - DNA, 603 bp, Zea mays
gttgccaggttcccagatgggtacaatttgtctcttgagaattcaagaagcaagctacaagacaagctagtgtttgtaaacaagaccagtgttattttgacaaccctaaagcagagattgtactcgctatgctaatcttcatatccatgaacagtgctaccatccagatccagtggctaatggcaaggccagtcagtacaccggcaataagtcctgccgtgctgtgctggattattgctcatacagcagcaagttccagttttaatacacacacatggatacatcaaggacatcgcagatgactggtagcccaattccttcattttcctgatcgcgacaccagggagagagttcatatatggaagacgaaccggcgatttttcaaaacctctgatcatggatggttcctaatatatgcaagacgaccaaacacctggcccagacgcccagtctaggactatgagcaagcggcaatactgaggtcgtgcgctaaaaggacacgccggatcattcctcctgctcgatcatcctccggacgtcatcgatcaccagccaagacttgtgcccgccgccgatcacctccgcctgtttccgggagtcgct

SEQ ID NO: 285188 - DNA, 517 bp, Zea mays
aaaaaggtatttgttaagttacagctgaagatggtcacatgagtagaggcattcatattagtacattatatgctaattacaatggagtgaagaactattttacaaacacatatatacccctcgccaaactaagtgatcacttatttatccagaaacctccatgccatcctgaggtctattagagaagatggggctagaaacctcgagcaaaagatgacaaaaagaaatagaaaatcctctggatccaagtccagtcgtatttcctatttcccatctttgagacgaactgaggaacttgacctattcagacgatgcaagtccatcattgacaatgacctaggcacagatgcatcaggcacgcaagagccagatcggggtgcggatataaaaccatcaggtgaacgcggagaatcaagatgctcgggcagttcatgctcttcaatgctgatactgctgctgctcctggaactgctgctagccaaagtcaccaaagagtttctactcaaactagcatgcc

SEQ ID NO: 285189 - DNA, 369 bp, Zea mays
ttttttttttttttttattatatattctatattctatttattcataatcaaagaaaaaactgattaccgaataaataccgtttccgaccgttttcatccctatccaccgtccccagccgtgaagaaaaaaaaaaagctccaacagcacaccctcacggcactaacagcacgaagatgaatggcaaccaggagccatcctcgcctctcctttttcacgagcctcgcctgaagcctttttctagacagctttcgtcgtgaacttccaggccagtggtcagaattcagaatctccaaccatacaggcaccatctgtgagactgtgatctgtcttgaacctcctgggagttgtcaatttttcgagctcaccct

SEQ ID NO: 285190 - DNA, 432 bp, Zea mays
gcaatatgatacagtagtatttctatattacgttgacgaatatgatagccatggatgaagtaaaccatatcccgaaaaagggaacacataatatatcgatatccaattgggtgaaagcaacgcgtttaaatcaaaccgtaacttgaaaattttggacccatgggcggtgaatccacccatcaggtatccccatttcaggggcagttgtaaaacaaggtatcttcgtaggttattagtctctgctcagaaaacatcagggttgaaacgcccaggaatggagctgctctgctgagcctgcttgaggtgcattgtgagggcatagttgtttatctctagtgtcctaacttgctcctggtactgcaaaacaagttgcttcaaactctggacctcgtgagacctctcatcaaactccttttggcgctcatgttgaat

SEQ ID NO: 285191 - DNA, 654 bp, Zea mays
gtcatgtaccacggggtgccgctcggggtggcggcggtgcccgggttcgagcagcccgcgcacagcacccgcctgctccagacccgcgtcattgtcgaccgcttcaacgtgctccaggccgacgcgcaggacctcatccgcgacgccgcgatcaacgaccgcgtcgagctccgcatcaccggcgacgtcggcgcgaagatcctcgtgctcggcttctcctccccaaaagtgcaggtgtcggtggattgcacgatcgccatcagcccgaggagccagtcgctgaaatacaagcagtgcggcgtggacgggctaagcgtgtaggaagccgtcaagccgccgccgccgccgccgccgccgcagaagctgtagtccggtggagatggttagagtgggtggatctgtgcgtcgattctaatttccctaatctgtggggtttggtttcgtcatgtgcattaggtggtaaattttgcgctcttactttaggaggaggccgctggttttgtgaattattgctgcttgcaatcagtagttatcagtgtgaccatggttatacgtccatcgatcgccgtgggcaattgcttacgagctaagggaagtggtgggcaaagatgtgattatgtgatgggggcgaagaggcgatcagaatcccgtcgc

SEQ ID NO: 285192 - DNA, 704 bp, Zea mays
cccacgcgtccttatctattgaactgtcatctgcttcgtggtggccgcatacatgaagaataaccaactagaccatgctttgcagtggctgctgagtttagagaaggaaggacttcaacttggtgtcaagacaaatctcatgttactggattggttgtctatgttgcagctagttccggaggctgaacagtttgtgcagaagataaagaatcttggagaagagcccatagaagtccatgtgttccttgccgatatgtatgcgaagtcgtcccaggaagataaagcccgcaggtccctcaagatcttggaagagaagaagaaactattgaagtctgatcagtttgagagggttataagaggccttgtcgatggtgggttttcggaggaggcaaataaattctacaaaatgatgaaatcctgtggctttgaaccatcaaaaacaatcgaggtcgctgttaaggctctcaggattaggggcggttctcatcgcactggtaggtagagcctgtacgccggcagagtggcagtgatctactgggcacgcagtcaggcaaagagggattctggtgtgagaaccttgtggcactgacacggtacaatcaaattgacaaaactcagtgctgaaagatggtttggccaattttttttttctggttgtcaattgtctcgaggcgcgacgttgcttccatagactatgtagttaa

SEQ ID NO: 285193 - DNA, 545 bp, Zea mays
cccacgcgtccttccacgcgtccgcccacgcgtccgcccacgcgtccgctttggaatatggtgccaaggcaaagtgtattgtccgtgctgctcatgccgcaacacctagggacaaaatgagctccgaggagtcatctgcgatgctcaattcaagaatcgttgcaatgaaccagttcatccacaagcttcaaaaagagaacaaattgagggagaaagagcgcaatgaggcccgcaatgtgctaaggctgagggaagaggagctagcacaattaagagcaaagctcaacttgatagaaaggcagggaaaagctactgagaatgagatcaattcaaaagttatggagaaaacccagacattgaggggtgaactcatgaagatggaagaagcgatgtataagcagcagcaagagctctgtgtgctaaggcagcgactgcaggaggttgagcgtgaaaaggctgatagttgtcagccagggcagcaggatgtaattggaggtagactgctggcacggctatcagagatgcctgcaggccttgatcaatca

SEQ ID NO: 285194 - DNA, 572 bp, Zea mays
agagaccagagcaaggatgttcacaaacataagaacaagagtcactccaaggacagggaatccagacatcatagacaccattgtagctcttcggaagatgagcatgagcatgaacgttggagttccaaatcaaggcataggcatagagatgatcaccgctactctgacgaggaacactctgatgaggaacacaggaggtcacacaagcatcggagggagcatcactccagttctaaaaggaagcacgaggaagactgataccaggttcgccggaagtgtctgtctagatcaggtgccaagtttgaatcagacaagctgtctgatgaccctgcccaaatcaactcagggaacaactgaagcgccgagtaaactgagagcaaaaatcagagcaccatcctgtaatattttgtatcccagcagtaacattatgtccttaggcctctgttttgtagccaattgctctttcgatttctgtatttgtttcgaacgttctaactaggtgtctgtccatcttatttgaaatcagtgacctgctcgccaagttctaactaacaaaataaataaaaaacaag

SEQ ID NO: 285195 - DNA, 452 bp, Zea mays
attgaacacattttgttgttgcccatctaggtctaccatgcaaaactacaggcagagaaatggtcctggattcacaagccgaaacacaaacatatttctgtgccaagtggtcactaatgcgtgccttcttccaaaaaaaaattctaacttcatgaaaattgaaaaaaagggagcattatgcctttgtcctgcagatcctcctagattcaattaacatgtgcgccagatgactccaattctgaatcaggtcctgtgatcctccaataagggcactgaagcagatgaaccaaccgttgttgatgtggaagcaatagcggtattggagatgtggtcaggagagaactgctcaaacctgagctcaagatccggtagttgctcaacagatacaccattagagaaaagcacgccacaggaatcaggaccatcggtgagcgaaaaggacaggtcattta

SEQ ID NO: 285196 - DNA, 411 bp, Zea mays
aaacacttaatctaagggcatgtacagtggagagacaccaaaacagttctccaaacacaagagacaactaagagactctattatacaatggaggggctataaatgcagtctactaataaatacagaattaaatgtttttgtacaacagcagattgatagaacagacgacaaattcgttcagtaggaagtgagaccgctattactacttgggttacgagccagaggcgtctttttacggagagacgggtctaagatttttttgcaaatacaccccttaaacagcttaagagcctccacattaaacaccactgtacatgccctaagagctaatatggaatttccacacacacacctgttataccatgctacaactacttgaacctttttttcacagcattaaatgggtgaaga

SEQ ID NO: 285197 - DNA, 517 bp, Zea mays
cccccccctttttttattgtttctctttttctttgtatttttattcattgggcaacatggtttctagttctaacaccatgagctagtttcacgacataggaccgttatatcacgttactgaagtaacaacgacacaatgcaactgctgatttaacaccagagcacaagataactgaccaaacctcggcatttccgatgactactaatctagatccagcagtactgctgcttcactgctagtgctaaaactgcgcagggctacagaagcgtgtaacaccggcacgagctagcttaagcgttatgtcattacagagcaacctcatcagggtttgcctgcacgaagggatccagaatccagactctctttcgacgcttttaagaaaatcagaaccctcaaactggttcgtgaacttgaagtgggaacgaatgagcatgctaactgactaagggcactagatgcaatgcaggagcgctagatgaacataaaagcctggagatatgcgacggatatggacta

SEQ ID NO: 285198 - DNA, 401 bp, Zea mays
cccacgcgtttggcgtgatcggcggccaggccactgccccttccagtctcgccgtcgccggagataggccgccgccgccagccggaacgcaacaccgcagcggttacccgcagcggacggcaggaacccagtcctccaccgctctgcctaccctacaatcgggatctcgcgggcttcattaggggggaaaatcgaccagcgagcgagtgcaagaagctcctgttcgatcgatctcgggagctccgatactgcgcgcaatcccaaatttgacacagagtcacagcaatgtcagtgagccatgccgacgagcacgagatatctctgtgcgaccccagctccgaggacgaccggcggcgccggaagatcgggtccctgccgctcaaggctatccacgcgctacg

SEQ ID NO: 285199 - DNA, 361 bp, Zea mays
tgaaaatatctctcattgataaaacagtgcacaaggccatcgattctagatctgctgtattaaagagatatattgcagacattgggaagtcctggcctgtgttcatcgtttgtggtggaattctccctgttttcctgtcagttatctggttgcttatgattcgttatttcgttgctgccatgacttggatcacagtagtcctcttcaatgcccttgttatatctgtaacgatgttcttttacatcaaagctggctggataggcaatgaccccttaactgttgtcattggtgaaagtgatccatatgttcacataagtggacgggaaataagtcaccttcatactattacaatcctaatgac

SEQ ID NO: 285200 - DNA, 342 bp, Zea mays
ggatccatcaccaccttattccttataagctaataattagtatatacatgaggagtgagttgattccaccaaaattgttgcaatgaacttatgatgcaccacctcatggagtgactctacaaaccaaacacaccactagcgtggagtgcatggggtccgatccgtcctcccactttgaggattggaaaaggtccgcgagctgcagggtcacatgcgcggccggcaaagcgggcctttcctagctagtccccctttccttcccgctcttctccctgcgtttccgtctctccctctctgtcttcgtcgcacatgcgtttgcctgcgacaccacaccacatggcc

SEQ ID NO: 285201 - DNA, 339 bp, Zea mays
gctcccgtcttcccgcccaccgcccgccactggattttagctaccgcccgtaccggcagctccagcaagagtagcaagagtgccactcacacacacgtcacactgcgtagtgcgcaaggctccgaccttgatgcgcgtacccgccacggtccatggcctccgccgtcgccagtaacctccccgtcgccacgccagccgccgtgccggtgccttacgggaggctcagcccgcgcgtgtcattcagccgcgacgcgcccgccgacctggtggatcccgtcgccatggcagtggccacgccggagcccgcgatctccaacgacttcattgacttcgagttca

SEQ ID NO: 285202 - DNA, 249 bp, Zea mays
tttcttttttttttttttttttttttagcaaagcataacaatattttctggacgtgctgagttacacatgttccagcgtgtagagaacattgtgatggataacgtggttacacctacttcaaataatattcactcatatataccacatcgtccagaagcgttcacgtatatctgcattacacggatcacaaaaaacccgggccttttccctgtagaaccttgccgtcctgcccagagaacttgactggg

SEQ ID NO: 285203 - DNA, 276 bp, Zea mays
cccacgcgtccgttcaaacgtcactcgacaggacaatgcttcaactgagactacaaaatcgacagtgttaaatgactcttgctgtgctgaaaaatataaggctgatgcctgctcaagatctgtatgcgacacatctacagatccatctgtttcgggagttaatagttccatgcctgatttttccatattaagaggagaagtctgtttggatgatcttactattagagaacttcaggaggcgtttagagccacgtttggccggcagactaatgtcaa

SEQ ID NO: 285204 - DNA, 632 bp, Zea mays
catcgagatcgacagtagccacctttctggctgccggcgcacctgctgcctccgctgcggaacacccatggccgctggagaatcaaggtgtgctctgtgcaatttcgatatggatggggaggagattgaagagtgtgcatacctgcatctggatgaccccacccacttgctgcacgctgtggtgcatgcaaatggttatgggcatcttctcagggtaaatgggcgtgaaggtggctcaagattcctcactggccgtgacataatgagcctgtgggatcgcctgtgcaaggtgttacatgtgaggaaggtaactgtcatggatatatccaagaaacatggaatggactacagacttcttcatgcagtcataagtgggcacccttggtacggccagatggggatacaagtttggtgccggcagctttgctctcacctcagacacctaccgaaatgcagtagacatgctttccagcataaacctggcgctgtacttctcgcaccgcagccaaattaggactccattgcagaacacaatcgctctttattgggcgctctctaatcgccaactagtaaccatccgggaccttttccgcttcattatgcacctcctccatcaaggtcaaaagatgtca

SEQ ID NO: 285205 - DNA, 353 bp, Zea mays
agtatcttttgtgttccctgttgctcattatattgagaagcaacatctatacgcccattaagatcagatgacattatagaccatatctccaatactgcatgaagaagcttctgctatgtgtttaataatagatcaagcctgtttgccgaaaagatcaaactggatagtactagtactagaattttatctggatagtacttgaagctgatgtttgaaccacttttctgctgcaaaattgtagcatcccatttttgtgtttctctcagtacattgattgtggctactcatagtgctaatttctgtcgaagtgtgaaccactcagattccagtacctatagagagcagcaggacct

SEQ ID NO: 285206 - DNA, 548 bp, Zea mays
agtcactgcagccaccagatccactttctgttaagaatgctattgagcttcttaaaaccattggcgcactggatgatatggaggagctcacttctcttgggcgacatctctgtactctcccactggacccaaacatcgggaaaatgctgcttatgggatctgtattccagtgcctggatccagtattgacaattgctgctgctctcgcatatcgaaatccatttgtgctcccaatagatagaaaagaagaagctgatgctgtcaaaagatcatttgctggtgactcgtgcagtgatcacattgctcttgttaaggcgtttgtagcatggaaggatgctaaaaggagtggtagagaacgcactttctgttgggaaagttttctgtcccctatgaccctgaagatgatggacgacatgcgaaatcaattttttgatctactatctgatattgggtttgttagcaagacagcaggagtgaaggcatataaccgctatggtaatgatctggagatggtttgcgctgtcttgtgcgctgggctgtacccaaat

SEQ ID NO: 285207 - DNA, 938 bp, Zea mays
cacgctctcatgtgaataccttgacttctatatcggagatgactccttcagtaaatcagaagttgagatttcaaaagagatgcctggtgaaacaagtgaggagttggagtttggcactccgacttctggccgttcctgggattttctgagcagtccgggaagtcctttctctgcgtcatgctctagccaggcatcccatagaagggagccgtcggtagttagggaaggcaagaagaagattttggagagatggtctatggtatcatcaacagtcaatattgaggaagaaatggaaggtcgcagaagtacaggcacacttggtgacatgctcacaatatcgaaagtcaaggaccaggaagaaattggggctgaaacactggggagcccagcacctgagctggaacctgacgagcctttctcatgtttgccaagatctcgatcccttccactttctttgtcctatggagtcgctgagtcaaatggaataacctctggcactcatgaagctgaaaaggaaagaatcaggaagtcgtcatcgtttagggaaaaagtttctagcctgttctctaaaaataagaaatcaaccagggagaaggtagatccatctgtgagcaatagactcaaacatggaggggctgtgactactggtgatgtgaaggaaatctgcaaccatcttgccctagacaatcttcagaaacaacatacttgtctaaacacagatgagaagaacactgtgcatggactcgtgactagttcttgtgagaccaatagtgcagctgatatccctgccaaggatatttcctccatttcaagtcttggtgtcccaggaatctttggtggccttcaggatgaacctagtcctgtatctgtactagatggaccgtttatatgtgataacaataggaggctactgtactcatctgaaaatttcatcactt

SEQ ID NO: 285208 - DNA, 318 bp, Zea mays
aaggaagatgataaaatgcagggagaaaaaagcattactattgtttaatgtttaagaactgcaaatttataggattaacagttacaattctagttacaggttgcagcaaaagggaaatatgtaataacaggatctacagctacactccatgtctctgaagctcgagccttttgagtaccaggtccttccaaaacagaatccgtgaatcacgttcatcgacagctaaggttatatgttcagtaatctgggaactcgatgtgattctgccagacctagaaaacacggttgaaattcccgggcacttagcggacgcgtggg

SEQ ID NO: 285209 - DNA, 419 bp, Zea mays
gcccaagcaaattatccgaagaaatggtcagatgcatggcatccatatactatcttctgcgcaccgaggcgccagcaggaaagcctgagaaggcccgctcgccattcttgtcaaggtcatccacgaatgtcatccttcctcggcgggtgaacggagaggaaaacagcgcaccgaacaacaggtgcacggcggtggaaatagcttccatatcagttgacaagaaccagatgccagatgtctcttacgcgatcacccactacaggttgcttgtggaacagcttgaaagagttgatctgagcgtgtcggagaacagcgttaagttggccttctggattaacgtttacaattcgcttatcatgcatgcgtatctggcatatgggattccaaacagctctctgaaaagaatggcgctatttcac

SEQ ID NO: 285210 - DNA, 426 bp, Zea mays
cgagcaaagcttagcacaagcaagtgttgtttgcccagatgggcccataggctaaaacaattatgcacccataaactgataaacacaagaaacaaagaggtggtagttcatgtacaccaatggctgacccgtggccagaagcagaccaagccctacgaacaacacaaggctgccgtcgtcgcatgcttgattgattgattacacgaagaaaaagaaaagaaaagatgcaatgggtgccaagctgctgtctcacactactgctactaatgttacagataaaaatgatttacacaggcaatattgtacaaaatgacgatccacacaaaacagagccgccgcactcacgggggtcacggaatagggtccctctgcgcgccaggcggagcgataggcattgggaagtcgaaggaaaaatacccgcccaac

SEQ ID NO: 285211 - DNA, 487 bp, Zea mays
ggatataacatcgtttctatattagttggtttatatggataaagatttagaaaatcactactatatatcaatatgatcaagctagaaaatcattgtccagatcatacagatacagatgacaactttattcctaaaccctgatgaatgatggtttgtatacaggcctggtgcagggaagatgacgccaatgctatgcagcttattattagaaataacacaggtgtttgtttttgcctttttggcacgggctgacttgattcctccaaacgctaacaagtcactccagcgacagcgtagccattgtcaaggctaggaccttcaccccattcgccatgtcctcgggtgatgcatactcctccggcttgtggctgtaacctttgtaacagggaatgaagatcatacccattggtgatactctggccatgaagagtgaatcgtggtaggctctgctaatcatctttttgtatgccaggtttaactgttttgc

SEQ ID NO: 285212 - DNA, 438 bp, Zea mays
aatgtttgtctgttacggaatcagatgactagtttgagcaatttggagaatgtggttgtgctcaataaataagtcatgtaccttgtaaaccctattttctctttcataagtaatgcccatgcaaactctatagtctgttcttgtatgagctcgatcacgcttgctaacacagaacttctttattttcagcactacagccctggctcgaacaaacagatctactcaatgttaccaatccatcaagagcactcgggtttgagtaacactttcaaacatcaaaacccatccggccaccatatgtaacccaaaagttccaagcttcatcggaactgctaaatgtcataccaatttgtggaattcaaaaaggaattgcagcaactatgcggttgtaaataatgcattcagaacacgaccaactgggatgttctcatcatttaa

SEQ ID NO: 285213 - DNA, 382 bp, Zea mays
atcctctctaattattattacactaaatcaggaaccatgagggcctagggaattcatcacgttagtctcattcaatcatcttacacttgctaccacacatctaacaacaggacgtgaaacatacatagagcattctggtctgctactgctaacagctccacaaccatctgggcattatttatgctaagagcatgctggtgacatacacgtactaacgtattactggggggggaagttgcttcgtctgctgcttcatctcttgcagcagttccgggcagcattgagctgctccatcagatcctgaatggtggaagaggcctccgtgagcttccgcttcaggttttccacctcttggtcggggcacttcctttcttctgcaaag

SEQ ID NO: 285214 - DNA, 446 bp, Zea mays
aggggcaacttcagccaatcggctccttgaagaaacggatattaaatagctagtgatacagagagctgctttcacagggagcttataaccaatctattgtacaattgcatttacagggtaagcaatcatgacacatgccaaaaaggaaaacactagtccacaaacggtcactaccaatcatctgcgcgcagtcccaagaccatgccaaaactgcatcatttccagtgtttccaaccgtccagggtaggtaaggacgtaaggagcattgacataatttgagttaagctttccaatcaggtgagagatctgcctgcccattcgcgctctctccgcttaagctttgcttgcatcttgttgaatttttcttttcctttctccagaagtgggtctaccactacatagtcatctggatcatctttcctagtcattccatccttggaagaact

SEQ ID NO: 285215 - DNA, 397 bp, Zea mays
agtagaagtatccaaacaccccctaaatctcatttgatgacgaggttcccaataccgacgcaatagtatcatttttatgtcggacaatattatacaaagctggatggtcctgcgagaatcatatcttcaagccgtcctagatatacaaacttgtatgcgtacaaataataaccactgtagcgcaatagtatttacatccaggtatttggttgtgtaaactagacaggcaaatcatatatcagagggggacgccaaggatgagttcatggaggcttggatctcctctagggttcttcctgtggtttctggcactagctgctccacaaacacaactgtgagcccacatatgcttgcaaagatgaagaatgtgccgtaggagttccacaccaggaggaag

SEQ ID NO: 285216 - DNA, 445 bp, Zea mays
aaaaaaaaagaaaagagcaaatgaggtaaaaatcctactttagtccactcctcgatgactaaagaacttaaatttagttaccctattttagtcaccatgtttatatttttagggactaaaagtgactacccaaaccaaacggggcttagagttctgctgagaacatttacatttctgttgggcgtacatacagctatctagtcctgtgcacctgttgatacggtactctggtagaaccgtagaaacacaatgaagataatctatgattaagttttctacagcaaagctattccttttgtgaatctacaagatgtggtaattttgtgagtgccaatggcattaagggatcggggacatgcacatcacacagtggctgccacctgctgccgtagaggtgtgagaagccttgccagaggtagaggcacatgagcttttacaaatgtcc

SEQ ID NO: 285217 - DNA, 356 bp, Zea mays
gtgagggtcagctacatacctgaaacttcaggcatcatagcccaattgttgcaggagatcatgagaagattaaaccttacatttgatctccatatactttcttctggtgataaggagacgcatagcgatctgcaggctttgctatgtggtgttctgcaggtcatcatccagaaactgagcagctctgatgcaaagtccatagtttctcagaccgctgatcagctgatggtgctgtttctgcgtgtctttgcctgccacaattctactgtccatgaagaagcaatgcttgcaattggtgctcttgcatatgctactggtccagattttgtgaaatacatgcctaacttcttcacata

SEQ ID NO: 285218 - DNA, 759 bp, Zea mays
atgtctgcagataaaaagtttgcaagttggaagcattggggagttcctatcagctgctctacagcctccagaaccacgagctgtcgagaatgcagtggaattcttgaagatgattggagcattagatggaaatgagaaccttactgatcttggacgatacctttccatgcttccagttgatccaaaattgggaaagatgctcataatgggtgcagtttttcgatgcatagatcctatacttactgtagttgctgggcttagtgttcgggatcctttcctgttaccacaggaaaagaaggatttggcaggaacagcaaaagctagattctcagcaaaggattatagtgatcatatggcccttgttcgggcttatgaaggatggaaggatgcagagagagaagggtctgcttatgaatacctgctggagaaatttcctttcttctcaaacactacaagccattcactctctccggaagcaattcagctatattttgaaggattccggtttgatagactctgatgggaatacaaacaacagtttgagccataatcaatcattggtccgcggtattatatgttctgggctttttcctgggatagcatctgttgtgcatcgagaaagctctatgtcctttaagaccatggatgacgggcaagttcttctttatgctaattcagtaaatgcataatatctgaccatcccatatccatggctggtctttggtgagaaggtgaaggtgaatgctgtcttcatccgtg

SEQ ID NO: 285219 - DNA, 478 bp, Zea mays
cgccgctgtaccacgtctaaggtataaccgcagtctctatccccccctcgacgaataactttcgtgagcgattgttgcttcagagtttgcagtgtagtggtcaagatcaattgttctgccattaaattcattcgctacatcaaccagtattggcagtgcggtgttgcggcccataaatttacattgattttctgtgtcaaatgttttacatggagaagcaaggtgcaaggatgcgtacggtttgaaaatactggtattgagttttgaagtatagctattgacaatatatagttccagtatttgaatagttgcttcacgcgtttttgcttgaaaactaagcatgtgtccctgttcatgtcaattcccataatcattcttggtattaccttccttttcaaaacaaaatgaataatattctttttctgctagttaatgggatgcaatgatctaaaacagcaaactgcaactactagatgta

SEQ ID NO: 285220 - DNA, 358 bp, Zea mays
agcctgggcacgacccatgcgtttatcccagcacaagcatcatttgtatcggcgtagatctctgaacaagcggttgttcgatacacaacacaaaaaagtcatcttacactttagttacaatatcttccctccgttcttttttatttatgggcgtttagttataaaatgaactagcgggcaacaactattcgagagcggaggtggaggtagtacaacgcatcgatgcagcacagttcaattcacggcgtcttcggtgctccggacaggggtcggtcggtactcaaccgtagcagcggatgggatcgctgcagcccttcttggcggactgcccgcccttctcgaggtactgctggtggta

SEQ ID NO: 285221 - DNA, 581 bp, Zea mays
aacacagatcagacattaggtcataggatttccaaaaacaccttcacttacaatcatgaggcttataagaaaacactcaatagtcatcaccataaaggacctgggtgggtagcccctgctatacatcagatatcagacaactacgatttattcaagtaaattattaaatatggggctaggacgcacacagcattaaactacaactgctgtacacgatttgcacatgtttgcagcttgctacagggcataaagttcaaaacatgcacggaagctattatgctagtttgctactgcacatacaacaaagggaaggtacgaaacagaaatcagttctaacgcggctctcttgactgagacctatcagcctgcctatcgtcatccctgccaccatgcctgtcatcaggcctaacatgatgcctttcattatccgaaggctgcctatcaaactgtcgatcatttctctcattgggattctcatatcgcctctcgttgcccgaatcctggatggatggatatccctctgtggtttgttgaatgggcgaacttgcagtcaactttaaagcagtccccgcgttcaagaa

SEQ ID NO: 285222 - DNA, 683 bp, Zea mays
  unsure (1)..(683): unsure at all n locations
ggaggcaaacacatccccagcattaaaaaatatcatgataaatgaaccaatttttgctgttcaagacattcatggacagaaaccacccggtccaatgtgacccacaccggcttgacagaccaaccaggatcctaagactgacgctacatatatattggtatcctttcgttcatctgtggcaaatgaacttggcaccaccacagaagaaaccacccgtaactaacaaaccaaaatcaacctacattaggagaccaccgcctggtttatcatcccctgggcccattgtgcagtctcccgaacttcatcatccaactgttgtgcttggcactccctcaagaactcaacatggaataggtgggtcttgaacagatcctttgagctctggccaagcgtgtctgcaagatccccaaggacagcaactgcagcctttgtcacactgtcatccctgctcctatctttgaagacagcttcagtgaactgtagtagatgtgttgcatatgggatcatcagctgagcttttgggcccttgatgccctggagtataccagagtatgcctcaaaaatgccacgtctgagctggttgccataatcaaccatatcatcatcactctgatcaagagtaccaagaagttcagcagctccttcaagcatcggcatggcatatggtaggtntgacgcaaaat

SEQ ID NO: 285223 - DNA, 447 bp, Zea mays
aacaaaccttgtttagcagatcaaattttggttaaatgtatcagccggcgggggtctcatatataaacttgatcagctggacaagaaatgaaaaaaaaaggaaccacatgacccgcattgaaaaatcccccgataaatgaaccaagttttgctgttcaagacatactcggacagaaaccactcggtacaatgtgacgcgcaccgacttgacagaccaacaacgcacaaatatgtctaccaggatcctacgactgacgctacatatatattggtagcctttctttcgtctgtggcaaatgaacttggcacaaccacaagaaatctcccataacaaacaaaccaaaatcaacctacattaggagaccaccgcctggtttatcatcccctgggcccattgtgcagtctcccgaacttcatcatccaactgttgggcttggcactccctca

SEQ ID NO: 285224 - DNA, 699 bp, Zea mays
ggcggcggcttggaggagttggaggccgccggcgggtccctcttgacggtggcgttccagatcctggtggactccgtccccaccgccaagctctcgctgggctctgtagccacggtgaacagcctcatcgcctgcaccgtggagcgcatcaaagctgccgtctgcggcgctgaaggcaacccacagtagtagccatccataagatagagagcgagaggaggggtggtgcagcttttggggatcggagatatttatcagtggggagtcaagaacgcacctcagactctccttgccatgtggtgctctgatactgatgcaagcagggaaaaagaaggcgtcaccactatgcaaggggggatggttcgggtattgacttctccgtcgagtcaactagagaaaggatgcgtgctgcagagaagatgctgtttcttctggatctctttccatattttctagggtttacttcgtcatgttcgtcgtgttgttgttgttcaggctaaaaggtgcctgtgcctgctcgtaggctcgtagctagagaacagagatttgtttcccccttttattttattttttttggattgcaaagatttgtagaatctaggaccagtcatttcatcaccaatgcttggctaaaacgtgtaccgttgttgttcgtagctttcttgccccccaaaacgatgcaatttcaatcgctgagtt

SEQ ID NO: 285225 - DNA, 467 bp, Zea mays
ctaaaacacgcaggagagctgggtatcatttcattagaagaaggatggtatttacaatgaccagtttcaaagacttgggctaaaactttctatagatcctccccaaaaaaaggaaagggtaggaatacccagaaaatacagctacaagaaaaaacaatgaacaaaatttaaataaaatcaaaatctatagatgttgcaaaaaagaggagttattccctgaatgttcctaaaagtaatgcatgcatctcacaattctgtcaagacaacctgttcgtccctgtcttgaccactctcagcttgcttgctggggatgaccactggaggcgaccactggtctgggacgacaagaaagtaggccgcatggctttcctaaaccgcttcttgtattgctttggagaaattactgttggcgacacattctttggtccacctagtatccctgaagctttcacccatgtctctaggtg

SEQ ID NO: 285226 - DNA, 477 bp, Zea mays
aaggatctcaaggcatcgtggactgaatccaaaccaaaacttgaaaaagatccacaaggtcgtgctccgaatcctgacttaggccaaggtgatgcagaaaagttgtttcgtgaccatgtcaaggacctatatgagcggtgtgtacgtgatttccgggcacttctatctgaggttatcactccagaggtagcagcacggacaacagctgaggggaagacggcaatcaactcctggagtgaggcaaaaggtcatctaagatctgatctaaggtacaataagctaccgagtagagacaaagagtctatttggcggcgctatgctgatgacttgacgaggaaactcagacaatcagacacgaaggagaaggacaaatcggatacagatgggaaacaacctaggtcctctgatccacctaggcggaggtagcttgtagtaacagtcacttgtacttcctaggtgctgctcctatatttctta

SEQ ID NO: 285227 - DNA, 631 bp, Zea mays
ccacgcgtccggcaagcatgggttgtctggagcatgtgcaatttggagaacaagattatatcagtagagagaatcctgcaatacataagcattcctgcagagccccctctttccattccagaagataggctggctctggctcagaactggccatccgaaggagagattcagctccttgacctccatgtaaaatatgccccgcagctgccatttgttctgaagggacttacagtcaccttcccaggaggcctcaagaccggtattgtcggaagaacaggaagcggcaaatcaaccctcatacaggccctcttccgtatcgtggacccgactatcggccagatactaatagacggcgtcgacatctgcaccatcggtctgcacgatctgagatctaggctgagcatcattccacaagagccaaccatgttcgagggtaccgtgaggagcaacctcgaccctcttggggagtacactgacagtcaaatctgggaggccttggattgctgtcagttgggtgaggaggtaggggaggaaggagcacaagcttgactcacctgtgatagagaacggcgagaactggagcgtgggtcagcgtcactcgtatgcctcggcagggtgatcctgaagcgga

SEQ ID NO: 285228 - DNA, 404 bp, Zea mays
cccacgcgttcggtggattgttccaagaagtaatcatcacaagcaccatccctctgaaggaggagaagagttttccgcagctgactattctttcggttgctaacctcttgggggaaacaatctggcgcgttcacgatgattgctcggttggtcatgagccatactccagcttggatattgactgatgcttaaggaatagttgtggcagctcgcaaccttctctttcttttcttttggcctcggtttttgtctgtgcgtgtaataagcaatgtttttgtggaattctgttagcgcagaacctcagccttgtatttgagtgacagcacataagatgacattccagattgtagtgcagtgtttcagctatcctcaatcacagcacataatatgtgtttgcttcccgt

SEQ ID NO: 285229 - DNA, 461 bp, Zea mays
aaccagtggcaactcagaatattatttcttttaactgaacttagtacaaaatctaaacatgagggttaaaaagacacccataacacagaagctagaataaactagtcttcagcaagtcttcgtcgctgaagagacatagtatggcacaagtactggaaacattaggcagagaacaagcatactgaaaccttgattctcagctaaatttggcattaatctggggttacaaagaagatgtagcatggtgcagagatagcttaggtcaaaagtagatcattagctccgtagtgagggggtcgcagagagaccctaacttcatgttcttcaggttcattccctcgttttgggaccatgatctccagcactgaggcagcctcatcaaaacaagcctccagcttagcatcttcagggatacgagtagctagaggtatttcacgaatgaaatcaccaggagggcaatg

SEQ ID NO: 285230 - DNA, 518 bp, Zea mays
cgcaacccgctggcgggccagcttcccgccaccacggcttgcgcggaggcgctggcgttcgtggacgtctcggcgaacctgctcactggggcgcgcccgccgtgcatgcggggcaattcctcggcgcgcacggtcctcgtcgcgggtaactgcttcgccgacgccaagcagcagcgggccagctcgtactgcaaccccggcgcgctggccgccgtgctgccgccgccgcagggcaacggaggaggagggcaggggacggggaagggccgcgagatcgggatggttcttgcgattgccggcagcgtcgttggtgccgcattgctgattgcgctggccatggtggtggtcctgaggagggcgaggaggcagcgtccggaggcgaccatcctgtcgaagtcgcccgcggcgacaccgaccaacaaggcggatggatggaaggctccggctaaggcaacccagaagattattactactgctgataagagacatgcatcacaagctgcaagggtgaatacact

SEQ ID NO: 285231 - DNA, 459 bp, Zea mays
aaagaataaagtctgataagacattctgacccacattttggagtataaacatatcagcaagatggaactatacaagcaaccaagaataatagtcacaaacaatgctctcaacttacaaaggaaaatactaaaaaaattggcaataagggaatgacaggatctagtccctttcaatacttaggcataaataggggccagcactcttggtcatcttgcacgggcccttccaaagctaccaaccaacatagagaactggtatgtatcctgcacaagattttaacggggaagaaagcaggactattgaaatatattggttcccatggccagggagaccatggctccataaaccgctgtcctgacaacaactgggctgcagaaaccctaaacatgaagcttaagtttagatcacactacggctggaatgaaaaagcagcactgggcaactatggaaggacaaaa

SEQ ID NO: 285232 - DNA, 667 bp, Zea mays
aggagattgcttttttggtgatagtgttctgcatcttccatgcctgtgtgggcttcattttgccgtcactggccagattgcgaacaatgtacctgccaaatgagctgcgagggggcatgatgagcttttcaatgtcactggcaaatgccgccaccttcgttttcttgatacagggcagcgcccaccatcgacacgttgcaaactcaaccatcctgagccttgcgtcctatggcctgttaggagctgggggctgcgtccatatgttgaggaggtggaggaagcacactcggctgaatgcccgtagtctgtaggagctggaggcacccaatgaatgctatacacactgcagggtgagcttgagagcggtttctgtagcatgctagtatctcacgttttgtttatctgactttttctggaaatatcaggaggtaggtgtaggatactacttttgttgttgttcaaagaaattgttgaaattgaaggttgacaaaaaatctgtgtacatgcgtcggggccatcaaactaacgtctgactttgatttttagcaattaaactcgaaagccaggaatctgtgtatgtatgtttggtttgtagtttttttttttcaagtgttcgtttcatacattgtcttgatagtataaaaatcgctcgtaccatacattttcc

SEQ ID NO: 285233 - DNA, 391 bp, Zea mays
tgtgtattgggaataaccgatcaaggtcttaagtggttgcaaaacatacactgattgcttaagatgggatttgctgatttgcataatcaagtatttattcctactatgattttgaaataagggctctcaaattagtgactatcatgaatcttgtaatgtccagttaataaccagatatgttggcgttggcaagacagtaaaacaaccatatgaagaaatcagtagaacagaggttgaccatctccgagaggcagctgaagatctcagcaaacgcagtttcccagtaactgaatcgatgtcagctttcctccctggtcctattgcaagaactgttttggatccagccagcacctgagtgcagcctgcatcagctacaataaatgtaggaata

SEQ ID NO: 285234 - DNA, 301 bp, Zea mays
ccgcgagaactgacggctcggcctccaatggcgcccttctccctgtaaacctagctgctctacctacccgcacccccaccccgtggagagcaagtgcagccatggcggcggatcgggagaaggagcgcgaggcggagctggagggcgccatgtacactaactgcctactcctcggcctcgatcccgcggtcctcggctctccctcttcccccgccggccgcgtgggcctatttcgtcactccaacccccgccttggcgagcaactcctctacttccttctctcctcgctccgcggccccgc

SEQ ID NO: 285235 - DNA, 440 bp, Zea mays
cccacgcgtccgctcgtgccggcgactatggtcgggcagaagttcggcgacaagatcaggtactacgtccagacggacccgtcgccaacggcgacatcgtgttccgcggcacagtcatcggcaagtcgcggtccgcgcctcgagtggcggcgttctcgagccgaggccccaactaccgcgcaccggagatcctcaagcccgacgtcatcgccccgggcgtcaacatactcgcggcgtggaccggcgccgcctcccccaccgacctggacatcgactcgaggcgcgtggaattcaacatcatctccggcacgtccatgtcctgcccgcacgtgagcggcctcgccgcgctgctccgccaggcgcacccggagtggagccccgcggcgatcaagtcggcgctcatgaccacggcgtacaacctggacaactccggggaaacc

SEQ ID NO: 285236 - DNA, 405 bp, Zea mays
acttcccaagggtcggctaggtctaggtggtctccaagctttccgcctttccacgccaccattctccccacccgcgcgcctcagcaatccccatccagcatcgccgtttcgccgcggcaccgacacctcgccggccatgggcgcgtcctcctcgactggcaacccgtccccagagggcgcacgagcagcgggagcaggagactctcgcctccgccgccctctccctcccgctcctccgcgccgccttctcccgctccgccgccaacgcgctgccggatgccctcgcgccgccgcccgcctcctttcgtctgcccggatccccggcgccgccgccgccgcactttcacggcatcctggggggggctcggccccgccatcgcctcccaattcttcggccacggagct

SEQ ID NO: 285237 - DNA, 485 bp, Zea mays
gtaaaagcactcgaaactttatcaagttttcttttatgtataggtcaacaaaacaatgccataatcgcagttgcgttgcatgacatttatgtctacatgaaaagagacaacaaagttagttacaggttgtgggtaagaaactaagaactgatttaggccaacgagaccttattactctgccctttcacctcgcagctcgttattattactgggaatttgtagctgacaaagcttggtcagctaatcagtttccgccagcataaagtcgcagttcatcttttatacatgaactggcaccttattcgtttttttttattatctgtcagaaaccaaactatattcttggaagcatgttagagaccatgcatggcaaaccttattactctgatgcttttggtcatcctcatagtcgacaggttgtgcgctatctcctagcaaactcgcataagatgatattgtgttgattcccttgacacagtctttga

SEQ ID NO: 285238 - DNA, 528 bp, Zea mays
gaggcatgaacactgaattatgtcgattatgttcatattcatggttaacaacgctatctcgtctaaagtagattatgctattgcatgaaaacaatggcaactcctagcgacaaaaatgctgattgtacgaatctcagatttgttctcaagtgatcatctcgtcgctagcattcgtctaaaggcgagctaaacaatggcagtacagagcaaccacacatgcgaaaaggtagattaacaggctcatcggatcaccatccacgactactctacttatcagtagtaggttgtgccataataaggttgagctgccgcaggttgttgaggataagctgacggcgctgtaggtgctggtactggtgctgctggaattactgcaggctgtgggtagctttgttgtgtataggcctgtgcagagtatgttggaggataagcaccataggcagctgcttgaggagcaggctggggcatttgatggctgtagtcgtaagttccatatgcaggatatgcagcctgctgtgcataagaagc

SEQ ID NO: 285239 - DNA, 493 bp, Zea mays
tcgtccaatcctacctcgacaccgaaatggtggcgatgtggcaccattctcaataggaggatctggtggtggcttgatacctgctgcgatcaacttctccggatcaagaggtcttgtgaataagaatactggctcctcaggatccttatatttcatctgaacgcgttgcaggttaacctggcattccatggcctcccgctttgtctcctccctcttaatcaaagcatccattagtgcttttgcttgctccacgttgtgtcgcaccaggcggagtttttcgaatgattggatactgttttcccttctttgcatccttcttgtatgaagacgatgggccttttctcttggtctgaagacattgtatggatttgtatcattcactggtggaggcggctgcaaacctccaggcattgggttgaagtaacgctgacgcaagcaagtgaccaaaaacatactataacatcataactcgattcaccaaaacaaagcacat

SEQ ID NO: 285240 - DNA, 573 bp, Zea mays
aaaataatctatgaaatccataataatataaaataaatcatcattctctcactaatacaacatgtgtggcctgattcactgcaaaaaaacatgtaaaacaacaatgttcttaaattctgcaatcaaggcgatagtctccgaactgcccgaattctggctccatatcacttgcccagcaactggtgtccacactgattcacgcctttcagtctaaaattcagttcagtgatgtcgtcgctgaaaggaaccagcgctttgttttgcctgtcaatttctatgtccatatccactgccatttcttgagttgtcccaacgtgctacacaggttggaaagtgcatcatccttctttgctctctcggcccaaagaaagaaggaaagaaactgatggttaactgggctcgaggtcttgctgctagtgacaatgatcctccattctgctgagcaaagttgttcacacctgcagctttagcaacaagggtgcgcttcagtgtatggtagactgaactttgtccacaattgttagactgactgctgtcctagtaacgctcctgccatagttggttggagctcag

SEQ ID NO: 285241 - DNA, 480 bp, Zea mays
caagttcaatgttcgttgccatggcttcgtaaggttagctcagtattcagaagtttcaaatcgaaccgagcctttcaaactccaaaaggggactggtagaaggtggacggcagacagagatttggatcaactgcagcaatccatagggagcaatgcggatgactctgaagtcattgaaattgttgggaaaaatccatttctgtggcctgaccactggccagtcaaagactatgccaaaatctttgattgccttgtcttagttcctgagatagaaaccgaagtggttaatgtgagatccaagattagagaggcaggccaaagagcaagacatgaagctgggagttctcatagtaagcagaggagagatagctcaacgaatccgcctgtaccgtatgttgctgttcacatgaggatagaaaaagattggatgatacattgcatgaagtgggagcaacggtccaagtcgcatgaaatctgcag

SEQ ID NO: 285242 - DNA, 410 bp, Zea mays
acactataatgatctttcaagacactaaaaaccagaaaactaggtacaccccacttctgtttacttatgtagcagcaaatacagatacaagtaaaaagaaaaagaaaaggagttcctgtggtttcagagtcaccagctagctgtgaggtttgcatccaccagcagcaatccctaagccaacaacgaccggtactctctggacattccagtcccagctacttattccaaagaattaggatttcaattaaccgctacaaaattctttttagtggcagaggcccgatttccggatcaccgcgcgcgagccgaatacacagttagattggctgctttacactacatgagatgagatgacagccctgcctgatgatgaacctgaatgcatgccatgcaaccccggaaaaactacg

SEQ ID NO: 285243 - DNA, 463 bp, Zea mays
  unsure (1)..(463): unsure at all n locations
gntcagcacaagccacacaattttaccacggtaaaatcaaagtactgtttcgaacactacaccgtttgaactttcaacccttttcttcatttgtgaaggaacatatcatatcaattacaaacaaagccaaaaatgccttggcttttcagaggaacaataaatcaaaataactaacaactgaccccagtcagttcctcttcagttcagcaccaattctacagccctccccccttttccactgtatatgtcacctacatgtctaagataacaacattcatggattctagagggttccagatagttccattgtgtacaaccactcttgctcccaggctgcaggtttagttgtacatttgaattggccatcagaatttgacaatgtgaatggcagattaactgttcaaactgagcaacgaaagtgataaatcacatgtatctgccatgcccacctcagtatagcttt

SEQ ID NO: 285244 - DNA, 408 bp, Zea mays
gaagtacaaatctcaaacaatcctcctgcattcagattattgcagttcatcgtcgaaagcatgtcgaggaatcctcaaatacatgaatagcttacgaatcacgagaacggtttcgactacgcattttagtccgaagatcctgatgcgacacaggaacgagcgccgcgcgagcctaccacaaactaggatagagttgctgatactgattcctacgtggaacctacaaaatatcagtccaggagcggtgacctgcaccggatacaagcgacggggaagttcgtcttctgaagacgagcacggtgtgcatgctacagatgacacgggcgaacatgcgagcacagtagagcaggcccgtcgtgaacagtgctacagtgtgccgcagaatcgtcatgggagccagaaagagct

SEQ ID NO: 285245 - DNA, 469 bp, Zea mays
gaccatctaattttttttttcctttagtacaagttcgaatacccattctatcctggtcccgtccctggaagccacggacaagccacagtccacagatttcagaacaagcagcttgcttcactcgcactgacacgagtccagcatctctccgtttcatttgaactacaactaatctttgccaactaaccaatcaggatgtacaccaagcgagggtacctatagagtagagactaaagttgagtaaagttggtgtccccaaacagctcggcagagtcagagatcctactgccggtaggcgctgctgttggattgcgatcctggtttcccctgcttcgacttggacaacgaccggccgccgccagtggcaggccgtgcatccgtcagctccttcacgacggcggtcatggagggcctttggctcgcctccctggccgcgcaccgcagcgccactgacaggaccttactcacc

SEQ ID NO: 285246 - DNA, 398 bp, Zea mays
aaatgaatgccaatgaagtaaagctgttataatcttttacaatgcaaaatttcccctactgtctgagggccttcaaccgctactagtcttcagaaaatcttttcttttcaatctcaccttctggattctaataacactaataatcttcaaaacagcgtatctccttagctagccattacagttaatagatggcttcttccagaagagtcttttggatccttaagcaaattattttggtctctgatctatacaggcagtcgacttatgcgtatgtggtctcatccaacagcgtggtgctaacgccgtgtgtcttcatcatgcaatggtatttcgggggtactattgcacccacttgcatgcagagctcaacgacagcaggcgcatggccataataatcc

SEQ ID NO: 285247 - DNA, 391 bp, Zea mays
gccacgacctttgcttccttaaccttgcaaccgggcgcaatcaaaacgagataatgttcgccgccaccgaatacgatcgaaagctatgcaaatctcggatgagctagtacgtgtacagagactactgcatcttttaaaaacaagataaagatatttacatcgctgcagctagcggagaaacaaatgaagctgcgcgcgcggataagaaaactaatcaaacgcaaccagggaaacttgtgattaccccttcttcttcttcttctttgctactgctaggctgctaatcctcactccatctcccccatgttctctagcttccatgcatgtggcatactggcatggatgacgccgtcgtagtaccttggtcagctacttacttattcaagcaaag

SEQ ID NO: 285248 - DNA, 461 bp, Zea mays
aatgagcctttttttttccattccggagtctcatgggacaccgtcaagtgaggtctgtgttaacaccaaaaggagcaggagcaacaagcccaagtcccacgcgagcaagaggtcgctggattgtccaggccacgactcagttggacggagcagcaccgacaagttttcgaaggaatcaaggcatgccaagagagagagctcctcaagcaaggctgctaaatccgaccagggcgatcaagaacctcgtgtaagcaacagcaacagcaacccgttgcctagctacatgcagttcacagagtccgcaagagccaaggcgtcgtccccgaagatgagcccagacgtgcaggacagcaacgccgcgaggaagaggcactcgttgcccatgaccaacggcaagcacgactcgtcgcctcgcatgcagcggtcgtcgtcatcgcaagctccgcaaggcgtgaaaagca

SEQ ID NO: 285249 - DNA, 499 bp, Zea mays
aaaaataagagacaatttttcatacatagtcataatatacatggtacaaatgatgcagttaaattaatacttaatatacatggtacatttgctccagttggtaccctgatacaacaaatagtcatattacattcaaatgacgcatagacattcagaccattcggtagagtaacattagcaataaaccttcacatgtctatagcaggggtgttggtcttcgcatgattctttactacacaaatggtataagaaaatactcggcgtagaataacttccaaatgaacatataaaattgtgtgatacaatccttattctcaatgtcaaattgttgtgctctttgccagagtgtggaggcaggcaagccatgaccagacacaatgacaatcttctgatacaggttcgtagatgatcgctcctaccgaaattgcggctgcgtatgctgtcatgagaatattaatgcagagcctatgcacctgaagcattaaaatcttccggtggc

SEQ ID NO: 285250 - DNA, 393 bp, Zea mays
ccaaaaccactcagaagcctccgcttgaccgcttcactcgctttccgcccgccgcgccatgagcgccgccgcctgcctgttcgctgccgccgtctccctatcattcccgtcgacctccgcaccctcttccgcaagacgccgccgcctccggagccccaccaccctcctccgctgctccccgactcgccgccgtgggccggtccggcggacactcgacgagcggctgctcgaggccgcgccggcggagaccgaagacgtccaaaccgctgttgatgtagaggatggaggagggatcgctgagggcgatgaactgggaacagaggagatggaggagctggagcagcgaccgccgacgagggctttcgtgaagagcaggcggcagctgcaggaaga

SEQ ID NO: 285251 - DNA, 390 bp, Zea mays
gggagtgaatgccatttgcttttatgccagtgaaatatttgtttcagctggtttctcatcaggaaatacaggaatgctggctatggttgctgttcagattccccgcccacgcctccgagtacttctgatggacaaagctggacggaggccacttttgatggtatctgcagctggaacatgcctgggttgcctactagttggattgtcattcttagcttaggaacatcactggggaaaggacctgaacttagtgctggctttggcaggcattctgattttcggtggatcattttcactgggtatgggaggaataccctgggttataatgtcagagatctttcccataaacatgaaaggagcagcaggaagccttgtaacactcgtcagctg

SEQ ID NO: 285252 - DNA, 426 bp, Zea mays
cggactcgtgttgtcgccatgtttggttagcacatctagaatgcattacaattggaggcaatagctgttcactatccactataacctgaaagcttagctgttcaactgagctttctgattcttccatttttttccattcaagtatatgatattcttgtgtgctattcaatattacaaataacaaatttgcatatgagaataattaagtaaatttggccacctaatcagtaggattgtttggttggaggaatttttgtagcatgtgaaacttgagctaattagaaagcaaccactaccttctcttcagcatgaaaaaatagcttagccatttcttagagttaagcccttagccacttgctggccttatcgtctggaagaagaaatggtactcaactgctggtctctttggcaaatttttctttgcac

SEQ ID NO: 285253 - DNA, 585 bp, Zea mays
attttaggggaggcataatgcagtggtgagagctgtctcactaagtcaccattgcctccgtttataccccgtccagatccctccagtaacaggtctgctcttttttgggtaagtttaaagcacatgagatttgtacatgctattataatttataaggcaccagacggtaaagaacaaaaagaaatgaggatggcataggccccccagcattgcctaagggaacccttaaacctactttcccacacccttacacgacgaccacattgcctatgtgagcatgggacaggccttaaatcgtgctttgacgtatggttagacaaagggatttttttacccagtccacataaatccactcccactgggagtcataacccaggtcactagggtgctactcggaagccttggccatcacactaagagcccttttgtggacctccaactagaacttagaaacaataggttgcatgtagattgagttaccctgaactagcaacccaccagacccgggtcactagggtgctactcggaagcctttgccatcacactaagaaccctttcgtggacctccaactagaacttagaaac

SEQ ID NO: 285254 - DNA, 459 bp, Zea mays
atatatgacgtgggggaaaaaactatatatacaacaattgcccggcgatagcttgtatacctccgcgggagaagagaagcccgcgaagagactagctagacggctgaaaccacacacctaaacgtggtttctctcgaaccagttaacaaaaaaaaaaaagccctatgcccctatcaaagagggctttaatttatcatatagctctaaacacatttcgaatccagcatctctctcattgtacagtcccagcatctgtcatacttcggttaacttcaagcgtggtactacattcattgcatgcaactcctggaatagaagcttgcaagcgtatggcagcctcatcttggccatgttttccccattcttgacacattgaacagtatgaagtcttcagtttgtgattgtagtagcctaacaagccacattttctgcaaacctggacttgataaggatcacttg

SEQ ID NO: 285255 - DNA, 398 bp, Zea mays
cccacgcgtttgaggacgcgtgggcagttttaaaggataactatggagatggtgtatccgatatgattgttgaaccccaaagagataatggtgttttgattaaacagaatatgagagcgttggatgaagatggaattgccggacctggtcaaattattcgcaatcatgatatctatgtaaacaagcgaactcccaaaaacacttcaaaaggtattggtagggcattgagagaaagtgactacaaggactcacctgccttgtacaaaggtgttgatggtgagactactgtggtagatcgtgtaatgctgtgctcagatacaaatgataagttatccattaagtgtattattcgtcacactagaaggccagaggttggtgacaaattcagtagcagacat

SEQ ID NO: 285256 - DNA, 484 bp, Zea mays
cacgacccaaattattgagagcccaggaagtgagagatgagcctgcagattccggtgagatcaggcgccctgcgccgccttctccttctaggtggcgccgagggtctactgcgcacctactccaccggcgaccggcgccggcgggtgatccgcgaggcaaggcaagaggaggaggacgaagcgttcctccgcaccctcaacttcggcgctgaccccgagaacaaccctcttcccccgccgccgaggcatggcagaggattatccgacgcctcagccgggaagcagcagcagcagcccgagcgaagcgcgcagaaggtcgtcggggagacgctgctggagaagcttaagctgggcgatggtccctccgccgccgctgctataggaggcggcgatgagccacggcagtctgaggacgagcctgcgcccgcgcagccggtggacgtggacgagatcttccgaaagatgaagggaaccgggttgatcc

SEQ ID NO: 285257 - DNA, 372 bp, Zea mays
cccacgcgttcgcctacgcgtccgcgcgcgcattacattacattacatacaatcatacacagtttggccgttaattagccagcgctgacaaattaaccctcgtcttcgtcgcctgacccgccgccgaccgccgtacgtgaccaccaaccaggctatagagctacctccagccgccggcccgcgcgtcgtccgccgcggtgtacgtacgtctgccgcggagccacgcgcgcggacatggctcagctgaaggccgcgcgcgccaccgacgtcccgcccgccatgccggacccggacccggacgtcgtcgccgccgacctcggcgcgtgcgtacggcacgggcgcgttgacggtttggcagcaggaagcggcagg

SEQ ID NO: 285258 - DNA, 283 bp, Zea mays
gttgttctcaacgatcagtctcgatcccacaaggaccaccacaatctttggtgtctcttgctagcttgtacaagcctccaacactttgcaggaagtttgaatgggagtcaaaactccacgcgcaaatgaacacaaggatgaagcacacacttatctctcaatgtatctcacaaggcactagggctaaactcaattgagtagctctcaattgctcgctctctgcttttgtggcacttgtgttggttgtagtgggctagatcttgtgtataggatgtatcaatga

SEQ ID NO: 285259 - DNA, 372 bp, Zea mays
gttctagatcgctagcagtcggcctttttgaagtgttttgtgggagatgttttggaattttggctattctgtacatcgaggatcatccacctcagtgttcaaatatagcagaatgtgccgacaacgtcagaggtaccaaattcaggtacaaaaatgttgcatgcgtgttcagctatacaaaattcccagttatcagcacttggaaccttgttcggcacaaagagaacctacctcggaagaaacgaactgtcggactgtattctgtataccaatgaaaaccacctatgatttcatcatttcgtcctcgaattggaatgagctttggcaccaagaccaataccctagtccttttaccatttgtattgtagccat

SEQ ID NO: 285260 - DNA, 477 bp, Zea mays
aaaaggggggttcaacctcgggtccttgttgactgttcttggctccgggtcagagaaacaataaccaacaatggaagtggtatggattcgtctcctacacttgaataggagtacctgatagtagtagaggcacttgatttctttctgcaatgaagcatggaagaaggcacacatctaaacaagtgctgcacgttttcctgagctctgcaaatgacgtttcttccacatcctcctaggctcctagttcctcgccatgctgcccatgcatatatccccaacagacgtgcgtcgagtttgaagaggcctgtcccgttttaggacatctgaatgcacgcgggccatcaaactttggctgcttccactggcgcgccagccctctcggcaacaatctgctcgtagaggtctctaatcttcagcccgacgatggtctggaagagacctgtcccgttgttgcttccaggaaagcccacgcgtccg

SEQ ID NO: 285261 - DNA, 267 bp, Zea mays
aaaaaaggccattccaaggttggggattagcaaactacaggggttacatgaaaaaaaatggcccaacggtggcattcaaacaggaatgcaacaaacattgcccccaaaggggggttataccggagcattccaaacattcaaggccccctttttttggaaacctttacttttgcaaatcccacaaacagaagttaaaggggccccagctttgccgggggggcattttttatggggcacaaaaaaagggtccattccccgtttgggggg

SEQ ID NO: 285262 - DNA, 421 bp, Zea mays
acgtgtattgggtagtgtgtacagtgtactcacgccccagctcgagtcagccctgttcacatcgcgtggtcgtatgtctaccggcccccatctgcccgtgggccgtggccgtgctcgccggcgcctccagtggcgttcctcaggctaagccacaagtggacggtgaccccgaggagcaccaccacggcgatcgccacgttcatcagcaggccgcggctcgcgaaggccggcccgggctggttcgcgaacgccatctctttctctgccagcattgccttctcctcctgctgctggtgctgctccgtgaccgtgtccttctcctgcaccgtctccttcctgtcctcagccatcttcccctcttcctccctcttcctctgcctgtcctcctgctccttcggcctctgaacagctcccagcgacg

SEQ ID NO: 285263 - DNA, 650 bp, Zea mays
agcccaaacagctacccatagtcgatgctgaattccttcataacatccattttgtaattccaccgcaattggttgaacaatattgatattacatactagtctttacactttacaatttgcctctaatgatttcttgaaagttcatggagtccccagtcaggtaacctggccatcaatttcctgataagttattgtccagcatttctatgcgagttctcgccaacagtctacattctaccggaaaaaaatgctcttgtttgtgtctgtcatcttgttgaagctgcctgacggatgagcctgagggactcggcgaagtcgtccaaaagctgatgagagtctggaaactgagcatcatccactgcgaggacaagcttgatggagttcgtatagctttggtaatgtatagtcagagcatgtggatgcccgtagacagagggagcgatgtagacgattggatggccgtagaactccaccttctcagcaggtccgaccatgcttgagaatgacatggtcgtatttgtgaacataccatagcagagagctgctgcagcctccatgccaaatagtttgactattaggttcccactccagtacgtgaaaaccgcttctaatgaagccttcttcctttgagctgtccttttcccttggcg

SEQ ID NO: 285264 - DNA, 594 bp, Zea mays
  unsure (1)..(594): unsure at all n locations
agactccacaaacatcagacggattaatagtgagacgaatcaccaatctgacaagcaactacaacgagaggaaccacaaacggcggggagtcctgggatctgttaatacaacgttcagcagccaccagctcaaatctaggttttttttatagtctacggcgtttaaagggtttgttagcagggatcccatgaccactgtcattcctcttcactataccatacgcgcgcgcgcgcgcgcagggatcgatcggcgggcggcactcattgacgcacgtctcaacatcatcatcagcagcagcagcacttgaagcagctcctgcacctgcatgaccaacagcagccgccgcaggtgaagcaggcagcaggaggccggcagcacctgggaaaccggagcgcnaggcagctcctaagcggcccgcagcagccacagccgaaggagccgcagctggggcaggtcggcttgcggacgcggacgcggcagcagcagttggcggtgaaggtggtggtggtggtcgtcgtcgccgccgtgcttgcccggtgcgccgccttcttgcggagctggtggagggccggccggatcttacacagccgggc

SEQ ID NO: 285265 - DNA, 323 bp, Zea mays
acaacctaactagctgcggttctccactatcactcactgctactgcacctacttcctttccgctctggtactgttgctggcttgcggctgctcttggtggtggtggtggtggcaccgaaaccctagcccttgccctcatgtcgcagcaggaggctgtggacccgccttcggcgacggacgagcggctgggaggtctaccgcggagcggctccaccagccgcctcaacgcgcaggcgccggagttcgtgccgtgcgctggcgcaggttcccctccccctccggagcacaaggcggagcgtttgttcgcgccgactccccacgcg

SEQ ID NO: 285266 - DNA, 689 bp, Zea mays
tagccacttcactggtcactccattagcagatgcgctctgcatcttctcccctctggaacacactcccacacagaactagagctccaaggccatggagaaatggagaagacgcaggcacttgctgcttgctgttgcagccgtggccctggtggcagcaataacgctgccgtccgcggaggcgaactgtccccggactactaccggtcgacgtgcccggacgtggaggcaatcgtgcaggcagtggtggccaagaaggtgaatgagaccttcgtcacagtcccggccacgctcaggctcttcttccacgactgcttcgtcgagggctgtgatgcgtcggtcatcatcgcgtcccgcgacaacgacgccgagaaggacgcgcccgacaacgtgtccctcgctggcgacggcttcgacaccgtggtgcgcgccaaggccgaggtcgagaagaagtgccccggcgtggtctcctgcgccgatatcctcgccatcgccgccagggacgtcgtcaccatgtcgcccggcccccactggaccgtccagcttggccggcttgacgggctcgtctccaaggccggcaacgtcgcgggcaagttgccgggacccaacatgcgcgtcaaggacctcgccgccctgttcgccaagcacaacctcaccacgctcgacatggtcgcgctctcgggagcgcaca

SEQ ID NO: 285267 - DNA, 377 bp, Zea mays
tccttttcccaccctaaggctttgtttggttactccactacaatctacatgtattgaggtggattggggtgtaaattagtttaacttactcactagtccaccttaatgcatgtgaaggtgaatactagagtaacatgtaatggtgccgtgtttctttgcaccaccttaacactgctgtagcgtttcggaattgctggaaaggcatgcaagctcttgccctcaatgtgtttctagtgccaagtgttagaaataccccctagccctttcttttagtaattgctacattgcattgttgacactgagttagtgagttgcatgttgagcctccctggacaagatgctaataaaattcactgcctggagccaggtttgatttc

SEQ ID NO: 285268 - DNA, 519 bp, Zea mays
atacttttcaaaagtatatgtatctggctatctgttgcttgctcaatatgctgctacattcttggatgcacttgaattttagcctacgttagagttcatggtgctgtgtcagtaaatccacatgcttaaattaaaatggagtggctatttcagttctactatatcaaaggttgcttggcttataactattgttcaacaaaagtgatgtgagtttattgatttcattttcattatggtcatttcttattgcattattatatttttctcaatctaggttgagccattacgcagtgaaagctgctgacttgtgaccacaaggtcctgtgtctgagttgtgggaagcctcttgcaattccagggaaaggccgtgtactataggacctaattaggtctgaccctttcctgaaccccgaacaattggggttgccctaagttgtgttttttccatggctatcttgttgttcaccattcaaaaatcgacctacagatactgagtgtaagggagttctcatgtcatga

SEQ ID NO: 285269 - DNA, 369 bp, Zea mays
ttttcaaagcaagctccagggggaatcttgcatagatatgggcattaaatagagttaagccctaccggggacaggatgtatacggacacatgaacgaacgacaaaaggaccatttccacacacaaacagctcagggcacaccagactttttttttttttggtttgtcctcggactcctagctccagtggagcaaaagataagagttaatcctcaaggaaagaagatacccaagcgcaccatcatcttcaagcccatcctgaaatacaaacccctcgaccggccgacggcgtctcatctcaaagtgcaggttgagagagcgggcggctcagtccaacaagaggttgatcatcgagttggccagcccggct

SEQ ID NO: 285270 - DNA, 386 bp, Zea mays
cccacgcgttctttcacgcgtccgtaaacctccagcaagcttcagctagctcattgcctccttgcaaggagtgtggagatggctactaggccggctctcgtgttcgtttgctgctgcctcttgctggcgtacgccgcggcagcgcgtgtgctcgacgagggcgagccttttggccgcctgaagaatgctgcgcgccgtctccgcgatggcgagcctttcggcggccggaaggaccccgccgacccggaccactctcccggctcacacaggactccgccctgcccgccgtccatcggcacctcgccgaccacgccaaccacacccggaggcggcagctactacccgccttcgccagacatcggcacttccccgaccacaccgacagc

SEQ ID NO: 285271 - DNA, 550 bp, Zea mays
tgatctaaaacccaacgttgtatttatgtaggttggtggggggcctcaatgaaggggagacaacatcaataccatattttccaatacaaccaatccatttcaacacagtgccacttccaccccacccaatataatattcctaatactaatagctaaagaccagacaagaaccagagggaaacgaacaattcaaatattcaaattaacccatatatcgacaatcaatgtaaccctaattgataagttgctgcaggtcgatgcgccaggatgaagctagctgcttcattatctgtacgggtgttgctccctcccaatcatcagaaagctcaatcacggtagcctcatgaagtcccagtaagaggtcccgctttgcatccagaggtattccgagataagcagagccgttttccattaacaggtcagtcaactgctgaagccagtttaatgctacatcatagaagctttcttccacgagaaactgtcccactgcatgtaggacttcatttgcaacctcatttgaaagttgatcaataataaaaaccgtttgttc

SEQ ID NO: 285272 - DNA, 410 bp, Zea mays
gacaaaatgttagttcttattaaacaaatcgggggacccccaagactgacctcgaccggtggttccttcttacacgttttgacagattcacatgtacattttaacggcgagtaagctatatatcctttttcctcttcgcggcctctgttgtagcatagccacttcatcctgaatatagcctcagcttcgaccgtatcggctgccggcatatcgggcatctggtgagggtttccccgcactccctgcagcacatatgcccacagccgaacgccagatccttggcattggtcaggcagatcgggcacacctggtcatttctcggcgccgcggcggcgccgccgacgttgctggcgccccttcttagggacaacccctgccgctgcgcgtgcggcagtggcggtggcgcgggg

SEQ ID NO: 285273 - DNA, 275 bp, Zea mays
aaatgatatacagtagttgctataaacacccatcctcaaacttgcgacaacttaacagaagcggcaagggtttacacgcctgataatatggccaacatctcgatctacatcccatcccgatagcacagaaccacgatcaccatagaagaaacatttgcacaagagacgaacggcaacggagctggacgcctggacagcagacgggaacacggaggcaacagcgcctacaggatctgcagcaccccggtccagacagggtagatgaagagcaggag

SEQ ID NO: 285274 - DNA, 304 bp, Zea mays
attacaaatttctccgtaggttgtcagcgtctacgctaatatcagttggtttctatatgcatgtatgcttttttcttaggcatagctttttatatgaaaaacattgaaatgcaccgacatctcgaattggagcctccctcgcttctacatgagtgccggctgaatccccctcagggcttcaccagcctgacggcctgccctgaagcttctgccgtgcgctgcagtctggtgtggaagtagcaagcaggtagggtcaccaaaagctctgctgcaatgcgatgccagcagtgccatgcatgtctga

SEQ ID NO: 285275 - DNA, 499 bp, Zea mays
acgatgaagatttctgaagtgaagatatttctgaagatgcttcgagcttattataatcatgtcagatcattcgagagcactctagtcacaaagttttttggtcttcactgtgtcaaattagccggagctaaccagaaagaaggtccgttttgtcataatggggaacctgttctgctccgactactctatccataggcgattcgacctgaaaggttcatcccttggacgcacgactgataagccgcagacagagatcgatgagtacactactctcaaggacctcgatctcaacttcatatttcggctgcagaagcattggtaccaagagttccaaagacaggtcgacagggactgtgagttcctggagcaggaaaacatcatggactatagtcttctggttggtgtacattttagggacactagggataggctattgaccggaggttcgttcgatagcgattgcagcagaggatcatcgcctcaattgtcaagaggagac

SEQ ID NO: 285276 - DNA, 345 bp, Zea mays
ggcaaaaacttatgcgcattcaataaatcaaacttgaaagagtcgggctgccttaaacgaataccaaaccgagtcggggcacgatccacaaacaacaccctacagtaatcagcagcgctaatgaaacgaaaccccccccagcgttccggggcttcctcatggaaccaagaacagaaaacaacttttaccaaagaatgatcaggaataatcaactgactgactgcaaagcttcactggacacagagctgtcaaaccaaccgacctactttctgtagacggcaagtcactgccgttccggtacgggggggactcggggatttattagaaagcgccctccctcggatt

SEQ ID NO: 285277 - DNA, 265 bp, Zea mays
atcccgctgaaagtataacatggcaacttcactataaaacagaacgaggtatgctgaaaaacccccatcttagcatttctagtttacattactggcagcttcgaggggaagagaagcacccctaaaaatgaatcaaactctcctaatactagccaactgtagcgataagaacaacccagatgagatacggtttctgcacaagttacctacgctgacccttcagcaaatctctagctgattgaaccatgatacgttctttattcat

SEQ ID NO: 285278 - DNA, 374 bp, Zea mays
ctaccaaacagccccttagtctctcgtttcattatttcctcacagatgaaatgtcaaatgacccaattcttcgttgcccacgaaaaataaatctacacgcacacctcaagtaataacactgcaggattacattcattcaaaactaggagcgtctttcctaccgggtacaaaaatacacattcaatggaacacaaaaatacaactcagctcatatagacatatctggcaaagaacccataaggatcacaggactgctatttctcggcctcagaagcttgtccggccttgctttggagagaatatcagagaaaaacccataagatgaagagagaggtggaggctgaatagattccgttgatggcatgcccgtgcca

SEQ ID NO: 285279 - DNA, 506 bp, Zea mays
aagacattggcacacagatgagtcctgaggatagtatatcttctccaaaagcgagacattcctgctccagtctgccttcaggacatctgataaaggaaccaaatagtcatatacctaaacctgaaattcgggacgtgcaggttgatgaccaagtaactgtgacccggtggtccaagcgacatgtaacacgaggctctgataagaggtcaacaaatattattgaatggaggaagaagaccactgaaacccgaactccatcttttgatgaaaaagaaagagaaagatgcatgtcacagtaagatattgcctatttctgcccatcagctaacaatcccattttgcaccactgcccagttttgaattggatttacacaaaaagaatatattgctccaattgtcatcttgtagctttcaatactccaagctgtcgttgtcgtgtatcatgtttattaagaaaggtcagctcaatgttgaagtgaagctactatggctgtaatacatgttca

SEQ ID NO: 285280 - DNA, 510 bp, Zea mays
tttttttttttttttttttttttttttttttttgtggtttttttttttttttttgcattgttacttatacaaccatactttaatgtcatgcacaaatcattaattacataagaggtctgcaccagaacaattgtactacaaagaacacaaacactagccctggccccctccataacagaaggtcgatcaactacttttaacaccccagtaccttccacccccagcttacatacacatggtgctaccagacacccacaaagccagtttgttatctactactaactgtgtaatccacgcctacgcaaacccacgtctcagaaactgctacatacttacaattaccactagctctacgtaaatcacccaacaacagaactcagatcatccaaattttcaaatcctagtgttaagccaaagaatgagcattgccagctcctgaggcactgtcccctgagctcctggactcagaaccactggacgacgaagagccactgccagaaccacgagagc

SEQ ID NO: 285281 - DNA, 449 bp, Zea mays
  unsure (1)..(449): unsure at all n locations
cggacccggcgctcgagtcncttctctcctctcctctcctctcctctgcggggggctgccttttatttgacaccggtataaagaaatcaagtacaaatgaagaggcacatctctgcccagtatttgatgactgaagataggtagcagtatggtagctgctacaattgcgggaatgtttcttgtgtgttttgagtccctctgcacctgttttggcacaaaaaggaaagatgaaagcgaagaccatgttcttgcagaacattccaattccttgagttcttatcaaatgaggtcggtttctgatagaatttctgcaagctcgcttcgagcacctgcaagtccatctagattttcattgtcttcgccaccaagcagaaatgaacctttaaacatcagtcttgaacatgtggttaaactgacacataacttcgctccgaccttgatgattggtg

SEQ ID NO: 285282 - DNA, 386 bp, Zea mays
gtcatcattgttttggcagccactgaagctgaactcgaggataggaaactgagagtagaggatgcaaagaacgcaacttttgcagccatcagtgaaggcataactcctggtggtggggtgacatatgttcatttatcaaagcatattcccagcatcatggaccttgtggacgacacagaggagaaaatgggtgtaaatatagttgggaaggcacttcttgtccctgctatgacgatagctcgcaatgccggggcagacggtccagctgtcgtggagaagcttctcgccagcgagtggcgggttggttacaatgcgatgactgacgagtttgaagaccttgtcgctgctggtgtggtggacccgtgcagggtcgcgagatgcgtgct

SEQ ID NO: 285283 - DNA, 687 bp, Zea mays
cttcagagaataaagccatacaagtagtgtgatacaagtcttaaaacacagccactggacccattaacgactcaaccacctcacttgttttgcttgtacttcacaatatcgtcaggcaacaccaccttattttcagtgtgacaaacaaggtatgccactgtcgacttcttgtaaggttccagccagtccttgtcaccctttttcagtttcttggcattgtcgtccaacttagaagtgaagttctcaataaaacttatgagcgctgaggcactatctttgaattcgagttcagttacagtaactgtgaacctacaatcaccatattttttcaccatgaagccggattccttcatggctttgagtagacagcccatgatagactttcctagtcaggatctatctacaaacgacaatgatgacatcttgcaaaacagagcatcaatgacgggtagtcttttcgtatcgacatgaaatacaaacaattcttcattcttgtagaaaggaaaaaatatcaatgtcctcctcatgtttcgaaagactttcactttgggatctttggtggattcggtgtctttgcgtacacgtgcaacattggtgcctttgagtacagctttgatttcttctacaagttgtgcagcatcaactttggagagttcaatcaagggaacatcacaaccgtcatcccgc

SEQ ID NO: 285284 - DNA, 386 bp, Zea mays
ttgctccttggaagcaaattaaaataatagcatgcatagtctttttcttccgatcaaaaccaacggacgcatgacatgacttcctcgtgcttaattacgcacacttcatcaaacctaacgacgacgcacctagaaggagaacttgtagagcatgtcgtgcctgtacacctgtccgggcctgagtgtcagcgacgggaactcggggtggttgacggcgtccacgtagcccatggtctcgaggcagaagccagcgtacctgtcgtacaccctgccgcccttgccggcggtgcggttgagggagttccccgtgtagagctgcagggtgggctggttggcccacagctccagcgcccggccggacgccggggtcccgggcctgcgccacc

SEQ ID NO: 285285 - DNA, 635 bp, Zea mays
ggagctcagcctggtccagtcctgtcctggacacaacgagtgaagattgctgttggagcagcaaaaggccttgagtatcttcatgagaaagcgcacctcatattatacacagggacatcaagtccagtaatgttcttctatttgatgacgacgtatctaaaatagctgattttgatttgtcaaaccaagctccggatatggcagctcgacttcattcgaccagagttcttggaacatttggctatcatgcacctgagtatgcaatgactggacaacttagctctaagagtgacgtttacagttttggcgttgttcttctggagctcctgactggaagaaagcctgtggatcatacattaccaagaggacagcaaagtcttgtgacatgggcaactccacggctttgtgaagataaagttaggcaatgcgttgattcaagacttggagtagaatatcctcctaaatccgctgcaaagtttgcagctgttgctgcactgtgtgtgcaatatgaagctgactttcgacccaacatgagcatcgtggtgaaggcgcttcagcccctgctgaatgcacgtgcatccaacaaccctggatgaatgaatgaatgactgccgttgcttttccctgacgagagt

SEQ ID NO: 285286 - DNA, 300 bp, Zea mays
agcatcccaccccacgcactcccagccgccagccggctgccggcgagcgcacgccaaatcatgaaatcagggagagacgagtgcaatgctgggcatcgggcactcgggcttgggcctcggcagtcctaggcacccaagcgaccaggtcgcgcggtcgtgctcgtgggcgaggcgtcgcgcacggtgacggctgacggcgcacgcgcgagcaggcagcactgtgccaccgcagcagccgtcgacccagcgtccatcctccggtcctccctccaccacgccttcgtcccttcaccgcatcgt

SEQ ID NO: 285287 - DNA, 342 bp, Zea mays
ttcctttttttttttttttttttttagccaaccaaccggtggggggtcatgcatatcattggagggctagggataatcccgaacccgccagtttcagcagggaccgttcagtcgaaggatacataagaccacagcgaaaattagagggccttacaaaagcagcagcagcaatgcagcacgcagatcaaatttacacatcaaaacgcaggccaaaacccgagaagaaaccgaaaccccgccgccggcaagcacacccatgcacccacacacacaccactgcccacgggcggaatatacacaacggaacctaccccggtagctccaaccgaaacacagtaccca

SEQ ID NO: 285288 - DNA, 407 bp, Zea mays
attacataagctattcgcccttttcaataccattgtgattattttttgtgttaaaactatgtatatgagcctatctaagcactaagcatgaatataggtgagtgaggtatgtagcacatgagaacattttttatgctcacatcttgcatactttgtcatctttacattcgccctgcggaagggaaatgcagtcagtaaactgaagctgctgaaatgttcactcgcaaccagtatgattactgattggtactgagcacagcatcaggcaaaagatgtgagctgatgatcagaaggacaacttactgcagcttttctagcggaggtcgacctatcgtaggtaggaaaaaagagtgatcaaatttgctcacccaatgcgaaatattcagtgcacatttgcattaagtttc

SEQ ID NO: 285289 - DNA, 397 bp, Zea mays
cggacgcgtgggcggcgcttccttccttcctccctccgtacatccctctctctctccctctctcctgccctcttcgcctcttctgcccagccatccctgacgacgccgcgcggccgacctcctctccggggacgaggccgatggagtcgacttccggcgaagacgctccgaagcgcaacccgctcccgtccgcgctcgtctcctacctcgagtctgtgcttgccgcccgccgcccggccgcggccgaggtcagcaccgccgccgcagccggcgaggctgaagcctcggctcccgaggatgccccctctggagatggggcgccggcgaggcccatcgtgctgctgacctgtgccggggggatacggtccgcgggtcttgcggcgctcgtcgacgccct

SEQ ID NO: 285290 - DNA, 436 bp, Zea mays
aaaagatacattcaatttcacccagcacgttgaacttttccaactgtagagcatccacattacatttacaccgaaagagggggggaaaacttaaggcaactcaattgacagcttcatatagttcagaactatgtgagcagatattattgtaatgttttttaccatagaaatcaacaaccttctaaccaacaccttcaaaattgtgatctctagtgggtgaaaatagtctttaacgattcacaatctcattgttttattggtttatgctgaatcttcggagaatttttactgtttgacgttgccccaccactgccccagcacaaatgagcatgggtccaagccttaattcatagctttgctcagcattaggtgaatcagtaggaggatgccgattccgaccatgacattttgctttgtcatattttctgcaactagc

SEQ ID NO: 285291 - DNA, 293 bp, Zea mays
aatctacttatgtaatctaggggagcaaaacaaatagggtctaaatatccactagctagcaaaccgagtgtttgaaactaggcttgatacacacgaatgaatattcacatggttagaacgattcttttggatctcgcctgccccatggcgccctgccacggaacgcacagatgctcctggtcagtgcttggcagctccacccttgcgcggcctgggtcgagccgaagacgcacctggacccttgcgaggtttcctagaccgagccttctttgcctcggaacctatagctttca

SEQ ID NO: 285292 - DNA, 545 bp, Zea mays
aaaaaaaaagaaagaaagaagccgctggggctgtgctgacggctggcgctacgggcagccgtctgcaccagtatccagccgcgaaaaaaatcagaagatccgagacggagttcgacgaggggaggcgcgacaaagaaatatccaacggaaagatggaggatctgaataagttttatgcttctttctggaagcagtctagcagttcacttagtagcctgcactctgttcatgagcataagctgatgaacttgggttcgaagcgcaatcaaacccaagaagtttccaccaactacaataaacgtaaatcgttgtccggaattgtggaactgagttcagatgttaggagttcaatccggaggaaatctgatgcttatcgcgaagtgattgacttggagaagccatcggtttatggtgatgccgtggaagctatcggttgctctggccttggcaaccttgccaaccaaaatggcaagtctcaggatgtttctccacagaacaactcacttgcagagtctcttcagttgtgtagagactggaagacatcg

SEQ ID NO: 285293 - DNA, 329 bp, Zea mays
ctcgccgctgccgcatcctcaccctcgtccgctcctccgctgccccaaaccctagcctgaggaggggtcctcctccgctaccgagacccacgatgtcgaccatcgctgcctcccgccgctcgtcctcctcgtcctcttccgcgaccgccaagcgccccgcgattgcggacgggccccgggggacccaaggcgaccgccgcacaggccaagaagcgcgtggcgcgcggcaacatcaccaacgttgccgcgcggggagggagggcttccgttggcggcagccgtgggaacgtcatggcgcccaccagcagcgcgaagttgaatccaacggt

SEQ ID NO: 285294 - DNA, 267 bp, Zea mays
cataatgtataagaggatccatagtaattgcagagttcccataaggctcatacatggataaaataggagtatgttccaggcatcatggtggttctagacctgcctaaattctggcctaggttcaagatccacgatgctatatcccagtcgcagcaagagaagagcaagggagctagtaacagcggtaggtgcggtggcgaacgcaccagtggatgacaggaccagagacaaaattcaagcttcagaaccctcttcttcagctcctga

SEQ ID NO: 285295 - DNA, 542 bp, Zea mays
cccactcgtccgaaagtttgggatgttggaggtgatgtccgtcatattgcctggaatccttcacctgacaggcctattcttgctgctgtcgttggacatgacctactacttattaatgctgaggtggggagtgaagaaatgcaaacgatggtaaaagatctgctcaaggttgatgaaatggctcttcaagatgacactgatgacaagaaaccagctgtgaggtggttgaagcatgacaaacttgatgggatcaccttagttcatcaaaaggccgtgtcaaatgtggagtggcattacaagggagattacttcaccacagttgtgccaactggtgatacgagagctgtattgttgcatcagctcacgaaaaagcactcgcaccatcctttccgtaaaatgccaggccttcctgttgctgcaacattccatccaagtcagaagatgttctttgttgctactaagaaatttgttcagatttatgatctccaaaaagcgacgttggtaaagaagctggagtcaggtcttcgcgagatttcctccat

SEQ ID NO: 285296 - DNA, 437 bp, Zea mays
ttaggcccttgatcttttaagaaatattgtgtccagtccagaacacttaggatattcagaaattaataaagaaataggtttttagtatgaaaataattccataaacttgtataattgatagttaattcattttagctccaaattgagtcgttccagttgctataattttgttttaatattggctatcaactagtaacactgtttagccatgaaacttgaattaaaattgtccatttgaattaatctgttctaggtgctacataacttcagaaatccataacttggtaaccgtaactccgaatttaatgattcttgttcccacggtctcgtagcaacgcgtagattatgactatgtattttgtttatatgtttggtgtgatgttaattttgcctataccatggttggctgtattgctacgtttagcgtgaagatacgt

SEQ ID NO: 285297 - DNA, 327 bp, Zea mays
gggaggggaaagcaggatagcgatttaacatcagatgtcaaattttcctacactacgataccatgacaagcaacaagctacattgatcccaaagctgtccatgatctaaacaacacaactaacagcatggagaagctgaggtaaatccatggatgagcaaatcatttcttcttcttggaagggggctggtcttcgccatcttcatcatcgccctcgcctttggcgccctcatcaccttcgtcgtcctcatcgtcatcatcatcaccatcttcgtcgccatcattgtcggtgccacttccttcttcaccattagcttcaggatcatca

SEQ ID NO: 285298 - DNA, 480 bp, Zea mays
agagcaccagctcaccgccccaccgattcaaaggcgctcggatcctctgacgtcgacgttccctgccagctcccggctgccgccctcgctccttccgccatctgcgctgctctgcggcgccagagccggcgcccgcccgctgccgccctcgacggaccgggacacggggccccaccgttctctttcctgcgctgcgctgcgcggcggctgtgctgctgatcagttaatgtgcctgtgaggctgtgacaggcggcgtcgagcgagtccgaggcgggctaactaaacccgccgtctctcgaggcggcgcccgcggagggccaggtggagggccgaggaaggtggaggcggtgaggcgatggggggcgccaaggcggaggacaagcccgccgccgccaccgctgaagacgattggtgttaccagtttggaaacaagaatgcgtttgactcgaaggccccgaaaaaatcaccacttgcattgag

SEQ ID NO: 285299 - DNA, 503 bp, Zea mays
cccacgcgtccggacattccggcccgctcccgctccttcccgttgtctcgtaagctgcgaggaatccccagctcgtcttgccccggttgttttgtatctcctcgtcggacccagcgttccagtcgagcatggcttcgattccgcctccgtcttcctccgtcgctgccctcacccgccaaccggcccagttcttgaaatggtgccgcctttccaaggagacaaaggcatcggtctgcagtttcttggctacaaattcaaacagcactagggtgaaatcagtgggcttgagagtagcattatccttcaaaaatgatggtggttatccagctgacggtttctctgggaatggcaacacgctattgccaaaaagcacatccgttcgtggcgaggaccatccggttgctgatcctgtactcccaatggattcaatgatgacgccagaaatcctctctgctaatttggcacttgttatggacaagttctcagatgatgacacagatact

SEQ ID NO: 285300 - DNA, 463 bp, Zea mays
  unsure (1)..(463): unsure at all n locations
ttttnatanttttttttttgacaacaaaaaacgagattgcactatcagtatatcatgagatatactagtaggaacaattcttatcatacaataacacgaattctcatttggttaaatatatagactactagaacataggagtaccaaaagtctcttgaccttgcatatcaaaacatcatctgtattcagacgaggaagccctgggtttggcggcattggacgaactgaggtgcagagacacgaataccacgccgatcacaactatcaggcaccccaccagcgtgctgaagaaaagagccccaggctgccttgtctgcacgaatccatatattccaccggaagttaccacaatcatgtcggtgagaccgtccccggagaaatcctcagngaggtgagcgtgagtggggggccgctgggagctcgatcatggccagtatgccaccagaaggagagagcaccaccg

SEQ ID NO: 285301 - DNA, 370 bp, Zea mays
cgaggcaacatttctttttagaatttttaaactaagaacacgaatgatcagtgatgccataccgtcaatcgtgaatgactaaagtggtaaaaaatttatgactgacttgagattcttacaatcttgggtgattcatgaatacatcaaggcacgcttacaaagattttacaaacaccagcctcggggctcaggtccagctgatcatggtgacaaaaccacatatagccccgaaacgtagggctacaaagagaaaatgatttacacttgttgggcatcaaatacttgacctcctcataaatgatacgttgagaaaaatgttgtgaaggctgtcaagtctgcccaacttgggaagaggcttttgagttttttt

SEQ ID NO: 285302 - DNA, 567 bp, Zea mays
ggcaaccaacagccacagcctagcagaaaggttgaggagggagaagattagcgagaggatgaagctgctgcaggacctcgttcctggctgcagcaaagtcactgggaaggcggtgatgcttgacgagatcatcaactatgtccagtccctgcaaagacaagtcgagttcttatcaatgaagctcgcaacggtaaacccaaggctcgacctcaacatagaagggcttctatcgaaagatcttctccgcttccctggcgttccttcgtcttcccttggattctccccggaaatgatgcacccacagctgcagctctcgcagccaggcctgatccagggcggcgctgccggcatggccaatccggacgtgttcaggagaatcatgcaggcacagttaagcgcaaaggacgggtctcagatgccgccccacgcattgaatggggcattcagtgacgtcgcgcagcagcagatggcgtacccgtcgtcccaggacctgagcatcgggccgtcgcaggacgggtttcaaatgtgactgaacatgcccagctgcacatactagtaaaagatgca

SEQ ID NO: 285303 - DNA, 451 bp, Zea mays
acgaagctgaggccatttatatggaactttcttcagaaggctagtaacctgtttgagttgcatttatacactatgggaaacaaactgtatgctactgagatggccaaggttcttgatcctactgggaccttgttcgctggacgagtcatatcaagaggtgatgatggtgatccttttgacagtgatgaacgagtgcccaaaagtaaagatctggatggggtactgggtatggaatctgcagttgtgatcatagatgattctgtaagagtctggcctcataacaggcacaatttgatagttgtagagagatacacctatttcccctgcagcaggcgtcaatttggccttcctggaccatcacttctagagattgacagagatgagaggcctgaggatggtacccttgcttcttcacttgcggtcattgagagaatccaccacaatttttttt

SEQ ID NO: 285304 - DNA, 310 bp, Zea mays
aagccctttcgccacttagcacaccggcaaaagggctaactaaaactggcagataaagatgtctcaactgacactgcccttattgcatcccatgataaacaaactaaaatccgccagagatttttttaccccaaaattgggcttcttttttccagccttttgataccctaatgaaaaaaaattgcttttcaaagttcagaggggggaaatcatccagttggacccttttgctgagttcggagccaatggggatgagctgaccagcttgacccaaccaggtcaaactttgacactggttgtttgatgcccc

SEQ ID NO: 285305 - DNA, 546 bp, Zea mays
gtatacattgcagagctcagattgcaacttgggcttctaaagagggagactacagacactagagatggcagcgagctttctatattgagtgatgatgagacagcacgtcgatcacttcctgagactggggaatcccatgcttttaggaatacggaagaaagggacttctcctacgtgtttgatatgcttgctgctctgggcatccacgcggccaacgaggatgacctccttgacaactgctacttactggagtgctctgcaggccttgatttatacgatgacctcgaacagaagtacgacagcctcattttatggcctgtgcatgagaggaagctcttgtttgatatcacgaatgctgttcttggggacatgatcacctccgtgatgaacggctgctcgaagggactgatggcgaggtgctcgcctggatggaatcgggaagagtttgctgagctcgtgtggcaaagggtggtgcagctccggcaagagatagagttcaaccaggaagccctgctgttgagcgtagagtgggctggctctgaagat

SEQ ID NO: 285306 - DNA, 396 bp, Zea mays
agacaaagggtcgcgtgtcaagttgaccttgactttggccaccgctgggcccacgccgaagtggtcgagtattattttgttctggtcacgattctagtagtacatgtacaactacaacaaacataaaacctcaacctatcatacctgtccttggccggatacaagtcacataaacaaatacatcgtcaggatcccgtgcagaggggggaaatgatctgggggactgtcccataaataatgttcgggagatttgaaaggctcgatcgtgtttctgaaacacgaacagctccatatcgatctggtgctttcatctctacatgaggcccctcttgcgataggggtagcttggacgaggtaccgcccttcagacgatcacacacgatgtctcataccgac

SEQ ID NO: 285307 - DNA, 607 bp, Zea mays
atccgagaaaatatcccgataggcggtatccgacagatatcgggggtattgtattcgaattcgatatccgaataaaatatccgtatttgtatccgctatcaaaaaaagaccggatatccgaaaattccatccgaaccagtattcaccatcttcgagtctggatctggacggatattttctaaatcatattacatccctagctccaaatcgatatactcctagacgaacgaattggtctgtggaaacgattcttgtactgtttccgtcattgtatacggcagccttgttcggaatcacggagtagctccaaatcgatatactcctagacgaacgaatgggtccggggaaacgattcttgtactgtttccgtcattgtacacggcagccttgttcggaatcacggagcaaactgatgctactagaaattctctccctagtgtcgcgaaggcgtaacgtatctaatctatccgagggcctcaaacttatcaagttggctagccagaaactaaatttttccgggtcctgtggcccaggcatgccctcaagatccagatgtcttgttcgccttgcagtccgtacggtatctctagcatgtctgatatatgcc

SEQ ID NO: 285308 - DNA, 466 bp, Zea mays
aaggaaacctctgtgctttacttccaatatcgcttgcatttgacaagtcctggtaaaaacgtacagagaacagaaggaaacctctgtgctttacttccaatttcgcttgcactcctgataaaaccacactgtacagagaataaaagggaaccttccagcccaaaccaaagaagcccactctctctctctttttttccctgtttggcggacaaaatagaaaacgaagcccacttattaaaccccaacagcggcactttgcgctttgcaccccaagaaaaagcttggcctatatttcatacgtgatgccaaccttgagcagctggtctttgggaatggccagcgccttgtggccctcggtcaggttcttcctcaggaacgtgtagatgtagttgaccactatcttcttgaggacggacgagttgggccccgcggacacgttggcctcccccatcaggtacaccacccc

SEQ ID NO: 285309 - DNA, 332 bp, Zea mays
cactgcaacgttaacttactagaaaaaaggggtgcctccgcggcgccctatggtgtcagaagagcttgtctttgtatgtataaataacggatttgtatcacatgcatcaagtataaacatattgtagcaatataaatgcattgttggacatagtatgacaacagaatacatatgcaatagaaggaaacattgaacaggttgttcagttgatctctgtttcaaaggcgcagacgtatcgcatgaggttttacaacggttctaaaaaggcagtgtacaagtagtctatgaaaggatgttcagtacagtaatatgtaactaagactgtttgcagc

SEQ ID NO: 285310 - DNA, 647 bp, Zea mays
atcgacgcggggggatttattgtatatactcattcatttctatttacgtagtagtttgtgcgtataaggtcaggtaaaaatcctcaggtgctcaagcatcccgcgagtgcctatacatgggatgaaaatatgcacaatcacaatacaaaaccatgtacgccttcagcttcagctcggtgtacactctcccagcaccgcatcagggccgcactgctcgcacgcgttgccagcagcaacacacgcacacacacagctaacatctgcatcatcgggtggagcgctccagcttgccgctcttttggctgtctcggactagaatagctggaagaagaggcttgttgaaccgtcactgaacgaccggaggtctgctggcttcaccagtgccctgcacagcgggcaagtccgctccctctcgaaccattcggacacacaatcttcacagaagacatgtttgcagcgcaaaaggatgggaacgtgcatcttctcttggcatatcgcgcacaaatctccagcagcagccacctgctcgcttgttgcatatgagccacaatggaagtctttatgagataacgctctcagtgccgtcataaatgattgaaccttttctgcgactgatgtcaacgtgaaagtgagatacaggccagtgg

SEQ ID NO: 285311 - DNA, 456 bp, Zea mays
cagagtcaaatacttggatattcatccatggaagtgtcatctctacatcagttcagtaccgattcactcatgcatgcatccacccaccatccagtgtcggacaacacaaacagctcaatgtttgttttacagttcgccgattcagaaactacgaggtccatcgtgtctagtgttgtcagttcaggctaagcaagagccttcttagtttttacctaatattaatatattagttttacctattatcagtctcctcattctcacttggttttaaggcagttacagtcagagaacaatcgctgagcagtagcatcttctgccaatcgacttcaatcccgttgtcatccagccacaccgttccttgtagtgttccaccacatccaagattgtgtctgcttcacctttcaccccaccaaaggtgaatattgagccaccgagcacagctgaagaatgatatcc

SEQ ID NO: 285312 - DNA, 378 bp, Zea mays
tcggcctcggagattttccaccgcgtcgcgtccaagtgccgcttgctccacggcaggtatctggcgacaccatggctggcgagcccgcatttgcagacattgttcctgggcatttacgggacgccgccttcattcacatacaagagacagttgtacactgttcgtgatggtggaaccattgctttggattggctgctcgcatctgatttggaagttgcagatggattcatttcgaaagacgcttcaacaccccttgtagttgtggttcctggattaactagcgattctgctgctgcttatgtaaaacacttggtttactccatggcaagcaaaggatggaatgttgttgtaagcaaccacagaggtcttggtggtgtg

SEQ ID NO: 285313 - DNA, 578 bp, Zea mays
  unsure (1)..(578): unsure at all n locations
cgctctttcctttctctgaatgccctgacttgttctgcctccgcggccaagatccccaaaactaccgacgcgccgccgccgccaccatgcctctgtcacacgggaacctgctgctcttgattggctctgtcatcgctattgttgtcacctccgccgccgccctatccgtatacaccccggttgagctcacagtcacctcgcatccgtcggccttcgtgcaccttccgcacgcgcgaccccttgacggtggcggtaccgccgggccctactgcacgcgtgttctcctccaaggccgtccctcccgcatccgcgacccgtctcgcttcttccacgcgctttgactgcgngccaacgccacccgtccccacggcctcgagctctgcttccacagaaatgccacagtggggccatgcaagtgcgccgcgtcccaatggcagaaaatgcccaagagcgggctctggatgcaggtcatctcaccatacgactaccggattcttgatttccgaatgcctgctgacccttcgaggtctgttgtggtgtccactgaggaagaattcttgctccacagggtggtgttc

SEQ ID NO: 285314 - DNA, 360 bp, Zea mays
cgtaggatacgttgcctgcaacgggcagtgaatcggagtattcactgggggggatacctgccgaactggatcagatgcggccatcagggagctgaggtcgctgggcatcaagtcagtgatgcttactggggatagttctgcagcagcttcatatgcacagaaccagcttgggaacatacttgatgaggttcactctgagcttcttccagaggacaaggtgaggatcgtcgacgagctcaaggcaaagcatggcccgactctgatgatcggcgacggcatgaacgatgccccagcgctggccaaggccgacgtcggagtctcgatgggggtatctgggtcagcggttgctatggagacgag

SEQ ID NO: 285315 - DNA, 559 bp, Zea mays
cacgcacggctttcctttcctcgccgccggaggcgcgccgcggaagacgccacaatgagtttcgtcccgtccgttggcgcactagaggatgccctgcctgaccctgcactgcaatccgtcgccgggtgctgaccaggcgagctcctgattcggagccattttgcggggttcttttggggggccccatcgccgtgcttcgtttccctgcccgccttggccgtgcattaatacccgcttccttgtgatagtcctctccctccctccctccctccgccctcacttcccactcacctcgcgctcgtcgccgcggccggttcggttcttgggagtgccagtctgctgccgcttgcggtgaccggcaccggcgcgcagacgcagcacttcccggagaccatctgcctgcgccgttccgatgggttgcttcgggtgcttcgcgccggagggcgacgaggacctcaggccctccaagcacgacgattcgtcaggggctgatgcgaggaggaaggtcgcgccggatgtggccagcggctacgcgcacagcttcaccttcaaagatctg

SEQ ID NO: 285316 - DNA, 368 bp, Zea mays
aggggagcaagtggggggatgcaaaccaatttttggtccataccataccaataccagacgggagaatagagcctcagaacattcccggcccgccacttgacagcaaaaagaattatccctccctctccctcacgaatgcctaattctgcaaagactgcatggttccattccaaggtgccttctacctctagtactaactactgcctacaacaggaggaggacgacgctgaagagcagcgcggtggagacgatgcggacgagtgacgagacgtcgccgaacgcccggtgcgcgccggagcctccctccggggagttggacgacggcgccagggaggtgccgttcatcaacgacgtcccgttcttcccag

SEQ ID NO: 285317 - DNA, 306 bp, Zea mays
  unsure (1)..(306): unsure at all n locations
atatattattgttaaataaacgggcaaagagctggcacaaggaaggcgacgacctaatactatgccaacctgggcaaccagcgtcaagaagtatatacccagggccagacctgcccaacttggctcacctgaaacatactacacaaatacctctggtttgtacaactacgaagatgctcgccaaatagtagaagggcaccagacctgaataaatgcaagtccacanccaggtctcttcagatgtagccatgttgtcgaggtgcatgcatgatgccggtgtagggcagggtacttcacgaaaacaac

SEQ ID NO: 285318 - DNA, 407 bp, Zea mays
gctcataacttgactttccatgaggcattgtcaaatgctgtttatacgaagaaccggttctttacagattgcagaatacaaaaatcgcaacacagtgaaacactagaaggaaccaaaaaatcccttttaagaatatttgcatatatacttaaggaacctaaataatgaaagaattgaactgtttgaaaacccatttaacacaagaacaaagtgggactgaaaaagtatggaaatgtggtagcctcttataaaatgccaaatcaaaaaaatggctcgagtcctcctaatagccgatttatttgattagcattatatattatatatcttgctaatatttataatcttgtggactgcccacattctcagacccagcaaaactgatatcaggtggactgctccttccatgc

SEQ ID NO: 285319 - DNA, 626 bp, Zea mays
aagggcaacaaaagaagaactcaggtgacagaaacaggagatcagtctcaaatgacaaactacgtggtaaatgctccccctcacgctttttccatggccagaacccagcgggctcacaagaggcggatgctgggatgtctcactacaactgaaccgagatcatccatcaggttgctggtaccatcgcagcaggcgccgtggttctcgaccctagggctgctgcccgtgctgctggagaccgatccgaaggcggtcgtcctctgcagaactcccacgggggacgactgcatgccgtggcctgaatcccagcagtagtagtcggttagaggtggcgccgccgacgggcaacctcttgcttccgcgttgctgttgttcttggccagaacctcccccaacgggccgcccgtcgaagagtcgcggaacatcgtcgcccaggtcgcttctagctggctaacctcgtatctgttcgctgcagcgctgacgacgccagatggggtatactcgcggcccagcttgagaggtgacagaatcagcttctcgtggtcgtggatgggagatgtggaggccgatgatagctcggaggatgccattggagcggatactgagagctgggacctctgagctct

SEQ ID NO: 285320 - DNA, 437 bp, Zea mays
gagagagaggaatagagtacttttcttgatataacatgcgagacaattacatacataagggggtgaaaataaagtacacatcacatcggtgctttgtggttgcattgtggtttagggttacagaagatatatactagtttcctctggtagctagtgcatgcttaatcatcatatgcgtgcgaggtgaatggggcatccgtttctgagcctgggaaacattgcccacttctcaaggctggggtcgtcgtcggccatctcccatctccatgttgtaacaaggtggtgcagaaaaatgagcatcatgattttggcgaggttcatccccaggcaggttctcccgcctgctccactacaccaggaagctgtacggctgcttcgtgtgcatgctatgcccgcccgcgccccgggcaggatcaaacatggtggggttgtggtag

SEQ ID NO: 285321 - DNA, 307 bp, Zea mays
  unsure (1)..(307): unsure at all n locations
gcataactgnactccacgaaactaggcttttttttctttgtacagagtatgtaccaagtagtacaaatgaagccacactcattagcactctccacaagctaccaaaggggggaaaagagaggaaaaggcgtaaagagggaatgcataatcacacagggcaaaaaccaggagctcttaacagatgggaggcgcttgcttatactatacacatacacaaacaaatgacaagaaaaccaccctaccggagaaatgctcatatggaccacagataataacaatgttacaacctcattggttagaatcgatt

SEQ ID NO: 285322 - DNA, 339 bp, Zea mays
gggggcaacaacaaaaccaaacatataaaattcggtacaggaatacattgtcatgaaagagactacagggcaacagtaaaccttactagatcaaggagtacgaaaaacaatcaagtttacataatgaaacattgtagtctaggaaactggagagtgtaatctcgaccctcacttctcttggtgtgatgccggtcaccatggcgtcggggatccctgtggtgcgagtgagagttgcctagtccctgtaatctcgactctcgcttctcttggtgcgatgccggtcaccatggcgtcggcgatccctgtggtgagagtgtctgctctcatatgtatcctccc

SEQ ID NO: 285323 - DNA, 461 bp, Zea mays
gaatcagaatctccatgatgattttcttattatatctagtttgtacagtgaaaaggggtgttctacgcttctcgtgcaacatgaaggatctgcctcccaatccctatccaccctctataggttagtcatctcatgtggacacagccagaagggaagcggtaaacttaagcaagtttatacacatgtcggacctataacaccctatttgatcagctcttacaacggtcaactacacctgacgcaccctatttgatccgaggaatccttctcaagctccgcgatcagctgctcaatgtttcttctgtatataggcatgtaatggtcattgatcatcattttcgaaagcctcagcttgccgtacagagatcttggcgtcaagaagatccctatgctgctttgtgcctccccatccgtaacatcatcctcaggctcctctccacgatctgcttcttccctgctgg

SEQ ID NO: 285324 - DNA, 530 bp, Zea mays
gtaggaaagaggatcttgtctgtttctataaattccataggatttataaagtcgcttcgatctcatgtgttctttctgtatccctacatattatttatcgtaaggctatacaaccacatgagccaaacggcactgtacatgctgctcagttgtaattcccaaacaacaaagcaaagtacatgctcactaccatttggtgttaaccactttgcagacatctctacatcaccaagggatcgccgtatctccggtagtaagggcttcctctcatctcgtcggcgacgagcaccgaatggtcgtcgtcgtcgcccgaggcctcccaccgggcaacgaagccgtcccaggaggagctgacgagcgttgggtagtatggatgccaggtgcagtctctgatgatggagccatgccacgaaagcctcttgacagcctccccggttaccacgtcataaatatgtacagacttgtcactggatcccgtgtatatgtacctctgacccgtgctgaaacagaaagcacaacgatatgaactg

SEQ ID NO: 285325 - DNA, 444 bp, Zea mays
gccgttgaaggtcctccccaagtccgtcaagttcgccctccccggggactgcttcgacgacgacggtggcagcgagttcgacgatgacttcgacgacgacgacttcgatgacgacgaggactacgacgacgagggcttcgacgacgacgtctacgacgagcccaagatgatgaagcccatggccgtgccgccgccgtccggcgggggcgacaagaagggcggtggtggcaagaagggtggcggcgggaacgagatcccggtgcagatcaagggaaacaaccacggcggcgggcaaccgcacaacgcaaagggaggccccccgggcggcgggaacccgctggcccaggggaagaaaggcggtggcggtggtggccccgtcggtgggccgatgggcggcatgctgccacagcaggccatgatgaggcccaacatgctgggtggcgc

SEQ ID NO: 285326 - DNA, 419 bp, Zea mays
ttccctttttttttttttttctttttttttttaatcctagcgctttttaaatatgggaacaaaccccaacccaatcggtctcaggccagccatatgagccacccttgtcagggaaacaacacaggcccataagagccacagccaccacatctccacaccactacatcgtgcagcattttggcatgtagcctccaacaacaggctaacttacaacagcaccccggtctgatataaacgtttacgtaactttcatatatataacacaaaagtggcccagccgttgtcgtatacttttcctgactgcgtacaaccacaaccgtttcacaagcgaaatgcacaagttgcctcagcgacaaagatttggtccaaagcaacggaaggactgccaaaggagtagcttcttgccaaatcattcgtca

SEQ ID NO: 285327 - DNA, 460 bp, Zea mays
acggttaattgatctcctttttttcggagatgaataattcaatattggtgcgagtaggtaacacagctcagctcccccaaactccctgaatcgagggggtctgggagttattcagcaggtaacacacacacactgacaaacaatcaccaccaaccaatgcattcacgctcccccaccccccatccaatccaataccaatcctgccttcctcgaatccagcacaggcaggcagagctgctcagctcagcagctggtgtcgagcatgccgtcgtggaaggcggcgacgcggtccggggtgacgcactgcgtgatgagcctcgccccgggcttgtgcgcccacggcttcaccaggatgcacgtggcgatgtagtccaggttggtgagcggcacgacgtgcgcgggcggggaccaggtaaagcaagctactgccgtggcgccgcatgcggtgcgctttgcttgg

SEQ ID NO: 285328 - DNA, 408 bp, Zea mays
atttattcagtttttttttttcttggattgtttttttcttttttttttttttttttttttttttttttacgaagggcgaagccccctatttcattaagaaataggaaagtttgaaacatccacaaccacgcggcacatcatcccaaaagatcgaacacggccagaaccctatctagactctaaacactatcaaactagattagtgaagagcctaagatagcaaagaaagtttggcctacgattaactacataagactttcttatttacaacccaatcagacaggcagaagccacaaaaggaactgaacaagccaaccatcaagagacaaacaaacttcatcaccatcttccaagttccagcttccatatcaaccagaaatgcgcctatctaaagggcaccacccaaag

SEQ ID NO: 285329 - DNA, 405 bp, Zea mays
ggatcagatgcttctataatttatatacatattcaaataattacaaatctctctgttccaaacaatcaaaccaatcaaatgaatgatatcacgatataccctatatttccctttctttgtagccatttcccacccaaaaccataaaaaaaaggaagggaaaaaaaatcacaactcaatctgtgcactcctaaaaaaaaatcttcagttccctgtaactccacaagtaactgtaccattcattctgctctttatctgtagaagatatcagtccgtgtgctgctgcagaagaaagtgaaactgagaattctgcctcagtagcgggggcggttccacatcggacggatcgatgtgaagcatcagccgagctatgtcatccaacgatatcggtatgcttgagtcgtcgt

SEQ ID NO: 285330 - DNA, 516 bp, Zea mays
gtcgagtttttttttttttttttttggaataaatttactagtgtcaataagtaaacaatgtatgaaagacaactacggagattgaatactttgaagaacaataagcaaaacactaatcaattgcaaggcaataagtaatgctagaaggaatagacaccgaaatttatcccgtggtatcggtgatttgccgatcacccctaatccacgttgaggtggacttcaagctctcacttgctcctctatcaagacacgacttgatctttgagccaagtggacaagaaatcactcaatacctcgattccactaatgtcacctttgccgctccggcgaggtaggcgcgaacccctcacaatcaacaccgcgacttctccacaatcttcttggagagctcgacggagacaatcacccgagccgtctaggaggcggcaacctccaagagtaacaagccaacgacgcttgctcggtgtaccacctagtgcctcaaggatcaccaaatgatgcaaatgcactaggaac

SEQ ID NO: 285331 - DNA, 330 bp, Zea mays
acaaacaaagggggttttcttgaaacatttggggctatcgacaaacttattgtgtagatttctccacctgtatgacaattgacaaggaactgtttatgaacttactctactacatcatggtcaaaaggagaagaaaatgaattatgcaaaatcatacagttccaccgcacctaaatggctgcccaccaaaccaaacgtatgatcggctcacgaatatctggcgatgccataatttggttcatgaagaccacatctatcttagagggaaagctctatcagatgccacgccatagattttgttgctatccaccgttcggaagtgtacccccc

SEQ ID NO: 285332 - DNA, 360 bp, Zea mays
gacccgcgtaaggggggagaaattactagttgggtatggttcttttcagtcagaattgcaggagaacaatggcctcactacacagtcctacagggggggggtaataatacattgggcatgggcaatctggggaaagtccatgaccactcatagcttccccagatcatccatgggccatattatcaagagaataaacagagctttacggagaacaaagaaaaaccaaacagctagaaactcctaatccgccttgtcaactgcaaaaaatgttaggcgggaactggcctgcaggactggagtgacaaaggaaagaaggcttgcattatataaaggacaaactcctagacaggggcataaagt

SEQ ID NO: 285333 - DNA, 687 bp, Zea mays
acactggatttggtaaatttcatcgggtccggtgacccctgtgccttaaggcagcttcgcccctgagtcacacacgtatacggtatatgaattaccatgcaagctcaggaaaccaaaagtaacttgagatagtaagtatgcctagatcacctaggctgccgcgacactgacgccagcgataccgtacgacacaaagacgaaccaaatgtgatcacagcagctaaccagtgctttcgtcatgctctgaatgctgaagcaccccataaagctagcttactataggacagtacgtactgctacgggcacacaggacagaaacaacgttattacgcagatgacgcccaggagtactacactgctccgatcctggtgagacggaccacacgacgtctctgaggcgccgaccgtcggtacgcaagtatcttgagccgcttcactgcttgacaaagacctcccacggcacatcgtctccgacgagcaaccagtccccttccccgtcctcgtaggtcaccacgtaaggacgatgcagacggcggcgctcgtgcgaggccacctcttccaccaccacctcctcctcctccacctcgtgatctgcacccgcacccgcacctcgttgggtagccgaagggaacatgcggcggagcgtgcggagcaggtcctggtacgagccgtggagggacacgtcca

SEQ ID NO: 285334 - DNA, 764 bp, Zea mays
  unsure (1)..(764): unsure at all n locations
tttnttttttttttttttttttttttttttttttttttttttttttgtgttttttttttttttcccacgggaagaacaccccctttccaacacgatgcaaaacgaaacattaacagggtttaggtaaccaattccgcgtgacggatcaggcggactatttctagcttgcgcatacattagcttatcttacagaggcgagaactatcttacagaaacgagaaggttctagggatgcgctagcgaaaacatttaaaaaaaactattaacaaaataacaactggtgtaacatttacgacgactcgccctcggagttctaagttaacgatcaaaaagcaaaagaagtgatactatcctccacattctgcatactgacttttcagctgcacattaatttagctggttcctggttggagtaaacgcttttcagtactgcacgggttgattcttttcccaggccgacgagtcaatggtcaaattctgagtacaactacaggggtgccccggcaactaatctgcaaaaaaccggaagcctctttctgccaacggatggttgtcatgctggctgctgagtcaatactcgagaggtacaaaaacaaacggaggtttcgtccatataaagcttgggggggcccagaaagctgcaaccaaatcttaccatcaggaatgaggagatcgctgtgaaacatcaccgttgcaagtaccatcggcatctttgctggtgtccccatgctcttcgaccaccgaacctagggggtcggcacttg

SEQ ID NO: 285335 - DNA, 488 bp, Zea mays
tgctcactgctggactgccgttgcgctcatcatccatagcgccactcttcctgctccggttcacaggagcgacgcacacagcaacctcttccacggtactactgctcttcatcctcttgccaccgttggtgccagcctcagcatcaaccttgcgctttttcgtctgcttcacagcatcttcatcaactaacacatccaccacttcagtcgcgcccatctttgaccttttatcatcttttccttcctccttgatttcaaccacaatcttcacagaaccttcaacattagcatcagcgtctgcactgtcttgctctccctcattcaaaccactaacatcctctcccttcaccaaatcaccatcattttcctccgaatcaccatcaccacattcctcagcatcatctgaagtcatcttggcttcttcaacagccttgcgttgcaaagtctcaatcagctccatcatttctcggttgatctggggattctct

SEQ ID NO: 285336 - DNA, 447 bp, Zea mays
actggaaacagttcaaccgtatgcctatcctcaaagtaatataaggggataatttccctttgcctatctaccgtacaacacattacacatctcacacatgcacgcgaattacaggcatggagcaatcaaacaagtgaagctgaggtctttctgcattgcaaagcagtgtccttgtcacaacaatggagcatgatgtattccttccctctttctgcttccagtcctgctcacgatgggactgctactggctgagcggcacacactcgatctcgatctcgacctcaccgcgctcgacattctggagcctgagtgtgatctcctgcttgacctttccactcgcaacagagatgacgctgtccttggcgagcacaccgttgctgtcttcgctggctgaccatctgtagagttctgtcgattcggtgatggtcgagttctcgtgctccttcg

SEQ ID NO: 285337 - DNA, 336 bp, Zea mays
aaagggaaagggaaaacggcccgagtgattcttttagcatacacgtgcatcgcccaataatccatcagttacatgacacgtatgaattattggttcataacatatatggggaggggtccagtataatgcaggaacaggaatcctagctcactcaagcttccatgcgtacagaaacaggcagaagtcagagtactcattggcggcggacggcagcggctcgggcttgaagatgaacagcgcgttcctgacccccgtgccaaagatccagtcgtgcgcgtcccagtacacctgcaccttgagctggttgatggagatgcactcgttgcccctgaactt

SEQ ID NO: 285338 - DNA, 541 bp, Zea mays
cagaaaagatgggcaaagtgtctcatatctagttatatattttatttataaaaacaaatgaaacaaagacacaattattagcatcttataaatgagcagctaactacaggcaacttacatacaggaagtttgatgctagatttgcaacgtcaaatcctttttttttatctcggcaaataacatacaacccttgaggtatattctgtcaacttacaaacaaagaatgtggtatcggcagctatgtatgtaattgatcatttcaatctaagtgcatcactgtcctttgctttgacctcgcaatatgtctccaaagccgctcctcattatgcgaccaaacctcgtgctctctggctgagcctgcaggttttgctcaggagccgtggggccagcaggatcatgttcctcgccaccttctttctttgtgaggagactgttctcaccaaagaaactgctgacagatgatgcaatcccaagatgcgcccccattaccttgctaatgctttccagcgtaccccctgacctttcccggcttatgatttct

SEQ ID NO: 285339 - DNA, 467 bp, Zea mays
cgacggcaagcttataccaaaatgcagacatttatcttcttgatgaccctttcagcgcggttgatgcccacacagcaactagtctttttaacgaatatgtcatgggagctctgtcagataagactgtccttttggtgacccatcaagtcgattttttgcctgtatttgattctgttctgttaatgtcagatggtgaaattattcgtgctgcaccttatcaagatttattggcacattgtcaagaatttcagaacctcgtaaatgcccataaagacactattggtgtttcagatcttaacagagtcagatcccatagaacaaatgaaaacaagggatcgattgatattcatggaagcttatacaaagagtctttgaagccatcaccagcagatcagctgatcaagacagaggaaagagaaatgggtgacactggtctcaagccttatatcctttacttgcgccagaat

SEQ ID NO: 285340 - DNA, 475 bp, Zea mays
tctaattatagaaaagaatagagactacacagttgatggccgctccgctcctgttggactatcaggtgctagttatatatcatcccccatgagggaaacagagcagtcaaagactagttttgaccagttttattctaatgccaatttccagttgtatttgtccttctgcaactttgacaaggcaatgttcttgggtttctttcatgagctatccgagcttccctttgaactgcaaagaaaagctgtcagagatttgaagacttctctgagcggtgaaaatgaaatttggcattctatggtctacaatgggttttttgaagcattccatgaattcctcaagaatgacagtggaattcacacactgcaagctcgaagggctgggattcagttttttcttgctttcctttctagtggcagggctcgaattccttcagtttgtgaagatgtggtacttctgattgcatcactacatgat

SEQ ID NO: 285341 - DNA, 490 bp, Zea mays
ggaggctaactttacttccatttcttttcttttcctaaaaaggccaatgagaaaattatggatcttcttctatcagggatggggggcaagggcaagcagctattttggatgtaaaccaaacaaccgactgcacctgatactttgatattccccatatacaagggcagatcaaaggaacctaagatataattgacatcatccaaagtttatattccatcatcccaccgaggaaggtttgcactagcttcattgaccattttcactagagtaaccacactttctggtactccaggagggggcaatgtaagatttcttggtggtggcctatctgggaatgatcttttgtcaaatcgccattcaccaactttaccataggtcagttcaccctttagtgagtagtcacatccataagtgaagtggattataaatgtattctggagctttgtatcaaaaggtggctggatcatgaaatctttacgaaggatatgat

SEQ ID NO: 285342 - DNA, 303 bp, Zea mays
gtgtgcaagtgcaagcagctattttggatgtactaccattcaaccgactgcacctgatacctttgatattccccatatacaagggcagatcaaaggaacctaagatataattgacatcatccaaagtttatattccatcatcccaccgaggaaggtttgcactagctacattgccccctcctggagtaccagaaaggggcaatgtaagatttcttggtggtggcctatctgggaatgatcttttgtcaaatcgccattcaccaactttaccataggtcagttcaccctttagtgagtagtcac

SEQ ID NO: 285343 - DNA, 489 bp, Zea mays
ccctttcgtgcggcgggcgattcctcgtggaatggagcggagttcaaaatagctggacgccaacgccgtgggcaccacgggacacgccacgcgcgtcggccacggccacgacctggtgcctgccttgcgtcgcgcgcgggacgtgatgacttgttgccttgtccgtgcgctgcgcggcgcggtgcggtgcggttggtggttgctggttggcacaggaggaggagcgggcggtgtcggtggccggtgggagtcgtgaccggagttaccaccgcccggccgctgtttggtttgttggctggactcggatattacggccgggcccgtgttacgtcggtcggggggcccgtcgcttttcttgtgcaaacgtgggccccggcctgtcacgtaatgtgtgcagtgactgaagtcgtggggaaagacgatgacgtcattcatggcagatacacagtgcgacgacagtgacatggacatggacatggcgcagctgga

SEQ ID NO: 285344 - DNA, 438 bp, Zea mays
ctccttagacaaaatcaccaatttggtggaggggtttcgttcatatgttctaatcacagaagtctgattttacaaggtacgaactgcacacttacaagttcattattaatgaatatttctgccactcctgcgcttgagacctgcaggcttttgcttgcctgcatccaagtgaacagcgacgacggccaaggcgcatgcgggcatggctatggcgcctgtgccaggatggggtcgtgcccgcgccggtgcccgaccgcccagccgtggcagcacactcatgccgtggccacgagcccgcaggatggtggggccgcaccgcagaggccgccgaggcctggacaggggagacgcccgtcggggccgcctgcccatgcgcgcacaccgtcgcgtagggggcctcgcgcccgcaccgtcgcgcatggggcctagcgcccacgc

SEQ ID NO: 285345 - DNA, 476 bp, Zea mays
ttttcttctttcttttttttttttttttttttttggtttttttaaaaaaaaagggggtaaaaagcttcttccacgaaaaacaatatggtcaaaggatcagcaaaggcgcctgaccctgctgacagccaggaatatctgatacttacataacccaatttcatattcataaaatatatctgaaaaataaacagcgataatgtgcagtctcactaaactagccacttattacactcgatgagtaaccagctaacaaatggggtccggaatctacaagagctacactaacatcccgaccactgcttgtgggatcagagtacagttccagacttccagacttacattccaggatccaggctagtccaaattcttggttgtcatgcaattcagcagtccaggcgttaaacttctaccccgtgagccgcaaagtttctgtacatgttaatgtcaaacaaatgaattgacaaatgtaatagtta

SEQ ID NO: 285346 - DNA, 377 bp, Zea mays
tttttacaagaacagagagcattccaattatttgaataaacatacccacagaatctggacagcggtggcaatatatcacaatttcagaaaacactaacacacacgactgtagatacacacacaagctaataaaagcagtaaggcaaatacggcagtacatgaatatacatacttaaggtagtaggattgtaggaatacgtagtcgcgatttgtgtaccataggagcgatgaaactgaaacgctttgcaccgatgagttggcgtccagatcaggcgtgctcctcctcgccgtcgtgctcttcctcttcgtactcctcggcggtggcgtcctggtactgctggtactcggcaacgaggtcgttcatgttgctctcggcc

SEQ ID NO: 285347 - DNA, 482 bp, Zea mays
gggaaaccgacccatgtttccaggagtcgggctttctcacgttgaagatgaaacgggacagcatcacatcacatgtgatggtgctcaagaaatatattcccatcacactgcatggtgcatgcacagatttgcctggctgccaaaagaacttaacctaccggactaacaacaggtagcgttttacttacacagcactatttcacatatcgttgcctctccgcctgctgccagaggtctgaactccaaaacatcgccccctgtcagaggcgtgctgcccgcgtcacccaatggcggcgtgtatccagctcccaacgagtgtatcatcgctttcatggtcagatgcttcatcaagtttggcaattgcatcaagcaatgactgctcttggcctataagcagttcctttgccctttcaattgcatacacatctggccgggataataccctctccacctgttgacaacacagaaggcattgaaataac

SEQ ID NO: 285348 - DNA, 400 bp, Zea mays
gaaccaaattccgcttcttcaaaaactactgcttccatgtatggtacaatttccgcaaaaaaaaaaacagctgcaacggctttttaaaacccacagctaaactcaacaaaccctaaaacaagaaatcgggatattacgagccctgaatgtgacgaagtacatggagctaacaagaaaacaatagagacagagtatgtgatgcaggatacaagaagtttctacgctgcccaatcagcatttcaggtgcattttatgcccccaatttgacgtgttatggttatgaacctggaggagaaattgtaagatggtgtcccgacaatatggaaggagacagtgaagctgacttgacagtggttccacgacacagaaatacaagaatgttgctaaaacacgtgactaa

SEQ ID NO: 285349 - DNA, 618 bp, Zea mays
gtgcagaataaagaataattaccttaaccaaagaataaaaatgtgtgctttggttttatatatatatatactgacaattcttctgtaccattacaaaccgaaaagaactaaatcagtaccgctaacagttcgtgtatcaactcagacggggggtggaacaatattgtacaaaccgtatgaagtgagggcgtgaggcaatccttcacctcaggataagggtcacttggtcaagactaagttccatcatttcgaactgtagatgtctttcctgcaggtcagacagatggaagtatcttcctccctcatttgacagctacactccaagttcttaggagcttagtcatcccaatccacatcccaaccatctttgctatttgtctgtgatctcaacgaaaggccatttgctgagacactgcccgtaggctttttatccacaggtcctgccggtgcttcttcatcatcccagtcatcgtcccagccgtcttcccagccatctgttgtgcttgcggtgttgtccacccccgaagagtttggtgcctgacctcccatctcaagctgttggtacgggacaccatcattgccttttctctttgcaaacttgcaacaggcacatccaac

SEQ ID NO: 285350 - DNA, 418 bp, Zea mays
gagtaaggggggaaccccctatttcattacgaaatagaaggagacataagttcttacaataccacatgagcacccagaattttaaagctgacaaaacacacaactatcagctaaaaaggaccaaacccttgaccaaaccaaactactagtagcaacacaaaaagtaacacagagctgaccaacatcaaagttcacacagatcacaccaaagcagcaagcagcatttctatctcatagtttttcctgtagctaggcgctacaagggagaagaagtagaacgaccgcacagttattgaaccaaaataaccagataacaaaacatgtttcatttcatcggattcgtctgtcaactggcctccaaccacgagtcttgttgtagatctcacacgccatctttttgattttgagacttccgagc

SEQ ID NO: 285351 - DNA, 364 bp, Zea mays
gctgggcgctctgtacgccgccagcgggagggatgcgctccttgccgtccgcgcgctgctcttgctcagaggcgtccttgagtccaactcggcacggttcgttctggcataggacgtcttcggaggatccagccggcttctagccgccgccaacgtcttagatgccggagcacggctcttgctgggagtccgtagaacgcctgccgtcttcgtcacaacggccttactcgtgacctcgtcgtcgacctgcaggctgctgccgacagagagctccctggcactctgggtgcgtcgtcgtgtactccttgatgctccccgtggggctcccggatatctcgtgggcaacggcgatactatcgacttt

SEQ ID NO: 285352 - DNA, 626 bp, Zea mays
tttttatatttttttttttttttttttttttttttgttttttttgctgccaaatgggaatatgatagaaatcgaactgctagttgggttgataggaaatagtattacaagctactgttattactctatgaaatacagatgagttgtttcttcagacttgagagcataagcctaaagcttttttaggtcacacattgaaaacccacgacatatgtagcagattagatgttacagatgacaagtctacaactgatcaagataacgggggcccacaaggaatgtgctgccacctacagagctagagagtacttaaaaaggctatcaatttctggcagcacatttcagcgaggagtccggacctccaacggcagcattggagacgtcgcgctggtgctcgtcccgctccttagctgctgctcggacgctgcagacttgagctcaagctgctgcagctgatgcacgacgtgcgacatcctcgggcgcaccgaagggacgtgctgggtgcaggagtagacaaggtcgacgaccttctggacgacccccgcgtccggcgactcctggatgagcgggtccagcagatccaggtagcggtgggactgcaccagcggagtggcccattcgaagatg

SEQ ID NO: 285353 - DNA, 592 bp, Zea mays
  unsure (1)..(592): unsure at all n locations
ctttcatataaaccttaaatgcaaattatntagataggctaaaaaacactccattgaaagcttttgagagccacctgaatagtacaatttcaggaatgtgctcaagactcacaagagaacaaaaactaagaatcaaaacgtgtctattttttgctaaaatatcagccactacttgtttctctgccaattttaaccatgacctccagcattaaaactaccaattaccagagcacgttcgggtcaacattgagcatggaagatctctcagctgccgcgttaccatgacaatcatcgtactaatatatcaggttgcaacagcaaaacttaaattccatcatcaccaggatcgagcaagtacttgaatacaagccgggtccaaaaaaactgatgtcgatatcgtttctacccgcaaatccattttacagaacagctgagtcccagcctttggtagtttggtacccgcaaattctcttccagggggaatggctcactcatcatcagcacgcctttttcttctttttcttctctttcttacctgattcttcggtttgcattgcgacatcctcaccatcagcgtcagacttctttctct

SEQ ID NO: 285354 - DNA, 348 bp, Zea mays
tttttatattttttttttttttttttttttttttgggggtttttaccataattccagcccagcttgaattaagaaatacacatgtgatgacagtcatgaaggaacaagggaaagatagcgcacgaaacccagcaggttccccacactttgggctgcagctttgttggtgttgtcttaactatggcgggggcgattcttcttccacgagggaagtaaaggacagggggatttacagacgccagtcaaccatccatggggatacattgccctggcaaatatttgggtgttgttcccgttgcacttttgaacgaaaacgttgttatgtgcattgccattcgagcgagaacc

SEQ ID NO: 285355 - DNA, 429 bp, Zea mays
ttttctcctttttttttttttttttggcaaccaagggaccctatcacccaatgggttaggccaatgaaatatataaatgatacaaatacaatgaagttggcatgtacctatctcaaaccaggagcgattccatgaatcattaatggtacattgaaaactggcctcccagaaggccaccacactggttaacctcactggttcaaagagggtcacacaccctccagttgctaaactaaatcatgctgcttttgtcctcggaaacttttaagtagtttgataagctcatacgtccgcacatcatgacccaaccggaggcacaactccaacggggtcaatccatcttgggttctaatagttctatcagcgccctttattaaaagcagcttcacaatgtcaggcctctgtgtttgtaccgcaagatgcaaaggt

SEQ ID NO: 285356 - DNA, 475 bp, Zea mays
gggagggacaaacgaacccccgccctatttgccaaggtacgtacatgtacatcaatgctgggctgaccaaaaaaacaaaacactgatggaaatctttcaccttgtttaatggggagaagttgtaatgtacttcctgtgtttcgttttacaaaacactgagaagctgacatctcagtggtcgcgacacaaaaagcctgccggggtttcctccgcggcgattctagaaagagcaaggtgtttttctctcgcgctaaaaatgttgactacaaaggtatctggatgcacaagaactggaggaagtctacaagcttcggtagtccatgacagtcacttcgtcctccggagcatcgaggtcttggtagcttcgtattctgcgaggatcatgcatatgatgaggggaaggagcgccaaagattggggatgggccacgcattgaaggaccaccacccgtccctgctttcctaggatgtggacc

SEQ ID NO: 285357 - DNA, 331 bp, Zea mays
agccataagtagtcgagaatatcatatgcgtggaacaaacatcagtccctcttgtcacaagcatctcatctctaatagatagatagataatgatgtactagtaaacataggcaggggggacgataaataacattccgacgaaatgccaaaataacagcaattgtcggtggatcaaagcgcggtccgacgccttactcctcgtttacggcagcctcctcggtaggtggagcagtcgccgacgaggcctccgcggactcctgcgcctgcgcgctcccctcggcgggcgcgggcgccgccgcagcagcggcggaccgggtcttcgcgagctcga

SEQ ID NO: 285358 - DNA, 392 bp, Zea mays
gcagtcacaaattttggtttattaagattccgcaatccgtctgtttcaaaaattattcgagctcaaactcaccaacaagcctcttcataataaactatcgaattcaaaactgatagaactctcccaagaagctacaaaagaatgacccgtgtggcaccatggaaaaagtggggattctgatccgcaccacaggattactgctcctaactttgtcaatcgacaccatggaaaaagtggggattctgatccgcaccacaaaacggcaccaaacgagtcacagtgcagtctggccggtggacgatgaggtcatgatgttcagtgtctccgtcacagaagacatggcgctcagcgccgccttaaggacatcctgagagcacccaggcttcacaatg

SEQ ID NO: 285359 - DNA, 313 bp, Zea mays
gcaggcgcaaattttggtttattaagattccgcaatccgtctgtttcaaaaattattcgagctcaaactcaccaacaagcctctccataataaactatcgaattcaaaactgacagaactctcccaagatgctgcttatgaatgacccgtgtggcaccaggattactgctcctaactttgtcaatcgacaccatggaaaaaggggggattctgatccgcaccacaaaacggcaccaaacgagtcacagtgcagtctggccggtggacgatgaggtcatgatgttcagtgtctccgtcacagaagacatggcgc

SEQ ID NO: 285360 - DNA, 435 bp, Zea mays
ttttattattttttttagaattaatgtgtggaacattttttttcaactagaataacgtagttccactagcgatcacgaatgcttacatcagggggcagcacctaccgaagcaggcacaaacttaagtacatctgcgcacatagtcgcacggattcaccaaaaattgtcccataaagacatcagcttgcttcaactcctatagtttcatcgtagcgcaagttatatggccggaggcccaatcagcttcaggtcagcagcaaaatttgcaatggagcagatgtaacgtctttttttttatggacagatctaaagcctgcacgaacggataagaaaagctgaattttcatctcccataccaaacctgcacgcctacacaatgtgtcagatacctttggagcccaacacagactacgagtctgcagaacacgtagcaga

SEQ ID NO: 285361 - DNA, 350 bp, Zea mays
gagcaaagaaaatgagcagcagatacacatgctgacatgcataggatcataaaagttgtcagttgttacagaaatgccttagatccatgtcttgattcaaacgtctagtactatacacataacagcataccaacataaacaattagagtgcaaaaacacatgctaatgatgagtcattctcattgcatcctctgctttctaagcctctcaagctccttcaccatctgccagtgctccaaagaaagactcttctcgccaaagctggaggccattatttgtgccattgttagccatctgctaagttcagaacaacccaagctcctatcatcacgcatggcactgaccatttc

SEQ ID NO: 285362 - DNA, 458 bp, Zea mays
gtctagttgtcggattcgttcctcccctgctcaccccatggccgacgtctcctctaccagtgctccttccagcgctcggcctccagctcctacgcgcgctccgtcttcccctgccgcgaccccgtggaactcccagctcgtgctcacaatccccatcacctatgcgtccactctagcatctccctcatgcgtcctctgcgcgagcgagtccgccttggtccggccagcgatacctccgccggctccctgatgctcgcgcgcgtcagctgcttctccgcctatcgcacttgattcctgtaggtctcgccctccgagctcctctcggtcgccagacatgcatcgctgctgacctccctcatccgatcgggccctacctcagtagccgtgtcttctcgtcaagctcgtggccgcggctccctgatgcctcgtcatccctgttctccctcacatctgagctc

SEQ ID NO: 285363 - DNA, 320 bp, Zea mays
ggaggggtgccacgagctcttgttcttcacgccgggcgtcgacgcggcggtccagggagcacgacctgagcagagagcgcgaggacgacgtagccgcgaggacgatccgctcctgctgctgctggtcatcggtgcagtccagcacgtccgcgaggccgccgttgctgtcccgcgcgcgccacgggcggcgctggcgccgcttgcccgcgccgccgcccgtgcgtggcacgaaggccgccgccgcgtccagcacggaggtcgggctcagggaggaggccgtctcgggctcgggctcggccgcggggctcctggcgaaggcg

SEQ ID NO: 285364 - DNA, 403 bp, Zea mays
gatcgagataactcactacaggattagttgtctcactgtttccaagattaacaccaagcacttaaggtacggcaatggcgcaagatgattttaccaatagcttacagcaagcttcatcctgcacaattgggtgcttacaaaagcctagcagaacagtgtcacctgcccctcttagaggtaattttttacagactgcttacgagacttcatccaccgaaacacatgggcccctcaggtaatgcatcggtacgtcacgtggttcccggtaagctcgctgtcgtatataaccttaacaacagttcccttgcctagcccataatagcgagcaacagcatcattctccagcatgcgaggcaactgtgaatccaccacattgtactccttcaggagcttagctttcccc

SEQ ID NO: 285365 - DNA, 300 bp, Zea mays
attcatgcatccggtcaattagtttatactgcctcagatttttagcttctttctttgggtttcggtctgtttcgctctttcttgcttcgacctaccccctagtttactgactcgtaccctaggtgagtgagcgtgtgtgttgttgacatgtgagattgttctctctctctctctgcctcagagagagggagatcaaggagactatgtcggtcgtctggttctagggaagagaggaggactgtggcccgttttctgaatagaaaagcaaggcctcatggttgctgtgccttgtgcctgtca

SEQ ID NO: 285366 - DNA, 555 bp, Zea mays
ttttcctccttcttttttttgataataaacacgggcagcaccagggtgcttcacataatactctgctgctgttactcggtgactacattaataggacgatagttagacggtatatctggctgtttaagcaactgcgatacgaaagagcaactaatcaactacgtagtgctttcagacttgtttgtagaagagaacatatgcttggtcatgcaagacatcgttctcgccaacgggcacaacagcgtcatcgtcaaagcgaagccattgcccgttgccatgctttgcgtgagcggtgtagtgccccctgtaggggtccctcccatgatgagtgatggttgcaacaagctcgtattttctaccctcttgtgatggtgagctcagcagatcacgactaaagaaccagtacggatggaaagtggagtggcttatagactttagtgctcccatgatttccataactgaacctcttcaagtgcagtatcattatctttgaaagtgcgtgtatcttgaatgattttctagctgtcaccaaaccagcctttcccgcagctgttc

SEQ ID NO: 285367 - DNA, 526 bp, Zea mays
ccagcgcacatacataccactcataacagtgttcatgactcatgtgaaaatggaaaataaaataccagtaataacagggttcatgactcacgtgaaaggggaaattaaaattcccggcataacagtgtttatgactcatgtgaaaagggaaaaatcagactcgaggtatagtttcaggttattactaatctgcagggctgttattactaggcaggagtgactccatcctgatgagatgaaacagcttgagtaatacctttgtttctcaatgtggctcagaattatcatcacgaagcaatgccacagttgacaagccatcgaacaatggtttttcatccacaccaccctcattaccttccatcgagaagaagtcatggtggactagactttctttgagcctatgcctgctaagcttcagataagcgctccattgatacagggccagcaaactgccattgacaccagaaatgtgatgcagatgttgccacaggatgcctgtttcccctcttttagaaagcactagcac

SEQ ID NO: 285368 - DNA, 462 bp, Zea mays
ttgtttattttctttcaaaacgcttttttattggggattattgcttgattacattatacaggatgatgaggaggaggaagaaactcggcagcaccaaggagtgacagactaccgaccaagtggcctctcgatcgatacatctctcatcactctcaaacaacagtgtgataagctaacaatccatgcacctctttgttcgtttcttcagagtttggacaccgactagttttatttatttccctatctgaagacgcttcacttgccctaaccaactccatctttctgtctctctatctgactagtatagtatgcactccaaaagaatcccaaaccttccatgaacaagaagaagaagaggaggaggaggagaaggaaaaaaaaactcaaaaggaaggaaagaaaaaggagaggtgaaaaaaaaaaaaagggcggctgctcgcgatctagaaccggacgcgtggg

SEQ ID NO: 285369 - DNA, 651 bp, Zea mays
tttccgcccttttataattctctttttttttttttttttttggggcggtttaacatctgtctaggttgaatttttattggagcataatgcccaaagaagcacagacagcataggtaacagagaagatataaacgcatatagtagaacaaaaagagtagaacaaaaagggcacaatacgagactactttgtccaattgttccaaaatctgatacacgagtacgtgaactttggagtattattttgactctcccttgaatacagggaacgggttaggttccatcatcacagaagaatagttcatcttgccacgagcacgatagctctagcgcactgcagcttcacttcttaggcatgaaaatgatattcatattctttcgttggtgacgttaaacccagctgcagctagccttacagacacaagtgttgaagtcgaaaggacaaccaaaagggcatcttcaaaaatgccgattgggacaccagaatacaatgttcaggatacgatattttcttcagtgccctgccgttcttccctgacaatggaaccttgcttgaatgcttgaaaaaatggtactagtactggccatctctaccgtgtaaactgccgtgcaaagtacaaaccaaatatatgcaagattggtatacaacaaaga

SEQ ID NO: 285370 - DNA, 448 bp, Zea mays
tgttcgcccttttaataattttttttttttttttttttttttttgtaagtttgcataatcctgacagtaagctgctacatcagcacaaaacaaggtatataatttacacttcaaaaggaaacatcttacgccaactgctgctaggtcaaaggattaaaaagtttcaaacacaaaaatttaagtacagagcaagctccagcttcaagtgcaaacttatttagcatcgccagatggtggaactacatgaagaagctcctgtggagttgagcctggatccaattcatagcaccccttgggagcattatgagcttcttctccagtaaggacatggaatggcacttggtgtgaaaaacacatcatctcttcccttggtatcctccagcttctcgatgcgttgtgaacaggcttaagcgctgacacaatcccaggagccttcacaataggcatc

SEQ ID NO: 285371 - DNA, 562 bp, Zea mays
attccaagcagcagcagcttaaattatgttgatcacacagccagatcattccaacagtaaaaaggaaggaaagaaaaaaaaaatacaaatgcagacaacattcagtttattgtataaaaggtagcgaaactacagccccaaggctgccgcctgcgtgatgcattggggtctcatcagtaacagccaggcctcccttcccttcctcctctcaaactctacgcaacaaaactaacaatgtctgcctcggttcagtgcaatattatcagtggagcacctactgttctgggctacatcaagcctgcatccatctattgtctcaccttcaattctgtgcccttggcaaagctgtcttatgcagattcaatcctcgaccactcatgttgaaccaacatctggagctgtccaaagtttcacctttttgtccacaccagcagtcgccaaaataaaaacatgcacgccaccattgggaattgtccgtggagcccaagcaatgccagttatatcaccttcatgtgctttgtcagctgtatccaaaactgcaccagtttccacaagtaaccat

SEQ ID NO: 285372 - DNA, 231 bp, Zea mays
ggacagaaaactagaacgcggtggccagtttcaagctaacgcttctactgcacagacatcaacatcactgggcaacaatagaaacaggcatggtaacaccctgcccaacagacatatcaacattattaggcttccccgggcatgactacaaccactggcaggagctagtgctcggcagggcggatgtcctgcaagcttttgcccaagaactcaatgatatcagaggtgaca

SEQ ID NO: 285373 - DNA, 445 bp, Zea mays
gaccaagctttaccagcaattgtcatgcttctaatgtcatctatgatgttacatagttgtttcggtaactccaatcggtggatctacacagacagctttatcactacaggggctaatttctaacttgctcaagcttcatactttaaacatatgcaggcatacactgaactgtgaacttgaaacaaacacaactcagaaacaaagcagagaccgacgaattacggccaagaccattcacaactacagcctatcccagtgtaagctggtcgaggcatgactaagacgcgggttctctttacccatatcctccactaaatcttacaaaagtttgttaagctgctgatgttaattttgaggagccggccaccatgtaccacaacagatgccatcaaatgcgcagcgccagaaacttcactgtacaggatgtccagcaactttggtcaga

SEQ ID NO: 285374 - DNA, 488 bp, Zea mays
aattcgaaatgccctttgtttcaaggataaaaatttctcaaatgtaccccttgggctacatgagcccatgtcagctctacagagagccgaatcaatagctaaaacatgtttaatactgctcttaagaggaaaaaaataacgacatagcttagccatcagacgcaacatcagcactgcatatctgaagcggcggctgctgctccatctcacagctctcttcgaagcaccgatacaagtaaccaaaccttccttccacggctgcccaatttaccacatggtgggattatcgtcagcgtgcacaaaacgtttcgtctgtatagcatgcatgtaatcaccgagctgttaaggaccgaacgcgattctctgcacaagatcgggccttctcttgctcggcatccgaacaaggccagtgacctgcatctcagtaacggcgctgcagaaccttgcttggatcatgccatcaccctccagagacgtggagtttgatt

SEQ ID NO: 285375 - DNA, 466 bp, Zea mays
aattcgaaatgccctttgtttcaaggataaaaatttctcaaatgtaccccttgggctacatgagcccatgtcagctctacagagagccgaatcaatagctaaaacatgtttaatactgctcttaagaggaaaaaaataacgacatagcttagccatcagacgcaacatcagcactgcatatctgaagcggcggctgctgctccatctcacagctctcttcgaagcaccgatacaagtaaccaaaccttccttccacggctgcccaatttaccacatggtggggattatcgtcagcctgcagacgcaagaacaaagccatctaagttaggagacaaagagcacaaagcttgcagctaatctaccttgctccgattcaacaactggaaacccttacgtgcacaaaacgtttcgtctgatctagcatgcatgtaatcaccgagctgttaaggaccgaacgcccgcgtcc

SEQ ID NO: 285376 - DNA, 318 bp, Zea mays
  unsure (1)..(318): unsure at all n locations
ttnttttttttttttttttttttttttttttttttttggcgccattgacatcccttgggattcttgggattcaaccccgcttacattgggactcttgggattcatcaaccgctacagcgtccgttactccgttagggcttgttcggttaccctaaccctcttggtcaaacagcattactgactgacagacacacacacaaacagcagggaacatgcaagtcccaggcagggagctgggtgggggntggatcaaggtgtgtgctgaacacacacacacacagcaaggaacatgcaagtaccaggcagggagctgggtgg

SEQ ID NO: 285377 - DNA, 308 bp, Zea mays
tttttattatttttttttttttgggcagagaaactgaggttattatttggtaattttgacgcacacactgcagaaaagtaacttacatgatacaccaaaatagtcgcgcgcaccaatgaatcagcaacgacagccactcatcgccgccgacgatttacatgtatgcatgtatggcgcgcagccgcaactcgttctacttgttcttcttgcgggtctcgatgacgaagaagaaggcgagcgcgacgacggagaaggccgagaagacgccggcggcgatcttgagagaggctgtggatgccggtgatgcc

SEQ ID NO: 285378 - DNA, 508 bp, Zea mays
ttgcaagcaccaagcattccaccacttggctgaacaacaaatcaatgcaaagtgatcaatcaccatgtcgcgaaaaggaaccatcagacggcataacaaacgaacacaaaaccagttaaccgataccggtctgtttcatataacttgtacgcttcaccacagtttcactcagcaaatggacgcggaacgccagaactctctacgctatctgcgtctgggatagcaagtaggatgaaggccaaagggattaaatggcaggcccatatactgcggtgacatgaactgtggtacgaatggacttccttgagctgcagaccaacctggctgggcagggtaattgtgaactccaggcacagcggcgtaagctggacgcgcaaagttttggatctgagctgcattcagaaccagaggaatagcaggcgtcggaagcttaagagtagctggctttgttgtcggttgcatatgctgctgctgctgctgtgtcacttgcgccatattttcttgatgc

SEQ ID NO: 285379 - DNA, 309 bp, Zea mays
  unsure (1)..(309): unsure at all n locations
gccggggataattgatcggatatacatacaatgtctaggtattgtacacgcatctcacatggacgagaacaaaagggacggatatactggaactggaggtggacggccggatcagctcagcaggctcgacgacgaggcgacgaagaagctcctgtcggcgactgtgactgcgtctgggccggcagtaatcgtggtagaggagcagtggtgcagtcccgctggggttggctgttggtgcagccgtcgatgatggcgtcggagacccgccagaggcgcgcggcctcgtgcccacgcgtctcgnccacgtcc

SEQ ID NO: 285380 - DNA, 589 bp, Zea mays
cattataattggttcatcctcacctaagcttcaatatcactggagaaaagttttggccaatattatatacatctcttctttaaaaagaaaaaaaccaaaagatacttttgtctctctaggcaaaacgaatcaaagttcatcaattctgtacagtcctactgaaacatatataacagctcgtacagattgttggagtccaaaagttctgatcttcagggcttcaagctaccatgagaagaagggaacaccccactgtactcaaaggccctgctatccatatcaaacgtcgaggttgacatggatgaactggagtatgggtgcttaggtccaaccttcatcgttcttgattcaatgctgaatgaagagctcgtagacattgagcccggtgtgagcccattgtccagcatgatcgcctcaatctccctcacaatgctgttcatcgagggccgggcggttgccacctcttcaacgcattgcagtgctagttttagaaaccgtgggaagccaaagaggcccccaattttctgaagaacagggtccatcacatccttgagcccatagtgcgtgccatcgtcttcgtctagtgcca

SEQ ID NO: 285381 - DNA, 437 bp, Zea mays
gaaacaaacagaagggagcatctaatctcactaatcagggggccagaagccctcagaacagcagcggtgtcgagacacctagacagtgtctgctacaaaccctacaccagtcgggttgggtgggggtcgtcatacagcgccgtcttatttacaaagatgacggacccacagaaacgaacctacagcgctaagatctaaccctccaaaggaagccctgcgtctcacgcatcaatcaggtcgcgatgttctcaaacccagtttccttgaccagctcggggaattggttcagggagctgacgagcccaccgagcgattagatcagctcatctgcttttcggcgggcggcctccattgcgtcaggcagcatcgaactaccgagatcatggttctggccaccatcctgggcagcctctttctttagtatggcatgtatgtgc

SEQ ID NO: 285382 - DNA, 599 bp, Zea mays
catgaaccattttggctatgggatatcaaatcagatcgtcttcctcgctgttatcttcttcttcaacccttcttctacctctcttctctccgatattcccttctaggtgctaacaccagcttggctggccgcatcagcatcgcttgaataaataccgccatctgtatgaagtgaggaggtgatgccaagcaggtgtgtaaccatttagaatgcttgtggtggaccaactgcggacaagctgggaagaaggcacgaacatgtagcagctctctatcatcgattgcggttgcggcttgcaagcattctactcggcacaggacacgtaccgagtgaaagcaactgttcctattgccgtgccggtaagtactacactgctactctccttttcccacgagtttgaccagctcggccttggcagcttccatgaccactgggaaatcaacctccaaatagcggccccagaagtggttcttggaccaggtggcagatggaaaagccgggcttgatatgccatgcataatcctagcaacggcccttggcgtgaatttcgcaaacgaattgcttttaaggaacacctttatgtcagcttgcaagaatgg

SEQ ID NO: 285383 - DNA, 436 bp, Zea mays
gataggaactggccggaatagatatttcctttgtttgttttatgtcctttctagttcagacttcacaatacataaggaattccaccaccagacacaactggtccaccagacaggcaggaacaccatgcacacagctacacccactccggtgctgtgacgcgcacattagcacgacgctcacacgttccaggcttgcgacgctggggctgctcccgtggttgatcaggtactgacgccgggcttgtaacattctcactcccttgaaatcctgcttgaccccaagcaggagcaccaggaaaacattgacggagagcttcaagatcttcccaggtggccaggtcagaaggtaagtcggaccactgcacaaggccttgctgtacgagatggttgcctttggtaagtcctcgcggttgaaggatttgaacaggaacactga

SEQ ID NO: 285384 - DNA, 399 bp, Zea mays
aagaagagatgctatagacaccatactggctataacaaacttgtgcaaacaacacgaactattgatgggtttacagtagctaaacacgcgcacaccattcacgcgcattgttatcgatattattaatctactgttacccctcgtcacttgctatgttttatgaatgccaataaacaagtttctagactgaggagggcacggtttgctcccctattattagcatctaatccacagacgtcaacctctcgcaaccaacatcaaacagctgcccataatcttgcagatcaagggaccttacctaatccggacgccaaaaccaatcctagggcctgtaccagcgcatgatgccttgatccaccaccatccggtggcacgcgacgcacaacctactttggcagt

SEQ ID NO: 285385 - DNA, 557 bp, Zea mays
aactcctcatcttttttttcttttttttttttttctttttttttttttttttttttttttttttttttttttttttttttttactgaacttttggacccaatgcagtttgaattacatgtaataaatattattttctccctaaaagcaacatacagtaggaatccttggctcaagctacttagcaacttgtaatgtactaatgcctatgctaccccaccagctcagtcacaacagcctaagcataaaattcaggtacaacatcaatataattcatggacagtttccatcccaggtactatgggaacttggtatcgatggacgtgtacaactgtaagtttcacttctcaatgaacaaatctgaacacgaagactggactctgtaagtcaacaaacttataagatccttcaagtgagttcaaatatattgcttctcggggctcctcgcttactccactctgcatggcgtagtccagcgccatttcatagtcgacctgttcaacatgctgagtcaagcagtctctaaatgtcatctccgttacctcctgagaatttacct

SEQ ID NO: 285386 - DNA, 391 bp, Zea mays
aaaggcaaattgtacagaataatagtcaaggtttattctaacaaacaccactgcaacaatagtttgggtaggagtgccaaccatcaaaccccctggtttatgggctctgtggccacaacggtatggaacacattttggtaccttctaataaaaagccagaaattaagccaaggatgaattgcctgagagactaagacaccacagcgaagttgaccctagacgcctggatcaccagctatggttcgcaaaccggtcatttcataactggaaccctatgctgacttccattatggacgccagcttgcgcgcttgcctacccaaaatgaccagaaaaactgaaaagatggcttgggtgctgcaagaagccgtcatttctgcgcagcatttggag

SEQ ID NO: 285387 - DNA, 520 bp, Zea mays
caaccgaatgaagtaccgctctctttcatatataataatgttcttgctactccgctaagaacaatatgcaccccggatttgatctcagcacgattcacaaaatcaattatctaacatggagatatacatcagttagattacaaactcgatctatggacagtttcatagaacacatctgctgtgtgcaacaaggcacaagggtgtgtgtaaaaaacaatatagcaccctattatatttatatatatttatgctgtagcagtaataatatgacggtttattcatttcatccttactaggaaaatgctcagctccggcgcgccgccggcgcctccaccgcccccgttattatcggcgccgttcccgccctcctcggggttgatcatgtagaaggcctccgagtccttggatccgacgacgcgctcgacgcgggcgcgcacgtacgtgagctccccgtcgggccccgggggcacgccgcccttctttttgggggcggccgggagcacgccggcgcccatggaca

SEQ ID NO: 285388 - DNA, 456 bp, Zea mays
ggggggaatagttttccgaatatgatgaggggttaagaggccgcttagatatatacaaaagttaacatccggtgcagctaccaccatgcctacatacatacaaaacaattccacacttgggcttctcgttttatgcaggcaggaaaagtaatcaacaaaagaatactacaaggaacaatctacctcaactaggggtcattttgaagctccatctgaatcagtttgaagcagcgaagtgatcactagctgcttaaattgaatctgaagatcttacagctctttgtgatttcgatctcagagctacgatacgagatatcgcaagcaagccattgcattggacatcacccgagaaccaagattcaatcaatagctggggagttgttgtcattgctggcattcgaaatggcagatcacatcgcttgggtttgaattcaaggatgtatcagccaatcatca

SEQ ID NO: 285389 - DNA, 407 bp, Zea mays
acgtaactggcaatgcagccagtgcaagcccgagtttattgcccaacaaacatatttacaaggtgcctaaaatgtgcctgtatttgggctctagagcttttgaggtgttttcacccctatctagtaagtaaaatctgaaaactaatccaagcacacacctctatcttctattgtctctataccaacacacacacgcaaaatcatctgaactggcatttgagcaagtcactcagcagccaaatctgtttccctcctgagtcttcagactggtagccatcatgaaagacagtggaagcagcaaccggccactatcttagataggcattcagcgcaaccagctttggatttacacttcatccgagtaataagtaccttgcgcatcagcaacgtccttgctcgcactggta

SEQ ID NO: 285390 - DNA, 404 bp, Zea mays
ctaggggggtatctgattacgatgggacttaaacaaacatgatttaacgttatttgttacctgttacattacaaacatataaaccaaacagcacccaagtttctgcaataactccgtggggaattttccgcctcttttctgcacacacacacacaaggacatcttcgaggcttccgtttaggtacgaactcgttagacaagtaaagattactcatcagaccatgctcaaacagagttacaaggcgagggtgcctctccagaatcctcacagcaaacaaccttgaactccgagcgtgcagcagtagatgaccgtgcgtagtggtggtctggtggagaagcaacaccgtctcgtggttgtggtggtggacaatcaatcacgcagcaatccaacaggaacaacaaca

SEQ ID NO: 285391 - DNA, 516 bp, Zea mays
aaaaagaaacgggtgaagtagttacctacctatttgttagatgctcttgcttggacaacacagtttgtctaacccagttaacttcggaaacacctgtgtgaagaagctgcagtggatggtgtataaacacactgttacagaagcagcctatataataaatacactgatcgtcagatacaaactaaatactggtcgagtcaaacaccgtacgatcacacagcgagcgtgcttcgatttgcagtctagccacagggcgtgagcttcttgttgccagcgccgcgagggttgtcgtccttccagtcgtcccacgctcgtgccttggcctcctcggcatcctcgtccccgccctccccttgcggcatcgagctgctgctgctgtcgccgcccttgtgccacgcggagtttgcttctctcatcatctcggcggtcctctcttgccacctctccatcatcttcatctcgcgcaagccagccttttctatgctcattgttggcatcctgtaactgggctgaaaa

SEQ ID NO: 285392 - DNA, 432 bp, Zea mays
cacaattcacaaatttatatatgtgtgaacaaaaaaaaaaagcgaacaaaacgcgaagaccaaaaaaaaaatgaagacgcaaaaataaagatactatcaaaactcaaaccaaaacctacctaattaaattacaccgcatctccgtttattgcgcttacaaaccccactttccaccatgatcagctactagctccatcgcatatctcgcagctacgacctcgccgatcgatcagatcatacacaaccttgcttactcgctctctctctctctctctctccctcgctgctccactcgccaagaatcgatcctccgctgttccatctggctgcatcgaacggtgatcgcaattgtggcattgagaattattatttcttgtgacggggacaagaggaggcgatctatcagtggaagtgctggtggtcggcccacgg

SEQ ID NO: 285393 - DNA, 395 bp, Zea mays
gttaaccagaagcacacgagggcgccacctgaatttattctttcagtttgttactcattaactttaatcagcaacacctcttgtttatacaaaggtttgctccggttagcactgaatcatttacaggttcataaatcacaacagcctccaatccaacccttcgtttccacaggtgacagacaatcaaaaccactttttgctcagcagtttcgaaacggtcaagtctgtgtcgccgaatccatccataacggccttcgcggagtgaaattcggctcttgcggtaaagctgcttcgaacaactatgcatggcatgccaatgcgttcggctgcaaggacaccagattggctgcccgcaacaaggatgcagctttgcacgtcgccccaacgtattctga

SEQ ID NO: 285394 - DNA, 377 bp, Zea mays
gacatgacaagcttctgctgctcgtttccaaccaatatagacgctggatagtccttccagcatttatgtacttctattcttattgctaatacaattgtacaatatgtcaatcatgaatccatgataacttacaagttaaatgcaagctttaccctaacttgtacaacactgaagcgcaatatgagaccagaagatgttaatacaacttgtacaaagagaactgaccctccagccatctgcaaatgcgttgcgagtttgcagccagcagccccacattcacagatcggcccatggagtgactccaacgtgggtgatgctactctcgcggcctagcgagccaaagagaactcagggcacgtagacgtgaaaagtagtcg

SEQ ID NO: 285395 - DNA, 419 bp, Zea mays
  unsure (1)..(419): unsure at all n locations
ttttngtcccttttttttatcccaatgtgaacttgtgattactgcaaaacagcaagcatatcccaatgtgaacttatcattacatgctagagaatcgaagcaacgaccacggctaacaccgactcttacaaagcttcattttcaccgtacgacgaaagaagcgaccaggccacagatacatccatttggcagaagccaacgtcaagagtgccataactccaacctgcctctttaggtttgaaacccctctctctgtgcgtaaagacttcaccaccttgccatgccttgacagaaacgttcagctccccactcacttcaacagatgcaactcgacgaccaagtgtgatagtgccatcatcagaaacaggcagtttatcgtccccagaatcaagcaagacaacttcctcacgacctatact

SEQ ID NO: 285396 - DNA, 532 bp, Zea mays
cacggagttcaacaatgatcacaccatgtacaacatgacagccctattgctaaaaatgcatcacaaagtacctaaaaaacaaaatggcctgttacatcggggctagaaagagaaaaaaaacctaaagttatattacaagcgcaacacagggcatggattgattgcacacagcgtcagagaccagctgattgtggcaccacgcgtgatcaaaccgaatctgggtttgccatggctcagccgtggtagaaaatctttcgccttgatctaccaaaatttcatggtgcttaggtgttgtcgcatatgttaagccacccaggatccaatagcaatttgcctcatgaagatattggctcgtaaggaaaagaaagccatggatgtttcaatgcttctgaggcgcttgggcgcttctttgggttcacctccagatggtacgctacaaactcgataaacccttgatcacccatgggctatcggtgccgcaaggatgtctttttcggaatcaagtattcaagcttgttactttcctgaagca

SEQ ID NO: 285397 - DNA, 561 bp, Zea mays
cacagccaactactggagttgctcttatatgccgaagcagacgtaagatggaaatatagtactgtatacaagatcaaaatatacatacatgagttgaactgaaatgtcgactgcttacagaaaggggctaaaactggtgcttaagaaatacgccagcaattgttctggttacattttacaacagggcaggataatcaacttgcgtccttcaaacaagatatatggtaggtcagtagcaagcagtgtcatacccagcagcatatcacaagttcgttaacgcagaccgtctcccttcaacgatgggggaggaaggatgttctggtggctgatacatgtgacatgtatgacctgaaattgcagcatcttagcttctgataaccacacgcaagcatcaacctagagcaatcatatttctcctcggtaacccccgccgccaaagtagtcttttctcgagccagcaattgccatggacttttgatgctccaacttcggacagtcactgacacgatggccaagcccaccacaatacgcacaacctttgacaccactctccttggcaat

SEQ ID NO: 285398 - DNA, 467 bp, Zea mays
aaacaaaaaactggcaaatcaaacaagcgcacattatattatcattggacccatgttaattcataattcaactacaggggagcaggaatatagattacatgtgaatggaaatatcagagcacttgactgagtttgttcgttatgtaaataaactcaagattagctaatgaatctctaccattattgatgttcgcaagcatgcacagcataactaatttggcacttgtctaattctgacgatctgctcagaatatggtcagatctcgtattctccagatctcataataaatggtaacagtatcgatgtgcctcccaggtatgctccatcaggagtacaggcggcactttccggttccagcacacactgtacactcatcgacatcacccgcaacatgtcgcaggcagtacttgatgcgatcattcatgatatccaccataagctcatgcagcccaagaggggcagtgac

SEQ ID NO: 285399 - DNA, 462 bp, Zea mays
ttctttaacaatgaggacttcataatgtcatagtttttaaacagattacaataagatgcaatagctgcctcatttgtttactcgagttatttacatgactgggccactggcctctcatttcgaccaaccaccccgggggatgagggcagaatggtcaagctaaatggagctaaaaataaacgaatgaaccaattggtatgtacagctaaaattcgcatcagaagaggcctagaccacgggcttggcaacgcaaggggaataaagccagctctcttctcactgagaaggagacgccagttctcccaagcagcgcaggccaccctttttcctcctggcataaatcttctcagaacgaactagttttcctggttccttctcctgatctcctctgcaagtaaccaaggaataaagtctggtgtgtgctagaaaatggcctcgcaaatagcttatacacgctgtttc

SEQ ID NO: 285400 - DNA, 518 bp, Zea mays
ttttggacattgttttggagtgggggctgaggccgctggccgaggtcgacccggaggtgtacgacctaatcgagcgcgagaagcggcggcagcgagcgggtatcgagctcatcgcctcggagaacttcacctcgctcgctgacatggaggcgctgggctccccgctcacgaacaagtactcggagggcatgcctggggcgcgctactacgggggcaacgaggtcatcgacgaaatcgaggagctctgccggacccgcgcgctcgccgccttccacctcgaccccgcccgctggggcgtcaacgtgcagccctactcggggtcccccgccaatttcgcggcttacacggggctgctccagccgaacgacaggatcatggggctcgacctgccgtccgggggccacctcacccacgggtactacacggcgagtggcaagaagatttctgcaacctccatctacttccagagcctgccgtataaggtgagctccgacaccgggtacgtcgactacgataag

SEQ ID NO: 285401 - DNA, 441 bp, Zea mays
tctcttaataattctttcatgttcgcaagcaaattggcggacaaaaccactgcttacatacatgcttcccagacctaccgcaacacctgccctctctattccacgagtaaatgattcaatttcctcttcacgtgtgcttggactgctctaccgttctacatgcaattctgccgctctgttgatgcgctgcacttgctctgcttccccctcgacctacccctcccgaacacggctagcctcgcgaagacgacgcaggaccctgctggcgcaccggcgctgcgagccccagcgcatggagccgatgcagctgccggagaccgtggctcgacgcttgatggtcgccggcgcgcccgcgtctgcggcgaccctgaagctcggctccttgccttccccgcgagccgaggccgagcccctagggttgttgtgccgctgcagggtccg

SEQ ID NO: 285402 - DNA, 693 bp, Zea mays
ggggcattgataccttattggattatgtctatgccaataagttaacagaacattatatcttggatgtatgtacagaaaggtaataaaaacacacttatctcgctcagggggtccctagtttcaagctagccacgctaacaagcataatcacataatttcactatcgcggcaaacaaggaaagggcactttacaggtacgataattctagtcttgcccccaaatcgcaagacaaaaatccatacagctccagttgtgaagtgctggccctttattttgctgatttcttcaagctgctcattaatgctcgcaaagcttctttcacgttttggcccttcgtttgtctgacctcctgggatgtcagacgtaagctctcgaggccgcggcccagagaagcaatcatgggaacagaaggtgctgcctcggctgcgcactcgatcccatctccatgcatcacaaggccagcacatgcagccatgctgcagccaaatgttgcccaaggaaatattctgaaaggctgcctgtgcttcttctgcattatttcgtagaatgaagtccgcataaccaataagcttgttctctcggccgatgatattacggtatgcgtgaccgctcgaatcttctctgctgaagccgtgaactgcaaagcagaagccttcgagccagcggtaacaaccccgtgagggagtatcttg

SEQ ID NO: 285403 - DNA, 534 bp, Zea mays
caagcgtgcatcagaaaccaaaaagaggcacaaccttaacacaacagcagcaacagccttttagtcctttacagacgctgctcgtgctccagttcctggagttaaaatcagatccctgcttcgtttccaaccatcttctacagtatcagaacagggcacatggcacacgcatatagatagatagatacacaaaaattgggagcagctgatggtgaatgtgacgcagctgcggaattccctttgccggctgctctgatctgacgggggcgcggcagcacttctacttcgatgaggccttgtggagcttgtcaaacgaagggtgtctcaggatctcctttgctgaaggccgcctcaccggatcagggtccatcatagacttgattaaactttgaaactgcatcgggcaccctggaagcaatgcgatcttaccctctctaatgcttgtaaagtgagatccagactcaggaagcggggtgcctcttattagctcatagacggctgccccaagagaaaagatatcaaccttgtcaagat

SEQ ID NO: 285404 - DNA, 511 bp, Zea mays
ggacaccaattctttcattgttttactttccagggcccagcaattgtagtgtatctagcccagctgaacaaaaatgcgccggcacacgcttttgtaccacggtctcatgtacagattacacgtcatgtaaacacatgtacaatagtctcagcacaaaatcacaagaggttaaaggaaaaatacccgcaaccattcacagatctcaacagcgcaacccccctcccaactggaaggaggacaggtcgtgtcttgtgactcgagaacaaatatagcccttgcaagttgcaacccttttcctacgctgatcaaacagcgagatcatcgctgtttcagtgatcgagacatgtcggagatgaactccatctacccaaagaggccacgcggagcatacggtgtgccttactgtcccctttagcctagcaagtccttgaaaagattggggttgttccctgtcggtgtcacacctacttgccgtgcagtcgagtccttttgcaaggcatcttgaagggtc

SEQ ID NO: 285405 - DNA, 680 bp, Zea mays
aaatcaaacaacgtattgcttctccaataaaccaaatcaaatcacctaacccgtccaggacccaaaactttggacaacagacaacaatatattgtgcacattcatcagcaccggtgatgggaattacaacatgagggaggtgtaaggtgtgctaagtaacagctgacgcgctgcaaacataaacagccgacaacgctattatacaagacctgacagaccaccgtccgtcacacgaggaaaccaactttcccactccatactttgcaacatgaggcaacaaatcaaaatctacagcaaatgaatacctagtacaatggacgctgctatccctttcgacgctaagacaaaaagaacacatacacaacccctcctctatctgctggcgtctgagtatgtacaggcgcgatcccaggcaagatcctgtggtttaccaacacttggttctgctcttctacttgtttgtggaaaggatttggggagcgctgtcgacagtgactcttctctggccttcgccttcagagcaccgcttagtctcgctccctgaacagttttctttcgacattgttttgggccagtgtgtgctttcagcagagtgcttccatgtgtccagaatggatggataattttagcctcaagccaatgataggagacaagaaatcaattgtttaataattttagcc

SEQ ID NO: 285406 - DNA, 447 bp, Zea mays
tccccctccccctcggcgggcggcttgtcggcctccgcggacagtgcctcctgacgcgcccgtaggacggcgaggacgttgacggcgggcatctgcaggcatccgaggaggtactggtaggactgcgccctggtgggcatgttctcgagctgcgcgaagtcgtcgggcccgtagagccgtccctcgtagacggcgccggtgaagtcgttgagctgcagcttccactccttctggaagtcgcggtagggcttgagcgccggcgggatctcgtcggagcgcacgaacagccacgcgttcatgccccgcgcgcacggcctcagcgcctcccaccgggtgcccgccaccgccgccgccatgtccgagttcttcgccaccaccagccgcgccgtgtcgggcagcgacgcgcggatgcttcgcagctgcgccaccgtgaacccgtggcaccag

SEQ ID NO: 285407 - DNA, 412 bp, Zea mays
cccacccccccccccctcccccccccgaaactcgtgctttaactatagtatagataaaaagttgatgatggtccagtaacatagtcgataactaacgtgctggtcagcagggctgagaaaccaacctcatggcgtccagctcatacaacatccaccctacagtcggctgctccatcatggtgatgacaagtgaacccgttacagtgacatcgtcacatacccccatcaacatggcaaatcctagatgatggaatctttatttctctaccgcctcttagggggtttcactaaagatcctcctgtcgcctggcttcctcctgtagatgtcgtgcgacctggtggttttagagcagactcccttggttttggtttggagtttgcaggctgtccattctttgtgtggaatagcctg

SEQ ID NO: 285408 - DNA, 377 bp, Zea mays
  unsure (1)..(377): unsure at all n locations
tttttntttttttttttttttttgtcactaaatgataaccctttattcatgatatggtataatagatggctatatctatatagcatgcctccaaaattcatgacaccacaagcttgtctacataagaaaaaaaaacatcttcctatatctaatatctagcaattaattgcaagttgcaacttacatttgcactacagtgacaactgaacgcatcacgatgctagctcaggaccagaacaattgtacaaaaagcattgtcacacatacctacaccagttcaggcattcctctctgcatcttcagtataccacaccaccaagaccatatggactcttgactcttttggcacataaattactatagcacaatcaaaaccc

SEQ ID NO: 285409 - DNA, 848 bp, Zea mays
aacaaagttacctgagatctgcattctgattgaatctttcctcctccggttaaagctgagaccccccacccaaaagaaacgaggaactggagaagctacaagagaatagagggagagaacagccttcgacatccatccatgcacaaaaaacggggctacgagacagattctatgcactcctccgacctttacaccatgggatgggaggatggataaccagccaaaactacacaaaagtattcactcacatcagccattcccagacccgaacaaccttttaagttagcaaggcgtgtcctcgcagtgcccctcctcccccttcctgatcaccacagcagcaaccaaaagcaggttcttcgagctgtggcctgcttttctcttctcattgtatctttcctcctccatttggggcttccgctggataagcacttgagctcgccagctcagattaccactccgacgcatggtcacctgggctctgtttattttccagcagcgggcttctggtcgcttgagggttttaaaggcaccggcattgttccgaaactcagttgcgccgcgggcatgtgggtgtgtggcatgccaccacctgcagactgggttgccgctgcgagatgcataaatccaccggacgaaggatgaagcgatttcatgttactgccagcagcggctgacaaggcgttctgctggtgtggtgcctgtggctgtgtcttgtcgcctggtcgcttctggtataggccaagggcagcagcaccgccggctcctggagcctgaggagcatacgtgctggatatgaagaaatggccttgagggaacggctgcttttcattgacgatgacatatgtgac

SEQ ID NO: 285410 - DNA, 342 bp, Zea mays
aagagaaacccaagcgggtactaaaataataatagtaacagatgatctcacatcaacaaacagctgctgcagcgaacaatgggattgggcatttggtgctatagttcctacatttctacatgtaatatcgcgaacaaaaatagctcatgtcaatagtctacagaccgaggcataggccaccacggttggcggtcgcaaaaatggcgggcgtcatgatccgaagtcaagcgatgcagcattccgggtgtgcaaattcacttcttggaggggagcttcctccttttggcaggtcagtcgcgcttctgctctgtcttccgctttttaagagacacctgatgtgac

SEQ ID NO: 285411 - DNA, 388 bp, Zea mays
cttatttattattgctcagatctaacgtctttacttgtatgatgctatctgaatgtctctttgcagttgaagttgaagttgcacatagcgcatacgacatcatgttctgaaatctcgaagcacgtactgctgctactgtctggcagaggagttcgacacagagtcgagatgcctccggactcgaatggcagcttcgacgggcacgagatcgtcgaggttgtcggcgagcctggcacgccgtcggggacgacagccaggctgatggacttcatccccatcgatatctacatcccgtccgtggagcggggcgcgctcagcgagagccggcgcaagcggcggtttctggacttcctccgcgcccacccgtccaaggactggtttttgcgct

SEQ ID NO: 285412 - DNA, 437 bp, Zea mays
gtgagcctttggattggatttgggaagaactcaagtcctatgtagtccgccattgcttagcgacagaattggaggacccagtcaaggacattcttcaggtttatgatattgtggacgattttgagaagctgaagatctctgcagagccctcagagcaacaaaaaaagtctgaaaaggctgctcgtaatgtctccaatgtgtcagccaattgtaatctgaagccaaggtcactaaactctggtgctactgaaagtaaggaagctgggaagaaagagggcattcagaaagcgaaacctgatgcaagggtcagaggctccaataacaggaatccagtaaaatgcaccaccgcaaaggaagtagttgctaagaacactggtaagaaaaccaagaaagaggccaagggtcaggaggaagttagcaatggagatagcgatgca

SEQ ID NO: 285413 - DNA, 487 bp, Zea mays
cggacgcgtgggttttttgttcctagttattttttgtaataattaacaagatagaggagggacactgtctcaacctctgcaccaatatatatatggacacacacacacacacacacacctcttttttgcgtctattttctgttttacttcaaagtttgcaggtttgtttcagccctgtttgattgtgagccttggcgctggcggtattttttctaagtttaaatgatccacctgctgtaggtaagtttggttaaaagacattcctatttttctgtttagtgacactgatattagtaatccttttttttcatccatctatttaagtgtcagcagaatcgtttgttaaacttgctttcctgaacttgctcttgattctggtaagtttttgggctcctggcactttacttttatgatcttattttgatttgctttttacaggaaaatggttctggactatgtcttagatgggaagcatagttcattagta

SEQ ID NO: 285414 - DNA, 466 bp, Zea mays
acggcgccggccacggctccggccttgcccttggccttgccgccgccccgcgcctgcacgggcacgatgcccacggccagcgcctggttctggcagaacagggccgggtgctgcgtgctgccggcgccgccggacaggcagttggacgccgccaggaccgtcacctgcttggagttggaggacgacgggagcgtcttcaggcacgacgggagcgtccccgtcaggaggttcgacgacacgtccacgaaccggaggttctcgccgcaggacatgttggcggcgagcaggcccgtgaagcggtttccggcgacgctgaggtactcgatggacgggagcgcgagcagcgccggcgggagcgggccgacgaaccggttcctcgacacgtccaggcgctcaggaggtagagcgaggcgacctcctcggcggggaccccgttgcaaaagcggttgccgctgagcacgacgct

SEQ ID NO: 285415 - DNA, 395 bp, Zea mays
gcagtgaaatgcaatgcagcaatagccaacagggcaagtgcagaacgctagaactaccgcattacaatttacaactttacaagatgaatcaaagacaacagggcggggaaatggcaagttgacgctatctaatactctgtacacgtccctcccgtcgatcggcgtcacaggtcggcgtcgtcctcgtcgctggcgccggcggacgtgtcgtcggcgtcgggtccggtgccctcgctgtcagagaggcgcgcgagccagcagctgccgtggaggtggccgctgacgcagacgaagtactcgagccggccctcgtaggcaccaagcctgcgggacgcgctgcgcggggcgagacccgcggcggccatgctccaaacgcgcgcgccgaaataggggca

SEQ ID NO: 285416 - DNA, 651 bp, Zea mays
acgacaaatgtttgtgagtacacattgcacacagaacggatgtttattcgcccagatgaagcactgttctctcttctctgcaagtaaccaagggattcatcaaatgaacaaaccctcaacaaggtagtccgaagccacccggaccggactacaagtaacaaagctgtagttaagttacaggttataaactacaaaattgactgctgtaagaatccgtgttccccgatatgaccgtctcttcagtgtggtagatgaccgtctcttcagtgtggtagatgaccgtctcttcagtgtggtttcggtacatagccatctactgcgaagtttcttgtggctacaggtagcgccagccgcatgccatcgagctcaggcttcgcgatcacttggcagccgaggcgtgatgttagatgtctctgtgagcccaaatgcaaggtcaagcatatcattttcttcatctgctggatcttctaatttgttatagtagtttacatccattactattacatgacaagtagaacacgcaagtgaaccctcacatgctccttcaagctctatgtctattttcatgagcagcttctattcatggacattccatctggaacacgtattgtcttttctgagccatccttgttaacaaatgttaccgagatc

SEQ ID NO: 285417 - DNA, 539 bp, Zea mays
caacgtgtcgatgacagagactcaggtgctctaatactgcatagccattacaaagaataatgctgaaaccaccggaggagacggcattttgcctacttatgaactaaacaaacacattcattaaaccgctggaacccaactcgactgttctccatttaccttatttctaactctacatatcacatatgtgcatccatattgtctttaactttggaatctgaaactgagcattccacctcattagcatccccacatcctatttcaatatcgatgtcctcatggttatgcctatgcgaaatcttcatcagatcaccatcaatatcgaggccatcccccgcttacgctcgaggaccaccaacttggtcttcttcagtctctccagcacggttatgctaggggacctcgcacttcctcttgtatgtgcgcccggaacttatgtttagaaggctctatcttggcacacactacttcttgaaagttactcagacacccttgatcattgacattaagcctgccatccgacctgtaccgaaaatttt

SEQ ID NO: 285418 - DNA, 365 bp, Zea mays
caacaaacattgtaattgttggtcaaaacagcatacagcggcagcacagaatctcatccaagaacaccacgacacttctcagcaaacattttaatcagaattccaatccactagcgcaggaactggtacggaactaacatatatatttattaagagtgcagaacgtacgcggtagcgtacacaagcagcagatatatcaagcaggagatattgcatacgttgaggtagcatcaagtgcaaagaaaaccacaaagccaaccccgcaccaactgatggcagaaggcctcactccgccgccgcctcctcttcctcatagtcggcctcctcatcggctgtagcatcctgatactgctgatactcggaga

SEQ ID NO: 285419 - DNA, 354 bp, Zea mays
ccaaaagaacgctaaaattttattccccaaaacgttatattggggctgttgaaaaaatatttttctcgaaaatagtctaagttcacatcagattgctaataagcattccctaaattttttgaaaccaaactagtgagccatgacttgcctatttgggcaagattcctttgtgtataccgctgaatggattcacgggatgcaagcctactacatatcgtcatcgctactacacatattgctgaactctgaaccattgcgctcttttagttgctcaactttgtaagcaagcaatcctgtgcagagaaattagcttctttctgtcctgtaagcaagcagtcctgaacaccactctct

SEQ ID NO: 285420 - DNA, 418 bp, Zea mays
ggcaaaaccaagcaaaattcgttgcattaaaattcaacaggtaatacccatcgggccacaaaaggagcaaaagcacaggctgacaggcacaacaacgactggcaaaacagatcaagcttcgcttgccggttccccgtcgctggccttctgtccttctggttccccgtcgccgctggctttctggcgtttgttcgagggttcgtcttccagcccctcgggttctggggctgtattactactatctggcgcggcaccgctcccttctctgtggcaggcgccgccgccgccgttcacggcggcagcgttgatggcctcagggcccaacagagagacatgtttgctcgtgatcttccggcctgctctgaccttcgggccccagtgccgctctgggtttggaaggaatcgtttcgtcttcttt

SEQ ID NO: 285421 - DNA, 400 bp, Zea mays
tcttttttttttttttttttttttttttcacttgaggaagcacaatagcattttccatcaaccaaaggcaggaacgaaaacaaatatcgtagggtcctcgtagatcaacaatgccctaatattgctcagacatgtgatgacaaaaagtatcatgaaacaatcctgggatcatttcgtagaccatccaagcgctccaacacctaaacggacatgatcagcccccacttcctacctctttgttttgtcataaacctcgatgtatcttttaggaacatcgtaatggtcgacaaggtgtttagcaaggtcatcaatcactccaccttgtaccaagacctcggactgccctttcttacctggaagctctgctgtggtggtgctgcaagcaaattttttctggagc

SEQ ID NO: 285422 - DNA, 526 bp, Zea mays
gggccctgcatctgggttcccttcgtccacacccccggaaagattgctgaagacgccaacgcagatgttacaacagatgaatatcatcgctacaaggaagatgttgatctcatgaaaagcctaaattttgatgcataccggttttcaatctcctggtccaggatcttcccagatggcgaagggaaaattaatgaagaaggagtacagtattacaacaatcttatagactacatgattaagcaaggccttactccttacgccaaccttaaccactatgatcttccgcttgcgcttcagaagaagtaccaaggctggttaggcccaaaaattgtggacatatttgctgactatgctgatttttgtttcaagacttttggcaatcgagtcaagaactggttcacattaaatgagccaaggatagtagcattccttggttatgataaagggcttaacccccctaaccggtgcacacaatgcactgccggtgggaactcatcgacagaaccttacattgttgttcataaca

SEQ ID NO: 285423 - DNA, 448 bp, Zea mays
gcagatagagagctcgtttttcattagaattccgtttgggtcatgtcccactcttttgttcagacagactaaactagatgaagctgacttacccagaaaagatacctaaacaactggtttggaaagagctaggaggtcctcggcatgctatgggttgaaatccaactaaatcccctcatcaaattctgcatccagaaccagcagcattcgccagatactacaaccaactaaatcccctcatcgaattctgcatccagaatcagcagcattcgccagatatccagtgccatcaatcatcatcttatttcacgacaacatggttggcccctttctcctcctgttggttgcccacgccgtccttatggaccatctcccagaagaaatccgtgaggacagtctcgtatcctggcatcttggcgtaacccgggaagtagttgatgtcaatgac

SEQ ID NO: 285424 - DNA, 405 bp, Zea mays
cacattcgaacccacgatcacaattaacatgacccaagtctgctacaccaaaaagtaaggaaagcatgacaagatgtcagcactcgtacatatgctgctctcagcaaaccaccatcacctacactgtacaagttacaagaattctgttgggcatcacctttgtggccaaatgcggcacaaaccaacacattatatatcacattaccatgatccctacagctaccttcacccataattcagcctagaacgaagggacgggcttatgtgtgacgtcttggtattccaatctcacaagcattcacccttgaagcaaacctcaacgagcatatcgtctcaccaacggaggatgcctccggtgaaatgttgacaaacatgagagctttcgagtcacctccaaggcaaggc

SEQ ID NO: 285425 - DNA, 351 bp, Zea mays
acacggttaaaggtgggtatttgctctgcagctgggatttaaataacccgagttacaacaatcgtcttggctctttgtgtgctggcaaagaattagccccggtacagaacacgatggggtcccgtctcattctacagaaggggagacagattcagcatactgtcaatgataaatattttagttgacctagttcttacgttcaccttacatcacctaaaattaactagccatgaagacaacaaacgtcacttgaaaagagtctcgagtattcattggccaacatggcaaggcaccaggctgttgtacacaaggaaccctttggcaacaataagactcgtaaagcataatatt

SEQ ID NO: 285426 - DNA, 397 bp, Zea mays
attgatttttttttttgggtctttactaaggtatgtgagttcttcagcaccaacattgatcgctattgccaccgtttttgcattttacaaactataactacagtaatagaatacaaaggggaaaataacaaacaaaatggaaacattgctctatccttattctaccaacagttacataatctgtagatgtagtaatgtaccatgcttagactaggttgtgctctttttttaatctttgtacagttcagctgattgagatttgcttcgacttctgacaggatgcagcaccagttgcttcactttgtattatttacattttctactgggaaacaactgctggatacttcttgccacagaccggctccgttggtgtcatcttggcccagaaagctccact

SEQ ID NO: 285427 - DNA, 607 bp, Zea mays
gtcttcgagtgccggtttgcctcagccgcgaccaggaactcgtacgatgaaatactgacgggcctcgggaggccaggaggcggagaggagtttggcaagtactacagcctgcctgctctctccgatccgcggattgatcggctcccatattctatcaggattcttctcgagtcggcgatcaggaactgcgatgatttccaggtcaccgggaaggatgttgagaagatcttggactgggagagaagtgcaccgaagcaagttgaaatcccgttcaagcccgcccgtgtcctcctccaggattttactggtgtcccggctgttgtcgaccttgcgtgcatgagggatgctatgagcaaactcggcagcgacccgaacaaaattaatcctctggtacctgtagaccttgttattgaccattcagtacaagtcgacgtggcaagatcagcaaatgctgctcaggcaaatatggagcttgagttccatcgtaacaaggaaaggtttgggttcttgaaatgggggtcctctgcattccgtaacatgcttgttgtccctcctggatctggcattgtccaccaggtgaatcttgaatatctggccagggttgtgt

SEQ ID NO: 285428 - DNA, 518 bp, Zea mays
cccacgcgtccgcggacgcgtgggttctagatcgcgagcagccgccctttttttttttttttgatggttggacatagcatagacagtattattttaagatttatgcgatcgatcctgaagctgcattgccgcgtacatgcatcctgatacatttcatgaagtacagacaaaaccttagaacagctattcaaattattcatatgcagatatgctatacccctttacacgtgaaatctgtacaggtcgaaaacccaaaagaaacgccaggcaaaaaagtttcatcggcgagagcgacgaagccaatcctggatagcgaaccgaagggcgtggttaggtgtgagactgagatgctccagtttcaggttgttcagaggcgctgtcccctgcccagtctccaactccatccgctcacggatcgcccgcccttcgtaggtcaccccatcagcagcgcacacctgaggatcatgcattatctcctgcataatcgggcacaggaaagaggagggtgcttgttcctc

SEQ ID NO: 285429 - DNA, 384 bp, Zea mays
acaactagacaatatggtcagcacaagggaatgtacagttacggttacatacatcacatacctcccccaaaaaaggctaaaaaaatacggaaaacctttgtcgtctgatcaataatagcgacctttttttttggtggtaaagccaaccgcactatatcgaccacacacgttctagaagacgagatttacacagctatagccaccacaaccaggaaaagccgcctggtttccatcccatcagactatggttgagtagttcaggggacaatctacatacgagaatcgccagctcgattaagtttggccgcacagaatcttctgctgctgtccgtgcatccgagctcacgatgactgcgatagttggctccagttcatcaggcggtg

SEQ ID NO: 285430 - DNA, 316 bp, Zea mays
gggggaagaaaaaaaatgggttctttcacttccaaaatatacatgttttcgggcttcttttttgaagagtaaagataaatacaatgtaaaggaagggaggatctaccaaggcaaccatgggagccttacacaccatggggccatttaacgtctaaaatatcctacaaaataatatctgtacagtttatgtccacagcgaagggggacggcaaataaaggcaaccctgtctatatacaaaatcgcgctaacttgccacgcggtaaataaccaataatgttactggcgaagatcatccattccttctatctgatgaca

SEQ ID NO: 285431 - DNA, 438 bp, Zea mays
gggtcgccaatgtcaaggattttgatttagaaagcatccaagatttcagcaacatgatctatcttgtggaccaccaccaccgagaaactaggactctatgttgaagaccacgtcataacaccactgcgcaaacaagcattaaactctttaacccgtcactcgattcagcacctcgtcaaacaaatgcttccacccatataggtgggcgatctcgaccaactgaaaaaatatatggctcacaacttgcaattaacaaatgcttccacccatatgggtgttggttcctacgtatcattgcttcttcctagtactctcttcttctagctctcctaaaatttgttcggcctcgcaaagcaactcctgcaaccccggtatgtgtggaatgggaaacaagctctgaaccatatcgatcaggctcgtcaggcatatcatgtagtc

SEQ ID NO: 285432 - DNA, 349 bp, Zea mays
ggctgtaagtttgagatcatagctaacccatcaactttcgtggaatgcattacagcactagacatttcccattgtgtccatagcgtaggtgagatctggatgttgtaaacatgtaatgactggaagctggaacgaactgatgctccatttctgtttgctgagtgaacatgtgatgactggaagctggaacgaactgatgcaccacttccgtttgctgagagtgttgggggaatctttcccgtagagggggtcacatatttgctcattttgcttgctagaccggcagtgttggcagtgtcgcgcttattttgctagctagatggacataaataaaaatctactcactact

SEQ ID NO: 285433 - DNA, 388 bp, Zea mays
gctaaaaccctccatgaaatggatggatggactgatgcaatcgccttgcgagtcaagacatgtagagatgggcctttcggcccaagaatccattacaaactgggccagtggaaagccctggcttgacaccaccacctccctcaacggggggcaattgtcgtcgaagaagcaaagaatttcttcgacactgcggacggctaccaacgccaagaagaagctccgccatccgcccgttttcaacgttttggggcctcttttgatgctgtcctgtggactctcagcgcctcgagaatgctctcgacccacccctcaagtccaggggtcgttgggtaatatatgctcttcaggcccagtttcttcgctgcagacgcagtggtctcaccgatgc

SEQ ID NO: 285434 - DNA, 396 bp, Zea mays
agagagagctggcaacactcttagcattaatacaaaaaaaatgtttaatatcaatacatttcgctagggaaccgaaagttccctctgctttgtgacaatctttcttctgctttcaggggcatacatacaattacgagtataagaagatcaataggtgagcactggtgaccagcaatatattgctgcacttggtctgcctagtttaggacagtgccttgtgtccacgcctcctgatgatctatgaccccatctcgtcttgaaattacgttcctcgtagcttgcgtcctcttcacgactcacgagtcatcatactcctggaaccgtctcgatctccaccgatttgtctaccatcatactactccgggagaatacgggcatccgcttcctagtagaatg

SEQ ID NO: 285435 - DNA, 441 bp, Zea mays
agcatggaggcgacgagttcaatctcacggcaagaagcatcatatgctcttgaacgatttattacacaatgaacaatcgccaatgacgtagaggggccagtggcgtttatttattaaaaaattatgcagaaaccgaacacgtaggcttgagcaaaggccaccgccttaatttgcgatcgatcgacatcagaagggcgcctccgcggacggcgggcgctgcaactccttgaccctgacccaagagtcgcggcgggatacggtgtcccaccacttgctgacgttcctgcgcgactccatgaggcgtgcgaccgcgggtcgccggcgagtgcggtcggcgttgggcaggtgggacaggtcggcgagcgtgaacttcctcggccaggaaggcctcctcgccaaggcgctgctcgtagatgtccagcagcttgcccagctgccgcg

SEQ ID NO: 285436 - DNA, 338 bp, Zea mays
cattgcactcccgggtgttggggcgccacacacgcacacatcattggcacgttagtacgttacattacaacggcatggcggttacagcagcagcagcaaatgatcttgcatagccttctttgcgctcaccttaattaagctcaagacctttggcactaaattcatgcaactatgcaagatgcagctcgccggccggggacctccgataatagcgtcgatctcggtctcgcgtgagctgcttttgccttctcgttaatgggagaaatgacctttttttctgggtgggggtggtagtaatagctaaagctaaatctaggggttcatacagcatgcaaggg

SEQ ID NO: 285437 - DNA, 426 bp, Zea mays
  unsure (1)..(426): unsure at all n locations
agcggtaggctccactggggcacatttgaagctgcaggcgggaaacgagagttcacaggtaatgttgacagaaccgccaaagaagaacacgatggtaatagcctagtaggtctttcctttgctgcattctttcgtgaacaggagacgccgcagatgctacgtagtagtaggccggtggttgggtcaagggaccaagtaccaaccacacaacactcaacagctactgcctatgagtaaagatgccatatccgtcttcgccgcaagtacgttgaagatagtactcacagtcacagggagaggaggtgggnangctaagacaaggcaacacagtcaaagaactcgatagaaaccagagctcatcatcaggccacagtatacctatagacgtcgctggaagcaccaggatgattgatctggacgagttca

SEQ ID NO: 285438 - DNA, 555 bp, Zea mays
agattcataaaaacgggggagatcaaagtagaaatgaaaaatgtttattgggaatcctgtagtcaatgatagacgaaacgcataggagaagcaaaagaacaagcaacaacctttcctcatcgagtggaaaatgcgactttttttcctcgcgaaagtgcgtaataaagaaactcttgcacatcttattgggcctgacgactcctgagcaggcagcagcgcttcagactgatgaattgccggcgcccaccaaggagagcagcgcgtccctgtagtgtccgtgcgccttggccgcgatgacgtcctccagcttggccccgaactgctggtggtaggcggctctgatgtcgtccatgtcgtggtccgaccgcgtcaccgccaccctcgtcagggcctccttcccgtggtggtcggcgctgtccctcagcgcgccctcaatcacctggctgaagtactgcgccctctgagtgacactaccataccatcacagcttacaaagctttcctttttatttttcgggtgcgccggcgtcggccccatattacctggctgaagtac

SEQ ID NO: 285439 - DNA, 394 bp, Zea mays
ctagctagccactacaaaggggggcccggaaaaacaatgctcacttcgataacagggctcacaagggatattcctatctattcttataggtgtatataaatataaatgaatgaaaccagatatggctctctagtttgctacggaaccagggcactaatgcaagatactccctccatttgatatggcatgagggtcgccaagcaatacctcgccagctaagatgcacaacacattctataaacattgccatccagagactctttcttgaaaaatgtacttccagcgaggcaatgcttttcttgcacttgcctactccccacttttcttgctccggaaattctctctcattgccgcaactttttttttgcactggactacggttttacctgggaca

SEQ ID NO: 285440 - DNA, 349 bp, Zea mays
ggtggaaatgaaacataactttgacatatataataataaatataatatattctgacatcaaactatcggtgagaattcagcattgcaatggtgttatcctgatctccaatttcaattgctgttttcagctttcgtcctgtccaaaataccttcccgaaattgtcatcagtatattcagcattacgacttcatcgtccatctcagtcttggtggcaaggatgctggcgcacttgcgcagcaaggacctcagtgaggcacatgtctccgcgtccaggggagtgtgaacggcaacacagagtgcgaagagccacatgcagttgttccttgatagtgcatccaagctctgaat

SEQ ID NO: 285441 - DNA, 291 bp, Zea mays
gcacgaagccgggatggatttcttgcagggaagaatgtacagtgtaggataaactacagactacttttctacgaagaaaaaaaaacagagaaacatcactcttggatgaaatcatatacagtgtgaggatatagcagtgtgctgtcctccttgtagtggaggaggtagtagcatttgatgcagaagtagcaggggttgttcagagcccacttatcgtcgaccgttaccttcgtcgcaagatagatctggcacaccgagcacttctgcaagcgcctctgcagctggaacgtc

SEQ ID NO: 285442 - DNA, 463 bp, Zea mays
aagggaaggatttcatactgaaaaacgctagcaaattattcggtgaaaattaaggtcagttagcattctaacttctacgcgactccgagttacaacacacagaatcagatgtgaaagaaatgatgcatctcaaaagctaactctaaacaaaatccgctgcttgtatatagagaactgaaattgattatcaacctatatcgccctccatttgctcgcaacaagtaggctctcacttttgagtacttctgtgcctgacgatcacaatgctggcagcaatgacttctcgccttctccaagacttaaacaccacatgattgcaacccaacactaatctgttgacatgtcaaggacagacataaccagaaacggcttttatttaggtggcaccatgtgtatcttcaagaagcaagcaggattggtgcggcctggaaagcgcttgcagggccttcacatttgcacacgg

SEQ ID NO: 285443 - DNA, 392 bp, Zea mays
aatacatagcagcaataaaaggttatgccttatcatatttgttatccagtgctggaagaatacggttcttacttggtactccaggaatggttgctcttgacctagatgcgacactgaaaggcctttttcagcaagtcctccattgtctggagaacattccaaaacctcagggggaaagtgttcctgacattaccgctgacttggctgatttgcgtaagcactggctgtcaattttgatgatagtcacatcttcacgatcctcgataaacattaagcacttggagaaggctactgtgtctactgggaaggagggtttggtgtcagaaggcaatgctgcatataattggtcaagatgtgttgatgaacttgagagccaactctccaaacatgga

SEQ ID NO: 285444 - DNA, 589 bp, Zea mays
ggaatgcatcagaattctatctctttttattcatcatatatagatagagtacgtgcatacaagttaattgcaccgctcctccacaagtccggccgccacatacatgcacgcagcagcttattcatgtagcatattattaggttaattgattgatgaagatgtattattcctccgatccgccactcttaattagttgaaccggatcgggtacacgggctgcttgttgccgtagaagaggccgaagttcttctccgtgggatcgccgcccttctggttctcgttgaacatggcgaagacgaaggtctccagcgggccggtcctcttgggcgtgccgcggccgacgtggtcgatgagtccctggttgtatttccgcgcgttgtcgacgctggccccgaagccgccggccgagggccagccgctctcggacacgacgaccctgacgttgggcgcgccggccttctcgagcgcggcgacgacggcgtccaccatggcgtcgaacaggttgttgtagttgaggccgttgccgttgtccgtgacggtggtgcccggctggaacgtggcgtagcccaggctgatgtcgcgcgggttg

SEQ ID NO: 285445 - DNA, 491 bp, Zea mays
tgcaacgccaagcatccagcaacagcagccgctacctccctttgtctagctgtctccctcacccggtccagtcctgcattgcattgcctcatgaggacccaaagaaacctccttcccctcctcctgctgctgtccgccgcgctgctcgccgtcgccgacgcgcaggagcgcaagaactacgtggttcatctcgagccgagggacgacgacggcggcggcgggtcggtggaggagtggcaccggcctttcttgccggaggccacgctggactcggcggcggatgacgggcccaggatcatgcacatgagtacagccacgtgctgacggtgttcgccgccagcctcactgacgcggaggcgcagacgctgaggcgcaaggaggggtgcttgcggctgtacccggaggagttcctgccgctggctaccacccactcgccgggcttcctcggcctccacatgggcaagcacggcttctggggccgatccgggttc

SEQ ID NO: 285446 - DNA, 433 bp, Zea mays
gcaccaaaaatgggtatgctctattttacaagttgaaagttatagaagaacaaaaaaatatcaaaccagtaagcttgtaatatttcatcttacagcaatgtctgtatatgtacaggagcaagttccgttattttcttttgccaacatcgatggcaacaatgacacttctgtaactaagacgtcgccgatgaagcaggaaaagaaaatgtctagcaaaaatgctagcaaagcctcttcaagccttccgtgccagcctccccaagttattccgctccatttaacctcatgttagtgactaaagatagatgaatagccatggccaagcaagcataacaaaaatgctagcaaagcctcttcaatcatgtgaaaagaacaggtggcggttgcttgaagctggggctggaagcacctgctttatttgacgatgttaaca

SEQ ID NO: 285447 - DNA, 644 bp, Zea mays
agaagaaaaaaacatcgttgatccaaagcattagattatacacaatgctgccatggactcctccccagtgtcatttagtttaagaccagataacaatttttttgaagaccaacaacatacacttttcccaccacacaagccatcacatctacacgaagcctcgtcaacgacgcttggctcctttagtgtcggtgaatcaactcttaacgccacacctgtaaaatcccccaaaacaaccgaagcccaacctgtatatcatgtgaaagaaaggaattaactagcccagatcctgtccaatctgtcgacactgcttccggccacaatccagctgctcaatgttcctctttggcctctcgaagatatcaacacttctcctggatttctcgaactgatcaaatgatatctttagcttgtctaccttctcgacgttgctatatctatgttcagtgtttctcgtcttatctcgagttgaccttgattttttcctttggtctgtgctctttcgcgagggttcaaagaaatcagtgctcttccgcgagggttcaatccggtccacattctcccgccatcccataggcaagcatggagggagaatgtggaccggattgaacccaccatgcttgcctatgggatggcgatttctc

SEQ ID NO: 285448 - DNA, 221 bp, Zea mays
ctcgccgctcaaggccacggatttcggactctccgtcttcttcaagcccggcgagcagttcagggatcttgtcggcagcgcttactacgtcgccccagaggtgctcaagcggcgatacggagctgaggcagacatatggagtgccggagttatcctctacatcctgctatccggcgtccctcctttctgggccgagaacgaggatggcatatttgatgctg

SEQ ID NO: 285449 - DNA, 622 bp, Zea mays
cccaagtatacttttttattttcgcttctttttttttttttttttttttgttgttggttttttttttttttttttttttttttttttttttttttttttttttttttcagtcaacaatgtattttaccaagtacattagcagctcgaacaataaaataatgaatccacataacacaaacacgattagaaatgcgatagctctagtgaccgtcaagatttgcgacagacccttttttttttgcacgttgacgttacctctagattttttacacaactagcaagcactcgtataacacaacacgatcagaaatgggtgtacaattttgctcgctttccaaataaccacgatgaagtccaacctgcagggcctacacacatcagggtgacgactgacaatttcatgagctctaaaagcggctgcgcgtgcgtggtgacctgttaggctgttaccacgcgacgtagcttctgaacccgggcatgcattgccgtgaaaatgagacgacgtttccgtacatattgatatctccgggcctctgcctccattgcaacaagacataagacaatgctgaagcctgaagctgaaatggctgagccgaaggtgaaggaatcggataataatcac

SEQ ID NO: 285450 - DNA, 575 bp, Zea mays
tttttttttttttttcaaaaacaatatcagtttataacccaggaattggttgtccctacatactgcattttatctatgaaaccaaatacaatccagtaaaattcttaagtgccctcaaccagtagacaaatacagttcaagaaacggaggtcatcaatccatcacgatcacaaacgacgtatggattctagcaacagttccaccacgaccaaagacagacagcaggcatgcaaacagctcggaaactagcatgtcactcaaaccaaaattgcatcgaaacaacaaacaccagcgcacattagtttggtttacaacatcaagggggcaagaggaaggcacgacagcagtcggggatgaggataaaaaaaatctcacgatcaaaatttcccagcctagtgcaacaccaaggacagggaagctgatgcggacgcaaggagcttgagcttcgaggtgcagatcttcatcaactcggctatcgtctcattctcagccccaactattcttctcatcacgccggcgcggctccacggctctagagaatgggcgatccggccaccgatttcggagctggcagc

SEQ ID NO: 285451 - DNA, 575 bp, Zea mays
gcacaacgtcgctgcttttttcttatggaggggcaatttagactacacgtccacactaccaccggggcatttcaaattgtgtgaagataccagtacgaccgcacgagttagtacatgatgattctgcgcacgctagcacctttgccccgaaagattgctaaggggcattcatcagactgtacaccaaaatctagagacctgtctcatgaaaagttctggttaaaccttaagtttagacgttctttttctcgtcgttacagctaatgtggccaaaactaggatcgtggtgatccctagacccagcaagaccaccacccagggagagcaagtcccgtcgctgcacatcgtgccgatccagccctcctcttgttccgccaactgtctgtgctgccccgccatggattgctgagctttcagcatcagatgttcctgggttcagtctttcttagcatggtcataaagttccatgtcaaggctgttcagcgagataatttgtttcaaaattgcctcggggaccagcttccgtgcctctcctgagaagtttgcttcctccactttctttagtgatattttac

SEQ ID NO: 285452 - DNA, 541 bp, Zea mays
tgccaacagggaaaaaacgacgcccagagggccggccatccgcccatgcgggccttcgcccgttcgctgggctccgatctctccgccgccccaagcccgacggcccccaccgtccgacctaaaccaataatacggcgaaatagctgccaccgcaactccttttccgacctgacgtgcatagcgccagggctaccgaagttcgcttccgattcgatctccacagctccgacccgaccgccgcatctccgctcttactcgaaggtggaggtctccttcagccgccttctacgtcatcgcaactgccggggtcggtggctgcctcgagcaccgtggcacctcacggaaccttacagccttacagtttcatggagtgtggacttctgttgcgaacaaacatggagaaaagatatctgtgatctcaactgaaatatggagccagtcaaactagttgaggggtacaactttgatgaccatactacaagtgatgtccgtgtttgctttaaactgattgatgagcagccggaatggttttcctgccact

SEQ ID NO: 285453 - DNA, 497 bp, Zea mays
gctgggcaccgctgaggcagaggcaacacatccgttcaagctgatcaagactgggacaccgactgggcaccgatgaagcaaaagtcatccctttcatcaacaacatcctgtttaccaactaatgtgacaatggcgtagtaatgattgagttttagcaattctaaaagccactcatatcatacacttgcactcttgggaaattgagagccccaaaaaaagttttttccttgagtgtgggcgagggtggttcatttgtctactctgtggctatcagaaacggaagtccccagccacctcttctagagaagtaatcactgtccaaggaaatcgcgagagcaagagccactgccctttcaggcaaagtcagctggcgaacaacatgcagttcttcgacatcttctgcgggagcaaacttgtggctttgcccctcatcaccaaaccggatagcatactgaccagcatccgtgaagagctacagtggtcaccggacgcgtggg

SEQ ID NO: 285454 - DNA, 497 bp, Zea mays
ggaaaatgaatacgagatcgattgctttatttccttggaaccagcatgtccaaaaggataacatataacaaacacaatatttacaaaggaatcatacataacacctcataagacctcagtatacaacaagaaaaaaataagcggcaatgtaaaaaggcatgtgggccgcctaagcatttaggatcagacatcagcatacgctagataactattagccatcagaccagcttagtcaattctccagcgtccaagttcaacagctcggctttagcttactcatccagcatagtgtaggacggcaggtccttcacctccagcacatcatctagaaccagttcccgctccagctgagttcttgttgatttcaagacctcattgaattccatataggaggcacgtttcacaagccactgagcatcaagcaaccgaaaggccacacagtacaggtggtcaaaggcgttctcatcacgtccaagcaattcaaggaaacgaattct

SEQ ID NO: 285455 - DNA, 333 bp, Zea mays
gtatcagcaacaactatgttccattgggcacatgggcctgtgttgcaccatcagtaccttttctcacacaaaaagagggcaaacaaacccaaactttttcacacagcaataaacaaattatcatcgcacttgaactttgcaagtttggatcggacaatacaacagagcaaagtcccaaccaaacgtctggagaaaacgttagacaaaacactgaaaaattagattctagcttactgatcagttctgctagctgacaaacctttaccagcaacatgatgatccgtggaaaaggtcggccgctttgttttggccctcagctttcaaattttaaat

SEQ ID NO: 285456 - DNA, 482 bp, Zea mays
tttttttttttttttttttttttttttttttttttgtttgttttttttgacaaaaaatggggttcgttttgctaatatacaacaactggaaagggaatccaatggcagggcatactctggaacgggcatgactttataacttaaagctttataatttactaagaaacatcaggcacatttctgggcccccggggggtggcagatcaacttgcacaactgacagattccattcaactcaccaccaccactccaccagcagcagcagggcatgattcgcccaagggatgtactcactgcctcgccaccatggacacaaaggaaaatgccggggatctgtgtttctatctacagaaaaaagaattccaaaaaaaaaaacaaaaaaaccaggcataattctgcctcttcagttgcagtccagaccacactcctccaggagagggccgtcgctcttggcaaggaacgggtcgacccggacccacagg

SEQ ID NO: 285457 - DNA, 473 bp, Zea mays
gtcactggcaactcatgtattatatttgttacctttctttttctaaaaccatagggtcatcctccttttaaaaaaaacaattacaccagagagacccaaggctacagatcagtacagccctcgccgcgtccgccgctcagctgcccgatcgcactcatttcttccacatgccgctgatcctcctgagcacgttgccgttcttcctgacagccgcgtcgtcgtccaattcctcgcagaggcccgcgtacttaacgccctcccacgactcgctccgctccacgaacttgccgttcccgcccttgccaaccgtcagcagcgccatggctgtctccgcggccttccgccactgctcggcctgtacccgcaggcggcgcagctcggtttccatctcacccttcttcgccgcttccgacgcgtcggcctccgccgtcctcgcggtcgcggagcccttctcggactcgtactggtgcaac

SEQ ID NO: 285458 - DNA, 601 bp, Zea mays
ccagcaggaggctgatgttactgcgctgcgatcggcagtggagcagcttgagaaggccaggtatgagctggccgacgcaatcgatgccaggaatgaagcactcagccaggtagatgatgctgttagggcttctgaggtgaaggctcaggaagccgagctgcttactgcagaggttaagcgcctcaaagggctggttgattccaagctggatggcgaagcgaagactgtagagaggattcagaatcttgaagcagagaactctgcattaaagctcgagctcgagaaagcaaagtctgctgaagagaaggctgttcaattggagcacatggttgatgaacttaagagtgatgttgatgatgctaggaagtctggctccaagtcagagcagttagctgatgaatggcagaagaaggcacatctgctcgaggtcagattgcaagaggctgaccagtctaatattttgaagggcgagtctttgaactcagcaatggcagaattggattcaacaagtagcttgctctatgataaagaatctgaagttgttgcccttcgggacaaagtcaggttcttggaggatgagctggcaaagctcaagtgtgat

SEQ ID NO: 285459 - DNA, 681 bp, Zea mays
catcgccgcaccttggtgttcttgcccccaggtcgtactggttggtgggagggaacatgaacctctccccgcccaagatgtcggagccatcacctgaaagtgacggggaacaaaggtgtctgaactcagagctatggcatgcatgcgcagggccccttgtgtccctgcctgtggttgggagccgggtcgtctactttcctcagggccatagtgagcaggttgctgcatcaactaataaagaagttgatgctcaaatcccaaactatccaaacctacctccacagttaatatgccagcttcataatgtcacaatgcatgctgatgcagagactgaagaggtgtatgcccaaatgacactgcaaccattgagcccggaagagcaaaaggatccttttcttccaattgaattgggtgctggtagcaagcagccaaccaattacttctgcaagacgttgactgcaagtgatacgagtacccatggtggattctctgttccgcgccgagcagctgagaaagtcttccctccattggatttttcacaacagcctccagtgcaagagctggttgcaagagatctgcatgataatgaatggaaatttcgtcatatttttcgtggtcagccaaaaaggcatctactgacgactggttggagtgtttttgtaagcgcgaaaagactagtag

SEQ ID NO: 285460 - DNA, 506 bp, Zea mays
cccacgcgtccttcctcgcgtccgcgcccattgtatgtctccactggatcagcggtgccatccccaagggcttcagcaacagctgctatggagatggctgcagcaatgggcttaatgcccggttccccatcatcggtttcagcggtgatgtccccatttacccctccaatgtccccttcgggcaatgggatgcccccttcattgggctggcagcagccaaatgttccaacattacaccttcctggcagcagccttcagtcaagcaggctccgaacgtcactcagtgcaagggatatgcctgctgatgactactccctgatgccggacttcgattcccaacttatgaatgatctatgctattcccgtctcggttcatccacagggaaccactctgcacggaccaagtccctgaatccatcaaacctggatgatctcttctctgccgaactggtatcatccccgaggtatagtaatggtgatcagggtgctatgttttcaccttctca

SEQ ID NO: 285461 - DNA, 587 bp, Zea mays
gtgaagcactactcgaatcaaaccaaggagtcggtgactgttgctgcaggctattcatggattaatttgctgctgctgatgacatacatcaagtgacttactgacttgtatcaagcatgctgttgtttcttaagcttcgtcaacttccccatttgcagctgcacaacctataggtcttgttgcccccctttgtcctcatggatttccttaacggcaaaattttgggcaatattggagaaaggagtgaagaacggtctcatgaattgaatgtaatcggtgcatgatttgtgcggtaggcctctggccgtcctcctgtagctgttaagtcgtggtgactacttttgcctagttttggcctaaagtgtccatcaatttgtcagagatcaaactagccgaacctttgccttttgctttgtccagacacatttgccatattgcaggtgtacctatgtacttcagaatacttggacttggcaaattgcgatccctaggtgatatcccggttccagatgtctgcaggttaaatgcatttacaactatggtcatgcatcaatgcaactgtctagcagggcttttttagcccccgg

SEQ ID NO: 285462 - DNA, 592 bp, Zea mays
cccacgcgttcttttttctacgttaatagaagaaaagattgctgatttgttaagtatgaaaccagatccaaactgattgttaatttgcttcatgccatcaccacgatcgaatcttcaagactacaaatttgtcagcgtgatggagcctgcccatcagtacatagcttttttttttgtcttggggatgcatcctgttggtgagatcctcttcccctgcaccatggtcagaggttctgtggagccaaggtgctttgggctagggaggaaattgtaacagtaaattttcatacagttcatcgtgattagttttgtgtacagagcagagcatacccgtggtgacatggtccctgtagagggccccattcccagtaaaggtgggatccctcgattcatactcaccaatgtaaagtaaaggtgggatcccccaattcatgatcattgtaaaatacgtgcccagtataacccaggagccctggctgagtggcatgtatccttccagttcatcgcgattaatctctgtacaaagctgttatactgtcggttttgaaatcagttgcaattacccatctgctccagttttgtagtatcagat

SEQ ID NO: 285463 - DNA, 496 bp, Zea mays
cccacgcgtccgcctccacctcctccggttgccttcggcctcgcctcccctccgtcctccccgtctccagcctccgggaccggaagctccacgtggcgcggcagctcgtacccggcgtctatggcggcggcagaagtgtactcgccgaccgcggcggcggcggcgcagcagcagcgggagaaggcggcgtcgcaggcgtggcggaccgtggttgggtgggatccggcttccttgttcaggttctgctccagatccttcgacgcacgccgtcctgcgcccagctcttatccttcgtcggcgtccgctacccgctcctcttcgggcccacagcctcgaacccgtcgccggaggtggccttcatgccgctccgctccgagatcccagctgacgcggcacctgccccgacacctgcgcctgagcccctgggccgcctcaaggtagtgcttgacttggatgagactttagtttctgcatatgaatcatctagtcttcctac

SEQ ID NO: 285464 - DNA, 513 bp, Zea mays
tgatcgcactgaaaaatatattatgtggatgcacatcgatgatgctaactacaccaaagcatctgtcggtgtggccgtgagtagctctccgactggaccttttacttacctttacagctttcgtccacatggttgtgagagtagagacatgacagtcttcaaagatgacgatggaatggcttacctcttctattcttctcgtgacaatactgagctccatgttagcccattgacagaggactaccttcagatcacagcagcaatgaagagaatactaataaggcggcatcgtgaggctccagccgtcttcaagcaccaggggacctactacatgatcacctctggttgctcaggctgggctcccaacagggcattggcacatgctgcagagtctatcatgggcccatgggagacactgggaaacccttgcgttggaggcaacaggttttaccgccttacaacattcttatctcaaagcacatttgtgcttcccctccctggtttgtctggtgc

SEQ ID NO: 285465 - DNA, 547 bp, Zea mays
cccacgcgtccggatttctccattcccaagctgcttgaccagacaaaccataaaaactattgaactttcaatacatctcctcccgtgtccggttcttcctcccaaaatctgcccgagcttctttgcccagcagatccccggcagttgcatccccaagcgcccctccccagtcgacggttctcacccaattccgccgccccatcgacgggttcgcaccaaatcagccgcccccgcagcggtgcgggagcggcgccgtttggacgctttcccgctgaaatctcccgacagtgtctcgtcattttgacgcctgagctttatccgggtggaaagtttggatcttggtgcttgcggagatggcgagtacgggggcgggtgctgttcttgctgtggtagttttggcttgtgcactgggagccagagctgatggctctgatcataagtacaaggaaggggatcatgttcctctctacgccaacaaggtcgggcctttccacaatccaagtgagacgtatcggtactatgatctacccttttgtgcaccagaaca

SEQ ID NO: 285466 - DNA, 366 bp, Zea mays
aagtgatcgttcttctacagtacatacactctatcgatctctgtgaattaatttagttattaactcgatcatggcgcgcccccagaacaaccagaaccccagggtgttcctggtcctcaacatcggcggcgtgacggttggccgcgtcgtcatcgagctgttcgccgacaaaggtgcccaagacggcggagaactttccggctgctgtgcaccggagagcgcggcgtgggaaagtggtccggcaagcgcctgcactacaagggcgcggcgttccaccgcgtggtgcccgggttcatgtgccagggcggcgacatcacggcgggcaacggcacgggcggcgagtccgcgatcggtgacgcccgtact

SEQ ID NO: 285467 - DNA, 410 bp, Zea mays
gcctgaaccagctgcagctcatggaccagctgcccaagtccatctgcaagagcatctgcgagcacctcttcgtgccggtcgtcaaggacgtctacctcttcaggggggtctcaagagaaatgctcctgtccctggccaccaagatgaagccggagtacatcccgcccaaggaggacgtgatcgtgcagaacgaggccccggacgacgtgtacgtcgtcgtctccggcgaggtggaggtcgtactgttcgacggcgtcgacgagcgggtgcaggccacgctgggggcgcgcgacatcttcggcgaggtgagcgcgctgagcgaccggccgcagggtcccttcacgttccggacgaggacgctcagccagctgctgcggctgaagcaggccacgctcaaggaggccatgcag

SEQ ID NO: 285468 - DNA, 615 bp, Zea mays
gagctgtccggcgacgtccgcgtgagcccgaagctgaggacggtgtacctggtgaacccgtcgggcggcggcgggttcgacgagcgcggcgtgaagcgggtccggccgtacgcccgcatggacgactttcttctccccggcgtgacggaggtgacggtgaagtcggtgccttcggccgcggtggctcccatgtgcacgaggcagcacaccgcgccggcggtggtgttctccgtggccgggtacacggacaacttcttccacgacatagcggacgcgctgatcccgctgttcctgacgacggcgcacctggacggcgacgtgcagctgctggtgaccaactacaagccgtggtgggtgcagaagtacacgccggtgctgcggaagctgtcccggcacgacgtgatgagcttcgacgccgcggacgaggacgacgccgtgcactgcttccccgctggcgcgttcctggggctgtaccgcgaccgggacctgatcctgtcgccgcacccgacccggaacccgcgcaacctgacgatggtggacttcgcgcggttcctgcgcggcgcgctggcgctgccgcgcgaccggcccgcggccctcggggagcaacaccggggc

SEQ ID NO: 285469 - DNA, 444 bp, Zea mays
cccacgcgtccgatgaacgccaagtctggccatcctaatgtgggtttcagagacatagtgaaggactccatctaccgggaccccggaggcctgactgtaaaaacctcggtgcaggaggcaaggaggaacgggcagcacaaggactcaccgaggccactgctgctgtccaaatcaatggatgggacctgtatcattgggatcgataggaccacaaaggttcctgcaaatgtcactgaatctggaaggtgtttgcaggaacggtcacgcttctcatgcgatgaccgaagactcctgcggccagctgaaacccaggaatgcaagaggccttcctcgaggctaaaagagcttcctagactgtccttggacagtagaaaggagtctctgagtccaggctcacgtcagaagagcatgagttacaagagaactgatgatattcttctggat

SEQ ID NO: 285470 - DNA, 453 bp, Zea mays
agatcgttaaccgagatattctgatacatttgtccgtacactcgtttccgcaaacataactcgcgtccaggaacaccaagattattcagaatcatccaacggcgggtacaaagtgtgtgaataaaatgctcagagtaggcaatgtctgagcggaaaaaaagcataaagtaaaactacaggacattcatatgactgagagatgggacctcgaaccgatacatttctcttgggagtgcttgaaaaggttttttcaggcggtcagcttgcggagagcagtggcggtcttggaacccagcggcctgcccagatgcttggagatgtagtcaccagcctccatgagcttgttgaggtcgacgttgggctcgatccccaggccatggagcatgtacacgacatcctccgtggcgacgttgccagtggcgcccttggcatacgggcagcctccaaggcccg

SEQ ID NO: 285471 - DNA, 528 bp, Zea mays
acggatgaacccttgccttaagaattgaatgatagcattgaccctcccaagtcccaacagatacaaatgggaatcaaaatcaaagataagtatggaccacaaaccctaacggagaaaaggtaccatttacatttagttgtgtgtcatatcacctatactatgtcgtaggatgatgtactaactccattctcgaatatttgttgccgctaattcatttttgaactaaagcgactgaccaacaacagttgcatgcacggctcctctgttcttgtacttgtatgtcaccgcgaagaagacataggcgaggagctcgacgccgctgagcgcggcgagcagccagtagaagtagtccacgtggccacggttcaggttgttggagaaccagctcccgcccctgtccgtcgtcaccctgtctatgaccgacacgagcgcgctgctgatgaagctgccgacgccgaagatgctgaggtagagcgccagcccgaggtgcgcagcttgtcgggcacctggtcgtagaagaactcctgc

SEQ ID NO: 285472 - DNA, 450 bp, Zea mays
gaggaagaaagcgtcctttatggaacacaagggtaatacccagaatcacaaaaatacaaagctcctgaccatccataacaaggatatatgggggaattcccaatgaactcgttacagactgaacagcttcgcaagataatgtattcagttgcgaatataacaggaaacaaaaccccccacccaacaatcttcgaatggctggctacagaaccaaatatcaaccttccaagcatttgctagtttatacatgtgttaaaccacatcttcctggcacccgtccggagtgatgagatgagaaccttggaagccttgacgccactacaaacaaacactgcaaaccgaaacaccaacagctcgcagtattttcttgcaattgccttcaaggaacgtgcaggggggttccgttcccacccagagccaacgaaacacagccctgcagacggaagctaa

SEQ ID NO: 285473 - DNA, 524 bp, Zea mays
ttcggctcgaggttgtacagatcagctgatactactaatcaaagaatacattttgatattgagccctgcggtagacatctagccactggtgggcaggatggcatggtccatgtatatgaccttcaaggtggtcaatgggtaaccggctaccaagcagcagctgatactgtaaacgggttctcgttccatccataccttccatttgctgtaacatcatccgggcacagaagatttggcatgcaagatgagtttgaagacgagttaaacttggcaggtgatgagaacagctgctctgtctggatgttttcttcctcacaagaagcttgaagcatttagtgaaaatattggatcaggctgaagctaagcgaagcattggatgcacattcaaatctattgtcactttgatgttcgtgtgcagagagcatcgcggcattgaccacttcctggtgtgttggctgtaattggtgtctgcaaaatgcaaatgtattcactgagatctatagaattaatgacttatttttttt

SEQ ID NO: 285474 - DNA, 644 bp, Zea mays
aactccctccgcttgtattacttaccggaggaagcgtacattgcggcggagccgttgccgaggccgctgtcgaaagtgaagattcttatggagcattcattcaggcgaacgagggtgagccagtgtacgatttctgctggtacccgtgtatgtccttgtctgacccagccacttgtctatatgacagctccagtcgtgatcatccgatacacctttgggatgccaccagtggggaactccggtgcacataccgagcatatgatgccatggatgaaataactgctgcactttcgatttctttcaattcttcaggatctaagctatttgctggatacaacaaagctataagagtgtttgatgttcatcggcctggcagagactttgatcagtattctttactcaaggggggtgaaggaccaactggtataatatcttcaatttccttctctccacaaaatgggatgcttgctgttggttcatacagccagacaactgctgtgtatgcagagaataatatggagcctttgtatgtcttacatggccagcttggtggtgttacacaggtgcttttttcgaaagatgggaactatctgtatactggagggcgaaggatccgtacatattatgttgggatattcgcatac

SEQ ID NO: 285475 - DNA, 770 bp, Zea mays
cccacgcgtctgtgacgaacttgacttgagaatcgcaagcgtgcttcaaagttctggttatcatgctgatgatggtttctggagtgaacctacaaagtctgaggtctcagacgataaaagacatgtggctatagtcaccacagcaagtttaccatggatgacaggaacagcagttaatccattgttccgtgcagcatatctcgcaaaaggtactagacaagatgtgacactggtagtgccttggctttgcaaatcagaccaagaactggtatacccaaatagcatgacgttcagttcaccagaagagcaggaaacttatataaggagctggctggaggaaagactaggatttgaatcaaacttcaagatatccttttatcctggcaagttctcaaaagagcggcgtacatcattccagctggtgatacgtctcagttcataccgtcaagagaagctgatatagcaatattggaagaaccagaacatctcaattggtatcatcatgggaaacgctggactgacaagttcaaccatgttgttggtgtagttcatacaaactacctggaatatatcaagagagagaagaatggagctcttcaggcctttctagttaaacacatcaacaattgggtgaccagagcatactgcgacaaggtcttacgtctttctgcagcaactcaagatttaccaaagtctattgtttgcaatgttcatggtgttaacccaaagttcctgaagattggagaagaaataactgccaatacggggag

SEQ ID NO: 285476 - DNA, 525 bp, Zea mays
gcaacagtgattttttttacacaaataggtatattatggaaacatattccatgatgaatctaacaatgcttatctgatattataaatattaatatactttttgtataaacttggtcaaactctatatggtttgactccgtactatgttataattagaattaaattgttttcatgggggagtaataaacaaagaaccattattggtgctcacagctgaaagaactggcagcacaagaatcttgatttctatagtaaacaagtttttctatgcaatatacaaatgagtgcatgctgtagagttcatcattttccttttcaaaaatgtaacaccgcattggcaacctctgaagagaagattgaagacatatggtaactgtattatcacaaacttaatttgcaccattttgtgttgttgtttaactttgttcttaaaaaggtagtattctagaatttcatatagacacattccttagcaacgaggtccgctgattaaactgtagaatagcctttgtattggtcctaagt

SEQ ID NO: 285477 - DNA, 397 bp, Zea mays
cttatatatttcactttccaaacagggatactcatgttgtcatatgacatatcactgacacagaaatcaaacaatccataggtcttcttggagccaatgagacagctgatcatcatgcatccaagcgtatcaaacaactgacccggtccctagctaggatacatacgccttcgttgatgttgcttatcaaacaatcgacgcagacacaggcacgagacgcggcgacggaggagcacatagtactatatcaagcatgcttgtgcgtcttggacggtggcggcggcggcactgggtagcggtggacgcatccgttccatgggttgtcggcgtcgggcgcggcgtcgcggagcgcgcgccaaacgttgctgcacgccttgaaccccgtcccgaacgccag

SEQ ID NO: 285478 - DNA, 879 bp, Zea mays
ggtcgactctagaggatcggattcctggtcccggcgtagtaccaaagattctaaaatcaccaactgttttcgctggcaatcttcctcttcgtcgtcctggagttcaatatcggcggaaaggtgggaaataccttcgttaccactgccataaatttccaacaccaattgggtgctgagcaggggggccccttcgacggatttaacccgatcgccgtctttatagaatagacgttgcactgagcgcaattcaatctggcggcccccttcttcgttttgggaaccctgggagggggcggcgggctcatcaaatactttgtactcttccacggggcgtagcagcaaaccattgccttcgggactttcaatccattcggcctggctgagggtgctaacggtaacaccgtggaaaacatcctgccctggttgcagcaactggccgctttcaattttcaccgaaccggggtccacatcttggtagaagtcaccgggtttaataataatttcccccaaaatatcgtttttctgcaccacttcaacgatgccgctggattggcagaaaatgtccttgaccacttccgtgaccgcttccacatactggccatcttccacaattaacagggaaatatctttgttaatttcgtgggtttcttcgggaatccagagcagggtaccccctttagtgacttcatagccttgtttgcggccgcccttagccacttccacgccggcatagcgaatcatgcccccggtggtggtacggtaacggtcgtcgattaattccgccacaatgctgtggttctgcactttggtaccgggagcggctttgagcaggaagcgaagcttatcggccgtgtagataacgtattgttcccggccgcc

SEQ ID NO: 285479 - DNA, 319 bp, Zea mays
tacacttttggtacagcaaagcattacacaatcagtaggcactacacctagctacttccactaccaaaaagcaataaaccatgagccacagccaggcaaaatgcatagttgccttactttttattttttttaaagaaacaagtatatgacacccaaaaagatcaatctatcttccacaccacgaatggccccttctgctgctgctcgcacggccggagcttgtgcatcgcgcgccccatcatcgccatcgccgcagtgcttggaaagaactgtccttcaagctcctcggacaaccggccagcaggtttcgttgcctgcc

SEQ ID NO: 285480 - DNA, 889 bp, Zea mays
aggtcgactctagaggatcgtcgttgggccgccctggcagatttgaaacagcaatggaattaaaatcaacctacattgggatattcatccagcagttgttgatagggcttccagttatcagtacagtgcaccgtcactttgcactttgtcagttgctctagcaaacgaccctgggtgccatcatgatttcccagttcccagtcgatgaatctcccaatgaggcggtgacaaatccattcaggacttacgcaaaagaaaacttaagagcaggggaacgaagctgttgacgcaggaaatcagaccatggttgatgagatatttcgtagactgtcaatgggctattaaccgcttgacgacgaagaaaattccagacctgtaaggcacagtgaatatgattacgttgaatgcgtcccttgggacattgacaggcttctacaccagtcaactgctttagttcgcgatgaaaatgctcaatcttccagcgcattcgacactcctctcgtgtcgcctgagtcgaatcttgagataagtcattagtcacgacgaattccgtccggtgtggtgacaccgtaactcggaacagttgcacttttttgtgagccggaaagcctcaaattttaatcacttttccttgctgtatttcggatgcatcccatagcagtgcatctacccgttggtatggagaagtgatgccactatcgtccaccaatcggttccgtttcagcgggcagtagtaaatcttgtttaatgtgtcatcaataaaagccatcagctttttagttgcgtaccaactatccatcagtacagtggcgaacatcagattcttgctatgtgtcacatgaatgagcatttccttgacatgctctagcttactgtaactatccatccg

SEQ ID NO: 285481 - DNA, 694 bp, Zea mays
caggtcgactctagaggatcaatggcgctgacaattggtctacctggacaaagtcaccggctaagaattcattgccgtcgccaccagaaatagaatcgtcaccaccgatgaaactggtagtaccgtctttgccaagctggaatcctttaccaccatcgatgatgatgccgttgttattaataacaccgacaaacaagtcaccaaccaggatgtcattgccaccctcaccggtaatggaatcatcgcccgcactaacggtggaaccattgacctgacctaacttgaagttggtcaagttaatttcactgtcgttgaactcgaaaccaaaacagtccgacatcaccaacgatgacatctagtccatcggcaccagtcatggtgtcatcaccaccaatgacggtcagagtctcagtcaagaatatgtcgttaccaaccccgtcaacggctgcagctaaatcgccaaccaagaagttatctatggcaacctgaccaataggaaagacaatcccgttatcaccctgcttggttgtgatggtgtcatcgccaccgatagcggttctttcgagggatgcattaaggtcgatgtctccgaatgcgccaatactccagtcaccagcggtaatatcactccccaaacaggctacaatggtatctttaccaccattaaataagttcaggtcaatatgatcgccag

SEQ ID NO: 285482 - DNA, 478 bp, Zea mays
aaaaaaaaactgcgctcctgcatacatttatctgatatcaaaaggcccccaaaacttggcaagtctcagagtaaacgtccttcaaaaatattctcaatgggacctatttaaaccccagggccgtttatgacatcttctaaacaaatggcagctacagataaagaatggcgaccagccaccagtacctgatggcccgttgataacagtagtatacaaatcttgcttcgcaaaacctctgatgccgcaaacctagctgcttcaatggcgatcaaaaccgctagtacctgaaagtctgcactagcatacaaattttgcctcccaatatctttgatgccaccccctaactgcttgaaggtcacaagacttagcagactattccgcctatgctttagctgagttactcgaagctctactgataacaaactttgagctataacataaactgggtcacaaactattatcttctgtatccagatga

SEQ ID NO: 285483 - DNA, 543 bp, Zea mays
gcaggtcgactctagaggatcaactgcgttctttgtgtcgagccacgggggtaaaaattgattggttttttaaccccaaccgggattggctgaattttaacgaagcggagttgggagaagacggcattaactttaagggctttgtgccagaagatgagttaattgatattcttcgaaccgctgattttgccgttattcccacaggcatttctgaccagagcggcgatcgcccagaattaacaaaattaagcctaccttcccgtagttgctttatcactgccactgccaatctgccaattctcgttgtgggctcccccgaaagtgcggtggcccaatttgtccagagccagggcatcggtactgtctgtgcttaccaaccagaggacttttccgccaaaattgattacttattagaaaaccaagggcccatgcgtaaacaagcttttaagctggggcaaaacctcagtgcagacggcattgcccaatggatttgggattccctcgcccaaggtcaagctatggatgcccgttttgaagctcagt

SEQ ID NO: 285484 - DNA, 791 bp, Zea mays
cggacatcgacatcagcaccagtcccgccggtcggatattaccctttatttcccgtcccctagagcaacggtttagtcatcgcagtgccacccattccctgttggccagtttcaccctagccctggtcagttatgccctttggtttgccatgccagtcattcccctagtaattgtccatgccctgaatatcggttacttcgccggttggttcttggactgcttcaccaaatccggggtggaaatgttttacccgttgggggtgcgctgtgtttgccccggtaatcgcaacttaagaatctctactggcagtgccgccgaatattggctgatggtcttcgtagtggcgatcgccgtttggactttccaactcaataacaccggcggtttggtgaaaaacttcaatgccctgattgccgctcccagtggggtggtggaattgtacaaccgcaaggggggcaacgaaattatctacgccgaatatgaaggggtgtgggcggggaaccgtgcgccgataaaggaagaggccccggtaattgccaccaatggccaaggctttttggttctgcgggatgaccaggtggtgaaagtgggcaccgaagcggacagcaccatcattgttaatcgcattcggggccgggagggggaacccgccgtgatccataccgaaaccatttacctcgacgatgaaccggccgatcgcctgtagggttacatcaaccccatgacttttatcagtggccagctcaccattgatgaccccactatgctccgcctggaacagtccgccttt

SEQ ID NO: 285485 - DNA, 500 bp, Zea mays
tttttgtcttttattagtcgtccaggagcactcgttagatttgcatgtgttaagcatatccctgaagtagcctaagcgcttcaacctgctcgctcttacaagccgaatctctctctatacgcaattgaaactagagtctactcctttctggtctgaaatctcagtggagacggtaaagattaagtgccttttttcttgcaaattctggatggcgtagtccatttgttttggacggcgtagtttcgcagcctatctagccaagagctggagtcgggttgacccgttatctcttcccatcgattggagatcgatcccaatgatagcacattatcccatcccaataaagtttttttctcctttactttattgttattggtagtgtagtttcgccgttgctggtgaaaaagcattcttatcccaagaaatagtggtactcattctcattagtttagttttgcttctcataaatttaaagcgctttcttttaaaaaagcatcaag

SEQ ID NO: 285486 - DNA, 522 bp, Zea mays
acaaaataagcatagatatagttattgtcggtgtgttttttgattccacaatgccatgccttgggacatctcagcatgttggtacgagttagagcagagtctgattacaagatgtattggaacagatgctatctttggataccatacttcctactccaagtataatacaatacaatattaagtaagcactccgtacgaatcaccgaacaaaacaagtaagcacacatacactagtgtatttggttgccatttaatttaatttaatttaatttaatttaattaacagggagcgagggggtggatgaagacgatggcgagggccacgcagcggtgccgatgatggctagctgtcttctcaggcggcggctgaggccgaggccaggtggtccggcggccacggcccccttcttgttgagcgcgaggctgcacctcaccctcagacggcgtagcccaacaccctgtaggccgccatgaaggccaccatgacgcccacgttgcgccacctgcactcttccccgagcc

SEQ ID NO: 285487 - DNA, 397 bp, Zea mays
gggaagccgagttgcagcagcaaaagctttcaagccatgtcagatgtcaagggagggacagacattggatacttaacataacccgggttctaatttcctatacaaaagctaggcgctaaacccactttttaagggttttactgcacgctacttaagcggacacatgttcagtcaggcggtcgagtcaccatcctaacttctgagcgctactgcaatgcaagcagatagctaatggtgccaaaagggttggggcgcgtccacaaccgtacttaacatgccagggcaggaaagtcgaagctcatttccacagcttgacatacttgtcatggccactcgaagcaaccaggccggagctcgacgatgccagggccgagacgaggctgtcgtgcgctgcaac

SEQ ID NO: 285488 - DNA, 458 bp, Zea mays
  unsure (1)..(458): unsure at all n locations
ttnntttttttttttacagatctcgacctccgaggggatttttattactgatgaagctgcaaaaagggcccaagtcctggatccgcgcatcctaaatactgatcactcatctccgagcagaagcgacctgacgatagcgtcgggcatgccgtcggcgaccgggaagaggtggccggccgtcgggagctcatggtagatgacccatgggagcctctcgctgatgtaccgcgacagttgaaccggcacgtagaggtcctcgacgccgtgccacaggtacaccttcacctcgtcttggccgccggcgaacgggttctccatctccagcgggctccagtcccacttcccgaaaccgaccatcatgtcgcggtggagcgagtcgtgctctccctgctgtctgacctgcttctcataggttcgcttctcgaacttgtcagctacaagcctgtccttcttggata

SEQ ID NO: 285489 - DNA, 497 bp, Zea mays
cagcgatcaaaagaattgttaggtcatggcccaagcatacatgataagctgatttttacttggaaagaatcttcagaacaactaatttgatgtgaaagaactgtttaagttctttttgccaaatttacgccaacctattctaccatccaaaatcaaaattattgagtgattctgctgctccagccaatatttccacagatctcaatatttctctccctacaagttaactgtgggcaacgaaactacccttctcgcctttatacttgatgaatttcaacatataaaccaccattgggctaaagttctaggtggtagatgctaagagtgacactggtccaccttttccagtcctcaaaatgatatgaaggtagcagcaattggctcttctcaaaactcacaattgaaggggccccctcttcgagagttaaaaggctgctacaatcttgtaagagaagccaccatctcaatctaagggcaacacatgtccaacagtgatg

SEQ ID NO: 285490 - DNA, 599 bp, Zea mays
gagacagaagaatcatagctggatgcacactctgatcggtcaagtacaaatcacaacttgtttaactcgattgtaactattatcgttccagattgcactttgtacacctagattgtaaccaaaatcgtgcggtcttgtcatatgtaccccatcttaggttagtgttacaattcagtagcaattgtagctccctgatcctggtcatcttggaatatccttatcttgattgcaaacttgttggtatccctgaatcattcccagatgatctgaggagtctctttcataactcaatccatttccttctctgaaactcccagttacaactggaaacatgactgctgctctgggagattgctagtcgatgccaatgtgcctatgcttgtcccagctatatacccaccggtccatgcattctgaaaattgaatccgcctgtgaccccatcaacattaagaacctctcctgcaaagaacaggtgtgactgcaggaggtgttccaattacagagatatcgcttggcactatggaaagcaagaaacagccaaacctgttctttgcaggagaggttcttaatgttgaatccgcctgtgaccccatcaaca

SEQ ID NO: 285491 - DNA, 351 bp, Zea mays
agagcagcaccttctcattaaagtgcttggtcaggtactaatcactacttatttaactcaattgtgaactactatcgttccagattgcactttgtacacctagattgtaaccactatcgtgcagtcttgttatatgtaccccatcttaggttagtgttacaattcatcttggaatatccttatcttgattgcaaacttgttggtatccctgaatcatccccagatgatctaaggagtctctttcataactcaatccatttccttctctgaaactcccagttacaactggacacatgactgctgctctgggagattgctagtcgatgccaatgtgcctatgcttgtcccagc

SEQ ID NO: 285492 - DNA, 499 bp, Zea mays
agcaagaacaaggttgccacgtcaagatatcaggaattcaagagatgctgtagaagaaaactagatccgcagaaaacagtgcctaggacccactatgtgaacacatacgaggagagtgagagaactgcaggttcaaaattaatgaaatgcttatgctgagtgcatatctgtcctaagatggaagggggaaaaggaaagaaaatacagaacagacaaaatatgagatgagcttttgttttctgggcagctggtccaatcagcccatataagaacctcaatcgtaaaagctcctgtcgtcttgcacaaatgacacaagccagtcagacactgcctatggttttgatatggcttatcttctattcttctagatttatacaacaaataaatgtaaaaatctagtcctagtctacaccagcttgaatacatctatatatggtagaacttttgttaatcatacatatgggactgatatcacgtaaataaaatagtaatcaggcat

SEQ ID NO: 285493 - DNA, 826 bp, Zea mays
gcggggctcggttttgacccgaacagcttctcctgttcggcggctagctgttcgttcatctttttctggtccctcattcgtcgcttctcgtcttccttctcctgcctcaggattttgtattcgtccagcatcgcaagaagagggacgccgtcgtaggtgaaggccacgccatgctcttgttcccatgcccgggtctttgcaagcagtgtgtcaacaatagccggaattttattgaccaaaacacgggccttttctgcacgcttcagattcagatgtgcaccccgagttgcactgtacctgttatcgtcccggctgtagtcttcaagccagctttcttcttcacatgctgacatccacctatcaaccctctccaatatgtcctttctgcttaaggactcctcatttgctttaagtatctggttctccatatcagccagtagttctgaaggctcgaaactactggactcaataatagacattatcctatctcttgcagcactagaatctactgcaacatgagcccgggcatatatatcttcaagttcagtctgtttcttgaatgcaatatccttcatcctactagcttttagctgatcaagcctttcaacttcgagttccgcctgctgaattacatcaagagccagagctcctggaactatcacatcatccaatgttgaggacattatgcatgttacgtgacgaaaaggttgctgttcctccacaggagaatccattaagttccaaagatcagatagctgggaagctagagcttgaatctttgcaaacctcttcgatttttcttcttcaagtacaatcaccattttag

SEQ ID NO: 285494 - DNA, 329 bp, Zea mays
aaaatacttgttgttttttttaatggaccaacgcttttccatctcacaggtcctgcatacgattggagtgggcctacaaagaggatcttggagttcaaacagagtacaggctcataatcacatatctagagcacaatctggcaatatgatcctcatatacggtagaggctactctttgccctacagattactctaatgacagctcggatccaatgcacactaggctacatgaactatgaaatcaccctgcatactagtaccatattagtgcagctgtcttgccaatgcactgcgccgtgatagaacgccgttggcatcccttaaactcc

SEQ ID NO: 285495 - DNA, 589 bp, Zea mays
atacaatgttacaagcagtaattccacagatgggaacttctggtgtatttacagccagtctccagtatcactttcaaccttcttcccttccctcctacagaatgacaatgctagaaatactacttttcatcccttcatatctcaaccgtcttaggaacgatgtttcggcaaatcttcgaggtcagattcctaaactactgaaactaatacaccaaagatccaccggtattttgatcataggacgaacagcacactggttcacagctaaactcgtgggatgctgcagagggaaccaagttcaactcatggggttatacctgttcgttcagagtgtttctttttcaccttctttctccttcggaacaaaaattagttatccatccaggcaaattgttggtcagtctatttacacccttgaagccttgtattatcaccttctttccaatcctgtagccgcctagaccccagatgctgcataatgccacaccctcatgacgaccttcgccaacttttaattcacttttgaggcagtttgaacgggctccagcttttcctgcgcttcgggctgtcagcgaagacgcctgacgcc

SEQ ID NO: 285496 - DNA, 458 bp, Zea mays
gaccactcgtccgggacgtgtgatcgcgagcggccgccctttttttttgtttttgatctataataatatctacatggtttcagtcacatagtctaaatggtttaaagtggtgaccggaaaaattacttctccgaattcgatgacaatgtctatctgcccgttatattttcaactatggtggatgatacatactgtacaaagtctaaatttctccacaaacagaaggacaaaaaagggcccagaggtgcacagaagggccaaactgaggcatgcgatgcacactaagatgaccctacaacagcttcagagttcttgccattgttcattgaattttcttcagattttcaacagccggggtcttttcttgctcaaccgggaagtatttgatacccacaaggtcaccaactttgctgataacctccaatccttttatgagatcttccctggagtgggaagct

SEQ ID NO: 285497 - DNA, 350 bp, Zea mays
aagcaacaaaaattactatagcttttgaccgcatacgtcaaactcagggtagaaagggcggcctagtcatcaaccaccatggttgtctacactgtgctcttgcaacttctacctatcataaatccaatgtgaacgttttgtcaccaactgcaattggaatagatggaaccaggtattacctagtacagcagtgcgccatctagtcatttagtccacaaggtcatatctcactactagaactattaggtcactcaacagtcgctacgctgtgtaaagtgtaaacggacgcatcccccggtccgcccacgcgtccgcggacgcgtgggcggacgcgtgggcggacgcgtggg

SEQ ID NO: 285498 - DNA, 633 bp, Zea mays
cagaatctttgagcggcataaaacaaagagctatggtagaaaatctattggagagattgtcatgatgataagtcagcaagcattagtctaaagtaaaatggaggagtttccattgtgtcagttcaaagtaaaagtaggaaagtttgagatcaaagtgactatccccatcaaaagattattatgtatcacgtgtcgtagtatacagtacactatactcttttttgataaatacattgataatttaatataaaaaagagtatagtgtactgtatactacgacacgtgatacataataatcttttgatggggatagtcactttgatctcaaactttcctacttttactttgaactgacacaatggaaactcctccattttactttagactaatgcttgctgacttatcatcatgacaatctctccaatagattttctaccatagctctttgttttatgccgctcaaagattctgacctcattattgcatttgatacaagaatgacagtacttgctgcaggagcattcacccagactcgaccattgagtccaacagcaatctcaaacgacagttttttcccaaggacctccagaactggacacgttggggaacttaacaacattcgtgacatgccag

SEQ ID NO: 285499 - DNA, 375 bp, Zea mays
ttcttttttttttttttttttttttttcaagaaagtcgtttgctacgtaagtatgcaatgggagtagtcctcacaatttccataaacatttgtacagaacacgaatcatatctctctaacttcttgcacttgtaacaccttgcttcattgcttgctcagttgcagccttgcaggattcgaagggtttgaataatctttagttctttacctagctaatatcttggctccactatatatctatactacagactacagggaacactgatctatcagcttatctgctgtgtggctccaacatacggcgccaagtgcttgctacagcgtcatgatatggccatggggctaaggaacgcctgctctagctcagcagaggct

SEQ ID NO: 285500 - DNA, 374 bp, Zea mays
gatagttcaatttttgacattgtggagatcatagaacccagatgtctctgttacaaaatatattatatacacatcccgttagtcccgggacgacatgcaaaatgcactagccaactcgcacgaacacgcaagtacattaatgacaggaaacttgggcagaaattatctgcttctgcactagacagccataaatccttgggtaacccatggaaataatcgatcggcggcggccacagccactcctagatagatgtaattatgggtgggggtggttcatgctgtggtgtggccggggagtcccgtgcgatggtgaaatgcactccccttccttggcctgactgcaggatgaatgccacctccgctgcagctagagc

SEQ ID NO: 285501 - DNA, 754 bp, Zea mays
cccttttgggaaaaatgttgtccccccggattccctccccgaagtaatttccggttggcgggggtgattatttttgggcggccccccttttttttttttttttttttttttttttttggagtcaagactatatagtatgtaggtcgatcaagtgagaagtcaatcgatggtcagagtaggtgattacacttcaaagggtagaaatgtctgagcagtccttgggaagggcaacatagtttgctggtgccacagcagtcttgacagcttcctgcacccttccagaagatggcctacccttccgtgacatgggggtagaaacacggcggctggtcggagttccaccaataatattggcattagagctctgcccaagaggcttccttgaagaaagaggacggatagggcttggtttcgttccgaacttggcaccttgctctgtagcaaactgttcttgcagtttcttcaattcccttgatcggcgcttttcctcttctttttgctgtcttgtacaggtgtattcatctaaacagtccaacagcctcaccttgttaaatataaatggaatacccatttccttttcccaggctttaattttagcagtcaagttctccaaaagagatggaagtttgctgaccaatatcctagctttctccgcacgcttgagatttatgtgagctcctcggacagcattatagcggttctgatccctttcgtattcatcaagccaagtctcctcttcagatgccaatgtcca

SEQ ID NO: 285502 - DNA, 413 bp, Zea mays
tgcgcgtccgttttcggctcctccctctgctcggcgccgcctccccgcttccctccctctacggccacacgtccccgcacccttctcccttgagaactacctcgtcgccgcctgcggcttcgcacccgcccaagctcgcttggtggccaagaaggcgtgcaacgagctgtccagggaatccaagagatcatcggaggagcactcctgcagacgcctcatctccgcctccaacccagatgccatcctcgcgctgctctccggcgccggcctctcccgcgccgacatcgccgccgtcgtctttgcggacccgctgatcctccgcgcttccgtgagtaaaatcgcaccccgccttgtcgctctccgcgaccgcgtcggcctgtctactccccagatcgctcgcttcctcctggtcg

SEQ ID NO: 285503 - DNA, 326 bp, Zea mays
cgcttgctttcacggccgacgacctaatccccttccctcccattggcagccgtcgccatgctgcgcgtccgaaatcggctcctccctctgctcggcgccgcctccccgcttccctcccccatccacatccacctccgcgtgtgccgcctcctctccacctccacctccacctctacggccaccgtccccgcacccttctcccttgagaactacctcgtcgccgcctgcggcttcgcacccgcccaagctcgcttggtgtccaagaaggcgttcaacgagttgtccagggaatccaagagatcatcgggagagcactcctgcagacg

SEQ ID NO: 285504 - DNA, 407 bp, Zea mays
cacgtgtttgcgtggaattgcgatagtcgcacagagcacttttgctaaatcgctagttcgtttcctaaaccctagcaaagtaggaatggcgtcggcgagcatgctcgcgcgctcccttctccgcaccccagaccctacccaaacgagccacccgaaccgccggagcgccgctgtcgtctccttcccccgccgccaccgccgcctgtccgtgcgcgcctccgtctccacggcctccccttccccaccgccacagcccgcggcggcggctgccggcgtgccgaagcactgcttccggcgcggggccgatggctacctgtactgcgagggagtgcgggtggaggacgcgatgacggctgccgagcgcagccccttctacctctacagcaagccacagatcctccgcaact

SEQ ID NO: 285505 - DNA, 422 bp, Zea mays
accacgtttatttccacgcctgcggccactcgttcgcccacgcgtccggttgcatggtgaggaaggagagactgggtgacagaataactgccctacaccagatcgtttctccgtttggcaagactgacacggcgtccgccctgcaagagaccattggctatatcagattcctactgggacaaattgaggctctcagctacccctacatgggccacggcaatgggacctccattcaaaatggaccaacaactggagaaaggaaccatgcagggctcctaccagatcaataccccggccagttgctgaaccataataacaacactggagcacggcagcctgcagcagtcggccagcctgatgagcagcagcagcagcagggtggtgctaataataatgacgagacgaagaaggacctgaggagc

SEQ ID NO: 285506 - DNA, 538 bp, Zea mays
  unsure (1)..(538): unsure at all n locations
ccaaattccaccgccagactgtgagcatatgaatgtcacggtgcacgctctaaataacaactacattgtatatgacccgataaaaacaaaatccttgcaaaaattgcagtggatgtaaacaataagcaaagaattgagaccgtgacatgtaaggatagcctagctacagaaggcagagaagtagaattacaattacaacggaggcttgtgcaggtgccccatcggccatcgctagcagcttcactgtctctcttcgtccaccaaaaaacaattnggagatccataggcaaggcagcatcaaaacatgcccgtccaaaagcacgggcagggtaccctcttctataagcagatgttttgtaccatcctttaaaagaaaaacttaaacattgggtataactaatctgatctcgggcgactcgagttcttgtaagaattcttgtccaaggggaggggggaaccctttacccgtttccttttggggccgaagcacctccagtaaagaacccccaatgatggcattatgacaatggggatggcc

SEQ ID NO: 285507 - DNA, 534 bp, Zea mays
gaagcaatgtggcagaactgtacatgttgaaagcaacaagacgaagatacagaaaggatctctgaaattacacagggatggagacagcgcagagtatcacattcagctgcagaaaatgcaacttttaccgcggcataattctgcagcttcttatgcctaaacccactaaatggaaccatcattcatggtacgacacatagggacatggaagacggaagcaaaacagaacaggaacgaagacaaccgggaacaacaattttggaactatgatattgaaattttataacctaaatggccataaaagaaagcctatgatgttgtacaactgacgggggcacgaccatattcaacacaccttcccctttctgaccttcacatcgcaccatgcttttcatctgctgctccaaatttgcagatagaagggaaacgaatcaactgctttcctccacagggcctgtgttcaggtttgcactttcttcaaccttggctggggcagcggaaccctttttagctgaagcaccctcagttttgggg

SEQ ID NO: 285508 - DNA, 388 bp, Zea mays
cggacgcgtgggttctttgatgaaggttgagagcctgctctgaaacgacgtacgtaaagggagcaaggaaccggagagcgtgcggcgggcttctggattttagagtaggcacctgtcgcttggacgtgcttcggagaagtaggtgtccaaaagttgcttacagtggatccagatccttcgaacaacattgctcaagctcatgatatagactgtcatggaggcagctgcagatgaggagaggccactgattcagtacctggctccagaggatgatgaagcttcctcacgatacactagcgacggaacgctcgatatcaacaagcagcgtgctctgaagaagagcaccgggaactggagagcatgcttcatgattctgggtaccgagttc

SEQ ID NO: 285509 - DNA, 468 bp, Zea mays
agtccttacttcaaccagatccggtataacgtctccatcgttgagacagacacgtcaacgctcccgcctatcatcaacgccgacgagattttcatcgtcatctctacgaccaacgttggcacggactcggaggacgtctctgctatgaaggctatcaaggcgaagtatcaggtgaagaagaactggatgggagacccgcgcgttgctgggacttttaggtgggatggactgacgtgcagctatgccatttctgatcctccaaaaattactgccctaaacatgtccttcagtggtctgaccggtgacatatcatctgctttcgcaaatctcaaggctgtccaatccttggatttgtcacacaacaacctgacgggctcaatccctagctccctgtcacaactgccgtcactgacaactctagatttgacggggaatcagctcagcggaccaataccctctagtcttctc

SEQ ID NO: 285510 - DNA, 559 bp, Zea mays
ccccgacccatcagtagagggcggcggctgcctcctcttcctacccgcgtccgagctcagcccccttcctcgccaccctgggaggcgacgagcatcaccaggaccccaggttgcctatattttcttccccttcttgaaaatggatcatagttctgacgaagatacagaaatcagtgattctgagattgatgattatgaaggaaaaatttatgcaagactgatgtcaggagatttaaaattaaataagaatggagaaaattacatttgtcccttctgtagcagcaagaagaagaattacagtaaaagtagcctggttcaacatgcctcaggagtcagtgcagcacctaatcgggaggcaaaagaaaaagcagtccatcgcgccctcttcaaatatttgaagaatggtcttgctaaatcacctgaaccagggtcacatgcaactcctgtggagccacaacctcttcagaaccgagacgagaagtttgtgtggccctggatgggtgtcctagttaatgcgcctactgaatggaaggatgggcgccaaattggagaaagtgga

SEQ ID NO: 285511 - DNA, 609 bp, Zea mays
ttgcaacgttgttcacggtgctttaaccatttgcaaaagatccaacatgagtctgaatccattgattctgcggggtggtcaaacagcacaacttgcacaagaactaagtctttcattgcaagatttggtggtgatctaggcaagatgatgtacaatgtatacgacagagtagataccattggttttggcgaaaagtgcccacagttgtgtagcttgtaattttgtcatagctttgcaagtgggttttgcaactgtgttttaacattgggctggcattcagcctggtcccctgttgtaaatgtgagcctagccgtgaatgagtctgtaattagccagccacatctgctgtgtgagcagccctgaacaaaaagactagttgaaaggaaacaaccgcaaaggggatcattttggttacaccccaggtggtaggatggctcatgtagcatgcggtgattggcaattccattctttgaaagcatctgtgtttaacgtatattttgtagaagtaaattgagttatgccatagtaacgatgactgattgggctaatatgccttttgtttcttcaactgaccaagaatactaagagtcggctagttttaagtgtccg

SEQ ID NO: 285512 - DNA, 386 bp, Zea mays
  unsure (1)..(386): unsure at all n locations
catagtgnttggatcgctgccgcgtgctcccgtcggggctcccgtacgcggacgctgtcgaccaactactcgttgtccttttcccgaacgccgagccctagcgtcaacgcggccaggcggcggtcagggccgggcgtcaggcggcagcagtggagcacgcagcccagcagctctaagttctattcagattggtgttttgctggtaccatgtccagtccgtggagccctctgagtattgaggaagacgaagagatacaagagcttggtgccgaggagcagcaggttggtgagcagctgcggcagggtgatgggcagcagcaggagttgacagctgatgcaagagcacaagagaccggaatgaaacgtgcaagatcagtgtccagttc

SEQ ID NO: 285513 - DNA, 466 bp, Zea mays
caagacggaagccttgtggtggctttcatgccagcccgcagggagatcacgcagctcacgctcactggagagtggagcgatggcagaataaccaatgcagtagagctctgtatggatgcttgcagcaagctgggtgacatattgcgtgaccgcttgaaagataccgctaccttgacgtgtgaatgacgtgttagagagagcactggcaacaacagatgttcttagctgtacaaattctgtaggcaggggaggctgatcggcctgatgtttgagtgagcatgatgcatggttatgatgatggtctccttcacggcaaaagctgtcaaaccgggaagaaattgcagggcagtgtgtatttggcatgtaacgtacttctgactgacctttgccttcatgtagcatctgtatctttctttttccgagtactgtaacacttcttactctaccaggagctggaatttttttg

SEQ ID NO: 285514 - DNA, 413 bp, Zea mays
ggttagcggtaacaattttttggtatttcaattaagaagaaaaaaaattgatctagttttaagtgaaacgaccgagcctaaaacgacgcacaaacaactcagacatcagcaatccgcgagatatatgtgttcactgttcagtcacactgcacatacatattaatattatcatgggagaccagagattattattatcattatcattattattattatatatatatatatataaaaggtccgagcagcctcactgttgagtcacacgaattcaccaaatatatcatgacatccgtcccatttccgctgctgtcgtgcctgccagtaaccttccacatagcggtatgtgtcatcatcccttgggaaccatcttggtttccaaccattgtcctgcatcttccgtgacatccgttgcc

SEQ ID NO: 285515 - DNA, 438 bp, Zea mays
atggatatggatgtcggtgtaattatgaatgcacagcaaaatatgtgatggaaattggtagaacatacaaaccaaattgatacagtccatgcgcgttaccaacgagtccggcaagacgcgggtggcggaccacggcagcccgacaaagtgtacagcccaattgtccagttcgactatctagctacttgttgtattagacacatatatataagctccgagcagcctcactgttgagtcacacgaattcaccaaatatatcatgacatccgtcccatttccgctgctgtcgtgcctcccagtaacctcccacatagcggaatgtgccatcatcccttcggaaccatcttggtttccaaccattgtcctgcatcttccgtgacatccgttgcctcctctccagtcgcagcttcttagcattggccttactatactccccat

SEQ ID NO: 285516 - DNA, 387 bp, Zea mays
ttatatttttttttctttttttttttttagagggggggaaaattttgcacggcaagaccaggttcagtagctaccatcattttatcaatcaatttacagcaattaaatcgacgaacatataataatagtaatacaatagccccgtcgggcaatggcaatggcggtctcccagctgccttgatttgcgctaatatggaacgaatcatgatgacccaaatacattgggaagctccatcagaaaagcgagttatacgtcaggaaggtgcaggcaatggacgcaacacatatcaccagggatggtagcagggtgacgttgagaagcttccccacgcccaggtaccccgccgcagtgatggtgcagtcagcgaccaccctcgccagggtccc

SEQ ID NO: 285517 - DNA, 727 bp, Zea mays
caagcaacaagcatatatgtgacatatctaacaggttttatcgtatatgacataattaccacaatccacaagcaagtggttacataattgctaatgattctttgtttattttatagactggtcaaaacaaataaagaagctactaaagcactctcgccatgacacaacagcagcaaggtcgtcactctgcactgctgtccgtcgccaggccaccaccactacccactcccattcagatcatacatctcctcacctcttcctccagctagccacaagctcatccggtcggccggtccacctctctcagccacctctctcgatcagcaagagggtcagaggaataacggcgacgcggctgtcgctggccctcctactggctgccatagtggcggtgtggaagctgccgacgacgagatttgtgttgcgcgtgcagatgtgggtggagaaggcggctcgtggcggcgtgtctcacaggaggcgtcgagctgccgtatgagctcgactcagtggggttgcatgctagcgaccgccaccgcgaccgccttggttgtctccacagagtggaggaggccgaccacgtcatcgccctcgtcctcaacgtcgtcccaacagctggccccaattgcgcgagggagaggaggcgacgacgggtgcgtgagataaaggaagcggcggcgggtgcgcgagtggagagggtgagctcgcggaaacccttcccgaccttgtg

SEQ ID NO: 285518 - DNA, 657 bp, Zea mays
aaacatcaaaggggctgcaaaagtctttttatataacaatctcctacatcacatttgcttatggtttacatgtatggttacagggaacaatgaactgctacatataaaaccaggatcaatttgggaaccttaaaatatgtaaaggaacatataaaaatcttgatactgtaataactatctaaccagcgacgtcccctcagaaggattgctgctctttcatggatctaatgtcatacagttgcaaaatgaattagcaaatggaccaaaatcaataatttactggcatcaaaaaacaaacttatcgatcctggttataggatggattaggccatctccatagataggatagaattctggttatagagggcacactgtaatccgaaaattctttgaagaagattgaaaaataaaaagcacaagccacggaccttaataatctgatcctttgaggcagtctgcacccagttcccattttgattccacttcacactaccattctttgaatttagccacgaatttagcagaaattgcagcaggataagcaggtttcgtaggtgtaggcagtagcgtgggtatgggataccttttttggtttgtgtaaccaggctgcctatgctatgcctggccggagcagtggccaccactgtcgtcggatga

SEQ ID NO: 285519 - DNA, 421 bp, Zea mays
ggaagaacgaagtcaccaaatttgaatgaattatgatgcaccattgatctacaagatcaagcacgcacaagtttatattctaaagcatgctaattgctaaccaacacgaattcatgctttagaaagattcttcatcgcagacttcaaattattcccacgtgaaaaatgacaacattgctgggaactgcattccacaccgggtcatttttacactgtaataaatttggccaacaccgattttacttgctatatgaatatctagttaaagctaaaacattgcctctagatctagcctttcaggaacagtagtattcacaatccaaacaagctgggtgacctcaacaacaattttgaagcagcgtttgggatcatgagcagagatagaaagttttgcttaagtttcagttcccgacacaccagc

SEQ ID NO: 285520 - DNA, 852 bp, Zea mays
cagaggaccaccttggagtaaggatcgaagacgacgctggtagacatgtttatatcgataatctggcatctatttcttctccattcaaagaaagtgatccattccgtctcgtcaagtccgctcttattgttactggaatccttggccacgagatattgtcgaaatcaggcctgaacatcaggacatggtcgaatgttcctcgtggaagtgtgactgggaacttctagtatattatcagctgctgttgttaagggactgttccaagtgatggaggacgacgaaagtgacgacagtgttgctagagccgtgctagtggtggaacaaataatgggcacaggtggtgggtggcaggaccaaattgggggcctatatcctgggatcaagtgcacccagagttttccaggacaaccgttacggttgcaagttgttccagtgctgaccactcctcagctggatccgggaattagaagaacgtctcctgattgtattcactggccaagtaaggctcgcccaccaagtcctgcagaaagtcgtgactcggtacctccgccgcgacagcatcctgatatccagcatcaagaggctagcggaactagccaagatcgggagagaggcgctgatgaacggtgagctggacgagctcggcggcatcctgctggaggcctggaggttgcaccaggagctggaccctttctgcagcaacaggcccgtggacgagctgttcgccttcgccgacccttactgctgcgggtacaaactggtcggagctggtggcggtggcttcgcgttgctgcttgccaagaacccgagctgcgccagagagcttcgacgggcgcttgaagagtccgacac

SEQ ID NO: 285521 - DNA, 307 bp, Zea mays
cacacgcagacgagagacgaattctttggacttttctagacaattgccgagccttggatgctgaagaaacagcgaacacaccggaacaccttcttacagtttactagagtgcaaaacccaccccctcgcacgcgcagaagagctgctgcgtccaggaaaccagcgacttcccttcagatcaagtgccgcaccaggcagccagccagccagccattgctcatcacgagaaggtttcgggcagaggctggccctgcaggaacgctcggaagagcacgagcgaccggccgggctgcgagaagggcgcctc

SEQ ID NO: 285522 - DNA, 529 bp, Zea mays
gactgtttgcctatacaatttgatcttatactatactgtctatgtatgctcctgcttcctgcgtgttggtccagtagaagggtgcaagctcatcagaaaagaaaaggtggatcttgctgtattttaatcaaaaaatgtctatagatagcttgtaacagataaatccataccccacctgtccccagcacccactcgcccactcacctgtaaaattgtggctgccttttcagattgctctttgcatctgatttttggctttgctttccccgtatgtctcaagtctagctaccatttatggctttcgcacctgtaaacatttatggttgcttttgtggattcatactagcatctatgctaattttgtaatgcacgaccttaatgctacttttatgtgtatttatgatcaatcaccatgtattttacgctcttcggattttatgtcaaaaaaatgggtttatacgctgatttatatgtgtgcctatgctgcaacacatacaattctaactaaatatgcataaagcagcgcgcc

SEQ ID NO: 285523 - DNA, 270 bp, Zea mays
cggacgcgtgggcgcgcgcacgccattcccctcccgtagcgtgcggcgtgccgtcaatccaaaccaccaaaagcaatgccgccgccgtccgcaaacggcgccaccgccgccgccgccgccgcgagggacgacatgtccccggcggaggccaggctggcgatgatggagctggcgaacatggtgtcggtgccgatggcgctggcggccgtgatccggctgggcgtgccggccgcggtgtgggtgggcggcgccaacgcgcccatgtcagcg

SEQ ID NO: 285524 - DNA, 497 bp, Zea mays
gcagcccatttccgatatcataatgagaataacttcaggacacataatatgtttgaagatccaaatttaagcaacctgaaggaactgtaaactgtttcagtgaacacataaaagagacgaaactacaacatgctacaatgcagcgaaagaggccaagtttggtttgggacaaacacacatgtcaaagaggattcagttcatcctgtgtctcttgttctgttggaggcttccaccatccacatccaatgaacctgatgcattgctcctccctctcctcctcagggatcccgaagaacctgcattgctaggctctcctgcactttcagagataccaccatccccttgtatcacagcaacagtgcttgaattagacgcttggtctgcagaaggtgcacccgcaatgcgagctccatcgactgctggctcattattctgaagattcgatgatgaagcagatcctctatattggtttggtgaagcgattcttctaaagtcat

SEQ ID NO: 285525 - DNA, 740 bp, Zea mays
agacttcgtataaatcgcctgcattatagtgaagagatgtacagatctcatacaaatttacactccagattggtttcattttatagcacaaacatgaaaaatagctgtagtaagggatatggggtgtggttgctatttccttcatgacaaagcatttgaattcctaaagtattacggctgctgctatgctccttcagccacgaggcagtatgtattatggaagcatcgccaggtgactatcaccgggcaaatggcaagcaagaagagctaaacttgatcctggagaccgtttctccgttgtctgcatcaggtgatcatttgatacatcctcctccactcacaccttttacctgggagaagccgcgccgacagggaaactggtgaaaacattggagtaagactttgtcaggtaagcaaagttcggcactggctgcaatgcaggcacacgctcccctttcttcagcagttcgtccaaatccagtctttgcaaggtaagcacggccccggtttctctccaaacaaatgcaagtagcccattctggaggacaaacaatgaaccaggctttgagctagggtatctgaagccatacccattggcaatgcccttgcctgcgaagctcctctagacatcaaactccccatcagtctgccacggaaagggctctgttgatggctcactcatcctcgttataaacattgaagacccattgggatggacaacatagtatgttccctccaac

SEQ ID NO: 285526 - DNA, 536 bp, Zea mays
tacttatattatttacgttgttttttttttatcatgtgttatctcagtaacagaacaaacgaatgagaacatattatgaatattcgtgcacttctgcaagcataaaacgtacaataaatttattaccagaaactaactcaactcgatcagtatggaatagcgtgctcagatgtcagatcatgtgcaaaaaagacttcaagacatgtatacagtatacatggcaattggttactttgatctcagacctggaatgttgttcagccccatcttcctgagggcaagcttagacactgcaggagggttgttgagacccatgcttctgctgaactcattggcaagtgatacaagctggtatttgtcgcgcccaatgaccttatttgaattgtagtaaccaagccacgcctgataagcggattccttgtctttaacctccacatgtgcaagagccttatcgacctgaagccgctaccgctggctatgtgcccgtttctcaatatgaacctgatactcagaagatggctggagggagggagggc

SEQ ID NO: 285527 - DNA, 405 bp, Zea mays
gttctgtcaaagacgaatctttgtttttctttttgcatcttgaacgataaacaaagaagtgtttttttcctcgtcttcatagatagatgctactcatcattccatgcacaggtacgcttcgtagtcgtcgtcgttcgtaatggtcacttcacgtattagttggcgccatagcggtcgtaggggcggaagccgtgggcgagcgcggcgcgccaggccttgtcgacgccggtgaccctggcgccgcactcgtgcgcgtcccagccttcgagcgcgtgcacgatgcccgccgcgcgccacgcgctcatcaccctccgcggcagccagttctcgcatgcgtggaggtcctcgaaggcgtccggcaccaccagcgccggggtgctgtggtagacgcagtcggcgcggacg

SEQ ID NO: 285528 - DNA, 566 bp, Zea mays
gatcttaaacaaacataatttaacgttatgaatgaaccaaccagtgaagccagatatagaaccaatatcgcacaactcaaatctgcgttcccaaatggcctactctactgaacaaaaaaatgcctcggcctcatcggtcacgattatccctttacagagaatcgttttatcggctgtaacaggttcctctgacctcacagttaaacaaggtttaagtagcaacagaaaggatttggactcggtgtaacaaagctctctttcgcaagtggccaagtatgcaaatttggcgcgaacttatttacgtccttgaggagcttcgtaactgccagcattggagcctgctcgcccagatccataggctggaggctgcgcagccaacccatagggcgagtgacccctgcgcagcggtgaagggagactgcgcctgtgctagactgtaggatgatggtagctgtgtgtgcccatacgcagatggtgcctgcgtttgtccatatgatggttgcgcctgagctgaaccatagggacgcactgctgctgctgctgtgcgccataggatgtgtttgacc

SEQ ID NO: 285529 - DNA, 684 bp, Zea mays
ctgaggcgaaggataattatttttgttggagatgctaaggggtcatcttcacagaattaccgaagataaagtagcccacaatgtttctaattacatgtattatgatgtatagtataatacactatgtgctaaggagtcgcaacgtcgtttttgcctacctacccaacggcaccggccggttgaccggagcccagcacggacgtgcggtgtgcgtccccggtctccgcggcgccgcctaccacggtcacgaccaacgtgcccccagcggcatcgatcaacgccggaggcggcgaggggcgcgtgtccgccgtcgccttgggccgcacctcggcccggcacaccgggcacgtggtccgggaccgcagccacgcgtcgatgcaatcgacgtggaagacgtggctgcagcccgggagcgcgcgcaccttctcgccgtccgcgagctccgacagacacaccgcgcagtccgccgtcccggtcccggcgccgtcggaggcggagctaggcccgtcgtcgtccgccccgcggacgcggtacgtggcgaccggcagcgcggcgagcgcggacgcggcgagcccgtggcgggcgctcctcctggcgaaggagccgaaggagcggcggacgcccacggccaggcggccccgtccgcgcgccacgaactggtacaggagcaggcggatgaggacg

SEQ ID NO: 285530 - DNA, 444 bp, Zea mays
gaggataaatctgaatatcaaatgagttcttgaggataaatacatggacagagctgatggcagagctatccagagctgatggacagagccttttttttttttttttttttttggaggataaatctgaatatcaaatgagttcttgaggataaatacatggacagagctgatggcagagctatccagagctgatggacagagcttttttttttttttttttttggaggataaatctgaatatcaaatgagttcttggggataaatacatggccagagctgatggcagagctttccagagctgatggacagagcttttttttttttttttttttggggggataaatctgaatttcaaatgagttcttgaggataaatacatggacagagcttttggcaaagctttccaaagctgatggacagagcttttttttttttttttttttt

SEQ ID NO: 285531 - DNA, 519 bp, Zea mays
atacaagagggagcagtgttgcagcgcccttcgcgagttcatacttcatacaaagttcagtcctcactggcaaaagaaaagctcagacgcgactgtattgttcgtacgggggtggtgttatacagaagaaacgcagtttgcactggggtctggagtatacaacttccatccatcctacgaatggtccagtgtagcaaagcaagacgagctcgaggctcgatcacatcctgctcttcccgaccgggcccagttccttggccttggccctgagctcatgcttctggatctcgccgggcgctgtcttgggcagcggcccgaacaccacggacttgggcacccagtaaccgggcagcttctcgcggcagaaccgcatgatgtcccgcgccagcgccgcctcgtcggagcggtccacggcgtccttgagcgtcacgaacgcgcacggcgactccccccaccgctcgtcggcgcgggccacgaccgacgcctccagcaccgccgggtgcaggtacaccgccttct

SEQ ID NO: 285532 - DNA, 500 bp, Zea mays
ggaagccagaagaaatcaatcggcagtttcatcagtgatcagtccagatgtaaagctaatcatacatttgggcagaaaagccacttcagagatcaaagctttagaatccctcacaaaacgagaggattacgcattggaccccagcacaagattcaaatacaaccaaagatagattgggagccatgaaaaaaaagaaaagcacgtacgggtggtcaatctcaaccctactcttgtatttgtcgtccaaagactagaacccagctagaaaaatgacagctagaaaaatgacgactgcatctctatttacacggggggaagtgggaacctgccctggttttgtttctggggccattgcactaggggcagaccgatttggtacataacaagaaaaactgaagctgtttcaaagaactcgtttggtactttggccaccaatttctagggggtccatgcaactcctggacccttaattttgatctcactagcagaagaatttttac

SEQ ID NO: 285533 - DNA, 299 bp, Zea mays
actacttgtacgcgccgctgtttcttcatcttactcgtgctcggcacgcaggcgacggcgacggcgagcggcgttcaggctcgggctctcagcgacggtatcagtggtctcccgcctctcgccagtcgcgtcgcgccctcgcctccggtcctctgcacaccgtccggtgaccttgtgttgtaagtttttccagcactgcttgctcacccatttctcaattagaaaacctcaaattctgtccctgagcaccaaatcaagaccataccaatttagtgagtccggacagatggcaatggccg

SEQ ID NO: 285534 - DNA, 538 bp, Zea mays
  unsure (1)..(538): unsure at all n locations
ttnnttttttttttttttttttttttgtttttaagctcatggaacgtaactcctgtaacttttattcattgcttaagctctctacaaatgatccacatacatacaaatacatacatgcatacgtgcgtacatacattcgagttgaattgaacaacaaaagatttggagacaacgcaaaaaatagctcaacggggcaaaccaccaaagagcacacagcattcaagagctcccagcgtgctcttctccaacccacaaagagtttccagacttgatgatgcctgtaatggtaaatgagcagacttatcggtgtgtcccgcctctcctcctggaggacgaggatgcaatgcgtgcccgaggaagccccagaatagccaccagcccaccgatgaaagatgcaccggctgccaccgcaaaagcgggtgcatttccaccgccaaacagctgatcccatgggccactgccaagtgacacaataacctacagcaggtgccagttagtgatatatatccccaaaagctgcatcatcatcatcatcatc

SEQ ID NO: 285535 - DNA, 279 bp, Zea mays
cccacgcgtccggcagcagtacgtacgcgcagcgcaggcccagctgattgcgccatggaagatcatcatcatcatacagcaacgattgcgcacacgtggttggcggcgatggcgatcgccgtgctccctatcctctccgtcctgattctggctgccaccaagcagatgggaagaaccgtcttcgccccttccaagcgccgagagccgccggtggcggagggcgctcctctcctcggagtcctgcctgccatcctcaccaggagcttgcaaggcgtgatc

SEQ ID NO: 285536 - DNA, 386 bp, Zea mays
gtttgatcttgcacaaacacatttatctcaccgtgagatatggaggtgtgctacttggttgacgttaattgtccccactagcatgacagcctacctatatctgtactcacatggagaagtgtcccttgcagcatctcaaccagttctcttgtatgctattcttctgatgatcctcctttctcctttcgatatgttttacttatcatcacgcttttactttctgaggacagtctggcgtataatactgcctttacaagcaattacatttcccgatttctttttggctgatatttttacatccatgtcaaaggtgttctcagatctggagcgctcagtttgtcgtatggtgaatcgccaggttgcaacaatcgcttggtttgaagcag

SEQ ID NO: 285537 - DNA, 328 bp, Zea mays
  unsure (1)..(328): unsure at all n locations
ttcnttttttaatatttttttttttcgttctttttttgggtgtttttttttttttgtttcttttagctaaagcctctgcaactttattgctggcgagccgaagagctcaagagccgctaggtagggggcaggggcaagggcaagggcaagggcaacgcagaggcagagcttccccagaggcccagacgctgaaaacctgaaaccttacactgacccaaccaggcaaagagcagcttcaaccaaccagacacattacacattaactgggctttgcaacgctagcatgggcatttagctgatcgagcagatcaaagcaccagcatggcct

SEQ ID NO: 285538 - DNA, 634 bp, Zea mays
  unsure (1)..(634): unsure at all n locations
aatccggnacaagattccaggcctgttcagtccacagaaacactagctgaatctgaacatcaggacagattcacgcgcaaatgtctaacaagtcaggtagcggatacatcaaaattgcactgattcaaaatatcagatactagattgcagactatctacacaaagacggatagcattagttacagcagcacatgtatgtagagttgtcaactgatgcaaaatatattatcagcgcacggagtggcagcagatgaacggcatccacggctgcttcttttctctggaaatcttgtcaacgtccttatgtggcagtttggctggggagctccaatggtggtcatcagggccagatttgcgtgaccccgatttcactgacaagttgttgtccttggtcacctggcgccggaacgacagcattcgttccttagtgctgggtttcttcacttggttctccatgcttgcctcggcgaggaggaccttcagcgggacacgaactcttcctgaattcagttgggcacctgtcgatgcaatctcttcattcatcttcttgttgcttccatcttggacaaccacgatgtttagctgctgcttctcttcaacgctgcttgtgctttcggctgcagcaatctccttt

SEQ ID NO: 285539 - DNA, 488 bp, Zea mays
tctcaaacaaatcaaaatcttttataatttttttcaatatgatccaatctaaataagatatgaatagccgaataaggcctaacagattcatctcttttcgagacggagcgagtaggcaagtacaaggtggtttaccaatccgtgccataacaactgacggcaaaacggaaacgaacaaacaaaatgacttcatttcgcagctaatctagcgactgaatgaaacagtacatacatgtatatggttcagacaaagacgataaagaatacgtatacgccgctcgattctgtaccaaacaatcgatgccttacagtttggtgctaacctatccgccaaacgcaagtttgcatgtgcgtcccttatgtgagtgtgatgtgttatgatgtacgtatcctccctccatgtgcagctcgttcgaccaatgaaggctcactggtggcggtgccgcaggtggtccatacgcctgcgcgagcgtgggcgcgaagcggtc

SEQ ID NO: 285540 - DNA, 352 bp, Zea mays
  unsure (1)..(352): unsure at all n locations
anatcncagcgtaaattcagcattcttccacacgcaagcatagttacatatctcactcgccaatgcaacaccgttcacaaacccggcaagcacccaaaagaggcagaaaaaaaggcaccccaaaatgtacaagtatactcgtcagaagaggcatacgatccgatcatgagtcccccacattgaggagcacgtcccacaccgtctcttcgagcagctcgtccagcagctccgcctccacgtccccagccagcgcgtccgcgtcctcgcggaacgcgccgtgccacgccgacacgctcaggtcacggccgatcagcacgtccacggaggcagagctcgccgtcctgcggtcgct

SEQ ID NO: 285541 - DNA, 367 bp, Zea mays
acaataagcagtattaaagatgttgtacgaaagtgttctaatacaatgtagctcacacttcagggcatattcacatttgttatcctgagcaggatgggcaggctaatacatgttagatatttgagtgggcatcagaaacccgtcagatttccaaacacttgctcactgtttcttcaaatccagattatgtgcctgaagaacccaaaatgccgctctagcatccatcgaaagctctaggcacagtcaggcaaggcactactggcatatttaacacgcggagaatatacagaatgagacactaattcatgctaagagaaaaaacgaataccaaaaccttacatacagaaaacccacacgcaagccaagc

SEQ ID NO: 285542 - DNA, 398 bp, Zea mays
  unsure (1)..(398): unsure at all n locations
agctngcaaggggttgatgtctgaaatctgaaaaaacagtaacagtataccaggtggctgaatattacggcaactaaaaacagagtttggttactggaagcagcggctgatgtctcgtacaggccagtcagaaccaaaagctagctgcgcaccgccatctaacagtgatcgaaatgtgtaggagcttcgctcagacctttccaccccaatcttgctccaagcatggtcggcatcatctagtagatgatctggctgcacggatgcaatggtaccatgcttgccaaagcggtttgctgcacctggagccagatgttgggcatgttcgatccggaatctacggtccttcgctccatttaaatcaacaatcttgtcaaccatatccagtagtatgtcatcgg

SEQ ID NO: 285543 - DNA, 376 bp, Zea mays
cacaggaggagttaatctgttttagaactggaccagttttgattaacgattagactcttcacatgatattcagagtaacagatacgtttaatggatcgaaccggtattacaaccacagttcgatcaacactttacagtgagcagtcggcatatgtgtatctgttatataagattaaaacgaaaaaaaagaggaaggattggtgaacggctcacttgctttcgcctgtgccatgtaatctggatttcttgttgagagttcccttctgtacaatggcctccaaacccatagaagaaaacgaaaactaaattgttgtagatacgagagtaagagtatacaggttcagagtcactgttttgggtccttgagtatacaaca

SEQ ID NO: 285544 - DNA, 533 bp, Zea mays
cccacgcgtccgcctgttctgccttcctggcaacctgtctcagcaattaagctaattccttggcccggcaatggctagggttgagctcctcgcgctgctgtgcctcgcgggcaccctgggcgcgcaggccaccgccggcccccgccccgatgcgagggtcggcgtgtacgagctcaagctgggggatttctccgtcaaggtcaccaactggggcgcccgattaatgtccgtcgtccttcccgactgcaaagggaacttggctgatatcgtcctgggcagagataccgtcgctgaatactttaacgacacttcttactttggaccgataaccggccgcgtggctcagcggatatcgaggggccggttcgtcctcgacgggaaagtctaccacctgcaacgaaacgacggcaggaacacgattcacggtggtggcacagcgttcagcaaaagcgtctggacggtgaaggagtatgtcggcggcggcgactccccatacgtcaccctgtactaccacagcttcgacggagagcaag

SEQ ID NO: 285545 - DNA, 378 bp, Zea mays
tccacgcgtcttttctttcgtccgcggacgcgtggggcctggttgattggctgggctctagtgctggaatatactattggtgggtctgctgttgcccgtggtatatctccaaatttagccttgttttttggaggacaggatagtgtgccatggattttagcacgccatcagcttccatggtttgatatcattgttgatccctgtgcagccgctcttgtttttgttgtcactgttttactatgcgtgggaattaaagagagttcatttgcacaaggagtcgtaacagttctcaatgcctgtgtaatgatatttgttattgtagctgggagttatattggcttccaaataggatgggtgggctacaaggtttctgacggg

SEQ ID NO: 285546 - DNA, 451 bp, Zea mays
accaggtccagcggcagccccagcgcagccatcggccccccgcttccttactggggcggcgccgctgttggcgcagaggagctgaggtggcgcatcggcatggactccgccgccgctgccctcctcgactccgcctccgcgtccgcctcttccgccaacgccgcaggcatggagatgcccaccgcccgccacatcgcccaccgcaccgcccacaacatgtcctcctcctcgctccgcaagaagtccgacctcgcgctcctccgcaaggtcccctgcgccccgctccgacgcctcctcgacaacctccaggagggttttgctcgccaccaagctcgccctcctcttccccgccgttctactcgcgatcgccgcgcgaatcttccacttcggccaggaatgggtcctttgtgcttagcttggatcgaggctcgttcctcttgctgagcgactt

SEQ ID NO: 285547 - DNA, 606 bp, Zea mays
aaaaatcagattctgagaatcaatgcacgcgcccagatactaacacaagaccacgggttccatggctacaaaaagtggcaaatgcgatgtaagaacagaaagccctgtcatttctttcttcacctggggcgccggtcacgctccctacttctctcatactcatggtctcttctctccctccccttttccctttcgcggtcttggctccggcgctggtcccttccatgatcacctctatctatgctcctggtttccttttcatcatagtcgtccctaccacgatccctgctcctctccctgccttccctttcactagaaccacgatgctcaacttcccatccagcacgtccagacccaggaagtgcctgcgcaccttcagtatgcagagctttagagcgaaatttctttttcaggttgccaaattcgtcatagatctctccatcatcctcctcagcctctttccgacgttttttaacttcctctagttcttcttcatcaagctctttgtacccaccaccacggccacccctcacaccaccttcattggtaccaggcttggaggtgttacatatattacatttgggccgctcgcgatctagaactagt

SEQ ID NO: 285548 - DNA, 337 bp, Zea mays
tcctacgcgtccgccatttcttaaatgggcatcacaccccttagttatatcaatatggaaagtgtggtaagctacagatgaccccgctacaaagggcttatttacagaattacaggttataagtcatgtgtttgacattctttgcaaatatttcttgaggattgggtggccaaactcttgtttacaggaaacctgctcattcaactacagtttgctttctattaggtactctgtaattgtccaaggctccaagtatggtgcaggcatagtggtcaactttgggcctgttttgttcctttatctagctagcctgggtcacatctagcattcaggcagt

SEQ ID NO: 285549 - DNA, 742 bp, Zea mays
cgagttcttaagccttaaaaatgcttcaaaatcttttcatcttaaatatctacaaacatatttttagctagtgaattgtattattacagtgaccgatctcgagtgaaatatatcatattcctacctttataaaacaaacaggaacaacttgagtcggtcggtcggccagatccaaaaccctggggaaccatagcgggtttaactgaagagaggaaaaataaaataattctggatttttttggcatgaattgtgggctagattggatccgattcaatccagattaaaccatagtctaatttaactgaatgaggctttaactggtggctggtgcttggctttctggagacctggacgtagcgaaatctagatctgccactggacgcagcgctgctccgcttcctggcttcatgctggtctccgtgctgttccgcttcggcgcttcctcctcttctccacttcggcagttcctgcttgtctccacttcggcgttgctgagctgctccgcttcggcgcttcttgctcgtctccacttcggtgctgctgagctgctccgctggcggactggacgcgactacgcgacgccccgacgcaggcacgcggctggaggctgtaggcggagacacggcttgtactgggcctattcgcttgtactaggccgcgaccggggctgcagcccgggcagccccggtcgtagatccgcccctggtcgtcaggatgcagaagctgctgctcgagtgaacg

SEQ ID NO: 285550 - DNA, 595 bp, Zea mays
tgtcgacctcaccaccaacggcgacgaccacgactgcgaacacacggtaacggcttctcctttaacgggaatgtattgggggcgaacgtggcggccgtcaccgggacggacggcggcggcggcggcgtgggcgcgctgctgtccgggatgcggctcacgaccaggagcgtgctgccactgtggagtaaggcgagcctgcggttccagtgggggctgcgcgtgccgccggagatcaaggccgcgctcgcagacgacgggtacgggcgcaaggctgggagcctcgccatcagcaagctgccgctgctggtgatgaacaagatcaccatcgagcacacgcccaaggtgccttcgcagtctgaaacggataagaagaggaagaaagatgccccaccagcagccgagggcgaggtgttctcactaatgaagaggcaattggaggagctgaatgctgagagcaccatgctgcgtctggcagtcgaggacttgcgtgcagaggttggagccagcaaaggcgatggacgtaagctgccagcaacagtgccacatccacagcgttcattcgtgtcgaaaccagatcaccattttcacagcgatg

SEQ ID NO: 285551 - DNA, 365 bp, Zea mays
gttctagatcgcgagcgatgcccccttccattcggcggctttttacaaaaactaattcttcattcattttagatcgcaagttgcggatttatacagaacggataatatcctaacacaaacaatggaaatagaatataggcaaaactactacatcacctatggaaaatggctacctcacagcccttaccaatcttctccattgaggaagcattattattaagcacaaaacttgacacagccgtcagcagccatatcatattgtagcgcttgcagtgtcagcaagccctatggcccccctatctaggtgtttcctactttcgtctggcctccagcgccttctttaacccctcacttgcatcattgga

SEQ ID NO: 285552 - DNA, 263 bp, Zea mays
cccggtcgcgtggtttcgaactcacgcaacgcaagctgagcaaccgctgccggccgcgcacggccgcccacccaccagtccaccactaaagcctcacaccgccacagcagctgccgcggccgagccgacgacgaggatgagcggggccgcgctgtgcgcggcgctgacggagctggggttcgacggggaggacccgctggacgcggatgcgctcgagtggccgttccagtatgaggaggcgcgaccgctgcttgcctggatct

SEQ ID NO: 285553 - DNA, 450 bp, Zea mays
ttgtacattttgtggtcggatgcagaggtatcctggagtggccatagcccataatgagattattgatgcatcctgtttggtcttctactatatcaagccaaactaatagcactgcaaattcagtaacactaattggccactctaacaacgaaaatccagttatatcatgtattgcctaaatgttgctgttgtttgtttttttggctattccaaaactttggcgaggctcttgagagttcacaaccaaatagtcctgcacatattttgtgcagaatttgcaaaagaatccagaaatctgtattgcatatataatcactctgggcctgtttaacaatggtaaactgcacgacttaatgttgatctttatatttgtttcccataaattgttggaacaaaaacctaccgtatcaaaattttcacagccagaagcccaaaagaatgttggctgat

SEQ ID NO: 285554 - DNA, 399 bp, Zea mays
cccccgcattagcgcggagatcgagagacaagagagggaaggcggcggcttgccggcttaagccttctctccctccgtcgtcgcctcctccttacgtccgcttcttcctcctgaatggagacgtcagcgccgcccaatgcccccgctccgccggcgcagccacggaggcggttgccggacttccagcagtcagtgcggctcaagtatgtgaagctggggtaccactacctcatatcccacgggatgtacctgctgctgtcgccgctgatggcgctcgtcgccgtgcagctctccaccgtctccccgcatgacctcgccgacctgtgggagcagctccgcttcaacctcctctccgtcggcgcctgctccacgctgctcgtcttcctctccaccgtttac

SEQ ID NO: 285555 - DNA, 501 bp, Zea mays
ccctcgcgtccgccctcgcgtccggatgattttgttgctgcagccttagcacaggcaaatgttacacgtacagaccacataatgtggaccatgggggatgattttaactaccagtacgctgaatcctggttccggaatatggacaaacttatccaacatgtgaacaaggacggcagagtgcatgcgttgtattctactccgtctatctacacagatgctaagcatgcatcgaatgaatcttggccagtaaaatatgacgactatttcccctacgctgattcaacgaatgcatactggactgggtactttacgagccgtccaactttcaagcgatatgttcgagtacacagcggatactacttggctgcacgtcagatagagtttttggtgggcggtaggagctccttgggattgttcacttccagcttggaagatgcgatggggattgcccagcatcacgatgcagtctcaggtactgcgaaacagcacacgactgatgac

SEQ ID NO: 285556 - DNA, 461 bp, Zea mays
ataaagaattgcaattaggtaaaatgattttccacctaggctcacatattacatggtcaagatacagctatttcttaaactgcaacaattctggagagcatgaccgaatgcggtgagactgaaagtgagacgagggtcacaacaaagtcttcccaataattctaaaaatatactcctcccatattcatgaatgatgttgctgagttcagatgaaagtacaagcagccatcatcttcaacgatgggttgcagaactaaagcctttcaagcaagacgataagaaaagccatctcgaaaataaaattattttaagaacagcttcaaaagttgaacagcaaagagtacatgaaaatatcagattttgacaatatggttccaagaaaattggtgcttcaacaaaaatcaaagtaataacacaaaaaataaactcgagccattctaatgtcaaacaaagccttaaac

SEQ ID NO: 285557 - DNA, 327 bp, Zea mays
ttttatttcagttcctgacacaacttcataatagcaaaatcttgtgtttgagtttttgactgcagatcagtaacgctctgctctaggtgtgcatttttttattctgctattttgtctgctgatgacaaaagtgctgagtttatactgacctgattcttgtcaatgagttctgcaatattcgtatgttatatgcattaccgcatgatttatgcatgatgccatgtatggtaggaatgtaggatgtttgcatatggcctgttcatttggatatatttcttaccgttgggttatataaatcagtaagtggaaaatatatagctgtttcct

SEQ ID NO: 285558 - DNA, 897 bp, Zea mays
cgaaccctatgttgttctcggtgcggcctgcctccggcgtcgtgcagcccaggggatcctgcggcatcacaatcacgatgcaagcgcccaaggaggtgcccccggactaccagtgcaaggacaagtttctcgttcagagcgtcgcggcggcggaggggacgacgcacaagggcattgtccctggcatgcaaagcgccaggtaagttggttgaggagttcaagttgagggtggtctatgtccctgccaaccctccgtcaccagtgcccgaggaaacagaggaagatgacggatctcttgattcagatgtggaccatgaagtggggacaccatcgacgtccaactgtgcagcaggacaagggcatacatgtagatcacaagcttcagatgacgagggtgactctacatccaagttaggactggaaagtagatatgcagaggaaaacaagatggttcagaaagacctgatacaggatgcctctatatccgagttagaactggaaagtagatatgcagaggaaaacaagaagatccagaaagagctggatctcctccggaagacacatgcatctcctggggacttctcggcgacgtctgtgctgcttgtcttcttgttatcttcacttcttggatacctgatgttcggaagcaaaacttagcaagttcttagaagcaagataatgactgcacatcatttgcggcaccggcagcggcacggctcttttagtacagtgtacagatatatacattaatagcgaagtagtcagtacataacagatatatagggctttcttgggtttcaagtgtccataggaatatatcttcagttttgaaatatgtgtgagtaaccgttcatgtttatactctatcatccaaatatatgatgtttactataccct

SEQ ID NO: 285559 - DNA, 388 bp, Zea mays
tgcatctcctggggacttctcggcgacgtctgtgctgcttgtcttcttgttatcttcacttgttggatacctgatgttcggaagcaaaacttagcaagttcttagaagcaagataatgacagcacatcattctgcggctccggcacagctctatcgtcttttgtgtattgctccttttagtacaaaatatatatagttaagtagtccccaatacatggcagatcctcctcccttgctagtcccgtatgaacagatactcctcccttcttgagtaggtgtttttttctttctaagggctagtttgggagccccaaaaccggagtggattgaattgtctgaaatccccttcttaattaattttaaataaaaagtgccttttaacccctcc

SEQ ID NO: 285560 - DNA, 402 bp, Zea mays
tcgtgtgcaggccggagggcatgggggaactcgtgttgaggtctatgcatcaacatcttcttcaagaacccaaggttgttggggttcaatgtcggctggacaggggatggtgggggcggccaggtgatgtaagccaaatcgctttcggcctcctccagcagcgctgcgaagacgaggtgctcgaggtggcccagcgggaccacgaactggtgacggaacctgctcaacaaccacgcgcgcttgacctagcccccaccggagaccctcactgtggcctcctgagtcaggtcacgtctaaccttgaactgcatcgacgcctcaacctgccggggcaaggccacgtgccttgcggaggctataagaatgttggcgggttgtacaactccatagcttggtgatcac

SEQ ID NO: 285561 - DNA, 382 bp, Zea mays
cggccttccttttttttttttttttgacactcatggtaggacttttcaccatcactagaaaaaccctggacaagttcgtgtacaaatgggctcataatgacatgcaagttcactcgcttggcttgacagtcacaaatcacggttcacatggtttcggcaatacacgctatcgccggtacccattccagtcccgaatcttggctgacgatttgtcaaccagcacctccacggcgccaacgggtgtctgcgtgcgcatctatgcaccctgtatctctggatttccacgtcagaactctgggtggcaccatcaggaatgcttccgccatcactgtattagtccttggaagttagctcgtccagcgtccatccctttcatcaaatg

SEQ ID NO: 285562 - DNA, 403 bp, Zea mays
cccccctctttttttttttttttttttttttttttttttttttttttaaaatcaatgaatataaataggttaccattttgatctctgggtcacgcaagatacatctctaaaagtggacagggcaagggcaacaaaggaaaacatgtaatagaaagcaaaattaagttacacatgctccgtaacaatctgagactaatcaacgattttccagagtcaagtatatatcttcatgcagtaagatgctaaatgtatggctttggacattctagttgggcaagcagccaagcaccttcattgatcatgagctgccgtggcagcaactgtattattgtagccaatggttttgatgaaagcatcgacataaaagtcttatctcatgcattatatcctgaacatatcgcgg

SEQ ID NO: 285563 - DNA, 446 bp, Zea mays
agaaagatgatggactaccttatttcgaaacaaacacattggtacaacttagtccgatgccacgatgcacgttgaaagtctaccaagttacaagtagtaatacacaagtggatgctcatagacaaagtacagcccagatcacttcctgggatattgactattgaggctgctctaacacgtaacaatgcaacaagtgaatgcatgatcaagttggtactacaaaaacacaaacaacagaaagtattgccaagtctaccaccagacagcttcctgtgaattagactgatgctgatggcgcacggtagcatgtgatagctacattagactattagttatggatcgtctacacaattacaacgagctgcagtcttgcttgcaacatgcatccttgcttctgatttgtcctttgcggagccaagactaggactaggacttgagcttgcttc

SEQ ID NO: 285564 - DNA, 356 bp, Zea mays
cgtgacttatgtacgtatataataattataaatatttacagttattacagcttacaagcaacagagtttgtttagcctgatgattcggcacggtacattgttcaaatactgaccgcccgtcagaaaggcaaaacaaaaggagggggggaatcttgcctatgtgcatagtatcttgttctttctatgcatccatcctgcagcgtttctgcaggcattatgtatgctaatctgctagcaggccacacgagagagaaccgttgtttgtttcccatcccattccattcctgaacccatggccacctgctctctgctgcctccgtcctgaattctctggaacccacagccacagcttcaca

SEQ ID NO: 285565 - DNA, 785 bp, Zea mays
gaaaagatgaagctctaagattgatgaattggaacaacagtgatcctcatttcagccctagtatagccttttgatgtgttcacccttagactgaaatgaggatcactgttgttccaattcatcaatctaagggtgaacacatcaaaaggctatactagggctgaccttgtaaaacgattggacagtttacaggttcattatgaagaatctctcatggatgaatttgttcgcattcgggaagggatgcagcaagtcttaaaagctggattccggaaagatggcatttgtgctgtgcaagatgagagtgcaggtcttgtagtgtctgtggttgatccacaacccggggaaacgattgttgattgctgtgctgcacctggtggaaagactcttttcatggcatcacggttgtcaggagaagggaagatatgggctctggacataaacaaaggtcgtttgagaatactcatggacgcagcaaagttacacggtctagatgatatgatcactgacatccatgctgatcttcgactatatgctaaggaaaccacagttaaatatgacaaagtattgttggacgctccatgctctggtctgggagtgctttccaagagggcggacttacgctggaatagacaatttgaaaatttggaagagttgatgtgtttacaagacgagcttcttgattcggcatcaatgttggtaaagccaggtggtatactaatttacagtacgtgttcgattgaccctgaagaaaatgaagagaggattactgcttttgttcagag

SEQ ID NO: 285566 - DNA, 546 bp, Zea mays
  unsure (1)..(546): unsure at all n locations
aattttatcgttcgagtgcaccaaatccttccttgttttgaggctagggactcatagcatgaaagatactctgactgctgctactggggctgtagtgccatttcacctctcacttttggatgaaggcgatgtgagcaaattagtgttaggttatgcacactgtgggatggttgcagcagcccgctggattgcaagaggtgtaacaccatgcctccgtgaagcagtcagacaatgcccagagtaccaaatcaagattgttggccattcattgggtggtggtactgctgcattgctaacctacattcttagagaacacaaagagttttcttcaacaacttgtgttgcatttgcacctgcttcttgcatgacatgggaattagcagaatcaggcaagcattttgtgacaacggttatcaatggacttgatacagtaggaatcagatcagctncattgacaaccgttgtcaatggagctgatctggttcccactgtatcaactgcatctattgatgatctccgttctgaggtaacagcttcatcatggtt

SEQ ID NO: 285567 - DNA, 552 bp, Zea mays
aatccatccacctccaaagtccaaaagcgaacgctacgcccgccccaacggtgaaaacgtcggaaccctagatccctctcacggtcgcgcctgtgctccaaaaccttagagccgacatgcatcagcccagagcccgctacccacccgggtatggctccagcgggggaggcggtggcgggggaggcggtagtggaggaggaagaggaggcagcggcggcggaggaaaccacaactactacggccggaacacacatccacagcatcaacaccactaccagcagcagcagcagcactcgcataggaactcctcgcaccagcagcagtggctgcggcgagaccagggccccgccgttgcggggccagtgtctggaaacgctgtgcctaagacggcgcctcagcttgacgctgttgactcgagttctcaagattggaaggctcaactaaatataccagctccagacacacgctacaggacagaggatgtcactgcaacaaaaggcaatgagtttgagggatattcttgaaacgtgagttggctatgggaatatatga

SEQ ID NO: 285568 - DNA, 547 bp, Zea mays
ttttgttttcaccaacagtttttcatgtacctcattaagaagtatggaaagatcatcagacaggactctggcgaacagaatgagaatttgcaatctgaaagtcaatctttaactctgagcacaccttcctgtgatgccagtgctcctggaaaatgttacacaccaacagactttcagatttatgaggatcacagtaatatgtctggtgcagctactccacctccagagttctgctgcccaatatcaacaaagataatgcatgatcctgttataataacatctggacagacttatgaaagagaatatattgagaggtggtttaatgaaggatatgatacttgtcctaggacacagatgaagctagagaacttctccatgatcccaaatacctgcatgagagatctcatttgcaattggtgcaaagagcatggttttacagtttccgattttattcctccaaatgaaaatgcttacagttacttaccagagcaattgcatggttactctatgtcaagtttgcacaatgtttcggtacctctcattgctg

SEQ ID NO: 285569 - DNA, 390 bp, Zea mays
tcccacgcgtccggcccctccctctttccgttccgcctcgttgcgctcgctctcgctgcgccgcccgccccacctcacggagctcacggcaacaccggcagggacggaaaaggaaagccgaggaggcgaggagagagagatacaaggcaggcagccaggcacaggcagcccgcggctggctacggggccaaaacccttacgcgcgacgcggccccctcctcttcttctctctcccaccaccgccctccccttgccatttttggtgagtgccccctttcccttccctagaccagatcctcgccccgttttccacttttgcctccaccgccggcccaattcggataacaagctccctccgcctcgccgcgtctcctcccagccgcaggagcc

SEQ ID NO: 285570 - DNA, 465 bp, Zea mays
gaacgcaaaaactgttcatagatataatcgacaatgggacgcatgtaaatggatatagacatcagcatcctaattttctgctgccaggccatgcattttacaccctacttcagctcagggaacttctctaatccatgtggatgtttggaactataaatctccatggcgacgtaacatctgcatctccccgcatgtcatatctcacagaacaaagttcttcccaatgcttcacggcaaagatcgccattgtctcaaactctccatcaaattatgtaccagtggtggatttgttcggggcaggtaacctaagcttagaccttcttgagttcagcgccacaggatctttctttaatggtttatatgcaaaagaatcaaggtcgatcacagattgctggcagatgttactagcatctcttcgagttcttgaaatctgtccctttgatggctcagactaggcatccgaac

SEQ ID NO: 285571 - DNA, 585 bp, Zea mays
agaagagaaatcacgacatattcacactgatttacgactgaaattgacaacattgttctaccattagtccacctttatgaagccaggagggaacctcataattactatacctaacttcgcattcaaggaagttcctttttttttaaaagcaaggcgaaaataagctaaaaaaagggggggaaggagcaggaaagggacagggttctagctaggactcatccccaagcatactgattgttgattgattcacggcgcttcaaccatggcgatgtctgtcggtgatcagcggtgacattgagctccttgagatggtttacttggaacagggccattccatgcggaattgctgatcacatcagtgagcagctgttggcgttctcgtcgctgaagatgttgtaaggctcagcatgcgagtgcgggggcagcactgggtagcccattgggtaatgcatcggtggccggccatagccgtagcccattgccgccgggtatcctgcaccgccgttcccgtgctgctgttgctgctgctgcatcatcatcatctgctgctgctgctgctgcatcaaggccatgtactgctgctgc

SEQ ID NO: 285572 - DNA, 355 bp, Zea mays
attaccatatatatagttagttagattagaagagaaatcacgacatattcacactgatttacgactgagattgacaacattgttctaccattagtccacctttatgaagccaggagggaagaagaacccacaagcgaacgaccccgtacgaagtccctatcgtctcctctctcctcccctcccttatggaaacctcataattactatacctaacttcgcattcaaggaagttcctttttttttaaaagcaaggcgaaaataagctagagaaagggggggaaggagcaggaaagggacagggttctagctaggactcatccccaagcatactgattgttgattgattcacggcgct

SEQ ID NO: 285573 - DNA, 578 bp, Zea mays
gcctgcgcagagaccttcttttcccttctgctgcggctgctccatgacaagaacacacctttgcttttcaactctgcgtccacagcaaaggggaagcaaagcaacaaatcagacgaaaccacgcaaaagttcttctacggaattcagcgacggtgtgatgagggggtagctcgaaatccgagaagtaggtgaagtgaaactgtcgtcagatcctcactacagtgcgccggaactgcacactacctccacaagcttcttgaatagactgtggatggggggcgagtcctcctactcctttcctactcgattcaacgcaacagcgcaactgctgaaatacctcgagaaccctccgggcaaatcgctgctattgtcaccactaaagaaacgagttcacgatgcgtaggggaagcgcgagagcgagctcaaatcccaggaagaaaaggcgagatctgagagcaggggaagggaattgaagcagattcgtgatgcccgcttaccctgtccgaagtgccggtgctgctctcgagagagagtgacgacgagggaagcagggccactggaaaagaacgcgtgggcga

SEQ ID NO: 285574 - DNA, 507 bp, Zea mays
cacacgcgtccgcggaccgtgggcgaccgtggcagtcgaccgctccgagccctccgagctcaacgtaagcgaggaccccgtctggtactcgcttcaggaggtcaagagcctcctccagcggatcgacgagggcaaccgatccaccgggggcctcgccttcgtcaccaaggcatacggcatcgcaggttgcatcaagttcctggagtcatactacctgattttagtcaccaaacgccgtcaaatcggttgcatttgcgggcatgctatatattgtatagatgagagccagatgatcaccatcccacactcatcagtgcaaacagatgttgcgacctctaagaatgagctgaggtacaagaagcttttggctagtgttgatctcaccaaggatttcttctatagctacacatatccaattatgcagagcctgcaacagagtgttacttctgcagggatgaaagaaatgccttatgaaaatttgtttgtctggaacacttttctgacaga

SEQ ID NO: 285575 - DNA, 246 bp, Zea mays
aggcatgaacgacgctatcaaggtccatggaattagcttacaataacagcatagatacccaaacaaagatcgaaaaagataaacactaaggtagaatgacaggaatggtcctatcgaagatccagttgatggggatgggtgtgggtatcttttgtgctttgaccgctctatcgtgggccttctcttccatcctctttatcttgtgcggcagcgcgcacaggtagtcccgcgcgcgcctcccctcac

SEQ ID NO: 285576 - DNA, 554 bp, Zea mays
gccacaaaacaaatgtaccttttgtgaaggtaccatataaactttgccaaccatttcggagtggaatggttccgacttctccagttgagattatgtatcactgtcctgaagaagagattgcatttggacctagttgttggctatgggattatttgaggcggagtcaagcatcaggatttttgcttccactttctggtggtgcggatagttcatctgttgcggcaatagtcgggtgcatgtgccaacttgtcataaaagatatagagaaaggagacgagcaagttaaggcagatgctcttcggatcgggcagtataaagatggggcaattcccatggatagcagggaactggctaaacgtttgttttatactgtttacatgggaactgaaaatagctctgaagatacccgatcacgtgccaaaaggctagctgaggagattggttcattccacttgaatgtacccattgatagtatagtatctgcttttctttccttgtttgaaacattgactgggaagcgaccacgctacaaggttgatggggggtcaaatact

SEQ ID NO: 285577 - DNA, 455 bp, Zea mays
ggcctggaatatatagcttccattcatggcctccatatcaacctcagcatctgtgcccagaagcagcgctaacaggaagcaatttacacatttctgctgctgagtacaaacattacatctacagtttacatacaggtataccgtacctcctcctcacttgtataccaattgctatgatgtgtacatgaatatgcatgtacctgcacacacacctcataacaggaataagtcgcttgaatgcttcaagagatgcttccatctcattttgctggatgcttgaagagatccagctatcgacatccagcttcacaaggaaaaaatctcccatattccttgttcccgaggcatgaacaagcccctacatctaaaaagggcagtaaaaaaaaattcaaatctgatgttgaaaacgacttcaacagcagctttttgctgttgtgatattgacatatgaagct

SEQ ID NO: 285578 - DNA, 329 bp, Zea mays
aaaaaaaaaagcccaatcgtggaatcaaccaaagcagcatacgcacatggcagcaaatgtgaatctcaactcaaaatacacaggacgccgcgcaaccaaacaaatggcaaacctgtacaagggaagggaggctaaagcagcatagccattgtctatgctcaggctcactcacccagacatctttattgtctagccgcccgtggtacataggccatgtcggcgaggggccttgacgcaatgcaccctccctgccaaggtcccaaagagatgagatgctaatagtgaaccctgtcatcgccgtcaaagtttaggccctgcattccccttat

SEQ ID NO: 285579 - DNA, 496 bp, Zea mays
aaaacttccatctgcaacgtaggcagggcattcttagtttctatgaaatatatacatttgagtgtttgtgactggtattttctctgtaaatggcatttggtattctacaaagcaaaactctacatgttctcaacttctgattccatatggaaactctctacatgctatacaaacgtttactacaaaactgtacaacagtacaagccacatcagaggatcggttgacaccaacaagcaacagctcagtgaactccaaacggtcacaggttccaaattccttgcttttcggtgcggcagatcatgagcatctcttcatacttggaagcattgacgaaaccccacagctcgacatctttgattttgaattcctgggtatgggataagcatgggttgttaaaagtctcggaggtggagctagaaccagtcataaggtctccatcgagataaagtgcgaagtgaccaccacctcccattgccatataatcggtagagcaaa

SEQ ID NO: 285580 - DNA, 454 bp, Zea mays
  unsure (1)..(454): unsure at all n locations
ttttaaatanattttttggaaacaacaaacaagccggggggtcatacattataactatctagtagtacataatcagaacagcgtcctgaacttccacctcctaccggaacaaggcttgctactgtacattttcgagaaggaagcgaaaggaaacaggatgcatctgctgtcagatacatgtccaaacaatgtactgctctcacataggacattgcatacgtttcaacttattatctgactagtgttgttcagtccaatccatcagatgaaatctccctagcggcctagccatttgactgtgcccttgagaagaaaatgtgcaaggcgaacttttattggaataccagacgggagtgaaacccaagctgctcatagctggacagtgcacccatttccttctgttccattagttctgctctcagacaacatgtcacagttcggtccagcagcaacg

SEQ ID NO: 285581 - DNA, 479 bp, Zea mays
ttttgagttggttaactaccagctgaagcaaataagaactgcacttgcggttgcgtccttgttaaagcggacactggtaatgcctccattatggtgcaggcttgatagaatgtggtttggacatcctggaattttagagggaacaatgaccagacaaccttttctctgcccactggatcatgtgtttgaggttcatgttatgctgaaggacttgcccaaggaagagtttggtcaacatattgatttcagagaatactcctttcttgagaatccatcattacctaaagaggtaatattaagtaattgtttttttatatatatttcacattgaatgcttggcaacaagagatgtgagcttgtgtcctaattgttttgatttggagcattaaattaggtgaaagattccttactcgaggttgaactttgtgacgagcatagctccagatgctctgcaattgatgaaatcgataagcatggaa

SEQ ID NO: 285582 - DNA, 416 bp, Zea mays
ggggcacaaagattaaaagtttatggcaactaaggcgatggtatatctgatacaaaggcttaaaggtaggagccatgcaataggtcacttaaaactccactagaattgctggccacaaggtctcacaaattttgcataggatagagggaaaggggagcagtcaagtgaaccaggagcatcctcgtttcacgttggtccatttacatctagcgtcgtccccggggcttcgaccttcctttggatgcaccaccaaagctggaacctgaagctgtagctccacctccaaacggtgtagaaaatagagatgtcccacccaaattagatgtagcgctagtcccaaatccaggagctggcgtcgatgctaacgtaggagtggaaggtgtcccaaatggtgtggtcaactgagccgatcctgc

SEQ ID NO: 285583 - DNA, 407 bp, Zea mays
cagagttcaataactgaatgacgctccgcttgctgcaaaatattgcaatgtccagaacaataacagcgaaaaagaacaaaagggaaagaaaaaaaaagacccataaaacaacagtcatgctatgcacacacccaacacctcatcattccaaaggccgaaagcacattacatacagctagaagatttacagggaaaggatttagaaaaaaagaagaaaacaaaaactagtgaagcccaacatatctggcagcaaagctggcatcggcatgtcttcaggttaatgaattctaaagcttctgcacaaggccatgattgccgccacaccccccacaaacacacagccccacaggggcccgggcgggtcaacaaccacccttttgcccttgggcaaaagtttggaacccacc

SEQ ID NO: 285584 - DNA, 598 bp, Zea mays
actatatgcagctccttcgctactgctaagaagattggggccactgggttgcgaggaagatcttggccagacttagacatgcttccatttggatggcttactgatccaagtgtaaatcagggccctcacaggaaatgtaaccttactcttgatgaacagaaagcacagatggcactttggtcaatgactaaatcacctctcatgtatggaggagatttgaggaatcttgacgatagtacattaaacataattaccaattctggtttgttgaagataaaccactatagtagaaataacatggagttccattatgtgcacagtgaaaggacatcaaatggagaacattctggtcactttaggtctccttatcctgttcgtgttaccaagaatgatggcatatttgtcagtctcactgcttgcagcgacgatgcagctaaaggatggtatatgtttccacaagatgggaaaccagatcatatatgcaggaactatgaaatactgaatgataaaaatgtctcattttgcctcggaaaaacaaaacgttttcttgcatcggatgtccttaccatggacaccaaggaacaccatcatagtttca

SEQ ID NO: 285585 - DNA, 402 bp, Zea mays
accaattatcaagagtccttgtgcttcttattaaatgctcatatgtgagaagaatgtgaaggaacatcagtacctagccatggcatgagcttatttcacgaaagcacaatgaaaatgccaacacaccagttggaaggaatccaaaaagaaggaactgagggaaaaaagaaacaactatcatttttttgcaacattccaaattcactcattgaggaccatctgttgtcagaatccgctcctgtatttccgaaaacgtcgtcacatccttaccccacagccagcactcaagtcctgtagcattggcacctgccatgtctgcagtttcatcgtctccaacatggattgccttgctggctttcacgccaatttgatccaatgctatattgaagatctctggggaag

SEQ ID NO: 285586 - DNA, 720 bp, Zea mays
gcagggatatgacattttttggttataggaccttatatccttaaacaaaaaaaaaaaacaagaaaatgacttttgtttatttaaagtaattttttgacaggccatgttcatcaccaaaactgcatgtgcctgtcatatttgacaaaacaaatacatatttaagaagacaagagttaatttacatagctgtacaagaagaataaatgactttgatacaccaggttcgaagttgtgaaagatgtcattgtaatgaacaaaagtgtgtattgatcttcaggattgatacagactccaatccaggtcaggttgtgaaaaaacttcataatccgtgggaccatctacaaagctattcactgtctgcatcccttctaacaaagatggctggaagcgatcgcttctagagggaagcaacttatagaacactaacatcccaagagtacatatagcctgtagcttcatcgagtcaccctgaacagcaaagaagagcagcattgcagcaaggaagaagatcacacagaattgcatgatgcacaacactctgtccatcagcttcccatcattgccggcaggaaaccctctaactctgtaaacgaacaagaagttgtacttgtccacgagataacggtagccaaagtatgtcgcacccacaggaaccacgagcggagcaaacagggagtagatcagtgtgagggcaaatatagtaatgtcaaaagcatagta

SEQ ID NO: 285587 - DNA, 210 bp, Zea mays
agaatagataataatttgatttgatagtatattggaaatcaagaatcgatagttggaaaagacagactacagggaggtaacatccgaccgatacgtttgtacaccaatcaacattgcaaaatacatcgctgtaaaaaaaaaaagacaagacccccttgtttgacaaaagtaaacggctgcctgactctttcattattttgttttcgggac

SEQ ID NO: 285588 - DNA, 333 bp, Zea mays
gaagtatatactgtactacactgcattgttcatatgcaagttacctgttcattttcatgggaatcgttcaggaattgcacatgaaaatcggcccaattacacaggcaaaccatttgcataaaaaatccacgctccatattgggcacacaaagggctcacctgttactactaatttaacatcagagtgcgttgtagacatgcagagcactatcactactcactaggctcccctacctacactaacatagatcatcatagcgccaaattagctatgataataaattaaaatctcttggtaaattagctgcccaagccctgcttgataatcagggc

SEQ ID NO: 285589 - DNA, 537 bp, Zea mays
attcgctagatcctacttggaagcacagagaaagaagcaggagtcatagttgatcggatctaagggaaagtacacgtcttcgtgatcaaagccgggagagtgaaagacggattggtagttcaatgcatagggatcatggcagcaagagggatacaagtaaacatagagaatctgacagggttaacagtgcatatgaaagggagagagggagagatgctggggacagggaatggcacagggtcaagggaagcgaaactcatagagctaaggaaggacgggacaaagttagcgatagtgataggcacagggattcaacacgctcgaaatatagcgtgtctgatggctacaaagagaggacaagatctggggagaaaggtagagatgctgaccgtaaaaaccggaagtttgaagaaatgaaggatgattctctcaaggaggaagatgaagagaagtaccaagagaaaatagaacagcagttagcaatgcatgaggaagaggaccctgaaaaaatcaaagaggaagcaaggaggaggaaag

SEQ ID NO: 285590 - DNA, 459 bp, Zea mays
  unsure (1)..(459): unsure at all n locations
aattcgtaatagaaagaggttttctccgttaaaaaagttgcctaaaacactatacatcctattgatccaaatgagaggtcttaattttatcctaccgctcattttctggacactatttctcatgcatgcatgtatacatacagctatagtctatagatggaattagacatatacagtttcaatctcttcctgagttgttcagatgatctccttgcgatcatcaacctcagatgccaccagaccagaggcagctgcatcggaaccctgtgcgccagcattgtaccacctggcacagagcaggtagcagcagaagttgagcacgctgagcacggcgagcatccagtagaagaggtccagcctatccttgtgaggnttgttgtctccgagccacccagcgccaccgtgccttcgccgtgaccctgttgaccagcgagacgagcaccgagctgaggtagaacc

SEQ ID NO: 285591 - DNA, 164 bp, Zea mays
  unsure (1)..(164): unsure at all n locations
acacccatgaaaaataaattcataggggagaatatggaggaacatagagcacacattttacagggaagcctatactggtaggtgtgagggcaggggacaagacacaaatgaagtgcaaagaattagttggctggccatcatcatagggggggggggnngggggg

SEQ ID NO: 285592 - DNA, 414 bp, Zea mays
ttttatattttttttttttttttttttttggtttgttaaataacctcataaatgacttttattggaagacgacgcttgatgacatttatctctcgagccaggttcaccaggaggcgaaacaatctcgcctactcccctacccgttcagacttctccacacagccgccgcgagacatgctacggcgcgccgccactacggctacgctcaatggccgcgcggcggcgtggttccgtcacctcacccgtaggccgatgacgcttccgcccgctcatctcgggcgccaccatctgcaggcccaactccgaccgccacgcgtcgtgtgggtgccgccgctcccgcacttgtgtggcgcgcggggctacagctacactcgcatggcgcggcgcatcccaatcgcgaggcccgacgggtac

SEQ ID NO: 285593 - DNA, 417 bp, Zea mays
  unsure (1)..(417): unsure at all n locations
tttttnagcaggaagctaaagtttagctcatgagattgaaacggggccttactagtgaagttgagttgtacaatatagggtcttaatctgttgccgagcaacataatgatttctaaatgatttgttcaactctgaatggcagccctaccacagcagacccgattccaggacaatggaatacgcattattattacaaggcatgatggcaactgcagagttcattttaggttcttgttgaaccagtcgagcatgtccgcaaaggcttcctcagcgcttttcacggcagctgcatcatcgaggctgtatttcacgctccacccatgcgccacgccagggaagaccttgacgaagtgaccaacccctgagttcacagaaagggcttgctcgaattgcttgactaactctggtggggacctc

SEQ ID NO: 285594 - DNA, 430 bp, Zea mays
  unsure (1)..(430): unsure at all n locations
ttttntttttttttttttttttttttttttggttttttgtttttttttttggccaagggaacgggagtcgggagttgtgtttcgaacagcagaataatcagttggaaatacagacagttgactttcaccgctccctcaatattggcctaataatattaaccaacagcctaagaaatacagtacaaaagagtcacgcctatcatacatcgaatgttctcaatatagacgaagctgctggccagcctacaacaatttcagagtttaacgggactactgggaagggcaaaatcatctgcgcgatgaaacccagttgcgcccaccagcactggctgtagtcttcgggggaggaaacatgcttatgtcggttggggcagcgggttggtcttcaaccacaaggaccgccctagcatggctctaccatgaacagcca

SEQ ID NO: 285595 - DNA, 386 bp, Zea mays
catgcggtcaaactgtggccacatatagtaaatgtgtaacaaaacataataccaaggaaatggatataattacagtagaactcaggatgtgatatcgtgcgctcaaaccttagttacacacttacacaaagtacattaaaataaagaataatgttaagaatcttacatattggaactacatcatacacatcactacagcttgttggaacccagttcagattccagaactagcagattttgctgcttctgtgttttgcgttgaaggcttaggaggagggcatgccaattcccatgccgtaatttgcgccttggaaaatccgtgccttcaggtggctttcgtagacatcagtggcgaagcgggatccgttgaagcagatgaaccagag

SEQ ID NO: 285596 - DNA, 466 bp, Zea mays
atttttcttttttttttcaaactacattgggtgaacatattaagttgggaacaatgttggaccaaatttatagttgtcaaatattgaggatgaaattttgcaggttcaataagtttttccttgtcataagccgcaaatgaaattatcgggttcaaagcagcataaagataagctaaatgaaagaacagacttggctcccacatgagttggctcttggaaagggataaaccaaggcaacattcagccgtaaatacgaagaggctatgtcgaactcatgacctgatgacttagggagaaaaccctcaccactcgactagacctattttcccatcattgtgtcctagacaatttgagtattaactgagctgccagcctgccacacttgaagtgcatcatttcaaaacaaaacctagacttcatgctgcgacaatgaaccatcttgccatgctcgagactcacaaggcca

SEQ ID NO: 285597 - DNA, 498 bp, Zea mays
agactacctccataggcaaggacatattcatcgtgatgtgaaggcaggtaatatccttattgataatcctggtgtagtcaagctcggggactttggtggctctgcttgcatgtttgatagaggcgatagacaaagggctaggaatacatttgttggaacaccatgctggatggcaccagaagttctccagcctggaactggatataatttcaaagctgatatatggtcgtttggaataactgcactagagctggcacatggacatgctcccttttcgaagtaccctcccatgaaggttcttctcatgacgctccaaaatgctcctccaggtcttgactatgaccgtgataaaagattttcaaagtccttcaaggaaatggttgcgatgtgcttggtgaaagatcaaacgaagaggccaacagctgaaaaattacttaagcattcttttttcaagaatgcaaaacctccggagctaactgttaagaacattttaactga

SEQ ID NO: 285598 - DNA, 625 bp, Zea mays
aatctaacaaacaaaacccagcgtcaactgtatgctggtcctaagtttgtggatcctgtgaagagcaacagcaatgacagcggctctcagcattgtaactggggaagtgcaaacgacatgctcccttcaagtgtgagcttcgtcaagctggctgacatgaaacctgagacgtggggcctgttcctcgagaagttccatgagctccttcctgagacattccgctcacgcaagtgcattgtcaaagagcaaagggcgaagcagaggcttggcacttcttgccagttttgagttggcacaggagtagagaggtgagcacctgctcggccgttgctgtttgctgtggctttcatgcaggtgttgagctctgcagttctcgaataaagccatttttcacaggattgcgatttgcaacaggatttgagtgagtgggggcctgaacctgatgtccatgctgatatgatggcctcgctttgtaaatacattttccccctttttcttagctaggctctgctagacatgagttgcttgaaagaagttgggattcaatgtctgcctgtttctggccgaccgactcttacactcatgatatgcactcaaaagtttcattcgaatgaacattcagcag

SEQ ID NO: 285599 - DNA, 754 bp, Zea mays
ttttctactgggcttcctgaggcattgtttttgggccttgtgcgcgctataccacggctggagaactgtctaatgctaagacctgcatatgcagttgaatatgattacttacccgcatatcaatgctcaagatcacttatgacaaagaagattgagggtttattctcctctggccagataaatggaacaacgggatacgaagaagctgcagctcagggtataatttctggaatcaatgcagctaggcattctgatgggaaatcattaattattcttgagagggaaagcagttatataggaactcttattgatgatcttgttacaaaagatcttagagagccctatcgcatgctaacaagccgttcagaacaccggctattgcttcgatcagataatgctgatagtcgtttgacccctttgggacgagagattggtttaatagatgatagacgttgggagctttatcagtcaaagcaagcccgcattaagcaagagaaagaacggttgagatctacaaaagttccaggaggtgaatttgctgctgaagttactgcagtatccaaccaacctgtaaaggattcatctacacttgaagccatattaaagaagccacacgtacaatataaactccttgacgagcatggatgcggaaatgagaatttatctcgaattgagaaggaatgtgtagagattgatatcaagtatgaaggtttcatcgcacgacaacaatgtcaattacatcagatcgtaaacc

SEQ ID NO: 285600 - DNA, 918 bp, Zea mays
gtaccttcgctttggttcataccaaattgaggaatcggttgagttatgataagttgcataaactggtttatgttcactacaacttgaagttgcgcattcaacattttgaaactgttatggaaagtcttgcacaaatgaaaaactctaaagatagaaacatagatccatgtagcatcatgatagctgttgctatgtatgatgaaggcaacccccctatggaatggttgtgcagttctaggagtgaatcagtgccgacacttgatgaaaatgatgagcctgaatcccctaacagaccaagtggattcgttttagaggagttaggaggattgaatgaagaagagatggttcttttaaattctaggattggttctggtaggaaaaatggtaggaaaaggaatgttgtagaagaagatattggagatgatttcttatcacatagtagtgagggaggaggtagcccaacctacaacgaatcaggtgatagtgactctaatgatggtggtggtgatgacgaagatggtgaaccttgtggtccatgttttgcagctaggccaccacctcatagtggtcctggtcaagatgaacgaccagcccctctccgtccaagatcaaaaaggcagaagaagctctccatcaagggcctgtacatgcttcagaagtgatctaatcttcaagcacaagcacaagaatacggcgtatgcatggactcattcaatggcaagattttgaacatgtggctctattgtatcaattgtgtgctttgtttcagtttcagcacaatattactaccagatttggttcatgtggcctaacaatatttataactgtgattgatttctatgcattatttgaactatggactaccaaatatttgtgactcaccactagtgttatattcaccggtgcatggatgttacc

SEQ ID NO: 285601 - DNA, 446 bp, Zea mays
cccgctagccaccctctccagggggccattacccctgtagcagcgcgatggtttcctctgctgccagaggcctcgcccaagtccggccttggtcgctcccatcaccgaccgagctcctcttctgtagcaggccatccgccttgtctccatggtcatgtgcagcgagctctattttttttcccagtgctctcgcctgctcgacggaatgctgcagcgcgaagcggccatggatcctccctgtgtcgcgccctcggcgtgcttgacgtaatgccgcagcaagctgcagcagcgacgcccttcgctgcgacgcgctcgccaggtcggtccactcgccgtcgatctgcgcagcccctgcacgtcgtcgtcgaaacccgcgccctccgtcgatgtcacgcctcgtgctatgcctatgcgacgcaatgctagccggtggacagcacatgcga

SEQ ID NO: 285602 - DNA, 227 bp, Zea mays
aaacacgaacctttgttcatcggggagctaccctagattatatgagcatgactgcacgtagccacttattaactccttatccattttaattacaaaaatctacctcttacatgtcccaccaaaaaggggatgcactgaaataaaaaaaatttcatcaggattcacaggtatgaccaaattgcgcactgggcttcactgcttgctcctaatgctgctccccgtctgct

SEQ ID NO: 285603 - DNA, 472 bp, Zea mays
ttctttttttttttttttgcatatagaatatacgttcactgaatagatctctcgacagagcgcacgatatagatcagcctcacagcgggggacccactgatttagattacatgtccacaccacacaagctccgatccatgccactatatatgaaccatcttacacaaatggttatggatagacctcgattatagaccgaacacctaagaccggtcttattctgcaatcgctatatccagcttcggagaaaatcttgctccactcctgctcatctcgttccatgccattgatgaacatgatatagacatcgaatatggcctgcatctctttgtgcttcatgtcagacggcccagctccaactaccatgtttattattatcacctttacaccggcttctcttggaggaatagcctttttgcaattcttcagtatcttcacgcagtcgtcatggtcccaatcatgcaagaccgac

SEQ ID NO: 285604 - DNA, 568 bp, Zea mays
ggctgcaactttttgttgcctcaaaatgagaacatgcatttctttcatctattacatcaacacggtagaaaaacggcacaaaacacatcgagagggagggagcataacggaaccatatttcaatatattacaatgtaaagcataatttatgtattgagatttaactatagatcattgttgagagatcacaaaactgaacaggcagaacttcctcgattgatcctcttggcagttcacaagccaccatgtatgtgttgctgtgatggtgtcagaaggatattcagtgtagctgttaacaattccataagtcgcctctagagtcctggcattaccttttaaggcatataattcaaaactgtgatccaggtgaggttgctctttattcctttttgttttggaaaaagaatttcaattcctacggagatccaccatttataactatatggaagctgaaattcactgggaacggttatgccaaaatggacaaggttgttcgcatcatctacttccttcagctacagcaaaggtccatgcccagtagggaaatgactaggatgaacagcacgtt

SEQ ID NO: 285605 - DNA, 511 bp, Zea mays
tttcttttttttttttttttttgacaatcaaatatacttatatacagggcaaaatcggtgattatgtaagttcgaagttcctatcaatggttaagctatacaaaaaaaaacctcaaaaacgagaaaaggaaagataccatctcaacagacaaaacttacatgagatgagcataacaatctccatctataaacagagcacagggcactgcataattccagccaacgcatctgccagtgccaatcaacaacagtaaacaggagcccagtcgcgatgatgggcataaaatgcaacgcttaatgtacactacaacaaaaaacgggaaaaaacagaaggctatctccttgctgaattcccatgtctttggctgcggaagtagctcagaagcgcttgtgccttctctcttgcccgcggtgttcctgactgtgaaagggcgactagagggggcactgcaccctcttgaagaactatactgcaaaacctgttgctgtttgtacagagctgaagcaacgc

SEQ ID NO: 285606 - DNA, 306 bp, Zea mays
ataaacggggacataaactgatatatttggaatcacttcagtttatataatccattttcttacaaactgggtgcttcgaacaggcctaaagttcataaataaataaaccaaactaagcacgaggctcgcagcaagtttgccaaaaacaagacagtacaaactagtaattacatttgcaaaccaaatagagatgctggctgggcacagaaacttttaaggctgctgctgcgtacaggacatcaaacccccgaatcctcaaaaccctatttaccatgctgatgcagccaagctagaatttctgccaat

SEQ ID NO: 285607 - DNA, 330 bp, Zea mays
atggaacacacctcatcagacaaaaaatggcgcacacataccgtgcagttttcgattttcaagacaagatgcttgtaccacattgccagtaatactccactaatttagaacaggcttcagacagcgaactttgaccagataccccctacatggcgtcgaaacagtatgcgcatgtatccgggttccgccatcacaaccagctttaccaaacaccgtagcaactcaagccattaggaccatcagatttgcagctccttctcaaggcattgctatctcccatgaccagagggagaaatgccttattttcagactagggggctagaggcaatt

SEQ ID NO: 285608 - DNA, 320 bp, Zea mays
ccttccgctggctcccttccctgcttaaatgcgacctcatttaagtttatatacggggacaactctgcctatattaccgcttaaaaacgctaactgaggaatttaatcgaacttgctgcgagaactcacacgatgtatgttttcttcaacactttcttgccacgttttctgtttgtgctcgaagcattaaggatttcagcatcctcatcgttccacagaatcctagcagcgtctggcttttctattaggagcttggctactaggaacccagcaatagaccacgtttggtacagccgtgactgtttcccaatgaatcgtgc

SEQ ID NO: 285609 - DNA, 440 bp, Zea mays
ctgagcaagccgcggccacatccggttatagaaatggcaggctcgatctcgattattgccaacctccgcttccgctcccggctttacaccgccgctctgttcctttctggattcagagcgacagccgccgaagaataaacaaacgcgagctcctctgctaaatacaacggccagagaacgactagtagtagtagtagtctacgtagcgctgctacacaggacggacgggatcttaattaacacaatgcttcgcattgatcagatctgatttggtccgtttccggggttctacggccgcgtgacgacgccgacgcgctccgcggcggcgcgcatcacaccctccaccagctgcggcatgcacacctcgcccacggccccgggcccgcatccggcgcggagccccgcgccggacatgtacttgcgcacctcggcgcggatca

SEQ ID NO: 285610 - DNA, 411 bp, Zea mays
aaagaaccaactgttgctttgtaggttcattttaaaagagttcttaacgcagctttctttccctggataaacatagtctagcacaaaaccgtatacggtaacaaagtacgcaagggatccaactggtcagaaaggaagcggccctcgcagcttgttagcaatgtgtaggatgtggtcgatgtttgtgggtgggtagttctggagaagcttgagattcgcagtgaaatcgccagccaagagccttctccggacaagaattagcatcgcgcagcagacccgcaacaacgtagcctgaggcccctctgggtcgcccaacagtgtgtcccacaggctgaggcagtcacggaactggaactcctgcgttagcagcaaggtgatccatctgaatgcgtagaactgtggattgacctt

SEQ ID NO: 285611 - DNA, 354 bp, Zea mays
ggaacttcagctccgccaactggccaaagggcaagcgccataactcgtcattacataagtgacaacaaaaaaatcatcgtaaaggaccagctttatcaatgggggttccctaataatttgtataataacactacagatcgaacacgcttatgtgttatgtccatcatctattcgtctgcatcacagcagcagagcgagcgacgctgtgaaatttgttcacagaacggagtcatcaaagctccaagctcgggtattattactggttacgggcagccgtgaacctcctctgggaaggcgttgcccttctgctcacaacatgcttgcgcgcaccctcgtacggcaagacctcgtcgt

SEQ ID NO: 285612 - DNA, 397 bp, Zea mays
aacacaggaatcaaacgcaggtctctgtttccaaaagatatgctcacgtttcgtgatgagcacccaaaagacaatctagagtgtaggcacatacagactgtacagaatgcacccgaggtgctattctcagtgttcagtatggaatgattcactgattccacctgcaaaagcatatggcctcttctacaagcaagatgccaatactacacagcatctgttccattcatttacaagtttgttcctgcacattccagcagcatccctctgctcaatccctgatggctgtgctatagatccggtactttctgctgacccagggatcgtttttgtccatatagtatgacatcaagcaacaccatatccaagggggattcctggtcgagggggcaacttccac

SEQ ID NO: 285613 - DNA, 537 bp, Zea mays
ggcaaacaattccaatttgcaatgatatatatctatatacagtggttggtccaaacaactaataaggagttaaatggcacttctgttatttttgcttaggacaccaaacgggaagcacatcagaagaactgatgcgctctcccagggcgctgagtaaagaaaacgctgcagacgtatatcctaggtagagtgaaaagcacaggcgcacagagcacgcaaaggttgcttcttagttgggggtatcaggcaggtttacacaaagagacgcatcaagacgtggagcggcttgctagtgagctccactggttgtaccatggacactgctaatggagccccagtgagattctgcggtccccatttgcgcagcaaggctatccatggaggccgaggtcccacttctgtgaccccagcttgatcgcctcgaatgcgtaccagccctcccttccacaagctcaggaagggcttctctgctcaggtccggggatgcatgggctaccctgccttccttctcgtccagtaggctgcctagaccaacca

SEQ ID NO: 285614 - DNA, 519 bp, Zea mays
  unsure (1)..(519): unsure at all n locations
ttttaaatacnttttttttttttactgaaggagcagaggggataatgctggatggtttttgcatctttcccagatgaagagcatggatatttcctcccccttttagctgatcgtcaggaggcaacaaaattgtatctttcccacgtgaaagaaagaaaatgaagctctcaatttcttgtccgacgctgaccacgcctattatcaggagtttacgcagcacttcccacggaatgacggcttctttctgagatgatgtgtgtgtatatacacatgtcagttagttggctaacattgatggcttatggaagcgttcggctggcttagtggcaaacttctgtttctacagtgtatcctgccttcagatgccgccgccgccaccatcaccagcagccagttccagcatgcatctcccaaggctcaacgttcgaagcacaatggaggatcacttaagtcatcggtgctccaaagtccaaaaaccgaggacccctgacccgatttcctgcacattccatgcaggac

SEQ ID NO: 285615 - DNA, 398 bp, Zea mays
aatgctaacttccgtgaaattaaaatgctcacgaacgaatttgtgatttagaatttagaatacaagtgccacgttatttcatcagagagctcctaccctaagtttatctggacgccattcagaactacacgtacatattgtacctatacacgtcggatctctcaataaggatcctccaacttcacttcaaattcagcatccccagtagcttccagcatgtccagtattttcttcgggccaagagttgtgattgattggccctcagcataaccaaccattagaagtttccctatcttcgacctccaatcagaaacagatttctcagtccacctgtcatggaccacacgatcacggtagttgaccattgtgccaagcccagtgtttcttagccagccata

SEQ ID NO: 285616 - DNA, 452 bp, Zea mays
gtacaaggagaggctcgcaggggtcgtcggagacgaggccgccgccgcaggagtcgtggccgaaagcctgttccttgtctgcgccgggtcggacgacatcgccaacaactactacctcgcccccgtcagacctctgcagtacgacatctccgcgtacgtggatttccttgtggagcaggcctgcgacttcatgaggcaactgtaccagcaaggggccaggaggatcgcggtcctggggatgccgccggtcgggtgcgtgccctcgcagcggaccctcgccggcggcctggccagggactgcgaccccgctcgcaaccacgcggcgcgctgtacaactccaggctgaaggaggaggtcgtgctgctccagaaggagctggcgtgccagacgatcggctacgtggatatctacgacgtcctgcaggatatgatcacgaacccctgcaaatacgg

SEQ ID NO: 285617 - DNA, 492 bp, Zea mays
cgccaccatccaatcgaagctctggaacctcctccactcccagcttccgccgacgctcgcttcagctgctgctttccttcccatccttcaacaggtgcaatttgcatttcccatggagctcactgattaataacgtgtgagctgaacttgcttttctgtggacaatttggaacttcagtactagtttccgataggattcagggagaaatgatctcttttaacaatttattttggagctcccttcagccttctttcaagttttacagaaagtgcctgacaaactgcccatattttgcactgaccatgcattcaactacaaagcccttgggttcatctatgccggtaaagagggcgcatttgaagccacatgccgcagacatcaagaggaacccccatgtacatgagctttacaaattggtttaccgacttccggagaaccttagctggctgttggcaccaccagaaattcctaaaagacctgcctcatagaag

SEQ ID NO: 285618 - DNA, 413 bp, Zea mays
agaataaactcaagacctgttactagcaagcaagcaagtacgcacgagcagtgtccgaaagtgcacctcgactaaccattttacacatgtctactagtatcccatggcacacacacaccacacagtgaccacaatcgacgctacaaagtcagctgcaaatcagcgtttgacatcgccagaaattagctcttcctatctgtcgcgcatcaagtatctgatgaactcctaacacaaacacagtgtgcgtcagtcactccatcgcccccgcaacactgaaaaatgtcagcactgactgcgagcaatatttgtggttctcgttagcacctgcctagtgccagcagggcagcagccttcaatccaacggctgccttgtccgcccgtctggcaaccccagtagagcagccctaactaac

SEQ ID NO: 285619 - DNA, 860 bp, Zea mays
agggagaactaacggatgggtactgttatatatttaaaaaatacatataattgttatgtacaactgtgtaacagcagggtttgacatatacactccgtgctaaaccaaacgagagggaaggcactgcaatgcaaagatacacacgtacacatgtacaggtgaatagacttccaggatgaccaggagcttcctccttattactggtgcgcgctttgcagggagatgagactaggaatagacttccgggatgatcagaagctaagcttcccctctggtgcgcgctttgcagggagatgacagggaaggtacagcaatccatcgtgactggaaatggaatcaggaagcaaggttctgttgtgctcgcatcaccagttcttcggtcgtcgtaccaatgatctcattcgcacgcttcaacggaacgcataagatccttccaatcgaatcccgatgaacaatgctaagcttctctaacttctttatagcatcatgaacatcaaaattgcaatctgcgccaaactcttctttgattagctcttcacaccgtaaatcaagatcttgtatagtggcttttccctgctccattaaaatgtagtaacaaattatgacctctttaacttcttgctgtatcacgtcatcgcataagtgaagaagagttcctttcccactatcaagctgtttgtcatacattgattttgtaatcaaattctgatacattgtcatattttgttgaaatgtgaagtatatcttagcacagtatccaatcacaccagacaagattgctattacaacccatacatcagcctttggcatttcaagagagccaagtagagtgaccaaaccgataacagcagaaatgagag

SEQ ID NO: 285620 - DNA, 581 bp, Zea mays
catatattgttcgtgtcttaaaatagtatctgatccgatacttacattttatagtgtaaaatttaaagaccacctagcccatcgatcctctgtacgctctgatggtgaagcagtttgtaggaatgagggaaatgggaacggaacaacgacagatcgaagcttctgtcctgcagatcgacccaagatctatagccatattatgtcaaggagatgccgtggtatcactgggagttgagaagagcagagcagctagcagcatatgtttcggttacagaagaatagcatatagacattctcctgtacggaaagaaaatctatttctgttacattgtctcttcgtgccctgtcgtaacactgtttgagagctgcaaggcatggccatggtgggtagggcaccagagaccagagtctagagtctcggtcacgcggagctcgaccggattcggttctattcgacgcggagcttttgttccggagaatgagattcggcgatggctgtgggaagctgggtaggagccgaaggaaagcttacgagttctggaaacccttgtgaatggagtaaaacagagagctcagctgct

SEQ ID NO: 285621 - DNA, 370 bp, Zea mays
gaataagaaatcctatattgttatgcattggggaaaaaaatttccctttgaacttgggtattcccaaatcccaagactcaagttcaaaacactggctcagccactgtcggtagcaacggttctgaaagattggtcggagtgtctactgtgacagcgatgccatccgcatctgccgtctgcttggatccgacctgtccgccgttcgcatcttccgctttaccccatagcacgacgtacagccccgcgatgatcgtaaccgcacctaggacgcttccaacatggagctgttcgtgcaggaagagcgtggacagtgtcgccgtgatcacggcgctcagcggcgtaaagatggcgctgtagaggggccctttca

SEQ ID NO: 285622 - DNA, 504 bp, Zea mays
ggcgtcacgcaactcaggcaaacaacgggacggaaaccccggccgtcactgcgccagagctggagacagagatcatggtgcgggcatgggggcggcggacggcgctgcctccgctcctcatccttggcctcctccgcctgcactactcctcgctggtcgtcgcccaagaaggacaagaaaaagaccctgctactttgttcgcacaagcctcagggatgatggacctgaggaagtatgatggggcgcttggcctgctaaatgctgtgttggaaattgacccaaatcattctgaggcttataggcagcgtgcatccgtgcttcggcataaatgcagatacgaggaagctgagagggactataacaaacacctggagctaagtcctgggtctgcttcagtggtgaaggaattatcccagcttctgcaggctcaaaattcattacaatctgcttatggccaattcgattctggagacttctcaaaagtcgtggaatacatcaacaaaa

SEQ ID NO: 285623 - DNA, 471 bp, Zea mays
ggcaatatcatgctttcaaatcacacaaaacatagcattgattctacaaaactatggacaaaacatagcattcattttatatgagatacataaatccggacccacgtgtcatatattagcgggttacccatcgggtagcgggtatggggcaacagagaacatacccacgcccaccatacccgatgggcataacaaatgacccaataaaatacccatgggtatcaaaatccgccatacccgtgccctaatagggtttttacccatcgggtttcgggtttcgggtacccattgccatccctaatgctagggtccgaagcctctttgatttaggtacctatattatataccattgtctttagtcaacttaacacggcacgcgaataaagctgagctctgtgatcaggttggcgcaaaacacgcaaacatgctgcaatttttccttcactggaccttagtttgtctactacaggt

SEQ ID NO: 285624 - DNA, 338 bp, Zea mays
ttcttttttttttttttttttttagagagggataaaatatagatcgaaattttttacagtattatgtatagggcagaaaatattcttttagagtataaaatttagagaacgttgcttgcggcctgcgttcgagtatagataaagagccggagtcttgactagagcaactaactaacttcacatttatttcggctagcagacgcatttaactttttaaaacaagattaatcacccctatttactcgactcgatcctaaagtcggggcacatcatgttttagcaagcaccgcttcctcctttggaagtggtaaagatggcctccaagttgttccgtcggg

SEQ ID NO: 285625 - DNA, 449 bp, Zea mays
actggcgttggtggaggaagagaccctgaggccggcgctcggcggtgatgccgaggaagtggtgaaggggccccaggtccttcatggcgaattcccgctgaagggcgacgatcgtgcggtgaagaaggtcggcggtggatgccgtgagcacaatgtcgtcgacgtagagcaggaggtagacggtgtcgtcgccgcgccggtagatgaacagggacgtgtccgacttggcctcgacgaagccgatggaggccaggtaggaggcgaagcgactgtaccatgcccgtggtgcctgcttgagtccgtacagggaccggttcagccggcagactagatccggacggtcagcgtcgacgaagccggtgggctggctgcagtagacagtcttcgttagagtgccatggaggaaggcattcttgacgtcgagctgttggatcgcccagtcgcgggag

SEQ ID NO: 285626 - DNA, 570 bp, Zea mays
gccccggccaaaaattccccaatcgctcgttttccaccgccgcggcggggctgaatcgcccgggggtccccaagccaccgtcgctccacgccaccccggcgtcgccgcctccacacgttcgtccccggtaacacccgtttttatccgtcctaccaccccgcacgcccgctcgcctcctcctatcgtcgcatctctccacggccgcgagcagcaatcgatggtgggggacctgtccctcctcgccgtcgcctccgcctcccccgtcgtcctcccgccttccaaggagctccatggcgtgcttcctctccagggtaagagaccgcaggacgccggcgtgcagctctgcgcgccgttgcagcagcatccgccccaccatctagaggcggtgccttaccaccagggccagcccgtgcagatggtcgtgcccggcaaccatcagggacaggccctcccggcggcctaccaggccatcacgatgcccgacacggccgtgctcatcgacgtgcaagattctcaccctgactcggttcaacttagccttgggattgcggacaatgtgcaaggcaagag

SEQ ID NO: 285627 - DNA, 295 bp, Zea mays
gaatcagggctattgcgattgtagccttagttcaggcccagtaacaactttgagtccttgcgtatgaacaacatcgacattcaatgggctacaagtgtactatgaaacagtttcacacgaagcagaaatcagtgagaatgagaactctgttccactgcacttcttcgctctgtaacttgatagacaatcaccattttgggacatcctatctctgggaagcacttatgatcccatgcaactcgctctattgacatcttgtcattcagctgaggaattgctagggtgatcaccttta

SEQ ID NO: 285628 - DNA, 268 bp, Zea mays
aacgacgtgtccgggaccgtgggttctagatcgcgagcggccgccctttttttttttttttttttttatttttactttctttttttttattttttgaacgagcagtacaatcttgtaaattccatttatgatatatccacacatggtcgacagggtttggaactcttatatcatcaagcaaatgggaaagagaaaaaaagaaatgaagatatatatgtaacagttgtagatagaagaaaaaaacatacaaaaaaaatgtacatttggc

SEQ ID NO: 285629 - DNA, 360 bp, Zea mays
ctgaatcggttatgctctataatcagttgggtcaaatggacataagctcttcttttagttcattggcaaactacagaaaccagacaaacttgaaatgaaacgtgtaaaattctcagtccaaacaatatatgacagcaatcactggattcgtatgaacggacaatcatcattagtgaaacaacagctcgaaccacaaaaaattgtcctgtacaaatgtcgtatgtcatagcattgaggaaatgaaataatttccctgcgatacccaggaagattgggttcgttttttttatctatcaggcaagtcctgatggtatggcaataatctctatcagggcttcatcagggaataagagcttgcct

SEQ ID NO: 285630 - DNA, 491 bp, Zea mays
cttcttttttttttttttttcttttggattcaaaaaaaagggactttattagccacaggggaatacaaaagctatgaacacaccacatctgttctgctgcacactagaccacaggtttagcagtggcatgctgcatcatctccagagaaaactctttgccaaagagttgcagacatcttaaaacatactagttgcagactgatcacagcagttctcttacatgaaaataccgaagcccctgcggctacttccccagcaaatttagctcaatatataacgcccctagtagtactccaaacctagtaaggaaacccccaccttttttcagggcctagcagctggcacagcactacgctacgcaagaagaagctgcccagcggccaagggccccgtccgaggcaggcagctcaagtggaatggagtgacgtggccagcgaacgaacgaaacgaaacctccaaaggcaaggaacggtccttttcacaggtcgagg

SEQ ID NO: 285631 - DNA, 556 bp, Zea mays
gttaatgtgaggtctggcagaattgtattgcttcctacaaaattcttgaatgtcaaatagaccctacacggtgaagaaacctaacaaaactttcactgccatgtcaccgctaacagcaaatcagacagcttcatcatgccaacaacactcaacatgaacagcaaattaagattaatttaaatccctatgagcttttgacctagcccctgacataaaaccagacatccaagacactacaagtataaagatgctgcaaacactatgtccctcttgatcttgttgaccgcctcctcgagttttgcttctaactcggtttccccaatggacttggatgccagaatcagctgctgcagaacctcctccagcctcctgatggccctgatcaggcttccttcgaacacttgggtcatctccatgatttggtagaacttcgaccctctggcccatgaatacaccgcttccattatgtcgggtcggaaagattctataaaactttccacatcgatctggatcttgcattcaagctgaaggttagcaacccttcttgctgtctcct

SEQ ID NO: 285632 - DNA, 621 bp, Zea mays
actcaaaaagaaattatctttgcacaaagctatttttacgtagttatcgtgtgtctatcaggctatgtaagtgcatatagattcacagagccaactctactagctatacacaataaaagatgacacttgtttgaggacttgcctcggtggaagcatatcagatagcacctagtacagttttgcttgccatataaaccagtaaaatctggacaggcattagccgaagactgctcaacggaatgtgcagacaagacagcccaaattcagggcaagccatcaccagctatttaccaataacctttacccccaaaataggcttgaactgtaacgcaatttaagttcgtttgagttacgaattcatggcaacaagtccagagtatactactaattctgaagtttatagcttcaatgtactttcaaaatggtagtcctgctagctacagcctccatcctgaagtttataggttcaaggtactttcgaaatggtagcgctgctagcctccaggggtactccattattagaagggcttcatcgagcaaaagcatcaaggcaactgacattagaatgatggtcgcccttttgagtccgacgacgacttaagtggcttgacctttttcttc

SEQ ID NO: 285633 - DNA, 533 bp, Zea mays
gtcaacttgtcttaaatgagtgcacatgccatactacaaaactaaacagttggcatgtattaattcaggaaacacaagcacggtccatcatcagagattaaatttgctgtgcatcgggacacagctataaataatccaggaaacaagcatggttcttctcaaattaaattaaattaaatggaagtgacgtagcatgactaggatggtgtctaaattactcttctaacatggcaccggctgcaaggctccagaacagttagtttaactgtggatggaactttgttctcgatgtatgtcttgatacctgagatcgctttggaaacatccataaaaacatcaggcgtgggtaaacaacttgtacacttaccctgaccacaccgatccccataaaaggtgtccagtgtaagaaatttcagtgacaccgcagtctcaagaatataacgtgttagttcaaataagcttttctcagagctgaaaccacatatcttcacactcctgaggtggccatggtggtgctcaggtgtgtgcctcaa

SEQ ID NO: 285634 - DNA, 475 bp, Zea mays
gtgaaatgcatggccgtggcattgaattggatggattttatggaagtgaccactgccctgtttcgcttgagctttccgaagctgtagcagaagaagcaccaggacagcccaagccatccatctaaatataccaccatggtggtcattgttgagacatttccggtccttcattaaacctgactgttccatgcattgcctactctaggtagctgaggtttgattgtaggtattattatgatcccagtaggttaccagttcctgtggtcagggctggtatagtttagggatcattgccatttaagcagtgcaatttggacatcccattctgcttgaaatgttgtttgtctaagagcagccatggactacctaatccctcatggggatcgaaaagattaatcccttggtatccaattttaactagcaagggatttaatccccccctaacaagcccaataaaatcccgttggttttttct

SEQ ID NO: 285635 - DNA, 476 bp, Zea mays
aacttaataaacagtcatgttacttccggattttcgaatagttaatctatcgggtttccaaatatgtagcgcactagcgcccattgtaccggaactctagaactaacaacctgtacataagagagaatctgatcaagctgaagccaaggaccaggtaaaataaatcctccagttcggtactagcaccggatcggccagggtattttcgaggggaaaaaaaaagacagacttccacatgagtagggcccgagagaaataatcgtggcaagccgtatccctgtatttttgtagaaaggctgtgtcgaactacctttggctcggtggtaactggtaaggcttctcaccactgcaccaagcttgtccttcatattttcgaaactaaaaccctccaaatgaagctttgcagtcatacttcatgaattcaaccagggccaccgtcacaatgagcaccattgtggacctttgggagcttatac

SEQ ID NO: 285636 - DNA, 536 bp, Zea mays
agaactacatacatctaggaccctgggccgggtaacttctattgaccctgcatccagacaaacatcaaagaagggtgcctaaccagcttctttcaacttttcttgcaaaaagccttttgggccaacgtttttctcgctagaatatctcatgcatgctcatgctcaacaggggataagataaatttattttggaaataaactgacagaagcgcagagcctccaacgggttcacctattttggcaccacaataagttcgccaccacgcgggactccatcatctccatgaccacctgaaccagcaacaacttctgggtcttcccgtaaccaatcttgggcacacactaatccctgaaccgttgaaggatccatagtactgagatactcatttagtgtacgggcttcactgtccaaagggatgatagatacagggatagctaaaatatcacgagccatttgtgaaagtacaggatacttggcggcaaaggacttccaccatcccagaatgtcaaaattatcctgatttccttctttttga

SEQ ID NO: 285637 - DNA, 345 bp, Zea mays
ttttttttttttttttttttttttttggcagtaaactgaagaagtttcagtattgcagaagtggaagccaatgaatacgaccgttactcctacaaacaactggaacaatgactgagctctccgagcttctgaccagtactaaaagctgtaatgatattgtgtttggtctcaacaaacactgcgttcattctagttctgatcaacatccatttcttctgcagcattttttgctctatggttaaccaccgcggtgtccattgtccctctgacatgctggcacataatcatcagattctgcaaggcatctttcagtacatcctttgctgcatctcctgttgtctgaag

SEQ ID NO: 285638 - DNA, 433 bp, Zea mays
ggacaaagagcaatggccgggaaggagatgacgccgaactcgaaggcggcggcgccaccggcgacgatacgcctcgtgaacttcatctccgaagaccagcttgacgaggtgaagcggacacgaggggagcgtgtggaggacggcaccgcgcagcgcgacaaacccctcttccagatcctacaggagaacaaggagaagaaggacgccgagttcaatgagcgtttcaagcacagacctccaaaggctttggatgaggatgagacagagtttcttgataaattggctttgtcaagaaaggaatatgaacagcaggtggccaatgaagaagcagaacagctccggggtttccatgaggctgtagctgcacggtccaccgtttgtcatgaactcgagactcctacagtatctagacctgaggagagcagacctaagc

SEQ ID NO: 285639 - DNA, 414 bp, Zea mays
atggaagacacagttcaaatttaacaaagcaaacacagtaccatagaatgtgtactacacgacgttcaatatccagcatccatcaagaactgaacaagtatgcttgaatagctggaggcatacattatccctattagccagaaaacaaggagcattcagttacaacaaacagccctagacctaacgacggaatggttgctgcccaccaccggttgcaaagctaggggagccaccatacgtggctccaggtccgccatatggtacaccacctcgtctccccgacacgctcccagggacagagaatggtgatgcagctgctgggtttatatatccagcatgaggtgcgtagtttaaggaacgtgagactgggttctggaaacgcggaccaaagcttgagcccctagcagccttggc

SEQ ID NO: 285640 - DNA, 420 bp, Zea mays
gacatcacatttcagttccattcaccagcggcgatcaaatcaaaacaaaacattttgaatttaatccccactcgctgtcaggcgcaggcgcttgttatttcgtaatagaaacaaggaaacgtcagacaaccggagtcagcagcggcttgctgagcacgtgcgcctccaggttcccgagcacgaggtcggccatggccttgcgcgtctcgttggtgccgctgccgacgtggggcagcagcacgacgttgtccatccccagaagcgcctcgggcacgttaggctcgtcctcgaacacgtccagcccggcgccgccgagccgcccgtccgccagcgccgccaccatctcgcgctcgtccacgtgtggcccacggccgacgttgatcagcacgccgctggggcctagcgcttccatcacctcgc

SEQ ID NO: 285641 - DNA, 726 bp, Zea mays
gagcaaaatagacttgaagttaattgatttgtaaacatggttggcgtttcatacgaatgctaacacactttttaacaaactaacatgagtgatacataatgcacaacttagatctaaaacagttttgagttcagcacaggcgccctgggagaagattgaagaaatacaggctactacaattagttgctagttactaacaatagatctagaacgtctttgacatactacagcaaacagcacatcaagaacctacacagctggtcctacactgaaagcaacagccatcgggcattcggtccccatgtgggcgttttacatcaagtcaggcatgagagatggatatatccagcatcatcatgctcgggctctcttgccactaccgctgcagttcggacacttgtagtgcttgatgtgttcggccttggcaggagtgatcttgacacacttgccatggaaccaagtctcgcacgcatcacagcatatccagaactcatcctgtccgtagttgtcaccacaagaaccacacagcgtgttttcgtgatcttcctcttcctcctcttcctcgcctccgctgtcatcctcatccttcggaggtggcatcttcgaaccccttgagttgggttctggctggcgtggcggttttgggccagctttattgctcttgctgctgcttttgggagttttctccttggtttgcttcttggcagttcccgtgacaacttcatg

SEQ ID NO: 285642 - DNA, 584 bp, Zea mays
  unsure (1)..(584): unsure at all n locations
atccttcacctttatcattcagaaggtaaaggagttgttattgctccacatgtggagcaataacaatccttcacctgtggctgggcaaagattgggggggacagtgtggaagattacaaaagatggggaggatgttgtgtatgctgaggacttcaaccatcggaaagagaggcatttgaatggcaccgttcttggatctttcgtgcggccagctgttctgataactgatgcttacaatgctttgaacaaccaaggctatagaaaaaagcaggatcaagatttcattgaatcattaattaaagttctggcaactggtggaagtgtgctacttcctgttgacacggctggtagagtgttggaacttcttttgttattggatatgtactgggatgaaaggcgattgcagtaccctatctacttcctgacaaatgtgtcgacaagtaccgttgattatgtcaagagttttcttgaatggatngggtgatcaaattgcaaaatcttttgaaagcagtagagccaatgccttcttgttaaaaaaggtcacgctgataattaacaaagaagagcttgagaaattgggagat

SEQ ID NO: 285643 - DNA, 532 bp, Zea mays
cccaccactccggcgcaaaacgcaggacgccatgttgttgttcaaggcggacggtgacatgtggatgccatgtggaccgaagcaaccgggcgccgtgcagaccaccatgcaggagcttgcatccaaaggcctcgctgcgaagattcttccgccccctatttcgagggcggacttcgagaaggtcctgtcgaggcagaggccgacggttagcaagaaggacctggaggtgcacgagaggttcacgaaggagttcggcgaggagggctgacagacgcgcgcacccacccatgcacgggcggctgcaccacacaaatgtatattgcatcttatgacttggattgttctgcttcgaagtggaagttgcgttacattacaatttggtgtcccaactacggctaatcatgccagctggtttctcgtgttgggctaccaatgggcctctgttgtcagcctatttcatttttattgttgcacatggaatttttccacgggtgtattattatggaataataattgttagcgtggtggagtc

SEQ ID NO: 285644 - DNA, 462 bp, Zea mays
ccagaccaaccgtatcagcatcagcgtaccggccgcggaggagccatctctctctctctgtgggggggtggggttttgtgtctctctccaggtgcatcatgctatggctgctcccaagaagacgatgagagctctgcggtacgacaagtatggtggaggagctgaaggcctaaagcatgtggaagtgccggtcccatccccgagcaagggggaggtgctgctcaagctggaggcggccagcatcaaccccatcgactggaaaattcagaagggcatggtccggcccttcctgcctaggaagttccccttcataccagttggagacatgtctggcgaagtggtagagctaggcagcggtgtgaccgacttcaagccaggtgacaaggtcatctccatcagtttcccgaatggaggcgggctagccgagtacgcggtggcgccggcgtcgctcacagtggcacg

SEQ ID NO: 285645 - DNA, 475 bp, Zea mays
tgcaaataacaacattggtgttgtcattgcgctttgggctcctattattcttgtctatttcatggatactcaaatttggtatgcaattttctcaacgctaattggtggtgtctatggggcttgtcgccgtcttggtgagagaaggacattggggatgttgagatctcggttcgaatccctgcctaaggctttcaatcaatgcttgattccatctgacacaagcaaaaggagaggattccgggctgctttctccaaaccttctaagacatctgaggataccagagaacaagaaaaaatagccgcaagatttgctcagatttggaatttaattatcacaagcttccgtgaggaagatttgatagacgacagagagaaggacttgttacttgttccatactgcaaagatcgtgatatggatataatccaatggccaccattcctgcttgccagcaagattccaatagcattggatatg

SEQ ID NO: 285646 - DNA, 660 bp, Zea mays
  unsure (1)..(660): unsure at all n locations
gcagtatttttgcgcctcccgcgtgctggtcaccgggtcggggcaggaccgcctcagcccctggcagcgcgggnactacgccgcgctccagggcagcggctggcccggcgaggccgagctgtacgagacccccggcgagggccacgtctacttcctcaccaagcttggctcgccgcaggcgctcgccgagatggccaagctcgtcgccttcattaaccgcgactagcacccgccggagtaaatccggtacatgcaggccgctgcagtgccgcgacaacatcagcatacctatagtaactagcgagagcgaggtgattggtagtggtaattacatttttttttgggtccttgatgatgattactgtgcgtcggaagaaaagaacggttcctctctccagaaacctcgtccggacggataggaggggaccggtgtgttcgcttgcgcggcgttgcgtgtcattgactgcagtctacaggctaccgtgccgtgcactgttaactgcgtgtagcgcggtactgccagactgccagttacagtagtcttcagagtataatattttttagtatagaagcgtcactctactaccgacccaatgcatcgtgtaacttttgtggtactagtgccaaaaaaaaaaaaaaaaaaaaaaaaaaaaaaaaaaa

SEQ ID NO: 285647 - DNA, 314 bp, Zea mays
cgcaccttcttcttccccttcttcccagtacatcgttgagctcttccaccgtactccagcattgttttgtttctccccatccccatcttcgtcgtcagcaccacccaagcattctccgcgcttgctctgctccaggtggcgctgcggggatgagcggcgcgacggtggaggaggtgcagatccaggaggctctcctcttctctgagaccatcaagggtctcaagacactgaggtcgcagctctactccgcggcagagtacttcgagcttgcctacacgcagcaagacgaaaagcaggcggtgacgaacaacctc

SEQ ID NO: 285648 - DNA, 435 bp, Zea mays
tgcatcccaggaggctctcctcttctctgaaaccatgaaggtcaccctcatccttcaaaccacatcattcgtgtccctcctcctcctccatcctcgcgcgcgtttcgttttcacacgtactgctgctgctgcttctccaatcgtcgtagggtctcaagacactgaggtcgcagctgtactccgcggcagagtacttcgagcttgcctacacgcagcaagacgaaaagcaggcggtgacgaacaacctcaaggagtatgccgtgaaggccctcgtcaacaccgtcgaccacctgggctccatatctttcaaggtgtccagcctaatcgatcagaggttcagtgaggccaccgatgccgatctccggatctcctgcatccaccagagaactcagggcagccaagcctgtgtcgacagagagggcatttcgcagcagt

SEQ ID NO: 285649 - DNA, 412 bp, Zea mays
cccacgcatccgctgacgcgtgggctgcggccgaagtcgctgccctgccgactccccaccgactctccacctcagccctcagggccgccggctccttcctccggtcctcccctctcctccgcctcgacaagcgtcggcgagatggtgaagaggagcaagaagagcaagagcaagcgagtcacgctgcggcagaagcacaaggtgcagcgcaaggtgaaggagcaccaccgcaagaagcgcaaggaggccaagaaggcgggcaaggccggccagcggaggaaggtcgagaaggaccccgggatccccaacgagtggcccttcaaggagcaggagctcaaggcgctcgaggcccgacgcgcgcaggcgctccaggagctcgagctcaagaagcaggcgcgcaaggagagggctc

SEQ ID NO: 285650 - DNA, 312 bp, Zea mays
ccacgcgtccgggggcttagtgctgatgcttcgcatttgcttgcaaactcaaagctagctgatgatgtctgcatgcagatagagaaacagtttctctccgaagttgaatatgcggaagaactagccagcactgtgggacagatagctgatggtacagagatgccagatgcaatcgaaatgatatttcagtctgctttacttacaggaaggcgaggcggtgttgatgagatgtttgggaaagcagcggatgccatgactgggtatacgagggcggtatccatgctgcggtttctcctgatcgaggcaccatca

SEQ ID NO: 285651 - DNA, 437 bp, Zea mays
aatcttagaacattctattaccaatctgaaggtacatttctcttcacccgactcttcattctatctgcccactgatagaacacattagatacatctaatttcccagcaaatttcactttctgagccaactcaaacaatatatctggtttcccagcctttgagaaatctgcagcaaacttattatagtctatttgtggagctttcatccctttattaatcatctcctcgatatatttatatgcctcctctggcctgccatgtcgtatatgcccattaatgaacactgtgtaagagttcacatcagggcaaatacccctctggtgcatctcctcccacactgcacaacccattgcatagttgctatcaccaacgaaatatgacttcatcatcatgttgtaagtatggattgtgggctcaagtcccttcttgatcatctt

SEQ ID NO: 285652 - DNA, 422 bp, Zea mays
caaggaacagtatcttctccatttcatttcatttcaatctcatccaatcagtcaaagctatacacagccattccctgctgccctgaacctctctcctgttcacttccactccaccacggcaaaaaaaatacaaaaaaattctcaaataaagactaccaccatgcttagcttccttccaatgtacaccaaactattttatagtttttataccccctgtaaaaaaactgcacgcatctccttcccttccaccacgcgccactcccctctgttcttcgcttgatcggggagggcacctgcacacgaaacgctcgtcccctcactccccatcaccggtccaccaccaccaccaccaaattataaacagcccggacccgccatatattattctctagctagcttgcgttgctctcacccgtggcggc

SEQ ID NO: 285653 - DNA, 393 bp, Zea mays
  unsure (1)..(393): unsure at all n locations
gtcacgcgtccgcggacgcgtggcgacgtggnncggatcgcgtggggggattcgcctcaacgagctggtcacttgtgaacgggatgtcgtggtgggggtggtaatggatgtgcttcgtgcactggccagccccaacttagatgtcaagagaaaggttcttgatttagttctcgatctgctcaccccgcgtaatgttgaggaggtggtgctttatctcaagaaggaggtggtcaagacgcaagctggagacctcgagaagggtggcgagtaccgccagatgctggtgcaggccatccatgcctgcgctgttgagtacccagaggtggctgggtctgtagcgcaccccctcatgacttccttgagacacgatgtgctgcactgtgatgtgtctgt

SEQ ID NO: 285654 - DNA, 419 bp, Zea mays
gttcttccagatgcaatcacctactcatcactcataagggttctttgtgaggagaaacgactcagtgacgctcatgtgctcttcaaaaatatgattaagcttggcctacaacctgatgaatttacatacacatctcttattgatggccactgcaaggagggtaatgtggagagggctctttctctgcacgataaaatggtaaaggcaggagttcttcctgatgttgtgacttacagtgtgcttattaatgggcttagtaaatcagcacgtgctatggaagcacaacagttgctcttcaaattgtaccatgaagagccaattccagcaaatactaaatatgatgccctgatgcattgttgtagaaaagctgagcttaagagtgtgttagctctcttgaagggattttgcatgaaaggttt

SEQ ID NO: 285655 - DNA, 497 bp, Zea mays
ctggggcttcctttcaccaagagtgcagcaagaggatagatagcatttgttgcagcgctctctaggtcgtctctctctctctctctcgagctagctagcgtcgtctcctccggtgaggtgatgaacagaggagaattccagacctcccttgtccagcagatgatctggagcggcggcggcggcggcaataccacagcggcaggcagcagcaacatcatgagcagcggcttcaagcagtcttgccatgaggatcaacaagaggcctcccgcaacctgcagctgctgccctccctatcgtctccgtcgtcgctgctcttctccaatgcccagcagttcccgcacaccacctcttcgggccagcagctagcccacaccaacgccggcggcgctagcagctggttctctcccaagtctggacgacgacggcggcagcggtcaggacagccacatgccggaatcgtggagccagatgcttctaggggagttcgctggagagc

SEQ ID NO: 285656 - DNA, 650 bp, Zea mays
caataaattgcgaggatgccgctttatctcttctcctctcccgccgccgccaagctcgccaccggcccacacgcgtccctgcaccggcggcgccagttcctcttccgagttccccaccgccccagccgccgcgccccactgctaacttcggcggctgagcgtccagcagggcgcaccatggctactgcggataccggagcgtccacggtgaccgattcgaggctccgagctacaggagtgaagcaagcactgatatcattgtcagataaaacagacctggctaatcttggaaatggtcttcagcgtttggggttttctattatttccactggtggcacggcatcaagtttggaagcatctggtgttaatgttacaaaagttgaagaaattacacagtttcctgaaatgcttgatggaagagtaaaaacattgcaccccagtatacatgggggtattcttgcgcgaagagaccaggagcaccatctgaaagcactgaaagagcatggcattgggacatttgatgtggttgtagtgaatttgtatccattctatgataaggtcacctcaggtgcaatatcttttgaggatggcattgaaaatattgatattggtgggcctacattgatccgagtgctgccaagaatcataag

SEQ ID NO: 285657 - DNA, 316 bp, Zea mays
gactaaacagggagtaccatctaatacttacattacttagtaacacatagtattatttatatacacaaattgaattgtgcggacaatcttatggagcttacatgcacgattctcacttgagcaaagggggcacatttaaaaaggtgagcctctccttatcctctggagagctccaggagcgcccagcatttcatgagctgtacacaaaatgaaaatgaaaaatactgtacaggggtgcattccgtggcatacaaagtcacatagattctagagcttgtggttcttgcgggtatcttgacaggatgatggatccatc

SEQ ID NO: 285658 - DNA, 501 bp, Zea mays
tacggcgcatgggcgcgcctgatgcactagtttattatatgctcgaactgttatagtagttaccaagtttttttggccaaaatgataacttacaaattcagcaggaaaacacagacatagattgttattattggggctaattatagagtaaagcaacaacgacgactattacatgcgacggtaatggtgcagcttcttggtcttcttaggatgcagaagcacagagctgagtatattgcgactcagcacaaggacagccctctgtagctccataacctttagtttgatttctttcaccacaaaattcgtctgcccgcttccgccgttttgtcgttttgggttcgcctcacaaagtttaatggacttcaccttattcgcgcaaaaaacttcattgcatcgcaaagaataagcgaactcgtgagaacggttacaacctgaaaaccatagactctttgggtccagaaggagactctggcactcctctctgacgaattctttgac

SEQ ID NO: 285659 - DNA, 575 bp, Zea mays
gaagattccgtacatctgctaacaaaagcaggcagatgatacagaaaagcaggatcataaaacaaatatggttcaactacaaaggacgcccagaatcacttgtggtagcacatgttacacacttgtgtcaaccaaagcaatgtgaacattatatcacttattacatgcttatacattgaactattacaacaacagatatgcgatcagaaccttcatttcccaagactatcaatacactagttgtaccaagaggacgcggagccccccaagaagtcagaaatgccttcactttgttaggttctactccagtaattacacccacacaagtttggatcaccaccactgcaccaggctcacggtattggcaacactactacgattcctcattctttacttgagtccactgtgcagcttctttctttctcctgacaagtatcccaaaggaaaatcccaggagcagcgcaaacatcacactgcctccgatttccaagtacagcggagaaattttccgcacggtgctgactcctgtgccaagtttggttccatccaccgcctcagcaacactactgttactg

SEQ ID NO: 285660 - DNA, 918 bp, Zea mays
cggacgcgtgggcggacgcgtgggtgaaatcttgagaagacggcaatatgcattattactgagttattttcagtattgtagcagcattctggactctgatgtccctccatctgttcttcggttcttgctactggaggagcaagatggtgatgatgaggacatcactcttcaaaaggttctcaaggagcacaatgaattagcacatgccaacttttccatcataaggaaggaagctcaagctatcgttgatttggttactaaggatgctttccatggtagtccggctgggaaagcactttccttttatgttcttgatgcattaattagtattgaccatgaaaagtattttctaaatcaacttcaaagtcgagggatccttagatcatgcctgagtgatgttgcaaactatttgtcaaaggattcgtcattggcatcagaatcttcacagcggttttgcactgtggatgcccggttttcattactgctgggattaagccaccattatggcaaacatggccctcggattctattgtccatgggtgctttacaaaacctttcagcatgcaacctcatgggtggccagaaaaaggtaaatccaagggcaatctctaaaattgtaaaagaacggactggtgaaattgacaagaggtcacttattacacctgtactgcgaatagtcacctcttttacatcgctagtggactcggctgattttctcgaggtgaagaacaagattgtacgagagatagtggacttcgcaaagcagcatcagtcagtttttaatagcattttaagggagaacatgactggaactaatttgctcacgttggagcagcttagcatggcggtttctattctcagcaaggtttgggcgtatgaggaaaatgaggaatgcagctacattcaagatctattttc

SEQ ID NO: 285661 - DNA, 825 bp, Zea mays
tcctttttttttttttttttttttttttttttggggtttttccaaaagttaaaggttaaatctggaaaaaaacaggtgaatttataagatcaaactgggtgcaaagtgggggttaagaatatgtgcttggcgtgtactttgaactcgaagagctacataatgcagtggatctggtgggggcctctccccccttggtcgactcatcaaaaaaaaagaacttatgctgactgcagcagtaacctcagtcttgagtttcaaccaactccagcaccagtcgactcaaagaaataccgaaagaagctgcctgctatcaggaattcaggatgtcgcaaaactgagttctaatgacgcaatgcatccgcacacacttcactcatcctcttcttcgatcagaatcttcttgcaagcctcgtagcacataaaggaaatcccagcagcaggcatcaacttcatgcagcttggccccacccctttgtagagccccccaaccccttcatcctcaagaatgcttaggagggcatggagcatgttcttgtaaaccttcctgccaccaacagctccaacttgcatgtgcttacgtgcaacctcaagagggaatgtcgctgagcttgagatagctcctgcagcagacccgatgagcagcgttgggacattgccaatctcatttgtcttgaacatcttcttgtacaccttcttcaggctgtcataggcgaagtagttcgttgcagcatatggcaccactccaatcaagcttggggttaagcctcggtagagctcagtaggcccttcgtcgcggatgattttgacaaatgcatcaaggaaatt

SEQ ID NO: 285662 - DNA, 408 bp, Zea mays
gaatgaatcatgcactgtcccttgtcattgattcagccaagtgatgctgcaacatgtaaatgcgcaaaccaattcatcctatccgggttcattaatcgccctcataattcataatccacatataacaacaacaacagctccggctagccgccggtcgcggcacggggcgggggctatcttcttcctcctctttggggactcatctcgtttcactggcgaaagaaaacgggaaaaaaagaagaaggccaaaatagaacacgactcaattacagacagacacgaggtcgacgacggctagcttcagaagcgcgcgttctcgaagtcgagagcttcagaagcgcgcgttctcgaagccatgcaggtcgctgacccggttcatagacttgcgcatgatggccaccttggcca

SEQ ID NO: 285663 - DNA, 532 bp, Zea mays
gccgctgttcgcaacccaagcagtagccgagccaacgaaggcgtgcgagcggaggcaatcatacatggacggcagccgcaagagggtggacgcggaagacgtcaaaggggattccaccggcgggaagcgattgcgagcatcggagtcatttcaaagtggcgtaggaagcaaagtgaagctatgcaccaattttttcagtacttatggttgtccctttggtgagggctgccattttgtccattacttccctggtgactaccgggccgtttcagaaatgaccaacctgggtggcgcaacaatcgcacctcctggaggaatgatgatggatgggccacctacacccatcgtgaagactcgcttgtgcaacaagtacaacactgcagagggatgcaaatggggggacagatgccactttgcacatggtgaaagtgagcttggcaagtctatgatggacaactatatgccaccccccatcggaccaccaccaaccggttattttgcacctccacctatggcacctccacctatggcg

SEQ ID NO: 285664 - DNA, 407 bp, Zea mays
ccccccccgaaataaattcccgggtggaggggtccttatagggggggcccccctttttttttttttctttttttaaacaaacaatgattaattcagtgatgctgcataaacaagcttgtgtatggctgtttgatgtacaaaccgcagatctgactttctgcaactatcattttatccaataacgcagctctatctggatagcccatatttgtaagagccaatacttgtagttggcccattgacaatcagagatttgtgataaatatcatgtgccatgatggcacaatgccaggggtttggggaactacatgtgttagcatcctctggtataatccagcattggcaaccatggactgttatggcttcaagaggacggtgtcctccccacgcgtccgcacacgcgtgcg

SEQ ID NO: 285665 - DNA, 528 bp, Zea mays
cagtaagtccttcaaagcactttgactctggttagctgcaagtccacaactgataccaagtacaacagctgtcacacatcgaaccaaaatttaatttacatgtaaagcagcggaaagaacgaaaatccacttgctcaatttcagtttcaagtactccataccctcaatcagacaagatagcgaaatcacgctccttgcagaagtttcaggatgggcgcaggaggctaaaattgtattaaggaacctgagcagataaactcaaccaatttcatggccattatctgctacaaatacaaccacaacaatctggaagcttctggaagcaataacccgccctgcagatcagccatgctgagaacatatatacactcctgatcaagttcacctttgttaaaacttgaacacctctgccaaatgtgttgtcatggacacccaaagtcaaagaaacaataatcatggcctatcagtaacttccccaattcatgtgagcttggggatgctggtaaacaccaccaggtgccccaacta

SEQ ID NO: 285666 - DNA, 450 bp, Zea mays
gtcgtcgtcctctcgggggccgagatccgcggggacctcgaggatcgcaacccgcccatcttcctccctcgccagcccgccgcgtccccgctcctcgccctcgacatcggagggactctgatcaagctggtgtacacggcgagccgcggcggaggggccgacgggacggacctgcgcttcgccaagttcgagaggcgacgcctacaggagtgcttcaacttcatccgggcggaggggctcctcgccagcaatgctggcggagaaggcgtgaccctgaaggctacaggtggtggagcatataaatttgctgacgatttcctggagaaactaggtgtttgtcttgacaagcttgatgaaatggatagtgtcgtttctggagcaaactttttgttgcagagtattcctggcgcagccttcacacacatgaatggactgaggaatccagtagat

SEQ ID NO: 285667 - DNA, 480 bp, Zea mays
  unsure (1)..(480): unsure at all n locations
gttgaagtctatgcttaaggatgctcttcgtgagaaatcagatgtcttcaattctgaaaattcagaggaggacaaggtaaagcttggagaaccaggatggagggataggtactatgaagagaagtttggggcaaggacacctgaacggatggaagaaatacggagggatgttgctctcaaatatactgaaggattgtgttgggttatgcactactactatgaaggggtgtgctcatggcaatggttttatccttatcattatgctccttttgcttcggatttaacgagtctgagtcagctcaatataactttcgaacttgggtcaccattcaagccatttgatcagctatgnggggttttccctgctgcaagtgcccatgcacttcctttaaagtatcggcaactgatgacctgatccaaattcaccaataattgatttttatccaactgattttgaagtagatatgaatgggaaaagat

SEQ ID NO: 285668 - DNA, 302 bp, Zea mays
gtcttgtgttgttcggagcgggcagcagcacacagccccatcccaatcctagtcgatcttcttcccctcctcaaggtatggcgattctctccccctctcatcttttctgttggtgtcactccccctcccttctagattggcgagtttctgtgagtagatgcttctcgtctaggcgaggggatctctgtcttgatttatttggctgctcggtacggataaatctggtcctgcttttcttaattcttggcgcagatcttgtgatccggttctatggtcatagataggtttgtgcgcatgatttg

SEQ ID NO: 285669 - DNA, 571 bp, Zea mays
ggcaatacaagcatacgatgatgtggggtgagcaataccaatccatggatgagaattgttgcactacgtggatacagatggaaaccagaaggaatgctgcatagactttctgacagtgaaaccatacaaatacaaactgctaactacgatataacaagacaaaggcatgcactggtactaattattactcgtgatctactccttcctgaaggttttaccactctcaggattccttagttattgagcctactcagctaagtcaactgctaacaaggaagctgcgaaacggcacccatcagtcggtcatcatctttagatctggatcataacggctttggtcctctgatagtgaccaaccaactgcagcatatgtggagtgcaggggaagccccgcgctggtgaatgcactgccgtttggtcccatggggctcccgggatcatcggagtgctcacttgatgtgccatccgatggggggctggcagtcgaggccgccccaaagacagctgtgtgcggtggcaccgatgttggctcacgtttgggttgctcttcttttggctttttagcttcagc

SEQ ID NO: 285670 - DNA, 437 bp, Zea mays
atgttcgcggcttccaacgccacggccacccgcctcatcctcccgcgtccttcagtcccgttccgcgcactcctcattccccgccggcggggtcgcctccgccgcgcggtccacgccaacgccgtcgcaggtggcggaggaggcagcgagggcgttgcgaaggagccgccgcggacgctattccccggcgggttcaagcggccggagatccaggtgccagcactcgtcttacgcgtcggcaccgaggaggcgctgcggtgcggggatgaggtggccgacgccgtgtcccggggcgtgggcatcgtcgtgctcgaggccggagaggagggtggaggcagatcgtacgaggccgctcgcgctctcagggccacggtcggggaccgcgcgtacctgctgatcgcggagcgcgtcgacgtcgcttccgcagtcggtgcgag

SEQ ID NO: 285671 - DNA, 361 bp, Zea mays
cactggtcctgcttgagaggcatattgtgcttccactggtatgtcgacttattgagttagcactgttgttaccggtagcgactacaacagtggaaagggccttctcagctatgaagactattaagactgaggtgcgcaacaagatgtccgatggttggctaaatgacttgatggtgggctacattgaaagagaaatgtttaaaggactggtccttcagaaaataaagaaggcattccaaattaagaaaactagacaaatgcaatggctagatcttctagaactagactcaactaaagattttattcgctatatggcagttggttgtaaatggattgtaatcaagatgactattaaataagc

SEQ ID NO: 285672 - DNA, 365 bp, Zea mays
cctccacccgcaaaaaattttaactttaacacaaaattgtacacatcagcatgggtctgaaattacaatgaggctgagagcacttttatacaaaacaacaggacttcgagccctcctggcaaatccctgtggcaactcaaaaataattggcaccatgagaattctaggccccgagaaagaaaaaaaagggaaagaattcctaggacaataacactattacctttgccattccaattggttgccaaaatcacaccatacacccaccacctatccacccagctgagtttatacaagggaagcctccaaggatcttaggatgaggtctatttggactggtacttggggtcaatggaaccaattggaga

SEQ ID NO: 285673 - DNA, 494 bp, Zea mays
ggacagggcacccaaaaaataggttcagtgaatgacatcagattccgattacatacagggcaaaccaatgggaacagctatggccgactactccacgctcaaatcagcaaaactgccgcttgctaacaagacatttcacagctgcataagagccctatgcgtctaacaggaacgacaggctacctaacctaactctatagcatttacagggtaaacgggacacctatacataggatgggctaccaggccagttaccacgggtatctacaaacattgaaccaagcctctcaccctgcactttgcgcagctaccaaagaaccatggatcatgccttctctcctttcccttcagcacaagaagcattggcgcttgtcagttctgcaacaagcaaccgaacttatgtacttgcatgcagcaagattcattgaagttgtccaggaggcaattcctatacccattatctagttcacgagaacccacagctggatcctgcg

SEQ ID NO: 285674 - DNA, 433 bp, Zea mays
gacgcctctcttcgccttggcagccttgccgcccctcctggatccaccgcgtccggtgccctccttccgtccggttcctctcttgcgtttagtcgtctgctcctccatcgccgccggccgctttcgcgtcgtacccaggtgggaccccgacccccgcttcctggggggcgactggttcaggcgctttaggaagtctacggcgttccgcttcttggcgagcccgtcagtgccagcaccggcgcccttcctcggcccgtcagcaccgtccgctaggtttcggcctggacccgcggagttcttgccaccgcggctcttcttcgtcctcaccccccacgtcttgtccttggtcgccgcagccacggatttcttctcgtcctccgtctctttcgccgtctcacccttcatagtgctctcctcctttctcgcagacgct

SEQ ID NO: 285675 - DNA, 371 bp, Zea mays
aaatgctctttccgatgttagcttcgaacagatcaacatgagtactccgtagaagtttcttgtaagtacatattcaacagcaacacacaagtcgaagcctgagagtaagcaggaagcaagaggccagttttacaatctgaataaccccagtttgactacagcatccgtgttccccagaacaggttgggcttgcgcttctttgagaaaactacagggagatattttacaaaaggatgctaggtctttggcagagtgtacaacatcagggtgtcccatgcctgattggttctttggttgactggtgagatactgagatggttactgagatgttactcacattgcgtatacaatctcaccgctgctgtcatcat

SEQ ID NO: 285676 - DNA, 308 bp, Zea mays
tgttcaattgaactggtaacaacaaaaggagaaaaccgtagagttcgcgtgtttttaccgttccactgaatctatacatacatggggcatatatagcaacgcagcacttggttacctaggattcacttacacatggctgcaacaatcatatcgcaaatatatgaaatcaaaagaaaggagatggttataaaccaaaccatactcgtatgatcagaacgcacacgacgatgcactagtcaaagctcaactgaaatgagcaatgtcaatctcgtcaggaatcttaaatgtatctgccgccccaaactttc

SEQ ID NO: 285677 - DNA, 513 bp, Zea mays
agatgagaagcaaattacttaataattatgctactgcagcagctaacaagtgtgccacaattaattgtactagctagctaggtagctagtagcatcactgcagagaaagcatacgaaatcaaatctgtctgaagactagtagtgtactatactatatggagtctgggtcatatatatataatgaggacgacggcatgatggagctgggagatcgatcggtgacgcgcgcgccatcagaatcagatcagatcagatctcgtaggacatgccgaccttgagcagctgcgacttggggatggcgagcatcttctccccctgccggcagttgttccgcaggaaggcctaggcgtagttgacgagcagcttcttgagcagcgacgagtggggccgcgccaccacctcgctctccccgaggatgtacaccacccccttttccatctcccgctcgataaacctctgctcctcctcgatccgcgccatctcctccatgctgatcttcacctcctgcattcc

SEQ ID NO: 285678 - DNA, 512 bp, Zea mays
gtaaagacaatagaaaccggtatggattaaagacaaatgatgtgaacatcatcgtctagttgtactctactacacattgattgatcgaatggccctttttttggatccgcgcacctcgcctcgcttgcccacgctgccacgcaacgcccatcgatcgaccacaaacaacagaactacagaagcacacatgcatggtttctgttcaactctcaacaacatacagctcttgccgggctgcgtgccggcggccggccccggccgggttcgatcagtggccgcccgcgctgacggcccggaactggcgcttggagatcttgggcagcaggaacacgcccacgacgccgccgacgagggcgaaggccgacgcgacgccgaacgccgggatgttgcccttcccgaacagcgcgtcccacgggccggcgcccagcgcgatgatcacctgagggatgacgatggagatgttgaggacgccggtgcacagcccctgcccgccgccccgggtggccgccagc

SEQ ID NO: 285679 - DNA, 675 bp, Zea mays
gaaaggcaataagaagcatcagttcaacaccaactacaactttacaacagggaacccactaccagtgcctgccattgcttgtaacatacaacagcatccaacaacggctcaaatcggcgattcagattcaaaacactagatgcatggtaacacctgcccatcggtgattcaaaccgatagatagatacatggtaacacctggcccctaagggcctaccactaataacaaggttaaacgcctcatgaactgcggtaaaatatatatatgtatatgctataaacgccccttaaaaacctacaacatgatcacagctacacacctcacttccgtgtgcatctccgcaggcaaggggatcgacgagcagcaatagtagtacccacttctgtcaaacttgaacctctgagaaaggtggatctcatggatggggtatgcaccccactccgccttcccaaatctcccgaatatgccccgggcatcaaacgaatccgtccatgtgttccgtttatttctgctcttcctgtgccgcacgttcattacggtcgcgtgcaacttcagttctctcacgtccctttcaaaaactaggcctgccttgataaaggcgtcagttatgacttctgatggtgcatgttagtcaagtgaaacatatcgcagcaataaactaatactgatagagc

SEQ ID NO: 285680 - DNA, 345 bp, Zea mays
ggggccccctttttttcttttgttatttaaacagttgcatgggggggatcaaattcaggatagccatgaagcaacagttagccgagctcactcatccggtcatcccctgttctcaaatcaagatcatataaacatgattcttgcttcctatcatctttgatccgatctagattacagtttcgagctatttccagtttccatgctaacaagcttgggaggaaacttctgatcgttggtcgctgtccgccattgtctggacctgggcagcatattgcaggttccagagaacttctttcatggaaggtcgagccgagcattcgatggacaggccttttatcataattg

SEQ ID NO: 285681 - DNA, 522 bp, Zea mays
gaggctggcttcaccattttgtattttgtcatgtcaccatgcatgcacggtagtttcacatttccaattttcattcgaccgctcatgcattacccaggtaatagtaatactaacccatgcaccactactacgtaactacgatttcctttctacaatctgctgccggtgaagtgcatgtgcctaatggagaaggctcagggtctccagcggcttgacggcggcatcgatcctccaatgggccaccgccgcaggcggcacagcaggtgccagaggctgcacgaacttgcagttggggcaggacggggaggacttgcacagcatgactaggagatggcagttggcgcacggcacggccaccatgctgcctccagagaacaaagtgccagcgggtttccttggctcgtcctcgtcgtcggaagcagcggcagcagcaccgttggcggcacagttgtcgatggcggcagccgtggagatgttgaggtccaggttcacgctctgcacctggggtctgacccagctctt

SEQ ID NO: 285682 - DNA, 380 bp, Zea mays
accaccaacacgaactttatttttggtcaactgtcctgtcaaacggcctctggaaattcaaaaatacactagaaagtagaatgatgtgcttgctatacagataattatctcctctagtgctaagtgctggcttaaaaaatcgatggtatcttgcacttattggaaaacatggaagtagaaatgcagcagtccaggtcagtcctatagtatcaaaaatttatgtggggtaagactcgacgattgtcttgtccacaatcagctaataacgtaaggcccgcagcagcaaattattctttattccaccttcacctctgcacatccgtatcctaaaaccgaggagacaaatcagtagaagtccaccacccccgatatggtgatgg

SEQ ID NO: 285683 - DNA, 606 bp, Zea mays
aaaaaagcaaaatgcacattatatttcaaccttaagttgctgagagttaatcaagtccaaacatgagcattaaagtaagtgattacatgcactgaaacaattaactaaaataaaacaacacatctgctctaggagctaccctcttattttcatagtacacgtctgggtagattcacagtacacgtccgggtagatcctatggaacccgagcatgagcaacacaatttggatcaaaactgcaggcagtcatcagtttcatggagatcctgatagcctcagatccacacgatcttgcccgaagcacaattctgagccaccagcgcttgttctgcttccgccccgcgaaagtaaagccaacaggccaccaccatgaactctgccctctggcagcggatcgatcatagactgagctaggacaggaggatgaacaccactgtttggaacagggacacccggatccagtaaagttttatcaccattgatcatctcagtcggtttgacatgcacagactggtagatagcggaacctaatgtaccaccgccatgaacacagtggtcctggatcaaagcactatgagctgagcagaggccggtcttgctccgaac

SEQ ID NO: 285684 - DNA, 420 bp, Zea mays
ggcggccgccctttttttttttttttcagatgagatggtaacagagacgaaacagtgtctctctcccccatagggcaaacttgtcgcccaacataagaggttccaagtcaaattaaaacatcgcagtcgcagcaacatattgatgcctacctaggctgctctgacctgtcaaagctgacgtgcattttctatcctaacacttattaacacatttttcctttcctaacagaaattaacacgaattgacccaacgaactactcgatggctactgcaaaaagagaacctctgcgcgcacgaccctctcttcctgccagtcggcagtcataccgcgccaagctctgaaaggttggaaccgggcaaccggcctgctactctgccttggatcctttgccgaccaggcttgcgaaccctttcctggc

SEQ ID NO: 285685 - DNA, 471 bp, Zea mays
aaccaatccaaaaaattggccactaaagaaattaaacctgagtctcgaaggagttttccatttgacatacaaagcaaaggagattggatatgaataccagatatgctatgccctagaaaattcctaacaaaatccaccacatttcatgtacatattacagccatgcgacaaacctttgcatctagaccctccattcgccaatcgacacctctctccctctcctaataataagaaaagaaaacatcacatgataagacaaatcgttgcacatcttgtgaaactggtttaagcaaagattgacagaaccatatccctattgcaaagatatgttaactgctgggtacataagcagaatggcagattcttattttccaacagacattcactagcagctcagatggagtgccaattagtgggatccattgagaaggatacagaataagtactgtgataactgatataggaaaatgg

SEQ ID NO: 285686 - DNA, 630 bp, Zea mays
cattcgaagggctcgcagcggggggatacaaccttatagtatgtatcaagtgtacacaatacacgtttcgcaatgcgcctgagcgcgtaggccagggatgtgcgaaatgctcacgcctcacgggcattttgccagcgagtgcagctgttgcaagaagagaaaaaagaaaagaaaagaaaaaaaagaagtgcgctcttcttggagagttcgtttctagtttattaaacttcagatttccgaacaatcgatacaacaaccgttacatcatccagcttgccgccggagtagcccaggtacccagccgcgagagccgagtccgagaacgggctccttccaaacccacaccgccccacctccttcgctcgggcaaccagtaaatcggccatttccgtgggcttcagatcagcttctaatgatttggagacgatgcctgctacttcttcctcgtagacgttgtcgaaaagaccgtctgacgctgttacaacgacgtcgccttcttgtagacagatggcgtatttctgtacaagttttagagggtcgtcgcccttctcaatctgcaacgggaaattgaaaccgtaagtcattgggtttgatttcttatggacccctccgttcctaatcacgaggaat

SEQ ID NO: 285687 - DNA, 664 bp, Zea mays
gcgatcttattgtattttagtatctgaggcaatagataatgcagttgtaactgggggacagtagtatcacaaatgcggagtaagctgtggtgatacaacaccttgtgcagaatcccttgctctttcaaactcatcgccaagaaagcaacatgttaaagcacaagtgacttacatacatcacatcttctcccccttgttccaatattctgcattaaccttgttgtatgtcagaaatgctccttgtggaattcgaattttgttgtagacttgccattgaattcataacagagcttgcttagttcctgtgccagaactggagccccgcagtagaacactccaatcttagcatatggatgtttggtagctatcttagataagacctttttaaaatttggccttgcaaaatgtgtccgcactttagttccagaaactatatcaacaccattcttggcatggttgagagcttgtagcatcgtaatgagtgctgaccgagcatccccttcctcgtaaacacttgtgagataattgtgcatctcaatgatattcctctgatctagttcagcgatttcattcatgacccctttaaaccaatcaaaagacccttgttcacgtgtcacccaataaaagtaagcatttgttgtcttcagtaccctctttggttttg

SEQ ID NO: 285688 - DNA, 317 bp, Zea mays
ttccttttttttttttttttttttttttggaaagaccatgggacatcgctctgattactccaggggtatcaactagtacagtctacagataatgttacgttccctgatatccaatggtacttacaaacgaactgacaaattctaggagcatgggataacttcgtttctccaaagcatataactacaacacaagcaacctccctattagttctgtacaattccgcagcaacattaattcttgctgaggattgaagttcgctattttcatcatttagcaagctaatgttctacctactgcagacacctgcttggcaatc

SEQ ID NO: 285689 - DNA, 441 bp, Zea mays
gcttactgatatctggggttgatctaaacttgctttctgcatgaaccagctgcttcaacttacttcagtactgcaatctgaacttcttaagaataaagtttatactcagcatcttggcagcgatatttccgaacgtaaaataaaaccaccgggaggttcggtcacatatagcactgtgggagcattatgatctataaacaaaatctctaggaacatttccatatttcacttctgggaaaataagaaaggagagttaaaagatacttaatactattttagagaagagattaaggtataggtaccattttagagaagttaaatttatagatactagaagagagaagctggctgaaatgaatattataatagcaaaagactccatcaactttcagcagcagatgcagctctggcaggcgtgagatggacgggctcagacactgg

SEQ ID NO: 285690 - DNA, 499 bp, Zea mays
acatcggccgttactccctcgtgcccgtcctcggctatctctacaccggccgcctcaagcccccggcgcaggacgccaccgtctgcatggacgacgcgtgcggccacgggacttgccgcccggccatagatttcgtcgtcgagtccatgtacgcggcgtctggcttccagatctcggagcttgcctccctcttccagcgtcgcctctctgacttcgtttgcgaagcgctggacgaggacgtggtgccgattattcatgtcgcttccacctgcgatctccaggacctgctcaatctgtgtattcagagggtcgcagtctccgctctcgatagccgctacctggacaaggagcttccggctgacatatacaacaagatcaaggagatccgccgccaaccagagaacgccattattctggaccctgagcatgacaagagggtcaggaacatcctcaaggccttggattccgacgacgtcgatctcgtcggcttgctgttgaa

SEQ ID NO: 285691 - DNA, 437 bp, Zea mays
caagtgcagcagctgtattcatccgtaaatgttattaccgggaatgtatcaatgctgaagagatgcaacacagacagagaagcagcagcagggaacactttgagcggcgtacagaacagagcagttacgagggggtaatatacacacaagaaccggattggaagtaaaagcagcagcagcaggtggacgccacaagcagggaaaatagaaggcaggcagcttcagtgccaccccgcagcgccggcaagctccgaaaacgcctccccaaccaactcgcccaggacctcgccacatatctccctgctcatctcgtccacctccatccgcagcgtctcggcccaccctttgccgtggatctccctaccgacaacccagtccgccgcaaggcccgcgttgtcccccaacccggcgatgtcgttctcgtcatcgaagagcca

SEQ ID NO: 285692 - DNA, 377 bp, Zea mays
ggattcatccggaaatgttattaccgtgaatgtatcaatgctgaaagagatgcaacacagatagagaggcagcagcagggaacactttgagcagttacgagggtaatatacacacaagaaccggattggaagtaaaagcagcagcagcaggtggacgccaccacaagcagggaaaatagaaggcaggcagcttcaatgccaccccgcagcgccggcaagctccgaaaacgcctccccaaccaactggcccaggacctggccacatatctccctgctcatctcgtccacctacatccgcagcgtctcggcccaccctttgccgtggatctccctaccgacaacccaatccggccgaaggcccgcgttggcccccaacc

SEQ ID NO: 285693 - DNA, 390 bp, Zea mays
acggaagagtttaaatatggggggggtgcattcagaaattaggaggattgccaccaaaacatttccatgctactaacgcatcgctacagtataacctaggaaaaaagaactgtacatgggcaaaaaaaaaaaccaccacctaagatctgcattctgctaacaattccgctctcttcacacgtttccatgggaagggcttgggacccagacttgttttaggcttgatctgcactacgtcgctacccctactggttgggctacatccggaaatccatgacgcagaccgggttgttggagaaacaggcagcaatcttggtgccttctatgttccagcacacttcgaatatgcccccagtacctctgtaggtcttcaggaccctgccttctttc

SEQ ID NO: 285694 - DNA, 505 bp, Zea mays
agaacacaaccgctgtggactcaacccactctgtggtagtcttggatctgagcacatcgcctgtaaacgacaaaagggaacgctagatccacataccttgcaacacaaaccactaccactacatcgcaaatgtcgcacaatcgtcgagcaaatggccagaagactcctgtcaagacgatgagccgccagccgaagactcctaagaggatctccgcaacctctccgttgatgccagagcaaaacgtgacaggggcgaggaagaggtccgaagatgttattcctctgcaccatcgccgcctcagcctcgccgatcacgcccggaaaagcaagccgctgaggactggcatcccccggcaaaccctagatccggccgaaccagcacaagccagccagaaacctaaccctagacccgctaggacgaaacctaccaaccctagataaactaagaactacaagacccttcaggatgaatctccaatcctcaacaaccgccgccacctccgtt

SEQ ID NO: 285695 - DNA, 390 bp, Zea mays
aatgccaacgtatttctttgatcaactatagcaatcagcacgttccacacagagaaccaactgttacatctctttgtttcaggtacatgcattttcacgcgcgagcacaggaacaatcatttgcatcatgtagatatgatctaacataacatgacctaaatggtaggatggccaagaatttgcatctgaactcgctattttggaggcggggtatttgcgagcctccaggaaaaaggctccaagactccaaggagtctagacccagccacctcaccagcagggaatgcgcctgagatttcttcgaggtcttccttgctcagccttacctttacagcaccgatattttcgtcaaggttcttggcttttgttgttccagggatggggaccaca

SEQ ID NO: 285696 - DNA, 600 bp, Zea mays
gtcgtacggcgcccagccactgctggcaaatcgcttcgattgtctcttttcatgagccgtgaaccatcagcgctgctgcctgctgggagtgttctacgcctctacgggacaaaacgctgttttgttcactaaaatagataggctacgaagatggcctggccaaccctcaaatgaaaccatagccgggcctaaaaccttctgatttcatttcaataatatagtccatggaaacaaatcgttaatgcaggcagcagcgccgccacgcggcacagtcgccgcatgggccatcgcgacggaatcacctcgtcacgtacgcgacgagctcctccaggtcctgcctagacgacccgccctcggccacggcgccgcgaacggcctccccgagcgccccggcccgccgccggatctcagccccttcctccgaggccatgaccctgtcgatagcgtcgcggatgtcggccgcgggggtcacgtcatggcgccgctcccacgggcgcaccaggacgccggcgcggaggtacttgcacacgagctcggcgtcccagggctggtcgctgtgcatgggccacgccaggatgggctttcccgtggctgatgctc

SEQ ID NO: 285697 - DNA, 746 bp, Zea mays
atcactctgcaatggattcagctttcaggacaccggaggagtcagcagttccagtttatttaagctatgaattaaggggacggtagtaggcctacgctcagctatgtacctaacgctaatgccaacaaaatagcgtggcattaggggagcatctgggtttctgcaaattgtgtggaaacccagatacccctttacccatctgatatgagggagccacgtggcgaaagaggaaaaatttctatcaagcaaacaatgcttgccctaattgcatagcatttacttcgtagctcacagcccttcatcagtttatataccagccatgacatgatcacacaggctctcagttctcactttgtgtgctcgaaatggcctctattctataacaatgcagtcatgcttttattgggcatcaataccatccagctaaaaaaattgaggttattcgtcggctcagtccatcatgttcagacccatcataactcatgcctggggctccattactgtcatttccttgtccacagctgttgttttttgtggtcaaaattgcaaggccacttcaatcaaggtggtcggaggctgctcttatttggaatgaagagcccattcgtcgtacaatctgaaaccttttttcctgcatgatctggcactactgtggcgccattagattttttatccattggaatgtcagagcttgtgcctatgactgtggattcctgcggtgtcttgtaaggaaaccaggagacaag

SEQ ID NO: 285698 - DNA, 369 bp, Zea mays
ggaagggggaacagtacatgcaacgagggatccaaaccattaactgtccaattcagtgacagtggtgcacacactgcatgttccaggccagcacccgcccatgggagtacaaaaagaatgtgcacaatctgctgtgagttgacatttctgtacaggactgggacgggcgctcccattcagacggtagggaatgtgcacatgtaatgaatatagatacaaccttcacccttacctactaactaaaaaagtgagaaacagataacactaacatggcatctccagcgacaccagtctgtatagttgccaccaatattcgtcattatccttttgaggggaggtgctggcattatatcatattagaaagagact

SEQ ID NO: 285699 - DNA, 314 bp, Zea mays
ggccgggtggtggaccatctcgaagcggctgaggtcggggtcctggcggcgctccacctcgacgtgcccctccacgtcgctctcgccggagcccgagtcgtcgccggccgcgtcccgggcgtcggcgcgcaggcggatgaggcccttcatggacccgtacccgtccacgccccacgcctccttggccatctccaccagcacctcccgcgccggcgacagcacgggcgtcgggagcaccgccggcgtcacggggcacggggacaccagcgacgccacgccacccgcccgcttcgcgcggatcaggaacgacgtcg

SEQ ID NO: 285700 - DNA, 361 bp, Zea mays
gtcagcgaagaccatggaacatgttaataatataattgttttacccatctgatcgcatacaacaagaggcgtttgcatctcgatgacttgagttgcccctctgcccatctcaacaaacatcaagggccagggcatggtagcaaaagaacaacaaatccacatccccccatgtctctttaggttagctttcacattgcttataaacaaactctatggtgtctaaatcctacaaagaatggatcaagaacaccttttatatatacaacagaacaccgtttgcaactgcacatgatcagcgggggatgcggaagtatgcgtctatataacctctgtagctgcttctttggtctggtcaataaag

SEQ ID NO: 285701 - DNA, 469 bp, Zea mays
gtcgagttttttttttttttttttaggagaaccagaggagttctattccaggatactaagttttccttacaaaatgcataccgtctctttcggctacgctagtacttaagacagccacttacgcacgggagcacgcaggctcagacccaacaccaatatgccgactcactgcacccactctggtccttgctgacggacgttggcgcgacagacacggcgtgtgcggacaactggagctgcttccggttcgccgtttggtacccctcggctgactgtaggggaatccatactctcattgttgacattttcccccccttggaatcctgcttgcccccaagcaggagcaaaaggataacattgcctcaggttgtcttggtcttcccatgtggctaactcagtaggaaggttggaccactgcaccagaacctgtttcacaaaacgtttacctttagcaaagccacgagtctgc

SEQ ID NO: 285702 - DNA, 541 bp, Zea mays
gttaaactatattttattaaatttggataaaaaattactattatggactaagtaggtactattcgctatctgaattttttttttcctcgagagaaactaaatctaaaatgtttataggagaatctcagtcctgatcatactctccatccaccattgaccctcaccgaaaagtggggggaaaagagaatatatgatttgctctaacttctttccctgccatattatacattttgatcgatttctgcttgctacatacaagtactgccataatccgaaaaggaggggaggaaaaacaaaagtagagtaagaggaggatgaatgagcacatgtacggcgatgcctagttgttgccgccgccgccggcgttggccttggccctggccttcctgatgtgcgcgatggccttcttgagcgtgggccggaacctcttcatgtccagcgacacgtcctgcttgtcgaggtaggcatccttgagggactcccagcccttgctcttgatcccattggggtccgtgaagatggggtggtcgcgcgggtactg

SEQ ID NO: 285703 - DNA, 586 bp, Zea mays
tttaatatttttttttggctcagcacacgtacagatatataacattagcaaggcagacaattacacgaaacataggcttaactgttattatacaggcaaagcaaaaggaataatttcattcccattgaatcagatcagaagccggagcacaaccctgtttgtcagttttgccaaagcccgaccggaattacaaacaggacaggggcagagcaagaaaaggagtgctccaaatcaatggcatctaagtaaaaaggctatcttcctttccttttctgcttctatgtaccctaaacgactttaaacctaaaactcaaccctaactctcctcgtgtcagctgctacccgctataggtttccctagaatgtacaaaagcaccaagaccagtcatcatacttggaccctctgccttgtcacacggccacccccactgaagtcaagcactcttgggcccccggtccagtcgtcatcatcggagtcgtcggagtcatcgccacgtgcgccaccacgggcttttgtaacactcgaggcagccgttctcctgaccctcgtcgtacttcttggggttgggtttgtcgtatttctcgg

SEQ ID NO: 285704 - DNA, 315 bp, Zea mays
accttcttttttttttcactttctggaatatgtacctagagggtatttaaataaataaaagtagaatatgagccatagggatattaaatataacaggtacttgccaaatttacaaattcctcccaagtctcaaccgtggatgcattctttcggtaaagacgtataagacctaccaaatcctagaaagggcaacgaaaaaagaacatcgaacaagaaagagacatccggtccgaattgatctcagggacatttggcgttcctcccgggtcctccggagtagaagtagcttccccagtagctgttagtgcctccctg

SEQ ID NO: 285705 - DNA, 617 bp, Zea mays
agtagaagaaataggaatgctccttatcaagttccatgtgcatctgcttcgtgcaactcgttccacagtatactgatctcgtgaattgaccccacctacccgatctgtattcaggtttccataaatttctttgcagaaacggtgctaaaaccgcaggaacacacacagcacaaatttgcatctaatatcattctcctcaagtagtggtttacctatgccaagagggaagggaggtagacggctaatttaaaggttgtacatgtatgtgatgtgatgaataaggggtaatgatatcaggcaacacccatacaatgatttgtactctgtgtcgcaaacagagaaaagaaaaagaaaacgaaacacaggctatcctagaacctcaatcgagttcacggatcgatctgatctcctccccttggagggcaaaagaacacgacggagtcaagaaacaaggcgccggcgccagccgccagcagggctctcgtctcgtctggtctcgtctctctaggcgaggcgctcggcggtgcgcgccagcgactgcaggttgcagcgcacgatggtgtcgacgaacacgcgcgtctcgtccgcggtgttgccgtgtggcacgtccaccacgt

SEQ ID NO: 285706 - DNA, 494 bp, Zea mays
gatgaataatttaactgttatactatatgaaaggatcggatagaggacattcatgtacaatgaagatggctgttaggagcactactatacgaaacatttagctgccgtgtatactcaatcctatagaaacatttaactgcttatttagctgtcataatatcgactgtcagacaccaagccaatccgctgctaattaagcccgctggttgattagcggttggcaagtggcagagcagatttaagaccatccggcggcccggtcgccgtcgctaacgtgtccgcgccgttccggcaccaccgggatgggctgcgaccgcggcctggccaccgaaaaggtaaaagtggcctccgagacggtcctcaccaaacgcgaacgcgcgtgagacggctggcgagccggcccagcccgtgcagcccggcccggccccgggggcttggcaggaggtcggagcggcacagcgggcacgttgtccggcctatgtcgatccaacggt

SEQ ID NO: 285707 - DNA, 839 bp, Zea mays
tccttttttgttttttttgttttttttgttgaacggaacaactctaagtttttttttgcacgccaaaaacttgcctctgtatgatcagcgcttggataccaacccgacaggtgtgaagaggatgagtgagcgggcgtcttttagccactgacaatcgctcactcttcaaaaagctgggcgggcccaataatggctaacgatatgtgacctctaactagagttttgatgaacactgcttttaattgaccaccaaaataaaaaaagcacacgttccagatgacaaagtaaagacctttaaagtatgacggaactgattacagaaccgaggcttttagcaattagatactgcgaactcatgcatttcatcacactaagtgaatgacacagcagtgtacatggcaaacccgattaagccgtcttcttcttcttcgatttgagcatcacaaggcccacaaacacgctcaagagcgaaaggagaaccacgccggccagtaccggtatcaaaatcgcatactcttgaggcaggaagtacttgtgcacaaagtggtcgctgtcgacaaatggcaaaatgatgacccagaatgtgtagtatgtaaataaggttaagcttgtcagagtcagcagaaaaccgaccgccttatcacccaggtccattggtctggcgggcgctcttcgccggtgaaggcctcggcactctgtagtagggcggcgggggcggttaggccaactggaacccgatctgggtagagggagggtcgatctggactgaggtactgtcgtacggtgcgagccaggcgtcggcgtacggtcgagaggaacgcgagggagacgggaacgag

SEQ ID NO: 285708 - DNA, 571 bp, Zea mays
gttaccgcccgtaatcgaatgtaaaccattatcattaccctttacgttacatttcgtgaaccaaacagcaccttagttctgtattgctagttacaacttacaacacgctgacatgcaaatgcagttcgcgagccccccacagaaagtgacagcaaacaggctcctatggatcctgtacttagtgtccgaacaacaaaataccaatatggcaataagtcgcacatggacctgccaacctatcgttcctggttcttgagttcatgatcaataagccggagcttcagactgttctcttcgttgaggagggagagcttctcaagcgaagatttcagaagtgacatctgggattctgagatatggctccgtccagccctttgtgcctgccatggcaccattcctgtgctagccgcactgcccgtggattgctgagcaaaacgtttcatcctagcactcagggcggcaatggaggaacgcaaagcatccagctccacatctgcgaaccgatcaagctgtgatttgaactcctgctctgcctgggttaatggtttcttgtttgcagcaggaagcatct

SEQ ID NO: 285709 - DNA, 123 bp, Zea mays
cttactcgtccgggttcttcctgttatgattgatgtcggggcgaacatcgagaagctccttaaggatcctctttatcttgggctacaagagcaccgtcttgagggagatgaatatgtttcagt

SEQ ID NO: 285710 - DNA, 429 bp, Zea mays
ataaagggaaaccaacttacaaatagaaaaacttacagacacatggctagtcttccgaaaaaaacatgtgctcccatatacatacactgcaatcgtttgtgtacaacgaactagatcacgattatacatgcacgtagctagcacatatacacttgctgcaacaactggtacgtatacatacatacatacatacaaacaagagagagctttgccgacgcgtcgaatatgtaccagcacggcatcccatcccactccactccaagccaccaacgtatgtctcgttctaatcagccttgctctgtatcttgttccagcaagccgtcccaacggcttttcaggatcctgtatgcctccgagcatgggagaccaatcacgctcgacccaccatcagtgggaagctcaatcaccagccccaaccgcagcagtgtc

SEQ ID NO: 285711 - DNA, 445 bp, Zea mays
ctagttctagatcgcgagcggccccttttttttttttttttagggtaattcccaaatgaatatggatggtgtattaataggtcacatcaaatcaaaacagacaaagcaagagttccaagttcaactcgctacacttcaaacattgttctttatcagctaattctttccagcctgacgaaagcaaaagggaattaggccgatcgctagtgcctgaagacgatcaaaacagcagtgcagttacccttgcatcgcctctcgcgaacagcttccttcacgaggcggcgcaccgcaagtgtggctgatgaggtctccttcaactgattctgaacaaattcgacagcatcacctggtccaaatactccccataagccatcgcaccctagaatgatgaaatggtctttcttagtaagttcaaaggaatggacatctggtgttgcaatcaacc

SEQ ID NO: 285712 - DNA, 274 bp, Zea mays
tccctttttttttttttttttttttttttttttccaccaattggttaagatataatccgaggttagcaatgatcaccctagtctcttagatccaatgcgataggagttaacaagtacgagcgaatttcccagaacaaaagaattgatttcatcccgtttcagtatttaactgggccggggggggaaaaagtaaatagaccttttaccccttattaggggggtttgatctagctcttcctttggaacttaacctaactgtaacaaaaggcttgaa

SEQ ID NO: 285713 - DNA, 475 bp, Zea mays
catctgaactgtgaagttgccaaccgaatcctttcagatgtgttcaccagtctcactcaatcaaaagaaattacagtccaactcccaaaaggtcacgcaggatcataaacaataatggcagtaaccagttttcaaacttccaatccgcctaatatatagagcagcccttgcatcctaatctcacaacacagagcaaaacaatcaccactgcaggtagagcaaaacaatcaccacacatggcaaccggatcatcgctggtgccactgctgctgattgcagtagctgttgcacagattgttgggtcacaagctggtagcatttccatatactggggtcagaatggtggcgagggcacactggccgacacctgcgccaccggcaactacaggttcgtcaacttggcattcctggcagcctttggcaatggccagcctcctgtcctcaacctggcaggccactgtgacccgacaaacgg

SEQ ID NO: 285714 - DNA, 427 bp, Zea mays
atatgtcaagattcaacacggccgagaattattgcgcacggtcacacaatccacaacgatgcaacacgtatgtccacttgtcaccggccggcacgaaattcaacgtgtcaagcgtcgccggtgtacacgaactcgcgcatcgcggcgaacagcaccttggcgatctccggcacgaacagctccgacgcgtggaaccccgcgacgtccaacttcacgacgacctccgccttcgcgccgccgcggtcctgcagccaccgagcgaactcccgctgcctgtcgatcagcgggtcgcccaagttgccggtgaccaggcagcgcggcaggccggcaagggcctccggcgccatggccttgacggggttgcagaactcgtggtcccggtcggcgcccaggggcagcgcgaggcttcagagcctgtcgttggcct

SEQ ID NO: 285715 - DNA, 494 bp, Zea mays
gaaaacaaaaccaaccagtgctaatagtgtcgtaacgttgatgagtcatttacaccaggcattaggctgttcatcagcgacagcaaaactattggcctgtctcttacccatgttttttcaccaaacaaaaattgccttctatcggaataaggataggccgtgtaaaactaattataattcacagaacagcttttgcatgatcactacaaacgcaccagctaaattacatgtgacggtaaatatttctcattgaagatttgcaacatcttcaatgcgctaatgctaagcagctttcttggatggcctagagatgctcgtaccactatcttcactgtcattatcttcaaccttactagtgccatctctgtctgctgccttctggaagtagcctgaatacagaacagaactaggttcattatgatgaatccgtgattccatgactaatgaggatgaacatgagggaacattgaacgcactatcactgctagatcttt

SEQ ID NO: 285716 - DNA, 346 bp, Zea mays
gccccgcatttcattcaataaataatgttaaaagggaatacccccaaggttacaaagggacaggggatttttttgtaaaattagcagtcatatctttcaatcacagatccttcttcacacctatggatctagaatttgtgtccaacatccattgcttatagttggggtacacagctaagatgacaaattgggaaatacagacgaacattttcagtgcttcaaagaggaagggatacctcttgggaggctctatttgcaggtaggtaatgtgaagtagatgtgagcataaaaatggcaagctaagaactaactttgccttgcatgaaatgtttgatctttttccgta

SEQ ID NO: 285717 - DNA, 455 bp, Zea mays
ttttttttttttttttacagagcaaatacagatactagataaataataatgaaatcatggttggttgtacacaaaaggcaaccctctacatcctaaaaaactaaccaccagaactcgccttcggcgaagctatggtttctttcatctcttttccctcttcacccttcaagaacaaaatgtttctcagtgtccaaagtgaccaaattgtataaacaggctaagctagatacagcacaagttttctggtatcatgacttccctctcaagtttgagcctggttagcagacattcaatgaatgaagatgctgattatcaagtaaccttgttttcaatgcgctaactacaacctgactggctggcacattgaccttaaagctgttcgtgaccagacgtgtggggactggggagcctcttgatgtgccacaccatggttcctcattatatgtatgtatgac

SEQ ID NO: 285718 - DNA, 621 bp, Zea mays
atttgctttacattccccaaacctttgagcggaacaagaaaaatattctactcgcagtagtctgctgctgctgctgcggctgtaaaaggacctccgaactgagacagcaactaatggcgcgaaacaactgcgctgtttgaaattgcatgagctgtgaaagaggtatagtttgtttttgaaacagaaacctcatgcgactataatgtacagccttgattccttgaacatgtgaggttgaatgcttgtgttactgtattatcaaaatggtggatatgatgcaactgctaagcagcagcacaagccacccggatcttacattatggaacttctcaaagtcatagaatctacaaaatctggacatgatgcctatagacagcttagcaagagctaggcaagcgaaaacaaaactgaggaaaataacggcaagactcctgttctccatgtcagcctgtttttgccgaaatgtttcaaattccgatctgagtagagcattatctaggacaagctggtttagttgcgaggaagcaactactttccaggagatgataccttcaatttcattcataatgctgtccttgctgctctcaagattcttcagctctgttttgatcttctctaaca

SEQ ID NO: 285719 - DNA, 500 bp, Zea mays
cgtgaatgcaattttctttactgaatgtttataaagttatatcacatcaattgtcgctagattttttttcctttttttccgacaaaacacaatgtatatgtacaaataaacatggaacattcacaggccctggcagaggcggtcaacaaatatggctgccaaggtacgggatccagaaccacccaaatgccccggaacggaagtatggcacgaaacaaatgggtctcacggtatatgtacaaaccaacgctataaggaactggtgttgcggcaggcaatagcaacttctcgacaacaccaactccttccagagtttcaacgtggatccgcagattagtaaattgcctggaggaatcttggcctcatattttgagaactaggtgcaaggtttaccttgaaaagtactatgtaccatggcagatgatcgattccgcacagctttattccatgaaaacctagtagaatttcaccatcgtctacatactatggcacactggatg

SEQ ID NO: 285720 - DNA, 279 bp, Zea mays
aactggtgttacggcaggcaatagcaacttctcgacaacaccaactccttcaaagtttcaacgtggatccacagattagtaaattgcctggaggaatcttggcctcacattttgagaactaggcgcaaggtttaccttgaaaaatatgtaccagatgatcgattccgcacagctttattccatgaaagccatcccctccatactattgcacactgaatgttttgttttgagcacatttttcgttatatctcgatctcaagtaaggcagtatatagtaag

SEQ ID NO: 285721 - DNA, 446 bp, Zea mays
accaaaaactagaagcaatttattcggcttgaagacgtcactgaactttcagccaatgtttgcggctaaatataatgatttcttttgtacttggacaacagcaaatgcattaacagataacagatcacggttctgatgccaaaagaatcacttccaacattgaaaaggttacaggactctttgtatgacaacttacaaaaggggaaagtaactagaagtacttcccagccccagatccattatgccctagacgggttgatctgaaacaagttgaggcatttcttcagctaagaaaatacaacatctgaacggagtacatacttggcattctttttcacagcccgagcttcatgcagcatacatttggcgccatgtaggtggaggagtgccataccttgcactggagcaacctcagcgacaactccacctctttgatcataaaagac

SEQ ID NO: 285722 - DNA, 421 bp, Zea mays
aataactcatgtgatccaaggttacgagaatcatacgttcaagtctaagtttgagtcatggcctgtaagtaacacgtcagggagtgccagcacggaggaaggccgagggaaagttacagcactcttgaagcagaaaggtgttgatgtcaaaggaatctcaaaaactagtgtgccagtaaatgacgaagttcctcctttgctggatggcggtggaaagcttgaggtttggtgtattgatggcagtgccaagactgctcttccaaaggaagaacttggaaaattctacagcggagactgctatgttgttctctacacttatcattctgctgaaaaaaaagaagagttctatctagcttattggattgggaaaattagtgtacaggaagatcaagaggcggcttttcaaatagctaatacaact

SEQ ID NO: 285723 - DNA, 620 bp, Zea mays
cgcttgatggttctacattatgaaactcatgattatctagtacaatattatcagtccaaatggaatagcttcataaggtggtttaatccacaattccacatagatatgcagaatatatagaataaaaaagacagtattcaacacatctgaaaccaagtacatgataatctatcacaaaaaacaactccagacataaataagacagctacagtgccaacagcgcttcaactttggcaatctgctcttcctcagtctttggaggcgggctcctgtttgtctgatcatagaggtcatgcttccatttttcttcttgatcaccagaagcctgctctgcgttgcttctcccaccatatgaattgttaaacctgtctctgtccattcctcccctaacagaaaatcttccccttatatcatgcccattcctctggccatcactcctgtggtcagaaaacccccttctaaagcctcgatcatctggccttaggaaaggtcgatgatgtccatatccccgtgcctgataattccttgatctagaatctggttctgttacagtgtcagcagattcttgtatcttcatctcctgaaatggtggcctcttcttggcaaaaaatgctgcttcc

SEQ ID NO: 285724 - DNA, 487 bp, Zea mays
gtgtttgttggattagtcaagatctctcactgattcgcagcatccccctctgtttctccatgatctgttccttctcctggctgttctccagttgacttgctccatcgcctctccacgactagaggagggaggaggggagctctgatcgattcacccaagatgtctgaggtggtggcgatggcggggcaggcctacatgaagcagctgcaggcccacccgctgcgcaccaaggctatcacctccggcgtcctggccggctgcagcgacgccgtcgctcagaagatctccggtgtttccaagctccaactcaggaggctcctcctcatcgcgctatatggatttgcatacgcgggaccgtttggacatttcctccacaagctcatggataggtttttcaagggaaagacaggaaaagaaactacagccaagaaggtcttagtagagcagctgaccgcatctccatgggaacacatgatgtgtatgatgt

SEQ ID NO: 285725 - DNA, 805 bp, Zea mays
aaacccttggaatcttctgctgaggccctgtatgtttatataaattggattatgggaccactttgggattacaaataagctaaaataagctatccaatattagtttatttcagcttatttgttggcacaatgtaatattttacttttttacgggcttacccttccaccataatccagtttatataatttagaaggaaacaaaccacaccctaagctacaaacagtagatctcactctttgatgagcaggggcaagatacatcattacattatattctggttgaaactgagtcgtcatatgggtcaaacttcactattcttcttgcatctgggagcaaaggatgctctattggtttgtgccctttcttgtaccaataactgatgatgtacgcctccagtttcctaacccttttgacaatgtatgattcatcagtgatgtttaaaggctctgtcaggactgtaagaaagccattcttgtttccatagaccacatcagtgaagtaacggtcaccaaccaacacaagatttgaggctgaacaaccaaagtaactctctatttcagtagctagtccacctggtttctttatatcatgcctgatcacatgaaccccctcgatgacagcttcgatcgccctcgcatccaccccgtccggatcatactccgtcaaccgtgcggagttgctgtagatggcgagcgcaccgggcgggaacgtcgcacggcactggtcaaatgctgcagcgagcggcggccagagcgcgggcgcgtagggggccgtgagcgtgttgtccttgtcgaaaacgacgcc

SEQ ID NO: 285726 - DNA, 575 bp, Zea mays
ggataagatacaatttcttatttgatgaagactttcctgctgaaaaagaaagactgcaaaaaatgattaagaaatctaaggacccagatgccattggagaaatgaagagtcgtgtcacgtggattgataagcaggtgaagtctcatcctccaaagaacgttgaatcggaaatcttgcgtgagcatatcaagaaagagagggaggcagcaaaggctggaaaacgaccatactatctgaagaaatctgaacttcgcgaaaggaagctgatgaacaagtacaacgagctcaaggaggcaggaaagcttgatgcattcatggaaaagcgacggaagaagaatgcctccaaagatcatcggttcatgccataccgacgtagtggagatgcataatagtttcctaattctggagccgagcgaaaggatgattttaggactggcttctcatggtggctggacactggacagtcagtgtctctgttactttgttgccctagccgtacaatcgttagcttcgtgcacaatctacattgagcttagtaacactttttttttgctatactaaattatggatatgtt

SEQ ID NO: 285727 - DNA, 515 bp, Zea mays
gtggaggaagaagaggcggtggtttcggcgccggaaaagccaatgcggcgggggcggcggaggtggggagcggaggtggacgacggctactcgccgagctccacgggcggcggcgggagcagctgctgcgattccttcggctgcgactcgcctttggccgggttcgtgcgcccagatggtgacccagacacagatctggagacagatgggttggccacttccacctccagtgcctttaccgagcggcaggacgacgaagcggaagaggcgctgtacggggtgaaggaagaggagtgggctcagatacaagaaccagccaagaatccggcattccgtgccaccccagaatgccacaaacagcggtaccggacggatgctgctgttcttttgcatggtaggaaggggtcgaaacagcggccggcctcacttgacctcggtagccctgggttccatggagccacgttttctcacagtttcgtgattggtggtgtggggttgatgaacaaaggcttgga

SEQ ID NO: 285728 - DNA, 207 bp, Zea mays
gtatcaaggataccgccattgccattcccttccatgtcatggccctaacaggacgagcagccctattttaaacttcactcggagtgaaacaatgcaaaactagaaaccacagattgccatgaacccaagacaaaagacagctcaaactgaatagaacctgctccgtgctactgcacatagtaccccacgcgtccgcccacgcgtccg

SEQ ID NO: 285729 - DNA, 669 bp, Zea mays
cgatgatccttcatgtgtgctcttcactgtcaatgaaaattctgaattggctcccatcaattcctgcgaagggggtaagggcaagcacaataacagctcaaaggtggctactgatccagcttgtgttgtgattcctcaccagacctttgcgctatccgaggaccctgtgcatgaattccgtgggcaccatgatgccatcttggatctttcatggtcaaaaaaaatagggaattgctttctgcgtccaaggacaaaactgttcgattatggaaagttgggtgcgatagctgcctgaaggttttctcccataataactatgtgacatgtgtacagtttaaacctaccaatgacaattatttcatcagtggttgtattgacgggatggtacgtattggggatgttcctagatgcctagttgtggactgggctgacagcaaagagataattacagcagtttgttaccgtcctgatggaaagggtgcagtggttgggacaataacaggaaactgccattgctatgaagcatcagaaaaccatctagcactggagtcacaagtccccctgtatggcagaaagaaatctccacttaaaagaatagttggattccagtattgcccatctgatccaaagaaactgatggtgacatctggtgactcacaagttcgcatt

SEQ ID NO: 285730 - DNA, 444 bp, Zea mays
tgcctccgccgccgccgttttgtgggacgacgacggcttcggcgccggcctcttcgcgttcggcggcgacgacgcgtgtggcccgtcggatctcgcggccctgcgccacgagaccatgcccgccgtctgatggccatccccagggcccaggcagccgcagccagtcgattagccttccttttttttatttttacctttgttggctaaccttagcgagcgggcacccatttttttgacctggatgtaaagtttttagaagggtgaaaaaacagggggcgtggaaaaaacttgggaggaaggttcagagcaagggggagaagaagatcaaaaaaaaaatctggagatggattcttccttctaaaaaaaaaaaaaatataaataaaaaaaaataaaatggggcggccgctcgcgatctagaaccccacgcgtccgcggacgcgtggg

SEQ ID NO: 285731 - DNA, 306 bp, Zea mays
agcccatgtattcacacctgttcgaccacctgacccgcgcgcgccctgatggctcccgcgctcacctccaacccgccctccttccgtcccctcacgtccccactccgccgtcgtgccgccaccgtcccatggccgcgtcggtaagcccggcaaggactcctccgctgcggatgacgctaccggccccaacaagaggcccaacctcttcgcggacttcgggaatgccaagtcgctcatacaggcgttcccgtcgcagtcgctggtcgcgggcggtggcaggggcaggaaggacccgcagacggtgtt

SEQ ID NO: 285732 - DNA, 592 bp, Zea mays
ccctcctttttttttttttttttttaaataatatagtttatattataaaatagtattttgcacgaccatatacacaatttgttggtcataaccttagagctcaaacatctactatgcttacggaaaagatatttcatgaaagttataaacctatccactcgtatatatagctattaaatataatataaccatgaacacgagggatgtagtcatacaaacaaaaattcatggaatgaactcatgtctcgtgattacaggatcaatctaggatgagctggttgctgaacccatacaaaatgaaacagcccaaacagctctgaataaagcactcaacccttggtgagatgctcaagagaatactccaagtcaaaacctaggtagcaatccgacaccaagatcagcttcgtctcctgcacattgaacgtctgtggcaattccatgcgagtattaatcacccgatctgcaaaactaattcttttcagaccatacagctctgaacttgtagcattccccaggacaagccaccaagcttcttgttttgccttgggaaatctaggggcaaatgctcttgatgctgaccgtcgcgaatttt

SEQ ID NO: 285733 - DNA, 375 bp, Zea mays
ttgcggcaaatgcgagcttctttattggccagctgaagatacgtagccacgatctctacagcatgcatgcagcgagactgatctccggtcttcaaggagcgtacgcacgtacgtcgggctaccactctatgtacacttccgtcaccccaaacacacgctgccgtacgcgcaaacgaccgagatctagctacgccaatatcgacgtacggcctagaagtactcgaagcgttcgtcgtcggggcgggggttgttagttgtacggctcctgccgctccttcctgctcatcatcagcaccttcttctgcggcgccagcgccggcgccggcgccggcaccaccggcggcttgggcacctcgggaggccggacggacctga

SEQ ID NO: 285734 - DNA, 514 bp, Zea mays
agtaaattgtatggaactggagattaccagctagcaactgagttctacatggtttagaagttatgaccaatggagccatttacatagtcaaaaggattacaactctgttcctttcaaagatgtacaagaatgtttaggctaaaaagtaactgtcgacacaccagctcccagtatctgagcttacattacaggggagcggataatatacaccgaatcggccgattgcgcctacaccacgaatgctaattcgcaacggatacaacgcccatggcagcctcctgccatctcgctgacaatcatcggtaccgactgatgctggagggcatgccttcgttgagtttgttaagcaactacaatatcctgatagctactgcctaatgttaactaacattcagtagttccaaaagattctcagcttcatgctccttgaaaaccttgacaggaagaacattgctgaggccctttagatgaagaaaatcactagtgacctgttgccaatcgacagagtcaacac

SEQ ID NO: 285735 - DNA, 310 bp, Zea mays
gggccattggatttaattatttatttatctcttcttatcaggatgatcaagagtggtagtggggggtaggggccttgggatgttacacaaagcgatatcatggtttggttgcccgcccttgcatactcctccgttgtagctagttacataacatcactgggggctgaggctgtttcgtccacaggcacctgctggctgcgccccaatgcagcagcgcaggcgcccacaaatgccgcgttgatgtacgttgccggctcggagtgcggggagtcctccctgttgtcgccgaactggtcgttcccgttgggcc

SEQ ID NO: 285736 - DNA, 386 bp, Zea mays
gtggcgcctcagccggcgctgcgcccggcgctcgccttccacgccgggggccacgccgtcgcgctcccgcaccaccaccaccacgacatcccggcgccaccgcggaagcccgggccgctggccgtcggcgcgcagatcctgcggtccgagggcgccgcgggcctcttctcgggggtgtccgccaccatgctgcggcagacgctctactccaccacgcggatggggctgtacgacatcctcaagaccaggtgggcccgggagaacggccggcgtcctcccgctgcaccgcaaggatcttggccggcctcgtcgccgccggcgtcggcgccgccgtgggcaacccgcccgacgtggccatggtgccggatgcaggcggacgggcgcct

SEQ ID NO: 285737 - DNA, 477 bp, Zea mays
cttcagttcacatgtgcagcatgccgtggtgaatgctcccagatcagagacactgaggatgcaatccgggagctttggtagaggagggatgttgccgatcatgagcttatggctactttacgggctgctgctgcactgccttctcttgaagatgtctcaccaccttatcaaaactctgatgatgagaaactcggtgcatatgcattgaaaaatgagagtagaaatactctaaagttttcattgaaaagtaacagtagtaaacctccaccagatacacctgagcaagagaagattgtttttaagagctctggatcaaataagaagccttccaaaaagaaaagtggtcaggctaataaaacagttgatggccatgatgaaatatttctggagagaaggcatgctgttaaatcatcaaatagctgtttgggagatcaaactataaatgagaatcatgacaggagcccttttaaaaatgat

SEQ ID NO: 285738 - DNA, 410 bp, Zea mays
ggaaaagcaggtcgttactgatgttatcttcattcactgccttgtccaagacattttcagcatgaagtgatctatgtgaaactacagattaggccagccaaatacatacaaatctaggtgtttaactagtagaagcatatgctcgctgaaatgcgcgctgatggaagtgagcacgagactactcgtagtcgtagcctagcgaagacgaggactcggccagacggccactctgatctgagggatggcccgtctcatgccctgcacatgcagggtgtcagcgggttctcccagagatcgtagccggggaaggggggctcggggaggcccgtcctcgtgcggtgcgtgacgacgaccgtccttcgtgaaggaggcccagcccatgttggggtcgcccagggacttggacatga

SEQ ID NO: 285739 - DNA, 438 bp, Zea mays
agagaaaacaactatattgaagaaaataccacagttcaaaatggtcgtgcaactttgcacttcggaaagcatctctaacgtcaagtgcaaacacaacgcaataatccagttcctcttctatttggatcgatttgcaggtatctatttggatatggtccaggtatgtgaagcacaagtgcctcgaacaattgcaacttaaatatgccgcccagcggcccagccattcatccatgtctttcttcacgttgtgtcacttctggaactggatgctgtaagaaccagtgtttggatctttgacggctttgaaattgtcaacgctcattccgaagcgccccagcacggagttacccagatcttttagctttcctgcaaaacaaacatgcatcgcaagaaaagccattttacaggagagatatctgcaacttttcacgatgagat

SEQ ID NO: 285740 - DNA, 541 bp, Zea mays
accagctgtgccagaaagagctgtaatgatttcagcaaaggatgaaccagacacagagctacctccagctgttgatgggttgcttagagttcatagaaggataacagatggtttagaaactgaaactgatcagcctcaacgagctactgtcaacactgggccgacaaggctactggttccagcttcccaagctggcagcctaattgggaagcaaggagcaactattaagtcaatacaggatgcttcaaagtgcgttctccggattgttgagaatgttccacctgttgcattaaacgatgacagagttgtagagatacagggtgaacctcatgattctcacaaagccgtagaactgattgcaagtcatttaagaaaatttcttgttgaccgcagtgtcctccctttgtttgaaacacagattaaagcacacaatatgcacagagagcaacctatgcctcctccacaggcatggggcccccctcctccgtcaccctggggtcatccaccaccaaaccttcctcctggtggcccaggttatgtt

SEQ ID NO: 285741 - DNA, 474 bp, Zea mays
agttgatttatttaaacttaaagagaaagcatgacaatttgatgaaggagaagggagagattgctaaagaaaatcaaagccttgtaaagcagatggaggatcttaaatcaactcagaagacaacatctgaaacaacacttgagcaggctattaaagaaaaggatttcaggatacagacattagaaagaactctggaaaaggaaagagatgataacaagaaagagaaggcaaagagtaggaggaatgagaacacaatctttggtgcacttcagaaggtgcaacaggacaagaaacaagtagaggagtctatagataagcataagcaggctgtgagagagttgattgagaattatcctggattatcatctgaagtgccacctatctctgcactagaagagcaacttctttcatacttccgtgcatctaaagatatggaggaatcttctagtcccttccgtgatggtgcagcaactc

SEQ ID NO: 285742 - DNA, 572 bp, Zea mays
aattaaagggcaaagctccggggattaaaaaaagggttacaaccaatcattcaagcccatctcgtttacacatggggcaccaaccgaagtggcagcgacgcagccctaaaaatccatccagtcaacccaacacggaatggcaggccgcaggcgtaactagttttgcacagaaggaactcgcttacccgaggtctacacaacaaacaacattgcctcgctatttccaaaacgtgaacatgaccaaaaaaaaaacagcaactctatgtgcacgtggaaaaaaacagcaactccgggcctgtatcttctgcgaacaacatgtcgagctcatgttgagatcacagatcctcgtaccaaccaccgctgtgcaggcagaggcaggaaaccgttcttctgcgacgtccgaatgagcggcgcttgcttcatgacagccgtagagccatttctcggaggagggctttcttctgcgaagcagtgattacatggctggactctgcatgctcaaggacgtcggtgctcctagcagcggcatgtcccggtggcgcttcaactgcgctcctcaacatatgagcctg

SEQ ID NO: 285743 - DNA, 345 bp, Zea mays
  unsure (1)..(345): unsure at all n locations
gcaggcacgcgcacacacaatgacacaaccaatcattttacctcctcatctaatcagacacgctatccttacaatcgcaaaccgtctgatccgtatatgcctcacgaatcgtacggttaaggatacgaagcctttatcaggcttccctctcgtcgtttctccagttaccatgcatcttgggccccgtcgggccctccccgacgagcaccttctccaccagcttggctagccgctccctcaccgaacgtggcaggagcctagcggcgcggttgatctcgcgcccgatgtcgtactcatcccgngggccccactcgcgctcgaacccgagccacgccggctccttga

SEQ ID NO: 285744 - DNA, 506 bp, Zea mays
agataccttgccgtttcaatcagcttggtacctggcactgtattcctagttaagcatcaaaagcacaacagaatgtcttcaggtggtgcctgtttgaaacagcggcaaagcgtggcgaaacattggctcaaaaaaaattatccatacaacaaacgtgtggcgctaaagggaagccaatagcgcagacaccagattagctggagtcaaaatcatctttatgacaacaaatacataaccacacacagggggagagagagaccccctagtgtagagggtccactcaagcattgagtcaagcaagttcaagcaaccatctgaatataacaggacgatagcatcttttattccatgcctacgtagcaccttctacggcttccatgctctatggcaccttagcaacacaacagccagcgcagcagctctttggtggcagaagcagaattggtggctgcggcggcggcggcagcagcagcagcagcggcgcagggcactcaagctgaggaaac

SEQ ID NO: 285745 - DNA, 521 bp, Zea mays
aatctcataagaaaaaatctttgtaagttatccagcacaatgtacaaagtacaatagattgcggagtaccttcttcacacatatacaaatactcactgatgaacctctattatttgaggaagggattcatatcaagggccatataatttgaaatctctatattctcttctacgctcaaaccaatatttatttttcctttgcttaatgtgcctgcttacaagttagaagaagggtggaacatgcctagctccttgccgtgtcccttgatcgtgcttcagcttgctgacacatgcagtcaggcataggaagcggtgtatatggattcctgtggtttccttaatgcgaaacctttcatctcactgtgccgacgcatgtcctgcatgtggtgcttgattcgatcccatctacgtacaagattagctcttgatactccacaactagatgatgattacgaaaaaaaatttcatgaaccctttcgtgttctgcccattgcaggtgttcagaactaaaaggaagtaacc

SEQ ID NO: 285746 - DNA, 418 bp, Zea mays
aacacagcgttggttctggctttctggaacctagtgtgaggcacaaaggacatcatatggtacattacacagagctaaaaaaggttttcgcagcgtacagtttacccagtactccatctaaatattgggcaccctaactagttatcagtcgaattgttgccgaagagccatctcggtttcactcttccatgatgcatgtgacgattgccccctcatcctcttgaccttctccttgtctttgacaggggaacccttcttcttttcgggctcttttgtctgcatcggtctaccaccacactgagggcacaccataccctttccatgtgaataggtctttggtacaccacattgtagacacatccttagaagatcagctgcgtcttctggcccaggatttgcagcacctattactcttttt

SEQ ID NO: 285747 - DNA, 441 bp, Zea mays
tttttgaacaatgaaacacatcttcatttcaaatttctggcatcaaggtgaggccataataacacttggattcgctacgcagttctacgagttcaagacgaacacgcacacaattttaacacgcagtgttaatctaaaagctacgcgacgaggctagctaccgactagatcgacgaaagatcctcgtacacagatttgatccccggcctctcggagaccggcctgatgcaccgcagcgcaatgcccagggcctccttcatgcccttcacagcctgcgggttgctctcagagtccgaggccatggcggcgtcgaagcagtcggacccccgcccttccgccacgcgcagccggacccagtcggtgaggtcgacgccggcggcgccctcgggccccgagacgacgtccccggcgcaccggcccgtcaggagctccagcagcgcg

SEQ ID NO: 285748 - DNA, 426 bp, Zea mays
ggccaaatcattgggttaactacattaattaattagcatatagcgacggcaactggtaatatatgatcgataggtttcgccctagcgaagaccagcacaattaatcaacaagcacgccatggccatgccatcagacgagacgagacgagcagccggccgggctgccacgacgagctaaaacccatgatcgccgggattaatactactgcccacgttgacaaagtaggacgacgacgacatgggcgcggaggcagcgccgctcgggctcgggctcgggctcgggctcgcgctctcgacgaaccctgctgcgccgttgctcgccgccacgtcgtccatgccatggcactgtgcacgtcgtcgaatcgtcgtccttggacggcggcgctgctccgggcacggacccggctggctgcggggccggcggca

SEQ ID NO: 285749 - DNA, 471 bp, Zea mays
  unsure (1)..(471): unsure at all n locations
atntgtctaggctatcgtctcccagtcaactggggttgctggatcgttgtcttcatatgatggaattagttaactattttatacaacactctgttatatataaatgatatgacattcgtttctatataatgagtcaatatatgtgtgagacttgatcgcaacatacttgatgatttattttcgcgttactacccacggaacccgggtgtgacacatcatggcgtgcaatcaggcctcaatttgcacgtcctcaataaccaccacggccagtcggcctgggccctggcctcacacggccggcggggaccacacaggtccatgatgatgcattcacttcatctgatacatttgcctccgcagcagggggagtccagacgaggaccagtagaaggcgacaggccatatacgagggcacgcctcggcagtaggcgacccttgtttgttctgctgggggccgtcgggccgacgccg

SEQ ID NO: 285750 - DNA, 514 bp, Zea mays
ggggaggaatgtatttccttcaattttgttaatttcaccaattacaaatttgagggtaactacaagattggtaaaataatatagtacattaatacaactaataatgtaataatagtagaagaaaaaaagaaaaagagaaccaaagatccaccccacctaatctcctatccttccgtcagtctccactaccaaagaatgaatttaactgaacaaaagaatctgaagctttcattcgggtgcccgctttggccccgctccgtctcaagtctagacttcggtcctgagctttgctcccaaggctagactcaacaaaagaagctacaccctccttttacggcatttgtggccgtctgtatgagtggatgaaactatataggctgcaattcaagccaaatacactgttcggctctcagcttctgtattgaaggaggcagcaacttcttcacaagagaatccaaaaactggaagccggagccgagcttggtcaagcagcacctcgaatttcttaatcaca

SEQ ID NO: 285751 - DNA, 377 bp, Zea mays
gttaaagcactctctaggataatttaagtgtagcgtacaaaagaagaaacaaccaacgacaggattcacaaatgaaaaactggctgggggctgccgtgctgaagaaaaacggtccatgtctcggtccatttctccgtgccctctccagctctcctctccattcaaacagttcacaaacattacagattatgtacatatttcaaacaaaacagttcaaaactttgggctaaaaattacagtagtgcctgcatctatgacgcagtttgctcttccatattggagtgaccaagtcagaaaaatgagttacctgtgcaagcgatcgtcgtcattgtcctcttgactgtgagcggcatttggcgctgaaatattggcaccac

SEQ ID NO: 285752 - DNA, 564 bp, Zea mays
  unsure (1)..(564): unsure at all n locations
angggggcgacagcctgtttttacatttacatcctctttttttactagcctggctcaagttattccgttattgttacaggctactactgctcctgttcccgccttttgcgctggatgtcctctagctttggccacaccacactcgccaggccaggtcactagactccagttccatgcatgggcaaatgccaccgtaacatcggtttttttacactagccgtgcagatcaaaaacccctcttcactcccagccctggatgccactcgggcaccagttgaagttgaggctggaggcgtgatcctcggagaagaaccccgccgcgccgccgtcgctgccgatgaggtccgagctggcgagccattcctccgtgaagccatagccggcgcaggccttgtacgagtcgaatgggaacgggtactgtgtcggcccgtgctgctgccacttggtctcgacgaaaacgggggngagacgagcagcccgtcggcgcccccgacgtgtccaggaacggcgcgccgagcccggccaaggccggcggctcgaacgccgcgccgccggagtagggcg

SEQ ID NO: 285753 - DNA, 514 bp, Zea mays
  unsure (1)..(514): unsure at all n locations
ttnntttcttttttcccngagaagcaataaaatagtaagtaaatagagcagtacattgtttcttcgtatgaatgataaacttgatgcataaagtagccttcatgagtaaccacaaatgacttaccaagaaacagacaactcaaaaacgtgatggaatttcagcctcagtgaaagaaacacactttgctacatacaataggattttcacaccctgctgtagaaacaaacataaaacaggtgaacaagcacctacagcacaagcaggtacctatcaaatgcacaggtaactcccactggagaaggtatggccaacttcattaaattgggcaatgccatcagtggctgggcatagtttaatgccagacaatgtgaatggaccttggtaagcaaacttcaccatcccaacaacctctagctcaccatctttggagtcttggtcaacaggcatccgcgccctgacctgccggctggacctttcagcggaatgtctgaaatatgccatctaagctctttc

SEQ ID NO: 285754 - DNA, 501 bp, Zea mays
tcgagttttttttttttttttttttttgttcgtcaacatctcccttttagatgttttctggtgtacaaagtacatacagaatgacagcaagatacaaatcagatccagacatgagaaaaaaaggctgaaactctcgacgagatgactgacctctgaatgaatccggagagcgttaaagaaaaggaaccatcatccaattctattgccattcgtatcgcgtagtacatggcactactgctacaagctcacgacaagtcaaagcagaatccgcctcgtccgtggatccgattccgatcgctcagagacagagccgcaggtccgtgcagaacccgaggtcgtggccaccgtccaagtcgagcggcgccgggaggttgagatcgagcgacgggcgcgcgcgcgaccggaccgtggacgcgtcgtcgccgtcgtccacgacggaggccgacgacgcgcagtcgctgtggcagtcggcgtcggtgggcggcggcgcgcctgccgtgg

SEQ ID NO: 285755 - DNA, 190 bp, Zea mays
aaacaaatggtacaccgggacacatttattaatgggcaggcatcacagatgtagatgttcttggtacagataacaattctggaacaaaaaatcccttttatttacatgtactgaaacaaacgggggttcttgttggcgcacatcctcactcaaggcgcacatcctcaattactatagctccacgcgtccg

SEQ ID NO: 285756 - DNA, 361 bp, Zea mays
agaatgtactgtctcccttttctgcaaaacgaatttaatttcaaagattctacggacagccgccgatcagccgagaaaatggttataatcgaaagatgaggcgatgcacataagtcaggtttccaaagaagcatgctgaaactctttacttgcaatgcacaaatgcacattagctagcccccatcttcccccttttgagactgagttcctcccacccttgttcattcttcatactcctcgtcaggtaccatggctgtcaagagcgaatacttcacccgcagtgatatcttgcccctctccagctgcagcttggcaccagagaccacccagtatcccggcgtgtcctgtggtccgcgcacca

SEQ ID NO: 285757 - DNA, 333 bp, Zea mays
tttcttttttttttttttttttttttttttttttttttcgggagggttcaattaaaaattgggggttacacatatcacagatacatagttctgtgactcagttccagttcacacacagaaaccacacatacatagtttcagttcccagatttcagtacacagacacaaaccacagatacatagttcccagatttcagttcacacacaaaacacaaatacttcacactttcttcttcttgggggggattttttaactagccatcctttcatgcgtggtggagttcctgctgaaagtgtagtcagcgttcatggctgacagtcagctgttcctgc

SEQ ID NO: 285758 - DNA, 448 bp, Zea mays
gccggggggatttggatctaaagggggggtgaaaaaaaattacacttctttgcttggatgaatgaagcctgaaagagagagggagatgacggggggaaaaacgaaaatttgatccaacaaaacaatgccctgaaaagaccaaaaaaagagcgaaaataaaaaaaaataaacaaagaagaaacagaataccagtgtccatcgacatgcaggcaccaggaacctatgcaattgaatccggccaaggacatttaccccgctagctgcgtcgtcacggcgtcggggcggcgggaggcgtgccccccgaccgctcctcctccgacgtggcgcgcacgccctcgctctcctccgtcgtggtccggccgccgtggccggcgccgatctcctcgaccatccttaccacgtcgggggcgtcggggcgcgcgtcggggaccgtggccacgcacgccat

SEQ ID NO: 285759 - DNA, 379 bp, Zea mays
ttcttttttttttttttgaagcttacataactgatagcacggactagttaatcagtaaggggtcggccaaagattgcgctatcacctgattgttcacaaaatatataccaaaacactagagaatttgtcatccagaacagagatagcaaaaagtcacacaccacagccaacatcaatcctaagcaagctgagcatttggtccaactctcctataatcagcacaggccatctcgtagttctgcttgagctcctcgtagcacttcagtgatgcctccgagaactttgtcaggcggtcaagaaccgccgtcagtctcgactgcagcccttcagctgatgctgcacaactcccactcttagccgccgcctcctgctcgctact

SEQ ID NO: 285760 - DNA, 302 bp, Zea mays
cccacgcgtccgcggacgcgtgggtttttttttcggtaacaatctgttagaattaatatatgcactggtctcaagcttcatcagcagcaaacgtacaggtaaggctcattgtatctgtgagaacagtgccccacttggagcacatgtaacaccgtcgcacattcagattaacagatgataggcgcactagaaaaggaggaatggccgaccgaagaattaaacccgttgcacaacagggcgagatccggatactgctgctagctgtggactcttctgcaacgtctggacaccagaacagctgc

SEQ ID NO: 285761 - DNA, 320 bp, Zea mays
cggacgcgtgttcggtcgcgtgggtttggggtctctcgatcttctctggatgcaggcaagattaagatcggaatcaacggcgagtttgtcccctctccccatgctacgctatttctcctcctcgagctggttcggtccgatctgagttgcgccttctctctgcgactgcgtccgcgtccgcgtccgcgtccgctcaggcttcggaaggatcggcaggctcgtggccagggtcgccctccagagcgaggatgtcgagctcgtcgccgtcaacgaccccttcatcaccacggactacatgacctacatgttcaagtacgaca

SEQ ID NO: 285762 - DNA, 443 bp, Zea mays
  unsure (1)..(443): unsure at all n locations
gctttaaagcttttccgattccgcaatgcttccgcccacgcgtcgcgtcgtaccgagccgcgggtagccagccaaccgccgacgcagtccacaagcgatgaagcgcttcttccagccagtgcccaaggacggctccccgtccaagaagcggctagcgggtgctgctgaaccgggcgacggccccacatcagccggtgccgccaccggcgctggcggggatgtagaggggaggcccaccgaggagccgttcaagttcctgacgtggaacgccaacagcctgctcctccggatgaagagcgactggcctgctttctcgcagctcgtcgcccgccttgaccccgacgtcatttgtgtccaggaagtgcggatgccggcagctggttccaaaggggcacctaaaaaccccagtgaactaaaagatgacacangcttgtcacgggatg

SEQ ID NO: 285763 - DNA, 236 bp, Zea mays
ctttattttttttttaattttttttatttttgtttttttttaatagtagtcaaaagattccaataaacacttttgagttacataaatacatatcagggatacggctgtcacaacattacacacaagggaaatactatcaatgaagaatggggtggtctctcaagttaagcatgtacgtaccatttattgaaacctcagtttgggtcactagggcctttattcctaccttttcttat

SEQ ID NO: 285764 - DNA, 573 bp, Zea mays
aataactttgtatcctttgtgctgctggtgcaacagcctgaacaccacaatatacaatgaccaacaattcaatagcaacacatagattaaaatatattaatccatagtaaaacagtatccatgttgataaatataatgtagtccataatacatagtaatatataattatagcaaacttctcttaatatatagatagcaaagatctgagatggacaacaacttttgatcgacatgaacattagcacacccaggttcggtctccatgcacagatccagcctctccatgtgcatataaaaaccttccgatcaagctccttaattatctggagcaaataaagacaatctcatacactctaaagcttttgatctctcagctagagcttcttcactaagaccagccgtggaaccacacaataaatctttataaaggtctatcattttacactttgtttgttcttgggctgctttgtgattaatcttggctacttctaacttcttgtcagccaaacattgttgcacttgtgccatcttctcaaccttgctgcttgcttcaatgaatttttctagtttctc

SEQ ID NO: 285765 - DNA, 399 bp, Zea mays
cttgttacatttatcacaatgtgaagaaaaacaaagaacagatcccaattggaagatgcaaactgtggacctttctgtacccgtaggattgagattgctaaggctgctcttagctaccattgaggccttagtaccggcagaagctcttctacctttttggacggatgggtatcggaaatcttggggtgcgaagttgtattctgcatcatctgccgaagaagtcttgcagatgcttagtgtgctggaaagtgcaataaagcgagactacttatcatctaactttgaaacgacaactgagttgcttaattcaagcacacaagattttgctactcagaattcggctggacggtctggattgggcactgcatcgttcatgggtcctgacactactgctgctgt

SEQ ID NO: 285766 - DNA, 515 bp, Zea mays
agaagaaaaatagcattttcattatcattttcggtcgcttgtttatcacttgcaatttctttacactgtctcaaatcttacaacaacgatgtagaaatgcagatttctgcacgtaaaaaggaaacaggcagcatacccccttggcatgctatatcgaaagaataaatctcagaaactcaaagaatccaaggatttacaggagagaacaaatacctcctcctctatatgacaaccaacctcctcgtgtcgttgccaaaggaactttggaaaccagtaacaatgtacaggacaatgtacattagatggctgctgagcaccacaaacatctcttcaaaagcaaactttatggagcttgtcctctgaatagagacctgctacctatttcgtgcttgggaatcctcagaagagatactggagtgaggagagggctcaaggctcttctggcagctccagttgtgtggctaataggttcagcaaactggccatcgagaaggttggtctcgattatcagcagc

SEQ ID NO: 285767 - DNA, 370 bp, Zea mays
cccacgcgtttgaatgcgaaaagatgcgacttgggcatcttcgtgaccgcgcaagtgatatgggccgtagaaaagagcttagggaatgtgtagagaagctgagattgctaagcactcctgaggagcgtgctcgtaggctcaatgaagaacctgaagtacatgctgaccctgcgatggatccatattatgaatctccggaggaacaggagcaggaaattgaaaaaagtagcttcaacaagtccagaggttctttcttgaggaaagatggtaatcctgtgcctccaggtaaaggagatggtagaaatgctgcacagcgagattcaaaaactaattgggaatctaatcgaaatacatgggccgaatcgagttc

SEQ ID NO: 285768 - DNA, 489 bp, Zea mays
ccacgtcgctttcgtccgtgagatcgcagagtaccggcagagccaccctcgccggtcggcagacctccacgggatctcccgggagctcctgcgccagtgcatcactactccgctgaccgtaccctcgacctgcgccaagtccgagagcctagagtcgctgatacgcgcggacaacgtgatgacggacagcttcaggatcctcgaagaggaggacgtcgtcgcgcgcacctgccccaagctgaggccggcgagcgtgctgatgcagctcgccacctgtggctcgctctcggtgaagggtcacggggacgctggggtcgttcggacgtgcaagccgaggttccccaacctcaggttcctcccctcgccgctgatctcgcgcaccatgatgatgggcgagctcgactacctgtcggaaaaccccaggttgatggggatgaagctggaggagaaggagtacttcagcgggagccttgttgagaccaagaagac

SEQ ID NO: 285769 - DNA, 423 bp, Zea mays
gtaaaacagttgctgtactcaacatcatcgcctatcctacctacattccagctctgaactcccaaaaggggggaggaagaagcagaagcagcagcaacagcagctggctagcttcaaaggtctctcaggtagccaaacctgacacggttgctcttacccatacacaaaaaaggatacatgcagctgaaaatactcagctctagccaccaaaaacacacactcgccaatgtgactccgcgcatcctttttcttcactgacctgtctacctctgactgaatcctacaggaggctcctcaggctccccgtcgccggaagcatcgccttcggaagggatggacatgaggagaattgcattcgccacatgagggcaagagagagagccttattcacagacacccggaccgggcggcaccacgccatgt

SEQ ID NO: 285770 - DNA, 516 bp, Zea mays
aaactaaaacgagacgtgttccattgcgttgtttcagcataggttttgtgaacgttaaggtgggtacctggacacagcaattccttgcagaacgacatgaatagctgcatgcagtatgccaacagccaacatggtcgattagtcaattgaactcaacgaattatggcacagtgcggatacacaggttcacgtcacaactcatcatcatgaactaaaaccgccaaacacccgggcatcttcagaggaggcagtgcgagagcagagtcgcggcgacgacaacggcgaacgctgagcccggggatcggatcgccgccgccgccgacgacgacgacgacttggaagagcccgggcttgggactgccggagccgttccggaagctgtgggcttgttgcacttgctcaaggcggcggggtcttcgccgcacgccgcgggcagcccggcgccgcgggtgaggttgacgggctgccgtagttctgcccgacggcggcgcagaggcagacgacggtggcggggct

SEQ ID NO: 285771 - DNA, 411 bp, Zea mays
  unsure (1)..(411): unsure at all n locations
ctcttcaaatcatagtattataggggagctcaatcgtagtaacagcagcaggcagcagcagcacacgatgcaccaaaccatttacatgaatagcactcgtaccccccccaaggcttaattaacaacaattaatcgaatagcgtgttttgtccatagacgatgtaccaagccattctagtgcagaccataagccagaattcttctcacaagtcatagctgttagtagactttttcggttttcgtacagatccctacaagtcactgcatctcctccctcgtaccggactgtgtaaggataggaagccaccgttctagttgcggttcttggacttatcggctgcccttgagncgagtccaatcgcatctgagcctttcatggatcctgagcctgcggcaggagccggcgaacat

SEQ ID NO: 285772 - DNA, 457 bp, Zea mays
gatcatctcgtgaaattacgtttgtggtgtacgatgcaataatacaaacttagtttatctctttcatttgttgcgatagctacaagctaagctcgatgtgtcatctgtttacagcacacacacacgcaaattaagatgtagattgcccgtgcctaatggaccatgtgcaatcatcatcattatcattaatctagaaccaaaatctatcaagtcatccacaccccaccacaactaccaatctttcaactagtcaccgtacgaggaatcatcttcacgacgtacgtgcagcttatagctagctgaggctgaggtgcgggaaggcgaggtccctggccaacaggtaccggaagctccgccggtggggcacccactcgacgactgccttcgcggcaccgggcccgtctccgcggcggcggcatcgctgacccgccgtcgcagcgtctccgggaggcaccgc

SEQ ID NO: 285773 - DNA, 444 bp, Zea mays
ttcctttttttttttttttttctcagtaatcatcatctgttgattgtttgtcatcatacatgcgtacagtcatgcgcgcaattggtatatatgttacttttttcttttcaagaaacaacaataataataagtatacagctaggcaaaaaaagtgcaggtagtacgtgatcccatgtacaattaagtacacacatgaatgaatcatgcagatgaagtgcatatcgtcgagagtgatggtgaaataatctctggctctgggccggcttgacttgacgcgattcccgctgctgctactagctagcttagtagtacaggcagctgaccctcacctaactccgatccccccgatcagttgaccttgttgcacttgagcctgacctccccgggcggcccggggagcacctcgatgctgcccatcttcaccatggcggcggcaaatcgctg

SEQ ID NO: 285774 - DNA, 336 bp, Zea mays
atagcaatcaaaatgtaaagatgcttgaggtggtgttattctgggtacaataacatatacatatgctattaaatgtttaaagggatcacatgcacaagctttgtgatcctcgaatgtccccctattcaaaaaggggatatgaaaaacaagcaggcgagtgtgctgggacttgaacggatcaaaccggatgcagcccgcaaggagcaacactttcgaaaatatacacgacacgaggtgcatccacggattgcttcatttgtgcatctcacgagattgttgactgaagctacacgaccctgccgattcgggtgtcaacaacgacagtcggctttgaag

SEQ ID NO: 285775 - DNA, 390 bp, Zea mays
gagatcattaaggttcaggggagattcattcccaatcaaaagaatcaatttattatcatcaattagaactaaatctactcacaagtgaagtatattgatcatggtacagaggggggttctgcaagcttcaggaaaaagctgtacaccctctcatgtctttccccatatcaaataaaggtgaaccaaaattttttaaggaaccttgaagtaagcttgctagctatgcccgtcatcatgtatagatccattcccggtctagccatgtttgatatcataaggcaatatacagagattaaactttcctatacgttcccgagacttgccaagattaaaagcaatcaattctggaagcaggcatagaaaagtattgacgaggaaatgccacgttgc

SEQ ID NO: 285776 - DNA, 478 bp, Zea mays
aggcctgaaattgggaaatgttacctacgtttccaaccacttgtccaaccccagccgacacgaggttgaccatgcccacgaagaaacgctatgctttggctctgccttgttgccaccataacttcgttaaatgtttggtggagatacacaagtataacatagggaagaagggtagttagtgcagtcctggagacaaactattctggcgaaagatgtccggaataccgtcccagttccccgtctccctcgcttcccagtatccacccatatagcggtaactgtcgccatcatccttcttaaaccaccttggtctccatcctttttcttgcagttgtcgtgcctgccgttgcagttgttcaagcctaagtttctctgaatttgccatctcatattcaccattttccagatgcctttggtctggtctcaaacgagaatcagtaggagccaacttgttcaacaaatgtggtgtcaattcatt

SEQ ID NO: 285777 - DNA, 401 bp, Zea mays
ttttcctctttttttaaggatacgatcaaattaaagtcaagttatatttctattggtttttaactaaaatttatttatagtccaaccattttatgaagaaccatttggatcttgatccattgccaccacccctacgtacatctactacgggctggtgggccagcggtaggtgcggaatgtgtcgtggttgccgccccagatgtaaagtgcaaaaaatggttccgagcaaataaacaatccgacgacgacgaatacatcaatttcaacggtgcatacttcagccgtcaagatctcaatgacaaacaaaagagacatcaggagtgtcatcgtagattaacaccggcccccaagaacacccatgcgactatatgccctccatatctttaggacgtctcattagg

SEQ ID NO: 285778 - DNA, 425 bp, Zea mays
gtgctgaagctgaagttacgtttattatcatcccgtgcaaaccatccgcacgtaattattgcataacactaggagctagggctagattaggaactgttactgtagcaaatagatgataagactccttagggaatgcaatcgaggctcctgcctaataaacaaatgaagtgggaaaataatctatttgccgctcatggcagtctgcgcttgttgcaccttggccccaaaaccgcacttccttgtgaggaggctccaggaccgccggggcttcccgagccgccggatctcctgcttcatgctcttgcactccttctccaggtccgacacccgcgctttcacgtcggtgatggtctccttcccatcgggtgcgtcgccctctacgtcactgtcggcgtctgcttgcgggcagcctgcgatggccgcgg

SEQ ID NO: 285779 - DNA, 349 bp, Zea mays
tttttctctttttttttttttggcaccgaggaaaaaccaccagtttatatatgtacatacacagctcttactaaagtgtgaccagaagagatgattaaggattaaaagaaaagaaaagaaaatcgacctactcccataggtacataacatcttcagctttgcgaagctacaagggaaaaaaaaacttctgtcttgtaccgccagaagggaatgctaagctcaagaagatgcttcgaatggtgtcctgaccaactgattcctacgggcgtttttttgattttgtttttttgcatctgagatctgactgaccgtgtagctgccgttcggccctgggcaggaaccaagggca

SEQ ID NO: 285780 - DNA, 420 bp, Zea mays
ttttctctttttttttttttttatggagcatcgagcagaaccgatgattgaatctcaaatctctacgtccgactaaggttacaacacaatacaggatgcaaatgggttgctccaggcacaagcagcgtccccaggcgtgggagttccctggcatctaaacacgccctgaagaattgagtcgagttacagctccgattgctaaagttgaaggtttacatggcagatctgggcagagtacatggaaaaactagttacagcagattaggtctacatatttgcaccgagggcgataggggttctactcctcttaaccttttgcagttaaatgtcgaatacagaatgcgccagctagttgactgtttcatggccccttattggggacggactaggggttcaacagctgttttgaagagaaaaatg

SEQ ID NO: 285781 - DNA, 413 bp, Zea mays
aatggaaaaacttgtcacacggcacgatttcgaaggagtaactgcacctcaggaaacaactgcatacccaaatctcaagcatctagtattgtagtgtatacattcccgcgaatcagcataattactcaccaaactatcgtgactagtgtgaagttgcattgacaatgcttcaacgcctagttgattcactcatgatttatttacagagtgcaaccataatttagcatcggaagggtcgtccagggttcacatttgcaggtctcttctgcagcagggttttaggccgcagcacctcataccatccactgaaaagtggaccacctccttatttacatgtttccgagccattccatcgcctctcggaacagacgcccaagcagattacagtgactggactgcctcctccgacaaac

SEQ ID NO: 285782 - DNA, 335 bp, Zea mays
gacagaaatgcgttagatgggatatggggcaaatcaaatgacaacaaaaaaaaagtccaagttctcggagatgagagtgagagtgagaccaaccaacaagaatcctagcttttcctttacacaaacttttccctatgcagggcagtagtagggatctccgacatcgacatcatgtgtccagccgacaaaatcatcccaggattaaccgcgaactaaaaaatgtccaccaaaaattattgctaatcactggggggtcttcatctcatgagcaatgagacgacgtcctgtcctgaccatcatcatcattcttacctaaacccacccactaaaccccc

SEQ ID NO: 285783 - DNA, 486 bp, Zea mays
cccacgcgtccgcccacgcgtccggaggcggagttccgtgcggcttctcatagggttcctgctaattcggctcaattggtgctcggcggtgggcgacaagggcgcggggaaagtaggcgtggctttcccggtggtggtgagcacctggccgttccgtgaggcggtcagagcggcgtggaaggtggtttcgaccggtgaaggatggggttcggccgtcgatgctgtcgtcgctggctgctccgcctgcgaggacctccgctgcgatggtacagttggtccaggtggaagtccagatgagaatggggaaaccactttagatgctcttgtcatgaatggggaaactgtcaggcaacaatggaaattggagctgtggcggccatgagatatgtgaaggatggaatcaaggcagcaaagttagtcatggagcacagcgagcatactctgctcgttggagagaaagcaacagcatttgcaatttcaatgggt

SEQ ID NO: 285784 - DNA, 364 bp, Zea mays
atacttaaacttggaataatattattgatactaaaaaggctcgaccgtcaaagccgctagattggatgatgagcagtgaccacaggacagaatcgtccacttgttgtttcaaccctcatagtcatatatagaagccacctatcttgaccagcagcccgccacaccttccgacgatggatatccgatcataagattcattccactacgaaaataacccaaagataaaccctcttcttctagcccctgcccaccaccatgtgcacacaaaccccaactacgtaacacatgcgtgcttcgtcgccatcctcctctatataatttacacaatttcttgcgactcccaagtagccaatgtatttgccca

SEQ ID NO: 285785 - DNA, 628 bp, Zea mays
  unsure (1)..(628): unsure at all n locations
cgccctccaacggcttcatcggcaagcagttcttcgggctcaagcagctgcccaggaccggcttcgactacgacttcttcctctaccagtgggccttcgccatcgccgccgcgggcatcacgtcgggctccatcgccgagcggacccagttcgtcgcctacctcatctactccgcgttcctgacggggttcgtctacaccgtggtgtcgcactggttctggtccgccgacggctgggccggcgccagccgcacgtccggcccgctgctcttcgggtccggcgtcatcgacttcgccggctccggcgtcgtccacatggtcggggcatcgcggggctgtggggcgcgctcatcgagggcccccgcatcgggcgctatgaccacgccggccgctccgtggcgctcaagggccacagcgcgtcgctcgtggtgctcggcaccttcctgctgtggttcggctggtacgggttcaaccccgggtccttcaccaccatcctcaagtcgtacggccccgccgggaccgtccacgggcagtggtcggccgcgggccgcaccgncgtcaccaccaccctcgccggcagcgtcgccgcgctcaccacgctgttcgggaagcggctccagacgggccac

SEQ ID NO: 285786 - DNA, 364 bp, Zea mays
ggttgcagatggcggatcgggaccatcagacgagatctcgtagtattggagcaaaaacaaattctgtaatcagcagacagcacaagtttattgctggatccgtactcgaatatagctggaaggaacctaggatagaatctgggatggtgaatggaccacgcgcggttgaaggcaagcctggccatggcacgcacgcacgcaggaggcgtgcccaaactactgctcgccgtggtgcgcgcccgcggctgtagcggtggcgcgtgccttgagccagtctatgatatcgtcgaacaccttctccacgttctcctcgggctcgccgacaattctggtgccacatccctgggtagatgcgaagcgtctt

SEQ ID NO: 285787 - DNA, 417 bp, Zea mays
ggggggcgatcaaaattttagggctagcacataacatatgctggaatgattcgtacagttattacaggccgatggtgctcccgcacacacctgacacccccacgcctcaagctctagcacacacacagcccagaagatcccgattcccgtcaggggaacacataaacaaggggagcagagcacgtatggcgtcggtttaagcttccaacccgcagatcaggttcgatctgtcaccttcttcggtcttcagatccatccacccccgcttgcctctgttccgcgcacgaaactcgttgtgcggcgcagcgccccgcccggccagccaggagagctgcggagcggagcgcagcgccgccccccacgggatctcttgcagctgtagcgctgcttgaaccagcacggccttcttcttctcct

SEQ ID NO: 285788 - DNA, 466 bp, Zea mays
gccgctgccgggtcgagcaggaggcggagaagcgcgagcacgagcagccgcgcctgcgagtccccggccaccatcacccacgagccattgagcagcagtgacgcgtcgtcgcgcgacagtcgagcgaacccgcaggcggacgccagcgagggcggccacgaccacgcccgcgcttttccgcctcccgagccattgtcagcggctccggcggcgttagaccacgagacgcggtgcaggaactggacgcaggaagacccagaggaggcggacgcagagacagggtggggggaggagtaaaaaggaggcaaggtggggcagggaaagggaagggaggtacggggataggtgggatcccgacagcaagcgagatgaagagcgcgccggagaagaagagcaccttgttgcggctgaggtgccggccggccagccccatggggacgaagagcacgcacgacgcacgacgcga

SEQ ID NO: 285789 - DNA, 274 bp, Zea mays
ttctttttttttttttctttttttttttttttttttcgcatgattacgtggtcctccactttcacgaacttctaatatgagctcacctgctgcaagcgtcacaatcccttaaggccgtatttcgatactctcgtattgacttcaatccatatgtattgaagttgattggagtgtaaattaatctaaatctcacttcaataaatgtgagattaatgtgaatacgagagtatctaaataagacctaaggattgtcataatgattgaacaacaaagt

SEQ ID NO: 285790 - DNA, 449 bp, Zea mays
ttcatacttttttttttgatgctatacaaatacggggaattctgaatttattaatgaaactacgtttatagacactcaattgtacaatagagtctctttgttgtctcatgtacttggagaactgttttgatgtctctccactgtacatgctcttacggccttatctctgcagacctgtagtccaaaactgaaaactgtgtgtacaacgtaagcaaacaacaaattcacggttgaaacagcaaaaagaatcacggcccaaccaaaactgtgtacacactccaacgttctacgacaacagggccagaagcagaaggtatccggcagggcgcacacgggtcgcgggacagctgcaggcacacccggtccacgtccttggcggagtcaagcagccagcaggtaccagtgaaggaggaggttcggcagcccgctcgccggcgagacgcccaccg

SEQ ID NO: 285791 - DNA, 369 bp, Zea mays
caaatgcatcgaatggctgatcatgttgcacgcacatcgtgtctgtcatacagggaatggcggtcatcaccctatctgctgagtgtccacaagcttaaaccgtcgccatgatgtgcatgtccctggcactcactgtcgtgctgtacgtgcagccgtgcaggcggctcgccaaacatgaggggagggcaaatgccgcggcattccgaagaagagcggcagcgaggaggaggctcaagaaaggctcggtaccatattgggaaaagaatattccatatcatcaaacagttaagagatacaacaatatatgcacagaacctaagggcgtagtgggctggagctctctgatgcacccttctccatagtccagac

SEQ ID NO: 285792 - DNA, 409 bp, Zea mays
atacataaggttccactcttctttgctttggattagtttgcacacaggtagttaatctcagttgacacttgaacaaattaaagatatgagcacctagagcaggccattatacaaaaggaaggtagtagtaaaagcacctaagcaagcagctatagcgagctagctctctaattaaccaaagtgatcaagatcctccaagaaatgaacaaaagaagatcatctcgtgagaaaaaaaagagaagaagaaatcgacgtggaaactaaagggccaagaaatggttatgcttggaccaaaaatcgtcgctgccacttaccccgcccatattgcatgcgtgcatgcatattccattcctccgcacagctacttcttgatctgatcccctcgcactgcaagttgcatgcatgcata

SEQ ID NO: 285793 - DNA, 344 bp, Zea mays
aataaaaatatgtacaattggatttaaggataagatttacattataatgttgtggagacaaaccaacatctggaagattatgtccacgctgagatggggattctatgtacagaataaatgtgtaatctgcaactatatacacagggtgctgggatgttcatattgttggagcagtgtcggacaattggacggtctgatcattgagtcggctcaagcaaggcttccctgtggcatcagtgcccatcaatatcgtgtcaccaggcttgaactgtccaaagagaattgcttcactgataacatcctcaaccagctgagtaacggctcttcgaagtggccgtgcccca

SEQ ID NO: 285794 - DNA, 425 bp, Zea mays
  unsure (1)..(425): unsure at all n locations
ttnntttttttttttttttttttttttttttttgggggtttttttttnnngggatcataataggcggttaagcacttaagttgtccctcaaattacatcatgaagtatacaataacttggtacataaagaaaaaagggattttggacaacgagacacttgataccgatacatgagttcagagaggcaccgcttccatatttctgtaatcaattgaacccacagcttgtggtcggaaatttacatgacaaagtttcatgcacgaaagacctctacttaacatgtaccataaggcatcgtgcgaagacctcaggcttccagtatagttcttatctgttcaggagagtgcttaaccaaagaccttgggtcaggataactgttattcggatccatgactgcgctgtaaatgagctcataagattctgta

SEQ ID NO: 285795 - DNA, 535 bp, Zea mays
cgacaaatagattggctttttttagagaatcaaggggaatcactctattagagaattgtgaagcgggactctaccaaacaagtcctaaaattgctcaacagttgaagcgattcttagtaacgaacaaatacaattaacaacttccattaacagtattaacatagctttcctatcaactagtaacaaccaagcagaatccatttaaagatgctgaaaagaacatcttcacggtttcactaagaaccacacgctccgtttgaacgtccaaacatctgctgtacctttggcttcaagagttagataacagattgccttcgcttggggttgagcacccgcagcgcattgccggctctccccacgaccatattctcacgcagagctgggtcgaagatgcccaatccaggtttcgcccgaacatgtggaggcgtaactcttttctggatgctgaaacacagcttcgctcctgccggtgccattcccagcttctgctgcggcgtgaccattttgttccacatgcccacatttggggcagggc

SEQ ID NO: 285796 - DNA, 539 bp, Zea mays
ataaaagagttcgagttctgagtttaataaacagcaggtagtgctactacagcattttgcaagcgacatgacatcggacaaaccgttacacaatatgactgctgggcgatgcccatcgaattttgaattgcataaaacgccgcttccatttgatatccttataatgtcaatcggttaatattcttcttaaaatgtccctgattctgtttcactggacacattaagcaaaatgctatattccacggccatcaaaatgttgtggacagttctggccgcaggaagtccagcgggctaccagcttaacgaaccagagtcaactgtatgccagaatggcaattctctgaaacccgcctacgtcttcaggagctgtattctgaatacagtaaccttgaccaatctccgtaaacccaaggctcataataggactaaaaaaaggaaagacgaaccaaaaagacagcgctcctaggtcgaatgccaaatttggtcaagggtgatttcactgatgatggcatggcaatagtcatgaaaacaaggcaaca

SEQ ID NO: 285797 - DNA, 464 bp, Zea mays
ctcgagccgtggagcaactgtggctgcattctaacgacttcactgggcccatgccggacttctctaggtttgataatctatgggatttgcaacttcgcgacaacgagctcacagggccggtgcctgagagtcttttcaagttgaaggccctgaagaacgtgactctgacgaataatttgctgcaggggccgatgcctcagattcctaatcaacttcatgctgacatcaaagcagattcagagcggttttgtgtgcaggaagccgggaagccgtgcgatccccgtgtgagcctgctgcttgaggttgctgctgggttcatgtacccgaaggcacttgctacggattggaaggggaatgatccgtgtgtgtttccgggcgttagttgcatacaaggtaacattactgagctaattttcaccaataagggtctcagtggtagtatctcaccgtccatcgggaagatt

SEQ ID NO: 285798 - DNA, 537 bp, Zea mays
agaactggaatgattttttgttctccaactacaaaccgtaatttgtctaaacaaattgtcgaatttatgaaacctacaagtactttatatctctcgtgtcagtgaagggagaaaggtgatatcacaaagtatcaaacaaacaatggatccgccttgctctagtgttttagttacatcctgattacggaattattcacctttcttcatcctgacccaaaacgtggggggcgttttgcttcctcgtcttctgagcacgacttcttttacacatgaaacgatttcctttatctaaagaatcagatcctcaaattcagatcatcacgagctgctcctaaccagctatgaataccaagctttgcctcactactggaaccgagcaaaccaaggagccaaaaattcccgtgagaccataagcgatggcgcagaaaggaagcgcttcaggttccttggctgacagtgctgctgtccccagtccatgagcactggaagctgtccctattcctctggcgatggggtcgttgacgacccacgcgtccg

SEQ ID NO: 285799 - DNA, 420 bp, Zea mays
tgagcctgtttgtttcttttcatattgagctacaaaccacgtgtgcctctgatacctagctgttttctctctgttatctacatgcataatgtttgtgcatatctacttgcttcctccgtttcaaattatagttcatattggctttgttctaagtcaaacttctttaactttgacaaatatatagaaaatcattcaaacatctagaatatcgtatgagctccaataaattctttatgcagtagcgaagctagagtgaatcagaggagagggtgcaaatgctctgagggtgcgtagtaacgatttataactggtgcatatatggtgaaaattcgctctaaatcactggttttacaaatttccgtgggtgcatatgcaccctttctcgtgcatgtagcttcacccctgtctttatgcaatata

SEQ ID NO: 285800 - DNA, 396 bp, Zea mays
  unsure (1)..(396): unsure at all n locations
tttntttttttttttttttttttttttttttttttttttttttttgtttttccagaaaagatggaacaattctttacttaactactactgtttaatttacatagaccatgcatgctatcctaggatcatgccaaccgcaacagcctttgctgctgtgggagagagaggcaggtatacaaacaatcggtcgaaagaatacacatagaaaaaatgaaaaggattatgggcgtatactatacacaagactagcattatattactaacaaaaacgatgacatggttgggcatccccatcctgtccccaatgctcttgatgaatcggtccctttctgccatggaaagaagcaccaagagggtagggcaaacggtggggggatttatgtatcactccaacta

SEQ ID NO: 285801 - DNA, 483 bp, Zea mays
aagctggagctcgcgcgcctgcaggtcgacactagtggatccaaagaattcgttcttcacctaagtttgagaaacgtctagtctagagagaaatggcaaatccaaaggttttctttgaccttaccatcggtggtgcaccagctggtcgtgtggtgatggagctcttcgccgataccactcccaaaaccgctgagaacttccgagctctttgtaccggtgagaaaggtgttggaaagatggggaagcctttgcactacaagggctcaaccttccaccgtgtgatcccagggttcatgtgtcaaggaggtgatttcaccgccggaaacgggaccggaggagagtcgatctatggagccaaattcaacgatgagaacttcgttaagaagcacaccggccctggaatcctctccatggctaatgctggacctggaaccaacggttctcagtttttcatctgtaccgctaagactgagtggctcaacg

SEQ ID NO: 285802 - DNA, 363 bp, Zea mays
ggcaccaacacagggcaatgatttaacggccatcatatggaaggatggatccccatgcggagtgatgataactagtacaactggactccattcaacgccaaacgaatgaacaaataaccctgtcctattaccaccaaaaggcaattgcaaagaaaccaaaagaaagatggccaaaactaggacaccaaccaaccactccaactaatctccgttcgatgattaagtatggtacaaaacaggtgccagtcaaaagttaccgaaatccagtgtgacatcagaacatttatagtccgtaatcatttggatgcccatatacaaaaatgccacaacttgtctgcgcacattgggtgggggatggggttg

SEQ ID NO: 285803 - DNA, 550 bp, Zea mays
aaactccaaagtatgaagtatagccaatcatccacaaaatatgtatatgattgcgatgatatcaagcgaaccacaactaaactaaaagcatcctgaactctgtagcttaaaaggtgtgacagaaagagccccatcctgggcgctgcatgtgaatgcagttctgtaactgtaacatggaaacagatgaaacttacctgggctgcatgtgaatagcagtcttgtaacatggaatcaaattgcattcagtttttttatttaccatacatagggatccaatttatgaactgcaccagacaatgcttttaacagtcaaagaaacatcaaggtacctcacatgacatatgaatgtactggtgattcttgttagacttgccagccatcgaattagctgtctttcaacactacaaagcaactcaatattcatgggtaagcccatcacaactgaaatgtacccaaatcctggccatgcctcgtaagtttgatagtctttccaccaatccagtgaagacggtatgaaaggtcaagattatgaagcaataacttcagatta

SEQ ID NO: 285804 - DNA, 416 bp, Zea mays
ctgatacaactgctgaggcacttaaggcaatactgttgctgtctaacattccttcagaacttgtcggggatccaataaaacaagaacgactatatgatgccgttgattgcctcctttctttcgtgaacaaagatggtacattatcatcagctgaatgtaaacgaacaacttcatgggtggagtttatcaatccttctgagagttttcgtaatatcatcgtcgactatccatatcctgaatgcacatcatcattaattcaagctttagtgctgtttagaggcaagcatccaatatatcgtcgtgatgagatagacaaaattatcaaaagtggtgcatcattcattgagaaagtacaacgaaaggatgggtcctggtatggttcttgggctgtgtgtttcacttatgcaacattcttt

SEQ ID NO: 285805 - DNA, 565 bp, Zea mays
caggacgtgcccaatggcgtccagggggagcatgtggtggcagggtggccgagatggctcacagaggtggcggcagaggcggttcgtgggtggcaacctcggagggctgagtctttcgagaagctggacaagataggacaatgtacatatagcagcgtttataaagcacgtgatcttgagaacggaaaaattgtggctctgaagaaagttcggtttgccaatatggaccctgagagtgtccgatttatggcaagggaaatccacatcttaagaagacttgatcatccaaatgtcatcaaacttgaaggtttggtgacgtcacgcatgtcaagcagctcgtatcttgcatttgaatacatggagcatgaccttgcaggccttgcatgctaccccaggcttaaaattctcagaacctcaggtcaagtgttacatgcaacagctactctctggacttgaccattgtcataaccgtggggttttgcatcgggatataaagggtgcaaatctcctacttgacaataatggcattcttaaaatagcagattttggtctagctacattcttt

SEQ ID NO: 285806 - DNA, 682 bp, Zea mays
cggtttcgtttgcggtggtgaagcccaactcaccgaaaccacagagcaattccagagcgaggagagtgcccaggagaaatgttaagagctccaccgttgatgaattagtggcttacgagatagaaaaagagattctccatgccctggaccaaactgacggtccatccacagaacatagcgcgacaccgagcgacgaagcctgcccgagcgctgactgggacgaagcatcttctgtgggcgacatcctgaaagatcctggcgaggccagcgaaacatcgcagtctgctgtccgtgactgtagaatcagctcagctggtgcggatgcagatgctattcactcaccgacgcacagagccccgacaagggaagctgaaataaaagacgagatcggcttgcttctcctcagtgacaaaccgttccttagcagagcagctgagctcataggcgttgatgtgtatggggatctgagtaaccagtgtgacaggatctccaaggctagaacgagaaaccgtcggctctatctggacgcggcaggagagcaactggagctgaaacaccgccagcagaacatcctgtggccttacgctaggccgctgggccggagatggaggtcatcgtcatcggcgtacctgtcgctggaggagctgctgagagatgtcagcgacggggttaggaatctgga

SEQ ID NO: 285807 - DNA, 453 bp, Zea mays
gaagctttggttggttgactgctccatccacccaccccctacagttcagttcagttcagttggtctaggccatggccatgtccgcttcctcctcctcgcgcgccctcctccgccggatcggcggcgcgctcctccgccgctccttctcctcctcatccgccgcctccgcagggtaccacgtcgcgggcgggcccagctacatgcgcggcgccgtcttctgggagcccggccgcccgctcacgctcgaggagttccgcatgccgcggcccaaggccggcgagctcctcatcaagaccaaagcctgcggggtctgccactccgatctccatgtcctcaaaggcgagctccctttctccacgccctgtgtcgtgggccatgagatcactggagaggtggttgaccatggcacgcacactcctgttgagatcatcaacaggttcccaggcggaagtc

SEQ ID NO: 285808 - DNA, 487 bp, Zea mays
acaagctggaatgaaatctaatgctgaaatagttgatttgacaaaggcttcaatcttgcctgagaagcttgaagaatcttttattgagtgcagtgaagaggataaggatgcctatctgtattatatattgagtgttcatggtcaaggtcgcacaataatattttgtacatcaatcgccgcattacgtcacatttcttccatactgcgcattcttggaattaatgtattgacaaaccatgctcaaatgcaacaaagagctcgcatgaaggctgtggatcgcttccgtgaaagtgaaaattccattttggtcgcaactgatggttttgcaaggggtatggattttgatgatgtgcgaacagttatccattatcagttgccacattcaactgatgtctatatccacagaagtggaaggacagcacgcaagtcattggctggctgcagcattgcgttaatctctcctactgacaagtccaggttttattct

SEQ ID NO: 285809 - DNA, 353 bp, Zea mays
gcacgcagcagtacgacgtctctcctctgggtctggggccgagacaccgagcacgtactaccagcaagatggtggcgtctcccagattcaagcccatcgaggagtgctgctcggaggggcggtcggagcagacggtggccgccgacctggacggcacgctgctcatctccaggagcgcgttcccctactacctcctcgtggctctcgaggccggcagcgtcctccgcgccgcgctgctgctcctgtccgtgccgttcgtctacgtcacctacgccttcttctccgagtcgctggccatcagcacgctggtgtacatctccgtggcggggctcaaggtgcgcacatcgagatgg

SEQ ID NO: 285810 - DNA, 494 bp, Zea mays
aacccgacctggaacgccacgctccgcttcgccgtcccagccactggcgccggctccctccacgtcctcctccgcgccgagcgcgccctcggcgaccgcgatgtcggcgaggtccacatcccgctgtccgagctcctctccggcgcccccgacggccctgtccccgccaagttcgtcgcctaccaggtgcgcaagatctcctccggcaagccccagggagtcctcaacctctcgtacaagctcggcgaggtcgccaacggctacgcccccgcttccgccgcccagtccgcctacgcccatcctccaccgaccgccgcgtacccgcctccttcaggcaaggctgacgcctacgcgcctcccgccgcgtacccgcctccttcgggcaaggccgacgcgtacgcgccccctgccaccgcatacccgccggcagccaaggccgacgcgtacccacctccatacggcgcctacccgcccgccggcggcaaggccgacgc

SEQ ID NO: 285811 - DNA, 315 bp, Zea mays
ggcactacacacacagcaaataatgtatacaatacgtcaatacgtcttggtttcagataagaaaggtgggtgatacggcactgcatgcttcggtagcacagtagtttccttttgcaaatttgcaaagcccaggtaggtagagaggcagcttgtgcttcatcgaccaaaccgtattctatgcagctagacagtagtactagggtagaggtttcctcgggagctgtgccgtcgtgctctccggccagcggatcaatcttggcgaactcgagcgtcttcttgccctcgagcctgctggtgacgtagtggcggctgtac

SEQ ID NO: 285812 - DNA, 381 bp, Zea mays
aaaaaacacctttaatagtgttctattttataatattttgacaaaaaggggttgggcacatgaaatgacccaaatatactacaccttagactagtgccctatccttattttctattatcaacagcgcatccaaaataattggctatcctaaaaattggtgggcaaccagcaaattgtgtcaggtgaggcaaccctgaaaattggtggctaactagcaaattttgtgttcaggtgaggcaacgggggtgatatgtgcctgccacagaccacagtgatcaacgactcgtagctgagctagctgttgcctcccttctgttttagggtgatcttgcctcctaagccgagcgcaattccttgggtcttgcttcttatcctgatgta

SEQ ID NO: 285813 - DNA, 358 bp, Zea mays
  unsure (1)..(358): unsure at all n locations
ttttnttttttttttgcagtcaaacagcctcaaaataaattattttgcatccactcatgcagctcacgcttctagtatacaggcaaccaaacaaagacttaaataaagtcaatgcacgcactgatgcaggatgagacagtgcgactaaccaatcagagcgatagtgcacagggttcttcgttcgttcgttcactcgggtgttttgctagcaatgcaatgcaacaactagctagctagttggtggacggctggagatccataatcgtcgatcgatccatcaggcgaggaggagctcggccttcttcaccttggagatgctctcgaggacgcccgccggcgacacgtggcccatcaccgt

SEQ ID NO: 285814 - DNA, 264 bp, Zea mays
ttcctcaaagcactgttctacatttacttttgtttgcagagccattgaatgacattactgaaacaccagaaccacagccagcaaagatgaaaccgtgtttgaatgaccttgacagaagaagccatcatgctaacatctctaaccatatggtccacagataacactcaagctgcatagcatggcactccaaagggagagagaaaaaaaaatggttttaagttgtcagatccataatggcagtgacaatgtccccattagaagcct

SEQ ID NO: 285815 - DNA, 441 bp, Zea mays
actggaacctcggcatctcgctccattgtgtcatacgtaaatccaagcggcaagccacgagagttcagatacatcaatacggagtatgcgctaaaactacaaaccgatctgaccgttccattcacgcgatagcttgacaggatgggcatccgaacaacactgaaacaagcacgataagtagacatgtaaagctgctaacggcgctacatggaattcactctttttcctctactaggttccagtgctggcgacaagtcttgatttccagagctacaagtcgacgggaaatagttcctggaagaagctgttcaggtcacctttctgtgtatcgaaggccatcagtttagtcactgcatcctggtactgcttgtctgttgctgttaatttctcactggtcacgcgcctcgtaggtttcttggaatgcatgtcctccaaaacaat

SEQ ID NO: 285816 - DNA, 722 bp, Zea mays
ggaaggaagggaaatttcgtaacttaagaaactatagcaggactgatttctatgtcagatcgaatgcgtcaggtagaggattcttcagcaaaagaatatgatacaaatcagctacaggcttgactcatctgcggtggtggtaatgcctgctatcatgcctatctctgtctttgtccctggaatggcgtgacgacatctcagagctcgagctgtaatggcccaagtgctgcctgctggggtatgaatgcggggtccaggcaccatcatctgcaggcggattatcataacgaggtgggcttctccaccccctgtctgagtgtgatctccctatgcttgggcgcaaaggtccaaaatcgtgggagtggtatctcggtgaataatgatcagcgccaggaggccctctatcatggaaatccctcgaatccaatgagtggtggcggcctgaggactggggcggggtgctaccccacagccactgatcaccattttctgggatgggggcgtttattccagggaattccactgtcatctttttcttaggcggagatgttcgccttgctctgaaagctctccctcctcatactctagtttcacctcaccatctccaaatatggtgataccagaaggtctatcttcatcgtcaaccacatctaggtagcccggaggatagcctaactcacgcattctgtgcagccaaggaggaggatcattctcctgcaaaa

SEQ ID NO: 285817 - DNA, 485 bp, Zea mays
aattaataaccagatacatgccaggtttaaatttaaaataatgaaatcgtggtcgtacacaaattgatctctaaacttataccgccaaccatcatgttttgtcttctttaacaacaacaatgtatatattcagcacgtacgtacaaattattgccacttggccggtaaggtaatcaatcgaataaatatatagcagggtaaaggatatatatatcagttcatcggtataagcagcttctatacgggggcgtccagtaatccgggccgttgttatccctgtacacctgaggggtgcatgagacgggtaccaagcacaggcctctactttgcaggtccatctccgtctccgacttgtccttccagtccaaccctccccatgcgttgtagtccttgctactgcttgtcttcatgtatggatcactcagcaactgcacttgttcatgcaaccacttgatgtaatttatcgcctcatacagaactgacgc

SEQ ID NO: 285818 - DNA, 471 bp, Zea mays
aagcgtaataaaaaaaccactaaaagcaatatgcgttttccacgagcatgtcaccaagatctgtacaacaggccaatgaagtaaataatacacatctacaacagcacagaacaaacctgaagctaggcgaatgatcctcataacttagaaatctcatttcaataacatatgttggtccaacgctcttcccaatatgattccagtgtaacccaacattaaattttttttaaaaaattatgggtcacaaggagaccagtactatattctaagatcataggtaagctctgaaggcttctactaaggcagataaagacactggatatagaatcctggtgaatagtgaactgattgatctttcttttccatttcttcttccttgatggatagcccaacaaaatgaatcggaatcttcaagacaggttaatcttcatctcctcctcaacaagctcaaatatttcaccaattcactcc

SEQ ID NO: 285819 - DNA, 328 bp, Zea mays
agaacctgataactgggaaatctcatttcaataacatatattggtccaacgctctcctcccaatatgattccagggtaaccgaacattggattaaaaaaatatattatgggttacaaggagaccagtcctatattctaagatcataggcaagctctgaagacttctactaaggcagataaagacactggatagagaaacctggtgaatagtaaactgattgatctttcttttccatttcttcttccttgatgaatagccaaacaaaatgaatcggaatcttcaagacagtttaatcttcatctcctcctcaacaagctcaaatatttc

SEQ ID NO: 285820 - DNA, 436 bp, Zea mays
aaaacagggactaccctaaaacagatttccattaccccagaaattagtagggcatagcaatgttttttttaccggatacatcagccattcacgaaaaaatctggctactcgggggacaacctacaacataccccaattttttcctgctggacagtaatccttacaaatgggggcagcctggacacaattctactatcctttttaattcccttcagggtttcttaccaaaggcttgactttgatctttatccttggtttggctgctgtacgtgcagtatctacagttgtttccttgcttgatacctgaggttcagagctccgaacagcagctggttcagcacttagcactggagctggtggccttgcaggcaaaacttccagtgaacctgaaggtttcactgttttcggctgctcaggggtagctcttccttcacct

SEQ ID NO: 285821 - DNA, 461 bp, Zea mays
  unsure (1)..(461): unsure at all n locations
ttcattanttttttttttttaatccgcagagagggggacttttttaatcttattgccgcagatctggacacgttcagttaacaatcgtacataaaagtaaaacacttgctcgtttacaaggtcagcagagccttttgctgccgctgaacccctttgcgcggccatggtttggcgacggcatgggccaacatacagggtgccttactaagctcactaccacactgctgttatcagcggtaactgcgagaacgttctcagctacgtacagggctggcactcgacagtcataactactacagggacatgtacagcgtattcacaaggttgctagtgacctatttatttatctacatggagcaggcaagtagcttacgcgacagcttcatcccactcttttcctgttaaagagaccaagagaatgtcctcgtctgtcccaaaggatttccgggcctcgtccaagc

SEQ ID NO: 285822 - DNA, 365 bp, Zea mays
aatctgaagcaaactggtgcgttattatcacagcttatccttctgcttgtttattcattcaacatgttttacatcaatttatgctgtccagtcactattcattcaacatcccgagaactcaaacagcatagtatgcttatacttctcaccgggccgaacaaccacagagggaaactcaggctggttgatggcattcgggaacccctgggtttccaagcacactccagcatgcttcgcgtagacagcgcccgccttgccaccgatgccatccacgtagttggcagtgtacagctgcatgccgggtgcgtcagtccacaggtccagggtccgcaagctcgacggatctttcagcctggccgcacgct

SEQ ID NO: 285823 - DNA, 534 bp, Zea mays
gatccgtctatcaacatcaagggcatcttttagtaaacaaggggcattgtgttaaacaatgctggaatccgtccaccagacgttctttctcgctatacaaatgaatataagttactactatcattatattatacatatattccttacaacaaactacactaattgctaccaggagattcaaaaaataaaataaaataaaatacacgtgaaacctactacacttcgatgcgaccgcgagatcgcaaaaaactcagcgcttcactgacttccagttagctctcctgaacgaatcatcgcgataatagggcaactggaccttgctaaacttgtaccaagagcaccagaagaagggagaccaaagaggcaagcagtcttagctttaggttcttgtggttcacaccactttgtgccgatgtcgcagcaggtcgctctgggatattgacagacttgtcgcacgatgaagatggtgcttgcatggaagatggccatggggctgcgatgttgtcattcagatcgcatgtgaagctaatcccg

SEQ ID NO: 285824 - DNA, 532 bp, Zea mays
gaattaaaatttgatactaaaataaaggacgtccaaggagaatgttcaaaagtatatgaaggaccaatacaaaattcggcctcctagctcaggcgaccaacaaaacattttcctaatcctaaaatatttagtttaagctaaacggcacgcaagctccaaggctgtttcattcccgtcgttctgcttctgcctgctggtacatatccagccaaacgtcaagcaatcttatacgtggtagagctgttcaggccattttggatacgcgcgcttgtacaagctcatgcacacagtatcatgctgctgaatgctgctattgaataagcatttcatggcaccatgagtaccaacagtctccttgatgcggccacgacgaccatgttttgtccacaactcaacaggcttgaaccattttacgtcgtcgggattgtggaacatataccgcacgatcgatttcagtttcgagactctctgtggatacccggtcagaacaattttcttcagaatgatccggtctggatccacactttttagc

SEQ ID NO: 285825 - DNA, 432 bp, Zea mays
aacacagaaagctatacattttaatttcgtctcaaacctttgcccaagagtacactgcaccggtatctactgtaggttccatgccgttctctgttttcgtagctctatagtttcacaccatgtaaggtctgacaatgtaggtaacagattacctgactagcttagcgagttcatttttcagagtatcagtcctctttatctctgataaaccttctcggtagtctactgagcacattctcctcagctatcttgtaatgcctcgaaatgttccggtagaccatcccagcatacctatcaacaggcctctggtactttgttgtacaatgcaggcattgtgaccaaagcaacggttcctatgtaagcaagagtgatagacgagcagaaatttccaatgacagataacagccacaagacaatcacgacctggaaaaa

SEQ ID NO: 285826 - DNA, 711 bp, Zea mays
gcgggttaaattgtcatcactaggtttaacatccatcagaaccaaatttgaatgaactgcagaaacagaatcatcattctgtgagccaaaccagtaactattttacatgaataaacacaaatccaaaaaaattacttggcaagctgcgaagtttgattcgaagtgaataggaattaggatgtttattgtcacagttaaccaacgaactactagtaggtgctactacagagatgccaagtatcactaatcaaggagttacacaatctcttccgataaccaaggatgcatccggaaggtgcaaatattgagcacgatattgctaccagcgagccatgtttgaggttcgaggagggtcatgctgtccactgcccaccagcaccatatgcagcagcaccaccaccaggctgtggcgagaccccttttgctgcagcaggctgctgtggatttgctgggggcgcagcatagccgctctgggttgttgctggtgccgcagactgctcataacctggaggatttgtaggcggctgggtgtatcctgcctggccatacgcaggctggctggctgctgaggaggcataaccagcctgaccagtagcctgaccaggaggaccatatcctggctgtgggtaggcacttccatagttaggatctgctggagctccctggtacccatagctcgcattggtttgagctgcttgctcaccatatgct

SEQ ID NO: 285827 - DNA, 225 bp, Zea mays
ggggcagcagaggttttattcgagtaaaatttccaacccaactgataaaacttgaagtttacttccaacaacactatttatcagggcattttttttttgtggcgccgtagcgtcaaacaggggaaggtgtgtagaaaagtggcctgaatttctcaaagtaagatttctgggcccatccgctgctcctctgctagctcattgagcctttgagcggacgcgtgggtc

SEQ ID NO: 285828 - DNA, 375 bp, Zea mays
gaatgcattcaaacacttgataaatgtttaatttactctctacttagtttagcaactaataatgtattattttaattgatggatttgaggtgttacacacaggaagcggttgcagcaacccgggataagcagctcgatctggctttgcttgcagacagacctgacattcctgcacgaacttctgcacaaagggcttcaacttagtccaggcaaagagttttttcacacggctgtatgtcactggtatgccagaatgtccgcccaatggggaactgtgtaaagcttcgacaatgcggtgctgcagatgtgtgtcctcacccacccaaatgcgttccttgtatcggagtagaccatcatgcagggtaaaattgggta

SEQ ID NO: 285829 - DNA, 291 bp, Zea mays
aaaagataaatccgcctttattcagatgcacgattaccacatgcaaagttgcaaacttgaaaaaggaatacaggcaattatcaacttatgacccactcttcaggagcgtatatggttcagcaatcacacagacaagctctactatcatattaacaatggggaaaaccaaaataagcaaccacacactaatacttcatcttcagcaataaaaaacgattgaatctgaagctggtccggctgttctagaattcttgcgctttggcaacatccatagccatttcattctcgtcc

SEQ ID NO: 285830 - DNA, 354 bp, Zea mays
gctcggggtactctttctgtaggtaagaataagatacacagcgaggcagagccaattcagcagtgacaggcagctcgatgcggaggcatacaccacacagcacacacacaaacacataaaattagccgatacagttatactaattattcgagctacttactaatcgttcgtccaacccgaaccaaaccagcattaaccagcaaaccagagactgcactgctgcgtgtatcggcagtgcttgacgccgagcggcatgatgggtcccatgccctcctgcgcggcaacgggcatggactcgagcttgcagtcgagcggcggcagcagtgcggtcttctccacgcgcgccctcccgac

SEQ ID NO: 285831 - DNA, 337 bp, Zea mays
ggaaaccaaccaaacatgagagctgccgattatattaattaagaaggggtccggaccggactaaacaacaaacaacatgcggttggattgagacatcaacacgccaacaccatacaactcaactcgtcggttggattaggacatcaacacgacaccacactcaccgtcgacatagagtgcccaaacaacacaggcagcggcaaccccacacgagagcacaaaactgctaaaggtcatcgttatcaagcaaagatgcagagcatccaacaactccgactttccaaagcagccaacaggcgaaccaaacaaaaagcagatagacaacccgaagcgaaag

SEQ ID NO: 285832 - DNA, 346 bp, Zea mays
aagatgtccactcatatatttggtgtgatattgcaatctaataacatgatgcttggtgtgaaaaaaggagattgtaattgacaacatgttcctgtcaaaaataccatgacaaggttggggtccagaccaatcctgaagattatactatggccaagtgctgtgaaaaaagagagacgaattctgagagccaagggctgtgataaaaactgcgtgaatcgcacatagtgtctccatgcacatgtgtgctgagataatccattttaccatcaaaactactaaatgagggctccagtctcagtaggaagcccaggcggctgcttcagggaatgagagacctggaggagca

SEQ ID NO: 285833 - DNA, 449 bp, Zea mays
gacagagcaacagagaaacaaggaattaataactcccagtagttacaaacaaatagatgatacagtaaaatgcaattactgcttagaacttctcaacccaatgccgaagagattgatgtagctgcagttgctgtatacttcagagaaacaatggatatacccccaaatttacacaagatttttacacagccgaattttcaccgatcaatagtgtttcagcaatagaggaagagagcttaaaacagtcatctgacttttcatcgtttctccccaatttgatctcctaggcaaataagccttattctgattcgcatcaccttcacaacatggcagatcagaggcatggcttccattgatgcttgtgtgcctgctttgcatgcatgtatcacagagcagacatccgttgtctcaaggaatttctggcccttcaccagaataaccacgcgtcc

SEQ ID NO: 285834 - DNA, 472 bp, Zea mays
ggctaggaacaattttatagcttccactaatgacaaatctacggctttttttttttttttttttgatgtacagagcgcattgcatgttattctgcaaacaagcggcacaatgccacaatccaaaagtagaaattacataaagttagtaccttgatgtggatacatatatataaaaaaaactatctatgccacatctgatctcagagaacacaatcaactcggccatggttttgcctttcgactccagcatcataagttaacaaaatttctgttttgattccatccatgttcttgctgatagcgtacaatagcgcatacttgccacgtccgaagtaggtgcatgaaaggcatccacaacattagttataacatcctggcaaaatgaaaaataagaagatttaagtagcaggtcagaagtgttaatctcacgttaatggcttccggaattgaatactgcttgctaaaaactcca

SEQ ID NO: 285835 - DNA, 435 bp, Zea mays
ccgcaacgaacaatcaaataaacaatttaattcagctgaactaagtgtgtataacattcaaccaggttaacaacccaactaacagtcaatgtttttcagtaccgtaaagaaaagagcagaacaccactaaaccgtctaaacacttatgtaaggttacccattttttttcacagaagcatatcaaagttcgtgttacaaaatccagagcctgatgggtcagcagactccacaaatgacatgactacatgagactaagtctttgaagcaaatcatcagcattcagatccagaagatcaatcaactagtcaggcatgtctgtcgctgaaacttctccccacgccttctattgctgaagaagggtaaagagcaccaacaaatccaaatactcacatgccatcatacctttcctactctcgatacattaatgcagagaac

SEQ ID NO: 285836 - DNA, 669 bp, Zea mays
atcccaactaaaacgccgatataaaacacgatggagtcttcccatatgttacaagttagggctgaagtcagtgcaataaagttaatgaaattcccataggttacatgttagggctgatgtcaatacactctagactctagtaggttgaatgttcttccgtattgaattcacaaaaacaaaatgggttcgccatacatgagaaaaacatcagttatcctggctcaagtggaattctggaagggtcatcctgattacttcagctagacctcagaccaccgacttcaaaccctaacagcggctgcgatgtcaggtggggggcaaaatgtccaaatggcaggatcacagaaaggtctcgactacaacagagattgcttgtggtcctcctcgctcaagaagggatagagcaaggtcatgttcatgccaactccgaagtccagctgctatcttctttagcgtgtccagctttatgtcccgcaaccatgatggaacaaacttcaccaccaggaacataaactgagacacatacgctttccaggtacccgggtcacagcccagaagaatgtgtccgtccagcacaccagtctatgaaatccatgtggtttctcaccacccgtggccgcctcgagaggaaagacaatttcatgacaggagaactcctgtccgctcccc

SEQ ID NO: 285837 - DNA, 393 bp, Zea mays
caaaacattctcagagaaaaatatattgttattacaaactagcccattgttttatgtggtcgtaaccgcaacccattccgtgctgcttccaaggatagtatccattctcagataataaccgctgctcaaacatggccagtttacttaacatagcacagcaagacatgcatgatattcacagctatagtaccaaaattcggcacgccatcaaatcagacgacgccctgctggtctcgcaagacggcgtagttgatgacgcgggcgacggtgcccatggacggccggaaggtgggcgtcgtactgcaggcactgcaccgcgattcgcccgagcttgacagctccagcgggaggatactgatcaccaagttgcgggatcgaggcattcctgaaccc

SEQ ID NO: 285838 - DNA, 382 bp, Zea mays
attcaaaacagagttttttacaatgtaaccaaacacctcttagcaaaacaatgagaaatactatagtattcttcaatatcatggttttacctcaaaactctaaaaatactttgctccaaacaccccctaaactgggtaaataaataaatataagacaagcatacattattattatacaaacatacagaagcgcctctcccgtcatttgagatgctcttttggctttcccacttacaacagtggccccaatgtgctgcaatacacgcttccatgatttcctacataaccagttctagtacaggattggcaagcattgtgctagttggtattggctcgtcggaatggtgtgattctgatgcacaatgccgcctgtcatgatcac

SEQ ID NO: 285839 - DNA, 371 bp, Zea mays
aaatactcgaacaaggatccgcaaattctataccaaagctatgacttggggcctcactcttcatagggttctggaaattacaagccactaccgaatccgacaagccattaacctgctagagataaataagaacagcaggggagcagaaagacaagaggagaggagaggagagaaacatttgatgaatgaatttaacatggacctccacggggctcaagcatgacagagacgaagggctcaactcgacaggcaaaaaggatgcaggggaggcaagcgccattcagaatttacagcaaaggattctgtaaccccagcctcggtcttccttctgacgcctgcggtcggccttggccatcttcacggggctgctg

SEQ ID NO: 285840 - DNA, 718 bp, Zea mays
gtgctgctgtcactaggttgacttcaaacaagtcgagttatcttctttctggttttgaccaatcaaccacttcgcaggatgtctcacgaattctggggtcactgtcaacatcggcagaaagagatcaatcagacacagaaaagactcttgagcatggaagttttaatccaaacattgatgcacggctaaatgatctgaagctcaccttgggaccagaattgaggattgtttatcctttaattctgaattttgctgtcagtggtgacctagagcttaatgggatggttcatccaaagtatctaagacctaagggcatcttaacatttgaaaatggtgaggtcaacctggtagctacgcaggttagacttaaaaatgatcatttaaatgcagcaaaatttgaacctgatcttggtttggatcctgttcttgatctcgttcttgttggatctgaatggcaattcaaaatccaaagtcgagcaagcatgtggcaagacaatctggtggtaacctcaacacgctctgtggaccaggatgttctgtcacctagtgaggctgcaaaggtttttgaatcgcagcttgcggaatcattattagaaggtgacggacagcttgcgttcaagaagcttgcaactgcaacgctggaaactttgatgccaaggatagaaggcaagggtgagtttggacaggcacggtggcgactggtttatgctccgcagat

SEQ ID NO: 285841 - DNA, 393 bp, Zea mays
cgtccgttaggctcgagaggtggactcaaacatgacatccaagttttgcaagttttgatgttggatgttaaatttctatgctcacccctcgtttggttattgatgtactatttccatctcatgtcacaaatttggcataaggaaatgggtattggtggctactgactgtgtttgtttccacgtattatacatgtacaatggaacagttgataatagttttgcatgaactattggcgttggctatctaaaaggacagaaaggcagacatgagcaacagatcccgctccatgggctgaaactgggattcgtgatggcagaaagtgctactgccgctctcagctgtagcggtgtggtactgggatccatgccaataagtgtgtttttaggatgagc

SEQ ID NO: 285842 - DNA, 374 bp, Zea mays
atgggtctgttccctgtcgatgtgtcagatcttgcaaaggaaaaggataggtataaggcaagtgtcgccgaagctcggagcaaggtccatgaatacagagctggcgaccgatctcaccctgacactcctaagatctatgaagagctgaggtatttgttggctcacatgaaggaagctgggtatattgctgacactcgatttgttcttcacgatgttgatcaagaaaccaaagaggatgctttactggctcacagtgagaggctggctatcagttacggtcttataacaagtgctccccgctcacctattcgggttataaagaatcttcgatcctgtggggattgtcacacggctttcaagataatctcaaaact

SEQ ID NO: 285843 - DNA, 528 bp, Zea mays
gctagccatgttttaggagcgttgtggtaccttctatctggtgatcgtcagattgcgtgctggaaaaacttttgcgatgaaactgattgccacactcgatatctatattgtgatgtaaaaccagattcaatgtggaatgggacctcagtcttttctacttgtaatgctaagaacagtaccaaatttgactttggtatgttccagccactgttagcaaacaaaactcctaacgagagcttcctgaagaagtatatctattgcctttggtggggtttgcagaatctaagttgctatggccagacattgactgtgagcaccttcattggtgagacactgtatgctatattattggcagtggttggcctagtcttgtttgcccatttgatcggaaaagttcagacctacctgcaatcaatcaccgcaagggttgaggagtggaggctaaagcagagagataccgaggagtggatggggcatcggcaactgccccatgaattacgggaaagagtgagaagatttgttcattac

SEQ ID NO: 285844 - DNA, 385 bp, Zea mays
ctcacattcttatattcacccattcattaagaaaaaggtatctcatcattgggacattactttcaatcagaataaggaagctctgaatcactatatacaagagtcatcatatccttcacatgagaaaataccaactgattccttggtagaagtagagagtacagcagatacaactgtgacagatcaagttttgaaagcaaggtcttcaaaaattctcgagcattcacctgatgatgaagttgaaggagagatggtgtacttacaatctaggctgcttgacaatgctgttgttctgaagcacagatatgaaaaattgatagcaaaggttgtccaaaatctttgtcgtgagctggatgctttcagtaaaagaaaatgggatcttatc

SEQ ID NO: 285845 - DNA, 552 bp, Zea mays
atatattcatacccataaaagcgaagacaatccctttggagagaatggccacaacttgcaatcctgttagcagtcatatggtttgaaaagctgagctccaggaacttgccaaatgataagccccaagctgcatcagacatgattactctgtgtgttgctggtggcattccatccttaagcttgcacctcatgcatctgtgccacatccatatcctcccatcatgttcacctggcaacttttgagactgaaggcgcctgacactaatcgttaggctgccatgttggtgcatatagcacctcacatgtgattctgaaggctccttacaagatgggcagcaatatgcctgatcaaataagtcctcacgaagatacctccctaatggcttatcaatactaccataagacttgatccgaacgagatgagaacgctggcatgcaaagcttttgggaatgcaggtgcttgagaggaaactaagatactctgattgttgtcagtaccagataagtaaccagctgaaagcttgtctttgtcatctgtattccctgcagcag

SEQ ID NO: 285846 - DNA, 538 bp, Zea mays
atccgtggaaatcgattgttatattctgaatctccagatacgtgtggtcatttcagtcactaaaccacacaagctggtttagtctggggcaacataatataatagatttacaacgaactgaatcacttcattgcctttccaaatacattcaatccacctttggaacagccatcgtccttctgggctctggctgcaggctcatctagcaggggcttctgatacttgaaagtcccatcaacgtcatccacattattcaagctgttggttgggtagccgatttcaccttagaagggaggtccaataaaacttccctgtcatattctactctcggcaggcactggtgccaaatcgaagtgctcctccagcacagcgaatacttctgtcagtgaggacaccttgaagtcaggttttacttcctcaggtaaagaatcgtgaggaccatatcgccccgtttcatcaagcaagcaagtgaaagctcctgccctctttccacaaacaacatcatccttgagactgtcgccaaccatgatcattcgtg

SEQ ID NO: 285847 - DNA, 461 bp, Zea mays
aaacctgcaaaaaaatatcactcaaattttattttgtccatggcattattcatcacaataccgtgtccataccagttgtatatttgtttttgcaagtacacggtatggcaaaattagtactcaaatcatagtatcagagttctcgttctagcggcatccaaactgttacaaggtagtgcatccatttccatctcgctagtacacagggaaatcaggatcgacgtcttgtccccacgcctgcagcccaccgatgatatccttcgcgttggcgaatcccttctcgcggagaagctggacggctctctgagagtcattgcctctcctacacaggacaaccaaggctgacccctcccctgcttccttcagcgaggcttcgagcgcgggcagcttctcttccagcatggagagcgggatgttgtgggacggagagatcgaagctatctggaagtgatgcgcaggtc

SEQ ID NO: 285848 - DNA, 719 bp, Zea mays
atcagatgtcatcattttggaggggatcttggtttttcatgatcagagggttcgtgatttgatggacatgaaaatttttgttgacgcagacgctgatactagacttgctagacgtgtgaggcgtgatactgttgaaagaggtagagatgttacctcagtgcttgagcagtatgtgagatttgtcaagcctgcatttgatgcttttgtcctgccttcgaagaaatatgctgatgtgatcataccaagagggggagataaccttgttgcaattgatctaattgtgcaacatatcaacacaaaacttggccagcataacttgtgcaaagcctacccaaatgtctttgtagttcacacaactttccagataagaggaatgcatactctaattcgtgacaagaacattactacacctgactttgttttctactcagataggctgattcgtctggtggttgagcatggtcttgggcatttgccatttacagagaagcaggtggttacaccaacaggatctctttacatgggagttgacttctgcaagaagctctgtggagtgtctattattcgaagtggagaaagcatggaaaatgcactgcgtgcctgttgtaaggggataaaaataggcaaaattctatttcatcgcatcagcagacaatggacaacaactcatattccacagctgcccgtggatattgctgaacgccagttttgcttttgga

SEQ ID NO: 285849 - DNA, 494 bp, Zea mays
ggcggaaatttttgctggggggttattattacagtatgcaactgcacgcacacatacaaccgttccaattccaaaacagtcctcgatattttagccagtcgggggagaattgaatagaagaaggatgcaatgtactactacacgagctgagcacgtaaaaagtgctacaccatcagccacagccacggcggccacgggagcactctacactctgcctctgctgccaagtgcgaaccggagtatttacacgctacaggcgacagcacggaacggaaaacgcaaagagaatgggagggggaatacaagaagcgaaaggggaaagcaagcgacagcaaccctgcactactactactgctcctacaccttttttttcttcttctttggtttgctacgcgtacacggaaggccacacggaacttgcagcacacagccgaggcgcgcgcgacggggggtcaccgctcaccgctcgccggggggtgggtggggtgggggac

SEQ ID NO: 285850 - DNA, 757 bp, Zea mays
gggctaccttcagttttgcatctgccccgtcttaaaattaaataaatgacgtcatttacttttaacctcttgttttattatttgtaaaaaaaactgaataagacaaatgatcaaacataaacataaaagaccaataataccatagggatagggatgatattcatgtcactcgccgacacgacatatcagcagcacacacgtgtcctgcttctcttcatccatcggtgtcagccagcgatcaccatacatgaacaggggctgtgacatatcaattaaccacgattccgagaacctaaaatgggcgacctcatcagcagcttcacttttggacttgatgcctccctcgccttctatttaggcttctcatcaacgcctgacacttcaactcctcttctaggcggcagctccttctcatctacagattcatcctcacagatgttctcaccaaccccaattttcaactcttctgaggaacgaggatccaggaagtttacagcttcgttcagggcatgaacagccatcttccggacctctagtttgtcttctttagccttgtggaaagatggaagtcgtctaaactcctccgtcagcttaacacactcaccaacattttctggggaaacaaaatcaagcgcaactttgatgcaggacttcaaatttctcacttggtgaggacatccagcaggaatgaaaacagcttcaccaagcttctgttcaaacgtccagggttcaataccatattcttccttgagctttc

SEQ ID NO: 285851 - DNA, 417 bp, Zea mays
ggaggcgcccgttagctgggacagccggagcagcgcgcacgcggcgttctcccgcgccgcgggcgacgccgcggacttgagcgcgtgcaccagcggccgtatcgctcccgcctcgacgatggtcgccttgttctcgtcgcagatggagaggttgagcagcgccgtgacgccgtgctcctgcagcagcgggtccgcgtgcgacagcagcctgacgagcgggcggacgccgcccgccgcggcgatgcggacccggttgtccgggttgtgcttggccagcagccggagctccatcgccgcgcggcggagcgagtccagcgactgcgacgggcattccagctcggccacgagcgaggagattgcgtcctccgacgcctcggccgcgcaggagagcagcaggcggtggatgcccgcggcggc

SEQ ID NO: 285852 - DNA, 477 bp, Zea mays
tgaaattacaacagcaagaatcagcagtggaacaacagcaagggggagaggaaaagctccccgaaaatctcctcctctactttgagcaaatcctccacgatgacccactcatagttccattgcgcaagatacttctggtgcagagaccacaagcttgccatctccgccgagatcctccccgagctttaccatgctgctcgggatgcctactacaacgcaagggatgccccactatcgcgcactaatctcatgaggcacaccaaggcactgctcatactttgtcctgacctactcactgcatggaactccatgaaaatggtgctatcagcgttgtatgatttcacaaagctcaaggcttgaactgcaattgtgagccttgatcctttcctactctccaaagaacgagagcacatggagccataggagatgtgtgataaaacaagttgctgagcaacatcaagatatgttggagcttat

SEQ ID NO: 285853 - DNA, 622 bp, Zea mays
attcactaccgccggcgccggatccaataggaggaggaggaagatgactgtgggcatgatcaacgcaaacccggtggtgcacgagcggccggagcgcgcctcgcacccccacgccgccgatgtgctcgaccctctcgatgtctttgatacggtgcgggacgtcaaggacccggagcacccgtactccctggagcagctcagcgtgctgtcggaggagtccgtctccgttgacgagacgctcggacgcatccagataaccttcacttccaactgtgcagcactgcagtatggccacagtcattggcctgtgcctccgacttaagttgatgcagaacttccctccacatttcaaggttgacatcaaagttgctccaggatctcttgctaatgaagaatcagtaaacaagcaactgaacgacaaggagagggttgcagcagccttggagaaccccaacctacgccagctggtcgatgaatgcttatgctttaatgatccatactcacgttaacttgttccatgctgcttcacaagtcgcaaccctgcctgctgtacagtagtaaccatgcatgctgtactctgccctatatgttgacgctgtcgttgtacctggcaacgtgtaat

SEQ ID NO: 285854 - DNA, 693 bp, Zea mays
agctgcagaacagtcgtgcttcaactctctaacaaagtaggcttcttatgacataaaccctcacagcacaacccaaggtctcataggtttcatggcaaccctacatgctaacaacatcacctaacaacgtacgcgtaccatcccgggctcccggcctacaagacgtttaagaacatggtccttgcttctatgcaacattcataacgcaaagaaaagaacggacgacgactgctaaaacctagtgctccttgagcatctcactgagcaaagggccgggcagctactactacacagcggctgacttggtggtgctccttgctgcggccctcttgggatgctccagctggcaaggcaaaatggcgctgtcggatgagtccgagctgctgcgctccccagcctgccctttgttgcctgacatcgtcgtcctcccgaccgccttcttcggcatcacgccacctttcgccctgccgttggcacccttgttgccgccgtggttcttctccgagacggtgctagctgcgtcacatttctctagcttcgtcgtcttggacgacagactgaggtcttccacggccatgacgccgtcccactcgtcttctgtgtctgttgtggcccctgtccttgagctctcgtaggagccgatgccgatgctgtcagctcggacggtggctgctgcagaagccctcgtctgct

SEQ ID NO: 285855 - DNA, 292 bp, Zea mays
gagtgtaaatgatgacaggtcacatgggtgtaaatgatggtacaatgcatttgatacagttgcacgacgaatccccatacgaaattagggatcacgccaatctctcttggcctgcttcacatccctgtaactgtaaggaatcgtctattacagggtacacacaaccatactgcaccggtactgaatccccgacacataccgtcctaaaagtctgcaggtacatcaatgtatcaggtgttcatggacacacacacactgaaccatgccgggggggtttgttcatgctgtcccg

SEQ ID NO: 285856 - DNA, 330 bp, Zea mays
ggaacaaaggcacaacaataacatataatcatataacagtagtattttgcagtaggggtcaaagccatacaaggccacaagcaaaacacacgcacacacgtctctttctctctatccataggaggacccagcttgggatcttgcagcagtagcagtaaaaatagcttacagacaactgccatggccatgtgctctttttcctgtcactgggccgccctagcatacaaatgtccgcgtcaggctgtagctgtactggtattacatgtgacctgtggctgtcgctgtggctggtaccagaactgtggattaacctcacatttggtaaaccta

SEQ ID NO: 285857 - DNA, 397 bp, Zea mays
attattgacgtcgagcgcggttcagtataatatttcatatattaccagtacatcaccaccatccatcacgtctaagtttaagattcagcaaacaaaaaggaagtacactgacgtatctcaatttcgcaagatggtatgggtaccagaaaacaaaacaaaatgttactagcttgctaaatgtctcgctaccgctgatgttctggatcgaaaaactcggttaatcggcgaagttgcccctccctcgccccacgacttgctccaggtcctcaaaccctgatttgagcagggacttctctcgagcgaggctctcgatcctggatttcagatcttcaatgttctgccgcatcgtgaggatctcagcttcgagcgcgaacttctcctcggaaatcttctcggc

SEQ ID NO: 285858 - DNA, 1191 bp, Zea mays
gacaactcgggcgggacacgggagacagccatggcgacgggcggccaggggaaggccgcgggctactaccagtacccgacatcgtacgccggtgctgcggacgaggagcgccggtggtggccgtggctcgtgcccaccgtgctcgtcgcctgcatcgcggtcttcgccgccgagatgttcgtcaacgactgcccgcgccacgggagcacgctcggcggcggcgccgggtgcgtggcggccggtctcctccgccggttctccttccagccgctccgcgagaacccgctcttcgggccttcctccgccaccttggagaagatgggagctctcaactgggccaaagtagttcatgagcaccaagggtggcgcctcattagctgtatctggctccatgctggcctagttcacttggttgtcaacatgctaagcttgctcttcattggaatccgccttgagcaacaatttgggtttgtgcgcattggtgtcatctacttgatatctggctttgggggcagtgtgttgtctgcacttttcttacacagtaactacgtctctgttggtgcctctggggctttgtttggcctccttggatctatgctttcagagcttattataaattggactatctattccaacaaggcagcggcaatcataactctactttttataattgtaattaatctggccattgggatattacctcatgctgataattttgcccacattggtggatttgcttctgggttgcttattggatttgtgctgctggcaagacctcaatttggttggatggaacgcagcgagctacctcagactaatcaacctccaaagtacagatcgtaccagtatggcttgtgggttgctgcactcctcttgctggtagttgggtttgccattatcttggtcatgctcttcaaaggtaagaatgggatcgccagctcccactggtgccattacctgaactgcgtaccaacgtccagatggaagtgcgatacctgaattccgcgaactatatgctccactagtgttcgtgtgtttgtggaaatgttcgaccaaatgttccacttgaccatcctgcgcttcttttgcccggattctccctggttccatgaaatacaaatgttccagaattgtagcacgagcttataactgttgatttcggcataattgatgtattcatctcaccaaaaa

SEQ ID NO: 285859 - DNA, 534 bp, Zea mays
ggacgcgtggcggacgcgtgggctagaactagtcggacgcgtgggcggacgcgtgggcggctccgctgattcgcgactcctactccggctctccgcacaggactccaaccgcctcgccgttgcatcgccgcgggcgtcaacctaggctgctgccggtaccggtgcgtccccagccatggctcggccgccgcaggaggcgatcgacaccttcgtcagcatcaccggcgccgacgaggtcaccgcagtccgcgtgctcgaggaacatggtcatgatctaaatgaagctgtgaatgcttattttaatgaaggagataggaccaccaccagaatcaatcagaatcctgtgcctgccactgccagttatgatgacatgatggagctggatgaaccacttgatcccatgttcaacagacctttgttccctagaactttgggcaacccttttgcccttttggatccaggttttgctgacataactgctggtgatatatttggacgtggaccccgagttacacaacctagggacgtgaggca

SEQ ID NO: 285860 - DNA, 638 bp, Zea mays
ggcttcaaaagagattcatataaaaactatttcattcaatatcatagtttgcactgatatattggaaaatattatcaatatcacacaaattagttacagacaaatgtgtcgacaactgttcactaatcagctaatcctttctagcgatatcgacaagtctttgttgtatgtttgcagggatggcatatcggcacgaattgtcctcataacttaaaagatcaatcacaaagtttcttcgaagagtttttgcatccccaacaaatttcagtcgtctgtcattcccccacatggccatagcttgtagaacgaggtagctggtattaaaccctcttaagtcaattggaacaccagtctgaattgtatgttcccacttaaagatatcctccgcccatccagaacgtttcttgctgtaagcaatcttatatttctttgaggccatgataatagcttccgcaaacctcttgtatggcatgtgtttacaccaatcttgagtcggtgtaaagtcgataaaagtcacatgcttttaacatgatctattacgaaaagggcgtgacattcgttgaattttcatggcataagaacatatttacaacccgtgatataataattcattgatggccaacaatcgagtgttttgg

SEQ ID NO: 285861 - DNA, 353 bp, Zea mays
aaaattaaaagcgagccgtctcttctttagataactacttacatggtaataattgcatcatcatgtttattagtagtagcaggggaatgaagagaacatcaaagggaaattaagcgcagcagccatgaccatggacactgaaatcgagcttaattctgattattacgacatgctctgccgtgcagcgtactagtatatatgcgagtatgtacagccagcgtgcacgccgccgatgcggagagtccatcggcggtcgcgtcgtgcgtgctctgccccgacgcagtggccggtcaggagaggtaggtgccgcagacgccggcccccgcgccgcagccgccgcagccgcagccccg

SEQ ID NO: 285862 - DNA, 410 bp, Zea mays
agaaactaaaatttgacatatttaagcagcaggattcacatggcattcatcaagataatttgcttcagttcccactgacagatatgtcactcgtctacacgcacatcgaataaaatacaacaaattacaatcgctatttcgtacatccaaaaaaaaaatcctgggtgcaaacccatgcttggtcaaaattgtttgttgcccagcgcatcaaatttcattgggatttgtggatatctgaatactcataccttactcctcttggtacctttcttttcagcttcccagtctcgcctcagcttgaattgccatttcctttttgtcttcttgccactcacctgattcttctcttgaacacccgagaagctcacagggccagattttttagttttaacagaatctatcttcctttt

SEQ ID NO: 285863 - DNA, 466 bp, Zea mays
ttttgtaaagaatacatttggcagtttgatggggagacttacagaagaagcgtacaaaaccaaaattaactgatccgtggcaacaaaatcccactggcaatgaggatccaaaagatcaaatacaccaaaacgatcgggaaaggacaatcatcaatgacctatatgattctaattttctataaacaactttggttctcttgatacacaccgtccatccaaatcttccagtaagctttccgttctccggtcccatatgttttcttccaccaataaccagtatcagtagaggatgagaacctggcaagagcatatgatgatgattggtcacaggtaatgatcaatcaacatacttagtatctccccccatttggtggtgccggtggcaaccggttaggtgtgcgtcggctgccagagttggcatccccgttttcatggcgccggcctcgactgtcagcactttttgacc

SEQ ID NO: 285864 - DNA, 473 bp, Zea mays
gagtgggaataactgaaccatatttcattatattgcaatgcaaaacataatacatgtatagagggaactatagatcattggtgagatgaactttttcctaatgacccccaacttttctattggatcacaaaactgaatcgacaaaatttcctcgattaatcctcttggcagttgacaagccaccatgtattcgttttactgggatgttgtcagaaggatattcagtgtagctgttaacaaatccctgcgtcgcctctggagtcctggcattacctttgagggacagtattcaaactgcgctccaggtcagggcttgctttttattccttcttggtatggaaaaaagaatttcaattccgacagagttccaccatttgtaactatatggaagctgaaattcactgggaacagttatgccaaagtggacaaggttgttcgagtcatctaattccttcagctacaacaaaggtcca

SEQ ID NO: 285865 - DNA, 178 bp, Zea mays
ggcgaaaatacgccctgggctatgtgatggaggcacagacagtcttccatcttggttttacatcccagatttcaccatattcggctgctcaacaaatgtgcatggcaaacattcatctggcttacatcccagattttatctctgggctcctctggtttggtcatatgggctgggggga

SEQ ID NO: 285866 - DNA, 217 bp, Zea mays
cccacgcttccgggttctttctctcactttgtaatcgatcagctgcaatgaagtgggtagagtgggtagccgctgtcgaggatcgccatcgagagggcgacggccgcgctctcgacggttcggccagcatcagtgctcaccccacggttcttggcctcaaggtttacctcctctgccctccctcaccttatcttcttcggtatgcacttgtgttgtg

SEQ ID NO: 285867 - DNA, 285 bp, Zea mays
gtttcttccatcccatccgttccagctgacggtgcccgggttccatgcccagcggccagcgccttgtgacctgatccgcggctcgtccattcctccctccgtgaatggctcctccagcagggtctggggcagcgacggagggagggccggctcggcggcgcggcaccggcaccggtaccagccccggccgctccaaagtgtgggtcgagccgccgggcaagatccaccaccagatcccggcgctgtctctgctcccgctctctcccccggtcccgtcggtggcgg

SEQ ID NO: 285868 - DNA, 466 bp, Zea mays
ctatgtatttttgtgatgtattcttgtacagccaagcacttgaaggtattacattgtccatgattctcgaacctccttctgaggaggaagtttcactgcttttggaaatattcagcatatgccttactggagggaaagaagtgaacaacgaaatcatgagtaatgtacaagacttggccaaggcattttcagaatacaaagatgaagtcctggtgaaacgtgaagagctgcttgagtatgcccaaagtatcatttcaggactgaagagaaatgctgacattgtgaggatagatgctgaaaccctagaattgcagagaaaactagacgagaagcagaaatcacgaggtcaatcacctgaatatcaagataaaacgtcagataagattgctgctgcaaatcttgaggtcttcaaagaagcacttggtgaactccgcttatgctctagagttgaagaacttctgctgaa

SEQ ID NO: 285869 - DNA, 480 bp, Zea mays
cgaacacaagtgcagcatcttatgcagatagatttgaagggctggggggttggttatgtaccttcatttcagcagcattgcctacttcatatgctggacagtgttgctgggctcagggaatggttttcacaaagtgatgagagtcaagtgcttcctaggattcctgttatggtcaacatgactcaatctgtttcttccaagaaaggcagaaaagcacaagagagtactacacaaaccggcattcagatggatccaagcagacattccacagttcttgaggaggagtctgatgaagatgacgaatttctgatacctgaatctgaaccagagccatcaaatcttgaggatgctgcagatgttaggaagtcagggcgcaatgaagaggattcagatctgattgatttatctgggttttctgggaatttacgtcgggatgaccgtgatagcagtcgtgactgctggagaatgtctgatggaaat

SEQ ID NO: 285870 - DNA, 508 bp, Zea mays
ggcgacatgacagaggtggaagctgcagacattccggacaaagcgggtaacgggaagaaaggattgtgggtcttggtcccttgtgatacagctggagctaatttggaggaaattagtgggattgatgatgaaaattatgtcatagtaaatgaagacgatatagtcgatggtattgccgcctttgttgctaggtgcattcttgaagatccaaaatccaagtcgtttgttggatttaacttgtaagcagctgttgcaaaggcattagatagcatgaaagctcgatggagatggtcaaccttttgggaggctggacagattatatatatcttggctacttggggcatcacattagcaggggttgtacaagagccgccatgtcctgaaggtggcagcaaagggtgctgctgtgtctgccagatttgttatgaaggccatttgagtgtaagaggcactcatgtgggatcagcaatttgcaaaatgtaaatacaaaactcgtcccgtcagttgt

SEQ ID NO: 285871 - DNA, 524 bp, Zea mays
attcctctccactgcgctgccatcgtctcgcgccggccccccgtggggaactagaactgactccctcgatcccagcggcagcggcggaagcgaacggtgaccgcgacctcccctgaggctgcatatactcggatcgggtttcacatctccggttttggattggttggttgcccgcggcgatgggaggagagctgtggtggtatccataggggatcctcggttgcgtccttgtgcgatggcttcgacctccgttcctgagttaaccgcggacaagaaatgcgacaaagccatcgcggatacggcggcaccacttacttctcagggacactccgaagaaccgactgggaaagtcagcacactagtgcctgctttgccggttgtaattgcagcaggcgatggggctgcatccagtggggtgatagaaaacagaaatggcatggacaattctgctgatggttctttgaagcgggatgacagtgaaggtgctgagaagagctcgctgcgggggagcgtcaggatagctc

SEQ ID NO: 285872 - DNA, 448 bp, Zea mays
cccacgcgtccgaagggaccttcatggctgtcggtttccaagtttgtgacacggccatccactcagcgggtcagctggtgtctctgtgaagtgacagttgattgcccataggatatatctgtgttgactacaagtacaaatctagaagttcctactgttgtagttggagcagttaatctcaaaactatcataaatgagaaacacaatgtgcatgagattgtgtcggcatctctcatatgttgtcatcgggtgaagattgatagtccaatgcgtccagaagattggcagaaacggggaatgctcagccattttactgttgtgcgcaaacttgaaggtagcatatttcctataggtcttgctaaggaagcttctgataggaaccagaaagctggtagcaacgtgctagcactagaaagcagtgaacgtgcattattaaatcgcttgatga

SEQ ID NO: 285873 - DNA, 403 bp, Zea mays
ttgcgaccttccgcctcttcccgcgcgccggcgccgccgaccccaacgaccgcgtgttcgtacgcgtcgacaacaacgactacactgtccccgggttcgccgacgaggactccttcgacccatcccggtccgacccttccgccggcaatggaaacttcggctccgcatccggccccctcccggagcacgtccgccgcgagatccttgagctcggcctccctgacgacggttacaactacctctgccacctccgcgagctccgtcccggcgccgccgcagcctcatccttcgtccccagctccaccggtcgcccggagcccctcccgctcgatgtcaaggcttatgatgcaagcagggtacgcattggtctcagcgagggtgaactggacgaggggaagacgat

SEQ ID NO: 285874 - DNA, 334 bp, Zea mays
ggggcacaacgatttggctgcatggatatatttaaatcttgggccctttgttctataccccatcacaattattccttcgagtttattacaaataaacctaccacacgaatcatcatatggggaattatgcaatgtttaacaccgaaaaagaccttataggtccacatgcaatccatttgatgagattctgagatccaacaacaaaaaaaagaggggcgtgtagaggtaaatgagtatcctatacaaaactgtaagtgcactgctagttcataacttcctggactgctgcagggttccacttataagcagctgcatctggccgatcagatatgag

SEQ ID NO: 285875 - DNA, 317 bp, Zea mays
ccaaatcggggctgtctataagcaacagggtacaatattcaactaccataattacaaacggcatttctgggttctttgttttcatctggagtgcaacgatgttccacggttctgaaatctgccaactatgcaggatgacaaaacttcaaataaacgataactgaatctacaacgacgacctgagaagttctcaactctcagggtcagtgaagtaaacggggctttctagatcatcgttcttcgcagaagcgaatgagtcttctgatcctactgtcgatgcacctgagctctcctcagaatctgagacctcaccatgc

SEQ ID NO: 285876 - DNA, 539 bp, Zea mays
cataagaggcttgcgtctaaaatatcgatactagtgtgggtgtggccaaatatttacattaccctagtttgatggattaaaaaccccgtacagaaacccccgtatataccctgtgagaccatatatactgccatctacaaaccttccatgctccacgctttacgatgctacgacaaatcaggtcctccacagaatgcatcgggctcaaacgaccttgcagcagcgtcgctgtacactcccgggatagaccttccacctgtatttccataaggttcctttggggtttccgtgttcacgtacagaagaatgcaaaggatcagggagcctgccagacccaccaaggtgaacttcaccctgtttagcacaggcttgacagaaaatgagcctagaagccgatcacgagctaaaacttctggagttgtaacccatatctggccatcataccatcccgtttcctcatactgcactgtggcgctgagcagtcggttgccgacgtaggcccacccgaggtacatccgcacgacagcgagcgtgacggc

SEQ ID NO: 285877 - DNA, 340 bp, Zea mays
atgtatagtttggatcacaagatgggttacgaaacctttctacgtgacaatataatacacatttgaacataggttatcgtgtattatatattcccgttgtaacgcatggacatttaactagtttacgaagaagaaatgaaatgcttgtgaggcgcaccgaagttacaacgtcgcgacataaagagtaaaagcaagaagaataaatacatgcttcatctgccgctcaagctcaagcagcagccgtcggtagccgtagtgtggcggcggaaggcgcaccggcgccgttgctgccggtagtgacggcgatggggccaggcccgccgcccgcgagtatggacct

SEQ ID NO: 285878 - DNA, 279 bp, Zea mays
gtcttccggacgctgcgcaagtgttcaaggtggatgctggtgactatatgttatcgctatgtggaaatgaggctctcagagagctttcatctcctggtaagagtggaagctttttctacctgacaaacgatgatcggtacatgataaagacgatgaagaaatctgaagtgaagatgcttctgaagatgctcccagcttattacaatcatgtccgggcatttgagaatactctagtaaccaagttttttggtctacactgtgtcaagttagctggagcaa

SEQ ID NO: 285879 - DNA, 592 bp, Zea mays
gctaaccaggatgctctaggccttcttccatgttttcctgatgcttctcctgccatgctacggcacttctcaccttaccctgtctcctatgtgccaagaagtcctctgccggttactgttcacaatgttcatgagagaaggcatgaccatactgaaacagttgagcttcctgatgctgtggtgttctcccaatgcacgaccctagattcctttaggacatcagaatgtggcggtccaccactcaaggttcaagaaccaaccaaaaatcggaaagaaggctgtattgggtcccctgagaaagaacttgacactctcgccctctcaagctctgccgcacaagcgtcgtcgcaaaagttggaagcaaatgaaggtaagcaaacagtgcaggcaggtttgaagcaggcccatgaacagcagctgatgtcatcctcgtcttgtgttagttcttcagttgtggcacagagctcgcattacgctagctccatccagcatgaggagtctatacatagaaggaatcctcctcctcatactagttcgcctgcattgcctgatgtgtggtcttcccgctcgcaagctctgcccagatttggat

SEQ ID NO: 285880 - DNA, 443 bp, Zea mays
agaaataccattttaggcttcatctgctattctccttcacgctaatggctgtggccctgagtgtcacataccagttgcatcgaatgttcttcactgttctattggcgctacttgtttttgtctcaatcgtttgcccttactggcttataaggattcaggaatacaagtttgagatcaatggcccctgggatgaagcaaaactctgctttgatataactgaatagcagtgctaagttttctttaggaatgatttgcattgaagattggtttggttgtatatactggcatataggctcgctgcgagccttcatggcataaggtgttttcatgtgaatgtatatgctatttaatggatttattgtgttaccgagactaattcttggcatgctcccacatgcctaatgatctctaagtctggtgtcttacttaaaaaaaaaaagaaa

SEQ ID NO: 285881 - DNA, 300 bp, Zea mays
cctctttcttctagtttcgtctagtcttcaaggaagaccggaaccgagccgccctgcccgaggacttgagccaccggacgcacggctgctgccgaaatccacgggagaatgacgatggccgaggccgaggctggtagggcggcgatccggcgcgccctgcggtcgctgaaacggaggcatctcgccgaggaaggggcgcacagcccggccatcgaggcgctaacccgtcccttcgccgcccacgctttggagtggaaggagaaggctgaaaagcatgagttagagctgcagcaatgctac

SEQ ID NO: 285882 - DNA, 575 bp, Zea mays
ggccatcgggcgcgcgggcgcgcgcacgacgactacgggttctcggcggagatacagacgctggggcgcatcaggcaccgccacatcgtgcggctgctcggcttcgcggccaaccgggagaccaacctgctggtgtacgagtacatgccgaacggcagcctcggcgcaggtgctccacggcaagaagggcggccacctgcagtgggcgacgcggttcaagatcgccgtggaggcggccaagggcctctgctacctgcaccacgactgctcgccgccgatcctgcaccgcgacgtcaagtccaacaacatcctgctggacgcgcgcatggaggcccacgtggcggacttcgggctggccaagttcctgggcggcagcggcgcctccgagtgcatgtccgccgtcgcaggatcatacggctacatcgcaccagagtacgcgtacacgctcaaggtggacgagaagagtgacgtgtacagcttcggcgtggtcctgctggagctcatcacggggctgaagccggatggtggagcacctcgtcgacgacgcggtggacctggtgcagtgggcgcgcgcc

SEQ ID NO: 285883 - DNA, 485 bp, Zea mays
caattcgcaaactacacgaatcgtgattatggaaacactggaaagggatcgttgaggcttcagctgataaatcagagagagggtttctcttttgcattgttctctggaggcctgtcgaatccgaagctcatcgcccactcaaagagtgttactttcatcaacccaaagactccggtgtacccgcggttagcacaaggaaaatcctggaacgaaataacagtgacatggacaagtggctatggtaccaatgaggctacaccgtttgtcagatggggcatagaaggcccactcccaacccttcctcctgcaggcacccttactttcagtcgcgacacctggtgtggtcctcctgcaaggacagttggtggccgtgatcctggtttcatacacacaagttttctcaaggacttatggcccaatctcttgtacacataccaagttggtcatcgcatttttaatggttctatagtttggggacatcagta

SEQ ID NO: 285884 - DNA, 445 bp, Zea mays
ttttactcagccatacaggggctgttttatgcgctccatctggggaaacggaatcggaagcattgtttacaaatattctttgtacaagcatgaccacaacactttctgcagtagcagccttcagctcgtttttagcagctcatcccaaaaaacaagtgtctaaattgaaattgttgacaaagcagcaaaatacaccttactatcacaattaatctagctaagcagtatgtagacccacttccctctaactaacatgacaatgtagtttatttacaggccataacactgtcgcccgtccaagggaactcaatccgacgcgatggggcggtgaggggatagggtggccccatcgaggtgcggatccgagcacgaccaccaatcgagtggccgcccgatgtcaaccacgttgttcttcgtcatcgtcgctttttctcaccccaggtca

SEQ ID NO: 285885 - DNA, 405 bp, Zea mays
agcaggcgggttcattccacggactctgttatctaacattcagttttgacagatcagcaaataaaaccgttcaaggcatatacataagacacaactctggatcaggctctctggaacctagtgtgactgtgtgaggcacaagggccatcacatggtacattacacagggcaaaaaaaagtttcaccaacgtacagtttacagggtactccatctaaatattggccacgctaactagttatcagtcgaaatgttgtcgaagagccatctcggtttcgctcttccaggacgcatgcgacgattggcccctcatcctcttgatcttctccttgtctttgacaggggaacccttcttcttttcgggctcttttgtcagcgccggtctatcaccacattgagggcaaacc

SEQ ID NO: 285886 - DNA, 367 bp, Zea mays
ggcagcagttgttttatatcttaactgattgagttaagcgcaagctgaaacatcacatccggatactacctactaaaaggacagaggggaaacagggctgtgcaaatgccatcaatcaggaaggtgatggccagagaaccattatactgaaagcttctgtggctcatggctagcagaactgaatctggcatgcataagcaggggcgtacagacggttagattcggccatgtcactctcctcgccttccactcctaaaaactgagacgtctttccactcgaacagtttctttcagacagcaacttttttttggataaagccttttcgagcctctcctcaaatggcgttgcatgccaactcaccttttg

SEQ ID NO: 285887 - DNA, 396 bp, Zea mays
gcatataaaattgctgggagtgttaaattgttgtacgtagttctcaactttcacgtacaataataaaacgaacacgacggcaagatgagtccaacaaggcagcaaacaacaaaacaatatattcaccgcctgaaggcattgccctcggcatcacgcccaccctgcgagtagaaagcgcggcgcctgatgctctcttcaatcgtggcactgccacccttatctgttccaaatatgctcttcttttcatcttccaagaagttcttccctttgaactggtttgcattccacagttgttgcctctttagcactcgtcgtctgcagctttcttgagcatcttccatctctgctcctcgtggacctcagcgtcagcctgcatctgtgcagacgagctaaccg

SEQ ID NO: 285888 - DNA, 375 bp, Zea mays
tctttttttttttttttttgatcttcacgcagagattgcgaactcacttagcaaaggatgctgaattctacatctcccacgatcagcctgttttattagtaaccaaagcaattacattattgaactaagcgagagatctttgaaaccagagccagacgagttattatttgtatatgagggcgtcgcgtccaggcccgacaccaatgtagtgtactggaatgccgaccagttcctctatcctctccacgtagcgacgagctgtttctgggagagcactgtaatctcgtattgacgaaatgtcttcctcccatccaggcagggcctaatatttgacctttacttgctccaaaaagaaagatctgctgggaatgattg

SEQ ID NO: 285889 - DNA, 399 bp, Zea mays
ccgcggctatgtctggcacggtgggcgtggggctcgcggccaagaaccccaagttgatgcacgagggcgcgcacgacctcaacctggcgttccctcaccacaacggccgcgctctgcagccaccggagttcccgtcgtcgttcccgagcctggagagcagcagcgtgtgctaccccggacccgccatgctgggcaacggcgccgccggcaggggcatgggcgcgctctcggctttggagctgctcaggagcaccggctgctacgtccccctgcagcacgttcagctagggatgcccgccgagtacgcagcacccgcgggattcacgcttggcgagttccgcattcccccgccgccgcagtctcagagtgtgctcgggttctcgctggacacgcacggca

SEQ ID NO: 285890 - DNA, 478 bp, Zea mays
  unsure (1)..(478): unsure at all n locations
tttnanttannttttttttgtttttttttcaaagggggggataagcagcagggggtttccattgatcccatattagcgtaaacactatacaactctccagagcacccaccgaacaacaaactccccagaaacttattaagcgatgcgtctctcggtcatgcgatgcagctcaggcccaggcaccctcccagcagattcctcaggagcttcttctgcaacacaaacaaaagagcatgagaacaaaactctcacctaaaatctttctggagtttacagtccagctttattgctcatgatctttggcaaagctccacttgctgggaaaaatgaagtgcttaagcttttgaagaaaggtcacagcatatatgggcaaagtatagctgttctatctagggttgttatcctaacaaaagctacttgcaaagggtcagcttaggctagataaaggcttatgccaatcacatgacgagaactagat

SEQ ID NO: 285891 - DNA, 494 bp, Zea mays
  unsure (1)..(494): unsure at all n locations
tttnttttttttttttttttttttttttttttttttttttcagggccgataagaatgaattacattattatacgaaaaagtgtgggttggggagcaaagactctttcattgaccgtgttctatttctgtacaactagtaaaatcgatgctatgcactatgaacaacaatctgctgaggcacaggatctgctgataacatcaatagctcaagaaagcaaatttttatatgctcaagaaggctgtgcccctgtatgaagctaccaaaatcagcttactcataccatgcatgaagtacatttctcatacggtatcgagtatagaccatctttgtacacgtggagactgcagccactgcaactaaaagcaccagcaacgtttctcacaggaagatcatgacgcagcttgggcagcaccaagtttgttagctcctttgtccagtttcttttttgacaccttttgggatgcttccccttcttggttcttcactgactgtg

SEQ ID NO: 285892 - DNA, 481 bp, Zea mays
  unsure (1)..(481): unsure at all n locations
tttttcnttcnntttttatgcatcttccactttgtggtgcgatctgttgaatcacattgctgcgcatcaatgcagtttcacaggttcttgcaccggcttcttgggttacaatgcgatattgtcagttctgggagaggatttataacatcatgccgcatcgcctacctgaaggccggaggcacgacaaagctagagatcaaactattcagctacaagtgaattttttcagccgacaccctacgggggaagttcttgcggcttcctcctcccacggacaccactgggagtgtgctaaatgaggttatagctaaagatcacatgcaatgaaaagaaggcgctagttgccagcgccgccatgctcttcctgcgactactaaaatgctgcatcaattacgtagactgcacagcagctgcagctgccgccgccacggcaagcttcttgctacctgggctcttgtcgtcaaccttcttggcgccttcg

SEQ ID NO: 285893 - DNA, 574 bp, Zea mays
ggaataaaacaccaacggttgcctgggttgaacagcaactaaaatcaggccaggcctcctgacagagtcacaataaaattagcgctacaaaattctagccatctcaactacagacagaatctacaaatctttggtgagaacgcacaagggcgcatgtcttacatccgcgcttctcgcagtttcgtccctcgtattacagggctacagaaaaagcaagaacaatgtctacactcataagaacttccacagatgaaattcaaggattcgaatctactacagctatgcctacccggagccagccacagggggcctttcctgctttctatcagcgtgtggcagtttttttattctttcttccagatgtgttcagcttaaccgagcagggattccagtttccaccaacaggaacagctggatcaaatcaaaagagaacagggtccgcttcgaactgactcagacgtatgaataccgaaacataagtgccttcacaaagcagaaacccagactgccctacttctcggtttgttgcgtggagaccaagcacatggcatgggaggctcctattgcaacggag

SEQ ID NO: 285894 - DNA, 332 bp, Zea mays
gattgcatctaaaagtgaaattgatattagcgaaacggagctacactccactcctgccaagaaaaactgtttatagcgccttccccaaatgattctgggaccgactgcacaacttgtgcaataaaccactggaggtcctgaccttcgttaggctacaataaacatattttgtttacagtgttcaaattctagatcacgagtcagcagaggtttacctccccgattgctgactacagccatagaattcatagccaggcaacaaggtaggatggttagaaaaatcagcacccaaaattagccaacaccatctatgtgcaccaacactaacacct

SEQ ID NO: 285895 - DNA, 340 bp, Zea mays
cccatcatcacccccccacgatcctcttttttcattttcctacaatagggggatattttttttccatacagagataagttaaggctttctccatgcgccatatgttacagaaaaccagcagaaagccgatccaaaagcatgctacaaattttagctgacccgacaattcgccaagtgggcatacgaagcacattgttttgtaaataaggacacttaaggcccattggtgatcggcacagaggggcgacacgatccaggaggttaaagtaaactgcaactactggctgttcctaagctgcttgctgatgtgacctgagactatggttgcttcaggtaccct

SEQ ID NO: 285896 - DNA, 538 bp, Zea mays
gcagacgacgaagcactgggagacttttccgtgcaaaaccggtcgccggaggccggcaatacagaagcaaatggtagcagcaaggcgaggagaaagaaagaaatggggaagaacggagctccagggctccatgatttccaggggagcttacgttacgtagtagctaacgatacagctcttccacgacgtattctacagctaacagcaaccttaatagtacagaaaagctagaacactgagactgggtcctctcctctccacctcccatcgtggcggtcggggcagctggtcagtacagcactcactgcagaggcgcctgcaccgtcaccacgatcgggctacggacgacgtgccgcccgtcgctccacgtcagcgcgccgctccgcaccagcgagctcccgggctccatcctccctccgagcgccggctccacccgcaccgtgaagctcagccgatgcccgtcgcgccggaacgccagccgccgcgggtgcaccgtcacgttgcacccctcgggggccgtgaccgacgcgcggtacac

SEQ ID NO: 285897 - DNA, 424 bp, Zea mays
accagcgcaagcaaaccagaacaatagaaggtaccaacaatattttatattgggcgactgaggcagcatcagttttatagttaactatatcttaaacaggtgaggtaagcacaaactgaaacatcacatccggatgctacctactctaggacagaggaaaacagggctgtgcaaatgcaatcaatcaggagggtgatagcagaaaaccattgtactgaaagcttctgtgcctcgtggctagcagaattgtcatgcataagcagtagcatatagacggttagatccagcagtatcactctcctcgccttccactcctaaaaactgagatgtttctccactcgagcagttcctttcagagagcgacttctcttcagataaagccttctcaagcctctcctcaaatggtgttgcatgccagctcacc

SEQ ID NO: 285898 - DNA, 427 bp, Zea mays
  unsure (1)..(427): unsure at all n locations
ctcctcnccttttttttttttttagaaggtggaatcgacatttcgaatctgaaagtttcgaagaaaacaattgttgtggctcctcaaaaaaaaaaaagtaacagtttctgaaatataatgtaaaggattgctaagccataccaccagcgaaaacttgaacacatttgttaagggagtaaataaatttctaagtctctttgcactcacaggtctaccacaacagtggtggtgtcttgtaacattgcagcacgccactagcgaaccttgtgggtggagtaacactacagatgaatttcacaattgctggatcccatcaaactcagtatgttcatacaacaggcaacataagcccaccacaaacatcaaccttgaggaattcaaaacccttgggtggaaccaccagaggatttcttttctttcctcaagt

SEQ ID NO: 285899 - DNA, 364 bp, Zea mays
ctaaccatggcacaacttgcttagcatacatatgtggtgcagcctgatattacatacatgagcgactagctgaagaaagttcataattaataaaattcctgtcgagctccctggtcacccaggatcgcaaggaggatctatttgttggaaaacacagattgtagcgtattaagagctcacagttatctaacaataaaataacagatctaatttaacaatgtcgtccaaaagtatagggtaccctttcttgcaaacttactttgatcgcagggttcagatgattcgtcagcaaggtggatcgtgcatcagagacatgagctgcattcagtaattcacatggtcacatgggcaaaatgggtgcccc

SEQ ID NO: 285900 - DNA, 688 bp, Zea mays
aatcacaccaaacataacgttctcatctgttaagttcaaacacatcttcacataggaattgggtgttattgcatatttctacagaaatagcaggaatagtagctaattaaacaagcctctgccgagaacggtaatattgcaattgtacagttgcagtcgatcactttctggtttacaacctatagtatgatctgactggtttcctcttaatttcttcataaaacatctatcaaggcagtttagcgagtcgtggcccaaagcgcctaccgagaaactgaagctacagctcgctgcctcgctttaaagaacactgggcggtctgaactacctcagttgcatcagcaatcaagaacgagaagggccgtagcaactcggttactccttgatggcatctcccagctcttctttaaccgtgccagtttgttcatcctgaatttctttgtatgttccagtttgctcatcgtatgaataccaggttcccgtagatgcagaaccataatatccagagttagggtcatagtaatagcctgtgctgctgctatagtagtaacctgaagaaggatcgtatacatagtctgagtccacacttccattatcggctttcttcacatctgaggttccaggtttcaaacctgaacctacagtattggcatcagaactatgtttggtatcatcgttgtcatcatca

SEQ ID NO: 285901 - DNA, 294 bp, Zea mays
ggtgggaaccgaaagtacttggataacgctgataacgacaccggtacatcacaggcacacacatctcctgcttgttcttattacaggcacgagcatgacgttgccaggactttccctcccggccgccgcccttgtatcagcagtgtgggctggcagcgtcgcgtcgcgtgggcgtggcgcggttcaggcgacggggggcggcttctcgacgtcctcgagcgggcggaaccacaccttttggtccagcaccgtgcctcctgctgcagccgcattcgcgggggcagcgtcagcggc

SEQ ID NO: 285902 - DNA, 485 bp, Zea mays
  unsure (1)..(485): unsure at all n locations
ttttntttttttttttttctccctgaaattctccggggatttgttcccacaccaacggtacctacagagcaacatcaagtttcagtgcttgccaattggagctagcagatgtcgccctaatgagcagtttatcctctggactggacatcttatatgctagcagatggtatcctgaattgttagcattcaaattatgtactgtgaatcctgtgaatttcaatgctaatcctgaaaggttgaacgacaaagtaaaatgactctttctccagatgacatccgatgtggtttgaccacccccccaactgaatcattacattgggcacgccgataagcatgttcgcctcaattattcggttgcctccgctcacagtccattcaagcatcaagcagccctaacaaactcctttacttacagggtcctaaccttttagctacagtacagactggggcagaaccttgtagggattaaggaccgacttggggtc

SEQ ID NO: 285903 - DNA, 308 bp, Zea mays
gagcaaggttcatatgctgcagtttatcctctagactggacatcttatatgctagcagatggtatcctgaattgttagcattcaaattatgaatttcaatgctaatcctgaaagtttgaatgacaaagtaaaatgactctttctccagatgacatccgatgtggtttgacgacgccaccaactgaatcattacattgggaacgccgataagcatgttcgcctcaattattcggttgcctccgctcacagtccattcaagcatcaagcagccctaacaaactcctttacttacagggtcctaacctttt

SEQ ID NO: 285904 - DNA, 279 bp, Zea mays
ggacctggtgttttttttttgtttttttttttgagtccaaaataaaaaaatctgaatctgcaccgcaggcagaatacacacaggacggacagatgtttggaacacagcaccacgactgcggacgcccagaaagaatacacgggaccatgttccatggatataatttcgtgaaatcaagggggtgtttggtttatagggactaaactttagtcccttcacttaattccattttagttcataaattgttaaatagggaaactaaaatagagttttagtttc

SEQ ID NO: 285905 - DNA, 471 bp, Zea mays
gggaaaaggaaaccattatgctccgtgccttattattgggaacatgtgtacagctgagaaggctttaacaggctgtacagcttaactgacaatcctatttatatttctcacatgtaaatatgtacacaggtttttttttaactattgttacactggtatcagaacatctacgaacatagcaggaggcaaaaggcctcaggctgagcttgcagcagccagtgtcttgttcagcagctcgcgaagcgacccaggagaggttaccggcgggctgcacttgaagtcctggcacacatgcgccaccgccggtttccccggagggctgccccgtgccatttgcgcgatgtttgcattgttgccgtcccagaattccatttcttctgtgttcctagggtcgatttggatcactgttctattcggatcatatgacgaaaacgtagctgctaccatgtcctgaaattcttcagatccact

SEQ ID NO: 285906 - DNA, 328 bp, Zea mays
acaaccaacaagggaatcaatagaaaccagaggcctataagctcacctagcatctaatctttgatgccttgctacctggtacaaaaagaatcacgcgtactgtacatcctaggcaggaatcctgacttatccacaggtgggtgaagtcaccatggtgacgaaaaatgaaagactactcccctctttgcaataaaaacgcaaagcttgggttttcatggacaaatggcacaaagtcgtcatcagccacctcaatgaccggcagtgtctttgtaatatcatcaagtgaaaaaggtatactggaatcatcatctagcagtatagagaaatt

SEQ ID NO: 285907 - DNA, 482 bp, Zea mays
cgtaaaaacttaaccacagtgttatcagattttaaccactcttttagggtcctgggtagaaaaagcaacaacagtttccctatattctcacaactcctaacaaaatcagatgcagggataccggatccacttacgaaggagtcttcctgaaaaaaaaacaagcaaaaataatacagctcaaaaagaattgcaaaggaaatttagagcacaaatcgcagataaagcaacaacccatgctatgaccccgtgagtaacagccaccataccaacaaaaaaaagaagtttattccaatcaacagcacagacattctcattgcacaccagattgaagagcggcctattgctgcaccaccttccaaacacgaatgcaagcatcttcaccggcagtcaccagaatatcattgtcgaggaaggttaacccatgaaccccaccaagatgggctcccttgatggtgacgcgactggctaccggcttgtctatc

SEQ ID NO: 285908 - DNA, 423 bp, Zea mays
ggaaaagcgaacaccccgtggtgaaatggtgttagcaaatggaatgttaaatacatttatctatgatcattcacaagtgtatgttttgaacatttccacctgtcacgttttgaacattttcctcctaagagacgttggcacccaacgacactcagagacaacaaatcatcccctgtattcacacgcaaacgagggcattcaggcaacatgttccatgagtttttcaacccaacatgtcatccggtgttcccctggtttagaggatctgccactcttctcctgcctcgccagaggcgtcaaggtcgtagtcctcgttggccatgctactgccagaacaacagcacagcccatcatcctgtttatacatttgcttcgatggctggactgactgcatgacagtaaagagtggcgctccattggctt

SEQ ID NO: 285909 - DNA, 388 bp, Zea mays
ggaaaaacatcaagttttttttacctcaaataaaacaacacccccagagaaaaaggggggaagaaaggaccatttgagaaaaacaaggcagaagatgatgtacagacccagacccactgatcaactcaaaacactactttagcatgcatctcctagcactggtacagcgagaagcccctgttcttccacagcgagctcagcgtcctgcccagcttcctggacttggacttgcacagcggcttcgattcccgggggcacacgatagcttcaccaccaccgttcccgccctccgccagctggctttgcagcaactgctgctgctgctgctgcggcggcggccgtgtcccgctgcctctgctccctgaacagcttcaggagcttctgggcc

SEQ ID NO: 285910 - DNA, 559 bp, Zea mays
aaaaaacgtcaatggcgtcatatatttatgaacggaccaacaaaaaaattgaagcatactaggcataatcctgactactctaaccctggagtctagctagtccgccactacaatatacaccaacattacacagtaagatgccacatattacacgatgcaaagatagataaatatgataagagaccaatatatccaccaaacacatttcccagcctgccagcaaggggaaaatgtcattacactagggaagttcctactcactttctggtttgcactcaaaatctgaaaaaccttatccattaatgataagagtcttcaaatgttgccagaaagtaattggaattttcagttctggaagagagcaaataactatttgggactttgggggcagcagtggcacgccaatgacctttttccccgcgattctgcaatgaaaccttactaccttcgaaatggagggttctgtcactgatctgaaccttttgcttcttaaaaaacttgatcatgttcccactaacaaaacctgccctcaaacttgcagcacatggcaatggataat

SEQ ID NO: 285911 - DNA, 429 bp, Zea mays
ggataaatataataaatatgtattattattatatatgtaatctctctctctatatatatgttccattacatgtatgtctcgtcactccccaatcaccgtcaccatatgcactctctacatgtcgaccgaccgcgccggaaaattaacaaaccctgtaatccaatccgaaagaagacgaaaattgaatttacaaacaagaagctcaccaatgcaaccatgtatgagctactttatgtatcaccaatcaaccaatcaatcgtagtcgtagccgtagtcgtaggtaggcacgcaggagcacatgcacacgtgtatcagtgtgtgtctctgctggtgctggagatggacttcgaattggcggccggcagaatagttatgtgctgctgttgagcgcgttggcgtccacgaactgcacggcgtccttgtgtcgcc

SEQ ID NO: 285912 - DNA, 404 bp, Zea mays
agcttgccaactacgaacatatttattatatttcgaagtctccaaatttactacacggatgagcttctcaagccattctaaaccaacactttaaaagacacacacccgcaatatgtgtttgactcccttatcaataatctgctactggtagtagggtacgtcgttcgctgattccgaattattagcttagctaggtggactcttcgcccaacttctggtggtccttgacgaacctgccccagtaccagtggcgcgcgaagacgtgagccatggactcgagcggcacgcccttggtctccggcacgaacgccacggcgaaggcggtcatgacaaccagccacgacgcgtagaagaggaaggtgccgtacttgaagcagcacagcacggccaggaagaactgcgcc

SEQ ID NO: 285913 - DNA, 543 bp, Zea mays
cggacgctggttttttttttgtgtaaaatgttttcttttcacgaccaacaaatgaacaaataccgtctagaacatgatcatccgctagtgcctatacacttcggtttattctgaaggaaacagtaacagaactttatacaccttgtgtcgagggatgtaaatataatatacacttgaaagaatggactccgagaacgagagagtgccgatgaatcacttgtactgaactctcatgcagacttgagagagttgaaaactgaagcgccaagctgccgcaaccgcatcaggctaccgtccagccgccttcaggaacttgtcatatgggctagcaggtggcagcctgaacgaacagtctgattcgctggacgctgaatcgcagcggcgcatgcgccccttccttgttgactgtaactcaggctcagacagcagagaagactcattcgtttcaagcccatccacaccggctgaaccatgcgagtcagtcctcgaatgcttcaagctcaagaggacagacatcttctgttgcttctccccacgcgtccg

SEQ ID NO: 285914 - DNA, 371 bp, Zea mays
gatggttaatcgaaatattacgaatagcaggactacaccactcgtgatacagcattcgagtaacaacttaaccacctcaggtacaagaaagacaccggagtctccctccatggcgggcattgcgtttattcagtcatgagatgccgagctgctcatcatctgcgaaactacagcgctgtggaactggtcaaggtttttgttccggcgactatctcttctggtcaactgtgctgtgctcaactgtctcctctagcctcatgccgctcagaatgtcacgcctgttaccagtagctccgtgcgaagtgctgttgttaagttcaaagcctttcgatctacttggcatcagtaagcagcatacttggagctcggac

SEQ ID NO: 285915 - DNA, 562 bp, Zea mays
gcccccccttttttttttttttttttttttttggaacaagaaactggaagtgaacattaaacacgatgttcttgcaaatcacaacggcacgaaaaatcggttccccttttataattaaaacaaagaaaaacctggtattcatcaggcctatcctgcatattacagcatgtcacttcaattaggttctctctccacacggaaccgaaatttcacttatccagccatagaagcacaccaaaatctcaaaaggattgtgtggtccagccaagatgggcaagctggttatgttgaaacgctcctacttgatttccaggaaccatggccgacatgtccaggcctagatttcctgccaatggcggtgcagccggctgatgtatcatggtctgcgggttctgcaccatggtcatggatgttggctgcagtgcatgcacaaagcccgggtactgcaagtgaccaggatgggaaggggcgggactgaaggcagtgtggccactttgtggtggtaagtatgctgcatgtggagacactggttgtcccaccatattgtagaacggtgcagatg

SEQ ID NO: 285916 - DNA, 435 bp, Zea mays
gtcaaattgtaactcgagcattcatcctttgggattttgatgtaaatataaaagacatgtcggcgtcaaggattaggttatacaaagtcaacagaaacgactaaaacgaatttgaatttatagtgacataaactgctcaataattcgagcataatataatggcttttttagataaatatataaaatatataatggatatgacctccggcctctgcatgcatgacttgtatccaactcgtttatttggcccagggcagtgatacttctgagacacgtcgctttgtataaggagtttatgccatcagcccgtaataacagccatactgatctcaactacaacacaatgacctgcgactggctctggaaaacctcgacttctagccttatggatgcccagacttggctgcatcgcctgagcttctcattcatgcgagc

SEQ ID NO: 285917 - DNA, 530 bp, Zea mays
gggacggcaaaccccattaccagtaacagtaaactttacaatagacgggtgtccagcatacattatccagatatatttatatagagagaggcttcggcttaacataccataacatcgttctcatctactgctaatactaggaaccatactagtccaaatagcttgatatgaaatattctacaaaaagggtagctacagattttgccaagacagctccagcggcttaaggcatcatccccatgggtgcagccatccagctcgccgttgtcgcgccgacccaattgttgctgctcacctccccagcctccttgcagatatgatcgagcatagctaggaactccttcactccagcaaagattctgaacatgtgagcttcatcgttgactgactctccaataaaccactccgccatctccttcactgatgacaagcagatgctctcctgggactggagcttcaggatctcctcctcggcgtgccttaggaatgtgctcatgctattgtggaaacgccgagagctatcaacagat

SEQ ID NO: 285918 - DNA, 556 bp, Zea mays
aagccaaatcactgagtcagttattcaaaatgcaccgcaccaccttaggaggaaaattactgtatattcaccatacgctgtgcaacttgattttgctgtcttcctctttacacgctaaccaagaaacccgccccgccccctccaaactgttagagaaaaaaaaatgaagaaccttctgctaaggtttctaacaacagcttgtgaaattcgttctcttacatctacattaacattggggaggtagctttaactcttcgataacttgtctaggaatacaccaaaagctcactgaatcgcctaaacatctgtcagaattatggatgatacaatcataacataggccaggaagaagaacatgacaatctggatgaagaactgtggggtgtccctccagcttgggcctgccactcgatctactgctggcgattctctgtgagagtcgatggaatggcagactttgaatgaaaaccacgcctggtcccgtgagagatgctgttagctggtcatcacacacaaaaactgctcatctctcgatgcgaaatgcgagctatcgtac

SEQ ID NO: 285919 - DNA, 326 bp, Zea mays
gttcaaagcatattattatatatatgaacatacaaatcttcagaaacataaacttacaacatcagttctgtttcattacttgaaaacatctgacggcacataatcaacacagtaattatatgttgcagaaaagagtcgaaaccaggagaggatttgctctttgcacttgatgcatccatccatcaaccgatcagttccagaaccaagatgtccagttggccagctgcgccttctcagcaccatggttggggaccccaacagcaaacatggggtcggggagatcaaagttgcagccctcatggttgaccacgccaccattctttttc

SEQ ID NO: 285920 - DNA, 533 bp, Zea mays
atcggcagcctttttttgaggggtttcccctttccaccaaaaacaagggtcttaattcagtgattggaccagactaccggaaataaagttcttttttcattggcctcggctaagttgggccgcagaaaattaatgaccgcagaaatctagctggttcattttagtggtagccaaaacaaaattaaaaccgaaatagtttgtcccgaacacggaggacaggtactggtaaagtttgagttacacaggaatacatggcacggctaccgcaaactacttcatcgagcgaccctgcttccttgcgaaatatgaaagcaacgatgcctgcccatccgaagctgcttttacagctttttccttcctggtaagctgagagggtttcatgctagcttcgacttgagtgtcctcgatctttctcttgaatcccaaatcacgttgtgtttccaaagtggcaccagccagagtcatagtatcttcatgctcgatgctccacggtgtctcgaaaacttgtggttccaaggtgacaggttcatcca

SEQ ID NO: 285921 - DNA, 389 bp, Zea mays
aactcatgacgcgttttttaggaacgcctccgttccatcagctggagcaaaatcagcaaatcagtgagcccaacaagcaaacaaaatttcgacgatttctcacgtcgctcaatctaacaaataatggcacaccgcaactgactttaatccagctggtaccgtgttgtattgcatgcaccatccatcgcatcgcttcttcccaccagcaccaggcctgatcaggcaataacggcggtagaaatcggtcaactgctaaaacactgtataggcttccatcttttggggaagcccaggtctcaccatttcactcgtcgtctgaattctcgaacttgatcgagtgggtttgcaggtcgatttgcccgcccctgtaggtgccacgcttcttcttg

SEQ ID NO: 285922 - DNA, 423 bp, Zea mays
ggtctcaagttttctgaatccccaaagagtggccaaaagtttcagtctttcagtttcagacggcccaaaagcgactcaacatcctgtatctgcaagctgcaccggtacaccatctacagcgaggcagctagttcgtcaattaaactggtttaccgccggcgccggtcaaacactggatacatcatacacggcgtaattacacgcagtagtggcaggacgcgaaccaaagcacttcgtggtttgttcttgcgttgcgcggcgcccatgcggggtcgggcttcatgggccttctcgccgccgctcggtagaggccggcgcggcacctctgcaaaattcctccatggatgagctgcttgcagcagccagacgcccagtagctagctatatactgtccgaaccgacaactacaccacgtgcgcaacg

SEQ ID NO: 285923 - DNA, 522 bp, Zea mays
ctccactatatgctgctgggggtgttatgagccgacatcggccagccggccataaagttgtacagcattcagttagtgcgacgggttgccttcaaataacaccgatgcgaggcaatctataaccagatgccaaaatttcaaaaaaaaaaaactttttggtactatatatcgagaggatcagaaaaccctgcttctagtctggagctgctagagcattatatcgacttggggtaactcggttggacctaaagctgcaagtggtgaaatggggattcagattattctaccagagaaatgcctagagcgaccagcatccccattgccagggagatcagctgagctactgagctcttgatggttgttttctggtcgttcatctgtggtaggactcccgcgacagcaatgtaaatgaaaccaccggcggtgaaaccctcaatcagggaggaatgtcccggatctttacccaaagacaatgctagtgctgttccagcaagagcaaccaacgcagagaggaaattgaag

SEQ ID NO: 285924 - DNA, 387 bp, Zea mays
gcggcctttctttttttttttttttttttttgccgagtgaagcgggtaagcacgttcgcctcgcttgctatgtcatttatcaggtcaaagtacagtgtccatcgtcatgagtgaactatgcccttggttgcagacgcagatcaggcacgtcatctacacaggtttctgcattttcttttcgctcctttcactaaaaacggtgacgccggctacacgggaacacctcgctcacccaccgaagcatcgccgggccaagaacaagaactagccgacaccacacctcacctcacctttccttgctctacaactacaacataagtttctgcagcctcccccgccccctcgtcagccgttgacgctggagcaggtccgccggacctcgccgtc

SEQ ID NO: 285925 - DNA, 490 bp, Zea mays
gatgcgtgtcgccaattcagtatggtaaaatcttccaaatggtatgcaagccttgttacaatggtccgagtgtccgacgatcctccatctgcgcgttgtaaccgtaaaactagtttcaatcacgaacagaatgaaacagattcctctgcaccgcagcgagctgctgagaagcacagactgacagaccggagttaaaaaaaaaactgcaaagcttgtttacatgcctcaactcgcgagccacagatacaaaagagataacaccacagccacggcaaaccgcgttcattattcagtgaagagcgacagtgacggcgggtagtagtagtcctcgaagctccacagcccggctggcgctggcgccggcacctgcgcttcttcggggacggcggcagcggcagcggcagcggtggtggcacttacagctgcattcccgccctccatgtacgggacgccgaggaagttcatgtagttctcgtagcggacgcgtggg

SEQ ID NO: 285926 - DNA, 378 bp, Zea mays
ggcagggcaatcaccatcgtcatgcattgcaagcacacaaaacaaattctacttacaagttacaagcaaagcaagactactcgggtcttgggctactccagcgttctttgtcagcacacgctgctgcacccatctacaatacgtacgttgtacgtgcatctttcttctacaatcacaagcccaagaatcacagctccagctgggggttcaccgggtaatggaaacagaacgtggggggggaatctaatgacctgactgactgtctgaccaaccaacaaaaaccccgcacagcaaaacaagcaagcaagcaaagagacggacgaacaccagcaccaccactacacttgggggcctaccgtgtgtcggcgccgagggacc

SEQ ID NO: 285927 - DNA, 398 bp, Zea mays
aggataacagaggggacacttatggttaaactggttcattattcatatacccgcagtattaagtaagcacgcgctactaccaccttccaagtctcaacagcaaactaattaccttaactagctactacctcacacgttaacaacccagtagcccagtacagtcagtggccactagggaaatgataattttacatggagtacactaaggcagcatcatgccctctcctcctaggcttctgtccaacaactgagttctagaacccattccaccgaaaatcgcacaactttatcaggggaacacttcattagcgtcaaccattgaggcgctccaaggtcttcgcaacatgccttatcgacggcctccgctctggattcccctgaacgcatgcaagggcgac

SEQ ID NO: 285928 - DNA, 413 bp, Zea mays
gggtaagataaaggggtttattagtgctctgctataataataataatatgcgtgctactagacaacaggcaattcatcctgtcatccttcagatttccatttttacatatatatacaccgtacattaagctcatatggacattagaacaggcctgattggtatgtaattctactacacggattccaccccacaaacgacgaacgatgccctctgttctgtacgcatcgtcagcgcgccctctagctccctgccgtgaacttcatgcagatgggcggcttgaccttggccagcgcgagcagcgacgacgggaacgtccagatcccgtcgccgcagatgagccccgaggcgccggccggcaccagcagcgcggccttcttgccgtcgagcctgtgccacgcgaacaccacgaggc

SEQ ID NO: 285929 - DNA, 585 bp, Zea mays
atgggggcgaaccacatcagcaacttaataagcaaactgtacaacggatgtagatgtagctctgaggatagttaatagagcaaagacctaagaagtaccatctcctattcgtattctaacgggcaagggccttgcaatcagaccatccataacccagccaccatcagaaccatcatgtttgacatggctgaattccctctgcgcataatccagggatacttcaagccttccaccaggtctacattctgaagcaacattacttggtttgaaacccatatacctttccaaccaatatagatagttaacatggaacaaagatttgagcatgtcttcgggagaagatccctctttaagtacaatacaaaatttttctttgtaatccataagcagatattgctcatttttgtaaagatcaaacaatgcacaagcatcttctttactctcaattatctcactaagcttagaacccatttgtaaccgccggcatattctatctgcagcatcttttgcttccgctgacaaaatcttactttgacgtgaagcaccaagtgacaaattgaagaaaagaggttcttcatcattaac

SEQ ID NO: 285930 - DNA, 371 bp, Zea mays
aaatacataattcaacagcatagaccagcaggtcttcttgataacgaagagtaccattcatccagtgaaggatatttaagaaaatacagagtcgaagccaaggtaaaacggcagttgcagttatagagacgaacatcatgtcttcttagtctggctaaggcttttcaacagagctagccatgatcactcatcaccgatatactggaccaccagaaaaggaatagagtgacgaaaccggcgcaccggagccaccaacccttgctgagataggcctaacgcttgtttcagcataagcagggttattctcataagcagttgtaaggtaggctgaatgaggggggtccacagcacggttagcaagtcgatcataa

SEQ ID NO: 285931 - DNA, 497 bp, Zea mays
gaagtcgctctgcaactggtctttttttaaatagaaagggttgcatcccatgctgtttaattccagaatccagattcacttggccatgtatgcagatacatgtggatacagaacaataggataccaaaactggccaatgtttctctatatatacgaaactaaaatacaaaaccaggttccccgaaggggggtaccaatcacctctactgatactacaaaattttcaatcgcctagctagacctgagattaccgaaaaatatgtatgaatgctatcctattcctaacagacaactttgtaaacaacacccaaaattggattcaaacccctcacatcacatgtcagactatccccgagttctgtattttgctgtgccatcttctcatttcacgatcaaacgctcctcgcatgaacctcttgttcgggttcaggaaacattaatgtactgagaaactcataggacgtaaagaatatagcaccttgagacatatacatagc

SEQ ID NO: 285932 - DNA, 389 bp, Zea mays
ataagagggaataactgcgaaaagcactagaatggtatgagaatgcatattaccacagtacttacacaaaccgcacattgtaagagatcttcgcttcggacgctaaaggctattaaaaaaaaaagggaaagattaaagacgaacacgtacactttcggagacaagttgtcgaggaaggttaccgagaaggtaaaactgagaacttctgtttgtttcgtcggatagagatttcatacaagtccaagcaggatttcatcattttgtacagggttatgggatggccattccctaatctggcacgcagagaagggttgcccccaatgttgatgcacttgccacggatacaggaaaggcgtgcacctttttctctctctaaagaagcttcagca

SEQ ID NO: 285933 - DNA, 492 bp, Zea mays
agaaaacaaaaacgagacaataattatcaaaagaggttatagttgcgcatccccagtcagtttcgcaacagctttgtccatgcaaagacagctctataactacagcaccgggaccagtgcacatgactcgaatgggtttgaatgtccagaggtgagtgagtttcatacatatgtttaaataaggtaggtttgttcccgtttttatgggggcaaatgagcatcccgaaccggcaagaactttttcatgcctggatgcaatacatgttgaagcaagctccggtatgtaaagctcaaagatgaggcaaaagacctgtacagcttcggattctcagatgttgttgcatttaattactcgtcaagaatgggaggggaggggagggcgcgaggcagcatgaacgaagacaccgaggatggcttaggacgcctctctctcggtgatcctttcaacagagggtatttgctgggaatctgaatgaacaatcctcctagacc

SEQ ID NO: 285934 - DNA, 473 bp, Zea mays
  unsure (1)..(473): unsure at all n locations
ttnttttttttttttttttttttttattactgctacttattatgccgccagtcatcggtcttgaagcaaaagtttacatggaactcagtttcgcgctagtcaacacctcaagtccagccaagttcatcaaagaaccagcacggttctctagtccagacccaacgacgcgtagcaggtactaaggtactagtagtagtagaacagaacgaccgccaatccgggcacacccagtttagttacagttacagtagttgcagagagttcagtttcagacgagcgagagccgagtcgaatcgctgataagccaaggatgagttgccagtgtcggggctccctaatcaccgccccctctcgcgtgatagtgttggcgaccgccgggcggcaggctgtgctcatgcttcgtgaacaggccgtcgatcgcggtcgggggcacgcgtagcgcgtacgaagagccgacgctgccgggggactcc

SEQ ID NO: 285935 - DNA, 647 bp, Zea mays
gaaatgccacacctgccaaatgagggtataaggctgatcgcagggacaaggtgaatctgacgcctggagtacgggaaggaaatggcaggatatacaacatgttgtctggtttcagggagcaacaactcggtgccactgctgcggttcagcacagaccattcttcggtaattttgcctagtgatcaagtgcggcgttgacagtcacctctcagtcaacattcaactggacagtggggggaagtctctgctgtccttgaggcgatatgattgggcgccatccctcattagattggaatctgttgtagtgtttcggggagcagaaacagtgctcacaggtccagaaacttgattgctggaagcggattctgatctgctagcatggtctttggaggtaacttctaaaggcaacggccccaatatcccagactcaagtttactgttaaaggtcctggactcaagcttactgtcttgcaggagcatgaaaccattgccatggaaattattccttcgaacctgggaagatggagaatgagctggtaccttcaattgatctcttggagagttaagagatgacgatgacattggtatactcattggagatggcattccatgatcagttgcaccaggaatatgtatctgtggtagct

SEQ ID NO: 285936 - DNA, 408 bp, Zea mays
ggctgatcgcagggacaaggtgaatctgacgcctggagtacgggaagaaaatggcaggatatacaacatgttgtctggtttcagggagcaacaactcggtgccactgctgcggttcagcacagaccattcatcggtaatttgcctggtgatcaagtgcggcgttgacagtcacctctcagttcaccctacagtgtaccgccatcaacattcaactggacagtggggggaagtctctgctgtccttgaggcgatatgattgagcgccatccctcattagattggaatctgtcgtagtagtgtttcgaggagcagaaacagtactcacaggtccagaaacttgattgctggaagcggattctgatctgctagcatggtctttggaggtaacttctaaaggcaacggcccc

SEQ ID NO: 285937 - DNA, 381 bp, Zea mays
aatcatataatattatcaggacatttttattataatatcatgaatgaatatgaacaatatcgaattacatttataccttcatcttgacagaaggtaaaaggctcgagagtgacgtgcaagcgaatacaagtcaacgtgaacaatacagtgctactgttcatctatttataggcacaagacgcagcctgtgtaaattacattcatgcccttgacatttactattgacctagggataatctatcaaggactagacaaccttttcccctttaggtcggttccattttttgctgttaagccgaagcttctccacaggtagcttcggaactggttcatccttctcccgatccctgctttttatatcatgtatagcttcatcccaag

SEQ ID NO: 285938 - DNA, 527 bp, Zea mays
ttcttttttttttttttttttttttttattttttttttttgtttggagaggaaagccggaaccttttctccattatctaaaaagaacagagatgcatacacaaacataatcaatccttacattgcacggcaaatatccaacattgaaagaaacaagaaaaatcgatgctacatcttgttaaatatgcaagatagtgatggtagtagttaactagttatagcgagaggagcactaatctaaatacgccgtttacagaagaatcagacacccacaggacccacaggcattacggtttccatggggctggtggcggcggaggcgaagggaacatgggtggcactgcagagaacatggtgttcttgtccaccccatggccttcacccgacaaagctaccaacgctgcgactagaccagcattgcccgccagcgttgcttcagtgtagttataattcttgcggacatctttgaacccgtcatggcgatcggggccagcaaccatggcccctactatgatattggggtttggc

SEQ ID NO: 285939 - DNA, 499 bp, Zea mays
actcctctcgctataacttgttaaatatgcaagatagtgatggtagtagttaactagttatagcgagaggagcactaatctaaatacgcagtatacagaagaatcagaccaccgccctcgtcgccaaaatccccccaatcccaccgccagtctccgcccgcgcctcagaagtcagaaccctagccccggcgacgccttcagatccggcgcccttatccggcggaatcgctcgctcctaccaccggttgccgcgttccggcatctcggctacccggcgtcctctacccgacttctacgccctcgatctcccccagccgtcgtcacgaggaatcgtttgctccacaggctacgtctccaccaagccagcgtcgacgactcgaaggatccgtgccgtcgtcgatcgccgatcgcctcttcgtagatcgaatctgctcagtgttttgctattcgttgtatttcatctgagatctgaaaaaagtattcgggccatctcgagata

SEQ ID NO: 285940 - DNA, 418 bp, Zea mays
  unsure (1)..(418): unsure at all n locations
cacatcaccgcaccctgagctgaaaatgtggcccataanctcagaaggaacgcactacaagccacacagataaacagttttcggagggcctgacggttagtaaacagttcattgattcattagacatcgaggaacctactttactggtaacattcggaaagtgccaccgactcccacaagtaaaaaaaaattcacaccactcacatagctcctaactgttccatgattacacattctgcaaaacatgatcacccagccttttggggttttagaagatctggatggcgggttgctacttcctctggcgaagctggggtaaattaggggagggtgcatataccttgagggtgcataataacaatttataggtggtgcatatatggagaaaatttgatccaaaccactagatttccaaatt

SEQ ID NO: 285941 - DNA, 422 bp, Zea mays
atccaattcccaacatctctggaaaattaaattatatttgacaatgactttagacaattctccatgttcgagtaaaaaaaggtttcttcagttcacactattgtatgtcctgtaatcgatttttacttaaatgtttctacgatgagaacgtacccaagttacacacctcatgggctcatggcaaatagtaaaattaagacaaatgaaatttctgggttacattgtcatctcaaggtcaggggttacggatttcctcttggatctattctctgtctgcggattgtttgccgctacatgtttctctgatgtctcaacttcattatcaccatccgggtctttcaaacctaaattcaaatttaggtctgttccaccgccgtttttaccagaatcttgaccatcctcatctgttgcctgagattcat

SEQ ID NO: 285942 - DNA, 363 bp, Zea mays
  unsure (1)..(363): unsure at all n locations
ttgccctttntttgataatttttttttttttttattttttttttttgttttgttttacaaaaaaatgggggagctagctagctggagctggaggtcagttacattaccaggggacgacgattaacttagtacattagtactagctgctgctgggtagtaaacaaacacgtgatcgtcgatcaggaatatgagtaccagtacgtggctaggagcagagtacatgcggcaggacgatcaagccgctgctagctgctaggactaggagcagaacgcacacccctaaaaaaaacaagtcctcgcgggcgttttgctcaccggggccccgtttttgcggtcacacttgagaaacacacacatatgaat

SEQ ID NO: 285943 - DNA, 420 bp, Zea mays
gtccgtggctttttttgtggcggcgccgggcctcgacgagcgcggcggcgaccatggagaaggtgacggcgaagaggccgacgccgatgcgctggagcggcgtgatccccgtggagacgcccgtgaggcggcgcatggccggcacgaaggcggcctcataggccgggacgagcgcgacgagcatgatgtaggggatcgcctgcagcgaggccggcgggacgtgcaaggaggcggccaggcgggtgtccatggcgcttccctgctgcacggagaaggtctgcagctgcgctaggatggtgttgaagatgatggtgcacgcgaagatgggcaccacgcacagcagcagcttcacctgctccacttctgccgccgtgcacataatccacgggctcttcttccccgccgacgatccgccggggc

SEQ ID NO: 285944 - DNA, 520 bp, Zea mays
atatcaatataaaatttattcttggcttcatgcccaacaggagtcccacggaatagctaattattctgggagtaaacagacatagcacctttgcccttgtattccatagcatcaaggacaaattaagatgatcttgtcttgcacactagatagatacatagcaaccatgcatagagccataggcctccaattctaagcgcggagataaatatccagatccatgctaaagcttgtgtcaacaaaagcacttcacttctgctaggttggtgtataacttagtaatctgacccaatatttatggcatcagaagcagggcccaactccttcactataaccaaattgaaattgtggtgccatcttgatctcatcgtcaaccttccagcaggcatctgggtagtattcccagacggttggtggtggcagcggggtggcaaggctgctgcacacattttcgttccctccaacaaagcccacctccgagggcatctgtggcgcctcaatttccatccatatctggtcc

SEQ ID NO: 285945 - DNA, 401 bp, Zea mays
ggacaggttaagttcaattccataagttactcatgggagggtctgagccgttcttgaccatgagcacgactaatttatcaattttacactctatagaagttgggcatttttacccacaaatcgggatctcttatttgcctcgggtggcgcaaaccactaaacactaccagtgtgggtaggcaagggctcattacgagacctttacaaagttccactatctcgagaaacccgttacagttttaggcagagggggtataggaatccctcactcgaaaagctatcacagatagttcgacctaagaacctccctatacttgcgacaactcctccttacttgccccttttgggtaatgtaatctttcactagcatccctaattaatcaaccaaggacgtccaattc

SEQ ID NO: 285946 - DNA, 538 bp, Zea mays
agttagagccaactattaggaaacttgctctaaagcgggcgtgtgcaaacaaaagctgaaaaacattaaggccggcatgcagaaaccacaccgaaattcgacgcgtgcatacagctttaaacggtcgtatatgccccaaaacagagaccgtagattcattaaacaccttacgactactaccactgctaatcttgcacattacatccttaataccgtcatgactttgttctcctactttttactggcacccaatactagtaccactagcagaaaggcagcaagagcaacacacaaaaaagaggccagggatagggccactcctcgtctcctccactcgggactttttacaagcagctgacgaagcagagcacgtttcagcagcagcagtcggctgcagacctctccgggcccccagctcccagcgtcaccgacgaggccggcacgtcggagctcttgagcacgcgcagcctcttggcggtggccacgaacatctcccaggggacgtcgccggcaaggaccctgtcgccccacgcgtccg

SEQ ID NO: 285947 - DNA, 395 bp, Zea mays
gatataaaggataaatatattgaacgttattggagctaaggcacaatgtctcaattattccccacgtcagcaatgagcgcagctcgggcacgcacagccataggtaggtgcaaaacttacacacgaccaaaaaaaacaacaatgcatgtcaacatattagtaccatatcagggctcgatttcttctgaaacaccaacctcatcaccggagctcagatgtcgactgtccggacgccatccccgtccttggttgccacggcgagttgttagcaacgcgacagttgcgccgtatctcccctttcctggggttttggagctcccccatctttatcatcccctcgatgaaggccctgaagaaggcgtcctggtccttgctgagccgctcgacgacgcgac

SEQ ID NO: 285948 - DNA, 513 bp, Zea mays
agcaagcagcttattgaccgcagagtacttggtcttcaggtaaacatatgtttcaccggtaaacatatctacttgctcaagtagatctaagcaactttcaggagtttatatgccgatcactcttcaccaaatgctcatgacattcttcattgataatttaacaagtcacttcctttgagcttcaccaaaaccaagtctagtcaactcaacaacaaacttctcttgtaactcttgcatttgatcctttttttgcttccatctccatcacttctgccatccttccaaagtgttgtgaggttttgttaagatcaccacgaattccacttgctagatccaagaatgggtcacttgacatattatctttgggtttcttccttcttttgctgctcgatgaagttgaatgatctgagttcctattatccatagaccattgtggggtatccatagaaaccatatcctcttccactactggacaatcttctcccatagctatttctttctccatgttaatta

SEQ ID NO: 285949 - DNA, 351 bp, Zea mays
  unsure (1)..(351): unsure at all n locations
ggagttgggaggcgagcttaccctgcatcgaatgcgtcggcacccaccagcaatctagcgcggaccaaccaactctacagcacatcttcttcctccttcctcgcttgctttgcttgatccatagcatagcctcgcacagcaggacgcatcacaagaaccaacaaaatattcacacatgacacaacgcgggggcgggcacgcacacggccggctcaagcagctcggtccagaacagcgcggcgtcggcgccgtcgttctttaccaccttcaccacggacacggcgttggcgagcctaaccacgctcactttgggcacgacgccgnccttcttccccttcacgcgcacgcccc

SEQ ID NO: 285950 - DNA, 764 bp, Zea mays
agctgacaacaaacaaatatttgagaatggatatagtatttacgaaaaacatgacactttagcaatccacttcatcccagagaaaggacagtagcattccaaatatatatgcacacacaaagcaggcggcaacacagtagcctgatagataacaaacaggcaccctcttgggcctgcctagcataacccctgagcattacagcacatctgcatatgtcaaaccaaagcagaactatctatatctagcgtcaacacgacagttacaacttctagattttaagtgacacttcaccttgccatgaagatctagttggtaagataaccattgggtaaggtatggttgcaaattacatacaagcatatactgagtataccagacaagcataatggtgccttagaaacgtcagatggaggcccaagtgcgatggaacctgcagaggaaatgtcaacaccatgccgaagatacaaccaatactctgtttttccatccaaggtaaaggacaccatctctctcctcaagcctgtagtagctgttgtaggtatgcaacaatgtgttgatagtgttgttcacaactgaactcagtgggtacggtctaaatccagccattgcaaatcttgacttccattttccaaacagctcgtgcctctcaaccctttcagcaccctcgcatgcgattaaattaacaatatcccttgcaacacagtgttgttctgcgctcatccgcctcctatcatcccttgggagagcaacatctatcgactca

SEQ ID NO: 285951 - DNA, 556 bp, Zea mays
gttgcttcagctgaccagctcagccttcagtagtgactccaactctcatcacatcacaggttgtcaggttaccctcaaagccgctaactgacagtacccaaaattccaaaattaacaaatattttaatttcacgggcatattctacgtctgcgatacgcaaggaacgaattcccagtctaattaagcgcgccggacccggccggacacgcctcgccgctcgccggcccgcgtgtctagtcggagtcggagcgctggccgggggtccagtgcggcagcgcggggctgaagtggctggacacgacgcgggagtccaggagctcgatgatgggcgggaacgtcacgcaccggggcaccttgtactggttgatggacgcgccgcgggagatggcgtagtccatgagctcctcgaaggtgcccggccgcaccacccggatctctcagcggcccgatggacccgtccgccacgcggctctgcctgtacaccgtgttcagcgcctcctccatctccaggcagcacctctccagcgtcccctcgcccaccgccggacgcgtggg

SEQ ID NO: 285952 - DNA, 419 bp, Zea mays
atcatcaggatttgatcagatcatcgagaaagctcaaacttcatttgtacatggacggttggacataacagatcatcgtcgcacgacgtttaactcccaagcaaagagggcggcccgaaaaaaggcccacaaggcaaaagaggaaaacggcccaggtcaccatcacacacacacacacacgggcgaggtgcggcgaaacgacgatctccagtctcacactcgccgccgccgccgccgcctgcttactggatatacagagacgtctgcacaacactcatcgggggagtacacacccaccggactgctacgatgatactcgatcggttcaggtctcgttcgatatatggctgctcaggttggccgcaccagctctcggcctccgcctccgctctggatccacgggtgcctgaggacttgct

SEQ ID NO: 285953 - DNA, 380 bp, Zea mays
aacatgatggggagacgagatgcaaaagcataaccatgtacagctactgcaagatctatgctcgcagaccagtggttggtcacacagctacgagcatccgccttagaacgctggttccttaaaccaaggatcctccttaacaggtctaaactactgagagcatacccaactagacagaaaagaaaaaaaaaactgcggctgaaacgatgctatagcctgtaagaactcggttactcaggcgccatgcgttggtttcagcttctggatccactgcatgagccgcttcttggggtcctggcaggtgccgctcttctgcgcgtcgaggcagccaccctgcgagaggatggagtgggactgctccaggactttgaccatctgcc

SEQ ID NO: 285954 - DNA, 354 bp, Zea mays
atatatagatgcttacgcgttggtctgcatggtaattacggggctgacacaggaagatataccatattgatgggtagaagaatgcaaactataccgatgatgcagcaagccttatttcaacagaatcgaaggagaccagagaaaaaacaacagcagctaatcatcatttcacgcgtcggccgcgagcccctcgtcgccggcggtggtctcgagctggtgggctgacgatgagacatctccgagggcggtgttgcgcacggagcagttgcggcggttctctcccgcgctgccggtgaggatgtccatctggctcatcttcaccatggacccggcgaactggtcgaagaaggcggc

SEQ ID NO: 285955 - DNA, 498 bp, Zea mays
tcgctatctagctgctccgcccagatcgacgtccccttagccgctacgctgccccacgccacctcacccgctcccccgtaccgtcgccctctcggaaccctcgccattccgcgccgcgagaggtcttcctagccgctgcgggtctgcctgcaccgcgtcgcgtcgccactgcaccgacccgccacagccccactagcctgactccaccgccaccctagaggatggaggaccgtgagtggatgtacacgggccgcgttcgacgtaatgatgtcaccccagaatggattaggaagaccgatgctttcgtggaacgggcatatggcgaagctgctaaaggagctagcctagtcccttgtccgtgtagcaaatgtgacaaccggaaaagaaaaccaaagaaggtcatggtagaacatatttggaagaatggatttacgccggactatactcggtggatcttccatggtgaagcgcatcgcacgagagaggaggtggtgagac

SEQ ID NO: 285956 - DNA, 399 bp, Zea mays
cacccgctcccccgtaccgtcgccctctcggaaccctcgccattccgcgccgcgagaggtcttcctagccgctgcgggtctgcctgcaccgcgtcgcgtcgccactgcaccgacccgccacagccccactagcctgactccaccgccaccctaggtataacctctatttccgcatcatggaaactaactccatctacgcaaccgcgggtgggattaggacctatcctcacctattagaaggtaggaacgtagtggacatgcattacatgtctatattaaactatactcggttatatatgttagaggatggaggaccgtgagtggatgtacacgggccgcgttcgacgtaatgatgtcaccccagaatggattaggaagaccgatgctttcgtggaacgg

SEQ ID NO: 285957 - DNA, 464 bp, Zea mays
caaaaaaaaaggcccaagactgggattaaaatgacggggtcatcaaggcaagctaaatgcaatgaatgcaaatacaattttgaatcagtgcatgttgttcacccaggttcactaagcttgttttagtaggcctgctaaacaaaaaatgaaggtttgctttcatccaacatctgtaaggaggatacaaactaaagtaaaaaaataattgaatagcagtgtcagccgttagacctccctccaccaggcaaccaaatttgcgcagttcaggtgccggacagcttttcaatcggggattgtgtttcactggttgttgcctgctattgcctaacatgtttgaagagttcagctaccatgttccacgcctcccagatcttgtgtttcagctggtgatcataaaatgttcagtcggtgatcatatttttcacgcctaccatgttcagccggtgatcatgtgtttcagctgc

SEQ ID NO: 285958 - DNA, 438 bp, Zea mays
gatcagtacaatcaggacttgctgaattacagatgtgaactttaagaaagtgtaaaagtcaaaacaatatatcaaaaaaaatcgaagagacaaatctaccacatcaactatcttgtaaaaacatagcatcagaaaaccctgcattcagtggcagaacacaatatagcaatttttttgctagaagaaatcaaactccaagtagccgtcagcacctctctgggtctggggtgcaccaacggaagcgtcagcagctcacgatggcgacgaaggatgctttgatggcctctggatctcgacaggcttcggtacctctggtgggcttgcgcaccgtatcagtgcccagttgacgccctcgaagaagggatgctgcttgatctccgtggctccacgcttgtaagccaacatttgctggggctccttcaccagcaggcccctgat

SEQ ID NO: 285959 - DNA, 407 bp, Zea mays
atgtaatattttatttatatttgtactaatgtgcttgataacataagaaaatatcaacatcaaattttatacatatctattttaaaatattaaatttattctaacagttgggattaccactttcatcccctagaaggaagagatccctcaagattgttgctgtccatagtgattaactcaagcagtgttaggttaccgattgagggtggaattgtccccgacagcaggttgccatcgattcccaaatcccgcatcattttcagccgaccaattgtgtttggcagagcaccggtgaaatggttctggctgagggaaagcttctgcaagtttacaagattactaatgccaggtggtatgcgcccatagatctcgttccatccagtgtaaagcacctgcagatgtgttga

SEQ ID NO: 285960 - DNA, 383 bp, Zea mays
ggaccgtggtttttttccgggaactgggaagggtaccattcagcttgcaatccatgtgtcccttaacataaacacaaactaccagcaaaataagaagactaggagaggtatgccaaagaagcggcaatacgctcttgatacgagcagcgtagcaaaaaaccccgcgccattggaggtttcaatcaccatatctatagctatgtacacgagtctaatgagtttgggcgtcccaaacatcatgtcttgctaacgactacacctacttccccgttgcatctctgttcagcattaccttcatccctgggatgcttccctataattgttcgcttgtcatcctccaccaaagctgacccttcatcagtcatactaacatccctgggacg

SEQ ID NO: 285961 - DNA, 288 bp, Zea mays
  unsure (1)..(288): unsure at all n locations
ttttnatttttttttgctataagttggccagactaaatttattttgtctgtactggaacttagcaacagatatataatttagtacatgggcacaattaggaacctaccctctatagcctgagcatctaatgcaaatctgtcaaggacaggggcagttgcaacacagcttgagcagcataaggtacttaagctgtaataagatagctcttgaaaacaactcaaaagcactgaacattcttaagcggaggtgcgagaggaagccttggcagaggtagaaagcttggatct

SEQ ID NO: 285962 - DNA, 379 bp, Zea mays
ggcaatgaactagcacacttcattacttgggcattgcagcttagtagtttaaacccccggcgggcgatgaactagcagccaggttcagaatggcacacacgccttaggtaataaattaataatcgacacaagtcaaaacgatattgatctcattcacgagaaaccacctgctaaactactcgttcttcttagccttcatgttccccttgggaatcttgctcaagacgccgtggtcgagcttctgatattgatctcgcagcagaccaagaaggctgtagaggaaatcgtccacttggtcttcgtacttctcatagagcaccggaagcgtgtgaacacaaacaaacccgacatatatgacagtcaggaaattgcaccaact

SEQ ID NO: 285963 - DNA, 414 bp, Zea mays
ggaaaaacttacagatgggggttatgggctaaacttatacagcaaactgatgaccgttaatagttccatgaatgacactgcactggtccaatactcacctgactaccttataaactaaagagactttttaggggtcaagaaaaagctacctaattttctttgcccctatacatcccagccatcaccccggctgctaaaaaacctctgggaaggcaaattcccaaagattcctgaaaacatagcagggcttttgctcctagcatggtaatgttcctgtcgtgtttcgactaatggctactcctgagaacttagacatatcaattgcccaagctggttttacatactccactgtgcttgcagagcttgcattcgcaaataagaaatttaggagaatatcctcacaattaaagaaac

SEQ ID NO: 285964 - DNA, 906 bp, Zea mays
gccacaagtttatctgtttttgattaaaagaattggtacatcagttctaacaggcacaacagcagtcgatctacacaccgccgaccccgtccgtactggtgatatggcagcgtcagggttccaacttccaacaagtcagtgctcctagtcctagcatagcctgccctccctactcatgcttaactacgtcagcatttagatctggaatagaaacttgaggtccgcctctgtaagcttcgacatggcatacgacgagtcccccacggtgccttcaaacaccagctccttcttctgttgcagttgcagtatgcgctcttcaaccgtgtcctttatcacaaacctagtgctcttgattggcttgaactgcccaattcggtggatacggtcctgcgcttggttctcgaccgctggattccaccaagggtccatcaggaacacatgagatgctacagtgagattcagagcgactcctccagcttttaagctcatcaagaagaccctgcagtctgcatcatgggtgaaggtgtctatggctcttcccttttcggtaatgttcatggctccattcaactggacacacttaatgccggacctctccaaggaaaactgaatcaaatccaagaatgatgtgaactggctgaagacaatccctttggcagaaccatcgtgctcaatcatgtttcttatctcctccctcaaggcatcaatttttgtactcgtcttaaaatccacaaggcttggtagtctgctcaatattcctgaacatttgcgacccttgacacttcgagttacttttccaactgaattttgtgctgttaagtccacggtgagaggtattgaacaggatggacatgaaacattccccaaagctgcagagtagtctatcaaacaagtcttgcagaatgc

SEQ ID NO: 285965 - DNA, 544 bp, Zea mays
gtctccaagtatgacagggacctggacattgtaggaacataaacatattgaaggatacaatacgataatataatacatatggcgcggacgcaggttccacaactgtctctaaagacagtgtacatgcagttacgaaacggtgatcagtacaacattacataactctaacagtctgcagctccatagactatacatgtacggtgcaacaagcagatgatcattgtatacaaaagcgtgttgtaagcgttggtttgttgcgtagttcttaaaaagtctttggcacaagcacatcaagctgcttaggcttaaacatgaagggagcgaagcacgttcatgtcaacaagcatagaaatccagcgtggcctatgcatagcatcgatggcgaacactgatctagtagtaacctcttcctaggcgtggatgtcagttcctttgttatagcgggagtagcacctggaaccacagtgctgctgccaacacaaaaagtcttatcttgcacactggttgcggaactttgtggtgtgagcggggtggaaggcatgac

SEQ ID NO: 285966 - DNA, 526 bp, Zea mays
ataattttcttatcgctacataattcacaggataacatatgttgccaactaattaacaacttgttctgagaacaaagaagctactgtgctgctgttgttttggcgttagggtggagagagagtagaaagagaaacagtgaaaatgggttatctcctgtattgattgattgactgactgaggttcatcttttgtttacatgattaatggaatggtttagtaactgagcacggagtcaaatgttagcgcccgctcgctactcgcccttctgcttcttcttcctggaccgcctggtggggcccgaagaagggctcgtacacctgcccgcgagcttgagagcctcgtcgatgagcaccaccgggagagccaccagcaggaccagcagccactcgttgaggctgagcgggacgatgccgaacaccgtggcgagcagcggcacgtagaggatgaggaagtggaggccgaacgagaccgacatggcgacgagcagccgcgggttgacccagggcggcatggccaacaggctgc

SEQ ID NO: 285967 - DNA, 510 bp, Zea mays
aagcataccatgttcttgtatgtactttttacatatccgtaggtacatgttcttcaattatcatcgagccaatcattgggcgagatacaaaattctgggtagctaataatattgaaatcaaatccctctgccctattccttcatgatgcaaattcaaatcggatgtcaattgcatatattcgatgaattgcattttcaaacccataccaatgctccatagacttccacaagctaaggccacttatagctctcaccactaactgatgatagcatttcaagagtctactgagctttctttgatcttggaacagaggctaactctttactcgatgatctgatgatgaagagaatggtctcaaccagcatgccaccaactaatcctaagatacctccagcagcgttcagtacagcattattgttgaacagagctttgaacatagcaaatcctaccaagtaacctgtgaacataataaccacgacatgcagacctgatgatgaagagaatggtct

SEQ ID NO: 285968 - DNA, 301 bp, Zea mays
acaaaatatcgaatttcttattcagcttcgttagctaaacgacaagaccaataagcattaatacaatgttcgtcgcctttttcaagtgccctcatttatgaaatgtgataatccttgatgcttacaataagcattggttgccaagttaatgactccacaattacaataaaaaaatattcaacaagaaagcaaaagtggctccgtacaacataatagtacgaacaggtaaccaaaaaatgacagtgaagccatttataaataaagaaaatagtttttcataactgactcatcgatgatagcg

SEQ ID NO: 285969 - DNA, 422 bp, Zea mays
ttctttttttttttttttttttacaaccaaaagcaagggggcatttatttgtttattattttccacaaatatttgaacaaatgcgaatgctagtacaattgtacaaatgatccctcttcactggcaaaagaaaagagcacgacacgtgggtctcatgcggcaagcatggcgaaaccgatgaaggcgccgagcgagccgacgaagcccgcgacaacgggggcagccgtggaaggctgtggcggcgttgtggagctgccgccctcagcggccggcgcgctggcggaagcggttggcggtggggagcctcctcctgctggtgttgtcggagtcggcgccggtggcgagctaggagttgtcgtgggaacgggcgccggtggcgagctaggggttgtcgtgggggcaggcgccggagctaaagctgg

SEQ ID NO: 285970 - DNA, 209 bp, Zea mays
ggccgccctttttttttttttttatcattgaaccaataacttgagttcatccattaactcatttgcacgggggagacataacttatgccaatatataaacatatcataattctcctaacacctcacattacaacaaagatatccatcccatgaccccatcccaaacttctgtcgtcacccgattttacaaaaaagaacactttggatta

SEQ ID NO: 285971 - DNA, 314 bp, Zea mays
gctttgcttcattaaggagtcttatcattgaagggcgaagtttctctctctctttcctccctaaaattgtctcgcattgttcgcgttgctccagccgcgcaaggagaatgaataaactgcaaagggccatggcaaaggccagcaccaatcaaatcaaccaagcgccgatctcgtgatctcgtaggccacgaatgtcgcggcattggctggaacgctgcgtgccatggcgggtccgaaccccttgtacaggcccttcaccccatcagccgccacgatcttcctcagcgcgtcgagggacccggagtacttgggct

SEQ ID NO: 285972 - DNA, 397 bp, Zea mays
gggaaataaacaaagtaaggccatattttcacttgcatttctccgattacagaaaagtagatttaacttagttaggttgcactagaaatagagcaatgaataatgatgagaaatgaacttgtcgatttctcaagaatatagagaatatttacctacctgtactacgagtcactgatctgtacaacaacagatataactggaactttgtctgttgcattgacagcctttgtcttcagccccagcagtactgttactgacagtccgtgactcttaaaacaccacagagggcagacggctcacgcttaaaatcacaataagattccaaacctttctcttggcaggccacaagcaagtagccttgatagtttaactgtcattgaagcagtagtgaggaatt

SEQ ID NO: 285973 - DNA, 266 bp, Zea mays
aagaaacctgtcgtttcatatccgtgaacccataaatgatatgcaaaatacgataatgagcgacacaatgatggtcaggatgttaaaaagatccatcattcatgtcgcacacatcaatcaagaatgatgtcataaatataacaaagatgacagatgccatgccataaatcatgtcaatatatgtgcatgctgaacccataacagaaaatacaattgaaaaaacaaaatcatcagaacacttggcttatgctataaaaattcttttt

SEQ ID NO: 285974 - DNA, 559 bp, Zea mays
aggaagggatcaatgacctctctaagggtggctttttattggggggtgatctcagctgcgcatgggagaattccataacatgtacggctgttggctgcaacagttcaaacttcagtccggcaaaataaaaaaaatacaatatggtaatacaaacattacgaacgaacatgacagaaaataagcatgtatgtctaccaactactagcttactgacagaacagaaaaggtcaattaggaactatgaggagccatgagtgctggcatcagtagctcagtcaggcccagcgacctctgcctccatggcttcgtgattgatgggtcgtcgcggcgactgtcggggttccagcgtggccgccggcgcatgatcaaggttttcaaggcatagtgctgtaaaatatgtaaaccttaatctgtagggtagaacaaaaataaaagaatgatgataaatagtgacagaatatcaagatggagcatatgagcacctaaattcagcagcatgaattgtgagatgtatctctgaaccatattttttcctaattatggctattgacacatgaaa

SEQ ID NO: 285975 - DNA, 413 bp, Zea mays
agcagttcaattcacaaacggtgagatctcaaaagagagcttacacaacgtgacattatgagcatacaacatacaagtacacaaccaaaacacattggcacgcgaaggctgagtgagtttctgtgacgctgttcaagtatacggatctaaattgtatgactgcagtgaccatacactccacttcctcctctaatgtttaaaccactcggaaagagtttggcccattgcatcagagaacttttttcatggtcggtcaggtaaaaaccaggcagcaagccagcaacccagcagttggcaaatccattttattggctcatattcgacatgaggaaattctgcacacctaagccacctatatgtatcatgggtctatttgctgtcttggcaatatcaaacatcccggcatgtttagc

SEQ ID NO: 285976 - DNA, 456 bp, Zea mays
agcaatgtacttattagtctatttaatttcattataagttgaagttaaacttgtttagttttgactaagtttataaaagaacatacaaccacctacgatgtctacgaacccaaccagccttccagtgaattgtccagtgcaattccccattaacaacttttggattgaactggtacatgcaacttaataaatcttccgtccaaaaagtttattcaattaaatccttatcccattgtccagtaaccgggtctgtcagatcattgacaaaagttaacatgtttggcccccttggagtgcacggtcctcgcagcaggcctctaggaaaccattggccatcccccttcttgagaagatccattcccttcagaatgctcctccaagtataagacataccctcacttggcttagcatgtaagatatctgtcgcatgaaaatgtttagcttctagaagtattg

SEQ ID NO: 285977 - DNA, 572 bp, Zea mays
tttcttttttttttttttaatgaaaatgtaaagcaatctgccaatcataatatcagaataggggcgtgacaaattcaccatatttcatcagggacgacaaaaatgttacatatgaactctataataattaaattaatttcctttatgggacttatgattatggacacctagtccgtcctgtgttccctcgggaaaacaagggagaagggaataaccactcgtaatcgtaactgatatggaaccacgactggtttgtcacttcgcaagcagaagcgcgtccagcaactgggctgtagatgatcttaaagaagggcacactgtggatttaccaaagaagccatcatatagagcataattaacagtagcagatttgatctctgcatcaacttggcgtggatcttcatcttccgaaatggagatcagcattcttttgggttcaagccaagttaagtatatgcttgttccctgtttgagattgcgcccaagaaaggtattctgcaaggttgacagggaagattcttcctcggcgtttgggttttttatttggcgggcaatgacatcatttagagcat

SEQ ID NO: 285978 - DNA, 428 bp, Zea mays
aagaaaccatatgcttccggggaagggatactaagcatgttgccccatgctgcactgtataaactaaactcaactcagtgatcaactttggtttggtgtgggcatcctcaattcaacctgaaggcatgtacatatctcagaaggtaaacgaagtgaatggcaagggagatctcggcgcggcatgacatgctgcgtcggtcaacaggggaagaggatcggggacccgtcgcggcgcagccggttctccgtgaggcccaccttgctcagcttctcctcgcaccacagcagctgctccctgctcagcttccccacccggagcacccgcgacacgaccttgacatcgatcagggcgagcagcagctgcacctcctccactgtgcctggccaggtcttgctcttccaccctttcctcttcttcagcagctcct

SEQ ID NO: 285979 - DNA, 523 bp, Zea mays
taatttattttttttttttttttttttttgggggcgatcaattccatgcagacttgtatatgtgatagtacaatgaatcacttttgtacaaaaaacactatcaacagttggccaaaagcaaaacaagctcaacacagaaaatctttaaatattgtttgtgctcaacattaaacctaatatctgcacaaataccatctgcgtgtaacaattgaacactaaggcgtccaatctcgctaggcttcaaaacaaggtgtagtgaccatcttcaatgattgggtcaactgcacgtgttgggtcataccttgtttggtgtgttaaggatgaactggtaacaggacgaagctcccaatacatatccaacaaagatttcacgagcctactgttctaaaaatgctctttttgcgatgtgaccttattgctatggttgaaattgtctcgcatgtaacctttaataccccaccatgcaccatcatttccacatagatcatctatctccatagccttcttccagaacttccgtttg

SEQ ID NO: 285980 - DNA, 366 bp, Zea mays
ctagttctagatcgcgagcggccgccctttttttttttttttttttctgcaattcctcaattactagtactagttcagcagtgagggcatacattatatacatgccgtcagagacattaggcagtcaaggggtaagagttacataaacaattctttttctcctatgttctgttcaaccatgttcgagaaaataaatagcaatgtgcattcccaaggatcctgagctaaacgggtcaagactcgctcccaggctgggcatcggaatcagattgcttcttgtcgctgccgttgccgtcgttctgttcattcatatcaggaatcgggtcactgctgccccccagctttttcttgagtgaagcgttctgc

SEQ ID NO: 285981 - DNA, 377 bp, Zea mays
tttctttttttttgttatttttacctctaacttgcaatagagtcgtaaatctttgtatttataagaaagaaaagaatgtccggagtacaagccttcctgtaaagggaggatgagacccaccaaataacagaattacacctatgctactaaacaaaaaaacgcaaaccctagatacacagtacgcctaaaaataatccatatgactccaaatcaaacaaacacatactattgattccagaatttcaccatttgaaaaaaataaatgaaggttaaccttacaatacaaaataaacttctgtcttgcgaggaacagtagattgtttctatgaaacaaatgcaagtacttgagggtatggcggcgtggtggccgggtcggg

SEQ ID NO: 285982 - DNA, 528 bp, Zea mays
cataagtcatttatattcaatattttttaactttattttttttacatttattatatttttattttttttttttgggtacaacgtttgtccatgtatttgtatgtaggttatgagatggaagctctctatacaggaacagagtgccggcagaagccacagctggttgaaaaccaaaaatagaaagaaagaaagaaaaaaagtctcggtaacatgatgtatgtacaagatacatgatatcacccggcagcctggaagtccccgaagtcttcatccacgggttcttgctccttcatcttctctgcagcagctggtagctctggagcaggttcgcctttggaggggagagcgctggttctgctgacgggttcagcaggtggttgctcttggggaggaaattctgctttgaaaggcgaggcagcgactccagaatccgtcggtgagacaggcgaaggtggtggtggtgggagtttaagggagacgggggcctccttggcgcttgtcttttcgttaacggagagcttgtttagg

SEQ ID NO: 285983 - DNA, 350 bp, Zea mays
aaaccagggatttcacttcaccagggggcaattaacaacagtagatgcagtagcagtcaaaagcagtacacatacaaaacataaatacacctcacagcattagttaaataagttactcctcctttggccttattattatttcatacatatatatatgcactaggggttaattccagcactggaagacatattacttgctttttcagggggaaaggattcgagctttccacagagcatcatcagaagattcagcgaagctatccacttgagtccacaacttgacaccattgagggcattcagatacgctggtgaggaacttcggcgcctgtcctacttctttacaccattt

SEQ ID NO: 285984 - DNA, 380 bp, Zea mays
cgccaaaaatatgctcgagatatagtgccctcctacagggccaagaacatgaacaacaaaggcgagaatcacaccagtttgtccatctcctttagcccctgcccatacgagagtccattcgaaatccccttgagaattgctcattaccagcacaatgaaacacattagcaagatataagtaacgaaatgaagccatgagggattgggaggcatttttctcgccaggaagaagccgcacctcagaggcggtcgatggcggagaggcatttttcccagcaggaagaagccacagctcggaggcagccgatggcgaagagctcgaaccgaccagtcattgtctgacaaactgaagtgggattagtgacaaggtcatcaccgac

SEQ ID NO: 285985 - DNA, 374 bp, Zea mays
gacagcatggacacgtgaacgagatcaagggtgcgtttgacatgattccacgctatttaaaatcatgtaaccttacaatgcctctacctaaatacaagaccaaccacagttaaaaaaaatgcaatccctatactacaaattgaaggcgtacgtaatattccacgcttctagctaaaagaaatcatgagccgttctccagatacttcaacccgttctgctctcttgggcccacatcatccttcgaccgtagtggagtggaggcaacgttcttgagtactgcagcatacaggtcgaattcggccttgtacttgcggcagctagcctcgatccacttctccgcgaggcttgtggagacgctatcttggctgtccctc

SEQ ID NO: 285986 - DNA, 499 bp, Zea mays
attacgaacccggccatctggggatacacagaatcttgactagtcagctttcagatagtcaaggaagaccaccaatagtgatgcacttgtgtagcagaggtacagagggaaattaacagagggaggaggtaaccttttgcctaaatcacaaacttttatggggggaaaggaattctcaacccacaagctacatgtttagcagcaaataggacggctcttactgagccatggcaccaccagtttatgttccagtatctcatggcatgagcatgacaccagaacatctaaaagctagctgttttcctgttctaggagagcacgagatcgttgtcaccaagatgtgggggcctcatgcacacctgaacttcatgctcctctggtccaacccggtgcttggggaccatgatttccagcccagttcctgtctcgtcatagtacgcctcgactttcgcgtcttctggaatccgtgtcgccagagggatctctctcacaaactcgc

SEQ ID NO: 285987 - DNA, 463 bp, Zea mays
ggcacgcggtaccgggccagcgccgcctccgaggcgtagcccgccgtcacgcgccccgcgtagttccagatgctgatcagggacacgaacgtgttgacgctcctggcggggtagcccagcgactcgccgatctgccccatgttgtcgatcgccgtcagcgtcccgcccacgccgcagattgtcgccacgaacagcaccagcatgtccacgctcaccagcgcctgcaggatcgtgtagtcctccccacgagccggcggacggaacatggtcctcacgcacccacagaacgacgacgacgccggctgctgctctgttttcttgatggcgtccgttgccgacgcggacacgggggccgggcggcggcgggtcggcggcgtcgagctggcgctcccggtagatcttgtactcctgcttgacgacgacgccgaggggcatgaggagaaaggatgagcagcggcgtggc

SEQ ID NO: 285988 - DNA, 460 bp, Zea mays
ccgtcaattagctagaattattacttactaataacaggcacagagtgccagaggtaaaagatctctataatgaagtgctcctttcagttcgaatacaaggcactttataacacacaacttcagcatcgcccccacatttacggcattcacaacagtcacattttcgtctcacaacaccacatcttttttttggtaagataatggtctcataaccatcacatatgctgctctcgaggatgcttgtacaagacgatttcctcctcgacctcggtcctggcgccactcaccagcacccagacctcagagatcttctccacacgcccttcatagagatctgcaatggtgaacgcgcgcaacgttggagctatggatcccgatccttcgggttgattttgctcgtgcccaggagttgtttgggcaaatttcactctaggcacaactgctccgttcagatatatga

SEQ ID NO: 285989 - DNA, 317 bp, Zea mays
ccgaaaaaagaatgatgacattttccagcaaacaaatttacataagggatttaccaactcatttgacgcctacatgaaccctgaaactaacttatatgggggggcaattaatggaacaccaacgcgccaacgaatagtaacagggcggggagcataattgggacttcacgacaggcgcgagagaaacctggcagggtgccccaacccaattttgggagagccgtcggttcaccattatgtcaccatccatcatgacccccgccacgtccacttgatgggcacaagccaatccgtaagtgttatccaacatgttgacc

SEQ ID NO: 285990 - DNA, 614 bp, Zea mays
gtggtgctgttcaacttcggcgactccaactccgacacgggaggcgtggcggcggccggcgggatacggatcatgccgccggagggccgcacctacttccaccaccccacgggccggctctccgacggccgcgtcatcatcgacttcatctgtgagagtctgggcacgcgtgaactgaacccatacctcaggggaattggttcggactacagcaacggcgtcaacttcgccatggcaggctcgacggtgacccacggcgtctctccctactccttgaacgtccaggtcgaccagttcgtctacttcaggcacagatcccttgagatgttcgaacgaggactggaaggcccggtgagcaaggaggggtttgagagcgctctgtacatgatggacatcggccacaacgacatggttggtgtggcgcacacaccgtccgatcagtgggacaagaagatcacagagatcgtcggcgaggtcagacaagccatctgatcctgtacgacaacggagcgaggaagttctggatccacggcacgggcgccctggggtgcctgccgccgcttgtggtgcagaagacgagggcgagcaggacaagcacggctgcctcgccggcg

SEQ ID NO: 285991 - DNA, 448 bp, Zea mays
gggggcgcccttttttttttttttttccgacaaagtagcatatgaggcatttattaacatacccccccacgttacatttcctcgcctgtccagacgttgagccagccaacaaatagtaacaataaacaatagtaatccttacatcacaccagtgacttacacgggcagccgattccatcggctgcaaaatttatcatgcatgatatggtatcgcttcgaatgtctttttgcagtgcaacagcacactctattttcttctatgcaacaaaatgaaccaaaaacatacacaaccagcaccatgccacaatcaccaaaacaaaccagaatagacagacatggagcgaaaatatgtttacatgtgtctgatgccaaggatgctctgagcctgggaccagcgtggagcagctcattgaagtcagcaccaccactctctagcctgacgaggcat

SEQ ID NO: 285992 - DNA, 463 bp, Zea mays
atccataatttaactctgccataatttatgaagcaatgcttttcctcatactgaaatactacggtcaggctcctctgagcaaacctcagcttgtcagttacaacacatgaacacaggtacaaacacaaaatcaggcgcctggtacccgaaactgtgcatcatcaaactaccaggttctgactagttatgactgtccttggtcttaagtggaagaacagatgccacattgtgtacggcttttgagtatcaagaaacgtggttgactttgatcaagtcaagaactaggaactttgtgcagtagcctagtttcgactagcaatccaactaagcagcaacacctgctgaattgttgagcaccttccctttgattcgttgatgggcaggtaagataagctgcaagagaggacaatccttacagggcagatagcaggtgaagcgcatcacagggaatggagcaccaagg

SEQ ID NO: 285993 - DNA, 447 bp, Zea mays
gaaaatgaacatgagattctcattcacgataacagagaagcagggtaccacaaaatagtttgcacaggatggaggggtttcctcaggctccaaaacttagataagttccaaacatacatttttttacgcaaactggtccttagccttgttctggcacaatacatgcgaacctatttaacattaatctccataataataatcacatgcaccatatagatagaacgaacaagctgtactcacattatcgctagtaagtttttttttactcctcatgatgtatatgtacttctttactgatgggaatgtcaaaagcatgccttttccaacgtgctcacagcagactggcctggagctgaccatcccttatctgcgctgcgatgtctctgacagcacctggtccatgagggatgaaaaccgacgaggacttggacgaggccccaatctcct

SEQ ID NO: 285994 - DNA, 447 bp, Zea mays
tactgacgaaactgaatgatgcgcttgttagttgactggcacgaactaatgagaggcagctagctgacttgtaaagttgtaatggtatatctatgttttttggctgccgtcatagagccatacaaagccaaagtttcaaggtccatagcaccggcagcgaaatcacgacccgacctggaaatttcaggagcagtccaaattctggctcatatctttgtctacaaacttcatcgtcccatttttttcttcctcaactcctgctgtattgccttttgccttgccttctctgcaagatcaggccccggattctgatcctcagcagaatcaacttttgaacctcccacattacttccaggggttcttgatccaacttttgaagacactgcttctttagagatggtagtacccccatttaggcatacattagattcttccaccacagtcccc

SEQ ID NO: 285995 - DNA, 480 bp, Zea mays
ggatacaccgttttcaatggaatactgtcaaaaccaattcaacggggctctttaaattccaaatcaccaaataatactacagttgctaaattacattaatataagggcagaagtaagaatggtaatctcaggatagctgcttgctttcctaaaaaaatgaaagtagaattgcccacacgaataactgacggactcttggcgaacgcatccaacatgcccaatcatgtgctcgtcttttgttgtcatatacttttctgctagaataaatggctcagactcatcctcaagcctcgcctctcttaactcatcagagttagcaacctccccctcaagctcttgatttcttagtgttaacagctcgtcaacatcgccaatatgtttgagcctcttgtagagcagatgagtagcttacgatacacatgttgcttgtcgtggtgacttctttttaaatttcttcctcaatttgtccattcccatgaa

SEQ ID NO: 285996 - DNA, 456 bp, Zea mays
atcaacaagccatcactaaatacgtcaggttgcaaaacaaaatggaacagcatgaattcagggatccaaaatccctggaggaggtaacagggcagcctcatatggtacagcgggcgtgaaaacacaatggaaagcgagaaaaaaataaaatgtgacagaaaagaaagtaaggagatcttgatattgtacaggtgggcatcgaaactataaccctgctgagcagactagttaagcatataaccaacaaataatctagcacgatatcgattcatgactgtttgttttgtttcgactgtcgtcgatcatttcagtggcaaagtagtctccgtggcacatctttcccagcaggacaggcttcccatgagatgtttctgtcaggcttgttgtgcagagatgaaatctactgaatcacacattcacatttccggaaaccatcgttttctgcatcatcatcca

SEQ ID NO: 285997 - DNA, 573 bp, Zea mays
gggggcgagggggggcttcccaaaccatggatggcgctcaaattcaagaattgagtttgactagggttaggcatagcattggaatttagttcctttgagttagtatcactattcatgcagcagttcttaattgtaataatcgacttgtattggctgtacgcattatcatgctaaagccggaactcttgtttccattataaaaaaataagccgcagtagccagccatactgcaggtcctcttcttgcatgttattgcttctattccacagtcatcgtcagtcctgcatctgtggctagcgtgcgcatctggaacatggcacgcactctcccatggggtaccaacacttcttccgaaaatcgtctcgggacaaacttgagacgataatgcgctcgcgcgaattggttggatctcatccttaacagatgtccaattgctgggtacatatgctgcaggaaatttctcatgccacgtgcttcttattggaaggggatgaccctctgttgtaaatatgtaattttgattcctcaagaatgaatcatcatacagaagaaaaagatatttgcacgtttctg

SEQ ID NO: 285998 - DNA, 299 bp, Zea mays
gcggccctttttttttttttttttttttttttttttttttttgttgttttttttttcccaggtctacagttttatttgaggctcaaaaggctggatcataagggccttacgggacattttgcatagcaaattagcagcgggaatcacccaagtcttcttccttgcttgcacatgacaaccattctgtctagtagctaagtagcacacacgcctaagatttacatgctaaacttctttttaacaactcaaccatgagttagccagcccactagacagacattttatgcatccgggcttcc

SEQ ID NO: 285999 - DNA, 415 bp, Zea mays
tgggtttttctgttcggttaattgtgaacaaatgagaaatataacttgaaatctgagaacgaaacaatacgatggtacaatgcagctgttttccctctccagaggacaaagaaatctcgctcataccatgggcttatgtcatcactccctgaatctcttcctataatctgattcaattcgcgaagtgtgatgtttcctctggctattaaccgatgctaatgaatccctctcctctaaattgttacgaactggctcatattgagaaatgcgaaagaaaccttcacagtcccaggtcacgtcatagtctactttcaaccgggatccttccttctctaaagaacgtccacataatgccttcattgcatcctggaagtcattatagctctcaaattgcacctgaactttgcaattaagt

SEQ ID NO: 286000 - DNA, 369 bp, Zea mays
ggaggtctatgcaacatcactggcaaatgaagagcaatgaatgatgcaacgggcgatacttaaataggaagacagatctcttccaaatagccagtcaaatcgtgagccatagacgcgtgcaagaaaatacacatagtgcaaatacagcttccagaactagtggttataactcaactagcggcagatattatattcaaggtaacaccttttctccacagcagcagtatgaatttataaattgggatcagagataggtatgcacgcctcagtgcaaatttaatgaactgatgggggtgggctttatgacaagagatcattcgtttgggtcgaattctcttctgctctggagggaagccctttttctagaat

SEQ ID NO: 286001 - DNA, 575 bp, Zea mays
gaataaagaagcaagattcttgttcccaaatgctcctagacgctttctttctttttatgttcatgcaccgtgcaggtgaaacaagtagctcattgtttagtactacaaaatacacccattcaaataaaatgtaggaaacaagtagctcactcttcttgtcaaaaaaatctggaagagagctggagaaaagcccattttcatattgggtcccatttaaacttccccttctaccttctagaggtggaaccaatgatttgggaaaagaatcaagttggtttgctagatcctggtcctctctccacgaagatggcggcagcttaacatccagcaacttgccatcaagactaaatggcccttctccaccacaccgcaccaattccacagccatagctcgaggccacacacctgaagaagtcgcaagcatatccactgaaagtcaaaatatgaatggcctactactcgtttgagttgttgaggaactcatctactgttgaattaatggtagcaatgctcttattcaagatcacaactcccttaggatcaccagttgttccactgatgtacattatcatgca

SEQ ID NO: 286002 - DNA, 447 bp, Zea mays
gaaggaaaccagttgcactactttgattcggtatctgttttatttcaccaatattaacagtgatgtacaaccatttcagtttctcaaacattgtgtctgggagaccctacaatccggtacacaaacagcattaagaagagtagaaaaaccaggagtcaaaactaaaaagaacaggtttcagatttgctgaccagtgagtaaggtagtgttgaacccgatttagatgtgtttaggttcatcttgaactttggagccaggataagaaaacagcttggtagcattcttgtaactcagctccgccaattctgactctggcatttcaaggagtgatgcgacatactccaaaacaatatggatattttctggatggttcaaggactcatttgatgcattagcagcctgtgactctgaatccatgtgacgcttttcagtatctgcatctgaact

SEQ ID NO: 286003 - DNA, 538 bp, Zea mays
gcaaaagagtctggactatggatctttgtgacagagaaagacatgatagcttcttatacatcatcatgacacccaaagaatgagatgaacaaaaagaaaatttgaagagaaatgaaaagagctgctacccctatgaactactgtgaacaaggtgtttgaggacagctgcccctgccataaactattcttcatctgcttctgctctagcaacaccatgaaccaaacgaatgcactgtagaagaaggcgatcgatccccaccaatctctcgaccaaaagaaccaacccaatcatatttacaggatctcgacgaaaacacaaagaaattgacaagtatgactaagtcattagcacctgaccaagctcaactagcatcttctacctcagcgccgcggcggcggcgcacgccgtggtgttcttgaggtgcgtccgcgccgtcctgagtagctcgccgaaccgcttgatgttaacggtgacgttctggcggtccatgtacactttcttcatctcccaccagccgcggctgctgatcacccaggg

SEQ ID NO: 286004 - DNA, 543 bp, Zea mays
agggttaaccaccattcaaatgatagaagaaattataacgataaaaggacttggtcgggcgattcaacttcgcctgggatgcatggggtcaatgcagtcacttaggataatacatacatgagaatagaatgttgtacccaaaactgctatatgctacaaaactcccagagaactgggaaccaaagaactcatacggcatgaatacaatagggattccaaaatgtacaacaaagtgaaaacacatgacgttccctgacaaaagattcatcaggctttcttgtcggacctattaaggtttagattaaaccacttctttttgccagatttgtctctgccatctacgctaccattctcagggctctcaggaatgctctgctcgatggtatacctactgctactaccgacaccaacagggtttgccaaagttcgttcagttgtgaacgagcaatggatattgtccctctctctcagcatatcatcatacgcttctctctcttgtgtatatctgttggtgacttcttgaaatcgtgccaaagcttttct

SEQ ID NO: 286005 - DNA, 302 bp, Zea mays
cgcatgcacaaaaaagtaaaaagaggggaagaattgcatatgacaatacatgtaataaatatataatcatcatttgttattactaccggcatattgaacacttcattcatttcaacatacacattggcttgtaaccgctttgatcgatcaggtattcattcacattcgcaggaacagtgcttgaaggcactactctttttgctagtgtagcacctacattctcctcagattgtctagccttgcctgcaaatcagcgtcgataccactgtcagcattcccagcactttcagcctgggcgaccc

SEQ ID NO: 286006 - DNA, 534 bp, Zea mays
gctaagaatcagttattagtcttcgcatgtgggcaactataataaatcaataaacgacacagtagtcacgagacatgtaaaacaagaggggatgtgaggcattttttcttcagcatacaccagttgatccactaatcaacaagccgtccatcgctccagaaactaccagctctaggcaaagttgatgtcatacgccttactgccgtccgccctgaagatgccaaagtggcgctcgaactcggggccgggcttgccgtcctcgtcgtacaagtcgaacaggaacacctgcacgggcacgccgggccgtttcggcgtgccgacgccgtgcgccgccctctccacaatcttggcgttgtacgctgcggcgttctgcggggtggcggccgggtgccccgcggttggccacccggtctcggtcaccgagaccggtacgccgccgaacccctccttctccagcgcggccaccagcgcgtctaccgtggcgtcgaacaggttcgtgtacaccagcgcgccgtcctgcaccggcgccgcgcc

SEQ ID NO: 286007 - DNA, 481 bp, Zea mays
gagaaaaaatgcccttcccccttatattcttacttataagcaatcgttcattcaggaatgacaggtcatcgagtccttcaacatgaagaaaccgttgacaactcatcaccaaatataccaacccactgttgtaccttttcacatgagagtttttttttcaatttcaaatgttgcgactaattcaaatgttgcgactaattcatagagtatgtagttttttcatttcttctgaaggtcacatattttgtggggagggaagttgaccacattctaaaagtaaggcgtaaagaaaggcagaggtcagctaatcatagagcccttcttcgtgccatatgtcaaccaaaaaatcaaccatctcctacaagagctctgcaagtcagaaactgataacataaatgaccaatagaagcaggaaagctttaactcagggatcttacagataatgggattcgttgtggaaaacgctcacttgtcgacaaga

SEQ ID NO: 286008 - DNA, 351 bp, Zea mays
cccaagaatggcaggtcttcattccaagcgctagttcaatgtacaacgattcgtttcatgactcatgagaggctccatagcacacgcccagataaaccagctaaccaccacgcgtgcgtgcacagtaattcttaccgtaactttcacaaacatttctgttgaagctacacagaccactcattacccaccaagcatatggatcattccagacttctctcactcgctactcctattacagccagataaaaagcatggttacccagcttgagtattgctcatcaaatcaaatgcagataaacgcacccccattgtgccagttagcttcttgtaccccccgatcagcatccagag

SEQ ID NO: 286009 - DNA, 454 bp, Zea mays
ggagtaatgtacacagtacacgacacatgagattatgtacgcactgtagtatttcagcataaacaaattgtacattgagctttgctgtacaagtaaattgcaaagtggagaaggaactttaagcaacagaagctatcttgcacttgtattggtgagcgtaatatataaaaacaaggaaatttagtgagctgagaccggctatcagccagaaaaagcggtcaagatggccttcgttcaagttatcagggatccaccccaattgcccattccgagttgtgaaatatgacaccaggcttaagatgaatgagctgagataacttccaagtgacacggtaacgagagcgaaagctgagcataagcttctcatggcatctggtgactgattgtagaaaaactcagcttgaccaattgatgtgaacacctcgcccacaccgaccagcaaatactgaggcgc

SEQ ID NO: 286010 - DNA, 423 bp, Zea mays
gacccacgaaccatgcatcttttttatttgtcgacaaatatttgtgtttcttgttttacgtgaatgtaaagaacatttttattcctaatgggaacataaaacgtacaacaaaattgcattccagatttccttctcaaacaacaatctcggcgtcacctcgctaaacaagggataaaaatcaactaggatggatgcctggccatgatttgagaagggggaggggagaagatcgagtcagtcatgttggaaggacagctataaaaactctggccatccacattgaccgcggtaatccaatccaatccaattatatttcggaagatcaggacatgctctctctgcactgcactgctgggtcataccgcgattcaactgtctggcagcacctcacaaagcaatgcctgctccacgtaatgctccata

SEQ ID NO: 286011 - DNA, 551 bp, Zea mays
agatcaagaaaaaaaacgctcaaatgagcttctataatcagtcacatggtggacaaccatctataattcacaacttgctaaacaaccaccagccacttttctcccggcttaaagttgaaggtcgctgtaaccatcagcacttaaaatgcattaagctccctcttggatgccagcagaggcgcttctaatagaacatgagcaggatctctccaaattgcaggtcatcatggctcaagttcaaggatcaccagtaatctttacaagaacatgatccatccttgaagtgatgaaaccgaatccgatccctcacaatgatttcaacattgtatagcttcgatatgagcttgctgatggtggggcagtctttgcacactctaaggttcttcaggatccgaatgggtgccccaggtgttgcattgagtaggccaaatgatatggctagccgttcgctgtgcaaacgcagggtggcgcctttggtgcggtcaatgtcggcgaccataggtgcctccgacaagtccggcttgtatccagcagatgtgagcctctgttgg

SEQ ID NO: 286012 - DNA, 372 bp, Zea mays
gctggaagaccacttggcacccaaatattccaatccattttactttattcacataaggggacttgctctcattatcctttttttccccccccgacccatatatattggctatctacaaatatctatctattggatagctgcaatggccgctggcagctttgaaccccacctccccacctagattagattacatacaaccctctaatggacaaaattctcagctgggaatcgagcgaggctcaagacccctcctggaagggcagtgaccccgagagcccaactgggttcccctgcaaaaacggaaagcccttgatggctgcccagtgaggagttgccgtccttgccgcctttttgttctggtcaaaaaccctt

SEQ ID NO: 286013 - DNA, 361 bp, Zea mays
ttgtttttttgacatgaaagatgggattctcccatcttgtagcttttatatatacttcaaatctctcacaaccctctttcttcaaaatttctgatgttccacatctcctagggcgtgtacaagggctggagaaatttcagcgttcatgtccgaatttaggcatacaaatagggagaactaatcaaaatgcaaattacgaaagggggactagcagagtagctagctaccgccgcctgcaagaacaaattttcgatccgtcccattcaaattcaggcaggcggtcaagaggcttcctggaactccaccaccaccacggttttttcctccttgccgcccgcgtcggcgccgcggagcagccgcc

SEQ ID NO: 286014 - DNA, 548 bp, Zea mays
gcagaaaatgcgggctttattagatatgtgcaaacaactctgtttggatgtttgcgaatagccctatatgatacatatcaacgaatgcgccaatatacatcctattgctagataaaatacagttttattttgcagtcttctgaaattctgcatagataaccacccggtagcctacggactacagctactcccaatgataggcatggccgaaatagctgcatgaccacgcctcaatcttgtggtcacaaaaaaacaaacgaactaagacggttatacacactggatggcagcaggccaggggcacggcaaccttcaaagaacaaattccgtagaaccgcagctggtctctagatccagcaaatatttgcggcatcgccactttccatcgcttgttctccctgccgctttccttctcttgttctcccctgacctcagggagaggcagataattcatacattatgtttcttcgatatcctcatccctaatatcctcaatttcttctcgctagtacaacgcatttagctcttgctgcaactgaacatgttat

SEQ ID NO: 286015 - DNA, 362 bp, Zea mays
caggccaggggcacggcaaccttcaaagaacaaattccgtagagccgcagctggtctctagatccagcaaatatttgcggcatcgccactttccatcgctagttctccctgccgctttccttctcttgttctcccctgacctcagggagaggcgggtaattgatctgtctcagggagaggcagataactcatacattatgtttcttcgatatcctcatccctaacatcctcaatttcttctcggtagtacaaagcatttagctcttgctgcaactgaacatgttttgtcttagctgcaattagttcatcagtcagtgttatcatcctagactgtaattctgaaattttaacaagtaatgacc

SEQ ID NO: 286016 - DNA, 442 bp, Zea mays
atattggctggcaacaacacaagctctgattcatactggaatggataaacacatgcacatctgactccacctcgcacagacatgcccacaccacagagagcgagtctgaaaaaaaacatgaaagttcgactccacacacaacatttgcagccctatatataattggctaggactaagactgattccacacacaacattccacacacaacattacaccttccaagaacgcaggtacaacaggtctaataactgtttatccagccaggagtggagctttgttgcacattctctagaagggcttggagggcaggttcgtgttggtcaggaagttagctgcaagagcaaaaccagggcccgcactcacattcttgacatactcttgcctcgccgggtggtcctcctgagggcggtttaatggggtccagactggttccccaatgaa

SEQ ID NO: 286017 - DNA, 346 bp, Zea mays
agaccgcgtaattctaaactccaattcgatgacatccaaacaatagaattggaattacatctcgtttcagtactatactatgattaatttggcattcaaacaaattcaattacatgacctccaatatcgacatctaaacgaagcattagtaaaactgaggcgtatggcgaaaactaatttcttcatcaccttcccaatacccaatgcattgctggattgagttaacaacatcactcatcaatctaaatttgcacctgtaacttccgttaggtgactttcatgagaacaaggattacctttttgatactaagcactggaaaagtggcctcccgtacaaactttaccc

SEQ ID NO: 286018 - DNA, 559 bp, Zea mays
tgagacgacacttacgactagacaaacttgtgttgtggcttggctcgtttggctcgtgagctagctcacgagctaatccgagctggctcattagagaaccgagctaaaatgctagcttggctcgctacagaatcaaaacgagccgagtcgagcgagttatcgagccacaagtatttcgtccagccctagccactactgatcaggctccaaatggtcacattaaagatgctgttttgctgtacaattctttcaactattatactcctattacctatgaacaaaacacagctagattctctccaggggttccgaagctgaactctcatctactacatgtgtttggttttagtgcttacacatagaacacctgcccaacattcagtaggctctcatggggaacattgaagatggcgctgttctccctgcagatcttcctaaggaaagcatacaagtaattgatagcaatcttcttgatgaaccctgaatctctgcgggccctgatgactgtgttcccgaggatgtgcaccaccccggcgtccctgcacgcgttcaggaacgc

SEQ ID NO: 286019 - DNA, 306 bp, Zea mays
cacaagtaagcttataatattaggtcttctggcttgtcgacagagaaacagtctcaactcaggtctagttcaggtatgggtcttatacggggcgctattacacttgttcagctaccgccacacagtacatgtaataaagagcaagagtttaactctcagtaaagcttaaccataaaatctcaaaggaaaagggcaaagattcatcacaggcttccgacaagaagcacatgattctatcacataaagtttgacaagctactggaagctgaagcgccgatgcgaaagcaatcgtcgatcacatctttg

SEQ ID NO: 286020 - DNA, 754 bp, Zea mays
aaaagaaacactacgttctttacaaatggacgagttggcaagcatcaaagagtaaaaactgacatggggctggtttgttcccccactttactggggggatggtaattaacaacagcctattttcctgggtatgttgcaccattgaaccaaaaacaatgaagtaatcataagttacacatatgtggttaatccagaagcgctacaaaatcgaaacctcgaaatataatgccaaaacttttgcacagcgaccttctcgccgacgggaatctgattcgtttcttcaacaatcaacatgaaatgtcaagctggtggtctttccagtagcataccttaactcacatgcagcccgggtcgagctaagtgtcaggagaggggagacttcaggctgcttaggtctcaactcacgatctcatcggatgttgaatggctagtttccaagttgaatttaggctcactgggatacacaaagacagtcgctgctgaggctgaaggagtcaatgcagcagaataccgcactgaagttactgtgatccttggcaactgctgagagccagaaccaagcggtacaaacttatgactaacagtgtgctctgatttcggtagaatgaaagcagcatgattgtgagcaccagaaaaaacgaaattctgagaatcaacaagggagtacttgatttcctgaagcaaagacgttgaattgtgaatcttcacatagatagtgaaagggatgccgaggattgcatagggagggcactcc

SEQ ID NO: 286021 - DNA, 510 bp, Zea mays
ataggagagtacaagattaactattttggatccaagattattgtagtttgactaattacttcaactcgtttggctcgcgagtcagctcgcgagccagctcgagctggctcgttatcgtaacgagttgaaatacaagctcaactcgttacaaattataaacgagtcgagtcgagccgagccactattgagtcgagtcgagcgagttaacgagctacgagttgttcgtccagccctaccaagcacaacaagacacacttgccagccaagctcttggcgcccttgagtgctagcagtgcagctccataggccgcctcagtctctgggccttccggacgccacgccgagcaccctctcccggatggccgtccacctgtcgttctgcgctcgtccccccgctgtgaacacctcctccaccgccgtcgcgccgagctcagtcagcaggctgtaccccttggcgtcgattcgcgcgatcgattccagtatgccgtgcaggtactgcgcgtcgctccc

SEQ ID NO: 286022 - DNA, 302 bp, Zea mays
actcaatcaattgcattaactacccttttctcagctcaaatgtcaatatgtcatccaaaagctatttgaaacattcactcaattaagatccacaaagtacaagcacaactatcttgagcaattatcgtgaattccatcttacgtgaataattgtcgatttggacttcagcagttgggagagtaaaaggcaatcagtcgctcatgatctcacttccatctgaattttcagaggcatcagtaacagcacctagctcttcagcctcttctctgtcggtttccatagcatcaacttcagactcgtc

SEQ ID NO: 286023 - DNA, 607 bp, Zea mays
gttctagatcgcgagctgccgccctttatttttttttttttttttttttttttttttttttttttgtttttttttttttttgcccaaagacgcaaagcgatcctctttactttccttatgtaaatactgcaagatcaagcttcagtcccccgaaattcaacatgacaaattacaacccagcgccggtcacatgatgaatttatatggcccgactttacatttgaattggttacagttacaaggcagacaataagttatttatatacataattattgttgccaggaacctctacatgctggccactctagagggggcttccgtatcgatctctgattccccgtttggtctctcctggagttggcccgttgattctttattgttgcgattggccagatagacatccaaagctttttctccgcaaagaatcttagctccaattccatgctgatttacagatccaacagactcctcgtcaacaaccacagcatctattttatcttttccagttcgtgtctctggaatctcatacatagcttctgtcaatatactttctaatatggaccttaaaccacgagccccagtattcttcgatattgctcttttggc

SEQ ID NO: 286024 - DNA, 1089 bp, Zea mays
aggctccaatacccaagttttttttaaccagtttgtttcagtagcaaccaggacacaggagcaaacaactgaacagccgggtaaaagtccaggagttttccgcctgttggtgcatcaaggacaagagcatcaggcagacccccccgcgcgcgcttccgatccttttagggagaagctctccatttcctctccttctatgggcaagggagtaaacaaaagggccctgccagccggcgtcgacccggggcgtacgtaggcactttagtactcagtcacacggtggtgaagcaagaacccaaaacaaaaaggccgagcccataacttagaacaagtgacgccacttttcccctcccctctttcatatatgtctattctctattatatatatatatctatgctcttgttgatgttgatgatgatgatatataagcagtgccttccgcacctcctgtacctaggacacctctagtgcatcagctggcgaggcgcacggggacgcacgggagtcttcgaggggctcacccttattggcaaggatcccagtatcacgccactgcagttcagggcagcggtagcactttctgccatcacaaattccacaaaagcgatgcgagtagaatgatggtagtcaccaagcaacctcagccgaaagacctctccacatatagactcaaagaacaatttcagatctgcctgagtgaccttcttgtcaatgtttgtgcagtaaatagtcctcgcacacatttcccgttcatcatcagacctgggtaggaatgttggattgactggtgcaatggcagttttcgatggcagaaccctgacaggataatatccgagcacagttcctgacagattcagagcagcccttgcaccctcctcatcagtgaactctatgaaggcgaaccgaaggactgagtttgggtctccacacatgcgacagtccacaacctgtccacaatttataaatagtgctgccaggttttcttcagtaacctggtgatcgatgtcggagacgtagacggtgcggcggatgatctcgtcgcgtgcgccatgctggtgcggctgttggtccgcctcctggcgggtgac

SEQ ID NO: 286025 - DNA, 335 bp, Zea mays
aaacaaaagggcctggccagccggcgtcgacccggggcgtacgtaggcactttagtactcagtcacacggtggtgaagcaagaacccaaaacaaaaaggccgagcccataacttagaacaagtgacgccacttttcccctcccctctgtcatatatgtctattctctattatatatatatatatatgatgatgatgatatataagcagtgccttccgcacctcctgtacctaggacacctctagtgcatcagctggcgaggcgcacggggacgcacgggagtcttcgaggggctcaccctgaaaataaaaattggcaaggatcccagtatcacgc

SEQ ID NO: 286026 - DNA, 401 bp, Zea mays
cagtgctcaacgctaatcgtaaattatcttcacattcaataacaatttgaagtatgcgacacctgcactgctaaagaagcaggttttaagacctgttgacagtcttaccccacagtcagcattaggaaggcaatgagcctttgtctcttgaaaaaatctatatcgttacaactataaggtagggatcaggaaccagtccacgtgtctataccttcatgtacaacatttcctttccaagcaggatttgcatggatcttattctaaagctaagagttacaagtcgaacactgtactatcagaaaaagagtaacaaactactaccgtcttccatgtttcgctttattttgcttatagtatgaatggcttgccaaactatacaaagggattgatttctatctcgg

SEQ ID NO: 286027 - DNA, 437 bp, Zea mays
ctatgaaatttctacatttcaaaggagccctgttcaaaaataaattagcgggcaataaaaattcgagaacgaagatagtagaaattatagcttgatatttacaacggattcatgggacgccaagtaatacttagatatacaatataatgttatctatgaaagcttgtatcaggacgcagagtctgaaaagctccgggcggtcccattcctctccagatccatgatgtctggacgagctcatgcgctgttcaacttggcgagggtgcgcttcaaggccttcacgctcagcgggctgttcttgctcactgagcaagttccggctctgacgttgcacacagggtaacccggcgggcagcagctggcgtggtccttgcagcaggtggcaccttccatcggacagcaaccccagaccaagcagacgttcctgaaaccaaacg

SEQ ID NO: 286028 - DNA, 324 bp, Zea mays
gtggggaagaaaaaaaattctattatgctactcttggcaagcaggagaacgccccattggaataagatgcaaaaaaaaaaaaaaaacctaaggagaatgatgtaacacaactttacatcatgatcatggctacaaagcaggatttttttttgtttttggtttgctgaagccagaagttctcacggggggctaggtcctctctgatacttgacggcttcttggagcggggggggggggtcctcctccccctccctgatgacgtgggagaaggctgaagaaggattgatgatatattagggaaccccagtttgccgttcccgaacg

SEQ ID NO: 286029 - DNA, 690 bp, Zea mays
gggacaaaaaaaattgatatagaggtagaaatttagagaaaaccggcggatagtcttagtctccagttctccgcatctgacaacatacaatgatacctgacacgagccccctcatttagactaccttagtctaaatacatacatcgaggctgcccttgcccactacgcataactcttcagttaatatggcgccaacaaataatgaattcagtacccacagcaaaaaaaaaaaaattggatcacccttcgaccgttacagctagtgttctctgcgattctcgcacgccatcagcccatcactcaccgtcaccactgacgaaccatgctctaaaattcacaggcactgcacgtcaaaactattgtagtacatttcaagagtctataacattttttcctcgctaccttctatgcttaactatgcttctcgaatgctacataaataagaaaacgatcaaaaaggaagaaaagcatgtcgtgctaatcagttcctccgacgatggctatgtcgacgcctacgcggtggttgcatcagcaaggacatggggtctgcatcctgagcccccctagtgtcagtaatcgctccaccatctcctgtgagccagttcagtgcctcgctcgcggcatcttcccccgcaagtttcttgtttgcacacggttgccccacgaactgcatgccgttgaactcaaccg

SEQ ID NO: 286030 - DNA, 452 bp, Zea mays
tttcttttttttttttgttttttaactttagaaccttgtattgctagaggtgcaaaacggtttggtttagagcatggttaaatactgtggagtgtaaacttactaacttagcgcctgcccaagtgtaacaaccgaagtagtacccccgcaggcgatccatgttaccagaacaaaaaaaaaaaggctgcgtatacattatgcatctaagaatcagctagagagcataggagcataagcgaccaatatgttggcttcatggcttgtgtttcttgcgagacgtcattcctgcaacagaaagatgacagcaccagcaaactcaacttgatggatctgtagatgagccaggcaataccattcttcgcctcagtattacagtgattagtgtgtcctcctgggtgacggtaccttgccgcttgtacagtctggagtgtagaagctcatgaaggggaaga

SEQ ID NO: 286031 - DNA, 448 bp, Zea mays
acgtcctcggggtcatccctaccgccctcctacctggggaggtgtcaggggtgacatggggagaggtgaaagtggtcagggacatgcatcagcgcaaggcggaaatggcgaaacatgccgacgctttcattcgccctgccaggtggttacgggacaatcgaagaactgctggagatcatagcgtgggcgcagctgggcatccacagcaaaccggtggggttgctcaacgtggaccgctactacaacagcctgctctcgctgttcgacaaggctgtcgaggagggcttcatcgacaccaaggcacggaacatcttcgtcctcgctgacaccgccgtcgacctgctgactaggctcaccatgatggcgcgcctggcagccgacgaccacgatgctactactacccccagaggagacggagacggagacggagacgaacacaagggggcca

SEQ ID NO: 286032 - DNA, 515 bp, Zea mays
tctccgggaggagcccctttttcgaagagacggaggcgagggtagacgacggaggcgaggaggacgacgaggcggaggaggggaagcccatgccggccgccggttcccgccgattcactcgcgtcttcatgcccaaggcccccaagccgccgcaatcccaggaccaggccgaccccgccacccgggtccttcgctccggtaagcgcctagccgccgacaggatccgctgggacgccaaggaggccgtagcctttcacgtcgacatcaaccacggccacgtccagaagcgccaaaaagaggattttcccaaaccgggattgccacctcttgacgaagtccttcggtatcgtgtacagaaggtgacggcgacgtcgtggcatcaccagtactgaggttgtccgcgacgatgagggcgggatcacgatgtttgggatagtatacaccaggaataagggcaagcgatcccaggtcagccctctgctgctcccgcaagatccagaggcccgtgtgacctc

SEQ ID NO: 286033 - DNA, 338 bp, Zea mays
tcctttttttaataacttttttttttctttttttttccaggggagcttaactgttccatacctgcgggccccgggctctttagaatctgaccaacgctagttacaggggattacattacatataaatatacatatagcccaacaccagtagtagttgtagacggcccgcatcatcaatcatacagtacgcctttaggagggccccggccgcgggtatgaaaacaagatacgtacctgtcttccgcccatcaatcgatttccgtttacattttgtacgtctactaatcgccttgtacagggagatcgccgccgccgctgaccgagaagcatcccttccg

SEQ ID NO: 286034 - DNA, 443 bp, Zea mays
cttattttttttttttttttttttttttttttttttttttttttttttttttttttttttttttttttttttttatcgtatcgttttatattccaatcatgcgtgtgcaagtccacgagaaaattacaagcatgtgtccattaaaaggcaggacatatgccaggatcactttaactaatctaaacagacttatttcatctcgatcctccaactggtaaaaataagctggtggatatgcaatcctggctgataaaaaaaagacgccagaggaaatacctgaagatttccgacgataataaagcacataccgagatatatcacacaaacacctcatgagtaataagtaagcgtgacggctgcatttgtcgttcttacctatccagaccatgcatgaggagctacaccatggctaacagagctcaacctatcatgcagggggttat

SEQ ID NO: 286035 - DNA, 368 bp, Zea mays
ccggattggcggtaaccatttccatttaacactgaatttccgaaaacggaaggaaaagacccatctgcaagcaagaagcttgcacaagtagacgctaacttgtcacaggaatgctgcagctctaattaataaccaacaagttctggactgaagtgcccagttcggttggccgttgttcatattggagcagcacatgtggttctgaagtgtccagtctggttgcagcggctgcaatgaacaacccgcttgactcgcccacggtcctccgctctaaccctcttcttccttggctgtgctgcgggcctcagtgacttcggtggattgatgatcatctccaccttgacctggccttgatctgctgtttcatc

SEQ ID NO: 286036 - DNA, 359 bp, Zea mays
gggcgtcttagggggttagaagtgtggttgttagcctactaaaaactttataaacacacgcacactgcacggaaggagatgattccgtctagatgccgcctttaaagaacgggtcgccgaggaaggaggcagagtaggtcccgccgccgttggggaagagcgtgaggaggcagaccaaggcgagcacgaacccccacgcgaggcgctcgttgccgagcggcgtgatctcgtcctgcgccgggatctcctccccgccgcggatgaaggtggcgaagaggcccccgtccaggcacagcacgctgccgctgatggcgcccgcgcccagcaggacggacgtgccgaacgacagcagcgccgcc

SEQ ID NO: 286037 - DNA, 230 bp, Zea mays
ttgctcatccgcgtcttcatccggctgcacaccttctccagctccaccacccgccagtgcatcccgtcaaggagcgaccgcaggttctggttctccaccgacaggtccagccgtctcgcgtacaggatcacctgcccgtcgttctcgccgccgccattgtcgtcgtcatagccgtcgcggcgctttcccgtggaagcggtaggggatggcgacacggacttcagttggcc

SEQ ID NO: 286038 - DNA, 729 bp, Zea mays
aaaacaacgtgccgtttattgttccttggaagaacagtccaatccaaatacaaatgcccggggactacaatttgccctcattcacagactttaactatcacagccgacaaaactcgacaggaaagacttctattcttacaaaccccactcctttccgaggcagaaaagaattttcctacagacatcccctaaaccaatagaattcacaacgtttttaataccagtataccacggaagaagaaaagaataagcgtagggatatggaccaaactagcaagtacaactgactaaaaaacccaaataaaaaatctactacggccgtggaaccctaactgaacagtagctcgaggaccagctcttccaacatatcatctttaatcattctctcaatgtcccttcctgccctgtcgatccagtctgctaaatctggccacttcggatctaaccctttcttctccggcttagtctcactgggcgcgagttgttcccgtctctgagttagcacctgcaagactttctctaggagaccctctgcgccccaaagcggagccaagttcctggtagtgttgacccaaggtcgcatgttcaagcatggggcgaggatctgtgacagtatcgtgttcaccatgtcgaatacaagcttcctgtctgatcttgaccactggacaactttggtgtacttcgtttccaccttctcgaacacatcgtcgctagcagggtactcggtat

SEQ ID NO: 286039 - DNA, 347 bp, Zea mays
ttcctttttttttttttttttttttttttttttacatggggggagggtaaaaatatattgcggggtatgcacaaatttacataagtttctttacaattatattacaaaaatttctctagaatcttttgcagaaaagtccttcggagcatctgttaagcttcagctcgtcattcttcagcttcatcatctggcttaagggggctccaagcttcgtcaccagccatttttcgcccgccgtttatccaaatctgggtcataaacctgcttcctatgctccaggctaggctggggatctcaaccaaatctgccggtgacaaggtgaagtttggcctatttacaattttccc

SEQ ID NO: 286040 - DNA, 320 bp, Zea mays
gagttcaaagggcaacggaaactactaaacgctggtggggcgccaacacggtctagttttatcatacaggttcggttctacaatggccgtggaccctgggcttctcgccgacggagaagctatttacagactacaagcagacgacagcgatcttcagagctcctaccagagcaacgaggctttccatttccaccacacaaaccggcgcgtgctgatgtgctcggcctcggcttcagcaaccggagacgaggccccgtgacgaccaccagctgccccctgtcaccgacgacgacgactgaccgcggcgcattcgatccact

SEQ ID NO: 286041 - DNA, 482 bp, Zea mays
gaagtagtagctcagtttattctttcaaccgcgagtccatttgcaacgaactggtatagccactagggatgctattccagaaccagaagtgtccaagatcaccaataaagcatgcctgcaacattacaattagcttagctctgttttgggccgcagatctgcaactacatctgcaactacatcgagcaactgtacacacatggaaccaagtcaggtacacctaccaaacctctgagggcctgtttctaacgcaggaatttcacaggatccaccacccaatcctggctggggactggatcccactggttgggagccaggaccatcccctgaacaaaactgcatcccatcattggttgttcagagttcagggtacacaatctggggtgccaagttttctgggccagcagcagcacgtcatgtattcatgtttataggcaaagatgcaaggaacagaagttccagagccatatcgataaacagag

SEQ ID NO: 286042 - DNA, 388 bp, Zea mays
caaaaacaaagaacacgggggatggatcctgtattcaggggtcctgattgtacagagttttacaacgcttcaaacttccagatacgctgctgcctattgcgcagcaagacagaaaatccacttagcatagccacgctcttcacaatgaacacagagctcactgctttcagagggctcgcacccggtcgaccggttgggtgtccaaaggactaaaagagggattgacgatcagttgctacacactgaatcacttctcccgatgatgggcaactctatacataccctaccacggggtccttgtcgcagacggcagagtgtctaccaccgcctggggcgctcaatctacaagccgcgcccgcatttgcgggctcttggacaaaacacaaac

SEQ ID NO: 286043 - DNA, 621 bp, Zea mays
tcctttttttttttttttttttctaaacaaaatctgctccttctatggggagcgttgaatttaactatcaacctatatcgccctccatttggtggcaacaagtagctctcacttttgagtacttctgtgcctaacgaccacaatgtcgataacaatgacttcttgcctgcgcagagatttaaacaccccatgaatgcaacccaacactaatctgttgatatgtcaaggacagacataacaagaaacaacttttatttaggtggcaccatatgtatcttcaataagtaagcaggattggtgtggcctagcaagcggttgcagggccttcacatgtgcacacagtgtcgttggaatcatggcttgcgctcctagagatgggtaagtatttcattaaaaaaccatgaagtcgctccccctgtggtgtatgttcattattctgctggtgttcttcgagagctccgttttatatgataagccgctcactaagtgaatatgtttcactgccttctaatagccttggcttccatagtctcgtttggtggagccgaacatggctgccgatgcttagtgaagctagcgttccgttgacgggactcagcctgcctcatgaattatatttaa

SEQ ID NO: 286044 - DNA, 495 bp, Zea mays
tcgcccgacttcgcttctgctttcgccggctgcctggattgcgggtccttcgaccattggtggggcggtaaagagaccctttccatactatccttcgcttttcgattgtgtcgatgttgtagctttcgtgccggcagggaggcaacgccgccgccgccgccgacagtgacgacactgctgccgccttcggattataactccttcgatcatcgcttttctgagttgtttgtgttttggaatcaaggtgcacatttgcatgaattggatctttgagcgaccagaccatataggtacaaacttagttccatggcttccgatgacactgctgagatgtgaatgttctgtttcgacgacgttgccaagagaattggtgggaaatcatacaactctcctatcatcagttacagggacttcaactatcctactagatttaacattgatcgtatctcttagattcacatgtgtagtagtgtacaccagatatcatgtgtggat

SEQ ID NO: 286045 - DNA, 430 bp, Zea mays
agtatggacacccaatagtgttttataaagtagtagagataagttgagcaggtttaaaaccggttcagccaggattcataccagctgaaccagtgcaacttgaaatttgactctatctcgacatctcatccagttttaattacacagcctagatactacacactttgtcagtaaaaatataagcggtaaaaatgcactgaactagggggatatatataacagtaagcccatgggagcttctaatccgtgacactaacatctatgtacatgttactaagataccattaatcaattggtcctacgagtcaaacgatacactgctggttctgaaacgaagggaagctcgaagctctccatcagtcttggttgctttcagtttttggaaggggcgctcctgacctggcgtaaaataccttcagcacgaattcag

SEQ ID NO: 286046 - DNA, 359 bp, Zea mays
ggggttaacctaaaggacacgggggggcttaaattcaaaacttcaaatgctggtgacagaaaatgctacaggttggctagttgcgcttagaaatgtaattctatacggcaaatcggggcagtcagagaaagagagttaaaaaaaaactaatggcccaacatagaacctcacaagttctgaactctacaagaatcacagagaagaaataaaaaaaaagagaagaaaatcagatggggaagaaaggggaacaaaatgaatacaacgggaacacttcctcccataatacagatggctgcctgatgcttgaacccacacacacaccaccggaggccaccctaagccaatcaaccagttagaga

SEQ ID NO: 286047 - DNA, 501 bp, Zea mays
aaacaagcaatgtaattattatgggtatttcgaatttattacttgcaaaattaataaatacaattttttcgtatcatttatatagtgtcaaatgagaagaaaacaaagaaaaatgaaaaagaaatggaaaatgtgaatctgttaacactgtagctttaggggacggaatttagaggacgctgctggagacggagaatatatagaggaccaaatcttctagagtgttctgtaaagtacaaagaatattcctttaggggacgaaatttaggggacgctgctgcagacagtctgactagagagagcagcctgcgcagcgcggcgacccgcgtccgcggcaaacagactcggtgccgagcagaggcaagtgcgcagcggcctcgaaggcagggcgcggcaacagagctgggcgagcatgacaaggaaatgacaaggctgagcggcgcgcggcgtccttcatggccgagggcgcgcgtggcacatgggagatccgcgagccggggc

SEQ ID NO: 286048 - DNA, 411 bp, Zea mays
ggcggccgccctttttttttttttttcgaaagcgcaggagaactgcgcgatattatattaaagaggagggacaattacagaaggaaacaaaagaggcgcctatggcggccagtaacaggcatacagaaacccatccatgtctaaagaagaacctaacacaaataaccacaatgctagctaactagcagggatgcctggaatgggggcggtgagcaaagacagcttttttgcaccagccatctcccataggtgaacctccaactcaactcttctaatagcatcagcaatactggggttcttattgtcaaaaacacatccattgcgttgcttccataaggtccaaactcccagaatgactagagaattgaggccaccccttgcaatttcagagactttgatacataacattct

SEQ ID NO: 286049 - DNA, 462 bp, Zea mays
agtaactcggaatcgctcgactcgagcgttttttttttttttttttttgggagaatgcaggaagcagtgacataatactatttgcacgagctagcttgctagttttagggggttaaagacaaaccacagatggctgccttgattgtactcctatatagatacatacagcgatgcatattttcttcagttaattgtggacacattacacttacacatgcctaatctgtgacatatttgatgccccacggccactagctccccacggccactagctcgtctttgagcgtcttcctgttgccctcgtgcttgctcccggccttcttcagcgtcttcttgagcagcatgtccgtctgccgctccatctcgcggatctgctccacggtcatgccgtaccactcgtcgatccacgcgaagcacagccggtggcatgccaagaacagcgccctctcccccgcaatgatg

SEQ ID NO: 286050 - DNA, 406 bp, Zea mays
gacaggacggggaaccgacaattaaaaagggtgtagtcagaagtatattttgactaagtgccttgaacagaccacaagctattcacatatggggggggattaggaatcaaccatttgcgatgccttagatgagcgccacgggtactctatttctggcaccatgcagcagaggccaccagcaacatgttcgccctgtactgtagaggctgggtcgacgctcgccgatacgctgcttatgggatcagcggcgcgcgacatagagggtcgggtagtagtcaggcggagcatcagctctggtccatatcaattctatcatattagggcgtctgacccgtgagagaaccttcagaatataaggcttcattgaaatctgccacaaacgtctgtcagcttaattctttaattc

SEQ ID NO: 286051 - DNA, 438 bp, Zea mays
gtcgcgcgcttcgaccacgtcctactcgtcgcggcctccagggactgcacggtggccgagctccagagggaggtcgtgtccgtgctcgggctgcgcgacgcgcccacggagcaggcgcaggccgccgggatcctgagcttcctgagggacaagagcttcctgctgctgttggacagcgtgtgggaacgtctggacctggagagggtcggcatcccgcagcccctcggcatggctaacggcaaggtgaggaagatcatagtggcgtcgaggagcgaggccttgtgcgccgacatgggctgccgcaacaagatcaagatggagtgcttgaacgaggaggatgcgtggagcctgtttcaagctaatgttggcggcgacatcatccatggccacgctcaaattcctgcacttgctaaacaggtcgctgccgaatgcaagtgc

SEQ ID NO: 286052 - DNA, 447 bp, Zea mays
tcagcgccgtttttcggcccaccactcgcccctccatctccacctcctcgtcgagatgggcgggcgagaagtaggacaggctgtactggacggtgagcacgtccgcgcccagagccgtgaagaccgccgccgcgcacacgttgtccgccgccaccgcgatggccccggcgtgccacctcccctccgcgtcggtgagcggggcgcccacgcggagcgagcagacgacgcggccgggctcggccagcgagacgcgggcgccggcagtcgcgagccaggtgagcgcctgccccccgctggctacggcggggtggacgcggtcttcgcggtcgacgcggacgtcctccagccacttcctcgcggtggcggccagccgcagcgcacacttgtcgccggcgtcgcccatgcgaccccggcccgcgcgctggccgagttgctttggtggtgtga

SEQ ID NO: 286053 - DNA, 386 bp, Zea mays
catgctaaaaaaatcctcgataatctatacagatgtttcatttcggctggggttttttctgctacacattcagaatcgcaactcaccgatcaccactgttacagcatccacccaacacatctatgcatgctatcatcctaataactacttaagcaattacacaacaggctcacagttgcagcctcaggttgaggcgcgacggatcaaaggcgacccgaccccctggcacacacacaacattttcaatcagccgtatgtgtctgcatctgattcaccaccagttgagccacatgtgggaacatcattggtcctggaacatcattgaaaccattcgcagtttgctgcatgcctgggtgtccgtgaagattattggggctgcccttcat

SEQ ID NO: 286054 - DNA, 394 bp, Zea mays
acgaggtctgagttttttttttttttttttagttcaaatttgaatagcctggtgcatccgacaaaggcgggagatttagtatcaagaagcaacggggtatgatctggagacacctctatcaaatgcatgaatctatcctagacaaaacttcaattgccctcgaagaaaagttgcagctaacaagtaccatagaaacactcagttgttttgtctagactcccaggctatacccgggatagttcctcgtcggcacatgaatcagcggaaatagacgacaaccatttctgacgaccaaaacagcaaaccaaagtccaaagaatgaacaagctggttgtctccaactccagagattttctacagtcttgtctgctcacagacttacaggaaatcgttc

SEQ ID NO: 286055 - DNA, 311 bp, Zea mays
gatccatggcgcatgggggggatactaattaccgagggggtactgagaatcaaacgctgccggatggactccatactcgaactccaacgatgatcagttcagagttcctcgcctcgacttccaaggtccaagttccaagcagccaaccacacatcattgagcagaggaaccagaccactcagctgtccctggcctcctgcagcatttccaccaccttcttcatccggggccgcttcgcgggggcgcgctccgtgcacagcatggcgaccctgagcacggccagcatctgccggcgccacgcgaacgacacg

SEQ ID NO: 286056 - DNA, 438 bp, Zea mays
attaaaggagctactcttctaggtaggagtacagactacagaggcagtagtaacagaaaagaaacacatcagcaacgatctctctctctctgaacaacggcatcagcacatcgatatcagacctctctctcgcatcaaaactatagcacaacacacgcacgcgcacaaagcccggcgatcgacctggccccctacgcaccctgctgccagccgttgccgttgccgttggacgccttgtcggcggcgttacgcctgcgcttccggatggcgatgggccacgtgatggcctcgaggcagagcgcgacgccgccgagcgtggccaggacgacaatgtaggcggtcttgtagccgctggccggcttgaggatgtcgagccccttgaagatgttgacggcgccgaggacgatgacggagtagccgacggagtggtggtagatg

SEQ ID NO: 286057 - DNA, 394 bp, Zea mays
aaagcaaagggggggtacaaattccattatataatccctaataattaaaaaaaataaggagctacttttttacgtacaagtacaaactaaagaggtagtaataacaggaagagaaagaaagcacaggcagcaacgatccctctgaagtctgaacaaccaaatgagcacatcgatatcacatccctctctcgcattcaaaactaagcacaagccgggcgatctggtccctactacgcaccctgctgccagccgttgccgccggacgccttgtcggcgttgcgcctgcgcttccggatggcgatgggccacgtgatggcctcgaggcagagcgcgatgccggcgagcgtggccaggatgacaatgtaggcggtcttgtagccgctggccggctcgc

SEQ ID NO: 286058 - DNA, 363 bp, Zea mays
aaatcctaataaacatgtaacttaagctcatataactttagtcctccatctggtatgtgatgtatcttgacaccatcaagttggcagacatatttaaggagacacttggctacgattgatgcttaaaatctggcgaaggaggctattgttttctgctatggacttcttcaaatctgcaatctcatcagattgcttagcaatggtctcgtcagatgcctgtgtcttagccttcaagctttggacttcatctcgtagtccgtctttttcttgccgctcagtctccaattgagactcaagttgctgcacctttgctgaaacatttcctgaagagcttctgttagaggtggccaagcctacattctg

SEQ ID NO: 286059 - DNA, 512 bp, Zea mays
agcaacaatcataagactatgttggataaatgataatacagggtaaatattccaatcctaaagccatgttatttctacaatcagaacgacacaaatccaatggtgatgcctaaaataaaaaatgcttctttggttagtgcccagccaactttttcgcttttgtcctagctttgatttacaaatgcagccggtattccatgtgttaccttgataagaacagaagcgccgacttggatttagtgttaagaaaatgaaaaccatcaaagcaagaatttaaactcacaacacaaaagatgatgttggtttctaatattgcaggtcgtaatttgtattttcctttgaccctgaagatgcatttaacatgctatttttaattatgctaatcaataatcatatctaaacgtcgtagtagtctattcggatgtacccgttcctcctggacagagcttgcactggtggccccgacagccaccactcacacgggcgccactgcaccaaccgctgttgcgccc

SEQ ID NO: 286060 - DNA, 410 bp, Zea mays
gtaagaaaaataacatattatattaggaagattccaattccttaaaatgaaaggaaacaaacgggaccttagaaaaataggaattctatggaaaaaatgatgctcccaaactagctcggagaaaataccctgtaagcttcaccctatagtttctgtatatttctttctttctagaggtaaatcctactatatgtcgctatatttgttatgaccaaaggaaattgagtgcgtgaatattttgcacgtcggggtatggtcactgtttacacgcttgacaattgaaagagatcctgaagaaaaaggctgagctcctgagctaatctcccaacctcgccttgccgccttgtcagaaacttgaggctgacgctcacattcttcagttcttggaaacatagattgcaccactccat

SEQ ID NO: 286061 - DNA, 470 bp, Zea mays
ccgatatgaggcgactcctcaaaacaaacaccgcattagtactttgacagatagcaagtccagccacaacaccatcagattcttcagaagatacagaacgccaacacaccgttttggggagattcatctgttggtaactgagttccactgcaaacactggctcctgtcaaacacttcgcgggttacagctaatcacaaatgatcagaagataataagctcctatcatagatacctcaacagatgtcgatacagatgcacagactattaactacgaagcaagaacagaccacgcctagaggggagaagaatacgtttttctttgttaagttgacacttctatgcactggctcagctgtcaggtagtctcatattaagaacttctggtggtggccgaagagtgcaaaccatttctctggtcttcccaaaataaacttggtccagtgaatttctcagcttcccctccatttct

SEQ ID NO: 286062 - DNA, 342 bp, Zea mays
gccttcctttttttttttttttactagtcaccaaacaatgggagcggaatcacgatccagggggggacaaaccccaaaggggcaagcttctagtacaaaacttatccgaaaagacaagaactacggcgttctgaattcccgaactggacagaccgaaatccacccctacccaccaaaaaaactggtggcaaatttctccaaaaaaatcggcggggcggctcctacaaagggggaagcttggccactacccctggaccccacttatttggtctttttgggcttcgtttttcccgaccgtttagcagcaagcgcggtgcttgcactcttcccttcgagcttctt

SEQ ID NO: 286063 - DNA, 362 bp, Zea mays
cttcctttttttttttttttgtaagaaacatgacattgggggggtcattcagttgcagggggggtcaccgagtttaatctgagacaagttccatatgaaagtgaaagcaaattattataagatacatcataagccaagggtgaattgccacgggcacaccggagcgcgccagtgatggtaccagcacagcacccccacagttgaggctgttcacctcaggacaggggtgtggtggcggaccccattgatggccatcttttcacctccattctccgcgtggaagttcatgctggggaggaatttattagcagatgcgaagctaacgtgcttttgatgagctagcgtgccactccagtttgaag

SEQ ID NO: 286064 - DNA, 392 bp, Zea mays
gatcgaatgaatggtcggttgagttttgtttttacaagcaacaacagttttggcggcccattaacacaagctgccgaaaccaatttggcgcctccccgtcaggttacatgagagagttattattgctctccggcccgcttttcttcgtcctcccattcaaatgcaaatcaaaatgatatggactttttacacatgcatttttgttcccaattgagtaatatacctcaccaaactctttaattacttactggcaatatctacataacttttcatttgacgtttccaatctgtccgttggtttccttcccgacctgcactgcacgaacctctatgcggaggccgcggtggctcttgccgccgcgtcgtactccccggcgccgcggagctcgtcg

SEQ ID NO: 286065 - DNA, 339 bp, Zea mays
aggccggaatcaaagcgcatgtattgagatccatcttgccctcatcatatcatacaatcatacatgtaactgcatcaatctcatggcatgtacttcggttgggggcagttcaacgaccatttacacgaaaacagagagcgacctcttgggcgacgttcagttaccacttacccggatcttaaacaagacaacgcaccacacaacacatactggaccaaatcatatcattttcataagaagatcaatagagcccggagaattagagactcgatacgaacttgcggcagatcatcttgctcttgttgtgttgggcttgcgggcaaggttgatgaggtccta

SEQ ID NO: 286066 - DNA, 418 bp, Zea mays
aaacagaaaaatctaggggggtataactgaaagtaaacaaagggtaggtgtagacagcaaaacactacagacagattaaattgaatagtcaccaagccccaaacatctatgaactcaaccatgacagataacataccccaaatatattggatccaacggttctccagtagaggttacatggtgctcattattgacttaatggcatcacacatgatcttatgatatgcttctttgtttcttgacatttgctcagtaatgctatgacctttgacaatccttcagccagaaactatctataaaccttttccagccatttgacaacaaacattgtcgaagattgaactgcctcttccaattatagcaattagtacttcattttggagcatgaattcctctaaataacaaatgtgaactcctg

SEQ ID NO: 286067 - DNA, 579 bp, Zea mays
  unsure (1)..(579): unsure at all n locations
acctttctttttttttttttttttaggaatccgcatcggcttaataagaagaaataggtcaaccgttgaattgacaccagcgatttattacgttagtttttctagaacgagtgtgctgcgtagattgcttgcagactagtccaggagcggcagagatcatagcgccccacagtcgtagtccgccatggcgaccagcgtcttggacagcagccgagacaggaacctgtccctgacgaacctgaccacggcgttgttgctctgctggatgaagccgacgacgtaggcggcggtgatgagctggatgctgcgccaccgcctcgccgccgcgtactcctccagcgccgccgtgacgacccgcccctcatcccgctcatggccgagcagggcgaaggccttgcccaggcaccgggccaggacgaccgccgtcctcaggcgccgcgcacccgccctgcccgagtcncggcgcattggggtgcagcgcgtcgcccgccacgcacacgccgncgnggctgatgctgccgcggaccagcgccagcggggaccggaaccgagcggcgatgacgccacgtcgctcatctc

SEQ ID NO: 286068 - DNA, 422 bp, Zea mays
gccaatacacatgttgccattcatctggaggactgtaaccaagacaatggtgttcatgatacacattaaaaggaatacacaacttcccggtcatctagaatggcatcacaaggaggtccatcatacatatacatatttaacacttgcaaccatagttcgtaacaaagaaaagcaaggcaataaaaatcatggaagcatacaaaactccaaacatcttcttcaagtcgctcaagttgttattcatcttcttcagttctgcagtaaacatgtcccagttcgcactaacatctgccttaattgtcgtcactcgttcgtccccaaaattagacgccatcatctccgcaaggccgctagtaaaccctgtcccttcgaccatcttaatgtaatcatccatccacatgaaaaatttgcatttttttctg

SEQ ID NO: 286069 - DNA, 449 bp, Zea mays
gtaagttaatactcctatataaaaaggaagggggctattacaccaccactactactactaggcctgtactatcctggcttgttgcatcacaaagaggcatcaagattcctgtacatgtcacagaataatgaatcacaacactattttatcgcgttcctccctgatcggggcacagaaacacattcacatgggaggaatcaagcaaaatgaggttagtacaaatagtaaggtaacgtcttgtaaatatttaaaccggttcctaatctggaacagtcttgggaataaaaatatattgctccatcatatgattagcctttcaaattggactttggtacccggagcacatgtatctccacccagaccacaattatgtcgctagtttattcatctttgatcacaagatccatggaataactcgtactttttcagcacgcaaagtaaagaacttt

SEQ ID NO: 286070 - DNA, 294 bp, Zea mays
gcagacaaaacgctagattgtcccaacagatagctgaacctacaccctggcccatttttcaccgggcaaaaagattaaccgggaggtctaaaaagggcaaaagggaagggaaaaaaatactatgtacaggacactggagattcaaaggagaaaacaaagggggaaaggatgctatctactgactcgaccaaagggccctcctaccatcaggaaacgatgggtcgagatcaagctgtttgcatgccccaagggctcacggcaaaaggcccaaaaaacataggggagtcagcgctg

SEQ ID NO: 286071 - DNA, 398 bp, Zea mays
gtgctctcaagacgagtaataccaatacggtgggaagaacttcaacttgtggcgctcgtgtgtaaaacagtatacagtcccatacatacaacattacatatacgagtgtttattttcatctaaaaataaataaagaaaagaaagctacgttccgatgccgaatctctcttcaacaatcagaatggactataaaattgagtcctatcctcttccagaaagttaagtgtgtcagctgtagttctaattgtatttgatggagcattttcttagtggacataatgcagaatgcctcgttcagatatatgcactgttctttgttttgaatgaaaggacaaaacatatgtactgataccaggttgcatcttgtatgttccatgtatgtgtaatctttccaactt

SEQ ID NO: 286072 - DNA, 454 bp, Zea mays
gtactgaaaacggatctcattgcaaaactgggcgcgcaatcaaatataaataagttatgcagctcagacactatgccaaaactatgtcggtgtacataatggatggatacgttccaaacgcacccagataatgctcgcgtgccagatctttcaccttcaatttcttctttcatttccaggttttctaattcagctaacaatgcagaatcagacgcctagcaaactgtaggttccttgagtcatttcagtgacgttccagcaagacaagttagccttgcttttgtattagcctctgctaatggagtaggctttccgttcccgattgttcgaatgtcccatatccttatgacaccatcggacgaagcagtagaaattagattggagagctgtgatccatcattgctattaccaaaaacaacaaccccttttacacgagttgcatgcggacgcgtgg

SEQ ID NO: 286073 - DNA, 633 bp, Zea mays
  unsure (1)..(633): unsure at all n locations
gatcaatccagnaaatatcatatacgctaaggctggtacaagaaaggatctatagggctaattgtggtccatgttctaacgaagagggcaccaccatcctgtaaaacaacttttaacacaatgcacccccatctttcacaaccaacctatatgaggtaaaaaaaatagtacaaaccaaccggagaataatcgaaataatacgaatcacacccaggttcaccgcgacagattagcacccctttcctacagataaacttaggagtgaaccgacttgagcctgggaatatagttgcctgccacgaacaacgcaagccccgatagcacggccgccgcgatcaggatgtactgccgcagtctccttctgcccctgttacgtagcggcgccggcatgggctgcaccctgttcagctgcttgattgccgctgcgggcctagacagccttttgggagccgccgccggttgaggagcctcagcttccctcgggttgtccgatgcgttgctgtcagtgtctgctgtgcccaaggccgcggcgtgcccgtcaccagtgaggctagaatctgctggtgccgtgcctctccttttgtctttcttggctttcttctgcagatgttttgatcagggtcagaattagaa

SEQ ID NO: 286074 - DNA, 734 bp, Zea mays
gtgctatcattcataaaaggagttgcaagtggagctgtggaggccaaagcagtgcaaccgtgtggctcaacattcgatcgtgcctagcagctttcgtgaattctattacagtggtgaatccatacgcacaactgtggagagcgaaccctgtactcgttccgtcgcacacagatgttgtaactagatgccggctaccttgaccaagcacagcaaaacacccaataaaacaagctgccatgtggcgtgccgcgactcagctccgccgggaatgtagcacgagctgctctgcggcaactgttggccttgcgtggtgccgggcacggcggacgtggtctcgcagtaccccgtcggcatcgtccctttgctcggctgcggcgtgccctgtgccggaaccggagtcaagctggtcggggccgccgtgccgttgtcttttgcgagcccgacgtcgtagttcgccgtcaggtcagtcttgtacagcccgaaggagcgctcggactccgggccccccttgaggtcctcgtcgtagagcgcgaagatgtacgtgtccaccgacttgcctggcgtccgcggcgtggcggtcctgggacttgaggtgcgccacgaggttgctgttgtaggccttggcgttgtccaccgtgtcgccggcctcgtcggcgtcacccttgtacggccacccggtctcggcgatgacgatctccacgtcgctgtaccccttggcgtccagcgccgcgcgg

SEQ ID NO: 286075 - DNA, 328 bp, Zea mays
atacaaggggattaaatcaccattgaacacaagtttatcacaagcatcagatcaatccgattatacaaggcatatgtttccattttggaaattaagacgcataaaatacaggtcgatggtgctaaccacaatcgaccataaccatacttaaaactgacttaactagttttctaagccatttcatcggattaacttgtacaacgtatgagttaaatacgatttttaatcgttcgctctagcaggggtacctcacacctatattttaccacacctcgcgactatttcataattatgacggtaaccaagcaccacgcaattacgaccttta

SEQ ID NO: 286076 - DNA, 381 bp, Zea mays
agaggcaaatgttaatagccgtaagattacatgtacataaatttgtcatcatttcacatgttagagagatacaaattgaaccagacagtttgtgattgatatttctggttattgttctcttcaaggtaataaaactcaaaaagaaacatctcaagagctaccaaaaaaataccaattgtacactcagatctaaagcgtatgtttcgatacagaactccggttattgatctcttcaaggtaacattgaagctatttcaccatgaaagaactcttgcaactgcagcctccaacagcactgggatttgttgaaaccacaaatgctgaacgtataagttcctcctcgtaatccacagtggcaccttttacgaaattatatgagat

SEQ ID NO: 286077 - DNA, 349 bp, Zea mays
aatcatggatcagaatatgcatcaggagaacgcctatacctttcttgccataaccactgacatatacagcgtcaaatgctaggaccctaaaccaccatacaggccgaaatcgcatggcacaagatgatagaacaagttctacgtacattcagggtatacaaattagcctcctcggctcccaggccagttgcttcgaaactcttaaaaaaaaggcccaacagccccagaggcccaggaatcagcaccagtggacgtagcaaatacataaaacaactggcagacgtgctcaactgcgtcactttacatgggagtcgtaaacctcaaatacagattctgggatgacgggggg

SEQ ID NO: 286078 - DNA, 350 bp, Zea mays
cagaaactggaaatgaaatccttactgatgggtctgtgtgtgtggggcacatagtttgtccaatccttgattttttttttgaaaacaataaccctcatcacaatcacaaccctaagtactcttgtcatcttgtgtgtgggaagctgtttgccctgaaggaatgtgtcgatgagtgcgagcccttctgcaggtttgttgagaggcaccaaatgccctgctcctctgatcgtcaccatcgtcatgccatggtactccacaaatctgcccgcaacctgtttgttcaggtaccatggttgccactgcgtcttgacaggcaggcccagggcttccacgcaataccgcgatccgat

SEQ ID NO: 286079 - DNA, 459 bp, Zea mays
agccaaaaaaataaataataataaccagaaaaaagctggtgaaaagcgaaatggaaatatagggagcggcgagcaagaactggtggctcctcatgccaggactggattacagggggggaattgaactgaaagcctggagccttagtggttacactaataataccgcatcgcggttccagtcgacctcatgcagaccacagggagaggacggagccattggaccatctgtggaggagctcggtcaggcacagcaccgcgtacgcgagcagcacgaacttgaggaggaactggaagtagtgcgagagctcaatgctggaggcatgcagcaccatggttaatcccgtcgtcggttgcgatctgtgggcaggcgcggcgacctgatccgaccgcagctttctgctgctgctcctcaagctctcgcactggtgggccgcgccgtccgtgggtctagcggcgctg

SEQ ID NO: 286080 - DNA, 451 bp, Zea mays
tttctttttttttttttttttttttagactcgcaatgacttcaatgacttgcaagaaacattattcaacagaagaacactcaatactttttttttgaccctgtcgatctgggcttctcattcaaacaggtgtggctatagcacaaagaggcgacgccttctttagagtgacaccaaaactctcagccatgtcggcactcccttctctttcgacctcggcgggaagcctccatctgatactgattcaacaacgatgcaaggaccagatgctccatcctgctggccagtggcaatcccaggacagatcctgcgtcctgcaccaaacggtatgagttcgaagtctccacctctacagtccgtaggcattcccaggaatcgttctggcataaacttctctggatgtggccaaacgtctccgtcccgccccatcgcctacacatttaccagcacgt

SEQ ID NO: 286081 - DNA, 494 bp, Zea mays
caatttcattcagccatagatttggcattttgggggagctcgcgcttttctccggaaaactctaccagatgtgatcttgacgtccgtaacaaatcaagttgcacaaatctggacggctgatcttgctagttgaagatacacttgctaggcttattagttcctgaagagacattttcatttcatatacagagtgtgaaagagtttggtttctatacagtagaggtgaaactttggcaaggcaataaaatagtaacagctgctactatctactgaacatgctgcgtagactgccgcgctccagcctctcgtgcagcttcttggcgccggccacgtccatgtcggagagcttcatcaggtaaccgatggcgccgtgcgagaccatcaccttcctgcatcgtttggtccccgagagcgtgaggaggcaggccatggcgtacttcttagccgtgttcgcagggctcgggtccagcaactgcaccaggctgggcacgcac

SEQ ID NO: 286082 - DNA, 416 bp, Zea mays
cattaatacagtttctatatgggacataaaccatgtttaaaggggattacatatgattccttatgtaatggatagagaacaaacttacatgttgtcccaacaaaaccttccattcaagcatatagctaggcaaggcaagttttattacaacaacacaacaatgaataatagagatcctagttctaaccaaaacaattctcttcagatatgttgttacagcatcggaattcagaattagtaaaagcatctccatcaactcacaaagttatagctcccaaaacaagggtatggggatctctttaaaaataataaatccaaaaaagacaatgctccaatagctctctataattttcataaaacactttgaaatctattgttcaaccacgcaaatgtttctacaatatggttcctacggt

SEQ ID NO: 286083 - DNA, 512 bp, Zea mays
aaacaaaatggctgggaagatacttcatctggaaaaaaataacttgtcaatcaaccagactaagcagcaaagcagattagataataactgatcgaacagaaagaacacaaatacaaaaaaaaattatagagtatttgcattgatttcatccaaacagagtgttaggccttcaagaccatgctccagtcatagcctagctactccgaataccgagagacgaaaataagagcaaccagctccatatcaaggataagttacgaaaataagaaagcttgaatgctaaacttggagcagctcagcagtagaacataacgtccttcacgttgtccttgatcttgggaagttgacgcacctcgacaggcccctcacgggctactgtctgcccgctgctgccaggtgtctagccaccgactgagctttctccttccacatagtagcgtgcgcggaatgcggcaaggtgggcgtagcacgctggtgggaccactgatacagcacgggtgcaacgagcatag

SEQ ID NO: 286084 - DNA, 486 bp, Zea mays
aattcaaaacgcattgcatccaatagctcaacaggcggttgagagaaagttcattagaaaacaagctgcggtctgagaacgatgcccacggaatctataatgcaggcaatgttgacgaaaaacaggatatgcatctgtggaacctacatcattatagttcagctacaactttacaaggaggcacaatcatgaatcctaaaactgaatgataacatcaaatgcaatctggaatgtctccacaccttccctttaatgctggaacacaagtcctcatgttggattttataagttaacatcaaaacatctcacagagtatttcctaactgactgactctccagataggtgttccgtaactgactgacatttcagaatacttcctgactctccagcttagcaaactagcaaaggatcaaaatttagagctttgtaaaacataaacactccgattagggcaggttccttctggagaacaatacattgtatac

SEQ ID NO: 286085 - DNA, 466 bp, Zea mays
cacccaggaacttcagtttttgggtgggggcaaaactacaaattgatatatacaatatttgccatgagtttgtaagccgatggaacaaaatcgagcaaacaaaaacaaatatggtacacagggaattatagggatatcatctcactaattgtctaagtaaatcgtcatgtgtcatttggagacaccagagcagcatcctcatttgcatgaatgaaagatcggaaaccagaggggctaaacagctgacctgatccactgctgctggctgacctctcaatctcggccaggtttgcaacaacagggattggcctctcgggaataatcaaaggacttggtactgaatcagcctcaagtatcttcagcgcctgctccattgtcggccttgcatgcagctggggatgtgtgcagagtgcaccaacaagcacgtacttctccatcaccttagttggaccaggatcaaccattc

SEQ ID NO: 286086 - DNA, 659 bp, Zea mays
aacaaagacgtttaagttcgcgggtggttcacatacacacatccattacacaggacaagaaaataagcatatgagaatcacactcagccttcttctgtttcttttactcctcgtgctcatccataaccgaagaaaacgcagtggaaattgactcaaggctgatccgagccactccctgacctacacatgcatacatgcgctctttctccatttccatatccttttcctctatttgaacaagttggtgaatgtcagtgccaaatgttcaatcggacctcttccaatactcaatcttcttcagtgtcaaatccgacatcttggagaaaaccctacacctttgttcaccagcacatcaatattttgtgagccctgctccaagtgtaaccatttggcttcattctttagaacctcccaacaatgagaaacggtgaatggccttttctccaagctacgtattatataaggtactaatatcatgcatagtacactaaaatcaggttttgttatcttgtcggcatccgataagccactacggttttcattcaggttctcgatagcaagatgtcgaatgcgggtggtgctaacttccatgacatcaagcatggattcaatggccttcatgatcctcattatctccggatccatttgctttcattgct

SEQ ID NO: 286087 - DNA, 501 bp, Zea mays
atataaattattattattagaatgggattcaatttcaaggatcaaacaggaagtaaaagtttcagaagcagttggcagtccaatatttacttactacttgctgattcccataatattcgaacgcgtggcaggcccagaccgcactttaaacaaaaaaaggatactctctacgtccctattcaacccctcgtagctaaatttagcccacccgacaaaaaacaaaataagacacctactaaattcttaaaatttagggggacactcaaattctccctccggcctttatatttcttgagaaagccatcatgtcacgaagcgcgctcgtcgatgcagtcaagcaagtttcggctccgtcttctctctaccggggggggcacttgatggcctttcttttggccgagtagttttggccttgtgcaactctatgacgagcaggtcctacttatcaatcctgagtcaatgaattcgagggcacttttgaaagccactgttaaaacagag

SEQ ID NO: 286088 - DNA, 332 bp, Zea mays
gtgccccttgttgcggcctccctcgccgccgccgccttggggtacctcttctgctagatccgcgctggacgcgtggtttgtgcttgatttgtgattcgtctggcgcgagtggagtccgtgtcgtgcgcgtgtctgtgtgacttgtttcggcgggcgtgtgtctgcatgcatccactcggcggccgacgagcacgtgtgcgcgtggtggtacgtgcgtcgacgctccattgtttgtggcggcgatcatgtgcctgccccgttttctggttatcaatgagatgatttatttgattcaaaaaaaaaaaaaaaaagggcggccgcccttccttttt

SEQ ID NO: 286089 - DNA, 371 bp, Zea mays
cagttcaaatgggacacaatggagtactggctgcagaaatagacaagctttgctcagcctgtttcagatggttggtttgctactgctcaactccacacatttttactaatgaacctgggtataccatatacctcacaagatatcagagcaaatttaaaacaagtaagctactttcagatctttttctatattgaaagccttatgtacaagcttccaccagttgaaggtccttgcagacagtggcgttgaggcgactggtcgagttgatagtgaatatctgatctacccctgtccttgtgctttcagagagtataacaattccagatctccttgacgggtggcgagggaagggtagagatccgaaagagact

SEQ ID NO: 286090 - DNA, 447 bp, Zea mays
  unsure (1)..(447): unsure at all n locations
gtaatataagtagcaactatatttttcagatatactattcatatatagggtagattgtatatgtacattgtatatacaaactaatataatgtgttaaggcggaaggagcgctttaattgctaaatgttaaccttctagatcaagatgctgatatcacattgggagcctgcgtagtttgagatgttgagaatgctagtcgcgatagccatcttggtgtttatctgaataaaaccagagcacaacatctagcaccctgtggcctggtacgcattattctatttctatcaaccagcctctatactgttgacatcctccttaaatgaacccccaaagatccagagctaggacaagccaaatttgttagcctactgaatcttgggctcccaaacattaatgctggattttgcaccatattatttatcgccttnggcgtacgctatggcatgc

SEQ ID NO: 286091 - DNA, 406 bp, Zea mays
tagataaactcaagagagcatacaaaaaagtttgaaagaaaaatccaactcaaaaagtgagtgcaacaagtgagtttacagtagcatcggatgtgtcccattcttcactagacacaatactagataagagtatgcctcgtagagtttcatacacacgtttgcaccatttctcacacaccgacacctcgcagtggagtcctaaaaagaagagacggaaccctcactcagaatggcctgaccggtacaaacaaagacgtttaagttcgcatatggttcacatacacacatccattacacaggacaagaaaataagcatatgagaatcacactcagccttcttctgtttcttttactcctcgtgctcatccatatccttttcctctatttgaacaagttggtgaatgtc

SEQ ID NO: 286092 - DNA, 596 bp, Zea mays
ggacaacaagcattttgttgcaatattttcatgaagaatgtcatacaaagggccattcgatatgaactcatagactagcaagggtacctcattttctaggcaacaaccaaaaagtttcaccacattgcggggaatgatttgagataaaatagcaacctcattgatgaactgatttatctctatttgctccactattttagatttttttatagccacgacacactgatcagacaaaatccctttgtaaacagtgccatgcccaccatgacctagaacacgagtagcatcaaacttggtgggtgcttcctctagttcatccaaagggaatatctttgttttgtttgtagcattttcattcgatattagttgctccaagagtagaccttgatttttcttgaagtactctctttgaattctcctttggatgccttttttccacttaccggtgagtacaattgcaccaagtgcaaaacttatggatccaagaccacaaacaagcccaattacaatcccaaaaattagaatacgctgcttagctgacatgacacatttttggttttttggatcatactctttcccatgagggcaacttgtac

SEQ ID NO: 286093 - DNA, 445 bp, Zea mays
cggaaattccaaaccggatcaattctttccaccagacccaaatacagccaaaccagttgaaacgaacgaggccgtaacaaagggatttctttcccatctattttcctggtgaccaaacgatccctcaaggtgtaagcacccaatacagacggccgtatgtacaaggcagagcatccagggaaaaaaatgagctgtgtttagcgtatttcaggatcatgtacaagggctttagcttgtgctacgagctgcactgacggctttactcgggaagtgcatgtaactgtaaagtgactgtacgaggggatggattttggctatcgatgtccttgagcttgttttaccattcttcttttcactgcctcttggctagcgtctttttaaggcctctcaagatcttggcaaaccacattgtgttcatgacgagcagtattgtaggcacagcaaa

SEQ ID NO: 286094 - DNA, 438 bp, Zea mays
caggcaaacaagttgccagaacagatttcctctggcaaatttctggctttgttatttggtctgtgttcaaagttacacacaggattttaacatctgagagggattggactacagttccagtagtggtacagttgatgatatttgagatgggaaatgtttcagcaccatggagtacgtcaggaactgtggcctaaggtgtctcgcgtactaaattcaattaaaagtaaggtcaatgaacaatgaaggctgttttcttataactaacgtgcctacacttgtggagtgccttcagaacgcagcctaaagtatatcatacatgatcattgaacatatgcaaaatagcaaatagagctatctagtccttcttgtatattattgttggatagacaggactccacatgttcgtcttgacatattcattagtttcttcctcactga

SEQ ID NO: 286095 - DNA, 628 bp, Zea mays
aagccatagcaacgattctagcaaacatgacttattcagaatacaatattcacctgccatttaaaaaaaattacaacagcatttacgttactgccccctgaataaaaatggattcaaagtttcatacatgaagcaggctgtcacgaaagaagctaaagcagcagaacagcagacagctatgaacaatgttcctaacatatttacattcctatattgcaagtaagcctcatcatccgaagttctgaacattacaatcttctcagtgcgtaaggaacagaagaagtcctgagttggataataatttatgaagcttaggagatttcattcttgtcacctttcatcgttccagaggaagacggttccccactggaagccggtgaggcagcagcctgttgaggctccttcagagaagtggacattcctgaaacttccttcataagatgtaacctgagatcagtagggcgaacatcctcaccaatgcaaaccataacaaattgtgaatagtgaaacagaacatctgcagcagcttgcttcttctgatccgtcaggtggtgctcgatggcagggaggggaaagccggcgagctgtggcggcctggtggtgagaggagcaccgatctgcaacaaag

SEQ ID NO: 286096 - DNA, 265 bp, Zea mays
gtgttaatctccgtttaatttctccgaaggagaacgagccagaatcaggctatcatcaaacgagcattcctggatccgatctgcagagaataacagggctgtacagtatacatttctcgagttgcaaacatccaattcctggatccgatcatcaacttctaacctcattttagagatcacaagcataagctaagggcgtactgatcgcggccgtcgatccaacgaccagcaggcagcagcaaacgttattagcagcagcgagcaa

SEQ ID NO: 286097 - DNA, 518 bp, Zea mays
gggacagtatatcaacattcaattagctctcttcgaactgcacagcaaacattggtcaagaacaactttcatgaaagaataaacaattgcagctacatagaactatactcggtcaaactcagatacatcacgcgcaagtcagcagctttggtcatataattcggccagactttacaaatgcagcaatgaaaacatcaaaagaaaaacaaaaaaagagggaattcccttacgaggctccgctgtatcctgagctgtagccaccactgtagccacctttcttcattgcacccgactccatctcctgcgtctggtggccctcgctgcttgatgcagacggtatctgtccatattcactggttggcgcgctgtattggctgctggtatagttgttgttgaatgccatcttcttgaacttcttcatgtccgcgttgtactggccagaatcgtaatcggagctgctgtatgacccaaagaagcggctatggccaggccgaacaccttcattaaccacgcgtccg

SEQ ID NO: 286098 - DNA, 349 bp, Zea mays
ttgacttttttttttttttttttttttttttttttttttttttccaactaaaaatacatgcgggagtctatagagaagccgcatcacatttgcgggggtggtccaggccagacggacgggtcaacaagcgagctctccgaggggggggggagctcattttctcaacaaggcccattcttctatctctcttctcccacctatattagtctctgtctttggcgcagggaactaaaaagtccctcgcgccaaaggagataaacactttggggggaatgaaccgttttctgtcgctatcaggagatcatcacgctcacttttcgggcaaaatgcgtcgcccccatcctccaaa

SEQ ID NO: 286099 - DNA, 394 bp, Zea mays
aggagataatccatcaaagacgattctattccagtgattccagagaatccagacacctaaggcaataagtgaactgagacccctcatagccagatctccattacttttgacaaccttctcccaccatcccataaaagaatttgtaccaggattaggagcaagtctatgtaacctaaattggtgcagcattaagaaccaaaattctctcgcgaaaacacaggaaaccataatgtgatacaaagtttcaaaatcataatcacataaagtacacatctctagggggtccaaccctcttttagccaacctatcaactgtacaacacatatttagagccatgagccaaaggaagaagcggcatttggaggggggccaagttttccaaactctttcatag

SEQ ID NO: 286100 - DNA, 385 bp, Zea mays
aaacgttaaaatattaaaaagttgtttcataacattttaacgttttaccactttaataaccatgaatttatcaactggcaaaaatacattaagataactacaagcacaagatctaacactaaatacaacatcctatccatcttcctcttcaccggctattgatttagaaagatctctcatattcgacatattgggagccacgggatctgtctcgttagtcctcgtccaccatatcaaaagcaggtattcgccaggtacgcccgccatgcctagagcctcctaacatgttcggagaccttatctcaacccttctcttcttaggcatcaagtgtccaccagttattgattcgaaaagctctcccatattcgacatgttcggacgctt

SEQ ID NO: 286101 - DNA, 666 bp, Zea mays
aaaaataaataattactttgttatgagatcactcattctacaaatatatctattttgatatacacataatgatttcttacatctgacaatatgaataagtgataatattaaattaataaattacaatttaaacggggacgaggatctccgttggggatttaacagatacgaggaagaaatgtctctggacgaggatattttttgtcgcttggatggagatgagaagctattccgcgacgagttctccattaccacctgtaccaattaccaaacaccctccataattatgtaagtcaaatccaatccaacaaaaccatcactcaaaaaaaaagagagaacatatacagtaatatagtaactatgacacagaatgcctcgtgatatgtgatgacattgacttggtctcctccaggctccaggttgagggacccaacggggctcgccgacgtgtcgtcggacccgctgctcgccttgccggaccacagcttccccagcactctcttcaccggcgccggcgccaccgcaccgcccttggccttcttccttgtcgccgccgccgccgcttctcccgttctcgttggccgacagctggctcacggaccggagcgagccgggttcgccggcgccgctcgagttcgaacgtcgtcacaaggcgcgcccaccacg

SEQ ID NO: 286102 - DNA, 455 bp, Zea mays
ggtgcgcgccaacaggaacgtgcagtatatgctcctggctgctgttccagagtttaatatccaatcaagtatccagcacacagtcgtatgctaatattcctcataacaaaacattagctagtgtacaacatcattcatgtccacgagaggtacttgtatatgcacccagagcactttcccttcagctgatcttattaacggccgtacaaaaggatgcttagcagtagcacgcgtaggcaaggtggttcttgttggagatgtaggtggagattgaagtctgaagcatgtgtcgaggtgctggactgggaaggcacaacgatctggggtgcgtccggacgcgatcctcttacccgtgacatgcccgtagaacaggccagcgacggcagggacaaacacgttgctctgcgaacagatctcaaggtccagagcccttgctagggctgcattgctggatt

SEQ ID NO: 286103 - DNA, 472 bp, Zea mays
agccgtaaaattgtttgagatcactagctcattacaagaatgcttggacacatacatgtctcctggttcgatactagtacagttacaacactgttagagtcaggacagctacaagtactccgctaatatctatgtagcagctaaactgataccacatgctacaaacaccttctcattgtaatgagttacaacaacttgcatttcctttaaacactgattgtttcgtcagtgctgaggagttcaactggaacgatggcagtagttttgacgggagcagcctgtaaaagaccatcatcgcacaagacttgtacaatcagtagaaatgttaaacccccattttatgatgactaaaacttaaaggtacttgtccttgattatcttcactatctcttcgactctcttaatgattttaggattcatcatgtctcttgcttgcccaatgagagtgccttctctgctgttataatatgca

SEQ ID NO: 286104 - DNA, 468 bp, Zea mays
ataaatgcgtgtcaaagcgattgtctacatggaaaaaagtgttatcatatacacaaaatgcaccatgtagaggttcaatacatgaatcccagcgggcatcgtctaaataggagcagttagaccattggcgggaagctccagtgtcgaggggctgattaggagggacctgacgtcaacttggctcatgattgactgagcgtgggggtggacctggtcttcgataacgtccaattacttgtcgctccggacactggcttagccctcggcgataatggtgacgtcgatctcgtcaaagggagagaccatctggccaaggccgattccacccctcgacaaatgccctcggcgacggtgcgctctccacacaatcgggcagctcccagaggcgatcaaccagaggcgcctcagtcgacaacagaggagagagatgggcgcacaccatgctaacaaccagacgaatcacttgga

SEQ ID NO: 286105 - DNA, 542 bp, Zea mays
aaaccgatgagaattgagataaaattgagttgaattagtgtgtactatattttatttatgcaaagaattgtgcatgtaaatcgcataattcatctacaacaaatggatagcccacactctgttgctgttgctgctccagatgacacgggccatcctctgcttcatggtgattaccgagtgggcacgcaagccaaccaaagccccaaatcccactcatggacagaacttaattatgtctactggcgaggcactgcaataaggatgaaatgaaagtgctgccaaaacttcttgactcgatgtttttgaaatttttccagtcctttctcccttgctactccaagagacccagctgcaacaaaatcatcgtaggatacagtttcaactctaataaatcctttctgaaagtcgctatgaatcactccagctgcttgtggcgcagtcatgcctgaaaaaatagtccacgcttttgtttcctaaaaggacatagttaaaggtctatcagtttcttttaactgatggagaaaaaactttgctcgagccga

SEQ ID NO: 286106 - DNA, 432 bp, Zea mays
cgaaccctagatccatacaaatccaagtatgtataaagatcttgtataagattagttacccttattcggagcctctcaccaaattttacataagcaatacgctgaccatcaccataaagaagcatcgttaggaatcaagatggccgaaagaatttctcacaaacacaagggcacctcttctcttagattgatgggttacccaagattaaactactgtcctcgcctttctactgaacttttcaccgcatgtgttgattcatcttcagatccgtcgaaatccgatgaccgtacccgcctctgatgttcaggtccagaagtagcaacccttcgtccgtagcgcacttgacatcgtccccgtcatgaactccatggtacggctgaaagtctagattgttcgctctgagaccgtcctcggacatggctttcaccagc

SEQ ID NO: 286107 - DNA, 485 bp, Zea mays
aatcacaatcggcagcaacaacttactaaggggaggctatagcaaacaacacatatatatatctaataattagggacacaaggaatggggtgtttggttttcaaggggagggatctaatgtggctttctactgtgtccttacattgatctgatctgctgtgtatggtacaaaacatacaccggtatggccggttggctatgatgaggggcttcctgtcctgtatgtacaccgtgggagcgcgctcagggttcctggctgttcacccggtggtgaagctccagcatctcctggtggttggggtccaccgagagggccgcgcggcagtcctggagggcgctcgagacgtcgcccacgtgctcgtggaaggccgcgcgcaggtggagcaggttcaggtccgccttgaaggcgatggccttggtcagtcgcgcgatcgcctctttctgtttgtggttgtccatcagcacagcagcacggtatctgtaag

SEQ ID NO: 286108 - DNA, 439 bp, Zea mays
aaaattcgaaagtaaacctgagtcaaacatgaattgttcaaaatattgcagtacaaattccaatcaaaacaaatcataaccatgagattcaaacttggaataatttttgtgctaaaaatacattggaaaaaggataaaaaaagaagaaaaaaatatcttctctgatttatcccttgccgcagtttttttttccttccttttcttcaccaccacgtacggctggaaggcttaagcttatctcctcgtcagatttttttttgcagccgtgcccaaccaagcttcttcctcctctcactgccgcgcgcaggcgtggagattttttcgttcgtcgctcatctcctgcaaatatccagccgccctccttctctatttatctccctagccgctccttccagcgcctcatctccttcgatctcacgcccgccagtgctcgatccca

SEQ ID NO: 286109 - DNA, 494 bp, Zea mays
ggacaagatgcaccttgctgtcctggcataaacgacagagtatggtcataccaattatcaatacagttatctgaaacacacttctttttccaagagaagttacagacacatgcacacgccaaaaaaaagatatatcactgaagcatgtttaggatgactgttttgtacaaaagcttgaggagcaagcgattagaatcctcaagcaagtttatgaacgatctatcggttcaagtatagctagctatcttatgtatttgctgggtttgcaatcttccaatcttctgggaggcgccatttcttgtgccaataaatcgacacccttgaccacagagggaaaccaaaactgtaatctaaaggtttcgtctgcgagccctccgacgaatagaggaagccacacataccgggagtctctcaagtttgacggactccacctatccgccatgaagataaatgcaccagacaaaccagggaggggaagcacaaatgtgctttga

SEQ ID NO: 286110 - DNA, 493 bp, Zea mays
tttcttttaaaaaaaaaaatatattttttagattacgcataaaatttgagtcaacagcactaggttagcacatcggccgtctagcaataggatacaagcatgacaaaattaatgtgactacagagtacagactattggctacacaatacgcttgtttttttttttacatacatgcctagaaacatcctgggttagcagcagggccctggaactgagatgtggcaggcaggaaatcatacaccagcaggggatttcagtgacgaggcatcgtcggctgctacagccacatggacatggccgccagatgactcgcggaaaagtagcagagctatagaccgatcgatcgggtttgtctgcgtctcgatgctccgagggtccatgaacttgcacgaagtttctgcgttctccagttcctttccgtcctcgctaccaccactgatgttcatcgtatttggaaaaacttgtctatgttgccgacttcgtgccaatcgct

SEQ ID NO: 286111 - DNA, 436 bp, Zea mays
aactcataatatgggggtatttggtatgtatagaatctttttctgcccaatagatttgcattccgtatgcatagaattctttttttcccgtccattcaccagctcctcttcagtgtccaccgaagagacgggcgcagtgtatatgtatcgcgcctgccgtgccagttttttcttttcctttctgtatctaacaccaatgatgcatgctttaaaccagcctttaatttgagccacagtgccaaccgatcttgcatgtagactcgtcgcgcatcatatcgtccgaagcaaccaagtttaagcaatggcccgccgcctgatcgttctttgctttgctgctcccattcccatcatctcctacccgcaggcgattttaaagcgtcagacagctcagcatccatgcatgcttgagatgcccaagcttggaagaaacgaaacc

SEQ ID NO: 286112 - DNA, 319 bp, Zea mays
actcctttgtttggcggaggcctgccaggaacccgagcggggacagcacgagctgctggcacagggaggcgaggaacagtcttatgtcacgggcgcatggcctggacaggaggagcaggaagacgacagcgaaggcggcgagcaggggggcaagcatcaccacgcgctgacggggggagcgcgctgccactgcctctgccggagcgcccgctgctccgtccgtatatggataaacaacagcaggcgatgccgggagcagtggagctgctgttgctacgaccaaaaccgcatcaagagctcgccttttatgcgctttttt

SEQ ID NO: 286113 - DNA, 421 bp, Zea mays
aacgagaaacacttggattttggagatgtacatgaaaagtttgcatgcaacacaaagtacacaatctgcaatgtcctcaatgcaacatgtaacaacagtttgtaatgtacaagggtttattggcattgctttattgagacatagcagcacacccgcaaaatgctggcatagggggagattatgggtttgtttagacgctacacagcatttgaaatgtgtccctcaccctgtcacccatgagatggtgggggtggcattggatagggcatcggagcaatgtttactggagcaccaggtactacggctcctggaaccggggcacgcatgccataggccagatgaggtggagcggaaacaggtagtgtaacgggagttccaacagctgagacaagggggccaccaactggctgtccaattgttg

SEQ ID NO: 286114 - DNA, 492 bp, Zea mays
aaaaaacagaccctaaactggcaagggttcatcaacttgggaatatgtacacaaaagcatttgctttgcaaaagggacgatgatcgtcataggtacagaaagcagagctgaggatcgcataaacaaatactaagctagagaagtttcatcggtttggttatatgtacataaaagcgtttgcgcttcaaaagtagtgatggtcgttgtagatccccaaagcaattatctggccgggaatgacgttgatctaccggacatcgctttcagggcctgtaaaatctttttgatgttcttgaagcctggtagttctgatcatgtatgtgttctgcaatgttagaacttagaaaggactatggtacatagcgtaaaaaaggaagcaacttgttgctcgggttgcatttgctctcctcttttttttaaacatacttcttaggtggggatgccagatttttttgtcaaggtggtctgaaagctagtcaacatcctgtaagt

SEQ ID NO: 286115 - DNA, 347 bp, Zea mays
catgtcaaggggggaaaaggagtaaagctttgttttaaccacacgtgtccacaacagccacagccttgaccaaccaatcaataacatccccagttcttcattttctcaattctgtatggaagcgccaacaattccaccagttctataaacaaaggcaccggtcattcaactcaccgctactaattacaatgcctattagcttccgtattcccacagtaagctctcttggcttccagtaatgctagggggcactaagcccttgaagccttgaccccaaaaaaattccggaaagaatagacccatctctcactcttggccgtgtgttcatacaacaggtgcaaaaatgc

SEQ ID NO: 286116 - DNA, 555 bp, Zea mays
aaacaaatatgatgcattgacccgatgtaaaatattttccttgattaccaggtcaccgcaggaaattgctaacgacagcgattatgtgtttgctaacactagtagcaaaactcaattaactaatgtacagaagttgttacaacaatggttagactaaatcggtcaaatgcctgctccctataaaaggaatgcagcagctgtaatctgacttaggaaaacagttaagatggggtaatatggactttcctgtaatcatcctccttgcgccttcttcgtctctgcctgcaagggccagactcccaggaccacgacgacgggactacattttgccacagcagtaaagctactatagaagttggatgacttccgttccgctggagcaaactctccaatctccaggacagacaggatctcacgccatacaatcacctcggtggcttctgtcaacatctctttctccatgcggagtagcttataatcaacccgtcattgcaaaatagtatacatcagaggggcggcaatcttcattgacacagatctgtctgttctgcgtac

SEQ ID NO: 286117 - DNA, 472 bp, Zea mays
aacaattcccttcatcgaactaataacagaattagcaatctaactcaccacagaatcatcacaattaatatacctagtcagaccattcatcaatccactaacacgaataacaaattggcttaccctaactaatccgacacgatagtcagacgaacgacgatggtttttgcttgacgcctttgaccgcacacacttgacgagcgatgtacacaatctcatttcttaaccagatacttaggggatctgtttggccgagtaagtggcgcgtggccagcacaagagcgtcttcacggcttgctgtcgacacaaatggaagtatggtggatttagcatgacgagaggaagcacacgtggcgcacggaagtcccctcgacaacgtcgtggaagcggctacgggtgtggtaacgagctacacagagttggcatagacgaggatgggcgatcgacgacattggtgtttcagcacgacgat

SEQ ID NO: 286118 - DNA, 438 bp, Zea mays
gaaaaaaaaagatgcttgtagtgattccaatcaggatatattgtacatgtttttcattctttcagaacattgaaactgaatttttcacggtgcagactgcagagtgcagacctttgtcctggcatcgcgattcgcaatcacaacagtcgccccaaaattgcagcttttagctctccgatcctcgcacaaggcccaagaactgcctgagattccggcgcgacgaacctccatcgccgactgcccgactggcgaggtcccgcagcgcgagcgccctcgccttcgtttcactgtcacggagcagctcctcgatcttgtcccgaacaacgtctctccccacgagtcccgttccgtgcgccgcccctggcggcaatggaaccttcagtcccgtcctcacacgtcgcagatgtagctccggttcaaaactggtcggtgaagtac

SEQ ID NO: 286119 - DNA, 557 bp, Zea mays
ggaaacaactagatttcttcatgcgtgatgcacttacctgtataagagaacctacaagatatacacaccattagatatctgatatatactcgtacatgtttactcagcaacactttcacacagggacttttctggtttctagcacaaacacagcatctaggaaggccatcagtcctgttcacgaccacttgcggtaactgaaagaatcccagcaatcggatgatttcaaccaccaatctttgaagcgaatcaagagaggcaaactggaatgatacatctttttgttcacttgactgctccagacgacctgcttcagttcatggcagaggtgggtacaaccaactccctgtaatctttacggatgctccacagaatctctgcgcaccgcttcatgctcggtcggttcctcttagttggggctaagcattgcagagccagctcatacagcttcgcgaccgctagattgatcgcatcggtcgcttccagattcggatctagtgtctggatagcattgccctccacaaattgttccattgcccattttgtggtaacacgct

SEQ ID NO: 286120 - DNA, 462 bp, Zea mays
ggggggggttacttagtggggggcccccctttttttttgtttttttttttgagacggtacaaccatggaagaagcacgttaaatgaccaggcagtgagcagtaacggtacgttttgctttggaccagaaggaccagtagccaaagggtccggactaataacattgactactcgttcacacaaagggggtcactgggtaacagccccaactaaggctactcgcccttgctatgaaaacagaacagcctaatcattcatcgcacaacaatcagaaaactaacagaaacattctggtacattttttttctgtatctcaggaaggcgcagatgtgcagctaggttatcctcacaatggtacgatataagtctcccggtcaccagagtctctccacgccctcgggatcctatgatttctggattggaaggtagagcttgaactcaggcggcagctcctcctccgagt

SEQ ID NO: 286121 - DNA, 443 bp, Zea mays
atcacaacagagcacgtgtatagaacacaacattacagttgatgcttatgttgtatagttgtttaaaatgaaaaatctacgatgtgtattcgaagtttcaaaccagacaatgtatgtatttccattacatgcaaagacgggtttttgtttcatataaaatcatcgggggtccaaattacgaacaactaacacctcctttgggttacaatccatatggtttcatcaatggcgcaaacatatggccagtaataaaaacttctgcgtatggttcatctctcaccttggagcagaggaagcctcgaacgacatgcagatggggggaacagctcccaggatggacagaagagcagaggggatgttccagatcccatttccacagatcagcccggacgccacagccaccgggtaaccataagcctgttcccggttaagtttttgccagg

SEQ ID NO: 286122 - DNA, 373 bp, Zea mays
aggagccaaagccggggccctatatataccatcctccgggacttccatgcgtggataaaaaatcgtgcaacagaaacaaaggcttccaggctccccttccctccatggagggaagggtttatcctgaattcctgatgctaccctggcactataggtacgctcatcatataattttggtcaagccgcgcaagtttgaagaactaatccacataaatatacattggggggtctctcatctgtccaacaaccagttaaggactgtctttttggggagaacctcgccactaccttctttctctggcttacgggaagtatttacagcactgcggatgacagcattgaggcgtagtctcagctgcgcattgtcaatgag

SEQ ID NO: 286123 - DNA, 487 bp, Zea mays
agcaattccatgatcgatgattacatatgcatgcatgtgaaagcaaagccctcagcaggtctcaatcaattacgtagcatcactcacgtctcgcccgtaggataggatgatctaatcatagtcgtacggtgtaagtatgggatagagataacagaaagcgggaatcttaaactctgatcacccagaaaagatgggtcgctgaatatctacagcttgttcagcaaaagtaaacgcaccgttctccagtttcttcacagcaacacctatgaacattagccacaactttcttgcttctacagcctgtgatgtcgacctcacaggtctacaccagcacaagctcacagtgttgaatcaaggtacgagtagaaccgtcgccgattgaactggaggaggcagcagctgaagaagcgatcatgcacaccgacaaagagagcttcagtgtcaggactgaacgatatgcctgcgatctcaccaaagaagtccagct

SEQ ID NO: 286124 - DNA, 884 bp, Zea mays
agctaaagaaactgtattgtctgggcaacgtatgttctgcatttgcaatacttcattgcatccgtcttaccaggaagcggaaacggaccaggtaattctgagaaggtaagctatagagcacaagaacgaacacatccgagtgaagagtaaacagcaacagccatccggcaaaggtgtgactacaaattaacagctagatttttttttggatcaaacgggcacacgagtggtgtgccctatttcattaatagagaagagttttaacagctagcgttgataacaaacaagcaggacaccctgctgacgtctagtgccaatatgagtttttggcagtaccattcgtcaaatgctccaactttgtaccgcccttcagtagctcttcaacagctttctcgacacacgtcaatgcatattgaacatcgctgtctgaaatctggtaatggatgacgaacctgacactgcttgatccggcgcgcaaagctcaatatggatagctaaccttggatgtgcccttcattaaagatactactgcaggtgtttagattaaggttctgacttgctatgtgatatgatttgcctgccaaccaatcaacccagtagcttgcaatatttaaaggtctgtttgttgcaaaatttgggactgtgtttaccaatggagtttgatattcactcaaagttatgttatgtgtaggttttttatgttaacttgtttggagagaatctatatggttttcttgcaaattgacagttcctttcccaaattttggtcaaaagaaaccatatcaccgacagaattcagatcccatttatcggtcacctccaagaatgttttctataattgaaaaaggagaccgaagaatggagcttcatcttgtaatgggggc

SEQ ID NO: 286125 - DNA, 389 bp, Zea mays
  unsure (1)..(389): unsure at all n locations
tttttntatttantttatcaagaaggtatttttgcctggcctctttaaaacagctgcgctgtatgagagcctttatacatctgtagtaaggtaacacacacagtatgaaaagaacagaagagcctacatgaaaagaaagtctacacggcgtatctagctgctggtgaatataaggagaaacacaaaataaagggcataacaggaatacacaaaactaaaaggcgcgcgggggaagggagtcaagatctcagcgtgcagtatccatgtaatatttggcgcaactcgctcaggatggcatcgacgagcagcctatgtggagttctggaccacctggtaacagcgggaagttgaaatttagaactaccaatacgctggagacgtgctccaaa

SEQ ID NO: 286126 - DNA, 418 bp, Zea mays
aacaggggaacaatctccacctcccatggaggggggataatctatagaacgtccctgggcacaatgaaacaacaatactatgtacattcaacaattcaaagtctacaaattttcagaagaagccagcacaaggaaagttcacagatgtcgggatgagcgtggttattttggattggttgaattagatatgtcagctcgcagctcctcttcaagctcgtcgaaatcccaaccgcctatctcctcaggggctttgttaacttttccgaattctagctctaactttgcaaactctgaatctgggtccagcgtctgctcaggtttcactggagatttcggagactccacgggcacatttttaggtgaagagggcacctgaacaggtgaatggctcgattcagatttgtctttggctgaacga

SEQ ID NO: 286127 - DNA, 356 bp, Zea mays
gtttcggaactacatcagacactacagatgtctgaactagccggatatcagtttcaggattgcactaggagaacgacagttttatgaggaagctatacattttattttcataagtgatatgtggttcacaaagaagggtatccactatcttaacaagagcaagcaatgaacaagcatgtcttcgggccaacttaaccaccttcagtacagcagcatttggaaacggatacccaattgtcagttggggtgatttagtgttgcatcctgatatctgtcaattcataagatatccagatccaccagttgcatagagtctatacttaatcctttcccttcaggttaatcactgaaagctc

SEQ ID NO: 286128 - DNA, 294 bp, Zea mays
acgaaaacgcgtacgttaattgagatgtacagaaatcgacaagactgcacaaaacattgcctgttttcggaaagcaaccaggcatcatgtaccaaccactcgtcctattgaccaaactccacgttgccatcatgctgcacggatgcctcgtctatgcaaaaccagtcggttcagcatcgagagcgaggataatcctgcgcaacaaaaaccgacactgacgtcacctttgccactgggtttaacacatcaagtctctgaaatgtctgcatacaataagacccttatacatcgaac

SEQ ID NO: 286129 - DNA, 426 bp, Zea mays
gtctatgaacagataaacaggagcctgttttagttagtacatcaggttcacatgataattgaaatggactaaaccttaaaattaatgcaatccctgattggaaacagaaaggcacaatttgatgccttgaacctacccgcagcttaagtttctatagctagagacagacagctacaaaattcgtgaggctggagctctaattaacacttattaaaagcctcatgcttacgtaagcatggaaagcctcatgtctacagtataaaaagtgttttaaacgcctgtatacaagttttgctggagacagcctaacaacatgctagagtaaacatatgcagcattgcagcaacctagagcatgtgaaggatcattttgcttccactctggggaagaacatccacttggcttggcatgccatgtccatgcgta

SEQ ID NO: 286130 - DNA, 231 bp, Zea mays
ttcctttttttttttttttttttttttttttttttctttggggggggggcaaacaattactaattacaccatacgtcaccaggtcaccagcgagacaaatgatcaatggggttcctacaatcctgcctcgacatttattagcttacacacaccaaaaaccagatttaaaagggaaggtactgaacagtgctgccaaaataccatgcatagtcccatcatttattgaagcct

SEQ ID NO: 286131 - DNA, 620 bp, Zea mays
atgtaaatctgtacagattgtaatgaatcacgtggtctataatctggcaagctgaatttgccttccaacagtgattgtctgatcctaaccggttctcagcacaggtagagatgggaaccggttaggatcagacaatcactacctgaaggcaaattcagcttgccagattttagaccacgggattcattacaatctgtacagatttacatcagatctgcataggataagggcacggatctgagatggccatagcactcctcactgctcttgaagttctccaggcaattccaacaaatgtggctgccacacctgcactcaacatggttgcagccttcactcttctcaattgtaaatccacatgaagggcagttcttcacgttctccttccctttgcgccattcaagcagagttgcgtccgggtctgccttgtactctttgtatgcctcacaggagatgaaaggatggtactcgatatggcacttggtgcaggtctccacagagcaagccccacagacaaagggtctgtcgccttgtgcgcctgcagcagctacttggtaaatggatgtgcagtccggtgtggggcagaaacggtataaccctgcgctagatgcaacaaatgc

SEQ ID NO: 286132 - DNA, 415 bp, Zea mays
agaataaattgattgttcaaaccaaacatctgttaattacatcacctaggagaaaaatggaaacgggtcttcttgaccaatcttttattcttttagaaaaatgcatgcaccataacgactcaggaagatttgaaagagcagagagcagaccttgtagggagccaggaaacatctgcatattatgggctgatttggtgaccaggaattgaagagaatccatggaaaatcccttgaatagcaagaggatttcctcaatagatcccctccaattccctacaattccctagtcgtcaaatcacctatatgtttctttctttggctacaacagattactgttccaaaccttatatatgaagaactaacaagggataagacagaccagttgagcatgatgcacccagagcgaaaacacttg

SEQ ID NO: 286133 - DNA, 395 bp, Zea mays
aagcgaaagggggactatattggagtaaaataaaagatgagcattctcagaaattagaagggggtttcctaaacctcagttcagttgggcgttatatatacatacatacagggattgtacaagcatggcgattcacgcccacttggttaattagaaatcacaacaatcgccgatacagttattagaatcccgctctctattcgccccgggcaagcctgcagccagtgactgcaagcaggaggcaccattaccaagagcttctcttcgggtcactggcgcgcgccctcatggaccttcgatctggatgctgctgaatgaatgggcgagaccgccgcttcccctcaaattctggagctctgctttgatcgtctccgcaatcttggcctcctcaaggc

SEQ ID NO: 286134 - DNA, 454 bp, Zea mays
atatatatgcccttgataatttgtattactatacttctatggctttgatgtacctaaaattacatcagtaactgtctccttcaaaaatgagaaacaactcaataatgtaaagcattctccatcacgagaagaaccaaatatgcctacgctatgtagcagaggaatggagctatcatacatactcatatagagcttcgttcagcgccgcacaaagtgtgctgataacaatggatttacatcatctactgaatctttgcagcctccttcggcgtatctcatcaactgtgagttctccagtacctccagcctgatgatactgcctcagcgaaaaatcatggtcctctcgtgcagtgctgcacatctcacagatatctgtggaaactgagttgtcataggtgcaggctgagcatctccatagacctcgaggagtatctcttgctgattgccggcgccc

SEQ ID NO: 286135 - DNA, 631 bp, Zea mays
ggagacaaaatggtataatgggaagataccatacgatggttaagtgcacaatatcaaacatatccataaggggctctacttttggatatcataagcatctaccttctcataccatctgtttcgtcttggagcagtgtatgcattgactctgtctaagctcctgtttggtggcctgcacaagagagacgcaagctgcatgagcggatgcaaaccaaggcattttatagtcatttgatggcatccactcgtacgcaaaaattgcagtatcagattgatcttgagcctacgcgtccggatacaggcatccaatcaggcacatactaaataacaagagaaaagtttatccactattgtttctcatgtgtctctttatgtttgagatctcgcgggaatgcgaatccacggattcctattccttgaacctagacagagcgaagacggagttggacccactaatgggccgcgcgggccggaccgtgtttcgtattaatggcgggacgacttagccaggaccatagacagggctagcccgtgtgcgtctatacacggagcgcaggcgcgcattaggtggcaggcatgctcacatgtgaacagagcgccgcctgttactatgttcgcttacttatggaag

SEQ ID NO: 286136 - DNA, 452 bp, Zea mays
agttcagcactttattgtatgattatgatacataataaactgctcaggtatatatgtaccatctagtacacactaggaatcagatacagatattgtacaagaatgtatctatcaatggaagtccctttattatgttgtggcttcagtcaaatataatctgagctgtgaaaaatgatattctaaattctgaaatgttgctagttacaacttacaaccggatcctgccaaagccatgcatgcactcagctgcgttggcaaatttgccagctgaaaatcttcaactgtttatggttgctgcatggctttagatctgctgtacacctgcacaactcaagctcagtattttcagcctttagttcggctgcacggctggtcggttccgcaatatctccacatgacacaagtgtttatggttgctattctgtaggactccatgtaccaggaacttaaat

SEQ ID NO: 286137 - DNA, 433 bp, Zea mays
gaagtagcaaaaggagcatcagcaatgcaacatcaccatcacaatcatttgcgcacgtcctgtaattttgcaaattcaacatatgagatgttactggtacagtaacattccggtaagccaatatctacagatttcaaaacgtccgggaaaacgaagcatgcctcgcttcctcagatgtaaactacccttcttgcctagcctgggctgcttgggtctgaaaagatggcacccatatttcaacacgactccctccggggcctataaccgcatcagtccttcggggtgatttcacacgcaggacgcatccattttcctcaagtagctcacgtgcgaccgttaatcccgcgatgaagttccacgtcatgttatcttcgagcataccatctgcaaggtctgatccaaatggggccagggagcgcatctgagtcatgta

SEQ ID NO: 286138 - DNA, 423 bp, Zea mays
aggtgctctggtttggcaatatattgcagcaaacaatacaggatcaaacaacgttaaagctggtgagctttgtagccaggacccatgaaaatgcctcgaaaaagaaagcatttcctgcaatcctcgcatgcttacaagcaaaattttgtacacacagtataaaccgagttttttttggtcagcgggatgatggcacctacaaaaaggatgcaaacaagacagaattacaaaacttgctctgatacaagttattgtcgtgttagcattggacgaatcaacactggtcgtgtgaacacataggtctacccaaatcaaattagctctgcttcaatgtgctccagatctttccaatctgttgagcatgataccaagaacaagggcatgcaccttcgtggataacaaggctgcaaccaaatgcctcaa

SEQ ID NO: 286139 - DNA, 560 bp, Zea mays
gtgcaaatatttttctttacatttccgtactctaggtttccaataatgtatacatactccctccttttttttgtcacaatacatttgacttcgcaaggtaatccccaattaatagcctttgaccactagtctaattctcatggggtcgcattaacaacaaaaactcaaagactctagagaaaagataaaacctaccttgtcttcgtgtacaagatagcttagaaactaaaaagaggtgagtacctgtgcgccatagatcatttgcagatcatcaatgaatcacttccatcacacaggttaatagtcacaggagatactgcctgatgatggcggtgaccgactgaacttaaatccagtgtgatttccgtatttctctactggccttttgaatttcaactcgatgggccatatctgagttgaagctgggcactgtggtatgctatacttgagtaccagaacaatggagataaaaccctcagtaaatcagttagtctttgtttctccgttatcggtgtcacctgatccctctggaaggagacctaaaagaggtaagggcagca

SEQ ID NO: 286140 - DNA, 950 bp, Zea mays
attcttatatatggggcgttcgctgtagtgcaccaggacaaaaagtttgcggtagttaggtacactgtacatgctctaaaaaagagaaaatgtcaagagtgcagactacaacggatgtgtgatatccgaggaaaggggcttttatacctttattagggtcgtagaaaccatttgttgaatctcatacacatagccagctgtacgcctgtacttcacaataattcacaaatatcgtattttctattgaaagccttgtggggagccttggggggacccgtatctcggtattgagtattgggggcacgcacacgacacatctcacactaatcataagcttggatggaggctcgaacctgaaactccgagtccaagaggagatcaaatgaggtcagggagtacgagttcaatataacacccatttgcttgcccagcgttggttattggacttgccgccggcaccaccttgtcgggcgtgttggaaggagttctcatcccgcagccaacccgacgtgagaaccgtctttatggatccaaatgtctgaatatcagtttccaacccagttacagatatattcagactaacagctttgcttccaaaatttacaacctttattttcatgtaagtgttcccatcatgtgggttattccaagtgatagcagatgtgaccagttggtcgtagttcggtagttgaatagtggacggatgaagtgtggcgctgcttgaatctttgaaaaagtgcagcatccagtaatttggacatccatagtgctgccatgagttaaagactatagcatctgggttccacctttggtcattgtcgtttacaaagagtggagcacaacttgccatctcaaccacgtcgctgtccctttctaatccaatgagaaatgcagcttcagctaaagcagctattagtgttcctcggccagcatcatttccagttacagca

SEQ ID NO: 286141 - DNA, 507 bp, Zea mays
aactgaacttagttccacgcgccatagcaggcgagcagcactaaagatcgagattaacatttctccactcttcaattacagagcaatagagcatttctcggggctggaaaaacgaaatgctagagatgctgcaacaaacgaggatcaccagtgttgggtctaggtaagtttggtcacaaccaccaatcaggtaccaacccggatagaaaatgctagcttctaagtggaagtggcacgattgggactgcttccttctgatgatttgaacattcagcgaaaagataaaattcagaaatgactgccctcttttttttggatgttttttataatatccattacaaagcgaaatccaaggttgcctgctcggtcaacgaactccaatcgaactcagcaatgtttgctcaaagatacgtttgagtttccttacacatgcagccgagtcaggtaagtacgacaacctcataagtttggcaatcgctgcgcttgcatcgtcggcatcatgatgat

SEQ ID NO: 286142 - DNA, 426 bp, Zea mays
ggaaaacacacgtcgggaagcaaatagctatgtacagtaaccaaaatagcagtaatcttttgcttagcattgcggagtaaaaaaaaagaaacacatatgagaattatacaataatactaatatcagcagctacggagttaatcataaccacatgtctatcatgtggattcatctatcgacatgataaccccaattttgttcctcattttgtaagcatctaggctatatgctaaggagaagcatccatagcaccattgttttgctcatcaccaccctccaatctcttaccatcgccaacatccccatcttcgtccacatcatgttcatccccatcctcattactaaggcgaccaatctccgcttgcgccttctccaatatctccctccactttgcatctaggtccctttgcaaatccctcctcattt

SEQ ID NO: 286143 - DNA, 286 bp, Zea mays
cgatagttactgtgtatttaacctcacaaatgtcatatttttacatacaacaaagctgtagtcggtatatcatcttaacagttcagtgtccgataggtgagtatactatactacaactcaagtttctaagatgaaatcaagttgtgctgtatggcgaaagccaaaaagctccatagtttatggccatgtccttagtttttgtgtctctgtttttcttctgctgtactggtcatgcctttctaagggtgcttcaaagtatcctagacttttgttcttcttcttcttc

SEQ ID NO: 286144 - DNA, 626 bp, Zea mays
cttaagaatacgcacaaacagacagactacaaccgagccgaaccaacaagctaaaagtgttcacgacaattgacagtcaccactttacaatggactaaaccagtattgatttaaccggtacatgaaggttgaaatgtttatctagacaagaaaaggcacaataacaattctataggcgggaacgcggcctgtttatgtacaaacaaactgacaaaatcttcaaagcttttccacgtcggcgtccctgaagctgccaccgagaagtgacagtaggccaccaccatggaccctcccctcaggaacaacatgacctccctctctgcctccatctacaggctcagtcgaccatgaaggcatcatagagcgaggaaccagcacctgcggaggaatcattgattggctcctcactgtgccgtcacagtcggaagcggtgctgacaccagaggccgagtgctcgttcgtcatgctgcttgctgcggtggcagatgacgccacaatgccgctgaagagacctggtccaatcatgtttcctacattcttcaccacctcttcttcttgctgcctggccatcaaggtaccatgtgctgcacagaagccactcttgccacgggagaacttttcgcagc

SEQ ID NO: 286145 - DNA, 545 bp, Zea mays
gcacaaacaaataagagcagctgaaacaacacacgaaattattgcaggactgactacagctgaaccaacaagccaaaagcgttcacaacaattggtcagtcaccatttacaatggacttaaaccagtacatgaaggttgaaatgtttatctagacaagaaaaggtacaataagaatacaataggccgaaacgcggcctgtttatgtacaaacaaactgaccgaatctgctgatggaaaagcactagctttgaagcttctccaaatcggcgttcctgaagctgccaccgatgagtgacaggaggccaccaccatggaccctcccctcgggaacaacatgacctccctctctgcctccatctacaggctcagtcgaccaagaaggcatcatagagcgaggaaccagcacctgtggaggaatcattgattggctcctcacagtgccgtcgcagtcggaagcggtgctgacaccagaggacgagtgctcgttcgtcatgctgcttgctgcggtggcagatgacacaacaatgccgctgaagagacctgg

SEQ ID NO: 286146 - DNA, 374 bp, Zea mays
aagaaagccagggatcgatctatactcttcttttttgcgtgtgaatgaaatgaaagatcatggactgtctttttttacaagggagttgatactgcagacactgcttttggtttcgggtggaaatcctgtgctttttttttacaagtgagttgatgctacacatacacacgtcgccttggacgatacgcattcatggctgatcttctccgcttttaacagcagaggcagacgcaccccgtcgtcgtcgtcgacgtcagcccagtggctccgcctgaagcttggctttctcggtctccaggccgacggcagcgtcgatcgtgtcggtggactgggccttgtacctgtacctggcgctgagcgcgaggaaggcgact

SEQ ID NO: 286147 - DNA, 604 bp, Zea mays
cgagacgctggtcgagacgcgtgggttttttttttgtttgagtttaggtgtctgtggctttttagtacggggtcagaagtacataaaagagtgtagcatacatatacacactggagtctggagatggagcttcgttcgtcctaggtcctattaccgtaccgtcaatctatgacgaactttatccactccaaaacacacacacacacacacacaaacaagatactctgacaacacatgaagcaaaccaaacgccataaaaaaacagtgaaaatagggctggcgaaaataaaaatacagcttaatatacatacatacacgagcactaggaataattttacagcagtggtcgaggtcgtggacacggagagcgcgtgacacgagatgtcgcgtagcggagacgagccggtggcatcacatgacgctgcacgcagcgctgggctctgcgtcctcgtagtactgctggccgtacgggttccggccgtagccgtagccgtagccgccaccgtacggccagtgcccggcggcgcggggccgcccccgccgccgtagtacccgccggcaggcgggccgctgtagctaccgtatggtgcgcgcccaccgtccg

SEQ ID NO: 286148 - DNA, 393 bp, Zea mays
aaaaaaaaatggccatgattatgcagtatgtgtacaatgcttcaattctatatatgcacgtgttcccatgtcgacgccaaccggctcaatcaatcgatttcaatataatcttgcaattgtatacgcatgtgccatgatgataacgaccaagctcaaaaccagctccaacaatggcaaaatctgcattgccactgaatcgagaattgaaccaaatggtggttggatcagcacatacgaaatcacttggtgtggaagagctcttccatgtcctcgaggctccggcccctggtctccggcaggcaggcgtacacgaacacgaacgacgcggtggcgatggcggagtaaaggtagaacgcgccggccatggtgatgccctggtagagcgagatgaag

SEQ ID NO: 286149 - DNA, 427 bp, Zea mays
attcaaactaataatatagtatttaagcttttggtttccttggaaaataaagttgcacaaaaacaaaggtgcactaaagaaagcatttacaagggctgtaccaaccatagcacatatacctatctcattatcatgcagtggtccttggcatcagaatttgacacctaagtgaaacttcctcatcatacagacacagatagtcctttctataagagctaaaaagacttaaactaagtggaaaaccatacactaatgctgcctcaataccttctctgatgtatacttcttcacctttagctttgtgttccttcttctagtgtcttcgtaattatcctcatcagcttcatcgacataaataatttcaggctcatcatcagcttcaacatcatcctcatcataattggcagactttggctcactcctagca

SEQ ID NO: 286150 - DNA, 360 bp, Zea mays
  unsure (1)..(360): unsure at all n locations
cagatggtatgaactcaaaaggctctataaataaaggaagaaaaaggcgtacagtgttcagatcatgtgaactcgtaactctctgtataaaggaagtaaaaaaaacataatggactcctggcaaagcgatgcgtatgtgttgacaagctattcgtccgttctcttcccgagctccagactccggccagactgtctgatgatggcccagacacatcagatcacttccggctcttcttcttctgctgtttagccagtcttctcttggcctcggatttggcgaagaactccgcccactcgtccgtaagcacgaacaccggttcctcgtcttcctcctcctcctccnccgcgtgcagcagcccc

SEQ ID NO: 286151 - DNA, 464 bp, Zea mays
ggaattaactacgcgattgcttcaggactcatgagtatgtatattttacacaggtgatgttttacaagagcaaaaattaaggcgagaatcagataatcgtgtgagtagagtacaacgtcagacaatggctatctccctcctccttccgtccctgccacatatctcaagcgaaatcttggagcgaaattcgaattcacgactcctgtgtgctcctgacggatgaatgctggccatggtgacgctacgatgctagtccaggccatcttgatctggatggagcgcatgtattggatgcgaatgggatgctcctgtctgtgttcgtttacgttgaactttgacggctggctggctggctggcgttggttgggttggtccggcgggtggtgccacggttcctgcctgtatgccgaccaccagatgccatgtgctggctgggcggagacggaatggatttcccttctttc

SEQ ID NO: 286152 - DNA, 469 bp, Zea mays
ggggagcatctggcaacttatcgaaggaaactgttctacccttttaattgacttttttttaaaaaaactacttcattatgtacatacacaacacagcaccggtatcaggataaaacagacgaacaggacagttccgaccgacccctaaccaaagagtttgcggtttgtcacatctcccagaataaaaacctttagtatcccatgacgatattagacggtggacaccccattacttattactatctaaatccagaacttaccactagctgcatgtttagaacaagctggcaagtcatccctaaggaatcgaccactgaagcagaagcagaagcagaagaagctaattccttcatccctgtataagatcattatggtcagtgcaaaggttagctgaccccaggctgcaccaccgggtggaaagaccagttcttttttggctcagttgtcatcccggcgactttctcgttcg

SEQ ID NO: 286153 - DNA, 204 bp, Zea mays
ggcggagtcgtcgtcctggtggcgacgacgggctctcggtggccgcgggccgtcttggcggagaacgcctcgtcccagatctcggtgaaggcccggaggatggcgtcgtggtggtgcggcgcgttcagcgcgaggaagtggcggagcaggtcgcggagctcgtcgcacgtcgcgatccggttctccacgatcatgttcaccatg

SEQ ID NO: 286154 - DNA, 427 bp, Zea mays
gggaccgtgttctgccaccggcgcgattcagcagcctcccgctgggtccatggcgtcgtcggccgccgcctgcaccgcgaccacgacgatgacaaccaacgcgctccatgccgggcccggcggcggcatgctgcccatgctgccgccgctgctccgcctagccgacttcgacgccatgagcctcggctccagcttctccgggatatcgtccatggggaagcccggctccatcggcgcggcctgctacccgcactcggtcggcgggctggagcaggggagggtgcagcaaatgcagagcttcccgttcttgcatgcgatggaccagggcccgctggggccacctctggccatggcgatggcggcgccagaggggatgttccactaggtctagacaccaccagtgaaaccaccgtggcggtggcggcgg

SEQ ID NO: 286155 - DNA, 384 bp, Zea mays
  unsure (1)..(384): unsure at all n locations
ttccactccggtatgtcatcgtcgtcgtcatcccaggcacggggggcttcttgaacagatgatcttttaccatacttctgaaccagttccctcatttgctctgctgggcgagcagagggtggtggtacatgtggccacgggcccttgtaggcatgcgcagttacatttgcggcatggggtgacgatttaacaaaattaaattcaggaagatcatcctcatccttagcaacaccgggtccaaagcctggaggggcgtcatcagttacattttccttttcgcgctggctggaaaagccttggtggtgccccgtatgagttgagaggagnnggagggccttgctgccggatttgaacctgtggtttccctaggatcgactgtttttt

SEQ ID NO: 286156 - DNA, 382 bp, Zea mays
ggaacaaagcaatatgattttggtgtgtgtgtcctcagcatttagctctgcagtgaaatgtttcgacaccaaaactagtcacatgttaaggttcatgtgttttttctatgaaaaatgaactgattcatgtatgattcctctgaacttctttcattccaaagagggcctaattgttttttcgccactccctttgctcggcgcatgtctgaatcttcaccccctttcgccctttttatcctcttccacgctatttccacgagtccccacaggtctacccctttatcagtcggaggactggagccctgtctttgaaaaccgctctaccatccttggccacgtactgatattgccacgcccgacctaggaaccatgccatggcaac

SEQ ID NO: 286157 - DNA, 316 bp, Zea mays
cttcgcgggggaaacattaatttcagtccattcaaactgaaacggaggccgttacagtcatagcatacattgcatcgcttacagactgcaaaaattgcaggcgcatggtccggacaaggcaatgacaggctcagcctgtgccaacaaaactgacagttttattctctctaattcccacaactaaaacttcaatatgcaaaaggtattaactactggcgcatcgccaagaacaacctgcagctgccactgttaatcagtcatcacagctggagcatgattcacatctatataaaattgaatccaggccatatcttct

SEQ ID NO: 286158 - DNA, 222 bp, Zea mays
cctctttttttttttttttaattataacagagggagtatgaacgttagctccaacttaaactgtgcaaagttcataaggctattagtaataaacagcatgtccgtgagcagaatttaagcacaaatctacggcagaatcctgatattgcccagtctaaggcttcttgaactgggaataccacgtcaaacaaaaggaacgcagatatttacacaaaagaaccc

SEQ ID NO: 286159 - DNA, 507 bp, Zea mays
acaaaataactaagggggcattaaaactgtatcatgtcgttggatattttcctcaaacctgttgagattgaactgaaacaaccatctcaatatgtacaaacagctctacacaactaaatctcattttctggcaactagccactgtatattacataactatgcttgcacttgtcataccttctattcatgtcctatgaagtatggataaacaaggagtattgctcacaagttgcgacatcaaaagcttgacaaaaagaatctagttgacgcacggcctgcgctctttgaccaatctaaaatatcctgcttcagtaagctcgtgcagtcactcttggctctggaatggatcacttgaacttacctcattctttgcaaacgttgttgttgttattgtcgccattgtaacaggttgactcgatggcaacaataacaatctaaaatatcctgcttcagtaagctcgtgcagtcactcggacgcgtgggcggacgcgtgggcggacgcgtggg

SEQ ID NO: 286160 - DNA, 482 bp, Zea mays
gttcgcgcttccacggacctcgcactgctccaccgccccgccggagttgaacatgtcgagcaggccgatgggcgcgaacgacacgcccggcgcgaccgccctgacgggggagacgtggaacacctcgaactccagcaccttgagcgtcaccggcagtgtggcgccctggggcagcctgactagctcccctgacctgtaggcgtacacgacggcctcgccgccccagccgtccccggcgaggccggcgatcacgtccacgtcgtcggcgcggaccgaccccgtcagcgtccccggcgccgcgtcgtgcacccgggtcttcttggtgacgcggcaccacccggcgccctggcagttgaacacgcccaccacgcccgtgcacttgttcacgttccagatcttgagcaggctcgtgccgtcgcgcgccgggtcggcgaagaggcagtcgcgggtggggcggcccgggagctgcgcgcggagcacga

SEQ ID NO: 286161 - DNA, 415 bp, Zea mays
ggcagaactttcccatctaatagatggttttggggtgggatcaaacttcatgtcatcgggtaacctttgcaacagttcatacattggaacgtcgcgcttcacaaacactcgaaatacacacgtgccgcaaactgaatattccgtaatgcaggggttcggatgaaaataacaaaaggctgggggatcttgtatacagccactgggaagctctgccatagaccgggttctcgtatttgccgctccacctgttggaatcatcagatgggacccgaagttccagctccggactgaacggctggaacagacggtcgatgtcctcgtacttcacctcctcaagggtagtgggattccacttaggggcattgtctttatcgatgctaagagctctaatgccctcataaacatccccattgac

SEQ ID NO: 286162 - DNA, 529 bp, Zea mays
aaggcaaagcactccatgagatactacattccacacaaacaggagcgtccattcttgtataacaaatttagatgcttaatgcttcctcggtggggaattttttatctgctggtgctgaaaaccaaataatgttcaacatggatggatacaagtcaaaaatactaagctcaagatagtaggtagtttggctaaccaattaactagaagcagtgatctggttattgctaataggacgccaggccgatcatagaagtaaatggaaagaagaaaactacgaaatttaatagaagtaatggtaccaacaccaaggtagagaggtctacacccagtctatcagagtactggctggacagatgtgaagctagcaaagctccatgttgatcattatccgtcttcaagccatttccttgatcagacaggttcacaggtcaaggtccacatgctataacatagcaggactggttaattagctgctaccatcaatggaataggaaacgtaacatgtgagaccaagaacctagttattctt

SEQ ID NO: 286163 - DNA, 374 bp, Zea mays
gcctagccattttgaactagaagcggtgatctggttgttggtaataggacgccgggccggtcatacaagtacatggaaagaagaaaactacgaattaaataaaggtgatggtaccaacaccaagttagagacgtctacagctgctcctttccagtttatcagagtactggctggacagatgtaaatctagcaaacctccatgttgatcattgtccggcttcaagccattgccttgatcagacaggttcacaggtcaaggcccaaatgttataagatagcaggactgatcaattagctgccaccatcgatggaataggagagaatacgcgtgagaccaagaacctagttattcttaggcttccatgtagaaattg

SEQ ID NO: 286164 - DNA, 414 bp, Zea mays
tttttcctttttttttttttttggcaaagcggaaggggatcagattctgatcgcccgtcacaggctaagatctgagcacggatcatgcagtaacagtgcagtgcaggagtatgataagggtagacacaaacaaacaagtcgctccagccccggccgggaccggtaggtaaggtagtgtttggttcggtgtcaacgagggatgggacgagatcaacccttggttgactctgtcccttatttttttgagggatagccccatccaccatttttgaacaatattgcttgaccctgactctggacctccaaaccaaacgcgggtcaaattaaaatgatctcatctcatcctcttcatccttcctcgtccctccatccaaacacaccctgaagcgcagtcggtttgcagctttgttgctt

SEQ ID NO: 286165 - DNA, 400 bp, Zea mays
ggacgactcaggggatatctatccatatcccccacatgtgttgattaaagagctcattgcatacaaggcatggcatcaaatagaaaacataaggaaaatgacttggctacgaagactagttgctagtgtgaatgacaagactagagtgtgatggcccgtatagcagtgaagctagagtaagtactcgacaccaaaacagggttataatcaatgaaccgataaggccacgtgatgatatggagtagaccatatcctgtttttggatgatgaaataaactttatgccaaggacaatgatcaaatgtagcgtggtgttagtgctcggaataggccatgcctttggatgttgccaagatgccttccaatgatctcaataaaaaattggggggcactacaaattt

SEQ ID NO: 286166 - DNA, 473 bp, Zea mays
aaactgacataaactacagctgcatactggatctagaacctagagccatctcaaatacctccatagtaacaccttcatagtcattgtttacataatgaagtttaaaataaaggaggatgtgagataggatatgtaagctgcctctgaacccgataacatagctttgataatgaagtgtgttatatctgattacctgacatctctagtctaaacaactcattagcaaatagtacaagtgtacaaccctagtctaacaacccactatcctagtatagaaacggctgctacctctttagcaagtacagcccatccctcgtttctagcttttcatctgctactagaccagaaagaaaactttgcagctgctgcagcgacttgtcatacgatggctcggcaatacaaaacatctttagagtgttatgtatcctgtccagcgacatactcccaaaatttgttagcattccgacgatgta

SEQ ID NO: 286167 - DNA, 450 bp, Zea mays
tttttttttttttttttttttttttttttttttttgtttttttaaactgaaaagggtacagtcccgccgccctttttttttttttttgcaagaatcatacaagcgagcaaatctatttcatgtccaatggagccaatttacaacttacaagcaagtacatggaaaggatgctcaaaataattagctggtacatatagatctccaaaaaaaaatctacaaacaaaaacgttgcatgcctagaaaaggatggaaataagaatgaagaaatataaaagccgcactaccaagtattgccccttgactccatgctgagacgttaaaaaacaatacgcagaagcaacatgacatctcttctactatcctcgtttcaattacactggtgccaccctcctctattatgaagtagctgcaatagccataaactggaaccatctaatactatctttctgc

SEQ ID NO: 286168 - DNA, 382 bp, Zea mays
gcataacaataagagtaagatttttgcaaacttcccaacggcatcgacagcatgtggtgctttggagaggagaatgcaacgggggtaggagtgccaccatccttcatatcatatttacaaaagaactggattgtatccatctataccatatcccaaacagtcaccatgtcggcagcttatacaggggtacgacatcgtaaacaaccaacaggtcttgtgttgtcctgcttggtttatgccgatcctaaccaacgcctgaggttgcgtcctctcacatgacaagaaagagaacagcatcaacggttgcaggcttggggcgggcgcacaagtagacacgtgtgccgcttgctgggaataagaaagcctgttgctgagaaaatca

SEQ ID NO: 286169 - DNA, 413 bp, Zea mays
gggtcaatgacttgacaatagtgtatggccagcaacaagagcacagtcacagtatcaggtaccgacatcatgtattttcaatttttcattgccgaatcacaggggcaacgaaaaaacatttgctctttgctggctgcacaaactatacacgacagaagcttttgatgtattcagatacctcaaacattctgggggatctgaactgccaccgatctagggacaatctcgaaagccgcaaacatttggaaacactttcatcatatacaaggtggtgaaggtattacttggcacataccatcccgcctttccaaatcgcgaggactgatggcatttccctggacagggagatggaactaggggccatgtcccttctattcctatctagtcagcaagccttatgaactgaaggagag

SEQ ID NO: 286170 - DNA, 525 bp, Zea mays
ccaacttcatggactcattctcattatatctgggaattcaaaagctttcgtggggggaactcccctcaaacgtaaagcggtaagggttggtttgagaggcacaatagaaaacagcatggcttcagtcaagcagtaccatataaaaacaatattttgttagtggagaacaaaatgtctgaactgtacgatcttatacgagatacaaacaaatgaagaaagaagaaaattaacagatctctatttaatataaggggttcaagttaaatagttgaacaaatatttggctcaacatttcaagcccaagccagaataacctggctcaaatttgactgataaaggccaagcatacttcaaattgtaggtttaacatgccccattctagttcatgatttgaactgggaatcaattgcctcctcacgtttcttccatgctcatggaccatcggaactctgtagacatgcaggtgcaacattgtaatgtcaagacgttagaactagagcactattgcttgcacaactgatttgg

SEQ ID NO: 286171 - DNA, 313 bp, Zea mays
gcgaaataatattaaaaatatgaaataccgagactaggtaatacacaacatagcatcaattatctgaaagggtcatcacatacaaccaccgccatatatgaattcgttcggacaagccaacagttcaatttagcggttacagatatctcttcatgtactcatccatgcgggtatactgaacctctgggtacaacagaggagcgtctgctccatcgtcgccgatttcaaaatttgtcaagcagccttcatagaaaatggggtaatagggtcccactccggcttgattggccaggtcagtacctttcattgaagc

SEQ ID NO: 286172 - DNA, 545 bp, Zea mays
atagcaacgccggttttaattaattttgttacggagtattagcgaaagtagaagaactgacattgaacatgcatgcatagataaatatggaaatactttgagaaaaatcacagagcagtaataactcgtcgaatcttaaaaggcaaatagcagaatgaacatcaactcaagacgccgttcgttctggaatcgctcgcggaaattatgggttcggtcttggatcgccgccatgatcgcctcccatgctcccacctcacaggcagggaagacaccatgtgcatctagacaacccgtatacatggtcgcctgcacatgtcttcttgatccattttccaccatggtttgctgggcaccttgtctccttcaccgacatgccatcatctgaaacctcataacaaatcaaccattccctgcctcccctcccttcgacaaccatccaagactattcacaaagcaggaacatctgtacaaggaccaggaaaatatttgtaaagaactaaaaaattaaaaatcttcctactttttttttgttattcccccctgaa

SEQ ID NO: 286173 - DNA, 473 bp, Zea mays
aaaattcaaatactgatatcacagtaccagaaaaatgtttttccaagaaagtaagagagctaggaagctaaatcatccacacatgcaagcgagacaagagtacaagactaatcaaaatttcaattctatgacataatacaaacgctatagaaccaatcaaaatacagaaaacctttaatcattttcccgacaccaaccaaaatttcaaaagccatgttgctctatacttaccaatgtacagaggaaacatagaggcattacgaacagcaagatgactaaaagcagcatgcagctgatcaaacctctgaaaagtctagacatgccaagaaagatcttcccttgctccacttcgtcctcctgcagtccatcgccatcccaggttacaccaaattcaaactcatccaggctggaagaagaacacggcacaccaactcgacacctgcaatgcatcatcgatgcgtgaagggaacgac

SEQ ID NO: 286174 - DNA, 389 bp, Zea mays
gggggtgaaacaaaagaagtaatgctagcaaagaaaccagttatgtatcgtatattattatgctatgggtaacactagaccttcacctcaattcccttaattaacataaacaagcaagagggagcaagagcaaccactacaagttaatacagccaccgccgatcaccaaattatactacaaccaccgaccaatatcatcatgtgcagacacaagaaaaacaaactgccacacctaagcttctttcactcacaggtcgccccaaatcccatgatagacatatctctatatctatttcaacttcagctgccttgttcttctcgttcttttcattcaagcgtcacaaatcatagacgagaatgaacctggtaatttcaactggctggaccaa

SEQ ID NO: 286175 - DNA, 475 bp, Zea mays
aaaagaaacaagttgcacagcacggaattcatttttgcattctgcaacaaattcccagtactaaacgttatataccttaataaacaactaaatatcacaaaatttgaagaataatgaaagacaggcttggcagaaccaaaggcgtcatacatagagaccagcacgtggtaacaaatgccccaccatgtacatgcgctggctgaaaaaaaaaaggttaatgtacattagagatctttgtacaacattcatacaagtccgatagtccaagtgatttcttatttgaaacctgcgtgaacttcatccagaagacatggcatagtagctgatttcttggttagcaccattagttggctttgctgtcctctcccatcaaaattgaagtggcgacacaccatcttgtactgctcaaaggaaactatgatacggtcggaagagaatgctcagtagcaagccgctttccagatgaatcattaac

SEQ ID NO: 286176 - DNA, 243 bp, Zea mays
ggggggggccatgctggacacatgcactttacattacttggttatatatatacaacgtcatgatagccttacagtttaacaacgaccaaaattgtacagggggggacacctacataaaagcacatcttgtttttgcgcactcaccaccggggcaccgacacaacctgttttattcctcacaacgctatacgcactatatatatgggctcatacggactcacttggctttttttgcacgaaggc

SEQ ID NO: 286177 - DNA, 520 bp, Zea mays
atggcctaacgccacattacaacgcagccattataacgatgctatgttagagtttgggttgggtactgtaatgcacacacatggtgttcagccttcatgcccaattcaatatctggttgatctaactggataaagacttggcctcaattagcatgtctcctatgttatttacaggagagcaggccgaagcagcagcaaactggaaactggcaagagaaagaaaacttcgccatacacatacacactacccaaaggcaaaattaaacagcagaggccacccacacccaccgatgaagtgtgagtctgacatgcgcgccctacacgtccactccttccacggcctccgtgactgcgacgaagtcgtccatctccttgtgcccggcgccgtcgggcgccaccgacgacggcaagctggtggccttgtactggtgccgcctggcgaagacgacgaagacggcgaagttggcgacgccgagcagggccagcatccagtagaagaggtcgagcctgccgcggtcga

SEQ ID NO: 286178 - DNA, 632 bp, Zea mays
ggccatccaagttatgatttataggcattgttcccaagacaagataaataaggggttttccgtaggctagagcagcaccattccaaccagggcccattcatcagccttgtcaagcaaaaaaaaaatcaagaagatccggattcctagcttcggggtagctcatacatgtacaggactatatacttattgccagatcccttcaaatttttttttaggttgagccgattttttccttcaacacatgctcccaatctgaagatccaaactcgcagctgccacgcagaatgtcatcccttccagtgacatacgaggatgacattccatctgacgtacttgggttcaaccttccgaggggcctactttgtagaccaggacgtgcatggcggcggacaccggtttcttccggccctgacaagaaatatccatcctcaatattctctggcacggctatgtaaccttttggtcttgacagagcactgctgtctcctgactgaatgtggtcagcagcagaaaggaggttatgactctttctttctccaggatggcccttgagcatcatcggtgggcaagttatggcagatccataggaactacttggatctacacccacatcacatagatggaaagaactg

SEQ ID NO: 286179 - DNA, 492 bp, Zea mays
aaaaaaaaaagtcagccgatcaggctggtttattccggccaaggtacagcaatactagtacagcacacgtacccagggtaattaataaaatgcacaagagggtgagaggataaaagcagtggagtacacggttatactacatgcatacaataatctatgcagggacggataaattatggagacgagacagcagcacacagccacagcccacagacaaagggctaaaaaccacgacgacgaggagataggaaacggaaacacgatgggcagcgacagcgtggcgcgcgtgagcagacagaggagagagcaccagcgaacggcggtctcttcgttggtacgtgttggatcgccgtcgacgccgcgccggccggtgatcagacggcggcgatggagctgtcgagcttgacgacgacgagctcaccagctgcaccggcgggcaccacggaggggccggcggctcgagcggcgaggacgtggtaacgcacgcgcgcc

SEQ ID NO: 286180 - DNA, 554 bp, Zea mays
aaagacattcaaatgtgttgcaattaaacaggtaacacgatacacaatggatatctgaagtgcagcatttatctaacaatatgtgtggcacttcaactgaataataaggaatgatgcaagtatagaaggtaactgcatcatttatgctctaccacccttgcagaaacggctacacaatacgccagaaatgcatacaacaggtcatagtatatttagctttcatacaaccaaaggcagcagggagtctggcagtgaattttctcaccaatcccagatcgtagctcgattactgaacatcccttaagagtttcagggtgttgagatagttagttgttcatcaggactgcccttggccacactaaatgtccagtaagatcaaaatcagctgttgagttgcattgcctcccactgtgaagtgtaaacaacatttatgcatggattagtattgaggtatgtgcaaaaatagcccatgcccatgggttcatcaagtcaactctcggatatggattatgggaaggacgtagccctggttctttagcagcttggataacctt

SEQ ID NO: 286181 - DNA, 404 bp, Zea mays
cgagaacatccagacaccggagggggggtttgtttcggttgctatttcattagatgtctagatgatacaatacacagactgattttcttgtgagaccgtctctcctctgagttttttctacgcgaccacctctccgaatggtatccggaccaaattccggctctaccacaataattaatctaagggctcctctgaactttttgattcagggagagtacagcaaaaaaaaaaaaaaactttttgaatgaaaatggaagaaaaaaaacccaattaggcacccccgcgaaatcccttgtgcgaccagccatccttcggagggaggactagtactagctgacaactgcacagaactagggattcctcctccggagatcgatgacgaccaccgagacgttgtcggagct

SEQ ID NO: 286182 - DNA, 441 bp, Zea mays
aaaccagacaaagcattaccgagttaatccaaagttcgatcttaattatacaggcgttttgcagttccgctgaacggcccgatacagagcacaagcttagttttccacacatttacaacacaccagttacacaagggtggaacgtgaaagccaagaatgaattgcctgaaacagcgtacctaccccatgggcattgggcacttgatgatggattcctgcgcccagattgcacttgcatacctatctcgctacaaagctcgttcaggagaacgtgcgttaccgcagagatggctgcgcgtatgctggggagagctatatgaatccggtctcgaatgcctacgcccgtggacaggaactgctgatcaaggatgccagagccataccgttactttaagccttgttctgtcgtagctggagtaagtcgggagggacatggagatg

SEQ ID NO: 286183 - DNA, 503 bp, Zea mays
aagcatctcaatcaatcaacttcgatgatatcatcttgattttttacatttagtaagagaaaatggggaatcttgcatgtgtaatgtaaatgcaacagtagtaccttccttgttttggttatgacattctgcactaaatttacagtactgaagcatagtgatacaaaaactgagtatattaggttctaatcatgtacagatttactcatgctcttcaagtattgccctaataaattgcaggttatctgatctatggactttggagatgtgaactgcctgaagtagtactgcgtgtctgggaagttgtgctgttctgtgtctgggaagtctggtttgaagatatatctgaaaagaagtttataacatcagggctttcaccaagaactctcaatgaccttggaacaggaggcatgttaacgtcaaggaatccctcgaggatttgaacaatctgaccagttgtaggtctagcactttcgtcatcttggatgcaccaacaggcaacc

SEQ ID NO: 286184 - DNA, 512 bp, Zea mays
agctgtagaattatgaaactattgaggagtccacaaaagtgataaattcaatacataggagccatcaaattcaaaagtagttttctcccttgattagcagaacctacttatccctcaattagctggccctaaaatataatgtgcaacacgtgggtgctgaagcctgtaggaaaggtcccagtccctgctcttcagattgcacaacccctcgttcttgcatatcccaacctccaggtcaaaaactattacagtttttcttgcccatattgatgctaaatctgggacctatggtttccatatgatctctttgaatataagagattatagaatctgcaaatggaataaaacaacataatgataccactaaaatagtaaaaaaataatattactaaaaatgtagacaaaaatgcatagcacagaagaataaaaacacaaataatacttctataacgagagctaaataaaacaaaattatgacttcatgagacttgtactcaacaacaatatagcat

SEQ ID NO: 286185 - DNA, 424 bp, Zea mays
gggacctgtttagaagccgaatgactcttttaaaaacatgagtggactggacctggcccatccattcacgaaaattacaatattatatagctcccattctgaaatatgatgataacgaaactgtggaaacacatcgcagtcccagatgacagaagcctaatcaatgacttggcatgtcagacatgaacatcgtagggaatttatagctcaaccggaactcgtgacaaggacggctggttccaagagcttgagcacgacggggagccctttcgacggctgcagcgtgaggaagtcggccggcgcgtgcacgtactccggcgccacccggaacgcgaagcgccgcaggatgagcgccagcgtggccttggcctccagcatcgcgaagtcctgcccgatgcacgaccgggggcccagggagaaggac

SEQ ID NO: 286186 - DNA, 507 bp, Zea mays
atccaagaaagcagaaggatagataacataaaactggagagcaactggaatgtacaaacggtactatctgcgaaagcaatagctgctaatagaacctaacttgagaacattacagtcaactagtcaaacgaccttaacctctgggacattataagctacatcggcagctttggcggctatatgatacatgagacctgcttcagaagttaagctgaacctacagttggcctgctattcctactcatcaactctgaagctatataacggcggagctagtcttcattgtcataatcctcgtcctcctccaatctatggtttgttgacagagcaaactggacagggtccatctccatcttgttcatgtcagccagttcccaagcaccaaagaagtccttgagttttgctccttcccttaaccgtggaacagatggtccaggtgctgcagtggctgcatcgcaactagttgctggagctgacagctggggttggggtggcactgtaacctca

SEQ ID NO: 286187 - DNA, 505 bp, Zea mays
cagaaaagttggcctgtgttatccgatgtcacggaacgttgattattcgtctccactccacaatggttaaataaacccaacaagggcaacgtaaagttaaaattctagcggggtcaaatctgattcttgtagagagccccgttgtttacacaccagaacaagctttaacacctcgactcagcccggtttctcgtaccacactttccatcgtctttgagcagagcaccagatcatccttcgagcattgccttggctgcatcgatcagtgcaggtctgaagctgttcgatgctcggccaagggcagtgtagccttccttgtcctcgacatcaacatcagcaccatgtctaattagcagaagagcaacccctttattctcacatataacagcatgcgtaagaggtgtttgtcctgtcttgtcaacagcatcaacttcagcacctgcctcaatgaggaattcacacagtccgcgtttccagtgcttgcaccaggtcgcggacgcgtggt

SEQ ID NO: 286188 - DNA, 539 bp, Zea mays
  unsure (1)..(539): unsure at all n locations
aatgatgtattcttgntttttctttcctttttttttcaagaaatctataggcccagagatgtctgaatatacaacatgaacgtagcaacatccacagatgggctctgattgagattcaagctacctttcttacaatcacagatggcaccgtcaacccaagttcaattcaccatacctagttgtgactcgtaacctccatcacgaaccaaataggactagcaattcacaatagtcagctatgaccactgtacataatagcataagcaaagacaactttagtcttcgggttcagctgagaaatctggctcgtccggcttcgttatcttcggcaactctttcatgttctgaggcacttttctagtcctagctatgaattttagagcaaggctattcttgggcggagaatcgtcatcttcgttatccattcgtctaatctaacggagttgaatgactccctcatactcaggtcctttgccatcttccttcgcttgtaccgtctccaggcagcttggatgaagcatgaggcccacgtcctccag

SEQ ID NO: 286189 - DNA, 345 bp, Zea mays
ctgcaactgttgcacgaaatggaaaggacaaaaatctgatgctatatcccattttggagaagcagaaaaaaaaacagctcctttggatacagattattgttattttctccctataatgatacagcagtgatggataatgtgtatcccttttctttaaactaccatctcctgtaacatttctgttatctctgatctgaagaaagaaagccatatggatacttctgagcaaaactgatggcatcaagatgcccacaagaaaatgctgacaggttatgaagcggcctagcgacttgataacacatttgaggatcacttccagcttccactagttgccaactcgccatt

SEQ ID NO: 286190 - DNA, 317 bp, Zea mays
agagaacaaaacgaaacgggggcgatcaaattcctgaatcaaaccgaagcatccaagtaaattcatgattcatagtactagagaaatgatattttaactagcctaggactaggaggtgaagatctcatcaggcaaccatcacagctcgcgtcagggactgactgataagcgacttcaggacactggctacagcattacaacagcggctaattcaaattaaattaatcttacccaggggaacaacagcaagtgagcccataaactctaatccttcctagctatcttagctatagcagacacaccgtcattgaccagag

SEQ ID NO: 286191 - DNA, 401 bp, Zea mays
ggtgggaaaataattccacaggaacaaattaatctgaaacaactttaaaccaacaacgaatatcagcgtagctacatctatttcccccctcactgcttctccgagtcaaataaatccctaaacaaaatttctctacagaatatctatagtatttacattatcagggccacattaccaaccatctcaggtagatgaccccaccctgagcatgctcaacaatgccatagacttgacttagcagcttttatttattataatccccaaaatgcagtaaaaaaagtcagcctctgttccaaaaagtgatgaatgtctatccatcagtcagctcttagtcttaagatctccttcgctgtcctcttcctaaaatactccatgggttcctgactaaaagacaggggcag

SEQ ID NO: 286192 - DNA, 428 bp, Zea mays
ggtactaaaaataagtaacattaaccaggcataacaattcaggggaaacggagagaagatgtttgacaaggtgccaatagccacaggctacaaaaggattaataattacgagagaaaccaaagaaaaaaaatggaagacaaaggattaagtttgtttatctcatcagttatcgctcctatttcgaagcatgtcccaacatcactatcagttgtaatttgtcctctgtcttctggtaccctgaatccctcctcttccaccacctgaattcgagttcatgttgcttccaccacctgagtttgagttcaggttgcttccaccacctgaattcgagttcaggttgcttcttcctcttctcccagtccagccaccgttgggccgaaaagctgcgcctgcactaatgttagaactgccaccgttctgaaggtag

SEQ ID NO: 286193 - DNA, 416 bp, Zea mays
agttctagatcgcgagcggccgcccttttttttttttttttgtgtggaaccagctgacttcttcactcagcagggcatacagccattaacgcagtaactgtcaagaaaatagataaagtctgtagcggaacagttacaagtcgacaccaaacaattgtccgacacatgcagtgcattgtacaactggttacagtaacacgcagattctccgactaggaagacatcatatgttagtcgttagccagcgtctcttcatccacgtcaaaagctttccttgcttgcttgagctcttcattcatggacagtagttcagtagcacggtgcagtttccgtaaatccttgcgtataagataaagaaaattctctgtcaggagcttccccctttttgaggcaacgttctgcgccttgtgcaccag

SEQ ID NO: 286194 - DNA, 493 bp, Zea mays
ataacgataagatactatccattatttaagtgttgcaaaatatctctactcacttgaacaatagtttagtatgtctcacctctccagccgttttgcctgtttaatagctgactcgaataaaaggctatgcatacatgatacattccacattctctggatcattcattatcttttttattgtcatggaccacatataatctgaataacatagctgcagcattctccttggcctttgtcatccaaccattcttcaacattaatggtaagatgcagacaatccacttgttccatggtttgtgtcttgtttggctcatagatcgatagattgagcagtgggatcactgttttctcctgcgccacccaacccgataacagcagcaactaaaaaggcatgtcattgttgtgatatcatgcattcacaacaattagaatggtaaattcactatgcatcaataaaggtcagtaacaatggaaaccccttaagttcagtgac

SEQ ID NO: 286195 - DNA, 427 bp, Zea mays
cagaatatgttaggatgaggccgctctgcagacagcgtttggagtggccgggcatgggagatgaagaggaagaaggctgcagtaaagacaccactaattgtagcctgaacatcgcccagtttgacaccatccaggtacatgacactgagaacataagccgttgcaaggcaattgagcccaagaatcttgaacatttgaagtgtagtgactagggtgcttctcccctgacggatgatgtcaagagtaggggcaacagaggcatgctttgctgtgaaaggtgaagccatagaagcatcaccaagcttaacaattggtgctgagcggccatcactttcatcattcatttcatccaacaatttctgcagcttttcttgctgtctctcagcagcagttaaggggcggctgctcgatgctttagcagaactat

SEQ ID NO: 286196 - DNA, 320 bp, Zea mays
gatgacgagaagaaactgcttgttgagggacatgcctggaattcgatctactgaaagctatgtacaccgtgcgctcggggctgatgaccgctaccaactcgtattcgtgcttacgtgtgtgtgtgtgtgtgcttggaagttggaaccgagtgacccgccgttgcatggtctggcgaacgatcactcagacactcactcactgagggactggaactcccaccactgagagctgatgcaggtctgatccgacgacgatggccagcagacggagtggaactggaacggttggtgctccggcggacccaacgaggtgaagccag

SEQ ID NO: 286197 - DNA, 538 bp, Zea mays
ggaggaactctcaaagtttcttaacactatgttacaatgtacacatttgtctttcactgattggctgaagtttaacaggggctatgtacaaatactacgccaaacaaggataaggacactgttccttcaggagcaatatgtacaaatactacgccaagccattagtccaataacggataatctaatctacacaatctgcaaggcacactgctaatcaaatctaagcagcagaaccctactggccactcagtactaagactccatacatccagatccagcaaacaacacagatctatctcatatcccaagggggctccacatccgtgacatgccattttcctggttccagttgcaatttggagtcagctccagcactgaactagtgttgttcgagacactggtcatcgctgtcgtgacagactccttctcagatgcctcgaacgccagaaggcccccaaggctcactggtcttctgaatggcagttccggcagaccggataagcagtacaccttctctgcaaccgttggggcggcgtag

SEQ ID NO: 286198 - DNA, 365 bp, Zea mays
atgataaataatgtagttctttttgcatctgggatagattgtttacacagattaaatacattaaataaaaacataaccttaacatatatttacaaagatagcatgaatggatcaaccaataaagctctacacgtagaactgatattgcttccatcagtagtggcttctgtgcgtgtaccgcagccgctgccgcctgcttggcaccaccgatgaatttaggctcctgccggagcctgaatctcgggtaccaacataggacctatccagaagcaagtgacgatgtccacgatagttgctacggtgtccagagtggtgatttgagaagccccgttgcagtcgattccgtgtgcttgaccgacgacccc

SEQ ID NO: 286199 - DNA, 524 bp, Zea mays
aatcggaaaaatatttatatcatcatcagttgttcggacgctagtcacaaccttacaaccttgtcatacattttttgagtgctagaaaatgcaaagcacttaaaatgcactgatacacagacaaggggcatcaagtaaagaatctatagtatggtaatttggataaaaagcaattagtattgagtcttacaacggaggaataacaatgaagaattactagtacattagcgaaaatcatctgataagaaaatatgggtcaaaacttgatcctaaatcacccacttggtcctcaggcttatctgatgatatgaacctctcgtgtgacaattttaccagagcgtaaagattagaaatcaacgggttcttgaggaatggtgtgatagacctttcaaggtttgaaaattcctgcaaataaactgcgcagttgtcctccaattgatccagagagccagactgcgtgagcgcgtataaaccgagtaggactgcatacactgatatgaacacgtccttgtggttacctatgc

SEQ ID NO: 286200 - DNA, 362 bp, Zea mays
aacgaaattcataggaaaattatttgggttcaaaactttttcgaaaagatgaaactctggaccgacgacgcctccagcagacacacaacaccacctacagcgtaggacacccaacatgtcaagtgctaattaaaactaaggcacctcaatcccttgcaaatgatacaacaataccaaacagatcaagccaatgatcctggtaattaacgtgtgcagtcgagcagcagagctaatgaccagtccaacagcagagccagtagcctgtccagcagcagagccaaaagcctcgtactgcgatgttggaagcggtagatagctgttgggggcccagtttgccgggatgacctggtaagccaccaatg

SEQ ID NO: 286201 - DNA, 443 bp, Zea mays
ggaggagattttaatttccaaactggccctaaataagacccatagaggaagttaattgcggtcttttgcaaagaaattcaatcgacgctatgcaagcaagtagagggatacgaggaacaccacgtacgccgggtgtatttatttgcacagtaacatactcctatatactagcactaggagtatactgctactgtaccacgtggatggatcatcagagacctcctcgttgttctcatatgtagtagcagcagcagcactagttttggtccttaacgagcgcaacgatctgcgcagctgcgtttttatctttgatgccaagatccttcatgtcggggatctcagcggtcgggtcgacggcccacctgacgacggctttcgagatcctgtcccatctctgcacctgcttcccctccagcgccgatatggtcaccgattgcggcttc

SEQ ID NO: 286202 - DNA, 709 bp, Zea mays
ggaccagtaaacacgccgtagtatttttcatgcaacacgcacatacaagaataaaatctttggttggcacctgatatttctatttacatggtgccgagagagagagtagaaccacggctgatggctgtatcaatatcaactcaccaactcacaagacaggaaaaaatgggggggactttattcctggctgatcttatcacactagttttaccacccattaggctaaaggtatcgactcattcatccaaagaccattactctattagggtacttcacgaagctcgtcactgccgccgactatgcatatactttaccccgccaacagcatggcaccaatgtcgcttcagagacattgaggtcaaatacccgctaaaaatactctctttacatgctgctctgttgaggagacagtgcgcctcttctacaaaatcatacgggaagaagtggctgcctctcgtcagatccatggcggtgtttagactcacttgcccctgaatcaggcacgttgacataactaggttcttttctgctgtgatcatgagcttcagccatttcaactttgctgctaggccttcgtccttaatttggttagaaagatactgatgcatagatatgattactattgaaattccaagaacaaaatttatcgtcagtgtgtggccaaacagcacagcagaggctactccggtgaagatagtcgcaattgttg

SEQ ID NO: 286203 - DNA, 337 bp, Zea mays
aggaggaatttcctatagattagtttcccatttaatttacaagggcacactttgtgccatatccatttttattttaacttattctgtatctcggataaaaatcaatcaggctggcatatcatgccaggaacatgtactatgctatcccaaatgacgaagcctgcatctataacctctcctaatactttcctttcctgccgtatatttccttcctccctccctttccgtatcgcaagatttccatcaaaggggagagaaaaagaaaagggaaaccaaaaaaaaaaaaagactccgtcacacactctacacccgagggggccagttttttttttttttg

SEQ ID NO: 286204 - DNA, 393 bp, Zea mays
acaatctcaaataactctcaaatagccacaacatattcggggccccgaaacagtatacagcgaaaatcaaatgccgctccctaggtttcaagggaaaacagcacgtgtggggtggggtatcaatctggtcagttttacaaacaggcctatatagagaatgagtacacctcgtcacaaaaaaatgtggaggttcaagaatgaatatgtgcaagcgcactaacgcaaagacaacaacaaatattcagatcccgagcattctcagcagttcctgctatagcatgcatgccattctgtaaccgctgctaatctttgcaaaatgggaattctgatccgggggagttagctctttgcttgacagcgtagttagcctgactgttcaatcaagatgagaat

SEQ ID NO: 286205 - DNA, 382 bp, Zea mays
gaagcggtgaagcataggcatcaacgatcaagaagaatccacatagattgagtcaatacaatagaatgccactatcacctataatcaattgaacttcaacactaaaagaatggggttctaaaataccaaaaactgaacggcatctatgcaccaatccctcaaaagattcaccgtatagcctgcaactaaggaaagacggacaagataacactgaaacacagttattttccacactgtccacacaatcaagggaaatgcttttgcacagggacttccaatagattttcctcagaaggagagcttccataaccagcatccccctcaggcaacaacagctgggccttgggctgttagatttgacacagccaactggaactttttt

SEQ ID NO: 286206 - DNA, 449 bp, Zea mays
acatgccgccaataaattaaatcaaccatacctttagcactgcttgattcaaaatatacaattatggagccaaattttaacataaaaaggaaacgttgagcgattgagatatattcataggagtacatcaagaacaacctgaaatctgaagatcgctaatacctcatttgcactagcttattgagtactaagaaataatagcagaacatgcagttgtcaaggatgtggcacatctccaaagcaacttacctgatgctgcctagtgctccacattccactgaggcactggtaacgcagaactaatccaaacatgactaagatgcttgaagaacacagttcaggaaaacgggggtagcaacagattagaaccctagcatgaaaaatggtacaatgatgcttgaaaagcatttagctagacgcgtgggtgacgcgtgggtcggacgcgtggg

SEQ ID NO: 286207 - DNA, 657 bp, Zea mays
tttttttttttttttttttttttttttttttcttttttcatgcaggggttggaaaagatacatttgcacaatagaattacagcgttgagacacggttcagaacatgatacaaacaaatcatatagatgcacggttaccccccccccccccccccattacaatttatcacctgtacgcgtccatctcagaaaaaactcatttcaacagagtatatcatatggaccaaaggtacagatggactgcaaatagaatgtgctgagcacaggaaccaatgggtagctagctattaacgagtacacggaaccgactagctctattggacgaaccttgagtaaaatctgaaatgtcaaaaaaaagaatgcagagattacccgtcgggcggaattaatctagtgctttatgccatttgataataaaaaaaacccaatatcacaatcttttgtgggttgtcgacggtatggtttgggggggcgacggattaatacccctatgacagcacagttatagacaaagttacccgagggcttgcttccgatcatgttccactgcagtggcccctcgcttggaatccaggaatggagctcgatcatcccgccgcccagcactctcggtccaccgatgaccaacagccgctctccgcagccccggaacgcaatg

SEQ ID NO: 286208 - DNA, 640 bp, Zea mays
aaatgctttattgttgttgggggggttattgtaaaaacgagactgcagtgttaccccgcatcatcctactttaaactcgaaccgaatactgagtgaacgtcatacaatgtgccatgcgcacggcgcttcaccatcgcagccattaatttcctcaatggtacgtgggtgaattacaatcaatcgtcacagcgctaatcgcctaaccacacctgtttgttctgtacaaagaaaatagtgtaacagtcctcagtgcagcacaagcgtcggggtccaacttccaaggctctcccagatgccgtaagctggggctctagcagggacatccaccctttcaccaccagatcagccgcctacaaaatgtatggcgtcccactagttgtcttagcctacgaattgaaaacttgcggtttgtgatttccgttgtcgtcagtgaatcatcaactgcgacgccattcgctggaacttgcagtttgtgaccgctgttctgtctctgtgtcagcaatggcgatacttgtctccgtccaatttagagttccacttggcacatatggtttggagtgatgagtagcttgcatgcagtggagatttgagattggcacgctgaacacactggacgtagctagtttgagctgactgacta

SEQ ID NO: 286209 - DNA, 452 bp, Zea mays
aaatgagcaaatagttagatgatcacaacggcatcatattcacatggagagatcaaaaaaagggaacgcagactcatttggagtaatatatagaaatcagcctctgctaatgtgtgcttgagtgcgcacgtacgaaacacacgtacaacacccatcccatgcactcgattcagttcctagctaatactataaagctacgggcaccgtgcgttcctgccgggcccgccgtaatagaagtaggtgccccacgcgccgccgttgccgccggcgatgtcatagcatcccggccggttcggcgagcaggcggagcccggcggccgggacgaggttgttgtcccagtcgacgagctgcacgttgcggaagtatgcggcgcgcgcgtatccctcggcggggaagcggccggagcccatctgcgtgggcgtgtgcggcgcgccggcggggcgcgcgttga

SEQ ID NO: 286210 - DNA, 409 bp, Zea mays
gaaagaaaagatatagaataactgagaaatgcatgacaggcagatatccctataatttacataggagtatatttagtttagacttgatacaggagaaataaataatgtggcagtgcgcgtgcaaagacttattaacatctttgactagttggtggaagcactaaatttattcacgagtttcttttaatagttatgtctctactaaaatgttagctaggtcgatgacagaccgaccatatatatgtaccacgtacgctttattgggcaggtttttggtagcatgctgatccaggggtggatccagaattttttttatgacccggactaaatctaccaaattttatcatcttcattttattttaactatcttataccgtattaaatagagacttatatagaggtatatgca

SEQ ID NO: 286211 - DNA, 599 bp, Zea mays
agaacaaaacaaacaccagggcatgcataataattcagagcaggtcagcaaaatctccagagtgaaaaaaaagacaaatggctaaaaaccggatcaaaccaaaaaaaaacacgcacacacacacacagggtaatgtataatacagcatccctttggttggtatacatgctcacccgtatacagcagacatctttttccagcttctgttggaacatggcttcacttctaaaatatgggccgcaacaattactactacatctcattcaaaactccaaaaggcctcaccacgcgcgtacgaaccaaaactagaacatgaccaccaccccccgccaaaaacaaaacaaaaaacaagacacaaaacaaaaccttcacgaaatgtttctgtatatccatccgcgctcctttcctctagctagcctagcagcttccacctctagcatgtcggtgttcgcaaaccacgccgctgggttagctacacaaaaactaacctgtgtattaacctgacaaatcaccgaccgattcacagccgtgtgcgccgggattgcctggctgaatgggtgtttcttccttctactacccccaagtgtaatactcgccgc

SEQ ID NO: 286212 - DNA, 450 bp, Zea mays
ggagctgagaatatatgaaatttgattactaaaagaaagagatcaatctttgactttgaattccaacatatattggttttggaacacaatttgtgtgatgaacatataaaaataatagcatacatgttttctaaattctgaagtgatctttcagttctattacatgcaaagtctaaagattcatctagcaaactaaaatctctccatcagctgggtgttacgccaacggctagcatgcatgcgagtaatcatttttcacacacttcaagcactctgatccttgcttccagcacctcttcccttgacaacagcagcatgcgtactttgtcggtatcagcaaagatgggtcaaaagatcaccgaataagttctgaagaggacaaaacagagacatgaatttggacattaaaaattaagacaaaatagagacagcatgcagaaaatatatgaa

SEQ ID NO: 286213 - DNA, 352 bp, Zea mays
agaccaacacgataggcgacagatgatacaccggcacaaaatttagttcagtatgcacagcacaagtttttcgacaagatgcctcgatgggacttgcgagagtttgatgttcatcgtgctcacaacataatccacaaagctgatttcagcaggagctacaaactacagaattagcatattaccaactgctttcagcacgatgcgcccccaaaatgaagtgtacaaattacctagcaccactcagtctccgtgaacaatgagatgattagacggtggttaccgagaaagcctccacttccagtatgcttttgaacccatatttctttaaacattctcttttttttctttttac

SEQ ID NO: 286214 - DNA, 554 bp, Zea mays
gaagtacagaagactgaaaataatttataattgcaggggtaaaaactagataatattacagtgaaagcgcgagatggttgacacggcagatgacaccacatgtgaagcataaacaaagtgcatatattacatggcatgttgcacacaaaataaacaagaaatagctagctacagcctacaagtacctccaatgtgccgggcggtctcttgagacgagaagaacccttgatgatgagtagtcaaatgtaggacagtacagatcatcagggccaatagcttctctcgctgcaatggtgtttccacggtcaaagctgtaggttggctgcgtgtcttccttaaacgtgtcaaaggcgaacagccccataccacatgcagccaagacaaggtttgagtcgccccatacttgggttatcgcagagtgatggatatgagcgttgaattcgggtaactcataggtggcgacaagtttcccctttctcagcgagtaatactggactcgtgacctcgaccctccttttatttgcagccttccttctgtgctacctataaatacc

SEQ ID NO: 286215 - DNA, 477 bp, Zea mays
catgctcgtctacatgtcgatcggactgcatatttgaaaaagaaaaacatcgacactaaggatgttgaacaaaaatcgagattaaatttatgtatacgagttccagattaatattgtgcacacgaagacgaacatgctgcaatcagactttgacggatctcctacgagccatcagctcgtccactaagcgtccgacatcatcgtaagatgacccaccgttggccaccgcgcgcctggccttctccccgagctccttggccatctcccgtattgcctccgcgtcctcgccgtcgcccatcactctcccgatggccttcgcgatcacctcaccaccgatcacggcgcgccgggtctccagcatggacgcgtagtccgtggatcccacggcgacaccgaccttgagcagctccactaccagcttctcgttgtagaactggtcggcgtaccgcggccacgtcaccataggcacgccggcgc

SEQ ID NO: 286216 - DNA, 460 bp, Zea mays
aagagtaataggcaagcatagcagtataccttttgtcatttcaaccgaacaattgtaacattcatggtcccataagcaaatagttgtacagatatgtttacagattctattcttccaagccaggtctagcaaacataaaaacggacccaggccgccattgttagtgaaaatttaatgcactcactggagcaatattagctgaacatatacataccctacacctaccttgtgaatgaaaacttgtgaagcaaggcatgtgtcaaaacaaaagcttgcgtatcaagctcatatatcaacatcacctccggaacttgccgaatcagcatcactaccatcgctaccactgctgctgctcccacttccactgccgctctcacttccgctgctgctgctgctgctcccactagagcttgagctgtcctgctgctcctgatgctcctctgcgttcacttgagctcgc

SEQ ID NO: 286217 - DNA, 254 bp, Zea mays
agcctctattaggagcagggaacagatatctacaccgggccacgttttattccgcacaaatatgcgagcatctgcagatagcagagggcaaaagtgttctactgccaaagaatttgctcattggccatattattaaaaagagggtagcgtacagaattgaacttgcatcttttatactcgtatatgacgatgtgcatgcatagggcgtgagtagtggtggtggtttgctgatgcagtggctttctagaacagga

SEQ ID NO: 286218 - DNA, 369 bp, Zea mays
aaatggccacaaagggcagagtactggaataacaacacgattaatgtacactgtaacaagtaacaggatttaattatttccactgttaaaagaaaaaggatcgacaaaaaaaatgtagattcccaacggcaaaaacaccttctcacctccgcaagctccaggttgcttgaactggctgtaattcttgcatactcttatacaaacttgtatactgccgtcccgggaagggagtaactaaaaaaaaagggaggaaaaacatcatggactgactgttacattgatgtacagttcttgtttaacgcgatcgacgatgacctataaataagttattattactgggggactggactcttcctttttgctctacca

SEQ ID NO: 286219 - DNA, 517 bp, Zea mays
gcaagcttgaaaagtctggacgtagtaatcagaacttatgtctttccataggtgatgttattttagtttctaaaaccaaaagtcctgagcaaacaataggagctcaattttggttagatgggtcttgtgttaagcatggaataattacattgctaacttaacaacagagggattcttgtgttaagcatggtcttaatcattttatcacaggtgaactacaagcatggaacaattccagaaggttctaaaataccgctaggtggattttacaatgtaaacaacagccaaccatgatcttcacagattcttgacacagataaacaacacaaaccaaattgacaacttaataagttgggcccaaacctcatttcatatccaattctaccctcctgcggttccattccagaacaacaacgtgtggagctgactatcagatgcacagagtaaccattgattgatctaagacggagtaactaatgagtagaagtgataccgaattcaccccatccctgggagc

SEQ ID NO: 286220 - DNA, 458 bp, Zea mays
gcaggcaattccgatttgcaaagatacatatatacagtggataatccaaacaacagggggagttaaggggctcttctgtcatttttgcttaaaacaccaaacgggaagcaaaccatcagaactgatgcgctctcaggacaactgagtaagaaagcactgcagacgtatatcctaggtggagtggagtgaaagcacatgtgcacagagagcgcccaaaggtcgcttcttcgttggtggtatcaggcaggtttcacaagaagatgcgtcaaagacgtggcgttaccttgctagtgagctccactggttgtgccatgggcactgctaatggagccccagtgagaatctccgggccccatctgcacagcaatgctgtccacggactccgaggtcccgcttctgtgaccccaacttgatcgcctcgaatgcataccagccctccgttccacaagctcaggaag

SEQ ID NO: 286221 - DNA, 367 bp, Zea mays
gaaaaaaaaaactagaaaaccttcacattttttttttctctagcaaccaacaatgtacaaaccagattggcagtaagatctaatgctcacagtttttgtttctactttttctcagcctccctctcatcatttatgcaacgactaagaagcaaccgaacattctaaaaatcataatgagtgaccaaaccttcaggtctgagcggcacaaggacagagcgagcaggcgcaggcgcaggcgcaggctctggctcggcagcccggctcgcctcggagcagccggaggccttctgcggcactccgaacagggactgccggcacgtcgggcacgtcgaccgcgccagcagccaccggtcgatgcacctgacat

SEQ ID NO: 286222 - DNA, 489 bp, Zea mays
gtggagttgattattccgggcacaaattgattaaggaatatatcctgctgttagtacggaaactaatacaacaaagtccgaggagaggtcagatgtgctgaacaccacacagcagtttacatgtaaacctcaaatcgattatgatcggcatttcagctttgcctcaagcaacagaaccgatggcaaaaactagagctcgttgcctcaagcaacagaaccaatgacaccgcggcgtctaaggcaataaaacccctactttccgagcaaagtcatcgttatcatcgaaatcctcgtcgtcttggtacacattttcatcttcagatttgtagtcatggccttcaaatgtctcgtagtcgtcggactcgccctctctctggtcatagtcatctgcctcttgttttccttctgcatccacttcagcagcatacccagcctcaaacttatcaccatgatccgaagactgcctgtgtgcatccacaaggatatgat

SEQ ID NO: 286223 - DNA, 448 bp, Zea mays
aaacacccccatcattgagatcctggactcgatccaacaaagtgatatctgaacaaaggttactcaaaagcttcccgtgaggaaaaaaaaactcatgaacttggacatgttaagaaactggcatatttggctacacaacaaaattcgggacctgatggatgtcgtacacactttcgtgtagtgaggatacacaactttggtgaaagaacacaagggcataacctttactgaggatcaggcctacatcctatcatgctaatccaattaattaatcaccatccattcatatgttacacgagaccctcatttggggtcgacagccactcactgcaccaattatccaagacacactgctctcaagaacggcaaaacccgactttgcccttgcaaccgtcatgacgggggaggattgatcttgcactaagagcaagatctgagttgagttttt

SEQ ID NO: 286224 - DNA, 592 bp, Zea mays
  unsure (1)..(592): unsure at all n locations
acccgntcaactaactgctatttttcagacgatttaggtcctaccaagccccccttttttttctaaatacaccatttttattatgcatatagacaaggtgtatatctaaatatgtagcaaaagttataaatctaaaaaagacaaaatgtcctataattaagaacaaagggagtaccatcttccagtcaaccagcataccaacctactccgcgaccaggaggagattatggtccatccctgctgcaacttgcaagacttctaccccttccagggtatctacaagacatggcgccgcctcatcaatggagctgcccaggcctagcctgccattcctgcccgatccccaggtccaaacttcacctttcgacgtgagagcaaccgaatggactcgaccagccgaggccgataccagcctctccctgctcagagagtccaccagtgcagggatgtcctcttggctggaccgtccgagctgggagctgcagttcacatccccatgagaggaggccagtttccacaccagcggtgccttcagtcgttgtgtagcatagtgcaagagagtggccgacacttgccgacatggagaatggcc

SEQ ID NO: 286225 - DNA, 473 bp, Zea mays
ctgagctccgtggaattcgcactcttccccaggtccgatgcaacactagttattgataatgttagctaggggcttgacttctgtcaaacctgcagcgtatcactagtgaaactgtagctcgtgtactcgattttgttcttccttttttgcttttgtaccgattgtgactactagcaaacaaaattgcaaatagggcatctagcaacagaaacaaaaaaacaacaacttgctctcctaataagttactacagcgaagttgcgtatatcccagttctaccttgcgaatcacctcacccgccatcgcctctatccgtgaatgttgcactgctgcaagtgcgggttatcgtagttaaggtacctgttccagtagcctctgtactttgggatagaaatctccaaccagggtttgagtttcccactgtagtggatgacagaggcactctcgagttcatctcttccgatgctggagtcat

SEQ ID NO: 286226 - DNA, 394 bp, Zea mays
  unsure (1)..(394): unsure at all n locations
tanatttttnnnnnnnnncnnnaaaaaggagtattcttatttaaaattggatgggaggattttagccccttcaatccactcaggttttgtggcccccagactagccctaaatgatttatagtttagaacagaagtgatatacaataatagaaaccatgcattggattaactaaacaacattctaaccagatcctagtaacgagtaacgacagaataatctatacatgtactcattgcaacactaccaacatacaaccgacaactgtccgaacaccacagatgtgatgcgtggtacactgatactgtgtttgcagggcctgtggacatgtttcacggggaagctggcgcaggtggtttcggagtctgatttttctggttagctgcagcttgggca

SEQ ID NO: 286227 - DNA, 441 bp, Zea mays
aacaagtgaatgagaggggatatatatgacgctagtggtacaagtgagcttagcttcttcgttacacacaggggctacatggaagaatggagattcagggcatgcagctcctgcctacagctagctagctagctagtattgcgctacaccttttgacaccatgacactatcatcaccacatacacacactgaacagcatctagcaactacaggaactgattgtgagctatagatagaggaaactagctagagagatgtgccgacgagctgtagcagtacaagtacagcagtcctctcctaagcacccccctaccatggacctccgatcctaataataagctgctgtatgtgatcgatccaagccaaaaccacttggctctgcacctagctagctaccgctgcttcacgacctgtactacactactactactactagcaccg

SEQ ID NO: 286228 - DNA, 456 bp, Zea mays
gaagtaccttgtcgggcagttccagcatgttggccatctctgttcggaaatcaatttccccgtgacatctaatctgtaagagaatatgaaattgggaaggagatggtattcatacatactccaagatgagtccaactcaacgttagaaaactactgaaaaaaactcatccataatctgatagagggccaatgtgatttggtctctgtccctcgcgcatttgctgtcacctatctgtgctgacgaggtagtaccgtggatcaccattgtggcattcagtagaccattccatgacattatggatttggaaggatattttggcaaatgaacactggtaaagcgtcaaccccagcatcaagggtagcatgtagcacgccaatcttaagccattgacaaaacatgagtaaatgattgacaataagacatgagttgactgagccaccataccaacccgagtc

SEQ ID NO: 286229 - DNA, 365 bp, Zea mays
caaaaggtgtcatagaacatataaatcatgcaacgaaacaatgtctctggaggggcagtgatgattcatcaaagggacgtaaccttgtgatgtccctctctctctgctctactctccctgcctgcgatctcccatcactgcatctgcatccgcacgctgtcctgtgccggcagctttgagcggccactgtgtgaggttggacggggcacaccaaggaccatgcctgctcattcattcatggttttggatccaggtccagctgtgaatctgattgcgctgcctgccttcatgcatctccctttcagactttgccacgaccatacaaaagggaaacatcaaagcaaagcaccagaccatgcgcacgc

SEQ ID NO: 286230 - DNA, 408 bp, Zea mays
agtgagaaggcatagcacacgttagtcgcaatgaagttacacgacgtcttttttacaagacaaacaaaaaaaaggaagctggagaaattacagaacagttctcggacatcgatagcgaaactacagccggtgctttacttgtgtgactgactgaatcatttctccgtcttgaggccctccttcgacttccgctgcttctttcgtctcttggagcggaacttctctttgctctctgcttcctcttcctccttgctgacagcagaccctgttatctgcgcaaaggattctttggcgccggcagtcacgtcgccaaagaagtccttcaccttgtcaaccacggttttgagctcgtccttctttggaagttcgatcacattgcttgtcgtcagagcagaccttatgttccct

SEQ ID NO: 286231 - DNA, 380 bp, Zea mays
gtggtatgaaaactttctagcagatcgttcttacattgtatcaccagaccagaccagctacaagccggcagcagctgcagaacggccagctagccggaacacatgggctggttttctcgtcctggacggctctacagatccaagaacatccggtaggcgtccctgcgaggcgcgtagtagccctcgacggtggtgtcgacctggaacccggccttgcggtacagcgccacggcagccgtcctcgtggggtcgacgtggagggagagccgctggaccttccgccgccggcaccgctccactgcgcccgccagcagcgcctcgccgtggccctgccgcctgcagttctccttcactgaaaccaaaagtttgcagtttcgggg

SEQ ID NO: 286232 - DNA, 477 bp, Zea mays
  unsure (1)..(477): unsure at all n locations
tggatcaccaccttcatcatcagcagcaggctggcaaattttttgttttttcatttggattttgttggctgcttgactatcatgacggagcagggcgcgtggtgcgcgcagtagtcgctgacgctccccagcagcgccctcttgacggcgccgtagccgtggctgcccagcacgagcaggtcggcgcggtgcttctccgccgcgctgcacagcacggtcctgggctcgccttccaccacctcgaccagggcgcgcgccgagctggcggcgcagacgcggcgcgccctggcgacgacggcctccgccgtcttgcgcaggccggcgtccacgtgcctgatcgcctcgccggctccagggccgccgaaactgacgatggaggacggcgagggcttggcgtggacgatgacgaggtcggcggccccgcccgccacgccgtcgccgggcgccgncacgtgccgcactgtccactccagcgcg

SEQ ID NO: 286233 - DNA, 348 bp, Zea mays
gcccatagacaatactcctattatattaaaattgatgaataaaattcgcattgttaattgctctacaagaaaagaaacgcttgttccttgagatattacatttaaactctgaaacttgagccaacaacacaaattattcaacggcatttactatttctgttgaaaaagcaatcaacacctgcactagatgttgactaccagaaaatcagcaccaattgggagatgatcgctaggatgtcgaaagttgggcaagccttctttcacatcctcagaatcccctcgcggcaaacgaagtaggctagtaggttttatcgaactaccatccgacaagaatatgtagtccagtgt

SEQ ID NO: 286234 - DNA, 379 bp, Zea mays
atactggctgccatttaagcacagataatgcatgccgacaaacgataccatgaaactgaaataggccacagttacactccatcctgtttgtcgccatgcagtgaacaacctcgtactttttattcagcagttcactccctgcttcagtcaaatcaataactataacagaagatgctgacccatccagctgaacttgacaatgcatggttgcctttagctcatcctggaacttcataaacatattcaaggtgtacaatctggatagctgttcttccatttggtactttgatatcaggagcctgctgctatttaatgaatcaaaatcatcttggtgctccattttgtatttgttatccaaaagtgtcatgtagctggcaag

SEQ ID NO: 286235 - DNA, 426 bp, Zea mays
gggcgacaggctccgcaagtacatcgcgtcggccaccaagcagaggccggccaccggcaccatcctgttcgagggcacccacctcggcgtgcacccggcgccggtggtggccgcgttctcggcgcgcggcccgaacccgcaatccccggagatcctgaaaccggacctgatagctccaggcctcaacatcctggcggcgtggcccagcggcgtcgggccggccggcatcccctcggacggccgcagcacggagttcaacatcctgtcgggcacgtccatggcctgcccgcacgtgtcgggcctcgcggcgctgctgaaggcggcgcacccgagctggagccccgcggcgatcaagtcggcgctgatgacgaccgcgtacgtgagggacaacagcaacggcacggtcgcggacgagtcgacgggcgc

SEQ ID NO: 286236 - DNA, 382 bp, Zea mays
gaagcgggggctgcctggcaacgggctgccaaccggtgcctggtccaggaggatgccaagcgagctcccaagctggcatgctgcccaccgtccctgcgaccgcatgacacgagcgatggaaatcctccgagtccgcaggatctccatgcccctatgtttatgcccatcaactggaacctgatgaactccagtttgcccatggaaacccagggggggctccagttgcagcccagctttgggtgccagacagcccttgctagggagcacttcaactatgtaggtggggaccccgctgagaagggaatggagggtctagcgccggtgtttaaacttgaggatgtccaagcaaagactgtggatccttttgagcctccggggatcg

SEQ ID NO: 286237 - DNA, 539 bp, Zea mays
  unsure (1)..(539): unsure at all n locations
tnaatcccttttttttttttatataaattttggtgggttaatttaggtgtttcactactacattgcaactatcagtatcatgcagacttcgatatatgtcatgatttgcatggtctcatcattggagagcacgtgccacacctaccggtagaagtttcgtcgcacgtcgttagtcatcaggcacacaccaccatacacgcttgcttaaacaaaaaggcaagtgtgtgtaagggtagttttacttattattactaaggtttggtatttacttatacttagtaattgctaataaaatcttgaccaactttgctcagcttcaacctttattttgttgatcagccttacacttcacatgaactcccacctttggtgagttcatgcccattattttccaacacttggtgagctatgatcatgtgtgagcttgagagcacctagagggggggtgaataggtgatcctgtaaaacttgagaaacttaagccacaaaaacttggttaagcgttagcacagtaaatgccaagtggctagagaggagtc

SEQ ID NO: 286238 - DNA, 494 bp, Zea mays
acattattcggcactttttttacgacctcacgaacatgtgttttctcaacaacagattcatccacatcattctatgggttacaagccacatggtcaggggcgaagccaggatccaaaattagggggaccaaattagattaggggggctttttacatgaaaattagctaaaaactaacatgtcctatagaattaggggagcattaggaggacatttccccctgtgccccctgtcgtcgcccctgcacatggcactcgggctacgacgatgcatcttgaggcacaatcactgtgtccccttcgacaactgtcgttggccaagacagaagcaggggtggcagcctccatatccactatgactctcaacacaatatccaattaagcacaccttgcctctaagctcagcagaataaacagagccaaaatcaccatgaccaattttatggtccatactaaaagttgttaatagcaccagaaagttcttcatatgagaacc

SEQ ID NO: 286239 - DNA, 362 bp, Zea mays
aacatccgccaatagccattcacatcatctcacttcagatatcgaccacaaagataccatggtttcaaatattttcttcgacatacaagttgtttcgcagcttatcactagacttttctatggctactagtattattattgccgatcaatctgtggcccatttattggcatcttgggcgtagggcgtgggatacgatacgatcaatacgaccgggagggtacggccgaccgagcagagctcttcctcctccttctcttcaatcagacggcgacgtggaccggcgccgaatcttcaggtacccaaacttgccggcgccgggagacgagccgtttaaaacagtcgggaggtacccagtcgccgc

SEQ ID NO: 286240 - DNA, 513 bp, Zea mays
ggcgcacgttcacgttttggacggccagcgcgcacatcatcacggccgtcatcggctcgggagtcctgtccctggcctgggccatcgcgcagctgggctgggtggccggccccgccgccatgctgctcttcgccttcgtcacctactacaccgccacgctgctcgccgagtgctaccgcacgggggacccggacacgggcaagcgcaactacacgtacatggacgccgtgcgctccaacctcggcggcgccaaggtcgccttctgcggcgccatccagtacgccaacctcgtcggcgtcgccatcggctacaccatcgcctcctccatcagcatgcaggccgtcagcagggccgtggtgcttccacaagcgtgggcacgccgtcccctgcaagagctccagcaacccctacatgatactcttcggcgccgtccagatcctcttctcccagataccggacttcgaccagatttggtggctctccatcgtcgccgcagtcatgtccttcagctac

SEQ ID NO: 286241 - DNA, 457 bp, Zea mays
tagtgagcctatctttattgccaaaacaacaacaaaccgatgaccaaagcaagttcaaaaataccaataacaactatcaaaaatatgttttgatcataagtattctgcaatagcgtagaaagaggaaacaacggtcgtaccccaggcctctttccagtcaattcatctggtagccaaagacactgattaaggtctaaactaccaactactaatctctcttttccatcctccacaaactgcatgtatagccaacttgcacatagaacaaagttcctcagctgacattaatgatggggacagtggaacagtcccgtttatgcaagaaactcttcgaaaatttatcatcttcccagaaatcctatcctgtaatgcttcaaactccctatctgcaagagcctttctgtgatcctcggttccgacggagtcgtctgcgtactcgtggaaggtgcggacgcgg

SEQ ID NO: 286242 - DNA, 580 bp, Zea mays
gcttaatattctatactcaacataaatagtaattataaggcaatttggtagccttttacaccatcatcgttcgccaacacttttttaatatatacatttctttgtaatcaatctgtggtccaagtctccccatccctactctacctccatcgctctggctcgctctcacataactctagctctaattccctcccattgcgctatctcgccccgttctctcggatcacgccacggaagcagcagcttctcctctttatttggacgaagacttccacatagagacaacaacaggcttccttacaggttccaaatgttatactagttacaggttccaaatgttatacctagtaggcctaaccgagtcgtatgagtcagcgtcactaggctcttacaattcatgggagggaaggggtgctaaaagattttatgtcgacgggctccaatagctttcagttcttcctcggtcccctccatctcagcgtcactagtagacctatcctgctccatctgctcgacttcttgttggatagcaagtagagcattgataaggtaatgctcatcacccaattgcattgtaatg

SEQ ID NO: 286243 - DNA, 457 bp, Zea mays
gatcgtactctctttgacgtacgtatacgtaactttaattcaaataacaaataacagcatcaagtttaaaagggagagaaaaaataaattaaagagggttcctattttgcatgcgtgtggaggaattattctgaatggaaattggagggtgattgcatgcgcatgctcaagattatatatatgttgtgggatacatatatagatgcagtagatcatcgtcctctttgttccttttttttcgggtggtttgtgcttcccttcagttggttggtctcgacgatgtggttgctgtgaataataataataaggaatataatgcgacagacgagacgacacagtagtacgtagtaaatagtaataatgggcatggcccggtgggtagcagggtaggtaaggtgcgccgtgcacgtacggctgctggatgggatgcatggatatggatcgtcggcgatgatca

SEQ ID NO: 286244 - DNA, 471 bp, Zea mays
ctagttctagatcgcgagcagccgccctttttttttttactttcagcatataagatgtgagcttcattgcttaactaggattacaaccagagttcaacaatcttacagtgctactagtgcaccagaggacactcgttgctaataatgtcatcagtttgacaggacatctgcaacatctagataacctttttgcagatatttcaccaaaatatagacccactacagggtgcggtagtcttatgagacccagaaccgtccgagccatacatactgctgtgctggatcatgtgcagcttggaccaaaatgagaacctagtcatacacacagtagagctatgttacaagggaaactctggtcgtcgcctttagaacctagtcaacatatgggccccttcctaaatcgctttgcgtggagtcggacttttatcaatcttcctaggcataccaggaaacgccttagatggtggcaac

SEQ ID NO: 286245 - DNA, 277 bp, Zea mays
gttattccacaatgttgatgtttgaattatgggtaaaaagtcagaaattacacatgaaattcttattgatcggacatgttggagattagctggcatttttcctacataatactagctgtttaaaagttcaaacaagtggtcgctgaacgctataacaaattcacggtataaatattgacaaacagtttggtactcggtcggacagctatgataaaccaacctaacctaactttcaagcaacaggccacagatgtcacatcagcgatcctagtttgat

SEQ ID NO: 286246 - DNA, 384 bp, Zea mays
ccaaaacttgtcttggtttactcggcctagagcatgcaacaaagctcgagtgtgaaacgaatgcgatgctctctgccatgtgtggggttcgtctactctacgccatggttcatagcctcagtgaaccaccgaatggcgtccactcagccacgcaggaacagaacaaactacctttggcttccttatctttctccacacaccaaaaaaagaaaaaaaaaactaaactaaacaaagcgtatgcctctcggagttttcggtgacagtatatatgtcctgatggccgtattcttcacccgtccatgttcgccgcctcaacagcatgctgtgcactgttccaaacttccaacaaaccagccggcgacgcttttgggaccatcaaccatg

SEQ ID NO: 286247 - DNA, 622 bp, Zea mays
cggaccgtgggcggacgcgtgggatcgcaaaccgccgccctttttttttttttttttttcaaaaaaatatagatgtactccactgtataaaatttcaagtccaagatattacaaatgcagtagtgttaggctaggaattaagatcacgacattttactgctttcgacacaaataatgttaccaatatgtgcaagatgaagttcattatctaaactgaaattacttatagcctgacatcactgataaaggtgcaatagtactggacaagacgacaatgcaaccttttgattagcactctttttacaaacaaacaaatactcgcgactatattttctgccatagaaaatataaactatacataatcaaaagaatggaatgctttgtccagaacaattcttgactcactgtccgggtgtctgaataggctatgttgagcagataaagcttccttgaagcaacaaatgcacccaagaagatccattttatccctcccctagtgctatccagtgtgtcgtcgatttcatacactgtcaggccgacatgacctgagctttgcatttcttcaaacaacaaaagtgatttcttcctatccttgatcttcagcagatttttaataagaata

SEQ ID NO: 286248 - DNA, 421 bp, Zea mays
gataccactagaatttcattaaaacttgagtcatcaaaagcatcagaacagtatccccatgctaaagacttcactcggggaatagtagaaaacgttttgaagactgcctgagtacaggtatccgatagagctctatgagattcaacttgtgatgagttgatctcagcagttgccaggacaagatcccctgggttgtaaaaccatggttagaaaataagaacaacattaccagtagaacaacaaacaaaggctatctgccgtctggttaacgtccatgttgtgctttgtatttacgctttcgctggactggacactcgacgtctcgacgcatctgccgtctggttgcagacttgcagtccaaatcacagacagcaaatcgacctacatgacacttgcaaaaccaaaaaaaaaaaagaggaaa

SEQ ID NO: 286249 - DNA, 344 bp, Zea mays
gcccaaaaggatcaacctattcccattgttttctgcagctgataaatacatgagaatatggccttttttacacataagagaagtgtcgcattaccctccacatatacaccacaaatctaatggcagcataactgcaaaccgatcactgcttgtcctgtcgatgtacctgaagtgaagacatcgaactccaagctcgatcagaacactgggcagacgccgtcacccaagtccacccctttcgcggtggggcacctggcgagagggcagtgctctcctgcggtgccccgccagtcgatgctcttgttctgcatggtcaacgagaagtacagcaccacccccatgaa

SEQ ID NO: 286250 - DNA, 431 bp, Zea mays
aggatagctcggggtttttttcctatatatatccacataagccgcgtccctttgttgccaaaacattgaatggcagagccttacaaccttagcacctaatggagcaccctgccgacacaaggagatttgcaataaaccaggtgaccatagctccgagtcttacaattccttcccgggcgcgtccagtgggtccttgggctcatcagcttccaacatgtctgatgatgcaacttcttccccacctggccatcgctctgagccatcctcagcatcttcgagcacgtggcatctggatgccgagggtcccctgtatgagttatcctcgctgctagatgagcttccaatcaggtgcatgtttataatcattttccttgaagaaaagtcataaaagctgtccaatttctacaaataaatcacaatgtggcttcaca

SEQ ID NO: 286251 - DNA, 507 bp, Zea mays
agatgccaacatgatgtacaggtacattgaaagttgtacattaccagtttaagttatccaacagacaaacagggatcaacattttgcaactcatttttcatctccattacaacttacaaggacacatgagcatacatacagctgctctactctagatggtgtacattccacccgacaccaacttaacagcactatttactcagcagaactctagttcatacttaaccaaaaagagaagctatataagcttttgcacagcacagctagaggcacatatcatgcacaatgcttctgagatctggccccggcttagtgttggtggagctgagcaggggccagaagtcagaagcaccacacatcacgatgggccgctgagctgactatacatgcataacatggcacaaacatgagatggcatattaagacctgacctctgcagcaaccttgccgccgtttgaaaacctgagattacaaagtagtgcatcacgccctgtaagcacaatatgg

SEQ ID NO: 286252 - DNA, 681 bp, Zea mays
actcatgattgttaaaatgcacagcagcaatttagtaatgctggcaaatattacaacatactattacaaaaatgcgtttccttctcagaaataaaaaaaaacatcccgagaaacctgactaaatttgcgactgagtcatttcttttgtatatcaggctatagttgtacaagagtggaagtgaaatttgaaacgagatgaggagttgaggattaagctgctggagatagcctccgtgaaggcaaaaccatcctaggagctgtccatcatgctatcactcccagtcgacgagtttaccacaccgaaattgttgctatctggaagtttcgcatcactagttctttcggctccgaatatgaaattactggggaagctgttcggggtaacgcgctcaaagatagatgctggagcctgctgattaaatgtaggcgcttggatgtcgcctggtggttttggaaagccaaatccaagagaagggagcgaatccaccggagcaaaaggttgagctggtatgctgccatcattagaaccaaaaagcttattttcatactcaatcagctgctgctgtgccgcatcagacagttgcacttgtggtctccgctctttcacccactgaaaagattgtgccaatctccaacctctcgacttcatcaagaaggctattacaaaagctgctgatctac

SEQ ID NO: 286253 - DNA, 428 bp, Zea mays
acaccgttaaatttagagatctttgttatttccacctacctgtaaagttcccacagaacgctacgttttctgcaccttatcgggttcagtagctaacaaaaagctcgctggatcgcaccctgctagcttacggatctatttccgatatacaaacgttgttggagatgcaactccattgccaagttgatgctgttttgccccttgttctaaaggacacattcatgacaaaatactgagtaaagcccggaactggatgctcaggtgctgcagcaactccagctccagccttgaaagtccatttatatggcgagccatccatttttaaaacaacgtgcaactcctcttgcttcttcacagccacaaaatgcttgaacattgacccacttccacaaaatttgccatcatatagtgaaatctcctcatcaaac

SEQ ID NO: 286254 - DNA, 445 bp, Zea mays
aataacattgtaattaatataatataaataagtatcattcaatttataatggataagcattatcaaataactcatacataagtgtactttaaatccagactaaaatactaattgaaaaacttgatcatcgactgtttgcgttaatattgagcctaactaaatatatatgaattcaagtctccacacttatgcggtcatcaaaatttgagttctattccatcttttcctcctcgtcaccctccaaggcatcatcgaaggcatcgttcatcagttcaccaaccatctccatcttctcgttttgcatctcaaactctcgcattattttctacaaggcaagaagattcatctgtctagtcatctgccacatggctttcgtcacacacttcatggcttcacccatcgcctgtgttgatttcagagcctgtataccaagagatacaccttg

SEQ ID NO: 286255 - DNA, 615 bp, Zea mays
  unsure (1)..(615): unsure at all n locations
ggacctggntttttatttttttgttttgtttttgcatcaaccatccatacccaaaataccataccagacctcgagaacgtgcaaatgaatataatgggttacatagcacaaaactcagaataaaataactagattttagacattaaggtttcctgtaagtgccacttcaaaagctcacacggaaaggctcgcttattatctcctagatttgtgtggatacccctgtcttgtaagtatgcagcctggcaatttatccatgggtggtacgccaatcttgtatatgtacagatgatgcttctgacaagagcaagggaatgcaaaagagctagcgaggttcagcagaagggtttgtcagaagatccagtgcacgtttcaggggatccacggcaacagatacgtcgtcaaatgcaagagcaccgaccgcaaacctggctgccttgtgagcctcagcaatcttctcaacttcaggctggtaactgctatcatatttatattggctagctggtggcgcagctggaggagtaacttgaggtgaatagtcagctgttgagtggtaatgtgttggggcagaggaatttgaagcaggagtgtacgaagtagctgcaggaccatcag

SEQ ID NO: 286256 - DNA, 410 bp, Zea mays
accccataacttcggggatagctcttattgctaatgttataaacacggctgccaggaagttctcctttggtcctcctttggatcctttataaatatatatggctaactgaagagcggtacaactcaccaatggactttacggatcaatagtcgaattcgacacacagattaccaatttttcaccaagcaaacggtttgaacagctatgtctgaatagtgcaaccgatatgttaactatcttgcagtttgcgccgcttctcttgggagatcttagatctgtcgcctgtggctacttcggtaccagattcttcgatctctacgagtttctgttttacacctaattcagacgaacgttctcccagttctgcagtccgtacgatgcctcctgttccatttgggtccatggttgc

SEQ ID NO: 286257 - DNA, 476 bp, Zea mays
taccaaacaagcccttagaattttcattcatgcaacacatgagaactgacattcaactttgtacttgtctttacattcaagatcgccgtacagactaagactagcataacaaaacacacaggtgcaggtggaagtggaaccatctaagtgcacttctattgcatcctcaaggtcaaggctgctcgaaatcactcctcttcctcgtccatgtcattttcacaaactagatgaccaagagaaactttggctttttttactcctgacaaactcgacgcaccaacccattcgcttttcctctgctcgccctgctctgcatcctcctcatctttcataacctcacctgaagacttgctatcgccctctttctcagcagaatcaatccttctccgatggtagctctgcacccttctgtaaggattgctcgcactccttcaggaacgtacgcacttcatcatcctcagcgacatgtagagctg

SEQ ID NO: 286258 - DNA, 260 bp, Zea mays
gggggttgaaaaaatgtagatatttaagaaaatatttcagaatgtatggaactaaataactataacactagggattgttaagccaaagcactaataacaagtcaaaagtaagaaaaataggagcaatggagaacatgacaaggggaagtaattactgacaatttcggtggcaaacagaaagactaatagatctccccatcctctccaagttcaccatgttccagctaatgggctccattttttctactactatctcggtc

SEQ ID NO: 286259 - DNA, 526 bp, Zea mays
gccccatccttttcttccctttttttttttttcattttttttctttttttttgactaattggagaaattgttattgaagcaggcatcttacatacatttcatgccatacagaagtttgaatgtcttattaacttctaaaagcaggaaaataatgtaatgagattaacttattttgttcgctcacatgaagcacaatatggtctgacttaaggctattatacaacaatatatggggaacaaaaacaggcacaatagacattgttgatagctggtcttccaaggagctttacagcaaagaatctgtctttgcaggtagcctcctgaagaagtttgctggtgctgatggcaccttgtggcgaaaccgaggatgcctcatcccgaagaacccaaggcagagtgcaaccacttggaatggtgtcacatacagtataatcgcagtaatcaggcaaaatatcaggaacatagctgttgcccttgggtccctccagctgagcagtgactgtaatctctctccctgagtggcaat

SEQ ID NO: 286260 - DNA, 352 bp, Zea mays
acagaagttccaatgtcttctggggttctgaaagcaggaaaagccagtataacgctattatacaacgatatatgagtgactgaaacaggtacaacaaagaggtacactagacattgttaacagctgtcttccaaggaactttacagcagagaatccgtctttgcaggtagcctcctgaagaagtttgctggtgctgatggcaccttgtggcgaaaccgaggatgcctcatcgagaagaacccaaggcagagtgcaatcgcttggaatggtgtcacatatagtataatggcagtaatcaagcaaaatattaggaacataagctgttgcccttgggtccctccagctgagcaat

SEQ ID NO: 286261 - DNA, 548 bp, Zea mays
  unsure (1)..(548): unsure at all n locations
tttnttttttttttttttttttttttttttttttactgattactggttaccaccagcatcaatgaaagaaggatcctttgctctgcagtttattcaggtagcatcttacctccaaagtggcaggcaggcagacaacagacaaagttctcttcgtcttcgtctctgcttgcttggagacccaaaaattcaaaaaaaaaaaaagggggaagaagaagaataaaagatagagaaacggctagattaacaaagggtatgatattgtcatgagctaaaaagccgaatgatggagctgttcacttgccgcaccacacggcctccgtatgtttcaaggccacgccgttcttgctggttcattactacttcatacacgcgctggccgccgcggatcgatcggcgcttcgttttcttttgtatcttccactcctgctgctgccgctgtgtgcatgcgcgctgaaactactcgatcttggccatacccatcatgcgcttgctcacggcgtgcacggcgggcgccgtcggtgcgcgggatcgagccccgacccggacat

SEQ ID NO: 286262 - DNA, 517 bp, Zea mays
  unsure (1)..(517): unsure at all n locations
tttnttttttttttttttttttttttttttcactggaacaatccctttttgtttaaacatggttgccactaactagttcacagtagtgactgacgagtaaccacactgaacacacactaccaccaccaccaccacactgacacacactacgacctggaggagacagcggcggcggcgttgatcccccttgcgatgccgtagctacggccgccgagcccgatgcagccgaagaggagctggccctggcggtacggcagcgacgtccggcgccgcatctcctcggctctcgggcgccgctcatcgtacagccgctcgtgcgcggacctcctcctgcccctcccaacctatacagacggagacggggacggagacggcgccgccgcggctgggggagcgccagcgcagtggtggtggtgggagtgcggctgctgctgctgctgctgctgctggtggctgctcttgccgccgtccgacttgctgcggtggagcaggtccttgaggaacccgctccagcggc

SEQ ID NO: 286263 - DNA, 818 bp, Zea mays
ggggaacattccgtctttactaagtatgcgtccgatattttaaacaatgtgagcagggagatattgccaagacctggtttctgacagaaaaagaaaactaactcaacatcaaataccactaaaactggtagaagaatgataacatatattcagaaatctaagacctctagtaaattatcaagatttcatggagcatgtcgactctgcaccagttggcaatggcaatcacaaaactcagtgtgcttgaagctctcgcctatatgtaatgacaaaggaccatgataataccaagaacaaataaagcctatcaagcaattgatgaatatgatacacattgatgtcattcaccttgaaccatgaaaacttaggtttcaaccacacacttatgctcaacattgtcatttgtttgggaaatttctgcgcctgaagtcatgactttcttctcttcacactcagaggctacattagacaagtgctttctcaacactgtgaaaatatctgattctgaagctccagccaacttatacctttcaacagatgcatcaagatttgtcttccagtcaccaacactgagcttaaactccacttgggaacgctcgaaaagcatattaccccagaagaggtgaatctgttgcctcattactgctgcctgctcagctgcctcttctggtgtcaactccggttgaccacctgcaccgtgatgccttttcctcagtaccccatccttatcacatgcgcctggttcttttaactctgccattctctgttcttccaccttctcccacatctctgttgcagccctcatgttctgctcagcg

SEQ ID NO: 286264 - DNA, 335 bp, Zea mays
gaaaattgaaatccggatcgaacataattatggcaagtggtgggcaacagccaacaggctctcttccaaggttttaatcctacgacgtccactataacagctactactaaatatttggttgaatgcagggaagacatattccagggattatttactgcagcagcagtttacagaggaccgcaaccgcatcctctctctctctgtttctctcttttcctttcccaatcgcaggtggctggcaaaattttcccgaccaaaaaaagcgtagcaatacgaatcggcaaatgatctcgcgaaccgtcgagtgaacatagaaacatggggggggggggggg

SEQ ID NO: 286265 - DNA, 341 bp, Zea mays
gccgtggctccagaccgtcgacgccgcttcagggggctgctcgagcaagtgcagcgtccggcgcgggcgggcggcgagcgcgcgggcgcggggcgcgtgcatgaggtcctgcggcctctgctgcgaggagtgcaactgcgtgcccacgcggccgtcgcgcgacgtcaacgagtgcccctgctaccgcgacatgctcaccgccggccccaggaagaggcccaagtgcccctgaggccggctcacacacggcgcaacccaagacacgtgctccatgggactgccactgctttgcctgcaactgcggtccgacccatgctgatggggcaggcaacctgttatgc

SEQ ID NO: 286266 - DNA, 385 bp, Zea mays
agccaagttgtcaatcgaacccaatttatgcacagacctacattattagtttttacagaacacgcgtagcttctgacgtacatcatcacaacctgcacttcaatgtacgactaagaaactatactacctgctgggtgctggctacaggcctacagctacagtaagatacacgttaagacatcacaaacccggcgaacgaagttacagacggaagagaacaccaactgagcacgtcaatccatgtggatacgaatgcatccaaacgaggcagggcatcatcatgtcggcacaacctcgtcaaacggcgccgagacctgcgcgaagaacatcttcagggacaggcacatcattatcagctggacgaggccaaagagggacactttga

SEQ ID NO: 286267 - DNA, 362 bp, Zea mays
agaagaaagttatgcactggtacattcgactctgttgatcgctaatatacaacagaaatttgggttctccaaatcctgaagaatgtacaagtaccataatgttaaatatcctgtcgagtccgatcaacaacaactcagttaccagggacctgtcaatgttctccgcaggcatcgcttcttttgtgcatatggattgctgaccaattccgggacctggttttgctgcatctccattatttgttcctgcttcttctgcaattctgcattttgttccttcagtttctgaacttcggcttccaactccattgtataagcctgcttacgggcacgggatctagctgcagactccctgttcttgatca

SEQ ID NO: 286268 - DNA, 719 bp, Zea mays
ttttaattacattttttcaatttttctggacgggctattgcatatttgcatgtccgagctttacaggatcgctggtggacaaattgtacaatcccttaaattcctgactgcctaaagattgaaaatgaacaaatcatcctatggctcctagcgtacagcatatctctcaattctgtctatgctaacatacaacatgactcggctttgccgcaaggtacttgcattgcatgcactacacattgggagagtattcctacgaccaccgttgttcgccggcagatgcttgcatttcactactgcagatttagctgaaacttcatcctcagtagctcatccattaaaagagaacgatcatgcccacaagagacaatcgatccccatctcaaagtttgtgacaggactttcaccaaaatcctcgcttgttttctgtatctcgttattgtttgcttctgcatatggttctgatagatcagatgaccgtatggacggtatggcatgttccttgagaatgtccgatgatgcagcatccgcttcttctcgatgcaaaacaacaaggaagtcgtcttcgaattcgaacgtcaggaacttgtctttacaggtgtccacaagtcgtgcaacgtgacggatccacaatgaagaatatccatcacattgctcatcttgtggacacctgtaagtacaaggaagtcgtcttcgaattcgaacgtcaggaacttgtc

SEQ ID NO: 286269 - DNA, 326 bp, Zea mays
gatgatgcagcatccgcttcttctcgatgcaaaacaacaaggaagtcgtcttcgaattcgaacgtcaggaacttgtctttacaggtgtccacaagatgagcaaggtgatggatattctttattgtggttccgtttagtttcatgacttgttgattgcccatgtgctcatacccaatgttgacctcgtgcgccaaaacctgcgacacaataacaatttcctccccctcaaaggttgctagagagtaacgtgcttttgctaacaatttcagccctagtgtatctacgcattcctcctctataaatggttctgttaaaggtgtgaagac

SEQ ID NO: 286270 - DNA, 321 bp, Zea mays
ccagagaagtataaataaataatatgattgatataatataatccgctaattgtacattctaaaaattggttacatccttctggagggaggatgtgatggcacgtaacgccaggaacttaaagaaacgattaaatacaacaattttaccgctgattggaactgaaataaaaatgcctttcaatttcttccagccttgtaaccaagttggtatgttgtgctatcccaatcacaaatttcgataagctccagttagggccttagtggtccgtaggcagccagttcaatctgaacaatgtgccattccaaatgaagttacttatt

SEQ ID NO: 286271 - DNA, 415 bp, Zea mays
ttcttttttttttattctttatgcacttgtaacggtgtggtctttaccatgcgactggtatgatatttacaatgtcacgctgcttgactatttcctaacctacgagagaatttatatatgtacaagacccagggctctataactaattggagttattatgttcttcgaacttcgattacggtttacgagtaggatctgatgagtctcaggccctggaacgagctcttgagcaggctgccgaggacggacaccgcgccgccctcggcctcgtgcttgacgggcgcgtcgtggccgccgcgcttcaccctcagcacggcgtgcccgagctgctcccccaccgcgttcatggtcctgccgtcgacggggttgccgtacgcgtccgacacgtagaacgtgtcctcggccttgccgtccc

SEQ ID NO: 286272 - DNA, 496 bp, Zea mays
cggccgccctttttttttttttttttacactttttagttcttgttatttgtgtggtttttacgccaaccaaacggtatgcaaggtacccagttactgttcaatactttatttgcagacacacaaatacaccgagacaaacataacagcaaaaaagctgcagccttcagcccaaaacgatacagtatacaccattggatcgagaaaaatgcttatcgtgagattcatgggagcttagtcacagcccacaaaaggagtaagccagtattttcattatcctgccaacagtaaatacgccctgactaatttagggcgggctgcaatggcagcttggcaggacaaaacgcaaagcacaggcacacgctcacacaaacacatcggccgtatcaatatacacctggatccatcctcttgttactgagctcagctgaacaaattgggaatgcaggctcctgagtcaggattctgctgctccttccagatacggcctgtgactcg

SEQ ID NO: 286273 - DNA, 342 bp, Zea mays
aacagatcaagacagcagcacagccatcaaattgcatttttctattccaactaaggggcagcactccacactgtcagtaaaacgcacgctaggtgttctagcggctccacctcacatcttacaatctcatggaaaacataccccacacatgttctcagaagcttctagaacaagcagagctgccgctcaacacagggcagctaccagcattagttctggatgaacgagacagccacagtaaagggaggggaattcttggtatttacaggacaattgccgccgccgccacacaccccgattcaagggcgttgtctgtcagttggctacccatcccgccgttcc

SEQ ID NO: 286274 - DNA, 949 bp, Zea mays
aatcgacaagaatctagcgatactagaaaacgacgattacaagaatcatgtccaagaaaaacagagccgatgtgtacagtggtggtgatccaactctttagagctgatttggtgacgaggattagaagagatctatgggggaggaaatatctggccattcttttttttttatagaaagatattttctatgtatgggtgcatttttgggaatggctgcgtattcatcagttcttgaaagacggttattgctggcagcacttcgaacctagtgagcgtccaatgcaccagcaaagcaaggtttacatgctgcacataattctttactgcacgatggagatgaacaaacaccattgtgattctgcagatgcacgattgtagatgctgcgtggaggaaacggcatgtcatcaaggctctgtatttctgatactcttgtacttttgtgataacatgagcaacgatgagaactgtgtaccagcaatgatggtgtgactgagtggatgggctgcacaggaaagcaccctttgggataaaggaacaaacttgtttcctgcaggttgattttcctcggagactcttgtttcctctttgtagtccacatggcatgcagagctggtatctggctgaaagtctagtagatagattccatcatatgaggaagatccaactgcatagattgaagatgtcagcagccaggttggctttcttaattgcttttgcagcaccaagtctgtgccctccaaccaagcaggaggagggcagtgaagatgagtcacattgagattgttaacattcaggactccagaccagccatcatcaagatggaaggccaattgatatgaacaactagggttgaagtctatcgacagaatcggacttgaaacaatgtttgattgttcctttagcgatgcaattttgcccaataacgttgataatttcactgacatcaat

SEQ ID NO: 286275 - DNA, 445 bp, Zea mays
ataagggactccatataattcactgcatgttcatgtgttctaaaacatagtataccatagccatatgcaacaacttaacacctcctataatacaaccaatcttctaccatgtaccagataactgattacacatcctctgctcccacacaagttcctaaaatgaattgagtatacttgctacagataagaatgcaatagaaggggaaaagatgatcgacaggaaggagacccgctgaggaaacactcctgtcatctttctcccccacaatatcagttctggaagagttttatgttcatcttatgctccagctgctctaatcatggaaccattattgcaccccccacataagtggggatcttgacttactggcccgaaccacctttgcctacgaagttattggcttattgcacaaattgtgcattcagtatttcccaactgccactg

SEQ ID NO: 286276 - DNA, 333 bp, Zea mays
agggcacatgtgctccagggcccgcgacatgaaacagaaccgtttggaaccaagcagccaaaccgttgcagggccgcctgtatggctatggactatggcacatgtacacgtttcctggcccgcctaaactcgcatttaatcagctttttatgctacgggggtctttacagcaactgcactgacatgcactcaattcaatcatttacacctacacccaggcagaaggggagcagagacagagaggtctaggccatcctgagcgcctccctgaacccgatactgaagctgttctgcaggtcggccttcttcgggagcacccccaccggcggcttt

SEQ ID NO: 286277 - DNA, 819 bp, Zea mays
gcgacgccgacgcgttcacctccgcggtcgtcttccccggcgccccgcaccgaggcggtagtcccgccggactgggactccgctgtatcgaccgtctcctcccacccctcgcccccggtggtcgtcgtgtgcggggcccaagaacagcggcaagtccaccttctcccgcgtcctcctcaacgcgctgctccccaggcatggtaaggttgcttatctggacaccgacgtggggcagccggagttcgggccgccgggatgcctctcgttccatgtcctcgacgaagctatcgcagatttgatgaacccaagcctacgggaagctgaaaggtgctacttctttggtgacatttcatcgaaaagagatccagaagcatatctgaattgtctattccattcgtatgactactttgttggaaaatatcgatgcgatgagaatgaaatgctgccactaattgtcaatacacctggatgggtaaaaggtgctggctttgatatgctcgtagagatgctaaggtatatctgccccacaatagttgttcagatacgcatcacaatcaagaacaaaaatctcctgatggaggtttttggttagatggtgggcaaacaggacctatgatgattaacatcgatgctgcatttcatgatgcctcaaatagatcgttgttaattcagaaagattcatgtggaatgcgtgaacgccgacttgtagagtacttgaaacaatgttttccaagcaacatctctctttcaactaatacggagcttgcttatgccctagcttcacttcgacctaatcaagtaccattttcagaggtggca

SEQ ID NO: 286278 - DNA, 438 bp, Zea mays
ggtccagaggcaggggacggtaaataaaaaataggtatctcgagatatattagaggggctaagcagaaagaagtcacaaaacctatcacaaacatttcgagccccaatgacggcactgccactctgcagccatacagcatcagctacaacaaacttggtagttggctccactacgatattcccattgcattgctactgcatgtaacacctgggggcatccgaagactataccggcgaggtggagagcaggaacgccggcatcgacctctgcagcaggacgccgcagaaggggcaaagcggggccggaggctgccgacagatcgagcgatcctttgtcgtcacggacggcgtccaaaggcatggtgaagaacgactccggcagcagcttgtcgaccgtgcccccgcagcacgagcagtgccacactggctgcgcgacgg

SEQ ID NO: 286279 - DNA, 619 bp, Zea mays
gaacgatacaataaataatagatgtgagttgacgttgcttttatcaccaatggcagtaagataagcatcttatctccaccttttgttattttgtctttggtattgcgagttcagtgcgacatcccccgtttacagtagacctacctggtacctgctgtcgagctgtggctgggcccaggaggaggtacacctacctggcctgcctatctgccgcagaacgcaagctcccaaacttggtgctagaacaaaacctgtatgtcctgccaattattctgatccgatcaatattgcggccgtttgtgcatgaaactgaagaatgaatcccacgtagttgcagtcagaggcctcagcgccaagttattattaggctatttaagctggtttgccacgctggtccctctgtcatcctgccttacttgcgtgcgttgcgtccacaacgtaatgctgtgggagtcaagcacgatttgtgcgtcttccaacctgaagagccagctcggtgtctatcttgagagagatgtcaagcgccgtcacagagtgcgttaatgctccacttgaaatataggtgacccccgtttctccgattttcttcactgtatcaactgtcacatttccagacgcc

SEQ ID NO: 286280 - DNA, 365 bp, Zea mays
atgaaacgaaccgggcaggagagctgccggttatattgataaagaggaaagcccaaaataggcaaacaacaacctctcgaagaggactacaacaaaaacaactgctacagcaaaaactacgctaaccctatcaacaacaacaacactctagcaacaagagcacacaacagctctgacaacatgagcacgcaacaaaaagccacccaacacatcaaaggcaaaatctaaagaaaaggcaaataagcctccgccacacagtcgcaaaaggcacgaccttttaaactcaaaagcttcttgaggaggtctggtggcaacaactcctttagatgatctgcgcaggcttgaattgaactctcgttgggctt

SEQ ID NO: 286281 - DNA, 466 bp, Zea mays
cgacagcaaaaaaaattgaatcatgtgttataaacacaaccatgtaatcgaaggtggaggcaatagaagaaaatataatcaagacgaccgtatcaacgaaccgtatgtatgatacaaaggccacgaaaaaaaattagaacgaattacgcaggccaggcggcctagttcttattgacgctcttgagcacgatggggaggacgatgacgaggatgatgacgaggaggatgaggatggcgatgcaggtccacttgcgggtgctcttctggtgcttccgcgccacctgcagctgctcgcgtccgcggtcgacgaaggacctggcgcggccgacgttgccctcgatgtcgtccagctgctccccctgcgcggccaccagcacggccatgtcgttgaacacctgctgcagctccagcaggtgcgctccagccccgccacggcgccgtgccgctcctggatctccgccaccac

SEQ ID NO: 286282 - DNA, 631 bp, Zea mays
acctccttactcaattttattctttgtgagcaaaaaagaaagagaaaaaacagtgtatttcacccttattttagaaaatatttttccctaacaaattgaagtctatggatgtttttcccacaggcacgacctggattaactccatttggtggttgaatatccctatatttccttaatcttagagcggcttggggaatcactccaagcttagattagcgctcatatcccaactcgcaagcggcaagctatattatccgggagacacatgttgatataaataagcatccacatgcagaaagggtcacttgcagctctcgggcacaaggcttcactcctgatagaacatgtaatcctcaccggttgagcatccgcaacatagtcctcattcacaaaatgaagtatgcactgacttccctcaaaacatactccaatgtcaacccccttgaaaaacctgcacaggtgttccagcatgacaacaaccgtcacagcatggtaaggtgcagcgaacaatgcagacaaaagcagaaacaatagtgaagcaaaaaatttaaaaaaaaaaatttgtaacaatgcaattgtttcaactttcaagattcacagcttatctctggagctaccaagggcaccaact

SEQ ID NO: 286283 - DNA, 412 bp, Zea mays
atacctgctccggaataattgcgcccttttgtcttcttcaaagaacaaaagaagttgcatgcattcgttttataagaagcgagtatacgagggaaaaactttccttgtacatttattttgctactcaatccaaaactgtcctcgctgatgaagtattgtcgatcagagactgagcaggcaccgcagcgacttgccttcctcgagtaaccggaaagccttgttgatgtccgagaatggcatcttgtgtgttatgaagccatcgaagtttatattgacctccccgttgacgcatttatcgacgaggtcgggcagctgggacttgcccttgaagtcgccaaagacgcagccggtgatcctacggccgtagagctccatcgggtgcagcggcaccatcttgggcgttgaatggatc

SEQ ID NO: 286284 - DNA, 232 bp, Zea mays
ggtccttccagcacacgcggtgtcggcggcgtcgccatcgcctaccgggccgggtgcgtcggcttcgctggccgaaggtgccttagccttggagcgcttggtgctggtgggtgcctcggcgacgggggctggagccggggccttggacttcttcttcttgttcttggaggacgaggtaggcttcttcttcttcttggacggcgcgggcgcggggacctcggcgggcttggtg

SEQ ID NO: 286285 - DNA, 402 bp, Zea mays
acggatgtagttatttaattcctcatgcattgcattcacccaattaacatcaagtagcgcttcatctatacaattaggtttaatacaagatacaaaagagaaatattcataaaataaagcaatgcaggagcgagtttgaacacccttacttatgtcacccataatttgatcgaccatgttatcttttgcaatataatgatggatccttgatacaatatgagaatcacttgaagcttgaggaaccgaatgacttgaattaccattatcatgagcattctcaacttcattattttgttaactttgatgaatttcctcatttagagttgaagaggatggaatggcaaccatgcatcatcgtcatcttcttttggcttaatttcaccaatggtcaatcttaatgac

SEQ ID NO: 286286 - DNA, 460 bp, Zea mays
gaggaaagagcggtcctcgctatcaaatgatgatttacaaaatctagctgttgcgaccgctgaagtctgtaatttataaagataaaatgctactggaatagaaacgtttcggattaaagctaaccaaacagcaagagtggcacaccatacaagaatatctttttgtctttcacgacttgacttgcaagtggcaaacagcggttgctccacttgatttggtgtgtcgccgccgtgagttcagcgtgggccccttgcagcaacggccaacgccagctcatccagccccaccggcgagcagcccaggatggcacggcccatcggctgggcctgcacagctggtgcgcagggcacccagtcccaccgggccacggcgatggcgttcccctcctcccacagctcgtagagcaccgcgccgttcgccggctcggccgcattgtacacgtacccgcccgcggggttg

SEQ ID NO: 286287 - DNA, 339 bp, Zea mays
acaatataaagcctcattctccttctgtatacactgagaaacaagctctacacatgtcttttgtttgcattgtatgatatagacaaccccacatcagggagacaacctactgctaggaaaagaaattatccctgcttcgcctaacgtgcagacgccatcagaagcccacaacacccctggtgccgacactctccgcctggtatgaactccatgtcacagtcatcaatattagtagcctatcctcagtatttgtatcttgccctcttgttgagttaacatgaaaaaacattttccggtgctgcgtatgcttacaagcaacttccatttcctcaacaaaat

SEQ ID NO: 286288 - DNA, 489 bp, Zea mays
cgacattgtaaatgttgataggtttcttgcttagccatgtgggatttaaaacaggctatagtattttgaaagagatggtgatggagtaccatcataaaacccataaaaaacgcaagcaccacattaatactttcgcgactcttaaaacaaagcagcaaccgccacattaatacttccattacccttaaaaatacaaacagcaagcgctatacttcagccggtatggcgtcttctgaatgattataaataacgtttggtctgtttattaaccgccaaggcaaaagatgacaaaattgtaatccttgatggatccattcacttcattcggattgaagcgtcaaaatcattggtatgttttccttccaacttttagtcctcaccgcctccatatgcgtcctggtttcttttgttcttgcatgcgcttctggtgctccttagagcgctcaataaactcggcagcaatatcaccactttgataggatgcaagaa

SEQ ID NO: 286289 - DNA, 567 bp, Zea mays
gacaatacaaggtgaatagcaattgcaatgcactagcaacagttacatacaatgaatctctacctctccatgttccagagcttaaatactgggaacaagctacatactacattgctacaaacagtacattttatgccgattaaattgaaaagaaaccatggacatgttgagcatcagactatcaacatcctaaactctaggcttagtaactttgctttagctacaattcacagccaatgggcacaaccgaatacacacagaactatgtcaactaatgagtttaacttgatacatgagagatctagcatggaggaggcttgaagcattaaaatcagcaaggaactagttttggaggacggtcagggtgagcacttctaagctcatgtcacaacggtataatccccacccatacggcaaacttgtagtattgtgcttcattgtggcatcaacattattttgattgttcaaatggtgcacgcacaaatagctgcccatggagggtgacaactgcggaggtttggtgagggtcaatgcgggaaggcaaactaatgaccttcttgaatggag

SEQ ID NO: 286290 - DNA, 662 bp, Zea mays
gtggagattcacctgaaccctgctcactacattagtgagattattagagaaggcactaaaaatggcactgctttctttaagtgccatggccatgagcaatttgagatgacaggtttggaccctgagtataatagattgttcaatgagggcatggtgtgcactgctagggttgtgtccaaggctgtgatcactgggtacaaagatgggttcaaccagattaagtccttggctgacgctggcggtggcattggagggtctctttcggagattgttagggcttatcctcacatcaatgccatcaactttgacttgcctcattgtggttgccactgctcctaagttcgatgggatcacccatgttggaggtgacatgttcgtgtccattcctagtgctgatgctatttacatgaagtggattctgcatgactggagcgacgagcactgcatcaagatcttgaagaactgcaggaaggcaataccagagaagacaggaaaagtcataatcgtggatcacgttcttcgacccgaaggcaacgaactcttcacagacgttggcatcgcattcgacatgatgcttctcgctcacaacgccggtggcaaagagaggaccgaagagaactggaagtggctgttcaaggaaaccggtttcgcgcgttacaaca

SEQ ID NO: 286291 - DNA, 392 bp, Zea mays
cgctactttgcttggaaacttgtctctgctttcatactttgccaagaagagagaaaaggaggccgtggtagtgcagacgttgggtgtggcctcaacatacgtggccctcggtcacctggcattggctgaaaccatgccgttgccttactttttggctacttcagttgttgtcatctctggccttgtcctgaatttcttgaattactttggcatactgaatgctggaatctggcgcttttgggaagatttcattacaattgggggtttatcagtgcttccccaaataatgtggtctacatttgtcccctatgtacctaacagcatcttacctggggccacttcctttgtgactagctgtctgggccgttaccttggcaagaaccggaaaactt

SEQ ID NO: 286292 - DNA, 510 bp, Zea mays
tattctttttttttttcttgggttaactggcatcttcaaattatgatggaccaaagtgaactgactcttactatatattccatcaaatgcgtcatggctggcaatgaagctggagacgcaaaagcctagcgtctctccctaattaaatagagcaatgttaaaccacaaagaaaagcacggttgcagtcgcctccaccaaacaactcgggatgagcctggaaaaattgcaacatccaatcaaattcagctaaaaaaacagctctatgccagctaacattgccaggtaggcgacctgaaccctacattcccatttcttcagcttggccctttcctgtccatatgcccccattgacttccacccttaaggttatgagtgtaactgtcaatctatgctgtcctggtgacattttctttgtccacgccggaaccgtttaaagttcatcatgcccgtgctgcttcgaagacatggcatccagtttgttttgcacccaccgtccgcggacgcgtggt

SEQ ID NO: 286293 - DNA, 660 bp, Zea mays
ggaacaaaaaagtgtaactttaaatagttatcttaatcatcaaatgccaaaatttaatataaaatgggccgcggactattctactcatataagcttactaggtgagtgcccgtgcgttgcgacgggagtaaaaaatttgtataaaacatagatctgctttgttgtaggttctcatgatcatgacagaccggtgtggtgattctagtttttttttttttttttagataattattgataattctggatttctgatgatctgctcggttgctagaatagtactcattctgtccacccatcagccatgaatccggacaagggcagccacgttcaagacattccactccagggagccattgtaggcaagccagttcagacagctcgccacaaacaagtgccagttgcaggtgaacaggttgtagtacttgtgctgaaagcgtctcatgcccgatcgtagagcatcgtcccatgatatcgctgctcctaatttttaatgattgtaggactgcttgcatatatgtgctgcaagattaacgggaagacaacactccttagacgtgattgtccaacgactttgatgaccccagcgcatggacgctccagtctccaaacatgctccccacgacatcgatattttcaagctctagctccacagattttttt

SEQ ID NO: 286294 - DNA, 413 bp, Zea mays
aagaagaataacctagtgttgatgccatccaaatatctcattggctaatctgcggccattaggaaatacaataattcattgcgcaaattaagcgaaagggagaatgcggtaccttttggccatgagctaacttcctcagttgcactccttaagcatcaaccaagaactcagcggaactaagacatagccacacttcctgaataaaagaaagaataagtgattaaaaacatagatgaagctaagataattattgcgaacaacatactgcaatgtagcacatctccagatatgacatagtatataatatgatattttcaaacctacaatttttccctaccttttttttgctaaaatgtggtctatgaactaatctggactagacaataacagtgaatcactgatgaatccatcac

SEQ ID NO: 286295 - DNA, 414 bp, Zea mays
ctgtagccacgcttttatttatcttgttttaacgggtttaaataataaaacgaaggcaagaaaacaatagaacatgctgcagtgttgggctaaggcagctgcaaagcaaatgtgggatatcaagtgcctatgactgaaagggctataatgctatatcgctttgcctgaaagagccatgacattgaagttgtttgactgcgaatacatggcgattcttgcttttatagcttctgcagcatcctgcaacaaggtatcaggaggggaaggcccatggggtattggctgggatgtccccccatcaagctcataaagctctccatcgacacaagagaaacaaatgtaatgttcaattacaccgtccttggcctctgtatcaccagcagtagcggcaatggaatgagcattctccatttc

SEQ ID NO: 286296 - DNA, 431 bp, Zea mays
  unsure (1)..(431): unsure at all n locations
tttntttttttttttttttttttttgctgtttgaaaacaggggaaatgcaaaacgaaactagagtcaccaaatcgtgcatgatcagataagagataaggcagacagataagtaggattacgacagagagctctattaatctcttgatacgcgagcgagcaaaccagtgggcgtttgaactgtttttatgtgcccagatccaatcaaatcgcgaaggaggaaccgcgtatcaagaggggataatcttaactttgtattctccagtgaagaaagcggcatctccttgtactttctacggttcaacagcgaaagaatttccttcctgccctgctcaacacagccaactcagatggtaaaagatgtccacgctggcaacttcgtaaaacaagaactgaaaatatttaggaaggtgcacaaacctgggataggcct

SEQ ID NO: 286297 - DNA, 455 bp, Zea mays
atgccaactcactttggggggtgctaatatatatgcatgagaataagaaccggcaactttcattcacgagtagccacctgctggttatttgttttacacatccatccagccatcatcacacacgagacgagggaccccaaaaaggcagccgctaaatagatcacaggcgctaaccctgcccggatcatatacataatcggcatatataaggcaaattaatcgacgaccttgcacaaggcgggggggacctcgggctgggccgtggcggaggtggagagcatgtgcacgacctcgcgcatggtgggccgggccgtgctggcctcctccacgcacgccatggccaccctgtagaggtccgccagcagcggcaccggctccggcgccagccgacggtccgccaccagcaggacgggctcatccgcggcggcggcgtccgcggtcaccttgcgcaccca

SEQ ID NO: 286298 - DNA, 435 bp, Zea mays
agagacagttacataatccactgctaccggccagaggcattgtgctacaaacatgttccagaaacccattaatttgaagcagcagcagtttcatacactgtgcggttcactgaagttcaaagccttcatctgacttcccgtgccatggcaaagaaagaaagaaagaatggaaaaagaaagaaagaaaaaactctggaggcaattcagggtaccagataccccggtctgcacagaccactgatgctgcatttgtcatctactcagtgtcactggaatggtttacggtgcgtgccactgcagggggccttgaaagcaagacccccattgttgtcatgtcaagtcgttctccaaatccagataagcagccagcacaccagacatgatgctggtattcccacaaacttgccgtcactgcacatcaagaaaacatgcgag

SEQ ID NO: 286299 - DNA, 445 bp, Zea mays
agtataaatgctctattaattttattaaatcttgaccaggatatcacacaatccatccacctgagctaaaatatcacacgtgaatagccgtagcaaaagggaatgaggcgaatatttacaatcccacagccagacacagttactacctttttattcaatcgtatacctcaatggacatacaatcgcatcgatgcaatatgcaccctcaacggcgactctccagatttagacatccctatcggtttcccagcaaccacaccaatcttggaaggcagcagcaagccagcaaccttaggcctttagggatgagttgcgcctccctgaacatgatcactgatcgggggagggttgaccacaggaatgtccaagctgcctccatttgcctttggggagaccttacggacattagggatcagcgcatttgactggtggaagccaccccact

SEQ ID NO: 286300 - DNA, 334 bp, Zea mays
gatctcaaaaacagctaaaccatttcctgagaggctcagatccattaatttgattctttaccctacaaggcaccccaaacacacctgaacactgcaagtcctccaaacgcacaattggatctgtacatgattttttattatgatacctgtgttatactacaacatcaacaagcaaggcaaacctggggacaaggcaatccggcgagcccgacacccttacgcgcaggcgcagggcttgtcgacgacgacgagatcctcgccgtccctgctgcggaacgcgaggtacccgagcgcgaggcccacgacgacggcgatgaacacgccgccgttgaac

SEQ ID NO: 286301 - DNA, 419 bp, Zea mays
aatactatgcagcactggttttgtaatacttttcggattgctcaagtttgaaagttacaagaagatctccaaaaaaaactggcatgactgctattccaaaaagcagtggccaacctgctgatggtaatggttttggaggatgcttacagtttctcgggcagtctttatgggcatagcatttgccattgttcgtcctaagtcgattagtcagaccattttctcttgaccagcaggctaaggattgcatactccaaagagtatacaaggaaccatatttgtcttccatgaaatgatgtgttctgaaatttgagaatggcatacagatgagtttacaaagagcaacaattttcagaaagagaagacacttaagataacactttaaaaagagggacttcttgaatgctttgctggtctcatga

SEQ ID NO: 286302 - DNA, 433 bp, Zea mays
aaccagataaggtttagcaccacactgctactatctcaattctcctaactaacaaggttcaccgcctgaaacacaatatcaccggttcaccatccacactgcataattgataattctacactacaacctacaggtattcgtcggacaaatatgttacaggaccgagagtcagacaccaggcgcaagtcgccataatgcgagtgagacccatctcctcggctgaagatgaactggtgggaccttgcactgctagcggaccaaaaagtgtccacctcgatacatttgatctcagcagtctaggggtcctcggttccagtagctgttttcatcctcaaagatcatgaagccgctagcccatgggttctgctcagggtacgccgcgtggaaatcagaggatgggtgccagtcactgttcgaggccttgagctccttc

SEQ ID NO: 286303 - DNA, 407 bp, Zea mays
attggtcaatatggattacaatatcaagtggaacaaatcattaggaaatcatttgccttgcacaatatgtcaaacaatattaaagtaaaaaaattacagaaatctgttttaacctccacccacccaaaaatgggcaaggcaatcagccttttcgctgcggttttaaatcagctgttctgactgctgtaactgtaattcatagagacaaaataccgtagaaagaaaaagagaagccatcgcttcggattagctaccgttttatcttcgtaccgctcagccaatgagatcgcgcataagcaggcagaggatgcagaactgcacaaagtattgttaggctatataagccaacttgataagcatgaaaccccaaccaagtgcagtatattcagttcagaaatatttaacag

SEQ ID NO: 286304 - DNA, 499 bp, Zea mays
agaagttaaccaaatattgcaaaattgtcagggtctagtaacaagcaaatatacatgacaccgtttccccacacatagcctttcagcagctacaatgaactagaaacaacaacattttgaacactgcttcaacagaagatattccatcacaagcagtaacaagcacaaacactatcagatatgtaactggcagagctagtacactgggttgcatagtgcttgtttgcttcggtgatgatccaggaaaatggaatggatcacactgtatatcatgaggatatcttgcaaatgtcctcgtattcgacagccctaagaaccttcccatcatagagacctttctcaacctgcacttttgtacagaatttctcagtgtccactgagagcaacctggcatttgatccccgataagcaccattcaatatccgcaacagcccaccgatctgagggatcacggtctcgagctcatcttggtcaaccctgagaacatgcttgctctcct

SEQ ID NO: 286305 - DNA, 499 bp, Zea mays
aatcagtaatcacatatttcaacatatacagaagcaactgataagagaacatataacgggtgagtaatcaccgagatgggccttgcagccgcatcatagtacagtcatacaacatcaacatcacaacatgtacaggtagctacctctaaagccgattgattgttctgagattgtcactttcaatatgcgtattgcatatgggcctgaggaccatggtatatcaatcccaccagcactacgcgactgaaggagaaagaggacacagacacagaaagaacatacatttaatcgcgataagctaggctcggcccacaggagaaagaggtggacggtggggcacatagctggtcggagctcttccttgactggctaccatggccttgacctcatgaccagcaaggaggtcatgctcctgcgctgcttgcgaaccaacttgcagcctgtcagggtacctcccatgtagcatcactatacacattgcaaaagcttgaagtaatgc

SEQ ID NO: 286306 - DNA, 411 bp, Zea mays
attcttacacaagcaacatatttttcataagtacataaattagtaagggatacaattattgtttccgggattgcatttagagcatatcaccataggcagaattaactctgcatcacagttttaccttgcgcagcatacactaccattcagagagcaagccttccatcgagcttgtcaacaatttcaactatagagggcctcttcttctgatcgatatccacacattttagcccagtttcaatgcatgcttttacttgctggaggctgtctgcatctagtgatgagtacttggatgccatgtgtccgtctgtccatgtttggcaaacctataggattggaattatgagcctaagtgatattttacaacctaggaaattttgaataagcatctaaaacttttaagcgctcgag

SEQ ID NO: 286307 - DNA, 433 bp, Zea mays
tccacgcgtccggaactgacgatgaaaggtgtgggggtttaagacaaaaggaggtccagctgtctcgtgaaattatcaacctttcacctctgtcaactgcaattatctctcatagaacagacgatggccatgagtgcaagactggctatgttagattagcttccttttctcagactgcagcagctgaaatggaaaatgccgtaaaaaggatggaggatatcggtgtccagtcttatattctagatctgcggaataacccaggcggtctagttttgtcacagttggtttccgatattgaattgctatatttttcttgtattagtcttgtcatgttgaactgctatatttttcttatattaatcttgtcgttttgaattgggaggtttagtaaaagctggtcttgatgtggctcaaatttggttggatggagatg

SEQ ID NO: 286308 - DNA, 338 bp, Zea mays
tcttccacgcgtccgcccacgcgtccgcaggtgtactgggccaaatgtggatagatccagatgtcaaactatcctcagccacaaatgaagccttggataacgctgcagaaaccgtagacggtgtgaatgcagctaaagttgcagctatgaaagctgctgaattagtgaataggaacattgcagcatttggtgctggaactgggcgcctatcaactgatcagaagaaaaagcttctttggggtaacaaaacgagtaatccttcggaggagacaagtaaacgttgggacttgttttctgatcgtgagcgccaagagaaatttaacaaactcatgggtgtg

SEQ ID NO: 286309 - DNA, 534 bp, Zea mays
ttaccccatatcaccaccactgatggcggcgcttccccttctccgccggctcctggcccaccgccgccctctctccaccaccgacaccactcccgccgtctcatccagcaagccccctaccccagaggccgtgctctacgccatccacagcctctccaaggatccctcccaagcgctcgccgtcttccgccgctccgacgccgacggcaagcccgtaggctccgcggcatacaacctcatgctccgcaccctcgccttccacccctcctccgcccagcgccatttctggcccttcctccgcgagatgcaggaaggctggccactccgtcgaccagggcacctacctcgctgccctcgcctccttcaagaaggccagcctcaccgccgactacgcctctctcaccgcgcactacgactagttccggaagggggacaagtccgccgccgccgccgccgcggaggccgtcccggcccacgacgccgcgggacttgatagcaggctcgctgacatcggtctccttccgctcacggaaa

SEQ ID NO: 286310 - DNA, 490 bp, Zea mays
tttcctcttccttggttctgttgagagcttgagtaccaagagtcagccatgccactacagcaagggcaagacgtgcaagcctgcccttgccaatgctatcttcagcaccattgcctttgtgcttggtgcagtcacctctcttgtttctggtttccttggaatgaagattgccacatatgcaaatgccaggacaactcttgaggctaggaagggtgttggaaaggcattcattaccgctttccgctctggtgctgtgatgggcttcctgcttgctgctagtggcctttttgttctttatattgcaatcaacttgtttggaatttattatggtgatgactgggagggcctttatgaggctatcactggttatggtcttggtggttcttctatggctctttttggtcgtgttggtggtgggatttacactaaagctgctgatgttggtgctgatcttgttgggaaagtcgaaaggaatatccctgaagatgat

SEQ ID NO: 286311 - DNA, 461 bp, Zea mays
cttcgaagcagtttatgatcgtactaattttcgtgacaaatcaaacatcacgctgtagttcatcataacaggctagtaaatacatgccaataaggttcgtatacgtctgttccagtcaagactaattgctactcagcaaaggatactaattcctcctcttgcttgttcttgatgaccttttacccttgcctccagaatctgaaaccgtagggagtggaaccagcgtaccacccttgacaccatcgttcttctctattgacttctgcagtttgatggaaaatttgaaatcctttatctgttcttccagatcgagaatcatttcatccttcgacttcaactgtgctctttccctttcctctatatctcttagtgtctggcgccacatgtcttggctcctagtgagtttttcgttcatatctgcaactttctttttctccacaataagattctcgagcttaagt

SEQ ID NO: 286312 - DNA, 343 bp, Zea mays
agtgtgaagtcggattaaaaacaaaagaaaacagaagaacaagaaaaaggacatcactccactcctcaccacaccacagacggacaggacagcgtccaaggttggtttggtcggttgttcgctcatcagattacagatccctcgtctctcagcctctctttccacgcaacaaaaaaaaacctaatccacagctggctcagagttcagacgacacgattcgccggcggtgggggtgggcgaaaggctggagcggttggtggtgggtgggtcaagactcaagagcaagcagaaaccagtcgccgggtcgactgcgtggtcaccgcgcggcggcggctgcgggcgc

SEQ ID NO: 286313 - DNA, 251 bp, Zea mays
agaggtctaaccaaaatcacattactccgtgaacctctgcacatcaaatgggtacaggatccattcgagatgttttttatgcgctttactgcaaaaatagaaaaaggggccgatgacaacagagcaacctgaatcgccttgcaatgggttcatgaaattccagttgccaacttggaacacatcattccttctttagcacctatccacaaacaaaaagcctacacaatattctcttcccattgctgatcact

SEQ ID NO: 286314 - DNA, 719 bp, Zea mays
gatggcaaatattgctagggcatgatgtataattgtatataccacatgcattttactgctatatagcaacgactagatacaacacagtcagaaaagccaaaaacgttggattagacgatacagccataacttcgcccttggagacaagcatgagatcatcgagaaaaaattctcctaaattacatgtcactgcaggtgacgttgtctggaaatctgacgaagccctgcctccaggtcttccaacgtgatcgtgatcatagtatcggcatcgttgcagctgaaatcaagccgcgaatccaggttctcgcgggcattgatgagcagcgtgtctacaaggcctccattcatctgcttcctctgctcttcagtgatctccctggcaatcagctctccaatggcttcaatgctgcagcttgggtgcagcttaaacccgtaaagcaagctacagtcacttggactcttcatcttcatatgtaggatctctgctagttctgtcgtactgaaatcatcgaaatagatgaatttcgtgacccgcctgcagaagccatcattcgaggcgatgactcgcttcattggctcacagtaccccgcaaatacgacaactatcttgccactgtccattacagacattatctcctccatggcttctaaaccataatccttgtcatcggatttttgcattggtatcaacctgtaagcttcatccacgaagagaatac

SEQ ID NO: 286315 - DNA, 442 bp, Zea mays
ttcccccctaaaaagaaatctcgtcccgagatttaaaactctaggctagataatggaaaaggaaatgcgtcactggcttatttccccattactcctacaaagcaggggtgtgcccctattggttcataccaaagacaaactacacaaatcctagcacttacgagaacctaggaactcaggaaaatgtttttctaaatactcctctggttcccatatggtttatcttccgggggttggttccactgtagcttacaaaacttgataaattttcttcgagtgacccgatcctttagatccaacacctttatgtgatattccaagtaggttaaatctggtccaaggttaacatctgcaatctcaataacatgcttgaggactcgaaaacatttctttaactaggacacgtagaacatgttgtgcactgttgacaaattctttagca

SEQ ID NO: 286316 - DNA, 521 bp, Zea mays
ataaaaaatcgggcacataaaaagggactaactcaaaacaactcgcacattaactactcttcacggatcatagggccagatacttactacctgactgtaagactaacaaacaggatacaagtatgccgcacacacaggcttttcgttcgatcattttttaggggtaaatatgagaacgccaatctcatacatcagctacgattttggtagcaagggacaggttacgtaggttctattggaacgtcaaactggaaatattcaggcacttatcgcaagaactcagctgtctaatttcactggcttcactttctccttgagaaactgccgaatgtgctctcgcttccagttatcaatccttatggtctccttctgttcacccttgttgtcaagcattatgagctttggtggcgaaccataggaataacgggtttccacatatgggaagtcgtctttatcttcttcgaggaagccaacaacttctggataaaataccagtttcctcatgcacacctcaataattg

SEQ ID NO: 286317 - DNA, 406 bp, Zea mays
gaaactgcaaaaaataatatgcttccaaacacccctcaaaggtaaactgagatgactggagtctcattttaggtacaatacaggactaggcatattatggaaggccaaagcacaacatgaattcagtaagactaacaaggaacaaaatcccttgttctacagtctacagtcctcacaacaggggagcataagggattcggaacttgatctactagcatgaatataagctgtccaacaaataaccgcaacatataaacaacagtagttatataagcttcagcctattatcagcgcctggaagtgttatatgagccaaatatggggattgcacagattaatcacagaccaaagtgaaactcctgatccgtgactatgatagtcatcatgaaaatatcagaaaagaaca

SEQ ID NO: 286318 - DNA, 521 bp, Zea mays
aactagctcaaaatagaagggcagacaacataaagcagaaaggaactgaacctaccttctgatttccgataacctgatgtatgatacaactcaccctatacagaggcatacacagccagcctagccccgttgccccaaggcaaactggaaggtgaaacgtgtcaaacaatcctcttcagatttttttctctccctctacaattacgaggcgtgtatgaatagggcatctctacatctgcaacgatgcacacaaattgtggccaagactcaagacggttgctggcctagccattatgaatctgggcaggagaaccatcttcggatcagtgaagtcgtatcgccgctattcaaatgaatgccggcgttcttgatatgcaggcatggtgcaatcctcactcacatgaatagatgagcgtcggtgtgtgcttggccaccattcatcaaccattaaaatgagatagctaagtatgtcagaaaatggtcttcaaaatcagaaccccacgcgtccgcggacgcgtggg

SEQ ID NO: 286319 - DNA, 498 bp, Zea mays
aacaaaaaaacgaacgccacatatggggtcaacctcaatttttcacaaattctttgacaacaaccaatataaaactaaatcaggtttttggcttaatcgaacagctgtatgaacagagtcctaactaactgcgctaacaaatgcgccacggaattctgctcgcgggtcacctgacgtttctccattgctttgagggcatcagctacttaacttccttgacatgcatgaaaggtaatctcagatctatcctcttctgaagtcgtcagatcattcaccacccatgagcaacctgatccaaggactaccagcaaatgcacccattgtgacacaaggcaaagtcttatccatgatcagtttcagcttctgcaggacttgaccagttccataaaatacgccatgctgaaaagcatacatcacctaccaaaatacaaaatccagcatctccaatttgctcaacaaattaaccttgaagtgcttctctctgatacaccatctatc

SEQ ID NO: 286320 - DNA, 607 bp, Zea mays
ggaaggcaatccagttattcgatgggaaaaacatatatgctttagatacaagttagcgagtacatattctttctgcacaaactaagttccactagaactagaagtacacgtgatcacttcgacgaggcgagcaaacaacattttttttcgaaatgaagagagaacagcagctatggaaatgaaaaggagcaaacttttcatggcaaacaatacgcactcggttcctctcctgctggaaaagaattcaaggtgttacaagcggaagtctagaatatatacgtggttttcaactcaaatcatgacttccgctcctggtatagatagctgcctctatgccttcttagtatttgcgatcgatcttgctgccttgaggttcaaaaacaccgcccagcaggaggcgacaaagctgtggaaaagaactcggagctggagtggcatgtactcatagttgatccaacttacaattggccagaacctccaagctgtgagttggacagatgcataatccttcttcaccttgttctttacttgtccaaatggtctcccttcaaccaccagaccaaaatacatcataaacatcatgttgttccatggagatgcggtcagc

SEQ ID NO: 286321 - DNA, 410 bp, Zea mays
aacgtccggggaaaaaataagtatgcgggaaataatactgctgttacattggattacacggagcatcggaggtcactatttctctaagcgagctaaatgctctacaactacaagggcagcgagctataacactcgatggaggaccaatgccgcatcagatacctccctcaacaggcaaaggtgtccgcttcacatacctccctcaccaggcaaagaccatggtgttctttctgacgacgactagtatgaacgagcatgccatactatatcatctgtcctagcgcttggtgcaactgtaccttacgtccattggtccttgcgttcacgagtttggacttcaggctgcgcttttgggtgccctggggctggggccattcgacgcgccctttcatagcacggaccacatgagg

SEQ ID NO: 286322 - DNA, 428 bp, Zea mays
tcctttttatggtgattttttttttttttaataatttatgggggggtaaatgaaactttattgaattttcaagtccatacatcgaggggatacaaagtcttgaaaaaaaaacacatttccgacctctgtttaacgggatgcacacaacctaagaaaaggaaaataccacatggcagaactcaagcactaatgacaatcgatcctaagcctagactgccacccatgtgcctaggtaaaaaacccttggccactagcatcaagtgttgagatgccgcaacaaccatgtcctgtgaagttggtcgcagcaaaatagcccatgaacggagctaatgaacaattttgaagacaactgcaaaggagataagttatgttttttatcaaataccaaactatttctgtaaagccataacgaccagcaagtagcagcc

SEQ ID NO: 286323 - DNA, 742 bp, Zea mays
gcatattgtatactggcggttgagcaacacactcaacgccgatcattaccttgatcatggaagatggatgagcttgttacacacacacacagtcagactgaccttacaaactgttgaatgtagaggccaaagctaacattgatgaatcctagcactttaattactatgttcatcgaccgataaatatatttactcttgtttggagtcatgaatcctcaggtttttccctgaactgacagagaggtcatttcaaatgaaaattgtgcgaactcatctaaaccaagttcccacaattttcactcatgggattatttacagtaacgggtttattttcactagcgggtttatcttctccaaggttgtcggcgcccctgaaggccccagagtagtacttgaagtggtgtgccagcaacgacacgatggtgatgaattcgcagccattactgagctgcctggcatgggactcttggctgcaatggtcagcagcatacaacaacatctccacccacacccccaggatcagttccaaagtgtcacgctgatcctgccaccgcaactctatgctcagaagctcgttggcgagcaagattgcatacatattagcactgtcacggatggagtccccgtgtggatttggtgcctttactgatcccaacgaaatgtgtttcagttgaatgatcagggaagttataccagtgcaaattgggagaaactccagcggacgcgtgggcggacgtgtggg

SEQ ID NO: 286324 - DNA, 444 bp, Zea mays
aaaagaaacgaacgagtattcatattgggcgcacatttgaatccacagaaagaatagaaacacaaccgggttcatttctctgcacaatctgcattcgctcccgttccagctaaacagatgggcagatggccgacatcacggctacttgttacatcagcaaatgcgaaattttatacggtatttgccacacacagcttctgatcggcaatggaaaaacataaaatacgctattgcttcacctgtatacgtagcgttcatatggtacacaaaacattaaaccgtcaggcgtcactgctgtcgcgctcctcgtccctcaaacttgccagtcgtttgctcacaggtctagatggtgctgatatcaactttgctcttaacaatttggaaggcaggagtaacccagctaccacagttgcactgtattcctgaccagttgaagtatcccaa

SEQ ID NO: 286325 - DNA, 413 bp, Zea mays
ccacgcaaaacaatattatcagcacattacttataacacaattatatcttcatggttaaccaaacaaagctgtacagatcaaaattactatgatttcacacttcgctaaatacttacagcttacaatgatacaactctgactgcaggcagaatacaaataactttctaacaaagcaaaattgggtaatcgaattacagtgtggtagaaggggcatatcatcattgtcagttatcttgcgttgacgacctttcatcttttcttgacaatatattgatctgatgctcaagcttattgttttggagctttaatctttgcacttcctcagcaagttcggtgacacttcgctgcaattggagaacatacaaatgcaattccttttctcgggcaggccctccagaagactgatatgaac

SEQ ID NO: 286326 - DNA, 321 bp, Zea mays
attaaggattatttattgtagatttagttaaattgaaagtgttttttaactccaatgctgtatattttcttgaacgtagcttattattgtttattacaagtaaatacactcgccaaacttcaaacgttaaccatgccttcggaagccaacaggtcttggacgaactcgaggaaagctgcacgcgacggacccccttccgccagcgcctcggccgttctcgccctcgccgcctccgcgcgttccttgagctcccgcgcgccgtcggaatcctgcatcacccacctcaccttcgcctgcacctgttgagccgtcaccaggccc

SEQ ID NO: 286327 - DNA, 243 bp, Zea mays
aagctctgaactttacatcttacaggagacttcgagggagagagggattaggcctttggcaacggaaccttttgctgggcaaaatacacaggcaatacatggcaggcacagactgcgatcgtcattagaagaatccccttgtgttgggcgcgacgcgatctggggagggcaaatctatccaaaagctacctagcgtcaatggcggttatggtgactctgttggccgggaagccgtgagacgac

SEQ ID NO: 286328 - DNA, 389 bp, Zea mays
gtcaaactagtttgttggatggtttctaatccagccaggcatttgcataataacatgttgggattcaagaaaaacatgctatcaaccctctaaacagtgtagatttgtgctacagcatttgggaaaattagctcacgggatgaacatgaggatttcggaactgtacatcaacctcaggtcacattttatgttgatgatggtacatgttcaaaattattctaatttcaccagaactcttgttgcatggcattcaaatactccatccctttcacaatttaagtcccacttgcatacctgtagcttggcaagaacaaagtttcatcccgatgtccagtccatacatgtgcttaactgtatgtttgccaatgaagtttcttgaatgttcacct

SEQ ID NO: 286329 - DNA, 496 bp, Zea mays
gaaggggccttgattacctaaaaaggctgccttctttgggctaacaagtctagtaataaagaataaataaatgttacgagatttcaacattgggcagtcacaatatgtacccactctttccaacgctacatcatttggtaataaggaaacaacagaacaaaactgcacgcgcacgcgccaaacagaagagcctgtctctttttctttcagctgatctgctgtaaacttacgacagcgggccatgcattcagcaaaagaatgcctgtacctattggacaaactgacatctttacccagatttctaacctttgatgttgttctcagtgttttgacttcagagcagataccatcatgccagccactcccaagcagtcagtgttcagacatcaccaggccaacaaaagactatttgatataccacttcctaatcctccatatttcctgtgctagtcaagtcacgacgctaccagtgtcaagcaatcatcccagatcccca

SEQ ID NO: 286330 - DNA, 637 bp, Zea mays
aacagcgcaacaaagataacctttcacataccaaaaacagagcgatacatatggtatttcagcaccacgcgacaggttgctcccaggtcaaacaacaccgggcactccagcaaaaaaattctgcatggataaaatgagaaccagaaattcataaagaaacctgaacgtgaacttccagcacagctgctcgagccactgcttgataattcaagggaacttgatctcctgccaaggtgacactactactcaacgatcttatccttcttcctcctcttctttgatttttccggtggcgacggtggcatctcggaagccgtgttgctccccgcgcctcgagcctcagatccttctgtggccttgcccgacacatttgagtgccccaggctgctttcatcctttctcttccccttgtgtttgggtgttggctctacgctcctttggcccagtgatagcgccgaaccttggctactgggattctttgatgcaccggtgaaccgagacatggtcttcttagaacctgcagatttctttatgctaggagtaagactcccaaaacttggttttgtaaattcctcaggtttaggataacgaactaaggatactcgccgtgaaatcttccccacagcctttgtttctg

SEQ ID NO: 286331 - DNA, 345 bp, Zea mays
cacatgacgggaaaccaagataaatatatactgaaaatcgcttaacacacgtactccattgttctaactacctaatattctgtttctaccgaaagagttaaaagtcctatatgcatgcctatctggtctatttaatagagtaaaaataacacgttaaaaataacatggacaaggggagctgacgacgatggagaggccaaggaaggatggacgggggagcgagactacgaacgccttggtcctctcatcagagccacagcgcgccggcgtccttgagtatgggcacgaggtcaccggagatgtgcacggccatgagtcggacaaggccgtcgaggagcctgcccc

SEQ ID NO: 286332 - DNA, 524 bp, Zea mays
ggatcaaatgacgtgatttgggacttatcgttaccttgtcatacttcacttcgcatttcacatatacaatgcaaatagcagcaggtacaccaaaacaggtactgtgcctcccaatatgaaactctaggtaggccacgacaaacaaactgactatcagaacaatcattcagcatgctatagctaaagatttacttatatataaatacaatcttacaaggtgtattaattaatttgttcaaaacgacaattgttgttgtctagccatcccagccataatcacaatgatcacgttccctctttcctgcctaatctccagattgtgacgaacggatgctcaatgaactttgatgtcctttcctccagaataggaatgggcatcatgcgcaagtgtctgttcttgagattggaaatacatgaatggagtatagtgcagaaaatttgaaacccttgatgtgtatatatcagcatatttttcaatttgcctggtaagatgactcttatcccataggccagcacgtgacaac

SEQ ID NO: 286333 - DNA, 415 bp, Zea mays
attcgggtcaatatgccagctatgattttatattttagtcctccgccattgttcgagtgtgtggttactggttacacaattctactgggacgcaacatatccctgtagagtagagtaaggactcctctggatctaaataactggaatcagcatgccaaaatcttcagtcccgacgagacagccacacaaaaactgtagctggctgtcaggcgtagtatactggtcgatcaggggcgcgcttgggttttcgctctgcgtgcgtcctgatgctccagctgtctacttgcttgggcagggaagaatgcgccatctacttgtttgggcagtccgatgcacggtgaccggattcgccgcagttgaaacaagcgccactgaagcttctgctgctctccctaccgcccaaggatggtgagcg

SEQ ID NO: 286334 - DNA, 350 bp, Zea mays
gggccaagcatttgggtattcagcccttagataagttcttccataatggacaaataggtgagattccaggctctactaacgctaccaaaacacttcccgggcttaattccagggctcaaaaaaatcacactagacctcaccactctatagctagtttgctccaacggaccggaggacgttcctcgttaaaatgtcggaaccatgtgttgctggagctggggcttgctgaatcttagccttcccagttgatcagagacaaatacaaactgaaaaacaaacataaaagggggtacaagcaaaaccataggaacaaacatcaaatagaccatcgctaagcattatgcttctag

SEQ ID NO: 286335 - DNA, 550 bp, Zea mays
actcaagaataatagtatgtactgatcaaatactcaagaataatagtacccttcttcatttgtttttctgtagggatgattccttgtttcttcatccgtatacatggaacaaaatggaaccctctagttccatgaactgcttgaactatgccaataattgccgacgaataggtcagccatcacccatcagcccaacacaataaaataataaacaattacctatatgatcatagtctactactgcctatgtgtatatatattgttgtatgtcacctttagcttttgcttctgctcattgagacatgagacccatcaccatcccctcctttcctgttgctaagctgaatgccttgagcaacaataggctcggaaaatgcggctgtgcattggttccggtgacagacttcaatcaagacagaacggacatgaagaccgtcgaccacgccgtcagcgcaaccgcggcaacgaggtacgtccagagaaagatcacggagcattcctcttgtccaacgtcgaacagctgagccatcgttccgatgttcatcgcggg

SEQ ID NO: 286336 - DNA, 520 bp, Zea mays
actacagatttcttaccatatccatattccagatagctttactcttttcaaaagatcatccacagcaaaatacagttcacaccggatcacccattcccatatcattccattctatatctggtggcctcaaaactgtcactcctataccagacccccaccccaaaaaaaaaacagagagagagagaacgcccgcccggcccaatgtaagcagaaaattctatagatgattggtgtataacgaagagttcatgcagattcggctacaactgttggatggcagttcaagtcgaatgctccacccgcttgatcggcagtgaagatttattggcagatgagatcagaagttcagcgcctacaccaaaggttaaagcaaaaaagggggggataaacagctcccttttttgctctagaatgctcagatgactgcttattacggactcacaacgaaaagcaccgttgaatgctagtactatatatccccgctcaaaacgaatctgctaccctatttctaatcttcatg

SEQ ID NO: 286337 - DNA, 383 bp, Zea mays
ggaatcaatcagtccagtgcggccactgtagaacaggactgtagatttattcgcaaaaggatcccgcagtcggcctcggccagtccccagctgagaatagcgtacgtacaagacgaccagtccctggcaacatagcctcctcagtcctcatcgacaacgttcaaaacgacaaaactagcaaaaaaccattcagcgtgcaagcccacagtgtgattttacagcagcacgataccttgctaagggacctgtgtatgtccatccgtgaggaaaatactggtgctccatttccggccggcagaccagagagcagagagaagcagcacgggtgtttccccccccccccccccccccaattccttccggaaacctggttcattcgttct

SEQ ID NO: 286338 - DNA, 655 bp, Zea mays
tttattttttttcctttttttgccagcaaaaggcaatggacatgggggcccttaaggcaatgatggcttcttccaaaaacgaagggaataatgaactggtgaatagagctaacatgtagttgtataaataaagaatatacacagtgaacaaataagacagggcattacagtcaacctgtattaagaatatctattcacaaggctcaggttcagcattgtaactctacacctactgttgtatgcctggatcgtgttgtagctgtacggtgcatcatttggcggacggtggtcgaaagggtcaaacaatatgattccaccagtatgaagtaaactcccgcgtggatatcaaaacaacaaccaatgcttctttctaggcttgtatttgctagggagatctcgagcatcgtacagtgagttatagtgaacttcggaccagaaactcagccaaatctctctctgtggagcttgatattgtggaacaatttcaacaaaacaggtatctctgaatgatgttagaagacatatctttgcagcaaacttgtcagcagctgcttgtagcgtgacatggtcaccccattcaccatacttcttcattttcttgcaatattttttatatttcattggaacataaccttcatataaggtgttacatttc

SEQ ID NO: 286339 - DNA, 473 bp, Zea mays
atacctgtaaagttcatgtaaattcataattcttggcaatattacagaatttacagttttttctcgaacactacagaatttacagttgcccggccgaatcagaactcagatgagcactacgaagtccgaacagaggttatacaggaatacaggattatgctgacgcggaagacatgactttcagaatgaaaacctagccaaaagcattgaaggtttactgcctggcgattttccttgtaaaccttagtagattcagctgtacacttggactaattacagctatacagtaacaataatagaaccggggggaggacgagacatcacctgatcagttagcattgttcttgcactgtaactactttatatacagtgtatgtgggcaaaatttgctacctcgaaatttgggtgtgcctgtgttcaaagacatgaacaaaagcacggtatgtggtcgaagtcaatcgataattcggtat

SEQ ID NO: 286340 - DNA, 748 bp, Zea mays
aatcccatgctttttcaggcagggtttcaacagcacaagttggagatggcaagggacggtagtttgtaatacatcacgcacaagcaacggaataaagattttatatacgcagacaacaagggcggcacagaaagtaaatccagctcggccatctggagacccgtggcggtgataccagacaccggggcaggcgtgcgcttgcctcaccaattttggtttggtgcggcggacagcgatgcatgcattttcatcaggtttcggtttgggagaaagagcaaggatacatcatcaaagtctcaacatgaatgaattcttgctactctggagaagaattggctggtttctttgcacttgaacaagaaaaccccacgcgatcttattttgtgagtatacagactgtcccagttccatgtcaaattcatttcccagttatgtcctatggtggcacgatcatcctattccatgccttcacaagaacgggcgcggtggtttcccgcgcggaagccaggcgaccgtggccacaaaaataaaaacacaagaagctcgcagcttggttggcaccaataagcaagcaccgttcaaatgtctccccttgctaatcatgttagccttgggagagaccatagatcatagtccagttccagtttggacaagaagcggcgaatcacttcttgattatcatcacgacatccccaacgagatgcagggagccagtaaccagcacctggaaagaagtagattggtttca

SEQ ID NO: 286341 - DNA, 391 bp, Zea mays
agaagaagaattgttctatgtatattgccattcggtgtacaatgtatatatagacctgattacaagagatagagccggatgactcggtacacacctaagaataggagctagactcggtaaacacctaagaataggagctagctaacagaatatgagtctatgcatagtttaacatggggttccagacagcagcccagaactctgacgatgttcttgtgggcgatcttggacacgaccatccctccgttgatgaacgcctcctcagagccctcgtagaccaatctatgcaccgccaccatcgtgttgccatcaagcgttcctttataaacctcggttgctgatgtacctccactgagaagactggagtaattatgtgtgacttcatttatct

SEQ ID NO: 286342 - DNA, 452 bp, Zea mays
aattgcaaaccaaattgcagcgcatgaaagattgctgatgatgattatacaatacaatacatcattcacagtatgtacacgattccttacggtggtcagtctctaatgtccgaaccaggtggccaatcaagtttagtggcttcagcctcggcggcgacatgggactttttagccatggctttagataccagcgccgtagctccctctgacgaagaacacttcttccaggacctcgtaatgatccgaaggtgctctgccacttcactcatcgtcggtctctggtctatttcctcgcaaacacacttgagcgacagcctccccatctcctcaagcagaccaacgtctccgccatgacctgcaacatcatcgtcgaagaacgccctcccgctgccatctgcctgccgagccgcgcggaactgcgcaacgatgtcgtcgtggtcggcgtagaacac

SEQ ID NO: 286343 - DNA, 360 bp, Zea mays
gggtactgaaaatcattgctgcaatagctcgagtactcagcaatccgaaggaaaaaacatttgcaggtccttgtacaatagaaccggaatcattcaaaggcaagaaagtaaattatttttactattattcatacagcacgacacactgtaagtccagtttcaacttctgtttttaacctgaaaacttgcgtcctgtaatcttctcggactcatatagaatatgattgataaggccccttgcagcatcgtccttcattttctgtatcttctctggatcagtttcatgcatgtttttcttgaattggtggctcaccatggcgactaaaagttctggattgggtttctgatggccaatatact

SEQ ID NO: 286344 - DNA, 462 bp, Zea mays
agatctagatcggatgcaccagatcgcttgattgcatgcttgcaccagaataagtgattgcataggatattttccccacaaaaagaacgcgatatacttcaatcctaataatttctacagttcaattactcccatctcgtccgaaaacacacaaaattgaccaacaatggagacacagaagcttccactggccagaccagcagaattatgttcctcattaggcccatatgaacaagggttgcttccagaattgattcagcggcggcgccatttgagatcagaccgacgggaagaacttgttcagattgaacggcagcgagtagaactcttggctcctcgcgtctttcttgaagctcctgaacttctcccaccagtggttgcccctgtccttccgcaccgcgctatcctctacctggagcgtgctgtacaggatataggctaccaaccaagcgaagcacggtt

SEQ ID NO: 286345 - DNA, 481 bp, Zea mays
aaataaacttttacttcattaattcaatcaaaaccttttgttcctctattctatagcacaaatgggttgtagtttccatgccacatagctatcaacaaatattaacagtatatctatcaacaaagcgctctaggtccccactgaaatacacataagagtgtacaacatgtcgaaataagggactctctaaataaaaaatatgaactcctggcatccttcgttcatgcaaagaggaacttacgagtatcattactacagctctggccccgaagcaaagaagttgacaagcccccggcacgcttggacagatacctcacatgcctgaaacatctctccatccaagttccaaacactttcgtcatgtgatgagataaaggtaaacgcttgtgtctcgtgatgctcaacgaaccggacgcgtgggcggacgcgtgggcggacgcgtgggcggacgcgtgggcggacgcgtgggcggacgcgtggg

SEQ ID NO: 286346 - DNA, 277 bp, Zea mays
ggacgctggttttttttttgcagaggacaggaacaaataaatgttccccatcccacctggtaatatgagcagttccctgtatgtacaacacgcggagtcccaattatctgtgttgggacaattaatccaccatcaggtaaaaaacacactccagtagacaggattggtcacgtggttaactcggggggcgcgtcggccgagcccggattgttgatcagcgcgacacgatggttccgaaccagtcgatcccgtcaaactccggcgcgaaccgcggtgg

SEQ ID NO: 286347 - DNA, 410 bp, Zea mays
caaatcttaaaatacacagatagaaaatatctaactaaaacatatgcagatctcccgaaacaagaaagaagcctgaaaactaaagcagggatacaagttagagagatggctggttggggacatccattcttaattattagggaaggtttcacattcccaatatagcccaagatatttagagctaaaccacttagtcatatcataatggacaaatttctgttccgatgatctgactcccatgcttactttgtggatttgtttcgccttgacctgtcctccacaatggcttcatgtgatgtctctgattcccgccgaaactgtgctcgagtgttgaggctaaatctgtgaatgaattgctaccggcgctcgatggatatgaggctataccacagatggtagcatactccatt

SEQ ID NO: 286348 - DNA, 444 bp, Zea mays
attgcccacaaaaccatttaacacggttgataagaccaggtaacagccaactagtcaaaatacagatattttgatacatgaaacccagtacacatccacaaagtacataatgaagccgcaatagcaaaactacatattaggcaataaaacgatatgatcctttcaagaaagttcctccttcaaatactgctacaaaggcatctggttcaaatccagttgtaaaattcaacagcaggaagcctttcgctacattttggcaccaatatagactcaaaagccatccgaatgcaaaaccacatgaacgaaccacggaccacagatgccaaactaagatacaaggaaaataatcagatggctagttctgtcaatatccaccctgaaaaccagtgcctccgacctgagaaccaggcacctggccctgcccagatgccccagcctgataac

SEQ ID NO: 286349 - DNA, 577 bp, Zea mays
attattattattattattattattattattataccatgggtattattatggcaaaacgcatgtactggccaggcagccaccgaccaacaccatcatcatgtacaaacacaagaaaacactgccatcatcaagtcaagcccaccaaatctttagtcgctcacgttcaagagccacaccacactacattatagacatatctcaatatatttcaacttcagctgctttgttctcggcacataatctttcttttcactcaagcttcacagaccatacaagagaacgaacctggtaatttcaaatggctgaaccaaaactcaggttcgtttttgtaaattccaatagcaaaaaatactcgtgtaccagctcataagcacaaccaccattatccacatcaggtatactgtgttgtgcaaccagttacttccacagaacgcccccaagtcagaacatgtcagctcaaactcacacattatcccaggagatgatcacattccaaaggctctgttatagatatcatttgaacccagcatgtgcaacttgttcacttcacttggatataatatcctcgacatgtctg

SEQ ID NO: 286350 - DNA, 420 bp, Zea mays
tttttattttttttttttttttttttttttttttttttggtatgtatgtatgttatctatataatatctcattctcagggcgaaaattttgggacctgcccagaaattaaaagtcaggaagccatcagctttccatgtacgtacatgacaaacaaacaatccaacccatgatcagttgagctcttgggcgcacgcactacaacctctctcaagactgatgaatctgttattgccacagacgggcaagcagaagccgcgacgctatctttacactctcatccgccgaacgcggcctttacacgtatttccggctgaagccttcggacttgtcgtcctcgacgctgctgctgctatcgacgccgacggtggccgttacaccggatccagagaactgaagcgggccctggggagacccggact

SEQ ID NO: 286351 - DNA, 465 bp, Zea mays
agggggcaaccacgctaacattcagggttttcatactggggcgcatagtttcaatgggtggaaaagcctatagatctcaaatgcaactcagctggaaggcgcatatacatacaaatacagcgggggcagggaattggctgaagacgctagggaaacgatggaaatgctcctagactcgccatctcctctgcctagtcatttttgctcatgcttcctaagctatgtcagcggaacatcaaagataccgaagaaaaggtacggctgtagtctgtagatcgcccaactgttgcagttgctaaacggtctaggcagcaatcttcatccaagttctgctactcgtaacttcactccccgttgacgaagcttttactctcgtagtacttcttctcgcttgctgccttcttctcgttccgcttctggtaggcttcgtggttagcaacaatcctcctgatgatagtacttgtt

SEQ ID NO: 286352 - DNA, 367 bp, Zea mays
aaacaaaagtgcatacaaagcacaatttgtatatgagcaaagaattggggttaaaaacagatcagtcgagagagacgctacaatatagtcgtatttaccctccaccatgcaaaccgaaaattatacatatagtcgtacttaccctccacaatgcaaacggaaaacgatacgttgtcctaacatacaaaaccacatggcaatcagatgagatggtagttggttgactattgcaagtgcttccatagcctacttgtgccctctgaagtacatgtatactttctgaagaacccatatgctcacaagtgtctccaagcaaaacaaggcaaatccgacaaagtaaaagatcccaactattgcatgatcagaa

SEQ ID NO: 286353 - DNA, 520 bp, Zea mays
ctataatgcattagatctattaagcttaaaatgaataacagatacatttgaagtcaaactaccggactaatacacaaacatatcgtgttttgcttcatctctgcgtgatgtataatgatatccgtgagcgccctccacgtggcatatgaagatatgtttttccaggtttcagcttgtgactggtgccgcgttgaatgagctatacttgctgtacagataaaaaaaacagctgttcacacccataccatttcataatcttttttttggtgctggatttttgcaccaagaacctgaatcatcacacagcattgttcccagaatttggatcgtgcccttgctgagcgtcatcgttgtcatttccaccatcatttccagattcttggtgctgtgcagcattggcagcctgctgagccaaacgctgattcctcctagctctccacctcaaatactctactagtagagagttcgtactaatagcaataccaaacccagtgaatgaggagagtaagacctcgagccg

SEQ ID NO: 286354 - DNA, 311 bp, Zea mays
ggttgggggtgtggtggtttgtgttgtttgtttgcctccaaacacgaaatcaatggcaagcttgaaggttataccacaactttcatggacatggccaagaatttattatttatttctctaaattaagttcctaccatctgaatgaagttaccacatcgatggatcgaattacgtcaggacttctgtcgggcctgtggtgattgcccttcttgatgtgtattcctaggaaacagaagctcatgtatttgcttctctgcagagaactctgagagggcctttgtagggaaagctaatctcaatgtctgcacttg

SEQ ID NO: 286355 - DNA, 580 bp, Zea mays
aatgttaataccaattttataaatttagccaaacttcaaattaagatttgtttgactcctcgaattttgagatgtagacttattttgggatgcgtacttggtccaacaaaaaaaacacctggactctcgagcgcagactcgacgtagaagtacaatttacaagttacaacagagcaatcacagttatgattggactccttgacacaatacaacctccaatttacaagttgaaacagaacaatcacagttatgattctactccggagtcctgacgtacttccaacttcccccacctttctcgtagccttaatttcaccacgtcgctgacttctgggcatcacataccgcggtgaaaaccttgactggtctcctgtaacatctgtctgagtttgttcacgactttctgcttggcaccatttgctttagctaataataccgctatttcaataatcactctcagacggagatagctgacatttgttttgacattcaagaacatacgtctgattgcacctgaacacaattgaacatcagactccattttgtgctgcttctcaagaccgtgtatagcacatcttgc

SEQ ID NO: 286356 - DNA, 353 bp, Zea mays
gccaacaactgaacaccttgttaccatttgccaatcaccaggggtaatctcgaaacaaatctgcaagtaagtataaaggtattcacatatatagagcccatggctcgcccgctgcatcccaatcccaatcccaatccgagtcaaagtcaaatataaccacacgtctcctgcgcgaaaccaacctgagacgccgaggtgtcgaagacgaccctcaggttcttctgctggtagttgccgatgatggaggtctcgtcctcggatttcagggaggccacggccaggcacacctgtgaggagtcgctgctgacgaagtagagcacgccgccggagtccacctccacctccgcgccgcc

SEQ ID NO: 286357 - DNA, 670 bp, Zea mays
cagggattacaactgaaagtctgaaacgactaatcatttatatcataattacacacaggccgggcaagaaattttctcggccttcaatatgaaaacctgagaacaagtccaagacataaaaaaagggtaaatgtaattaagtactcttcacatctctctctctctcgaacccttttgcccttatatttcgttcctgtagcctccattaggaaactcgttgtcgcgtgttggcacccattttcttctttcgtaataagacacatccttttgcaggctgtggcttcgttcatcctataaaccacccacccagcaacctcaccgtctcctgtcccatatctcctccagctccctggccaggtccttctggcgtccgacgacgatggtgacgtggtccttgccgtcgatgaccctgacctgggcgcgcgggaccttggccttgaccgcgtggctgcactgcacggggaggagctcgtcgtcgctgccgtggtagacggtgacgtcgcaggcgagctggtccctgaccacctcgagccacccgtcgatcttgcccgcgctgccgcagatgatgttgaggggggtgtgccacgacgcgatgtgcgtgtggcagaagaagccgtccatcaggtacgtccgtaccctgtagagggtgaagacgcggaaggcgagctcc

SEQ ID NO: 286358 - DNA, 568 bp, Zea mays
ggtcaatgtcatcgtgcatcgatattgatcagggtagatctcttaggcgtttcggtagttcagtaattacgaatccaggcaagaaactgggaataagtaaaaaaaaatttaggttacagtccttcatgagttgtagatgactggatgttgcaaacaatcaggttctcctgccaacgctgctcatgctcagctaaggctctgttcgttttgtgctgatccatagggattgaggggatcaaatcccctacaagtcaaaatcctcttcaatctctttcaatccacctcaatccctatggttttggcatcaaacgaacatggccaaaaagcgttcaaattcacaacacccatttcaagtatgccgatcaaagaacttttcaattgccactgagaacgcagcaaaccccacacatccaaagcatgtagctttagggccaccttttacagctaaagctcctccagtgacacagccagctactgctgtattggtagtgtcatgctttgcccgaaccttctctatggtacattcagctgctgagaaaatcagacccatgactgcaaaggttttggc

SEQ ID NO: 286359 - DNA, 341 bp, Zea mays
gcaagtaaaccattcttggtaaatgttgccagtacttttgacaatcagatgtacagattcgagcacgcacagcctctctctctctttgacacaatcatgtaccacgtcttactattccgtggcgtcgttgcagttcatgaggtatcttagttgtatttacagtttacacgcatacgggcattaggaaacaacgaagagagacttacaaatttacagacagccagggacacgcacacgccagctttccctcccaatttacatgaactgtcatttctgggcatctgatccactagaggatctggggttcggtatcaagtccttctaagctcttcgatgaccgg

SEQ ID NO: 286360 - DNA, 630 bp, Zea mays
acaacttaatcccgttacccatggattgaatgtgattagaaaaaattaaggagtttgacctacttggaatttaaacccaccaaatcacactcaatccacatgaattacaagctaatctaacaaggccttacaagaaaaaagtaaaaagatccagctcctattacctaccacaactacaatctcaacgcagaagaggaaaacagggtgatcgtgatgtgctcgctcctgcacgttcactgtagactgcaaatcagtaaagttccccaggaccacgccactcctgtcaacgctagtacattttatacttggttcctcccatcgagcaggtgcaggtcgtaaacaccaaatcatgcgaatggcatacaaaatggtggctaaatggaagtgagcaaactcgattgcctgtcaacggtatctaggccagatttgctgcctaatactagatttctaaatccccaggtccggtggtttttaccgtgaccaacctcccacgtacccacctcatcctagccttttcttccgatgagggtgcgtcttcttccggttttcccccagggtaatcttccctggttccagccttttctgcagacctgggactgggaggatcttcttctagctctagtgtccctg

SEQ ID NO: 286361 - DNA, 347 bp, Zea mays
ggcactggaactcacaagaccaggttaaactattagtgtaactgatttctttttttctcggggtctacaaaaaaataatcttataataacagtaagaactgacaaaacccctgttactcagaatatgggagctaggaatctaagaataaaagagaagagaaaaaagtgaagggctaaaagaaacatagtcatacagagagcaccacgaatgacagggagggcagcgtcaataataaacaaacatcacctcagccctaccaagggactcagaattacatcaaggccctggatctgtaactctgttaagcctctaagtatcaattccacaatttacatgaagcacaaaa

SEQ ID NO: 286362 - DNA, 331 bp, Zea mays
ggcaaatattattgttgcttcttgcattgcattgcattgctggggttacattacaaataataatattattactagttcaacgtacgtccgaattagcagcatgcatgcatgcatgaaaatctgctcgacagatcaaatttgccagatatttaatcaagaaacacaaaaaggccatgcatgtggccggccctctgctcctctgactctgatactgatagatatagtagccaaagctaattaagaaactaattaacccatcactcctccgatccgatccgtatatatactagtgaatgcatgtttattaatcagtttgcagtgttgaatggcg

SEQ ID NO: 286363 - DNA, 540 bp, Zea mays
gcaaattcaaacaatagcagggcttccattgacggaagtgctacttccactagtatagtattccctcatgtttgtttcgcagacacataaacgagcccattcaaaggccaaagaataaacctgcaaacggatcctatcattgcaagtgatccgttgcaccgtattatttagctgaagaaactaagctttgtttctcctcgtcaacctcctcaggttgctcgggcaccagctcacgctgtgccacaactgcaccgtttcctttcaccgtaaccgattgctggtagagcaccccaccgaggatggtgaacagcaagcagaccgaaccatacgcactggcatgcttgtcccagatcatgacattgatggccacggtgaggaacttgttcacgaccccggtcacggtgaacgcggtcgccgatacagctctcctggctgcgaagccaaagaaactgatgagcagcccgattaacgctagtacagcgccaccgccacgacggcgtccagttgaaaccagccttcgcccctggactccatcgctgc

SEQ ID NO: 286364 - DNA, 676 bp, Zea mays
gcgcctgaacaaacccttgtatattagcatatatccttttgaaactgccaccacctccaagcagtcgtcagaattgctcgttccagtgccttacatattacaacaaccaattattctcctgtcttaaaatccattccaggacaaaactacagtccataacacatactctgcttctgattttactgccgaacagatccaccgaatctcgtgtcatttgtgacaaatgtggggcatattacaaaaaaagaaatggccaccgaccacaacctgaactcattatgcgtatttgtacgaactccctcataaaatacatgagagaaaactaatctagcacactatgttcattaggtttgggctaaatctacccactgccaaaccttgagctcaccagttccatccccggtaaaacataaaccaccaggacccatctgtattgccctaatttcttttttggagaataatctgcctctgtcactgaacgatggcagatcatataagcggacagtgttgtcatttaatgaacacagtagcacaggttttgactgtgcgtcaggcataccactgagggcaagtgcaccctgatcctctttgtgtgtatatgttacttctaagtttccactctctgtagcggcccaaacttttattgtttgatccaaagagcaagataatagaaatt

SEQ ID NO: 286365 - DNA, 145 bp, Zea mays
aggcagaattaagattgtttctccttgaaatacgaaggggggttattttagggcggagtacatcacaacgaacatgttcacaataaccttttgccacatgagagaacaggtagcacagtcaaagcccgccaaaaatcacaaccgc

SEQ ID NO: 286366 - DNA, 479 bp, Zea mays
tttgatgtgggggcaaactttgcgggtttaaccacagtaatgtcttgattggtagggccaaagggtattgtttgtgcctttgaagctagcccccgcattattgataaaacccaacgcaatttagtattgagtggctgtaataatgtccagctttttcaccatgcggtttactccacttcccatgaaactgtaaaaatttacctgggcagccatctcaatgacagtatttacagtgaaaatggagaaggctccagctatgaagtcaaaaccattgctctagatgactttgtggaacacaccaagctggtgccaaatttactaaaaatggacattgaaggagcagaatttgatgccattaaaggtctggaaaaaacgttagtttctgccaaaccccatttagttttagaaacccagcgggatgatactcgatgtttggattttctgcgcaatttgggctacgttgccattcgacgttaata

SEQ ID NO: 286367 - DNA, 416 bp, Zea mays
gactagagaaagcagtcaatctcgtttcaactttgatcggaatgaagtgtcttatctacaatggtttgctgcggtactccagcaacagctggacaaatcaaaactaaactggggggttctatttttttttctttatactgccatttgtatatatagctatggttgccgctaagctagctggccaatccaggaaccagccagagatgcacaattaaccgcggtgccaaagaagagttcccagaaccaaagatccaccgcgagaaccgaagagaagatgagcagggcgagcgtctcgtatctattcaaaggccagcctgaagcctcagccagcgtcttcaacaaggggagggattcgctgtctatctcccggcttcttattgaccacgcggtgacccactgcacatcggccgggacca

SEQ ID NO: 286368 - DNA, 511 bp, Zea mays
  unsure (1)..(511): unsure at all n locations
cagtgctatacgaggctanatcttgatggggctgacctcaaaggaactaggctattctacggcacctgggaccaggctagtccccgcagccgcaaccaaaattccaactacgaaaccggcgaatatacgggcgcagtggtggaaaatgccaattttagtaagactaagaacatgagtgaggagcagaggtgctattgctgtgcctggggaggaacgttaaccagaaaaactatccccggcggctgtgaaggaatcgaaaatcgtcttgatcgatgaatgattgaaagagcaaaaaggttaggtagagaattaatgaaacaattttcaacctgttagcttctcctacgaatgaagggaatgatcgcctttgttatttgttgcggtttgtcgcagtagggccaaggagttgatgtacaaaatacagccccccagggcccataccccttcggcaaagacattaatgcggtgggtcatttcccggctgtaaaggtaatctgccctagcgggggaa

SEQ ID NO: 286369 - DNA, 490 bp, Zea mays
tctggggagggttgacagggttaaccccccactctcaacaggcaataactttcagtttttttcatgggttaaccacaaaaaaacaagaatatttcgaccaattacttgccggcttaatcttttcttaattctatcttaatttcgacttaatcaactgattaactccccttaaaataagtcaaaaaacggctatggttaaccaaaagttaatcgacttttttgggaaattatgcattgaaaataaaaaaaatttcgtgttttaaattaacaaaatgcaactaatattgttagctagaacggaccagtaaggtttctggctttattgacagcaaacggcccgtcttaccctagggttttgccgtttttttaggtcgataattatgccaatggaaaccccatcagcgaacaagggctgactgtttcaactgcactacaatttagattgcaaattcctatgcttagttcactgcaaaaagttgctaccttctcc

SEQ ID NO: 286370 - DNA, 775 bp, Zea mays
  unsure (1)..(775): unsure at all n locations
ttttgccctaaccagaccaagaaaccatgactgtttccccttcctacgacgcaatagtaatcggctccggcattgggggattggtcaccgccacccagttggtatccaagggtttgaaagtattggtactagagcgttacctcatccccggcggcagtgctggttattttgagcgggaaggttatcgctttgatgtgggggcctcaatgatttttggtttcggcgatcggggtactactaacttattaaccagggccttagccgctgtgggacaggcattggaaactctccccgacccagtgcaaattcattaccatttgccgggggggctagaccccaaagttcatcgggagtacgaagcttttttacaggagttaatcgccaaatttcctcaggaagcccagggtatccgccgcttctatgatgaatgttggcaagtatttaactgcctcaacaccatggaattgctctccctggaggaaccccgttacctgatgcgggtattttttcagcatccgggggcatgtctgggtttagtgaaatatttaccccaaaatgtgggggacattgcccgccgccatatccaagacccggatttactgaaatttatcgatatggaatgctattggctggtccgtagtgccggcggacttaacccccatgatcaatgccggcatggtcttttccgatcgccattacggnggcattaactatcccaaggggggcgtgggacaaattgccgaagttctagtagctgggctagaaaatttcggtg

SEQ ID NO: 286371 - DNA, 527 bp, Zea mays
ctaagcgtagatttttactctatgtttggatgttagtgcagaaacaaaataatgattcctaacttttctaattctgtaataaatctaaacgtttacgcaatgactaaaattcatttataaggataaaccttgcttttagcttctttctattggcttttctctattgttaatctccactaacccctacttattccttctccgccagtgcccagggccgctctgcatccccattagcccaaaccccagctttattggaaatcgcctcctgctccaggaattcatactgttctgcattctcaggccatgacctcttatggccttcataagtagtgggccatacctgccaaaaccatttccccattaactcccacctcaagtcctggcgtgtcagtcattgcaaaaacttccaccacactgcgcccatattgggtctttttcggcacccatcagaatgattttccgattatccgtcagcattccccggagataatcacgggattcaatgcccccggcttgcttaatttctg

SEQ ID NO: 286372 - DNA, 477 bp, Zea mays
cgctgaccgtggtaaacataaatttagttattacttttatccccatcaaggaaattggcaatcggcataaacggtagccgtgggttatggtatccatcgtcctttgcggacctattttcctgaaaatttcaaccccttatcaagtcaaaaattattatctccgggagagccctggttaaaccttggcagcgataatctttgtttaatggctctgaagttaagggaagattatcctgatcaatgggtattgcgatgttacgaaatgtcaggagaatcagcccaattagaagtaatcacagcttttgaccatagggttaaaacaaggctaaatttgttggaggaagcccaaccagaggaaaataataaccatgttaatccctggcaaattgttagcgtctgcttagcctaccactaaaacttttcccctttccggtcaaagtgtggccattaacttacaaagaaaaattttccaaaagc

SEQ ID NO: 286373 - DNA, 507 bp, Zea mays
taccgatttaagaaaccggctccgccccctgggtggttcctgtaagattgccaaaaatacccttgtccgtagggcactggcaggacaagaagcctggtctcccatggaagaatttctgacgggaaccaccgctattcttgtcttgaaagaagacctgggcggcgcaattaaggcttacaaaaaattccagaaagataccaaaaaaaccgaactacggggtggggtattagaaggaaaaagcctaacccaagctgacgtggaggcgatcggtgatttgccttccaaagagcaacttatgggtcaaattgccggcggcatcaatgccctggctaccaagattgccctgggcatcaaagaagttccagcttccgtggcccgtggtctccaagcccatgtggacaaagaataggggttgttttcaccctgttcaccccaaagtcatttgtttttggtttgtctaatcagatttaacctacttacctataggagtcatttctatgtccgctg

SEQ ID NO: 286374 - DNA, 734 bp, Zea mays
ccggatagttttcgcttgatgttccgtcgttcccgttgtgtggtctgtgagcaatgtattccttcctgcctcgtccaggcgatcgccactaatttctaacatctttgccgactccgccaacggtgagttatccccatggaatcccccatccaagcccaaccccccctggactttttagcgcccaatctccagccctggttactccggctcgggccgctgattttgccctggtggatccgttctcaaacggcgatcgccaaaattgaagccgaaaatttgcaggttctagctcaggcctacggggactttagccaaggctaaaaccgtttactcctggcttttcgtcaccccagcatcaacgatccgttatgtatggggtttttattttggaatttattaccgccagctctgaaaaaaggtgctctccaaccgccaccggtgagccactcccactttatgtatgaccggggcattcccctctggggaggagattttctacagtggctatttccccgtttagggggcacttccattcagcgggggaaattagaccgccctggcttacggtctgctcgggatttaatgctcaacggccaatatcccctggccgccgccccagaaggagccaccaacggccataacgaactcatttctcccctggaaccgggcattgcccaactggatttttggtgtgcggaggatttacgcaaagcccaaagaccggagcaaacact

SEQ ID NO: 286375 - DNA, 455 bp, Zea mays
aattggcgtgccaacaacatctattgtcccaaaattacgacataaatcagagttgggtattttaagttgaggaacttgaatcggagtggaatcaatatgaaaagttatacaccatttaactttaatttttaattttctatgttcatctctatcttcttctttttctcccaaatcataaaataaattgtcgtaaaaatagtctatatttattttattaaattctttaccaataatactttgtgaatatggaaaataagattccataagatttggaatatccacttgaatttctttgaaaaagatttctacttgttcaagaatataagtcctggcattttttctttgcgcctcattttggaaagtaatcaaaggaatataattgctttttaagtcttcattttcgaataaaataatttctttttttttaactgaagcatgagcattttttttttcga

SEQ ID NO: 286376 - DNA, 499 bp, Zea mays
gaacctaattccggaggattacggcatgatgacccattatctgatggaaatatttccctatccggttttaggactggaagggggctaccatttgccgagcttggccaaatccgtggtggaaaccctcaagcctttattgttctaagggagtttgaccccggcaaggtttggaatccgtggggcgagttttgctctatcctcctttgggtctgtggaagacttttattctttttttcctaaacttcagggagatttttgacaacagagaatagctagagttttttccgttgggactctccccagtaacccatcaacttataggctagtttagcggtagaaaattccgacaccaccgagcctcgcactggggccagttccatcaagtcgcaaccaattacttgcttggtttgaaaaagacggcggaaaaaatttaacccttcataccgacctagcccccccggttcaggggtgccgactcccggcataaaccgcgggtcct

SEQ ID NO: 286377 - DNA, 488 bp, Zea mays
acctagtagttggagagctgaggtagaagggttggaagcgttacctccctttgcactacctttccgagatggtagccatccgatagcaccggttacgttagctccccgacaacatcgtctccgaacctgggtctactcgctttcactaccttctggtttctggtcatggtcatagcttagtcgagatactaggggtcacgccactggcatagtgagcaaccaccccttcaagggtggcaatcctgccatcgtgcatgtacccctttctgttgtcaccccttttaaagctccaaaagcggatttttcaagcatccagatgttcctatgataagggtcaaattattgaggagccggatgaagctaacgtttcatgtctggttttgaagacaagcggctcctgtgaaggcgtcgcttagtctaacttttctggtgtgaccacaggttagagctttctcccctgttcagtttttcggagccacctcacaagg

SEQ ID NO: 286378 - DNA, 627 bp, Zea mays
  unsure (1)..(627): unsure at all n locations
ggggggggangacgatggaagacctagtcaaagctggcattgaggtggaagtggtactgtttattacagcgggcattgctgcccctgcctacgctcaaattcccctcacccatcgggcttacagttcctccgtcacctttgtcacgggccatgaatcggcgggaaaatatcggcctgaagtcaattgggcggcgatcgccaagggctcggaaaccattgtgatttatatgggggtgtacagtttggccaccattttgccccagttaatgctggcggggttgggggaagatactcccattgccctaattcgttggggaacctgtccagaacaacagaaactagttggcacttttgccaccattttggcccagattgaagtagaaaatttttaagccccggcgatcgtggtcatcggggcagtggttaattatccggctaatctccgtcagcaattggcacctatactgggcggtgtcaattaaaaattctgtgctaccaagatggctcttttaagggctttattatgtacccatccagtaaagccagaaaattgacatttgccgggtacatctgcaataaaaatatgcctaacacccacaggattgactcactctcgcagggtaatac

SEQ ID NO: 286379 - DNA, 679 bp, Zea mays
agagttgccccacaaatttgaagcggggaccccggccattgccgaggcgatcgccttatgtagcggcagtggattatttaaccgacttagggatggaaaatattcataactatgaagtggaattaacccattacctctggcaaggcttggggcaaattccccaactgcgactttacggccccaatcccaaacacggcgatcgggccgctttagcgtcctttaacgtggcgggactccacgccagcgacgtggccaccatggtggatcaagacggtatcgccatccgttccgggcaccattgcacccaaccgttgcaccgattgtttgacgcttccggcagtgctagggccagtctgtatttctacaacaccaaagaagaaattgacctatttttacaatctttgcaagcaaccattcgcttctttagtgatgacgactttaccgtttaactgcctcagcaaacctaattttgaggtaatcatcctccatttttgctccagcgggacttagggccgccaaagcctggggcagaaccaagttgcggcgatggttaccgatacgaacatttaactcatcgccagttttatttagttgaatttgctctttgggaatacctggtaaataaagttctaaactgtaatcattgttgctgccctgaacaatgttaatggtgttttcc

SEQ ID NO: 286380 - DNA, 505 bp, Zea mays
tgcaaagtaatgttcagcattgcccggggggaattggaacaggcccagtccaggttacgggcggccaaggaaaaccgagaactggcggaatataaccaccgcatcaccatttcccgccgagcggaggaagaaaatcaggtggccattaatgtggccaatcaaaaattagaccgggagttcaagttggcccagctccgggagcaattatccgctgtggaggaaaagctcaatggcattgttcaaatcaaaagtccttactctggcactattcgccgcattaagtttgaccgccaaaccgacggtaagctggccgttaccctctacctcgacactactaacccaaatccctagtgccgagattgaagaaccagaactgcgggaaccggaagaggacgataccccggagttgatggaagacccccagggacaatctaatcctttcctggcccccgaactggatgagttggtggacaacaaaattagcgaggacgtttggcaacaaatg

SEQ ID NO: 286381 - DNA, 264 bp, Zea mays
cccttaatgctctgcccacaggagccctggaagtgctttgattatcctgacccgtattatcaatgcccaaaatattgacgttattagcggaactagcagcagtatcggtggcacgtccttccactgttctggcataaactacttcccctgtgctgctgtcaaccacccgcaggtctatggcaacataggcttcttgcttggcctgacgctcgctgttcccaatactaaaaagacccaggttaagtccaaagttgttacccccag

SEQ ID NO: 286382 - DNA, 554 bp, Zea mays
aagtagaccggaccctccgttcccgggttgacctccccaccaatgccccggaattgattgcccgtttacgggactccaacattcgccttgattcccaccctgtccgcaacaatggcatggtttggggttttgtgggcaacttgattttccccgtgcttttgattgcttccctcttttttctcttccgccgttccagcaacatgcctgggggccccggccaagccatgaactttggtaaatccaaagctcgcttccaaatggatgccaaaaccggtgtcatgttcgatgatgtggccggtattgacgaagccaaggaagaattgcaagaggtggtaactttccttaaacagcccgaacgctttactgcagtgggggccaagattcccaaaggagtactcttagtgggccctcccggtaccggtagaactctcctcgccaaggcgatcgccggggaagccggagttcctttcttcagcatttctggttccgagttcgtagaaatgtttgtcggcgttggtgcctcccgggtgcgggacttgtttaaaaagccaaag

SEQ ID NO: 286383 - DNA, 541 bp, Zea mays
tcttattgggtatggcaaatggcgacagttcagtgtgtttgagtgttttttgtcagtcaagcagtttgcttatgttacaaacggcgatggagaagttgggtaaacttgatgaggatgcggtttgtatttatgtgttggatgaaaatacggtgcaacgcacgattacctacgggactccccaaccagaaaaacctggtagtattattatctaagaagtcattcttcaaattttggcatacctatagcgagggccttttccctgggggggttgccaaattgcttctgaaccttgaaaaatcaatactttcacgcattcagactgcgtactattttgaaggtctggctgattttggaaagatattctggaaggtttgccaaagtctgctttcctccactttccccgtaaggggtcggaggggcggtctttccttctactaatcccggcgatcgggactgaaacgattgttgtgcccctggcggtcgctttaatgcctctttcttttactatcccggcgatcgggactgaaactaatcctaatta

SEQ ID NO: 286384 - DNA, 635 bp, Zea mays
ctttattaatttcggcaacacgactctctaaattttgttgttccgcttgtaaatttttaatttcggcttcgatgctttcccgctttgcctgccgaatctctaactccccagcaattttttctgattggctccggcgttcttctaatcgagtgatatctttatcaattatttttttctgttcttgtaactcagaaagcgtattgttaatttttgttttgctaagctcctgttctgctaagagcaaaatttccctttctttttttgtcgctaaacttgctgttgccgccccgctgactcctgcggtaaatcccattattccagattgaagcggttgaatttttgcggctattcctactaatgcgacaattatccctgctgcaagaggaataacgttcgtcaaggtaggcgatgacaattgccgggggctgtccataatttaaaaaattgttgctatactagggaacacgaacaataaagcaaaaaagtatggtttatttacctaaaataaatcgataatagggtaaaagtaaatgaccatctattactgcactgcgtttgaacataactccatccttttttgtttaatatagaataaaaatattttaatcaaaaaaacaatccaagcaattcagtaa

SEQ ID NO: 286385 - DNA, 477 bp, Zea mays
ttggctgatggcggctaaagctttcttccccccttccgtcgcaatcgagggaatctcaggatgatccacaaaccagggccaaaaatcttgaccatcttccggtggtttgaccccatgctattcggcgatcgccaaaatgatccggcggggaattgttggcagatagggcacgtcccctatgcctgtcggtgctagatactgccctgaccgcttgcccgtcttgtcttcaccaaagatttttacctgccatacgttcccattctcagaccggaaaatggcggcctgcctgtcttccttggcttgatgtccaaagcgggtaaattttcaccccagggcatcggggatcggcgttgccaagacttccttggtgatggggtctatctcaagattcggcacaatctccacgttggcccggaatacgtcaggggcgatcgccgaatcttctacaaattctgaccgtatttttggggcattttt

SEQ ID NO: 286386 - DNA, 387 bp, Zea mays
ggggatttggttaaatcgagattttcaccatcgatgactacttcttggcaggggggaaagaagttacgctctggtttggccttgagcacatcaaacaacactttgccaaaatcaatggcctgggaaattttcttgggcggcttacgctgttgcaacagggctagctttttgcccaaatcctccaactccagaggatggtccatattcatggcccaacagatgcgctccactgtgcccatcaaattcaccgccaccgggaaaggggagcctttgacattctcaaataacagccctgggccaccggcctgtagcatccggttagagatttccgccacttccaaatcgggatccacctcagcggtaatgcggcgcaactgcccccgtgtt

SEQ ID NO: 286387 - DNA, 455 bp, Zea mays
gcgctgcagaattatcgccaatccgtggaagcaggattatttaaaattctctccaaaatgggcatttccctgctggcttcctaccacggtgcccaaatcttcgaggcgatcggtttaggggcggaattggtggaatatgcctttgctggaactaccagtcgggtgggcggcttgaccatcgctgatgtggccggggaagtaatggttgtccatggcatggccttcccggaaatggctaagaagttagagaactttggctttgtcaactaccgtgccggcggagaatatcacatgaactcgccggagatgtccaagtctctccataaggcagtggcagcctacaaagtgggcggtaatggtaacaatggggaagcctatgaccattacgagttgtaccgccaatatctcaaagaccgtactgtcactgccctgcgggatttgctcgatttcaatgc

SEQ ID NO: 286388 - DNA, 357 bp, Zea mays
ttgccccggacaatggtaagtgacttccccaccccgttccgtgcgccacaattccgctgggggatatgccgggtcgaacttcagatatttggtttgggagccagtgcccagggtgtagaccgggggatgctccaacaacattagtccgtcctcccgttggcgatcgcgctgtttggctctgacccatcgccgctgatattgccaagcttggcagtagggcacaagtccgaacgataataaacgacaggaaggattggccatggcgctacaaaggaaacggaatcaaactaaagttcaaagttggcagaaattaagaaacgtaaagagatgcaaaggaaagtcaaaatcacctgaccg

SEQ ID NO: 286389 - DNA, 407 bp, Zea mays
cggacttgccttcgattgccgcttcggtaagcacccgagtggcttcttggaaggaagccgcactgaggaaactatcggtattcaagggagctttggtgataccaagcaatacaggagtatagcgggccggagcactaccagtgatgcccatggcttcattaacctgttccacttggcgtaattccaccaattcccctgggagcatggtggtgtctcccccatcatcaatgcggactttggcggtcatctgccgcacaattacctcaatgtgtttgtcagaaatatccaccccttgggattgataaaccgtttgcacttgattgacgaggaatttttgcgccggttgcaaccctctcagggccgcttggtaacaaccgtccttgttcacgtagtagctgaagaacaca

SEQ ID NO: 286390 - DNA, 531 bp, Zea mays
gccgatgtcccggtggtggtacactgaccacggaaatttttaggaatatgctctacgaaaccccctttggggaagtaggcacttctttggagggcggggaatcagtggtgttgggcgaagtccattacatcagcgaccggggtcggggcactgtgtgggaagagtcaatcatttattgtcccagcaccattcaactggtgggtttgtccgccaccattggcaacccggaacagttgaccgaatggattaatcaagtccgcactggggtttccctgaaagtattacgccagggagagcaacgtaatgattcccccccctgtgtgctggtcaattccgatttccgtcctgtgcccctcacctttcactacagcacccgcaaaggtttatttcccctgttgaatgagaaaaaaacgggagttaatactcgcctattgcccaaggctgggaataaaaatacccgttctggtaaaaatcgccgcatgcgccgggaggattgtccctatcccctgttggtgatgcaacagctacagg

SEQ ID NO: 286391 - DNA, 580 bp, Zea mays
atctcgaaaaaaaacaaatcttattcataaacaaaatgggtaaggacacggaccatcatgaacaacccacatcccagattcaatgaacaagtcacctgggaagtctatgatcctgcaactgttctgactgttggtgtttctgacaatggccaacttggagagaagactggggagaagacatctagtggcaaagatgggaagataggcaaggttcggatacgcctttccacactcgaaactggtcgtgtgtacacccactcgtatcctcttctggttctacattcgtcgggggtcaaaaagatgggcgaactgcacctggcaattcgattttcctcaacatctctggtaaacatgttgtacctgtactctaggcccttgcttccaaaaatgcactatgtgcgcccaatacctgtgcttcaggttgatatgctacgccatcaagctgtccagattgtggctgcccgacttagccggatggagccacctttgagaaaggaagttgttgaatacatgacagattttgattctcacttgtggagcatgaggaaaagcaaagccaacttcttcagactcatgacag

SEQ ID NO: 286392 - DNA, 513 bp, Zea mays
cggacgcgtgggaaaaaaaaaaaaaaaaaaaaaaaaaaaaaaaaacggacgcgtggcttctctgtttggccaacagtcaatagattcatttcagatatacaaagtgcttcaaggattgtgctgcaccgcactgtactgaagaccacaaaaaaaatgggctgcaaaattgtgtacaattactatccactcattctacaaaaccatctgagattttttaccaagctactctaccaaaatccgttgggttccttcccatctaaatgacctagcctttgcacccattgtgaccctcaattttgtacaaacagtgtatctcatgccttaattttcattactttactactgtctatgataactagtagatagcaaatctggaagcaagtaatggacagctgaacattgaatctttgccacgggtcattactgaagtaggccatcaccttcccaaccaagccgcagcatctgatccaccacctttaagctcaaagcgggatcagtaaagactataagctg

SEQ ID NO: 286393 - DNA, 406 bp, Zea mays
gcaggcaacaactttatttgttacaaatacgtcaatccacaaacaaggtaactcccaagcgtagcttggaatagcttgttcaagacatttgtaaccgacattcaaacaagcatactggtttgcacagaaagcttaggacatcttttcactcccagagaccaaaactaactctcaactactactacttatttgacctgtcaatcctctcgtgcgcgcgacgcagccaggaaaccctaccctccttagtcttcaacgtcgcaaacacatcgcgatagcgtttctcaatcaacagttgtgtagcaaagaagtgctcgtcgctgccttctgcattaccatcatcaatgacagtctttaattgactagctatgtcttcacggacagggtcactcttagttttgattgagct

SEQ ID NO: 286394 - DNA, 777 bp, Zea mays
cttgtcggaaaagagttcagatccaaactcaagttttcagatgcaaaatcgaatttacacgggcaaaaaataatgctccagcagcagcatcagtgctacaaacatgagtttacatttaccccatgtatttatttctacatgctcatcagtcgtcagcgcaagcaatcttgagatacttatcgagcgcttcgtccttggttatgtcagggtagtatccctgctcaacctcaagtccctggtctcctgcaatctgttccacgacggtctgaacttgataggcgctggcatggtctggatccagcaagcacgcaatctcggtgcagtcatctccatggaagagcgcgagggcctgcaccgtgggaaggcctccgctccgtccagtgacaccacgggtgatcctcctgacggtggcgacgtccttacacagcacggggacattgtagttctcgatccaaggcgtgacacccaccgtcgtagcgcctctcttgtgcgagacgacgtgggccggaccgacgtcaggcttcaccggcaggacgttggggagcacgctgcctgaccactggttgcccctgtagtttgggcggtagtagccgagctcacgccggaccgcgcccaccgacttccccgccgggtgggctgctgcgtacaggaacactgggactgctgcgatgcaggcaatgtcagacgctacctgcctagccagagaagcggcgtcctcgatcgtcgcttggcccacggggtggaaggacaggtcgtcgactacgccgatcctcggat

SEQ ID NO: 286395 - DNA, 323 bp, Zea mays
attaacacaatgtatcataaaaagtcgctgttgagaccgactttaaaaaagcgttttgcagacatacacccaggcctatgtcaaccaaattgttccatcatagtactactagcaattcgacggaagccttgtgcattttgcagactgggagacgagttctatggtttcatctgatattcagattgttcagtactacttctactacgaattcggttgctctccagtcgcccccaccgaaaagcaatgaaacctgtgaggcagtagacatcatgcggggcacatacaggcatgcctgtcacattctcacttcagcttccccaacg

SEQ ID NO: 286396 - DNA, 358 bp, Zea mays
gattcattgtaggctattgaatggtagaacctatcgtttcaagccgatcagatctttaagcagttattacaggtaagtcagccagcaaaggcgtcaaacgaattcgctcttgccaatcaaaattccccgagggtttaacagtcaaccggtgctcgtacagcaatatacagaatgcaatataacaggttgacaacattactaagctacgaaatcatggtgtatatgctcaggtggtttcaatcgggggagaggtaacccaacttctacattccttaaccaccacaacactggcttctacaacaccactaccgccgtgtcatgctggaacagttaaccatgtcataaatccttttgccag

SEQ ID NO: 286397 - DNA, 410 bp, Zea mays
gagtccgaaactgaaaatttataacatgttcgataatataaaatcaatatatctttgatcttgggcctcggacaataaaacaagcaaatataagaatatactgagaaaaaaagaacatgtacatcacttagtgttacacatatattgtattgcaaaacaaagggggtcgtattctgaattacattgcgatatggcagttcaacacattcactatagctgtttgatgatatggtgtccctcgtaccaaaagcatacctgtagccaaatctcatcatgagaaatcatcatcttctcctggaatggttggcagaccctagtgacccttcaaatagatcagacaggtgattctccaaatcctatggagtgtattttatgtattttccagaattccttccactatcaactagact

SEQ ID NO: 286398 - DNA, 349 bp, Zea mays
gaacctctcactgcccaaagtcggttagtaacaccatgtcaggttctatacaaaaaaaaaatcaatagaaagccttgacatgattcattgagcacaagcgtaagctaaactatctggagacccctcggtcaaaagtaaaaaagaatcggtgcgctacacgaactactaaatgactgcctcatatgcccccatattacaggatacaagcacatatgcgctacacgaactacatttcgaatatctcaaactgtgagtgtaactgccatggtatggtatggaacctgagtgaaaatgcaaggccgccatgctggtgacacgtgcaaaattgattcaaaacatatatacctgc

SEQ ID NO: 286399 - DNA, 477 bp, Zea mays
ttttttttttttttttttttttttttttttttgtgggttgaagctgtcccgtgcactgaaatcaggtactcaaagatgaaaccatcatcataggttatatatatatatatatataacgtccacacgcatcctctttctagttcttctaagactttccactaccctactaccacattcagcaacaacaagaaagaacatgtgcaagccctgaacacgctgaccactaggtgtagtttggctaaacaaactacttactatcctatagctattcccatatacagaagcggaagagaacgagtcgaaggcgattaagaaatgcgaaagcgattaggggaacatctcgaggccagctctcgtctgtcagagcccggacttgaacaggtcggtccgcgcacgtgggttccgtcagcaggcacgagaagaaaaaaaagcggtaacgagcagcgcggttaaacaactgctttagattagccccca

SEQ ID NO: 286400 - DNA, 297 bp, Zea mays
gatataacggtaacacagcatgacattgttaatctggcagcccagaagagaagggttaagaacaacaaactaacaaatctacaatttgggtgagacatagctgatatatgtacactaacttatgaggcgatccaggcacttcctatgttgctatggccaccgattttgatgacggggctacaagatacatacacaatagagagcctaagactttctacctgcttcttcagtcagcaaaaactttgggcttacggaccctttggctcctgctgctatttacagcgacaagcacagctt

SEQ ID NO: 286401 - DNA, 428 bp, Zea mays
gaaagaacatcagcaaacacccaaggcaaatacaaagatcagagaagctggagggttagttacaggagcatcaggttaccgagaatgcaaccatgcacggcaaaaggcgcctaccccgcatcaaaatttctgccagaaacaaacaagaaacgaaagaatcacacgcacactatctacatccagaaacgtgatgttatactagatagtcagcggcattcaggaagccctcgtactgggtaccgttgagggcgctgtagacctcgtcccagttctcgatctgctccgacagcggcttcgtgtgtatcttcacgtgccggctcaccagcttcctcctcggcactccgaggaaatccaggacatccaagagctttgttctgttgcggacgacgtcctcgtagtagacgctcatgtgccgggtgttgtttagg

SEQ ID NO: 286402 - DNA, 377 bp, Zea mays
cagacaaatcgatattttttttctctccaaaggccagatgatcggaacaccacttgtgatctcgctctatatactttgattcaatcaccacacgctataacaagactatggtatatgtacatatggacatatcacgcgtgttacagttacagcaaaagaatacctaaccattaacatctagcaaaacgtaggggagggcgggtgccagtaggaaggcagtctatctaggccatcaattacgtcaagatccctgccccggccgcgctgttgcacggggggggtcctgccgaactccgtcgccggggagctgccgtggctccggcacgggtcccagctcctgtgggccttgctccgtcggtggccaggcggaggctcgc

SEQ ID NO: 286403 - DNA, 287 bp, Zea mays
cacataatcagaaaagctacttttttcggctctagtcttttagtttattttatatcatcactttataaaatcagctcataagttcagcatagccacttctctctaattgacaaaactcatattagattcatagacaatcagctctagaaactgtgccaaaggaaacctaaaccacacaagtcaggacatagatgctttgagggccacacaaactacatcagtttacggttcgtcagtactcataatttgtatcaaaacaagcattcgaatctattagctgccctagc

SEQ ID NO: 286404 - DNA, 456 bp, Zea mays
tttttatattttttttttttttttttttttagcaagctcataaaagtctaaacaagggcattacaagtccatagagttcatacaagtccattaaaatgtcatacaagcccgtagaggccaaatgagtccattacgagtctatataattcatacgttacataacaagtccatagagtccaaaccaattcaacgtctcctagtcttacccttgcctaaagcgtcggtgcctggagtgtaacgttgtggagagcggtgtcgcctacgatcctgtggttgtaatggctgtgtcgaaggagccccctcaagctgtgaaggtcctatctcgtcgtgatcgtagtcgaagccagcaccaagacctgtggagggcgttgctgtgtcggtacacgatggtacatggacgtcatgtgcaacagtagtcctgcagccacagcgagcagcagctccacgtaggcgcct

SEQ ID NO: 286405 - DNA, 398 bp, Zea mays
cgaacgcctagaaagtaggggcgaacttttgcctttatttcggggctaacaaagcacgatgcgcgggtttgaacaaggacctcagatgcgcatttctacatgacactttacatggtgggtgttcactacaaacatggacaagatcagccagcggtcttgtcagtggtattcggattgagagatggtctttttttagtcctccaccacaaatgttatcccatcatgtttcttgaaatggtgtgtggtatgatcaacaacgttggtgttgctcagttccagattatagaaatcaacggcgtccgccttgaacaaaggcccggaatgccaggtccccttggtcagcttgagaaacttggggccagaaacccggaacacgcagacctcggctggatcaggag

SEQ ID NO: 286406 - DNA, 394 bp, Zea mays
tggactcgtgggcggacgcgtgggcgggccgggatccgcccaccgagccaccggagcaccagccaccagtgcaccaccatcgcagggagttagggacacacaccggctgccgcggcccgccatgtctcactgctgcccctgcgcgagtgcctcctcctccaccgcgcccttcttcctcccttctatccccgactcctcttcctgcaggagcggcagcgctggcgccttcagcgctgctgttggtcggagcaagctgcggtgcggcggcgggccgaggcgcgcgcaagcgacagtcgcggcaggcagcaaggacggcgggagcggcggcacggctggaggggagaagggagaagacgacgccccggcgttcaatccgttcgggttcgtgacggac

SEQ ID NO: 286407 - DNA, 566 bp, Zea mays
cggacgcgtgggcgcggtgcaggaaaaatggcggcttccgctctccacctccgcctccacccctcgccgccggcgggtgtgaagcttcagcagcggcaactgcgctcgaaaatacagaggcagggtggcctatctcgaagattttcaaaagttgtgtcctattacggtctcacaaccccgccatataaactggatgctctggaaccttatatgagcaagaggacagttgaacttcactggggtaagcaccatcaagattacgtggatggcttgaataatcagctggctaccagccctctgtatgtatatacactctggacgatctgataaaagaagcccacaacaatggtctcgaatcatcactttttctgggaatcgatgcaaccagaaggtggtggcttacctgagggaggtgtgctatagcagattgaaaaggattttggcttgtttactaattttagggaagagtttattcgttcagccttacaactattggggtatggttgggtttggcttgcttgtaagtttctttctattttctttgaagtacagacaccaccggttca

SEQ ID NO: 286408 - DNA, 450 bp, Zea mays
atcgactgccacgtgtggggcaaggccggcttcatcttctactacgaggaggcgcgcacggggcggcccgtggctgggacttcgtcgacgtgacggggatccagcagttcgtgatgagcttcgagcccggagctgcgctggaggacgacgcgcagtggcaggcacctgcatactgcttcccggacgacgacgacgccgcaaggagcagtggtgaggaggaagctggggatgggcttgaggcggcgaccagattactcaggaagctagcaggagctgcagcaacgcattgactgtgttgtgttgtagtaagaattactatgcgacatgtaccgtattaatttcgagcacaacagatatacttatgttcttgtagtactacctaattccctagtttcggaatgccgcgcctgttccccaaaaacacccctatgatccaaataatatatatat

SEQ ID NO: 286409 - DNA, 476 bp, Zea mays
gcggtcgcggcggcgatgcggatggtgtcccgcaggggcgccgtgcggctggtgctcgtgtcggccaccgcctgggccatgctcgggctcgtcgcgctcgccttccacctccggccatgcagctcccgcgtcgcattcctctcagctctttgcaaaaaggacagtaaagttctctcggtgttggactcgatggggctctcatccaaaccactccaccgctgcccgatacctgttgcggatgatccaaatgctgttgccatcccaaagaggactcccaacacaatcgtgaagaagttggcatatataaccgttgacaagcaggacaaagatccctcaccgctgtttggagggcgccaaaactggaaacagagggaggagagctttaaactgaactctaccatgaaggttcactgcggatttatgaaaaatagtggtgcagatatggatatcattgatgtcaagtacatacagaaatg

SEQ ID NO: 286410 - DNA, 337 bp, Zea mays
acacggatccagaggctacggactgcactgcatctgaagcagtcctccgtcccagggtgtcaaactcacagcgtgcaaatgtaggagtaagccaatagcaaccccctgcgatgaactaatcgaggccaggtgaatcgccgagaagatacaggtccagccgtcagtgattacggccctacccctaccgttgcgtggtatgagtgtactgagctgacatcaggtcgtggcctcttcgatgctctgcagcgacggccgccactgccgttgccctgcactggagctccggctgctgttggcctgacgcgccaactgatcaaggctggcgtccagggctgcc

SEQ ID NO: 286411 - DNA, 439 bp, Zea mays
ggctcgcacggtcttttatgggggattgtttgtatcggttggtgcagtagcattacttcatcagtcatcactcactggcactgcatgtagtagcagcaactgtatctaattggcaacgcctgctcctacacgccacaccacagtagtctgcacgggcgtttcagctgttgagcactagtagcacatatgtacctgttagctcctgcagatcacatcatgctagtctcccatcagccgttgagcactattagcattggtcgggcgtttcagcaaatcaagaacctctgtagaccacaccatcgtcggcgctattcctgttgcgccctgctccccagcgcctagctcccggtgcggcggcgtccctctccttgctcggcaccacgctccctagctcgacgccctaaatgaaatcaacccaacagttgcttctcctaaatat

SEQ ID NO: 286412 - DNA, 445 bp, Zea mays
  unsure (1)..(445): unsure at all n locations
aatatccatggcccatgaacggcgaagtttgtaaacatagccgtggcataaaacaggggggttgctacacataacataagccctctcacacttcatttacaagagccgtcgacaaaacttcgagaagctacacctagaccgcaaaaaaaaaaaaaaaaaaaaacccgaagcacgtgtccaacggtgatcacctatggaacactttgttttcttattcacactaagcttaaaacaaaaccgaagcacgtgtccaacggtgaccacctatggaacactttgttttcttattcacactaagcttatgtatgctggtgactgctctgccttgaggccttgtttgtatatttaatccacctgagtcacggggtggaatttagtttattttccacttcaatcaaaacaccaacctttactactgttgngaaaacctcaactgatgttgctc

SEQ ID NO: 286413 - DNA, 431 bp, Zea mays
tttttagcagagtaaaagttatctacagatgtattgaggaggcaactaaaccttgtatggagttgctttaaaaactacaaatgctcagttatgggatcccaatcctaaatctgcagctgtggggtcttccattttttttctctcacaagaggactacgcatcattatattaagaacaaaaataggccttataaggcaaaaacagtacaaaaaatggcctcctgacggcggccaaacacatgcatacacataaatgtccatgaaaaaccacactactacaaccagcagcaaacaagcactcccaggactaaggccaaagtctcctaatgtctgctgccccagccattccccacatatgagcatcttgatggatatgttgcaggacaaggttgctgtttggagaggcaccatcaatgtgtttccacagtcaca

SEQ ID NO: 286414 - DNA, 714 bp, Zea mays
aaatccaacaggtcgcctgaattaattgaatgccagtgtaaccaggttctaacatggagtttactcacactgatattactggggacgatcagcactacaccaggaaacatcatgctaagcataaccagtttttttgttttcaactaaacagacagctaccacacagttaggggaggattattagaggatttcttcatccttggtatgattcagtagtcagcacgcagggagactcccagttgtcaccttgaccacataacatgggcggatggatgtggtaacgacggcggggtcacacaatgtagccactggccaaggttctcgccattgaatccgcccgaaactgcttctggcgtttccgcgacatccatagaagttacttcggtctcatcagcgtccataggtacttcaaaagcccgtgtgcgctctggctcaacggcaacccagtcagatcttatagacacttgtggtggtctccaaggaactaaagccaagctgttcctacgttcaggagattcatcctccacctcgtgatagttcgcaaaagcatggtcctttagaccacgtatcaagtctgaactcactatgaatgaagaacttgagatgccacgaccaaatggtgcggaattatctactggtttgtataaaacaagtgccatgtcctcactaggcacatgatgtgttgttagaccttccatcatgaattccatactg

SEQ ID NO: 286415 - DNA, 448 bp, Zea mays
agtagtcgcttatggctacgtcataaacgaactgaatcttcaatctgcacggtcattttcaataaaatgccctgttcattacatggccaaccatctgttgttgacatcaacgatcctagataaatgcaatggacccttccaattgcaaattcacattggccctaccacgagaagcctctcgttttgggaaacaactcaacaagtcgatgccaacactggaagtggcaaaatgctatgtataaaggagattctgtactgtacaagattgggaatcactacggatccgtgtgttgttggcaacctcttggtccatagtgttcggagcttttcattaccctcctccggcataacgcgcaatagtggcctcggcaacccatgcacaatatatgattgttttgtgtcaagctttccattccaccgaccacacactggacaaggacaaccccat

SEQ ID NO: 286416 - DNA, 510 bp, Zea mays
tcgcgatttattttgacgcgtgggcggacgcgtgggttggacctggggaatctgtgaccgatgatcgtatattgggtgcccgcatgacaaaggccagccttgttcctccagttactaggaagtatgaagttatcgaggagtaccttattgtagcagatttggaggaagtacagcgaaaaatgagagttgctttacctgatgactattctgagaagttgctgtcacagaagaatggcaccgaaaacttggaacttccagaggttaaggattatcaaccccgaaaagtagcaggagatgaaattcttgagcaagaagtatatggcatagatccatacacacacaatctactgagtgacattatgcctgctgatcttgagttgtcacctaccgacaagcatatctttattgaggagttgcttctgaatacattgaataagcaagttaggcatttcactggttcgggaaatacccctatgacttacaaccttaggcctgtcattgaagagatcc

SEQ ID NO: 286417 - DNA, 435 bp, Zea mays
gctgacaataagaagtcctataatatgttacagcatccctagctcaaaccacaccgaacatagagatccttatgctattgcagtactctcctacggtcctatctagggttcaccctcacttcaaattatacagtctacatccgttcagtaggaatgattcatccaccagagatggacccacacaggcaactaggagttgctggtaagatcactgtcattatcaccagttgcgtcggcttccttcacttcttgaatcatcttaagtacttgccaggcggcgggtcgactttctggtgaggaccgaacgcagctcgtggctatgtccacgatcattgtgatgtgatcactgtccactccttcatcctctctcgctgactggacataggtttgaagattgcttgcgaccaagactgaatgctcaagcggtggctttcc

SEQ ID NO: 286418 - DNA, 638 bp, Zea mays
aaactccaaattccactctcattgtacacgagtgggtatttaagatttattataaagcaaatagatcgtactcaaaacataattcatgatacagctgcttgaaatacttgttcatttggatttgcaaacgctgtccgtagaaaaatttcaacgacggacaggaattcctcaggcctttcctcggggggcaagtgaccgcaactcttgatcgcctcaaaagttgctccaggtatagcgcgtgccacacgctcggcattccaggcaggaacgatgcggtcggtgtcgccggtcaccactagcactgggcatgagatctcagagagcctctttgaaactggtactcttgatgcagacacagaatctatgatcatggatacggtgtgttccagcagagctgtctcccaacccttggattttagaggctttgtgtagccttgtatgacatgatcagttactttgctcgggtcataccatgcattccggacgcccagtataccaaatttatccatcacccatcttaccagcaccacacccaacgatgaccgaagaaaagcaactacagctttaagacacaaagaccgaaccacgtctcgtattgctctgatcatcttgagccacgcgtccgcggacgctgttca

SEQ ID NO: 286419 - DNA, 416 bp, Zea mays
aaaattatgtcagaaatttactgcaaggcgcaaggaagcacacggttttatacagattataatgtaaaagcatgcgttcaagtttggaaatttcaattcacagacaagagcttcctatagattacacagatttttccccaggaaggtaggagggagaactgctgccaggttggtttttcttcttatggaacatgctcgtgatgtttggcagcatgaagctcctcctcagtagcgttctgctgttcctatgccccgtcgttcttctcagaagctttcccagctgaagtctgaggtacaggaggcgatccacttccaagttcttctgcccctgccgacggctgagcctctgcggttttcttctccttctcgcgccatctcttgagctcaccttctacagcctttttggctgcctcagc

SEQ ID NO: 286420 - DNA, 395 bp, Zea mays
tagcctccgcacctgggggaatcccgatgccctagttcgctaagaacacatattaaaaactgctggggtagctaaacaatccccaggtaatccccatcttagccaagccattgatattcacatcattcttactctattgcggcatattgccattagttggcgcatccccaaccgccatcatcatatccctgccctaatcgaactctgtggcgaccgcctacttgggatggacgcaaattaccaatggggtaaaaataacaaaaaacttacgattaaatgaggccgattccaatccatcttttggggcgatcagccaattaaagcaaatcccccaccaacgagggcaggggacaagctctatcacctaacagaggaattcgttaaccgaacttacc

SEQ ID NO: 286421 - DNA, 576 bp, Zea mays
atttttgcagcggggactgtaatccgttttgatacactggaaaactttatgggctggatagatagcccggaaagaaggcaactaatttacctagaagaaaatgctggttatcagtttgaaggtaaagttaatacggaaggttacagtcgttggctaaaacgcaagttgagcaaaccttcccctgtgtggaaaatcaatcttttggtgttgttggtgctttatcccactgtgatgggctttaacctattattccgtaaaccggattttatcgactttcccacctggatgctatttggtaatttttgtagcgtctctatcacgggttggtttgcggtaccttgggtcagtggcatttatcaacgctggctagaaggtcaaggcacaaaaaaagagcaagcactggctttagtaaccattattcttgccctgcttttactactgcaatttttccgggtaattttccaacaattggcctaaaaaataacgctacatttttggtaagatttgtaccaatttaatagcgggcaccgtccggtaactgacgaaattcctgcaaactacttgggcttcttcctg

SEQ ID NO: 286422 - DNA, 502 bp, Zea mays
ctaaaggtgcgggcggttaggggtaactcggaagaatcaaccggcagattcagcttagtgaacgtattggctagcacatccttggaaatatggcgggaagactgggaagccacccacaggcccagcccatactttctgccgtccgccgcaattctgtccaacgctttggaatggcccaactccttagcttcatcaatgaacaaaaccgtcctgagagtcgattcccctagtaaacggtggtgactcatcaactgggacgctaaagcatccccggcgatcgcctgcaattgggggggaagtttggcaagattccaacgggttaacctttcataggggggctgggtttttgttgaaaatgccgtactcaaacatggtggatagctttagtctcagcttttccgcttccttgtcttcctcggccatttcctccagcaaagcttccaagtcagaaaagttagggggtactttcaaccaactctggggggattcctgggagatgccc

SEQ ID NO: 286423 - DNA, 492 bp, Zea mays
ccatgaatttaccattgccgctttccaagtacgctatcatacttccgttggttctattcttattaccctagataacctgcgggaattcaataaaatgttagaccaagaaattttacaagaagcgagcaaaggttatctccgcaaagcagaccgatatattcgtcaaaaacgcaatgttgatatcaccaaatacacccaccgcattaaagcttatcgggttaaccaagccaaagcaaaaattcttacctggattattgactgggactttcataagcaatcatcggacgaaagttcctatgggagcggcactgctagggcgttaatgcaagaattggcagttgccttccttgatcatcccatcgccaagaatagtaggggaagattatttagacgccatcatgaccctcaactgggtcacggaaattttacacgcagccaaacccttctatagccacagtcaaattacccacaaaattatctaccatcacaact

SEQ ID NO: 286424 - DNA, 410 bp, Zea mays
cttgacctttggttaccctgaccgctgccattttcttcgtcccgattggttaatcattgccattgatggtcttcctgtgaatgtgccggaattaacccagacaattttggcggtttttcaccgtaccctgccccggcaacggtatcccctgtgttttgcccattggcaattgccgccccagtgcatcgattggcatcgtcaccccgcaaaaacagaaatttatttgcaagatttaccccattggcaagggcaactaaaaaccttattgcaccagagcctagcaattttgggcaatgacgctccccctcgcctgaatcaattgctcaaggccgctgaacccaagggagtgtatcaactacaaggtgccagttctctcacggaaacggtgctgggctatcccaaggctttta

SEQ ID NO: 286425 - DNA, 474 bp, Zea mays
gagctcggtacccggggatcaggattctttgttaggtcaggattgggaaacggcaacggatacagaggacagctttgatgaggttcggtctaacccccggtgcagaattcaaacaacgggcagttgcaatttatgagctttaccaaaatcagtaccagcggcgatttaagtggattcgtcctgatttatttacgccggaactggctgataatctagaacaggatgcgaaatctttaatcaatatcctgtgaaatttcaggccgttggaatgcggatgaagatggcaaactgcaatctttaattcgtttactaactgaagaacatccagacgagaaaattttgatttttacgcaatttgcggatacagcgagatatttggctcaggctttagaaacggcagggcttaccaatattggtttggcaacgggaaattaacagatagacccaacgatacttgcccagcgttttgtccga

SEQ ID NO: 286426 - DNA, 541 bp, Zea mays
aggagaggaaatatcaactaacatggcgacataacatcataatcaattacatatgcaggaccagtcatttatgctattggacattttgatccctttcaccaatcttcgtgctgccaagctaagagcgcgagagctgaaaaataaaaaggacacgaaaatcacacacgttcactgttggtcagacacgctactctgcattgtgcattcttgcaaagctagaggcttgcatctctctaggtcagcaaaatcaccctactaccgctactacagtcacgcacccttcttctgcagcttcaccaacagacatttaaaacctttttgctgggaagcttcagtgcaggataaagaactcaggacttgaggttatcactcagtttccttatcgacctgtcgacgaaaaggacatcatcgatccacgaaacaatgttgaaagccaagctctccaacacccttgagtagctctccaggatcgcttgcccaacatccttgttgaactggatctggctggtgtccagggtggtctgcgacaggccagggaagc

SEQ ID NO: 286427 - DNA, 365 bp, Zea mays
ggagctgtattttattatacttattggggttgctctaacgcctgtcccagcctcccatgctattcatcataatctatagactgcctcatgaattccggttaaaccttaagtttagacgttctttttctcgtcgttacagctaacgtgaccaaaactatgatcgtggagatccctagaacaaccaagaccaccatccaaggagggcaaatcccgacgctgcacattacgccgattccaacccttttgttctccaaaactgtctgtgctgccccaccatggattgctgagcttttagcatcagatgttcctgagtaaaaattttcttagcatggtcataaagttccatatcaagtctgttcaatgag

SEQ ID NO: 286428 - DNA, 491 bp, Zea mays
ttctttatattttctttttttttttttttttttaggggacggtgctgatcttttgattattgagtataattctctggctcaaccatagactcaaagtccctcaagcattacaaagattgcgcatatttacatcacgcggccaatagggggtatataaaaaaaacatacgatctaggccccacccaggaaaaaattgcatgagcacacaaaactggctatctacacgtacgcgaaaaagcaaaacttgcctagggtcagaccatttattggaagctatacagatgttactgccacaatacgtctctagcattcataaactgctagaccagccgtctccacaacttcattgctgggagcgcacaggaatgtcccgtgtaaacaaccaaagctccgaccgcaaattggaagtgtgctctcattcgcttgttaccaggaatggaagatggccactctgaggagatccatgattttccatggcttcagatttgaca

SEQ ID NO: 286429 - DNA, 339 bp, Zea mays
gtacgagcatggcaggatctatatatatgagtaaagatgttcactgacaacttgctagattttaattacatatacacgatcaacaaaacaaatctgcgcgaaggaccagagaagatctagctagatcttcctgcagaagctaagccctccaactgaagatacagacgacgaagctttacggccccgaaaggtcatatactactcgcatagcatcaagagcaatcagccttacaggttctcgcttctcccttaccagaatgactgctcatgatgctatgtttcccagctgcaccaccctagctagctagctcgcgatgattcttagacagctcgatgatc

SEQ ID NO: 286430 - DNA, 490 bp, Zea mays
caatccacaatccagtatgaaattaaaataactgaacaaggctttagtgtagtgtaatcaaaggccattctgccagctgcaccctgcagacagcgacgacccatcaaagattcttcccagacctgtcagtttacatttgctgacgcaaaagttgggggaaggccaggtcagcgcccaaaaccagtgagtgtctacgccgctggcccggtggccccaggattctagaatcaaagcagctaaacctaaaattaactcaacgttacacaactacaaccttctgccctataattctgcaatcaaagcaggtaaacctaaaattcctgtggtaccatcgatcctgaaaattgcaaggttccaataccccgacgtcaagagcagcccaaggtgtgctcaattcacccatagcattacagctgatctcgtaagactccagcttctacaggtttagcaatatgtccaaccaaggagtgcaggcacaatttccgaaccc

SEQ ID NO: 286431 - DNA, 439 bp, Zea mays
gcgtcttaagatataaagtgtatgtcgacatcataatcaaatactttgcggagtcataactttatagataatcaaagagctcaaaatactagaacttagacatctctgcactaatagtgggcgcaagcaataaacgaaatatcctaagtacacagccatgggggagttttttctcgctagtcttctcatccgcaggtcaatgtcacaagggatatcaaaattcaccagttagcaatggcatgaattccaataccatcacgggagcttgagcatcagagaagctatgtctgtcatgagagcaggactaacgcgagagtttccgggaaggatcagagctgaatctcctccctgtcactgttttgtgcaccattgctgaacggagaggcgctgccgttctgatgcaggctaccctctcgatatacagagttcaacatggcaa

SEQ ID NO: 286432 - DNA, 466 bp, Zea mays
acaccaactgaagcacgttgtacgtacaggttcttacagcactccttgtgtctactgtcaaatcctggctaaatgtagtaacacaaacgattcagcaatccagatttggaagctaataccaccagattgtaccaacatacaatattaagaccattgtttgcacctatatataaggatggaactgcgtcatggtcaggacatcagcgatgatggtgagcgtgggagagtttcaaggctgggcaacaaatagtaaggaagcaaccagcttgttcttttttgattgtgcagccttcatactgaagtttcggttccaccttggattcatgtgctgaacgcctgaaccccaagccacgaaagaatcttaacaatgcttcttagaagaagttggaaatatcagcaccaggcagaagatacgaccagctttctgttcttccagccaagataaaggatgccatctctctcctct

SEQ ID NO: 286433 - DNA, 647 bp, Zea mays
ggtcagagctgatttaacagctaccaagaaactgcatcgggtgcattactttaatcagatggaataagtctcgtcttaagatttacaaaataatatggtcagagctcgaatcaactgatataaatctaggaggtaattagcacaaggccagttacaaaagaaaaccagagatagattacatgtataacataaactgcttgctacttaagtacttgtctaccatcagcaataatccccaaagcatcagggttagctaaggtgccacaacggcataggatactgatacatgagatgcaaatatgcagattaaagctgttcctggggaagatcatcacgatgcttcattcagtcccaaaatgcacagttcattacttgtcattgtcaatccagaagggcagaacgatcaattactttctttatccatggaagaacttagacttcctgagccactgactgcatcgaagtcaaagtcaatctttcgacaaatgcctgggctcagctttaacgctttaagagatggcctcaaaggtgcatctgggcatgtggatgcaatgccagtaagtagaggctttgaatcaggtgtcttgcagcttccatgtaggcccaaatctgtcgcattctttccagtttctttttgtccaccaagg

SEQ ID NO: 286434 - DNA, 455 bp, Zea mays
aaaatgtaacaggttcagccgcattttatgccaccttttttagtgtcatccttttgaaaacaatgtacatatagatattgtaacaagcccgaggcatgattttttgttccaatttggagagagaagcattagcactgttctggagctttctatttcgaaaggaaacaaaccacgcctctggttcttctaaaaaaagggtaggaaaaatcacccaggggcaacaccaacaattctgtccactgcttgctcaactactagtctactaccggggccgggacccaggaatagcagagaagctcccactttcagacatgaaatagggattggaattgatccttgtaactagatcggcaagatgggggaaatgacccacattgagcttgaaagataggatcctcaggagaaatatgacacactcatcaaattgcttctcaatccggtcgatttccatctcg

SEQ ID NO: 286435 - DNA, 365 bp, Zea mays
aagaatggctcaggggcgcgcctttcaacattccagtcttaactcttacaagagtactacattattccttttttgatatactccctccggtctttttaaattggcaccgtttaattcaaaaatgactagcgggtgacaaatatttaagaacagaggtagtatgcagtaagtaacatgcccaaacctcgactccactacaccgcaagtccagtccctgaattacactagcagtctagcaccagctggattattccatagctgaatggcctcatggtgatccactttccacgacaactgagactgggaatagatttggcagcattggtctttccaagtcatatcaactagaattgggccagtctttg

SEQ ID NO: 286436 - DNA, 437 bp, Zea mays
ggacagcaccatgctggtgagttacttcctccatacgttcagacattcccatggctggaaaacgcaaattacattcaaacgattacttgcatcatgggggacataaatctcatctttctggccagggtttttggaagagcaaaagctactgcacccacagcgttactcaaatgtagaattaacaaatgattgataccgtaagccatttacctcatagctgtcggccaaccataggcgattgagataactaaggttggttaaaagctgggtcctccaacatcttcatccgggtaagcaagctctgtttattgcaaaagaatgctgcaagcttccaggatttaactgcggttggaaatgttctgggtagatccaggataccaatttgaacaaccaagaaaataggaactagcagaaaggcttcttgaaacatatagcac

SEQ ID NO: 286437 - DNA, 471 bp, Zea mays
ggcaaaatcatttttttcatttttttatggcatatacagggtgggattcccgttgtttttgtagatggcaaaagccatagacaaagataggttgacagaggaaaacattcatatctcagggattctaaaactataaaaaaaaaatctagccctttcttcaacagatattatctccagaaagatatcatatttaacttaggccatgttcaccttccacatgtgcaattgtgtcactgtatgacacattattgccaaagaatacaagtcatcactcagcatacaacagatggttggcctccaatgacaagaccggcaacaaaatgagaagtttagccctccatacttaagttaggatgatgactccagtgagactaaaatggatgaaaacaaatgctagcagactcatcctgaccgaatgttatgttcccaagtattccattaaatcatcatcatgcagcaagtcatcaatat

SEQ ID NO: 286438 - DNA, 446 bp, Zea mays
acagagaaattaaaccctcaagtccacatattgatctgagaatgaagatgtcccagggcctcacagttctaaattcttttttttttctttcaattttcatcaagcacatcatactctgcacttctccctccgcgacatacaacgccggagaagaacagaaaaacacaatcgcaaggagggggaaaaagaacttgactttgaacgcggcatagcagttttccaagaacctaggggctccatgcattggagaacaggtctacgcgtacacagaatgcaatgcaatataatggtccgactcatcattcacacgctcaacgcgctccgtctggtccatgatgacctggccctcggacacctccggagcgccggaggttgcacttgagcagcgcctccacgaagtagcaggtctcgtccttggtgttgccgtcggggacgtcgacgacgaa

SEQ ID NO: 286439 - DNA, 601 bp, Zea mays
gacaagcaccgtcactgagcatatatgttcaccagatattcagaccaacggtgacaggcaatcactgaaaacatagtcagtccatgcataccagatattcagatcaacaatgacaaacaattactgagagcctcgactccactataactgcaggacgcacggaatgcacaactgaaacatacggaccaacaggcagagtagcagcccaaaggatgacccgtctcatgcaaaaacagggagcttgataaacttatcgagaaggcaacaccggtgcccaagtcctggttgaaatacacagcagacattgaagtgccaaagaggggggtaaattaggcatcttccatagcccattaagcattaagctatgcaaaactgcaaaaggctaaactacaagaccaggggctcgggtctagaagcagttcatcaggggcgatcatcaaaacgacctcctcccctgctagggcgatcatatggcccaggcctgtccctgtaacttcccccataatagcgtgcaggtcctccaccaccataccgatcagcaacaccaccgggggggccatccttgacatagccaccacccttgccgcctttagggccatcc

SEQ ID NO: 286440 - DNA, 453 bp, Zea mays
cgcagcacaattcttctctctttataaagacatacattactttactatctgtatctagacatattgtacatctacataatataaatatctagaaggcgacacgtcatattatttagaattggaacagggtaatatctatttttaacaggtgcagggcagaacttttgccggctcttaaaaaaaaggaatccactcgtctaaaaacttagaacttaagaagccctagctcttggcatatgccgacaaacagagcacaaaaaaactgagagcaatacctccacttaacaacaattagaccagatcaaatcccaaaaaggatcgtacttgctggtttcagcaatctaatagatacaagtagctttgtgaatttaacaggaactctgaaccacggtaaccggggcttcagtagctgagattgcaagttagcgatgttcgatgctcaaagaacatcaa

SEQ ID NO: 286441 - DNA, 681 bp, Zea mays
agacactataatcatgccacattgaataactgggatactagagctccttgtcaggtgaacatacaatacaatacaagttacaaaatgcagggagtcagattaatggacatgatacacaagccatggccgaaacggtgtgtttttgttgcaatgccgggactcgggccacagttttggctgaacaaacttagcagcgctccaggcgcaaaaaagaccggttcagtgcagcttgttggcgacgtaaaggaggtggctgattttcgtcggggggtaattctgcaggagcttgaggttggaggtgaagtcgccggccaggaggcgcttccggacaaggatcagcatcgcgcagcatattctgagcaaggtttcctgggggccaccaggatcacttaatagtgtgtcccagatgtgaatggtgtcggcgaagttgaattcctgggtcagcagtaaggttatccatctgaatgcgtagaactggggattaacttccgtagttatttccagatgttgctggagttctccatcatactttgctacaagctgtgataacttggctagtgtacctcgaatgccaacagcactgttcggacgcgtgggggaacctttctccacaacacttgctttctgctgaagtctgcttgtatagggaagttgtatcatatatttttctcccacgtcggc

SEQ ID NO: 286442 - DNA, 287 bp, Zea mays
caccaggatcacttaatagtgtgtcccagatgtgaatggtgtcggcgaagttgaattcctgggtcagcagtaaggttatccatctgaatgcgtagaactggggattaacttccgtagttatttccagatgttgctggagttctccatcatactttgctacaagctgtgataacttggctagtgtacctcgaatgccaacagcactgttgtccagtttctggcagaagttgtctctgaacccactaagcaactcgacgaagcaaaagaatgaatcccttccgcgaatc

SEQ ID NO: 286443 - DNA, 397 bp, Zea mays
gtcatgtccttgagccgcctcttcttcttcttgttggcttgcctgagcgtgacgaccagggtctggtccacggcagcgctcgccctcctcttcttcaccatctccctgaacatctcgtaccggctcctcttgtcggcgcggaggaaggccatgaacgtcctgatggactcctccagtatgagcaggaactggaccgccgatatcagatcgtccttctcgtcatcctcgtctctgaactccggcacgaggagcagcttgggcgtggagttcttcatccgcgcgtacacctccggccgccggccgcactcgtacggctcgctctcgacgtagcggtgcagcagcacctggaactgctggaactcctgcgccacgcgcgccgggcagccccgcgccgcca

SEQ ID NO: 286444 - DNA, 352 bp, Zea mays
cgagatgtaatcagtctgatagatgtagtctgaacgtagtaggaaacacaatagctcagctactaacaagtgggcctgaacgtagtctgatacaataagtctgatacatggcacatgtctgcagtcacctgctgacaacacatggttgatacaactaacagatcctacacctcgtccatgcttagtggaaccgacttcctctttctgggagggattctttctatcaatacccttggaagtggctgcgcagacgatggctcttcatgtggtgtaccagggtctcgtataactttgccgaaatgcggggttctaggttcttgggtaaatttgtcgacgcgaggaaaccattttt

SEQ ID NO: 286445 - DNA, 381 bp, Zea mays
gcacacagatgtcatgaggagtatatccatacatgtgtggacaacaaacgactagataacaagggtgaaaaggaagaacgaaacctacaaaactgctggctgctgaaccagcctacgtaaaatcctcaacagatggcccagcgctcataatcaaccagtgttgctgtcagcataatactccagtatttacacaccccccagctcttcctccctctaccggtggtccgtatccagccagctcctcaggctgcacagcgcctccgtcgacaggcccttcttgcagctcctgggcctcgcgggcagctcctcctcctgctgttgctgcggtgtaaacggcgaccccatctccggcgcgaagcacaccacgacgaccgtcaggtt

SEQ ID NO: 286446 - DNA, 440 bp, Zea mays
gggacgagaattactttatggaatttttataagcaaaatcaacatatttaaacagaatcagcttatcatcctataaccgctcaaatatacacgaaacctcacaacattgcttctggttcaaactctcaacatttgcaacaccaacccaagcttaatcccatcagaaagtatagttatataaacatttgttagaagtggaaagaaccccaggatccatgaaattcaacacagcgcttaaatagatggtctacatcgccggccaatcagtctgcattgctccggaagcagggagcagagtacctgtcccttgacacggcaaagctcgccatctatgccacagccattgtgagtgtttgcaccaggtttaagcttaagtgacttcacctttacatattcgacgtaaggcaaagagagatggcgaccgaattgcctcgagccga

SEQ ID NO: 286447 - DNA, 463 bp, Zea mays
gaggttaatgaccagcggagcagcatgcaggtcgagctcatatcctccttactgaggagggacagagttgacaaaaagacagaggaagctacatttgtcagcacagataatttacggatgacagggagtgcgaggttccaagtgtttgatatgaatgatctcttgctcacaggagatctagatttatgcaatgccaatggagtcattgggaatcgaagaacagcagcaagaaatggaatatgaagtgtcagtcatccacatcatgcaatggcttcttgaagggaaagctgtccaatggctcggaatatgtacaacctatgatcgaggtttatgtcgctgggacctcctctggcacacctatcatattaacaaagacaattcagcttatatcacgaaggaagtctgaaatgaaactaaagcttgattccatccctgagaatgaaacaactgaacagcagaaaga

SEQ ID NO: 286448 - DNA, 329 bp, Zea mays
gagaaaaaaacaaggaagttgttcaaaagttctcacccaaaaactatatccaatatgtccataagcaagcttcaggctaacatgtccgacgaggtcttgtttggatactctcgtagtcatctctactaaggtgtattgaactatatatttttggaacagagaaagtcctacgtacaagagacgcgtcagcacgatagctccaccaatttctagcaggtcctaatgcctataggatagcacatttactgccctggctctgcgccatcctccggaactcatcattttccatttgagctttcttgaggctctccttgagcttctggatctcc

SEQ ID NO: 286449 - DNA, 440 bp, Zea mays
gtgctcgcgctacttttcggcctcctactctatatgcttccccggaagcggggggtcgacgacggcgaggaccaggacttgcacaacagggcccttcgcgccgccgcagttgctcaggacaaggagaaggtggttgcggagatgggcggcagggcgccagagatcgatgaggacctccacagccgccagctcgccgtctacgggcgcgagaccatgaagcgcctcttcggctccgacgtcctcgtctccggactgcagggactaggcgctgagatcgcaaaaaaccttgtccttgcgggtgtcaagtccgtaaccttgcatgatgatggcaaagttgagctatgggacttgtcaagcaactttttcctctcagagaaggatgttgggcaaaatcgcgctctagcttgtgttccaaagctacaagagcttaacaatgctgt

SEQ ID NO: 286450 - DNA, 435 bp, Zea mays
atctaagaacaatcaaataaataatttaattcggctgagcacaaagtaacatttgacccgattaataatccaacagtcaatgtttaccagtactttaaagagaagaacacagcactaccaaatgctgaagtaattcacacaaacagatcaaaagctagtcttacaaaaccatcggtagttacacagcttgatcggtcgacggactccacaaatgacacggtacgaagtctttgcggcaaatcatcagcattcagatccaggtcaatcgaccagtcagcgattctgttgctagaacctctcccacgccttctattgctgaagaagggtaacgagcaccaaaaaatacaaatactcgcatgcggcatgcaatcatacctttcctactctagatgcattagtgcagtatttcatgcaaaacatgaaccattaacttgc

SEQ ID NO: 286451 - DNA, 478 bp, Zea mays
aaggggcaaaggggcatcactgttaccagatcaaatatgctagtattattttcttaaagaaaggagcaacatttgctcttgggggacactgaactacaacacagtctatcaatcaaacttttgcatacccatgaaacagctttaagatttctctaaagcttaatccaggtcgctggccccattaaaacaaacgagggaccaattacatagctcttgtgggacactgaactacaacaaatacatgttgatcttcagatgtatcaggcccaagagcaaaaccccttccaactagatgaattagggcaggctgcttacaaagggatttaacaaataggcaaacgaactatcttaatccactagtactatttaaacaaatagagaactcaaaactacatgctctacgcactgagcttcagttttgggtctaaaagcgaagccccttgcacgttaatgaattaacggatgctgcatgtaaatg

SEQ ID NO: 286452 - DNA, 517 bp, Zea mays
agaagggtttatagtttggattatatgattggatgatcggatggttagtagtttggattggaagattggatcacatcgcgtagtccacctctcctctccagtttccacgagaaaaaaagtggatcctctttcccaccaagtccgggtttgtgaattcgggagtgctagaatcttgatcttccacaagagaatgtctccagaagcaatggataggcttctagaaaaagataaagtgccaaacccatgctatagagtatagactgagtttcaacattggaaggctcaactaaatataccagttccggatacacactacaggacaaaggtgcacagcacccgatagcgcgctgccttttttagtgtagaactagaaaaccaacgcacaacacaaaccagagagttctccatggacgtcggtggcggcgccaccggcacacgctgccgagaccccaccgctgacccctcgtcccagttcttcgttgacgctggccatccatacgcagtcgctgcagccact

SEQ ID NO: 286453 - DNA, 470 bp, Zea mays
gtggatatgatagagggaaaatgtgaggttagaaagaagaacgatcttgcaagttcagaccttccagtgatgtttgaacatgtatttttctgtgaacttatatatgaccgtgccagtggagctctcaagcagttgcctccaaatgttaggtttatgtctatggtgcaaaggacaagtgcgttgaaaaagaacaaaggaaagcagatctgtgagcctgatcaaatagattcaggtaaatggttggatgtgcctaaagagaaccgtctagctactcttgacatttttgctggctgtggaggtttatcagaagggctgcagcaagctggtgtatcttttacaaaatgggcgattgaatacgaagagcctgctggtgaagcatttaataaaaatcatccagaggctgtggtctgtgtagataactgcaatgtgattctaaaggcgattatggataaatgtggggatactgatga

SEQ ID NO: 286454 - DNA, 481 bp, Zea mays
  unsure (1)..(481): unsure at all n locations
cccacgcgtccgcccacgcgtccggccgatctgcccggccaaggattgttgagctcgccgcgggctaggtttccttccgtccaccatgacggggccaggctcagctccgacccaaacaccccctccagaacccaagcataacgcccgccgccccgtcctcctcctggggccgccactcctagccgtcgccgttgccctcctcttgggcgtatccaacaacccgttgccccgccgcttcatccgccttctctttggaacaaggccctccattctccgctcctcgccacctcctgacgcagcttacgaagcaaccggcgcggtacgcacaccatgtgttctatggatggccccattcgcctccggcggcgggtactgctccgaggcatggtcctacgtctccgcgcttgacgcgcacgccgccgncgntggcgctgggaaaaataatttctcgctcgcaatagcgcaccacggcgatctcgac

SEQ ID NO: 286455 - DNA, 413 bp, Zea mays
cccactcgtccgaaatcctgtgcaagctaatgggtgaatggagattaatggatgaactgtttgtgttacgtgctatttatttgctaggatcaggtgacatgttgcagcagtttctgataacaatttttgataagcttgatagagggaatttctgggatgacgactttgagttgaataatttattgcaggaatccataagaaactcagctgacaaaatgctcctgacagcaccagattctttggttgtttcattagcaaaatatgacacacacaatggtgaggaaggtctatcaacttccaaaaaaggtcgtgcacttggttttggcattgatgcccttgacatgctgaattttacatataaggtgtcttggcctcttgatctaattattaatacagtggcactgaagaagtat

SEQ ID NO: 286456 - DNA, 434 bp, Zea mays
cccccaagtataaaccaaggaacaagggtattattaagggggtttacataccatcgtcactaaggttctttaaacaaaagggccacaaccatgccttggtgttacaaggcaggataaaaaccgaaggggttgcctagccaagctagaaaccaccttagcagatccataagttccttacatttcatcaacatcactaagcttcagttagcttatattttagcatcactaaggttctctaaccaaaaagtacatagccacgccttggcattcacctgcagcaaaagaatgaaggtgttccactgcagcaaaagaaccaaggcgttccactgtaagaaaagaacaagaaggctttccaaaagggaccgtagcaacgcttcggtgttccaccactgtagtaaaagaatgaaacagcttgcgacttttttgcaattttc

SEQ ID NO: 286457 - DNA, 453 bp, Zea mays
aaggcagagtgttggggacatgcttgaagttacaacctgagcaaccaaacatataaaatatcaatgaacagcagcaatcatcagtatttgttttgctgaactgtctgaacttggttacaagaacaccttggttggcacacacagtttgcacttcaaatttatctagaaccttttcatacacaattgacacaacactggcaagtggcaacaagcacacgccatcacacagaaatttagcatcagcaggtaaacactggttacttagaacatagaccaccaacttcttcttgtgtctacacgtgccgtagtggtagtctgggacctacggcacaattgcctcctaacattgccagcaggattggtgaagcacaaaactagagctaaactgacaagacttacaactggagctgctgcaataaacagccatctatgacgcccatgggctccatttga

SEQ ID NO: 286458 - DNA, 432 bp, Zea mays
aagcaactataattattcatcaagataattcaattaacacatgacaatttgttctacacatcattcttctatacgcacaaatgcgctatcttcctgctccacccacccagctctgctacctaaagataaaacacaaagaattgaactcgtacatcgttgcacaacacaacatctattcatgtcgtataaatatagttcttctgcacaagatttagcgtcaactgatgcgtgttatgatgtatcggcctttctctaagtcgtatatgattttcgtcttgggcttcctccatcttgatacaaagagtactccacataaaagaaacattcccagcacagcaaacaatggtctattgctatgggttgattctgcggtggtgtgtaatggctttaactcgtattttgcatcagtgtgatgaaagctcctagagccca

SEQ ID NO: 286459 - DNA, 345 bp, Zea mays
cgcaatgcacttccaaaagagttggatgtcaaatcatgttctggaacatcagagccacaaattttactaccataagttaaatggaaatgaacgctggcatatccagtgctacattctcagttagaacaaagcttccattctatctactctttctgctaatcctattgccatcgccaaactgcagaaataggccacagtacttttctggccactcagaacaggcaccaggataactggactcgcagataagcctacgcagccccattgatctggcgcatcatcagctcattgccttcgcagctcccaagccttttcctccttcatttgtctagcaacagaaggaag

SEQ ID NO: 286460 - DNA, 452 bp, Zea mays
ctcacgcgtccgcggacgcgtgggttttttttggatggtctgatctatagagacaatttttagtttaatctgccaaaggattcacagctccacagatttggagtcgcccaatcggcctacagatcaacctagtacagtacctgcctaatttccgactgctttgtctgtttcgcctccttttttgtttgacctgggactgggagcctctgtaaaaaaaccaacggagtcggagacacgaccgaagacgaggccaagcgtgtacggctggcaactgagcaggtttggcggcggtcacccgtctgaccgaccgggcgtgctgggccgcacatgagcacgcggtttgccacgccacggatcggattcgcgtggccggcctgcccaagtgccagccacgcacgcacgcgcaggcgcatcactggaagccgcccaggccggtaagcagcagcagcagc

SEQ ID NO: 286461 - DNA, 373 bp, Zea mays
catgtagtatatatatcaaacaaaataatcaaaggtgtacagtaagataaaactctacgctatccctcttgtccataagatgacaagacccttcttttttttgaaatgtcaccggaggatgtgttcccccaaatttgttttatttcaaaatttgaagggcctgattacatttgagctggcacaaaatgttttgtcggcgtggaggagagaggctttgctttggcagagttgcattacatagttaaacaaattgcaccagagatctgctatggctctggaggctactggcattctgagacgccaaagttgagcctcaattttacaagctgctaagacctgctgcagggattgagtttcattcctggagacgata

SEQ ID NO: 286462 - DNA, 243 bp, Zea mays
aagctcattagttattattttattttagattgctgtcaaagaaaaccaacgtatcagttcgctgccaagtgcaagagttgggatcaaaactgcaaaaggctatatttctgtacatgatattaatcgcaagaatgacttccattggccattaccaatagaatacaaattgacccaaatatatctgagtgcagtggccaccagagactaggcctttcttatatttgtggggtgcgggtgtggggg

SEQ ID NO: 286463 - DNA, 323 bp, Zea mays
ctgaaacacatgaggatgaaaaactatcatctcatcaagcatctcaccggggcaaacacaagcgctaccatctacacagaaggtggttagctttgcagcatgcatgtacagggaaggagtcagggactactccgctttccctttccactacaaaaggactaccagctccgacacacacaaaccgggtttcagaacagcgtgagcgaccgaggcttcgagaagatgctcagtttcctctgggaaaacctggacgacttcgacgcaggctgcttgtgaaccgagttcttgggagcatcctctactaccatgcctgtggcagccac

SEQ ID NO: 286464 - DNA, 381 bp, Zea mays
ttttttttttttttttttaacatcaaagcacagcaaaggtcccttcaaaccattgctccacgaatgatatatcgaaccacatggcatctattgatccatagatgctttgtttatatcaataaaacttccagcattggcatcaattagttataataaagttataaacgcgtccaaggaatctgccagcacgggatttgagtagctgcttggaggcgcagattgtcataacacgtctctccgcacattcacggcattgcttcttcctttctagcaaaatagaatggctacaacttgagcaaggagctagaattgcagtgtcccaccgtaatgctggctgatagaatcctgtaggaaaggaaggatgctatcatgtagatccag

SEQ ID NO: 286465 - DNA, 404 bp, Zea mays
agcggaaacaaaatatattacaaggtatgtacaaatttacatgagtttttacataataatattacaaaagtctctccagaatttttacaggaaagaatattgtagcaactatcaagcttcagcttcgtcatacttcagatttgttatacttcagcttcgtcatccggcttaagatgacttcgagcttcgtcacccgccattttccgcccgccatttacccaaatctgggtcataaatctatttccgatacttcgagctaggcttggaatatctatcagatctgatgatgataagctgtagttgggcctattaacaatttttccatgcgtgcaaccaggcttttcagaaaagcggtagctgtgccccgagaagctaccagggcgcagaagtcagcatggctacca

SEQ ID NO: 286466 - DNA, 415 bp, Zea mays
aaggacacgcagaatgttcttcggtccgtgcaagtatacaggtacaggttaattagacaacaaatgcaacaggaacacgcttcgctcggtttgacagggtacatgtggtataggatacggtgctagaggaagaagttccttgtgacaaagaatcgaaccaccggtcaattactggctttcgagggcaggcagataatgcaaagcgatctacaccctacacgcagcgaaacctgcatttgttccgttgggatcgggagcaggtcttcgcagctagaacagcacgcgagcctttttgcggcggtggacgattcggcgacgttaatgggggttggttccgtgcatcgagcgcccgttggcggatgcggactgttgcgcggcgagcgccttcttgcttaacgtctgatggatctcgctc

SEQ ID NO: 286467 - DNA, 409 bp, Zea mays
cacaaaaccatagtttataataacatggtttaacgtatgtcataacataattatagtatactttacatcattccaatccaataacagtttggagacatagtattttaattacagtgtaggagagagaaaagactgtagctgcgtgcaaaccaaagttttcttgatcctaaaaataccgtggtattgacaaaaccataatttaaaatatagagttcttatatatgctcctaaacgtccttttatataaaatactatggtatgctcaaatattacggtatacccgtgttcccaaacatgctgtcagtggcaggcccctgaacaccttccccggagatagtgagactactcaagcgcggggcaacgaaactcaccccagcacctgttatcctcttgcaatcaaaagctcgag

SEQ ID NO: 286468 - DNA, 551 bp, Zea mays
agttaagtaacctgacacatataacctccatgagtcaacacatgcacttcccactacatgcaaaactaccaactgcacgacattaaccagcttaaaactcataagaaaaaaaaacatgtaaaaaccttaccccaacacaagatcatcaccagcctaattgaagaagacgacgccaattaagttccaaacaccacataaaccctagaactaattgaggatggtgagctagttcagcttcatcagcatccatgcatgcatgccccccatcatgcatgcccaggtggacctggtcgcggccacatgcaactcacaacacattccccgacgaggatgagctgaaccccgacaagaactccaccggccacccaccgccaccgccggtgctgccgggccagtaggactgctgctcatgatgcgccgcgatggcacctccgccgttgctgccgtgctcctccatcttcaccgccgcgagtgcgcgagcagccccgaggcgacgacgcccctcgggaacccgtcagctgcgaggacgccggtgccgtcgtcggagaaat

SEQ ID NO: 286469 - DNA, 360 bp, Zea mays
ccgaacgtagcatccatttcaaactaatcgtcacgagtaaaccacacgtatccacccgtttcgaaacaataacagtgggcaggcagactgaatgatagaacctagattaacagctggctgaatagactttaaatggtgtcaactacggcacgaaacaacgccatcagcaacaaaagagtggattgagacagacaatatggattgatatacaatatctgctatctggcgttcttgcaccagtattttcagttgccaacaaatgctcgtaagtcccacaccatgttgctcatatttgccgttgtttcgactgagggccaactgcaaggagaatcttcttcctcgggcccataggtaccccca

SEQ ID NO: 286470 - DNA, 350 bp, Zea mays
gcaagggggtttactgcattgcgggcgattgaaataaaaaaagtcagaacacagcaaacccccttattttctcacacgctgcatgtgaacaaaatacacttgaatgtgtaggtctgattctgaaaccataaaaaaacaaaagggtcccaggtaaaagccatcgcgcagcattcggcgttatacaaactacaaactgcccaacactgtcaacgcttttaagcacatctaaactcttggccatagtccttcacaagtgcgacatgtgggctctagcttcgaacacagaagcacgtcaaattagctgcacatacttgcttcctttgccgataaaaagcgaagtcgggcaagga

SEQ ID NO: 286471 - DNA, 307 bp, Zea mays
gatagatagatagatagatagatagatagatagtccgagtaagttgtagcacgcatcttacatcttatatattagcttaaaggatggagcagttgaacagtagaaagccacaccaaatgggcgcatgaatcaaagaccatcatcggctaatgttcttactgtggtgcctcctcctctacagagatacaactgacacaactccagctcatcatgatgcggaacttcgattttcccgctaaaaggaagttacacaggacttcatgacgaataaccactcaagcacttcgacaaaggagagtcgaaggac

SEQ ID NO: 286472 - DNA, 533 bp, Zea mays
agtaaaaatataattaatgaaatgatacttgaacgtggccggactccagtaatgttttcaaactcactccgcaaaaaaactgaacggcgtggctcacaagcactagtgttgtagagaagtagaataacggccctactaaacaaggccaactgaacaacttaaatgtcaaataaaagaattaccaatactcggacccatacacttttttcaaaactatctgcccaatcacatttaccaactacacccttggacagcctgactgctgtacctttcaagcccgagctcgtgtttgcaagtctcatcggcgctgctgttacaaatcaagtgtttagttacgttggcctcttggacctgaattggtctctccaaaacaagaaccagtacttcctccaactgtaagcagtagctttcgaaagtctctatatccactttgagcctgaagtccagaccgaacaataaatccagttcaagcatattcatctctcttgtgctaattcctccaactctcccgtagtatgcattattgaaaaacc

SEQ ID NO: 286473 - DNA, 653 bp, Zea mays
attctagatcgcacccggccgccctttttttttttttttttagtgaacaaacaaggaactctgaacagttcctaacttctgattgcacaagcacaagccagatcaaacacgcctccaaccccatccatccatataatcttgctggagaaaaccaccggccccaatataagaaacaaagaattgcagcgcacagaaactgaagacgaaccaatacaaaagcaattttggtatgtatatcccaacgatcttttcctgatacaccggtccagtcaacacctcaatcaacttccaaaactctgttgcccccgcagatccagccagcagcatttccaatgaagtgcaaacaagcttatagtaagttcggctgcgatcttcacaccaatatgacgacatcaaacgaaaaacaaggaatgaaccataagaaaacctcaacccttcaactaatatctccgtaaccagcgctgaaccctttcttctgcttctgaagtcaggacgactaacaccaaaaaggacacaagcgagatcagcagttaaaataagaacggaccgaggtctcgaatccagttggtgtgcaggctactagaggttctgatggtaccacacccggagacacttgagcctgcgaaatcatcaatccatgtccaatcaacaaa

SEQ ID NO: 286474 - DNA, 476 bp, Zea mays
ggcacaaaagacaatggtttctccatcgcattaatggttgattcatgcccactgttggagcagtaggaatgtccgactataccaaactaaaccaaaatagtagtaaccacaaagtagctgagctaaacagaactctcataatcacacttacaagcgttcagttaattatgaaagagcacatagcttcaagctgcaggtatctggcagaccaaaagtggagaaaactctttactgctgaatgatagaattctatccgagaaagaaacctccgggcgtgtgagtagggaaagctacatattaattatcacttctaagcgggcaacacacttaccagcagctgatagatgtaagaacaaaactctcatggtataaaccttgaaatggaatcaagcagaaatttactctcagccaaaggatcgaccctctccaccttggccacagtgtttttcacttgtcgtacatcgccgcggctcgag

SEQ ID NO: 286475 - DNA, 509 bp, Zea mays
attcaaacttattatcgttggtactcaagcataaatcattaccattgtcatttacatttcataaaccaaaaagtctttgcaagattacacgagtgaggaataataatttttagtttccttcactagttatatccagaagaaattagtagtcagaggtttccttcatatctaactgttttccaaagtacaaggatgccgtacaccgaagctacactgtacttctcgaggacgatgactgaacagcttatgctgattaacagtaatggctacagggaaaccatcaatcgcagggcattgttccccacatctcttaaagaatcccagttgttcacaaccacaaaatttgaattatttttatgtggcggtctttggtcttcactaggaactgacccatgttctcccaagcaaaaacagcaaccaggaccagattgtttagggccctttcgtttgtctagtattggaccaggattcattccaacttatcaaaacccacgcgtccgccacggtcc

SEQ ID NO: 286476 - DNA, 478 bp, Zea mays
aaatgcaaacaagtctttcatagtgtggtgtgcagaaacggcaaaagggtggcagaaaactgcactatagtagtcaatgggaaatatgcccaaaaaaaactgaaaattacacccatccaccggtcgagcgcaaagacctccggaacagataagacggctaaagccttaaacggctaaagccttgctgttttttttccttccggtcttaactttcatgtttttctttttctgcttcttgtactccttgtacatgtttatggatgacagtgtgtggttcagctctgccctcaacctctcattctcagatatgcctcttagcacggagaaatggctctgcagcttctcctcgagctcgtctttgtccaccgagcaatctgccttctgaagcacatctgggcttagcgcaacaaactccttggcacgccgcttccttttgaggttcagtggcaatgctttgtagccggttttgatagttccc

SEQ ID NO: 286477 - DNA, 474 bp, Zea mays
caatatatattgtgttgcgtccttctcatatgtaattgggactcattaatcatgcttatacaagttagacaaactcacgtttagcaatgatgcagagtctgatttaagtacttatgagttgcaactcacacgaacatggttgctagtatatgcctatataccacatgctgctgcgtctcccgtaggccgtgaatctgatcagtaggacttgaacgggcggtagactttgaggtcggacgcgatgccggcgatggacccggctgcggcggcgatggagatgacgaggcagccgaggctgagcatctgcaggcacacccaccgggagctccaccgcggcaccttcttctgcaccacgtacatctcgacggggaagtagacggtgagcggccagaagccgagcgcgcccaggaagcccaccacgtcgttgaagaagggcagcagcatggacacgacctcgtggccacgacgaacgcc

SEQ ID NO: 286478 - DNA, 643 bp, Zea mays
  unsure (1)..(643): unsure at all n locations
ttttnctttttttttttttttttttttttttttcgggcactttagatccttttttcgaaatgaaacatccgaatttcgcatgaattgaactttgttagtcgttaggagaggactgttgggaggaaaaaatacttacggtttacgccactttacggaaaagtaaatctatcgtactggaaaaagaacatgtaaatacacgatactgaggcttcttaaatttcaagaaaatctaggtagccaggtccactgcccaatcagatcccttctcctgtacaaaaacaggaacatgatttacttttagtttatgcgcgtatgcatctgaagctttgcccttctttagctggccttctgacaactgaagattctggtgagaaataaagagagattttcttcgatgcccttccaggtgtagaataaacaaaccaactgattccctgaccaatctgggtccagaactgtttcgttgatcagcaatatcaattttttttcttctgttggatggccatgtcaccaggaatgaattgaccatgttgtcaagaacttttatatgcaatgttaatcttgtgctatctgtgattaggcggcaaatggactgcctgcttaaggttctgatcgacacaatgatctgaaactgatcacaaac

SEQ ID NO: 286479 - DNA, 363 bp, Zea mays
gggaagaaattacctctcggatattttggtccgttgaaaaatctttacacctagctcctttcggtacaacagcaaccgaaaacgagtcactgatgttcgacaggtacatcaactttgacaacacaaaaggggtctcgatatgatcgttttcctgagacacgtatctatgttcggtgctgagctcggcaaacagggaatccttcttcctgacaggagcctcaaacacaaaccgtgaactgatacaagattctccttctgagacgtctcttgggagcgagccagcgacattgacaacgcccttgacctgccagctcgccaggtcccgctcgtttggtgtggttgacccggattccgaccgtactg

SEQ ID NO: 286480 - DNA, 410 bp, Zea mays
gaggcaaactgattagctagcatgagcaccttggtaatctggacgcggagcagcatccccaacttctctttgttacattgatcgaacggacaagaaaacgaagcatcagcatcatactactgtccaatgtctaagctatcggttagcgcatcagtttcaatctttcaaagcgtcattggaagtcaaaggctaggtagcactagcacaagttgtttctagcatcgtccagatctgatgcatccgttaaacaggcgcacgagctcaaggccttcaccttggatcagggatgtgatcgacgacgcggtgcgacgtactcctgactagtaggagcattcactgtgatctcctgttgcttagcttagctgcaagaacgatctggaacatagcgaccggtagtatgaacctccttt

SEQ ID NO: 286481 - DNA, 416 bp, Zea mays
atattctaagaaaggattacattggatccttccctttgcaatcctatgttctaaaggctctcgtaaaaaaaaaactgaatcttacagaaatccttcgtgtcaaagtaactaaactactcaacagaagtcctccattgtcacaattctccgatctgattgccttgagataacccacgtggacatattagatgtaaaccggaagaatgaagtgcacaatcatttgatggtcattaggcaaacttatcttatactcggccccaggtagctttacctgtacccaagtgcttgtatgtgctttatgtacaagggcaacacagcaacatggagtacaggttagcacatccgatatgttatcttacaagttacaacagcacgagccttttttattatgcattaattccacatctgttggatac

SEQ ID NO: 286482 - DNA, 252 bp, Zea mays
caacgctgcagccgccgctgccgcggagtccgactcagaagatggctgcaacaacaacgactatgacgatgacgaaggatctcagcagtcgccgtcgcgttctgtatcttcgggctttggtggtggtgctcctcctgctgttggcagcaagaggaagatgagcagtggcagtggtggtttcggcccgctagcgagggcaattgagactttcgcggatatgtacgagcgcatggaagccgctaagcagcagca

SEQ ID NO: 286483 - DNA, 416 bp, Zea mays
ctaatattctactcactccaccaattcagctaactgactgaaatagcgaaataactcgccataactgaatctggctcgataatcgcgagaaccgcgaagtcgacgagagttcagggactcacgcaattaatcgagcacctagtgagcagcacactagcacattaatttattccatccatcggctcaatcaattaaagaaatagcgaactagagaacggttaccgattcaattaaaattccaagtaaacgttgctgattcttgctgaggccttctgtcgagtacttgctaaatatcacgcgggtagctttgttttcacccgacgcttgggatttcttgaccacgcacggaacgaccaccacctttgattgaaatctggaaagagctggtgaggtgggggtcgagcaggggatgacgg

SEQ ID NO: 286484 - DNA, 412 bp, Zea mays
ctcaccaacatggaacatttcacttgttcagccaaatcgttacatatctttagggttacaaagaactatgaggtgcaatgcaaccctttcaaagtggtggcgccgattgaacaccacaaaatttaatatgaatgaacctaataaccactaaacaatcagaggagagagagagagagagagggaggcaggaaagaaagttgcaaccaaaagaggtgtacaacaagaagccccccacacaatcgagggctgaatctcccccggtcgaccttcctatacgtcatatttctttggctgatgccattgcactagagttcttgacaggtaaccgagcaacgatttgttaggagggtatgtcctcttgccgtatagatgcttccctccaagatcagtgtacttcgaactgttctctctt

SEQ ID NO: 286485 - DNA, 616 bp, Zea mays
cctaccaaacaaggactgaggggattaaaatcctcttcgtattcaaattaaatagaaagtagattttagtcttccgatctcctgcaattcttactctcagataagctctaaatgcacttcgcctcagttggaagccacagaaaaacaaaacaaaaggtgctgccagtccgccacgcgaaaaagaagtcagtttcgcagttcgcagcacgtagacgggtgtccccccccgcccgcccatcgttgtcgtcagctccgggcagccgaaaccggaaacctcccgttccccatccccagtcggctgtcgccgtggattcagcggaacccccggcgcaaaaacaagcattatctgggagcccagcccagatgcgggcgcgttcagccgtcagccacacacgcagagacacgcacggcgcaagcgcaacttggcgcgagaataacagaaaaatatgcccactccacagctggtgaccactgccaagcgaaaggaaccgggccgatctgcctcctgggggaaagatcttgttcacctggacgcacgcgcgcgcccgcgcccgcacggacgggggccccgcggcctgctcctggaccgaaatcttcccttcccagcgcttttgca

SEQ ID NO: 286486 - DNA, 509 bp, Zea mays
agatgtgtacatctgatgtatgaacttcaagaatccagttacaaacaatacataatagtgagtccaatttgcagggaaataagtacaacatacttctgtatgataataatgtagaaaaaaaacaagagagtaaaggactgttcatgatattctgcggatagaaagatagatcacattaagatgttcaggttcatgcctggttacaacacagtattttggtaggacttgcagttgcaggaaaataaatatccacctcataaaagcttctttcgctctttatgttgtagtggaattcagacccttcaaagaggcccttagtgtggcgtcccaagagatgatttaaaatcgtgctccaagctattgaatctttggctgtattgagactctgcattagaactaccacccaaggtaatagaaaacgtctcgtatctagattcagctcctgtacaaagcaatggttgtatctcttcagcattatcttgaacaacatggcatgaatttgaccgttt

SEQ ID NO: 286487 - DNA, 458 bp, Zea mays
ggggcaaaggatgatacattgtcgaaggcataccagtgtcttctatgcttattaaaaactcgccttgattaatgtaaaaaaggacaagccctgatcatggtttcatgtcctcataaaaacaaggcttaattaaggcgatggtactctggtacaaataggcatgtgaaaaactgcatcggcagtttcccattacagatactctggttgacgaggcgccaccggatttcacttcttttttcctgcttttgcatcaggcaccaaagacctgacacaaaggcgaggtttggtcgagatgagttcggctgggagaacagacaccccagccaccgaagatccaagaggtaccccggaaaccgggagcatctcaacgagtaccgcaacctcaggcgatctaagatcaaccactgagttctcagcaacggatttgacagcagcagctaccactttgaaacattgct

SEQ ID NO: 286488 - DNA, 334 bp, Zea mays
aatagcgaaaaggtacttaatggcatcaagatgtccaagacatccacagagtctattacataaccattgtctttagcataactatcaaagtgcgaagaaacgaaacgtagatgataagcctacacaggcagctgactgggggtttgccactaaagtaaactaaaactcgtcatatccctggaactcctcgaagtcgtccatgttgccagcatcacctcctgagcactgggtgcagtggggacaaccttcaccaggttgttgcttagggaggtctccaacaacacactcaggaacctcggactactcgttgtctgagtaacattaggttagtgtt

SEQ ID NO: 286489 - DNA, 612 bp, Zea mays
gaagagccaatggctgttttattcactatagccttagcgccagaaatcacaacgatgatttccagaacgaacatacataagcacctgcaccgttgctgcctgctggcgcctgatactctaccatcactaggtgactggctatgtcacttttaaataaatataactatataaagcggggaaacctctggttcttttcttctttatttttttaaaaaaatagaaccatatcactagtatatatgtttcccatcgaacagatcatgtaaaaattcctactaatcataccccagccggggcatctaattttcctccacgacgttgatttaggtttgtattcgccggcaactacgacggacagggtccacgtttctttggcatacgtcaccaaacatctctcaagtatctcccttccatctgcaggctcttcacgtagctttctgccttggagttgttgtccatagacccctgctcctggacgatggtatgtagcgtgcgatggacatctctagccatgccttttgcgtcaccgcaaacataaatgtagccgccctgagaaatgatgctccaaagctcggcagccttttgcgccattttgtgctgaacatactcttt

SEQ ID NO: 286490 - DNA, 372 bp, Zea mays
gaaaaccgatggttaatctccatcaataagaccataaataccacacaaactcataatttatcttaacaaaatactcgtgtgtctgtcgatataatcgtccaaacacaaataaagacctagattctttcacgtacggtcgtccctccagactccagtacaagcagggagcgaatccaccactctagccgcccttcatcaaacaaacaccaagcaaatgtcttttgagcacggctttgtcaatagcaagcagattattactgaccaaacaacagcaccaagcggatcagatttcaggcagggctgcctgctatcttcatgctccggttcatcagcagtagaacatgaccttcttgacgctgtccttgagcgcgg

SEQ ID NO: 286491 - DNA, 330 bp, Zea mays
gggctataaaaataacagcttcaattcgggggcggagtttttttttccccagaaccgggatgagatgcatcgagctagctatgtacaggtccgcatgttaccgaccgagcttcttctactagctccaccaaaagcacagctgcgactgaaagaatgggcaggcaagccggggcattacagagagagaaaaaagaaagaaaggggggagaaaacctcacagtcacaggatcgtgcggccgttggtcttcctctttgcgtcctcccacggggccgcagcagcagcaggaggcacctgtgccgaaggccccatgtccagcttttttccaacca

SEQ ID NO: 286492 - DNA, 494 bp, Zea mays
aacagcaacaagcctctacactgcacatcagcacatgcgacaagtacgtcaaaaattatcggagcatttgtgtcaaaccttctgagttagcagatcggcaatcttaagtgctgtctaaatgtacatgaatcgcatacaagccgtagtcagtcagactgtggacaattgaatgcagctagccacacaaaactcgcaagctgtttgggtacaatgtacaaattctttagttattaacagcagctagttggagagggcagcgacagaagaatccggaaacaaggaggcctagttagtcttgcccatcttcttccgccagtacgatattgcggtgctgtaatgctcgttgcggattttcttcgaggctgccctccagtcacacttgtccatctcttatttggcagccattccaatggtttccctgaaatcttttgaactgaggagctgctctatcttcctcacacactgatcgagatctccgggtgcaaacagaaagc

SEQ ID NO: 286493 - DNA, 344 bp, Zea mays
cacaaaaaagggcaatgccataggcttcaaatctcatagtagaaatgtcatggacctaacattccaaagatcacttaacaaaccaaacgcttgaacccggaggcagcggcacagtacagacttctgtgtctcctgaaatctgagaacctgtacagcaacttgagtatgaagttcaattgagttacctgaggcctagcaactgaaaaaaagaatccctttgtaaactttgagcaaccaagggctagatattgaagaaggaagaaagcaaaccaacctaacattatgacaaccaagaaagaaacaaatcaacctaacattatgcaaagctcccctcaaaggaaaag

SEQ ID NO: 286494 - DNA, 577 bp, Zea mays
aaaaaaaagtggctgcaaatgtgcaattaatacaaactagtactctgaacattaagcacaaaacacagatggttcatatgccaaaagtggccctccaagcaattttttttactggacgaagtcaaaacctcaggctaatttcaaccctggtctaagctcccataatcccatcctttgaactggagagatcttggaagatcagcagccaaatacttcagtctatagtccaagaatttatattgaacctttgaagattattatagcctttagctaaatcctaaaagggttaaaaccatcagcagtttcatgcataagcttgttccagcaagttcatcaccaatctctgacttgtcctgtttcgtccctcaagacgcatgcgtcattaggattccacatgctctgggattatctagctccattgagatgtcagcacttgtatgtgagaagtgtagataacagcaataaattacataatcaaagcatgccaatacacgtccagcttcatatcattagataaaattgtttcttaatttaagtatgtgtctgaaataaaatatcaacacaagatgaagaggtt

SEQ ID NO: 286495 - DNA, 326 bp, Zea mays
ggaacagaggaaagctggctacttaatttatagagatgatttcatacataggcatcgacagcagttgctctcttgtacttgtacacaatcagaattcaggatccagagccaaggttcatggctggagtagagtaggaagcaattactggagtgttacagctagccgcacgtacattcttcacccttgccgcgcagcagccgccacatggctcccgtaaaaacatagggaggcgccggggactggacccacatgactgtgccgtgcacagcgcaacgacgctctcgtctcagctcagctcagctcagctcaagtagggagtgggtgc

SEQ ID NO: 286496 - DNA, 496 bp, Zea mays
tttttattctttccttttcaaagggcacaagaaaggcgtggccttttccagatgtttatgtttttcaatcaacctgatattggttcaaaacctagaatctccagaacatccaaaacccaaacaaaagacaacatcatcacagggaatggtgcttacttgatgccttacgattaccagcagctaaggcatccaaacttcgatagcaggggacgttcacacgcgaaaacaccgtagccacaacacctttttatcaccatctccagataagctactttgaggttctaaacctcacattactatacacaggtaaagattattctcgtcccggattgttttaccaccagtacgctgattcacctagacttgtttcgggcacctcttcaaagatctctcaagctcttcagttgaggttcttgtagattctgaaagagataaacacagctgcggcagctgcgacaacagcaagagcagcacccaccgtccgcggacgcgtgag

SEQ ID NO: 286497 - DNA, 501 bp, Zea mays
ggaaagaaacagctttattaatcgcgacgataaggcaaggcagacctcagcagctagctgcttacacccgtgatgtcgatgcctcagcgcatcaaatcacatacattaatgaacccccaaaaaaacaattggaggcaaaataacgcaaacctatcgaacttggaaaagagataaatctaaaacaaaagcggtggttgcgagttcaccagtcaggccgtcacgttactgttacttacttaagcagtgacgtataagtcgtagcccatgtcatttccccgctctacgaggcggcgtcgacgccggatcagtgacactgcagatgaatctggctttttctcccgctctcgcgtcacctctttttttttatccaaagcggcgtcgacagctagaacggccttggaccgtgcttgctttctcctgtcctgtgacgccaccttccgcttgtaatgtacacctactgttcgtagagggggtcagaaaaagcagccagcggcacaccat

SEQ ID NO: 286498 - DNA, 385 bp, Zea mays
aaccgtgaagcagcaatgctagcaaagagaagagagccatagatttacagctacgggtttccttctactatcgattcgcatatattatgaatatatatgaggcgatgcaatgtggcataccacattgcgcaaggcaaggttctcctatcccccccaaaaaaaaacgcatagtgtggagctacgacatgctcgcaccaggaaccagcaaacgggaaaaaccaaagcagacggcgaaggaggcaggcaggaattaccatctcctcctcccccacccgatctcccttcactgcagcttctgttcgtccatttcaacctctcctcacggtgtcaccgactcttgcagcatctcgctccctccgctggggcacacctacacgccctgggc

SEQ ID NO: 286499 - DNA, 543 bp, Zea mays
  unsure (1)..(543): unsure at all n locations
ggccgccctttttttntttttttttcagangccactttccacagctctgcggtttttcggcgagtttttgcatctcaaaacctaatccaaaagaacttacaagcgcgatgcaactcggtcgggattacttaacctaatccaaagcttcatatcgacaaattcctactgattccaccctccggcctacaatattgtacactagtttgttacattcaacgaactacctgtactgttaacaaactgaactagaggtacagaagtcccatcttctgttatatcaaagactgtatgcagcttactgcatacaaaccaatcccaagagctgacagggaacaccaacaatcactttctctccaattctgccacacagccaccaaacagcaacatacagaacttactaggcacttgaccacgggatgacaacacgagtgtaggtatttacagatgctgcttttgcatatatgattatgacgtgaaactgagcgcgatgtcaacaagcactttacttcaaagagagattgtatgctgtctgcagcatcctga

SEQ ID NO: 286500 - DNA, 311 bp, Zea mays
aaacagggaaccgcccgactttcacgggggccaaaaaaaataacccccacaaaagtccccgcccaccacaaaaaaagtttaaggggacacaccggaccgaccgacgactataacttgggggagcgactgggccagccagaaactggagcacgctcaaaactgacaacaaaccggttagcccacctccttgatcttggggccagggccccccctgccagggggggggttcttgtccatgccgccagggccgcccatgttttaacccgggccctgggacattttggcaatgatggggttgcaaaggctttcca

SEQ ID NO: 286501 - DNA, 494 bp, Zea mays
ggagagccccccaaatcgttatctgccttttcttttttatatttatttcacattatttcttttttttttttttttttttacagaagggtttgtcttttcgcttagttttttgacacattaatgatgtttgtctgtgtgccgatgacacaacaaaacgcttaccactcatcagtcaatcaaaaaagagagaaacgcgccctatgtaccccactcgccgcagccgggattccaaaactgaaaatagatcaggaatcccagcaacgcctccattgctcaaggacggcctgtttagttcgctaaagagcgtggcttgttcctgtcagccagaagaacatccttccatgcctcgtacaacacccaggtgatgccagaattcggcatcaccttcaggcagctcgccccccacccgcggtaaagccccatgacgccctcctcctggatcacctccgacaaggcggcaatcatgttaggcgggcacttcccctgcagggcgc

SEQ ID NO: 286502 - DNA, 450 bp, Zea mays
gcaaggtgctaaagatagtcattgcatgattgcaagaaggcagtatgaacaatgtaagattgtacccatgcattgctagatgcaatacaaaatttgaacattatgttacagcccatttcacgttcaggcacacttccagcctaagtatacatgaaatcgatgtatatgtgtaatttcctatcagccctacgagaagtagatgacagcagaatctattaccactttacatccagcgacagcggttctggtggcaaaatgaatgacagaaactttgtgaaggaaatatttgaagtcaggctgccccaagtagggggtgtccactactggaaattgtctcctaaccttcttcaccgaaatagccttgagcctatcgtcatcttccactctagctataatgtcaactggaactcgctggaccatgggtcttcgttttccactctggaacatcct

SEQ ID NO: 286503 - DNA, 330 bp, Zea mays
gcgttgaatctaaaacctaggggtggtaattgattaggatccaaatgattcttcacagaatggtagggccctaaataaattttagttaaaaatgaatagaaatagagtccgatcctaatccaatccttaaatcttatagtgtaaaatttagagcccattaaacctttggctcggctcagggggaaaacgacttctcaccgctgcaccagtagtaggggatacatcatacatgtggtaaaagactacaacacccacaagtatgggtgcctgcacatttttgctataatcaatctctcccatagccccggggagaataagaatttccagggc

SEQ ID NO: 286504 - DNA, 370 bp, Zea mays
aattgaaaacgagttcgattctcgtatgaaacgaaacgggaagagtagttcaccgtccgtttcgaaatgggagcctcagattttgatttacatacaggcagcagtaattagtaaacgtacaaggacaggcagcacaacgaggtgcggtgcggtgtcatcaattaggtaggtataattctacgtaggagtatcagcgattctgattctgaacgtatcgtcgcaactcacgccctgtcttgccggccaagccctgacgacgacgaggagccaccgccgccgccttgttggccgaatcctcctctgcctcccattgccatgtgatgctgttgatgttgctgctgctgctgctgtggcggctgaggctgcggcg

SEQ ID NO: 286505 - DNA, 357 bp, Zea mays
aatcaatgagttgattgaccaaaccactcgcagcttaaaccccccatttgtgtagaacgactcagggatgcttcctgaatcgtcacattcatcaggctcggtgtggccactgtcatcagagggagcggcgctcgggctatctgagccagcggaggagggcgagaccgaggccgacgccgaggccgaggatgctccaaggatgacgcagctgcccagtgtggacccgaagtcggccttccacttgagcatcacgccgtcgtccatgccgagctcgcccgccgggagctcgatgcgaaggtggcggagctccttgaaggagcggagcacctccgagggagagtggtgcgacacatccgc

SEQ ID NO: 286506 - DNA, 357 bp, Zea mays
ggctcccattgaaatgattctggggagagtgtgtacaacacacatcaatctttacacattcattccaagcactaattctgaagcggtgaaaacgaaaaatctaccatccaactctcaccggtccactccccttttcatgtcagactaaccttctaacaaagagcccactccaacatagcttgtacaccagggcagcccatcttcgggtgcctaggtgaaacggacgcttacttcccgtatcctacaattgggaagtagtggatgaaatggggatacaagagaaaataatttggggtggaaaatactctacacaaacgctgagcttctaccagagccataacggaagaactcgagccg

SEQ ID NO: 286507 - DNA, 355 bp, Zea mays
ccagtcgccctcctctccagcgcgtggacgcgcagccggccgccgccctcatctacaccagcgtcgccgctctaccccctccagcggaccagcgccgccgtcggtcggcctccagcggacccgctaccgccgccctgtctccctctcctccagcgtcgccacccacatcctccctccacaatcctctaacagccagtgccccacctctcctcccctctgcccccctcctccctccaccatcctccagcagccagcgtccatcccagggttagggtttccaagcagccagcgcccagcccaggttcaggttttcagtgacagtgaagcaccccaagttcaaattcagacatagtaa

SEQ ID NO: 286508 - DNA, 733 bp, Zea mays
gcttaagtataatcaattaaccaacagtgactgacatgacaacacacaggatgagtatatcatcatcaggtcctgctaaattaacactaaataaacaagccagagcagaagtacgtagtggtagctaaagcagagctgctaataactggatacattttgatgaggaatagagaggatgggtggggatccacgtcgagcgtagcaacaatatatagcaatgtgtatacaaacgcgcgccaattggtggatttaattaattaatagtactaatctggatggatcatgatgtacatgtaggtagtacgaacgacggcgatcagtgcatgtagctgctacttgaggacgtacttcatgacccctggaatggtggatcttgtagaagtagtcgtcccagtcgatggtgtttgggtcgaagttgaactccagccggtcggcgacaggcatggccatcctgagtctctccatgttggcgtcgtcgaagatgcccttgaagagcgcgaagggcccgtagaggtcgacgagatgcatgacgaacctgtacttgcggtccaggtcggcgtagaggcgcgagaagaggaggccgccggagaggaggctgagcaggcgcagaagctccagcggcagcctgtagcggagcagcatgtaggcggtgaaggctgcgactgtgccgaagaagtgcaccttgcgggtacgcacggggcggccgtccttgcccacgcgcgccacgcgtccg

SEQ ID NO: 286509 - DNA, 471 bp, Zea mays
  unsure (1)..(471): unsure at all n locations
atagaaattccgtttttcttgctcaaaagggaaaagggagaaaccgaataatctatttcgaagtatggtttcgatcattcttgtgcgagaacagaaaatttctcgagggctggaattatcgacaaatgaaatgagctatcctctagatgagttgatatcaatgctggtgtcaaacatcccggaggtgggccaccctcccgtcacggagggcggcggcggcggcggcgttagattttggttgtgcccagagctgggcgacgcctcctggccgccggtgagcgagtcggaactgaaggcggccggcgccggcgcctgctgctgcttcccgcctttcttcggacttggatctcgaccctccttggtgaaaactccccagtaccacctgcacggtgcctgcagcaaccagtgggccgcccaaaacaccttncgatcacattcctctcagggctgannagcgtgacgctgagcccg

SEQ ID NO: 286510 - DNA, 252 bp, Zea mays
ggccggggaagaagcttgcgattgctgtcatgcatgctagaatagcacaacatggtaccaacatttccttttcctttacattacgagagttttccgggcgggagggaagtcgccgactcgccgccgtcgtcgttgtacagctcctgcacgcaggcaggcagtgcctagtgcctagtcgtaatactcaaccaattgtcaaggggagatcgatctagggatgatgatgtcgccgatgtttgttgtgccaggggt

SEQ ID NO: 286511 - DNA, 335 bp, Zea mays
ctaatggaaaattagtttatttttaattaaaaaaatagaaatcccttttgtttctggggctcccaaactaaccccaaaagggcttaaatacagagatgtaaggtaggcctacagctgacttcatgcgaggatacacagcgatcacgcactgagtgggggatacatacatctgctcatgtctcagttttccccgcctgaagcttaaggagcccggccagcacgccggaaccaggtcttgaacgcggcgaccagatgtgggcagtcatcgacattgcgggtcgagaaccccaggcattgctgcaacagctcctgggcttctaggacaggcaaggggg

SEQ ID NO: 286512 - DNA, 293 bp, Zea mays
gagcatgcagcattcttatcctctttattattacaggcaacaaacgcaaacaccagtaccttcaacactcctaccgttccccatctgggacagtatatgtatatatgtacatccacatctatatcaagcgccggtaaaaactaggaaacacctattatactatgtaatttagtagtgtctggctgctgatgaggggtgacgcctagggtacctgctacaactacctcgtttccttttacaggcaccgaaacccaaaccgttgtctcactaccagcacagctctgcgactgcat

SEQ ID NO: 286513 - DNA, 384 bp, Zea mays
  unsure (1)..(384): unsure at all n locations
gcacaaaaaaggaacggggctctcgctgataatgatagctatcaaacgatataaacttacgacctaactaaatacatctctttatggtactacaatgggcaaaagaatggtacaaaaggggtcaatatgccacttagctccatcacaacggttgcaacaatggagatggcaatacacggttgacagaactctggcagcctgatttgttgaatggcagcccgagtagaattgaagcactcttaaaagatgagaatgctgttgctcagtctggccaatatattacttcgacagtcaactgccgatgatgcaccttcatacacagaatggtatagctgatctcaataacaaaaatatggcagcattgttgtccagatgcanaaatca

SEQ ID NO: 286514 - DNA, 365 bp, Zea mays
acggtggaatattgtttacttctctgttatgcgatatcccactccttcgagcagccacagtataagacgtctggccggacgcagcctggcccaatcatttacacggcccactctggcccactcaagcgaacgttgcgacgcctgattctagcgcgcttgctttcctcctctcgctgccgtccttcacccgaaggttcttcttcagacagcgcctgttcacctttggtgctgacattccccctttcttcgatcaccgcttgaccccaagctggtgcccgtggaaagcgattgtacaacgcctccgcatcctcccatgtcgccagctccgcatccatgccagaccacacgactttcacctgggcgat

SEQ ID NO: 286515 - DNA, 387 bp, Zea mays
aaaacaacaagcgaactagtatatatataaaccatcattggtcactgctagctagttcatccaccttggaacactgccagcactcctagtttttagccattttcgctcgggcgtaatcatccctccacgctcgatacgcctccctgacttcgtccagctgggaacccggtatgcccgagaacctgtccaggttctccagccactccttccacggcggcagagaggggtccaggaacttcgctacttctggcaggagagctgccctgtagaactcctcgacccccttcctggttgcttccgacttgttcatcgactggatcccggggcgaacgatcctccctcccttgctcttcgtgcagaaactgttgtccttgaggaccaggacct

SEQ ID NO: 286516 - DNA, 405 bp, Zea mays
atgtcgtactttatctgtaaatcatatctggtgactatatacaaacaatctgttgaaagcaggctatgtacagcaactcaaaactgattttggtctccctgaaaacgctgaccaatatcaggaacgaaccaaccaacacgtgactcaaagctgatctggcggggcatccggctggcgctggcggcgggcggcggcggcgcgctgcttgagcatctgggtgtagttgaagatggagttgaggcgctgctggcgttggtcgtcctcgaagccgcggatgaactcctcgggcttggcgtccacctcggacctcctgggcctgggcgcctcctccctctcccggtccggccggcggcgcgccttcagcgccagcgcgtaggcctcgtccatgctcatcccgccgggctc

SEQ ID NO: 286517 - DNA, 310 bp, Zea mays
ggatgatacgatgcgcttgttaacacggtagcatggcttctactgaagccctagaacagtacaactatatattcatatatgttcatcgtccacctaaaacccttcacagcctcatcatgtccatggctgcctttctgacgaagatctcaccatctagatcctggtcaaacacacacagagagcgagggagatgcgtagtagttgacctcgtacacaacttctgtacagactacagagaaagttgtgatccaaaactcccctgcaacaacagagccaggctctttctttcttcttctcttgctgcgcttct

SEQ ID NO: 286518 - DNA, 342 bp, Zea mays
gttctagatcgcgagcagccgcccttttttttttttttttttttttttataaacgcgatacatatacattatacaatgcggccaaagtagggcaattaataaatagatagacgaacccaacgactgatgaacaacagaacgaagtctgaacgcaaggtacaaactactagtttattcgccaagatacatagactggcaaactcattttcctagtacctactgatcaacacgaaatcgtcatcatctagaacctgggcctccttctgccccacgaaattttcccgtccaattgactcaacaatccggacgaactcggcccttttttcaagagggagcggaacg

SEQ ID NO: 286519 - DNA, 380 bp, Zea mays
tgagaaaaaatcactatgcacttgtacagatagcagtaccggcatcacccaaatcttatttatttagctgcatgattacagtcgtaagtcacttaaccgacaccaagcacggcgcccaaactggatccaatcaccacgcgcgtggtggtggagctcccgaccctgcttcgttcagcttgtcgagcaaggtgttgaaatccattgactggccactctcggccatcctttgggtgacgttcagcacttggtccctagggtatcccatggtgatcgccttctccatcatttctccgtagggatggccacgcatcatatgcgaacccggatgactcatgccaactccgccagggggcatctgttgcggctggactgctggaggg

SEQ ID NO: 286520 - DNA, 403 bp, Zea mays
gaactaaggcatagttcatcccacagaatattacagataatagtccacagacatacgacatagagttaatagatcaaaccaagttccaaatgcataagacataaactaaagccccatgaaaaattaacatgcatgtgcatggtcttagtgtccacatagaaccaccaactccccctgaaggagacgcctgacaacttctcatcactttttctctccccctttggcatcaattgccacaaaggagaggccttactgatcactcggcggaggatgcatgtggtaataatgagtgcggaaggtgtcaaacagggaggagaactggccaaagtcctgctggagctgctgctgcctctgacttatatcatgcaggttgtcagttgtagaaagattgtcaaactgactg

SEQ ID NO: 286521 - DNA, 451 bp, Zea mays
gcctgcctccagaaaggtctcgattatactcatataatacccaagataagtcgcaattcagctaagcaatcatgcatggatgctgtagcaaagtataaccgctcaggcgacacctataaggctataaccctttcttcacattaacggaggtaaaagaaaaaggaaaactcaaccacaagttgcagttcaccccgacctggtgcctcagttggagctcgctccgaaaaccctgattctctcttcgacttcagcgctgcagcaggggcagcgagggatgcctttatcttcatgcagcttattgcagccaacacagaggacctggtgggcacactggagtaggatcacacacgccgccgccttcttgcaggcaacacagtcccggcggcggcttggcttctgggctggtggtggcagcgaccggttagatgcaggttgtggccgcaggatggcc

SEQ ID NO: 286522 - DNA, 280 bp, Zea mays
gcaaacgaaaaccaccgctggtaatccagatagtggcaactcttacaatctacatgttcagtttctcgaatggacatacagcgatgaaaatacaacagatggtacatacaacaaggttgatttctcgagtggggatggggggtagggggtggttgctgcaaaaccccgtggaagctcagttgagttccaagtgtgctaacaaaatgccgcgaaaagtccatagtagttcaagaatgtacaacttcatgaactatcaactccagatgaagctgaatttacc

SEQ ID NO: 286523 - DNA, 332 bp, Zea mays
ctatatttaggcatgtcacagccttgcatattctaatgcactacatgctatgcaggcataaaattacacacaaaagaaaaagaatactatctatgcaagatggactcgaaaatcctttcaacatgtcgatcaatctaattattttagattttttctaaatttgcctttcaatggctgaagtccccttttgatgcaaatgaaaaagcgaacatcctgtagactgctgttgctgtgcatctcaactgttttggtcttccaatctttttggaagtattattatttttactttcacttactcttataattgcatcatgttacacgatgttgacgtc

SEQ ID NO: 286524 - DNA, 275 bp, Zea mays
cccatgctttcggacacccaagcagtcaaactaaacactattgtccaatcccctcttccaaattcattacaatcctattagcatgcaaagatttaatttgatgcaatgttttgatttgcactacgtttttactagctttgcagatgcttcagaaggttatgccgtgatggcatgggaggctggcaagtcgattctttgtatatagctagtagtacaaaactatatgctatgagggtccagagaaattgatgatgaggagcagctagaggtcgtgg

SEQ ID NO: 286525 - DNA, 284 bp, Zea mays
gcctttttatttttttttttttttaacgaaacatgcgctctccacacgagcatatgcagcaagcaagggcttcatgttttgcgtccccggactcctggtctttacagagaagaaatgaaatgtacacggaaaacttgctgtccgcagaaccagttgcgtgcacttggcctttggctcgcaaagggtaggaatgaacaaaaaccaaattccttgccccactttacccaaaaactgaaaatgaagacgaaaatcaacaacaagagaacaaaagggcttccaagatc

SEQ ID NO: 286526 - DNA, 350 bp, Zea mays
ttttttttttttttttttttttttttttttttttgtttttttttggtcttataggctggaatggtcctaggccttacagttgggctagcttggttattaactcaaattaatgatatataaataatggtggggctatttttttatatttatatatatatttaagggggtgcctcgccttacgcctttccttttaaaaggtaaaaagggggggctcgccttaacttgccttaccgccttaataactatgggttagggtttcccattctaacagggggtggctatattaattttttaagaaggaagctagctataatttccttctgcaagataaatctgaaaactaccctacc

SEQ ID NO: 286527 - DNA, 127 bp, Zea mays
gcaccttataataataaactggtatatgccagcagctatcaatcaagaacactactaatctaagcacaacaatggctgaccacgtacaattgtgacggcgaactttgtccagcgcagcgtcggtggt

SEQ ID NO: 286528 - DNA, 541 bp, Zea mays
  unsure (1)..(541): unsure at all n locations
ccactacantttttttttttaatggaaggaccgggggcaaacaattttataataatccaattctctttcgatcggcagcagacgtacacatacgtacgttgaaatcaatcaatttcttctcctttggcggcagagacgtgtgttgacgaagaagaagaagaacgaaaataaagaaagtcacgtggcggccggataagactttttttttcctcccttcaatttcaggcgccgttcatcagcggtttcttcatctcccaggcggtcaggccggacaccgtgacgtccacctcgccgttgttgaaaacgtagaggtgagcgtccttcccgacggcgatggacgggtacacccgtgacaggatgcacgtcttgcctcccgcgccgaagctctcgaccacggaccgatcgatcaagcttcgaagggtgatcttgccgctggagatgtcggcgccgacgaagcccgcgaaggtcggcttgtacagatccggactaagagacgacttggtgggatcggagcgcatgagcaccttgggcttgccgtgtg

SEQ ID NO: 286529 - DNA, 490 bp, Zea mays
gcatgtcatgttcatcccaagcgctggcatgggccacctcatcccattcttccgcttcatcgcggctctcgctgggcagagcgtcgacatctctgtggtgactgtccttcctaccgtttctgccgccgaggaggactacttcaccagcctcttcgctgccctcccccgtgtccgccgcgtcgacctccacctcctgccgttcgacgcgtccaagctcccaagcaacgaccgcgacccgttcgttctccggtgggaggccctgcgccgctcagcgcacctcctgggcccgcttattgccggcgccgccccacgcgtctcggccgtcattacagacgtgaccctgacctcccacgtcatccccatcgccaaggagctcggcgtccagtgccacgtcctcttcccctccagcgccaccatgctctcgctccttgcttacacccctgtacacatcgacaagaaggccgagcaggggagtgacatcggcgacgtc

SEQ ID NO: 286530 - DNA, 436 bp, Zea mays
agcttggaaaacattattatcaaatgactaacatatgaaatgttcagattccaacttaattgacgttcccctaacattgtgtatacatgaattcgtgaaaataatctccgtccatcagattttatttatacatacatgaaacggactgctcatagctcgaacacaaacaggacataagtttatggtgctcaaagctcacaagctgtgccaatcagggccataggactcgatatgattctctgttctagctggaacgcttgggatgtcaggtaaccaaaacgaacaattgacaaaagaacaagagcaatctgggagggtgtgattgtctcaagctgagttcaacttcttctccagtcgctttgccgagcgaagggcctccagggcctctgcttgtttcccttcccgcttcaagttaagcgctttcagtttctccgcc

SEQ ID NO: 286531 - DNA, 414 bp, Zea mays
  unsure (1)..(414): unsure at all n locations
ttnnttttttttttttttttttntttttttttttttttcctaactaaaatttatgtagggctaagctaacaaatagattacaaaacattttctcgtacaatataatacatatttatacataagttgcaatacaagagcacttacctagtatcttattaaagggacgaaactaagaaatgggaccctgtcacgtactcacgtccaaacatatatccatccgcaggccaaggacgacccgccggggggttcactcgctgcccggaccggaggtagctttggtgacgctggtgaagacgacactgctgccgagcaggtccttgccgatgtcggcggtgaaggtgtcgtaacggaggaagagctcgacgaggaagagcctgccaacgagcaccacaaagttcttgccggggcactgtt

SEQ ID NO: 286532 - DNA, 508 bp, Zea mays
atataaagtatcaatattgacaatacaaaataaaaatattagattcttaattaaaaaatactctcataatatacctgttacatgtcataaatattgatattttttccatgaatttgatctgcctttagatggtttcactcaggagaactagaattgcgctttcctagttcggaggtataagtcaagatagttattcaattcactgaccaacataaattatcagctgccctccgtcgatattcaagttcacccaacttcaaatgtgtttgacgtcgtctccataggtgccctaacaatctgccatgtctgctaccagtgcggacagttcaagctgtaatcaaacctcaagtgcactttaatcgcacatggtaagagtaagtggatatactcagatgaactgctacaacaaaattcctagacgttctgtggtacatatactccctacttcagatcgtgctaaagacgtcataattccaagcaactacaaatgcaagggacagtaagatgc

SEQ ID NO: 286533 - DNA, 278 bp, Zea mays
tacgaatcccccgctccacaccgtcgccgccgtcgaaatgtcggcgatgggatacgaccagggcctgtctacccacggcgcctcctggccgcagcgatccgactacgatccatactcctactcctacgcctactcccaccacatcgtcgctgccgccgcctccttccaccagccgcccccaccgggaacagagcatgctgctcccacatccgccgcctcgtcatggtcgtccgcagcaggagcatcgaacaacgtcgtagtggggggccaggcgcgaa

SEQ ID NO: 286534 - DNA, 379 bp, Zea mays
ctttttcttttctttttttaataaattcatttatatacgaactaccgcacttggcaagtttattaccaccagtttcatattcgaatccgccggatcccacggccacatgtgacagtgactaatggattggtatcatcaggaattcggacactcagcgcacaggcgtgcggaggcggcgatcaggacctaaacctgttccggatgatctcgtacaccacccggacgaagcttttggacgattcgtcttcaggcagctgcaggagctttgtgatccgcgcgtaggcgaactgggtcttggggaatgagtcctggggtatatctgcctgtggagtgctgtggagcttcggcttcgacagtgcccattgcattgcccatatgg

SEQ ID NO: 286535 - DNA, 357 bp, Zea mays
gcgttggaaattgttattctgaatgaggataagctgatacgcgaatttacacatgacaaagtcacttggtataaatttttttggttgtcaggcaagaaactgttgtcattacaatgtacaaattaagaagatatcaatattgccacatttcaacgcagtatgcctgacttcctgcttttgtatcgcctcctgtacagctgggtaatgccacgccgagtcccctagctattatagaagcccaagagacctcagctggctgatgtgctccgcagggagcggcggcggacaccaatctgtgtgctcgccatcgacatgctctacgacatactccttggttagcattcgttttgcaagaat

SEQ ID NO: 286536 - DNA, 523 bp, Zea mays
acaccgaggtcaagtttctcctccaggaccaaccatgaaagtgaatgttctgatgaattccggaagatgtctgatgaatttgagccagttgacatagaaggatcggcaaagcccgatgtttgggtgcatcgccctggcagttacgtcaccagtacatgggaacctcggaaaggccgtccccggtgccaggattccagaattcaccgggagaatgattcttggagtgatagcccaaggtcatcagtgtcaggatctcatagaagtgactccagcactgaagaacccacgagcagtaaatcgcatcgccaccttcaaaaggtcaagaagggtttgggcaagctagctggagcagtgctccaccggagcccaaaggagaatgatgacgaagcttccccatgtgtaactcctcaccagaacattcgaccggtcggggaaagcagggtttcagtagcatatgtggtcggatcaagatccagcaggggttgacggatcggggtcgagacgagatgaccaccagcaaagc

SEQ ID NO: 286537 - DNA, 869 bp, Zea mays
gacataatccatagttaacaattattttaatcaaacaactttcagctttcttacaaccattagccacttcctcacagctaaatcagattgttcagcaatatgtagctaacccaacagacactaccatcccctcttcaacgttgcgtatcgactcaacacagcaagcaaatcactaattaatttgaaccaacttagaaggcaatggaacaggcaaccgtcgcacaaacaattgcttaacaaaatgttaccagatcaccggaggccgaggagccaaggggaacgcgtcggccggcagcgaagttgcggggcggagcaaggaggctagctagtgcctgctggatatgctgaaggaagtgaccttcatgggcgtggccaccaccagtggagcctccggggagtcgctgaccgagtacctgtcgtgcatgaagcggctggccacgatggactcgtccttggggatcaccttgtagcaatagcagctcttcagcccctcctggtactggtagcactcgtggtggctgttcttcacctgcaggaagttccacaccacgctgtacttccccaccgtcgccactagatgccgctcctgcttcccgttctccgtcacccaagagaatcttccctccctgaacctgttgtttgctcctgctagatgagagtccagtgggttgagcttcagcagccttggagcagcaattcggttccccattctaccactaaacccagtcttctcctttccatctttgtcgatgaagatggtgcatacaagaatcaggtacgcatctgttgtcccaagaatccacttcccatcatatgtcacgtcgacatgggtaatgggcgaacccaacccaggaaaggctgtctttgcc

SEQ ID NO: 286538 - DNA, 348 bp, Zea mays
aaactcaagccggaccgaatatgttgctggggcaaaggattccattagctttattgctctgctgcttcaaggcagcatgcagctccaggtcatcgaaaattccttttgtcgttgatttcgacataccgttcgtggccagccaataggtgtgtcggacactcggtgggtggcgctagaccctacctagcacgtgtaacaaaacgcactatacgagactagtcaaggtatatatatctagctcacctaagaaaccgtcgtcgtctacttcatcttcttctaccaagagctacacctaacagccgctccaggccaggccaggccaggccccagctttccaagcgaggccgg

SEQ ID NO: 286539 - DNA, 394 bp, Zea mays
ttttaataaatttttgaaacaccaacatcgatcaaacaatcaaattattgtctgggctttgcggtctacactaggagcagacagtcacatagtttcctctctctaatcttcacatctctccggctctacatcgtttagagacgtcttgggtggtctgccgatcccaagacaaactctaggatctctcctccccgacggggttccttccgggagcgaaatccaggtgctgttggcgatatccgtcgcctctgcgcacgcgtggaccatacggccatcagacgcggaccgtccagcttgtctgcagaaaccctagctcctgcgtcaggtcacagaccgtccggccctcggtcgcagaccgtccgcgctgcagcagagagcaccgctcccggtgcac

SEQ ID NO: 286540 - DNA, 328 bp, Zea mays
tttttctcttttttttgaggtaagcaacaaagaagggttgcatatatactaagaggggcataatccataccaattgtagctgacaacatgtttttgcaagacaaagctaccaaaacgagcaaacaacatatagtaccagcgttacaacagctcaaggacctagcagcaatgggatgggtatctgatagacttactgatcaacaacagtagagcacagcccctcaagcgcaaatctgaacagagcacggccggcatagacgatgtggagaaattgttggtcttctatggtgtttcggcctttacctgtaccatgaagacgagacaccat

SEQ ID NO: 286541 - DNA, 554 bp, Zea mays
  unsure (1)..(554): unsure at all n locations
ctcaaactcctttacgtaagaaacggcttttgggagaatgtacatacagaaaaatacagcgccaaatgatgatctctttcacaaggcatgcgtagagaaacatgattcagactccatctgtactatcatgtatatatactagtgtaacaaggtccctctcaggtaaactacaaactacaaactgctcctgctccacagtaacgacgttctatgcctgagggacgggtgggttctcaacatcgccggcggcggtggccatgacgtggtgctgtcccgctccaattcccattcccatgtctgcagctgaaggctggctggaagtctgatcagcagaaccagacgccggcagatcaggagcctgatgttgaggtgcacgcggcctgcggtgacgacgacggcgggcctgctgggtaggaggcgccacccgcctggccctccaccgnagtatctcgatggcgatggagttgccggtcatgcccacgccgaagccggcgaaggtcgccaggatgatggagatcacggcctgcaaatggaggtatctgtagaagagatgg

SEQ ID NO: 286542 - DNA, 420 bp, Zea mays
agcatacaagatgcacagacatatatatatagcatccagcactctgtctttttcagaaaatgttgttattagaatgccaacgtaccctgtgctgtatgaagtatgaaaggatcttgattatataaataattaatgaagaaagccgcaaattaaaaaaaagtcatctttattctactagttaactgttaaagacagccaagcactgcgagctttgtcagttttccagctagcaatgactctgctgaggaagaaagagatcagcaatgactgatgaatacaccatacctccctgctctgctcttcccccctactagcagcaacagaaagcgtcatccaaatccaatggaaacaatttcaaagaggcattgaaagaaagaaataaacagggtgtgggcggatgaatagttgcggacgcgtggg

SEQ ID NO: 286543 - DNA, 342 bp, Zea mays
gaagggggcgttttttttcagctctatcttttcccctgaatacatggggagtgtcgcatcgaatcacacttcttcttccacatcgagaattttcccgccacgtactaatttgtttccctccgcgtctaatcttctcggatctttagtgtagacgaggatggcgattgacagcattgacgtgtcagcacgacgatctccatacgacgaagacgatggcatgacgacttgttggcgttgatgtgcaggaacgctgcgccggcgtactaccagtgacgacgacggtcaggcactagggactggggcgcggagctgggagcaggcactgctgtgtatgaccgcgac

SEQ ID NO: 286544 - DNA, 493 bp, Zea mays
gccgctccgtcgccgggctggtgctgccggggcgtcctgggtggcgttgcggtctcggagtcggaccttgtccccggattccgcttctcccgctgcagctacctcctcagcctccttcgccccgccatcctccgcgacctggagctggagaggcacgggctgaagctgctgccgcggagcccttcgtcgtttacgccatgccttgacggcagatacctgcttcttggccccgatgctgagctaaactactcagagatcagcaagttctctaggaaggatgcagtggcatacccaagatacgaggagaagctggagaacttctgcaagctcatggactttgtcatagactcagctccacccgagctgaggcaggaggcccacttctcgatggttgacaggatgaagcatgggttgagaagtcagcattctggggccaccttctcggcatgtgatgcagcaggggcagaaaacatggtggaattctttgacctac

SEQ ID NO: 286545 - DNA, 299 bp, Zea mays
ggcaaaaataatgcaaagtctggatccgtagaattccagcagcaacgaacagcagagagatgatcggggagattgagaacagatcagcttatgttttagctattaaatcagacgtagaaaatcaaggcaacttcgtgaacttcctcgcaagtgaagttcaaaacgcagcatacaaaaagatagctgacgttgaagagtttgtgaagtggcttgatggggaattgtcataccttgtggatgaaagagcagtgctaaaacaattccccaactggcccgagaagacagcagatgccttgaga

SEQ ID NO: 286546 - DNA, 482 bp, Zea mays
agacaagactctggtaacgaaatagaacacgcaaaatccgcttcagctttaggcaaactgaaaaatctaacatagggtgaatgtatctctagtcagcatgtaaatacagttatacaaatacaactgaacctgaagcaacattgctacaacacagagtatacagtataggttgcgtagtctccgaagttccagaattgactaatatggttagttccatcacccaatttagctatctgatgattatcttcagaaagcatgttccagttgctcttccaatttagacattttcatcaccatgagactgctcataaggtcgtgtttcttgaggatagaatggagacataaataagcttgacatatcccagttttcatcagatgccagtgtatgattgtcatattctggagttatcccttctgtgcaggcctgatagtatcctgaattcagagaccatgaaggcctataaggttcaagttgatcgtaa

SEQ ID NO: 286547 - DNA, 358 bp, Zea mays
aaggtgaaaacataatattcacacactgtcaacataagcgtcgacagtatatatagagtttgtgagccaaaagcaccaaactagtacagagaattgcaagcacatatgttacatcaaaatgactctctactaactaactaactccccctagctctcacaactcatatctctccccctttggcgtcaaacaccaaaagggtacccgagcctacgcatcagaagttggaggaggcggcgggggcacatccggtcgcggtcgaggcagtagagcgaacgctagctgagggtcagagtcagtctcggatccaggatctgctgtagaagctagagctgatactgactcggactgaggctgcgc

SEQ ID NO: 286548 - DNA, 361 bp, Zea mays
cttatatacttaaagtgatttctcgtgtgattcaatatccaaaaaaattcggatatccaaaaattccatccgaatcattgttcaccatcttcgaatccggatccggacgaatatttttcaaaccatattacatccttacatgtagccatacactactactagttcagctcaagctaggccttgtggacgacaacaaagcaggacagaatggccctggggttgaacaccagcagttcttccaggttggagaagaatcccaccgaccccaccaccgactcatgctccttgtcgtcgtggtcggcctcctcctctgccgctgctcttcttccttgggccactacacccttcctgcaacgtcgtc

SEQ ID NO: 286549 - DNA, 290 bp, Zea mays
ggaaacaggaaccatggttcatgagtgtccgaaaagcaaagcaacacaaagacatcagttttcctgatgtgcagatgccaatgtttacattattctacgttcctagtacgaggttaaaccgaacttgtcttgaatcctttagacttgactggtggtggtttttgaatccaagctttcgacggggggacgcacttcccaataatttttggcgcgtggtagaccacggaaccggctccggggaagtcgcacgtcccgttgccccggcccttccgctggtagtagctgttgaa

SEQ ID NO: 286550 - DNA, 406 bp, Zea mays
gttcaataaacgagagaagaaaaaaaaagaacagggggaaaaaatattatactttggtggggtggcctcccgcgctctcatcttcgcccacacgcaaacggggcttcgaggccggctccggctgctactggtagtttcttttctactaccgctactacgcaaccaaaaataaaataaaaataaaatctaaggccgcagccagaaacgaatgaaaaacggccttgccgtcgccggcgacgagagaaaacgcctggccgccgggacagatcgtccagacaaaacatcacatcacacggcggccaatcaagagagccgctgcgcgtgtggtttggtttggtttggcctgcgtcgtcgaccggcggcttcatcaggcaaaaaggttgagcagcacgggctccctgtcgcc

SEQ ID NO: 286551 - DNA, 581 bp, Zea mays
aaaagcaactccttttggggtttttataagtgtagaaccgggatttcttacaagaatatataatgacaagtaaaacatacagtacaaaaaaaatttgaaaaagctaaactggactcaatggacaaaacagatgaaaagatgtctgtacaaaagatcctaaaaaagatctagctccaaccggtcgacgccccctggggcttaccgggctgcactcccatatacaattccgggcaaacgaactcgccgtaccttgagtaccaggttaggtgaaattcgcaagcaggtgcgcctaggagcaacaaaatccaatcccagactgctgtgcaaatcacccaaactttcgcctatctatacacaaaaaatcacccggcggcttgcggcagggcagacgccaagaccaggcagcagcctcagagctactatattcgagcaggaaacccgaaattctgaaatgttctgatctgacctccacggccggccgtgacaattacggtcccccaggctgaccgacctggagcttgatcagctccactgggaagactggcactagaccgagggctctgctttgttggcgtcatgag

SEQ ID NO: 286552 - DNA, 360 bp, Zea mays
  unsure (1)..(360): unsure at all n locations
tttttaatanttttttgaagctaaggataacagattgggactttatgaattttaacggaaatgcttgcaagcaactacggtacaacgggatactccacagtgaacccaccccctctgccagccagcttggacgcttggctgtgccattatcgttcttgccaatccagctaacataaagaaaaagcgagaaaacaggcaaacagctcctgcaaagcaagttgcttgtagaacggcactacaaaaggaactctccatagagcagagcagccggagccatatgcagcagggagaacccagccggtgctaggcagccaagcacgacatggcagaagaaagcgtcgtaaaagcttccgctggcga

SEQ ID NO: 286553 - DNA, 735 bp, Zea mays
aagtaattcactccattaaaagaaaagaataagaggatgaacgacttcgtttctttaaccaaaacaccccgtacattacaaacatggcagctggtccacccaatacatatccaaatacaacacataaggcaacatttcttttgacaggtctaactaggtctccaattgtttacccagtctgtcaatgcacctacgttcttactaatatcctccacgttgtcacttcgcaatggcatcacgatgtcctctctgtagctctccctcgcctcctcgaggagcacttggaagatttcgcactctatattgttggcgagcttggaacccatgtaacctctgacccgtcaggcgatcatgcagaattgagttgtcagtctggagcacaactacgaggtcaaaccaacgttctggaaagaaatcacatccgtggtaatctactagtataccaccttcttccatcatgtcctcaagctcgtcgcacaccaggtcctcgttgatgacatggcactcgaggtcggcgtcccagccgtcgtggaggctcttctcgcggacgaggtcgccgatgttgacgtggcggacgcctgcggcgtcggcaaggagcgagcacgttgtcgtcttccccgtccccggcgtccccgtcactagcacgttcggacgcgcgcgccgcgagccgccgcagctccatgcggccatcgcgggggaagagggttctaggttgtcaggcgccgcccaccgtcc

SEQ ID NO: 286554 - DNA, 570 bp, Zea mays
caagtcaaacaaatccattccatttctgagtaagaataatcagtagctacatgccccagcaaatagtttttggaacaagtgtacatggtactgaactccataaactacaattaccaagctgctgggaagtgggaacagggggggaaaatgataagtagatactatgctcaaggttacctacgtagaaaccaacttatcgagaggaaaggacttaccagccggctagcacctgactttcggcggtgcggttgtgccgcagctgccgcatagttacctccatagcacatctgtccggacccaggaccaggagtggctctcagttgctcgcacacctcaggtgacacagagctcgaatacccttcgacaagtgaacaattccatggatcagtagacctgacacttagagaaacatttgacaagcagatgccactgaagctatcccccggaatgcctgcagcattcctgcaacaccaattttgacacccacgacatccttgatggttatgttgcttatggtgggaagcgcgttcctgtcgtagccatcgtcagggtgttcaccatagtttccag

SEQ ID NO: 286555 - DNA, 456 bp, Zea mays
tttttggatccagaatgcagtcagaaagctttgtaatcagctgaatcaaagtttacatgccaagggaccactacccagttacattctactgttttattttggtggcaagtaacaaatcagagacaacagttgttaaagtaaaagctcaggcttaacgtatgagctgcaaaatagaacaccagagctgcttaggacctgtttggctgtttctcactgacgacatcatacagcatgtctctcacatgaaactattagctaactaaatgttagataggcatcagcctaccttcagcacataaacaacctatagcggtcttgtgccaataaaaattgaccaagatgtggactttctttcatcttgtttaccagtagtctttgcaagaacacacaccattttcgaagtggtggaacctctttgcatcccttgcaatgatctgacgtccaacaagttttgag

SEQ ID NO: 286556 - DNA, 386 bp, Zea mays
gaacagaaacacaagctttatttatcttcagaagaaggttgcaaatattacggtgttccaaccaccagcctgcaaaatcaggtctccggagaagaaaaacaaccacacagggttgtcaaggcaaaggctccgcagaacgaacaccctaaccggacaccgcaaagtagcaaccacacacccatgaccaacaaaacactgacttgagcagcaagatttgcagacactcacacatcaaagacacggagctacggtaccaatcaaagggagtgttgatgtctgcaactctataaccaggatccaggagcagtggaaaagaacgcgcacttgacagaatacttgagagcttcaaacactgacttgagagaaactgcatggtggaatgactg

SEQ ID NO: 286557 - DNA, 394 bp, Zea mays
ttctttattttttttttttaccagcaaagaaaagcgggtgtcatagtttagaaacaacggggtcccctgtatttatcagcattaataatacagcatgtcgtgaaaggtcgagaagatagagagaaaagaatatcagcagaaactgtcaaaagcagtccgatttcagtagctcagttgacgccctgcagtttcagtgttggttctgtacatagcatgggcggcaatactgcgatatcagcagtgccgtgccgcaatgaaatgctgaatcttatgaacaaagatgtcgcgcagaattcagaaattacccttgcctttcgtaataggtacaagcatcaatcaagtgtccgaaagcatcccattcgtctgaagcagggcagggatgctctgctcgctc

SEQ ID NO: 286558 - DNA, 342 bp, Zea mays
  unsure (1)..(342): unsure at all n locations
tttagcgnaacaaacatattgggggtcttttttacaaacataagtggagatctcaatctggaccgaaatacataactgaagaaacgaagtcgctccagcgtgtcaggttggaatttctagctaatcttgggcgctttcaggtctggcaactgtacgaagaaaaccaccctctggacatgctcgacccgaagctcgcagaattcaacagcgacgaggtgctccgtgccatccacgtggccctcctctgcacccagggctcgccgcaccagcgcccgtccatgtcacgggccgtgtcgattctggcgggagacgtggaggtgggccaggtggcgaacaaaccca

SEQ ID NO: 286559 - DNA, 406 bp, Zea mays
  unsure (1)..(406): unsure at all n locations
ttttnttttntttttttttttttttttttttgatcgtaatttatagggtacaaccggcattaacaaatatagcacaattccaattttgttttgctacaaaagacacatgtaatcgatggaattgccacaccaatcacagtccaataccagtttccatacaaaaacggggaactatctcacctatcgacacagcactatacatcatacaatttcaatttacaaggagtgcatatgcatctgcccatccgtccatcaattgtctggatcatgtctgcaagcaacagcatcctcactcagcattgcatgatgctgcggacgtcaggcgccggcaggaacatctgtgccagccactgcagcggcttcacagctccgcatgcttctttcgccagtaccagatagcagcatt

SEQ ID NO: 286560 - DNA, 384 bp, Zea mays
  unsure (1)..(384): unsure at all n locations
ttttatttattttttttttttatttttttttttttgtttttttggaccgnaacacgttacttattaagactgggatcccagaaaaaaaaaattttgagggtaagttatcgacaatggactggggtgcgggacaataaataatatatgacggatcaataatgcatgatcaaagggaagcaatgcaccaaccacaaaatcatcactacaccagcaggataaccgttactcccccttctacaacacatggacagctttcccacctacagcaaaaccttgggctactttgcttacaggacagggccttttgcccttagcccctaggatacaagcccaaaaaaaataactccaaacagaaaaaaatggcaaggaaaacctgaatacaaa

SEQ ID NO: 286561 - DNA, 603 bp, Zea mays
  unsure (1)..(603): unsure at all n locations
ttnntcctanttttttttnngaaaaggccacaactggatgatttaacaacaacatcgtccataactacacaataatcatgataaatagacttaagaaggctaataagaatttttctcaaatctcagagaataaacagccagttgattcatacagagcatcttagtttctggtgtgtcaacaagactagcaatgcctttaaaaggggcacaagacatccagctgaaaatagacaagagcaagtctagctctggattgacaagatgggacagaagcaaatctgatcttcatcgttgacaattagatggcaattcactcaaaattgcattcagccagacagcaggaaaccaatggaaccacaaaacaatggctcggcgacaagagagccgagttatactcttcttcagttatataatccaatacttgttttgaacatttggcaagcaggcagcaggtactgcatccatccccccgcagacaggtagcttagtggacgcagacctggtgcttacaacgcattggatactcgagacatcacaggcaccttgtcccaacacctggccgccaacagcgccctgcattccagggctgcagtacatttgaga

SEQ ID NO: 286562 - DNA, 423 bp, Zea mays
gcacgaagcatgcatgcatggtcaactaatttattactttcgtcgaaagggaaaggaaaataaaaaaataaaataaaagatcagctacagctacaagctcctgcatgcatttcccttctatacaagggcacacacacacattattcacctccagcagtccactctgttcttccactcacacacagctagtagacagtaccaccatcacctctccaacggcttgtagagcacaaagctcacgtacttggactcaaaccggggggtgacgccgagggcgagcagcgactgcaacccccaccctttctcgatgaacaggtggtcgaggacgacgtgctgtggcttcaaagcttgattgccatggccagcgctttcgacgtcccccccgaggacggacactagaagctggggcggaaagcgtgggcg

SEQ ID NO: 286563 - DNA, 460 bp, Zea mays
ggagctgttatcggcgggtgcaagtgcggcgccagctgcacctgcgacccctgcacctgcaagtgaggatgaccgggtgcagcatgcaggccgtgacgatggaggaagtagctagatcggaaggacacccttcagtatctctagctaaatcaagctctgcagtatgttgtagcagtgtcgtctgtgtttgccgccatgcgcgcgtagctagctagtggtggtggtaaacgaataattgtcctgttcttcctcctcctcggcccctgccagtgttgcgtcgtgtgggccggccgggtgcatgcacagcaccaggccatgcccgctgctatgtaagtgctcgagccagtagcatcgtaagggactgttcggttgttcccgattggagccccggatttattcccacccggattgcttctctaaaagaaaaaaaaaaggacggccgctcgcgatctagaactag

SEQ ID NO: 286564 - DNA, 347 bp, Zea mays
tttttattttttttttttactgcaaacaaaagaaaggcttatttggccatatacattgctgctgtacatgcatattttttaaacgggaaactgaactcacgtgcggtcacctcggcattaccctagtcaaacaatggctcagtatagcattacagtatttttctattgccattgttttccgtggtcggagaacacaacctaaagatagccctacatctctccgatccttttcgtggaaaggatatacgaaccagatggatttcctgtacagtggagttagcatattaaataactgcacaccgttgttaccaacaatagaaccggggacatgtgccagtggaacttcc

SEQ ID NO: 286565 - DNA, 303 bp, Zea mays
  unsure (1)..(303): unsure at all n locations
tttttnttaattttttttttttttttttggccaaaccggggactattaaacataacgcagggagaaattacagccggcccaccacaggctaccgaatttaaattacaccccgccctgcgactgcgagtctgcgactgcgagagccgagagctctcagtccgccttcttggacgacaccttcgacttggccgcaccgacgacaccctcgcgcgcgtgcttgtcctcggccgtcttggcgcacagctcgtcgcgcatggggaagtacttttcgaaggcgcggggcaggaacctcgggatgaggaa

SEQ ID NO: 286566 - DNA, 405 bp, Zea mays
gcgatctataacgccatagtatgtgtaaatggcagcggactgtcagcccaggaagaatcatatcgctggtatacagtaggatgtgctgatggctggaggaaggacacacaccaggtgaggccctgctgggttgcagctaatgtttgcctcacccacctccggcaggtccagctgcggtgggtggacgtacccagacaccagtggcacacatgtcaccgtgatctccatccttgaaccttgctcatttgacaacgatacgtgaccacatttcctcccagcaaccatccagttctgcgggtttgcctcaacctgataaagtatttcgtcaatggatatggatgcatcctccggggttttcagcctttcgaccctccacctcatattaactaactgcccaaccctcat

SEQ ID NO: 286567 - DNA, 384 bp, Zea mays
tgtcagaaattccagacgaaaattgtccactagtttctccaccagatcgcaggagtttcacagtactcctttgattagttattctaataactgtacaggatgggtggacacaccagaattcctctcaaataccaaaagttaactagctcatcccaagagaagtcgtgctaccactgcaacttgaaaaggcacctcagtagcaacccaactcgtcaagactttcagagttgatcaacattaaactgccggcttgtcagttggcacaatgtcactccactttcattgaatctgaggaaatgcagatagctgggcgtttcttgtcacgtgaacatttgctggactagggatgatcctgttcctgtgtgagaaaccttcttcagatgc

SEQ ID NO: 286568 - DNA, 373 bp, Zea mays
caagccagggggaaggttgggcaaatatgggaataatattcactcggaacagctgtgatgtacaaaaaatacaaaagcaaaaaaaaacgtatgtgtctattttaatacacaatggtgaaacaattttaatacatttgccaaaattgggtccatatattgatacctttggctggtttacaaagaatgacatcctggtcagactcaaagcatgggggacaaaaaggaaaacttcgcactcttgtacaacatttgatatcataagccatcacattccaggggaggatgttcttcctattctttgagcaccaagttttggttgcgcaggctttggtcctcggcctttacctgatgagggtaagggcctggctttggt

SEQ ID NO: 286569 - DNA, 451 bp, Zea mays
ataattaaggggatatttgatgaccaaatgaatatgccccaaaatgaaccaaaccttacagggagggaatctaagcttacataataccgaagtcgagtggaggttcgccaaaatggtgacgaatcaaatccggccaatatacagagatcccggcgagcgacgttctgcactccactattctatatgatctagttccttcattttcaactagttacagcgctgcgattcacacgtatagccacaggattgtgccgatggtgcaagccgctagtcgacttccaagttccgaccagagacgcaatacaccggcgtgactccaaatacgaagtccacaacaacaattatactcgatctagaatatacacaaccatttcgtcctctagaagatcacaaccactgaacgacattggccaccaataaaagttgctgcactcctgaagatcgaagctag

SEQ ID NO: 286570 - DNA, 406 bp, Zea mays
tttccttactctctggtcccgtttcaaaactcgaaatagcaataatccagaactgaaaaaaaaaataccacaacatttgttctagctaaggttaggttagtagcattccaccagcacaacgatttctctaacaaaagaagcaagggagactacgaggttacatgcatcagattcctgtgacatacaaacttgctgcaaacacaatgtcacgcttaatagcgttagacgcgacctccatcttcttgaacagcgcagagttccccatgatggaagctgcattcctgaattccctacatgtttcgtccagacggacgattgttctacaatgatcccttcggatacatcagtcagctcgcatatgtctgcgaaaggcgtcccctttgcccactcgtagacgacctcaaca

SEQ ID NO: 286571 - DNA, 334 bp, Zea mays
cggaaaatatatgagtgccttttagctggttacgatgtatcccctatgatggcaccatttttgttctcagggaagcaaaagtgatgtgccaaaacaacctggctacttctgcttttggtgacaaacaccagaactacaagacgaatctgagtcaaccaaccataaacccatattttcaagttgcttttgaactgaatctgaagccctactgcgagaccagaaaagcacattacttttgtcttctaatattgatctgtttgaggtgttaggccctaactcaataactctcatagcctcatccagctttcccagcctaacaccagcactgctcgcc

SEQ ID NO: 286572 - DNA, 244 bp, Zea mays
cccaaaagatcatgttaaataaataaaacgataacacagtaatccctaaagaactacatacagcattttctaaagaactctaatcatcgttaatgaatttaaaaaccaagagaaaaaatctaaaagacctcccaaacatattatctcttttctctctctcgcacgcggaccagagatggatagcgtaagagactacgaaccacacttttttggtgcctacattgataaccaggttgaaagtgcc

SEQ ID NO: 286573 - DNA, 343 bp, Zea mays
ctgagcaggcaggagttttcatttcttatcacaagccataagggggtgataggcgctacacacacaatccaattttcaatgtaaaactgtagagcccagtgaagcaagggggagagaaaaaaacgactggcgatcctacttttgatcgggagccactccagatcatttggtctcactttcactacatcatcagatgaatcattgggaacaacatctcagactggatgatggtctggccactctctgaaacatggaaagcagttctaactgacaagttcaggaaccatactcctttctctctctctctctgggtctaaccatatgaacataagctaaattctac

SEQ ID NO: 286574 - DNA, 572 bp, Zea mays
aatgcaaaatattgttttgaatgatgaactactgcggtccccttgacaaaccgcatacatactcccgtaccaaatacaatatttgtttggtccatttgctctgccattgtacattaaccctaaacccagcacttttgtattaagtaacaaaaaggtattgtagcttggtatctccctacttctagcttacaactttacaccctccatcaacatcctggccaacaaaacaagatatttgactgtacagatgtacaaaaaattatggtccgcattgccctgtccaaagtgcgaaaattcaggcctcaaaaaaaccactgagggcagtttgactagccacaaaccaggctcgtataaaaactcgacgtataaatgctgatgtcaaattgcctagatgtctgctctagtgctcttaaatcatagcttcctccttgctataccacccctgaaaggagtaaagcatctcaaaagtataatgagcgaagcaaaatagaatgatatcaagtgaccaactgcatccatcgcattttctagcatgtcttcttccctctttgcttgttttaacgctgatatgc

SEQ ID NO: 286575 - DNA, 409 bp, Zea mays
cttaaaagatcaacagttgatcgatgagagtcgagcaaagcacatagtcttaacaagaaacagatttgccatactaacaagaaacagttttgccatacttctataacccatacatttgagctactaagctaacaaaacttaagaaaaacctgagggaccaagttctgcagtataattgattggtggccatctcaagtgaagcctacatcatataaaccttggtcctcaacttcttgatcatgtcatctgatttctcccccttgatcttcttacagacgatcaccctttatgctcttcttcctcttctttccctcctcggtagcacgcttgcccttcactctacccttcttgccaacctcgtggccatcatcaaccatgatcctcttcgtcttcttctttttctctgtat

SEQ ID NO: 286576 - DNA, 472 bp, Zea mays
gcagatcttccctcgagtctaacaggaataattcatctttggagtcagtagactcattgatgttggccaagtctgccacaagaattgctattctaggaatttcaacctccaatttaaatgatgcaagacgtatcaatgtttcagtgatgcaacaacgaggggaccctttgcttatagtaggatctccatttggcctcatgccacccttccatttcttcaacagtgtatcagttggtgctgttgcaaattgccttcctccatgcactgcaaggagctcattactgatggctgacatgcactgtctccctggcatggaaggcgctccagtgtttgaccaaaattcttgcctcgtggggctgctgatgaacccattaacacagaaaggcagcattttagaagtccagctcgtgatacatgggatgcaatatgcacggaatggaacagcacaaactggaggaaattgaacgacccc

SEQ ID NO: 286577 - DNA, 359 bp, Zea mays
aaaaaaggggggcccccccttttttttttttgtttttttttttttttttctttttttttttttttttttatctgagaactttactggcttgcatttcaaggatggcacacccagtgcgccatttattccatttcaatcgactgagataaacaagtaaagacaaaggagagggaagaaatcttatctattctgtatacacagcttttcacctagagacatcaaagagatgcacatcaagtatcgctagctagtctgcgggtactccttcacaacaacacctccttcaaactctatgggatccggaaaatcgtcccgtgaagccctcttgaacgagaacgagttctcttcgtcctcgtcac

SEQ ID NO: 286578 - DNA, 454 bp, Zea mays
tatattatctttttttttgctgactaattagtgactcgtgcaatttgcgaacaaaatggcctaacaaggcacaatttagcaatatatacgcaaccatgtatacaacagcaagaacttctacaacctctctttgtgattgtgaagaaacacatctttcttcgagatcttcaagaaccagttttatctctttgagattgattggcctgtgctcctccccttctcaattgcatcccagccgttagttggttcgagatacaggagtgcgtgcaaggactcttcatgatcttcctgcgatgtggtcatccacctttgacaacctcgataccaatgcttttattacttacgtatctacgttcactggcagcaaagcaacacaagcagatgagatgacatcttcggctagctagctagaactttgctcccgttgagctgctgtttgttgaccatgtagcca

SEQ ID NO: 286579 - DNA, 382 bp, Zea mays
acttgaaactggttatagttacatgagaggacacatcactactggggatgttaagcagtccagtagcacatactgttgctgcatctactgactacgtcaacagatccacacacacacacaaaaaagatgtgcttttgtactgcgcaggagctaacaagcactgacttgctatgatctgattaagttccttgtgatttttttagcactatccctgccatatgaggcagtacccaaaatcagggctcaaccacggctttaacccagtgaagaagctgattcaggaggacatctcgttccgaacgaatgaagtccagaagaggcccggcggccgtcatcgccagactgatgggcatggaatcgcctccactgaacgcagctactg

SEQ ID NO: 286580 - DNA, 353 bp, Zea mays
atcttatcatgtctacgcacaagaatggtaggcatgaataactgaatcgtcacacctcaaccaaaatgagcatgcagaacatcctgacatcgtgatccatcaagatacaagcccgattgggcatacagacctacaagatcacagctgtcccacaaaagcagcaactcaagaaattgttcaggcacgaatccatgccctgaagcaagatgactcccaatgtaaatgatagcaaaggctactcaggagtctaccagcgttcaagatcacaaaaatgaaagcacagcacaaactgtgacccggatcccaactatctccaccataacttgagtggcagtggtctctcaagagtgcgc

SEQ ID NO: 286581 - DNA, 483 bp, Zea mays
taaccaatttttttttctttttttatatttttttttatttttttttttttttttttagtgacaaactgacaatatggggaggatttttttaacacaaatcgctgttggtaaattacaacgtatttaatggaacacttttgtgtacaaatatgaacggctagtgtaaatgtacaataacacagattaaacatgtctacaaatttaaggaacgatgaagcgaaatgtctaacgcgcctctagagttgtgatactcatgttactcaaagacctctgcatgtgttcatttgatcgatcagttccgtaattcctaactgtaaaatatagaggttcttctggtgtaggaagtggcgatgtctcattctccagcatgaacacgatggatgacatgagtggccttgcatttggagggtcttggacgcacaaaagtcctaactgaacacaccgtacaagttcctgaagtgaataactcacagaaattgacga

SEQ ID NO: 286582 - DNA, 364 bp, Zea mays
aactgacagtacacaaataacctttggcaaagaaaaaacaacaacaaaacaggatggatgttctgtccatctctctttcggaaaccacaagactatattatatatatattgcaggcaatgcagccaaacacatcttctttgttatatatacaatacaattctttgacaagtgtaaatgtttatatccccctgtaaaggttgagcctgctggtgccaccaagcatccggttaaccacggtcgcagcagcatcggccccatggcttggagaggtgacctctggcgactcttccctgatctgcaacgatgacacagcctgagcggctatgaagccagggcaggtaacagactgacggaacgttcctt

SEQ ID NO: 286583 - DNA, 422 bp, Zea mays
  unsure (1)..(422): unsure at all n locations
tttccgccctttnttttttnaattacaccaatagcacaattcatttcttcatcttacaattttgggggaagaaccgaaatacaaagaaataattaataaatcgacttagccaggaaaactacgacaccaccaaccgctagcttttactatacacacatagagattattggtgcggtggtgccccagcccacagcctgatcccctagggctcacattatacattttaacccagggggggagtagctatggtttttttattatttaccatataagaatgacagcaacactgaaaatttaatgattaattaaacatagctaatccggctggttccgacgagcgctgcatctggggttagttcgtagttctggtgctcttttttttacccctcctttttcttcttctttttttttctccttgctga

SEQ ID NO: 286584 - DNA, 385 bp, Zea mays
gaaaccttatattaatgaacataaacatttgaaacggtatatttcatgttacacgtaaagatatttcattagtgtttggtagtattaacaaacaactttcttcaatttgtatttactagcaaaatacagatacacaccaaaattcaccaatgagagggtagtaagacaccactagtagtcgtcacggcgtcctttgttcagatcatctggtctccaaccagggctatgccataccctggtcacccctgcgacgagggtgatgatagctgagctcaagtaattcccaagagcagtggtgagcaatgcaaatgccgttaaaatgctcttcatggagtcaggcgcctggccatgaaagaactccagctgagtgatgataccgaagcac

SEQ ID NO: 286585 - DNA, 492 bp, Zea mays
agccaggggtaattacttctcatggaaacagaacacatgatcaaatctttttcacaacaccacgttcttggttcctatatcagcagttcagcactcatgaaaaccttatatgccccatcgattcatatactttgcctggtcctaataatatgtgacataaaagaaatagcattgtttcgtgactctgcttcttctgtataagcattgtaccaaagcatggatgcaaatgcactcatgaaaacatatgagcatttttgacagacttgtgatcaccaacaagacaaagactgtggaagaaccgacgagcaaagcgttggggtgagctcatttgaggtcgtcctcgcagtcactgagcaggtcgttgatggcctcggcgtgcgttatgcgcgcggacgcctgcttgacccatcgcgcacatcttgggggtctccctgctgacctgcacctggtcctccagcgcctttctgagccggcgctgctgctccctgagct

SEQ ID NO: 286586 - DNA, 284 bp, Zea mays
ctaagaggaagtccctactaaaatatttacatgtgtgggaatgtctagcagtatttaagcaaaatattggaaaagctagaatataagttaagatatttaacccaaacacttgaaaaaaaagagaaaaactagcatgtttaagttctaacttcttaaagacgatccaaatccaatcttcatgttcctcaggaaggaggtaccactcgcactgatggactccaggacaccctgggcttgacactccctgccggctttcccatataagctaagcatggacgtgtaca

SEQ ID NO: 286587 - DNA, 376 bp, Zea mays
ctagacaatagttaacaaattccacataattagatagataactacaagtacatagataaccacatacgagataaagataatcatccgaattaatctaatcgcggaggcacgaactgttcagaacttaggatcggaccgtccgccaacacactcacgccgaaaccagaacaataaaaaattaaaaaaatccgtatcacttgctgctcactggatggttccacaaaactgcttcagcaaaacaggggtcaaagtctttttttaagaaaagaagttccgcaggatggacttggggcatcacaagaagaatctccgcctgctcgtatccatatccggcttgtgagcccactcgtactcaccgctcctcgtgtcgaaggtc

SEQ ID NO: 286588 - DNA, 392 bp, Zea mays
  unsure (1)..(392): unsure at all n locations
tttccaccacctcgccgacgcagcacgactgcgcgtcgcagtcgctcgcgagaggcttctgctcgacggaatggtccggcctcgccgaactggcggtgtcgacgacggacctgtccgtgcaagagctgagcctcctcttcttggccggcggcgcagaacctgcggcactggccaccgactcgacgctcgaggtctcgttctctgcagcaggctgcctcctggccctgtcgagttcgtgcggcccttcgtctgagtcggaggagtccaggaggggcatcgatctcgtgctgtgtcctcgcgaacacccctcggtttcttctgctcctacgtcggctacgttggtnctcgttgctaccttggagctccggacaggatccagtggccccttgctc

SEQ ID NO: 286589 - DNA, 384 bp, Zea mays
catcaataccatcaccattatgatagtgtatagtttgactgaaattcatgttacaggcacgcattacaacacaaaactaccaatggcaggcaagatactaagagtcagatttggagtctgctcataatcatgtcgaactctccgctggcgtgcacctgccgcaccgttctgtcgtagtcgtcgtcatcgtcatggtcgtcttcttcttcctgttgctctgcttcgtcgggcctggacggtggcttgggcaccgtctgcgcctcctgcacgatcctcaagatctcctccacgctctgcgacgagtaggcgggtgctgctgtcgcattattgctgctgctgctgctgctgtctccctggcggctgtagtagtaggctgcctgcgcc

SEQ ID NO: 286590 - DNA, 539 bp, Zea mays
gaatgcaactgccagcagttcactcatggtcatccaaaatactattttgcactgtagactcattgttcgcaaagtgaaatttaaatataggtaagaggatgggtaagctgctgaaaataaccttaggatcaagtatttctctacatctttcactctacttcaaaagggaaagaccgtcaaatatgccacatttgccttgcaggcctctcgggggtgaaaaagaatgtgcacctttgtgcaccttatagctaattagctattgtgaattcgtcttgctttcggggcttcttactggattgaaatacgggtgagccatggtttccttggctgtaggccttttctggtgatcataccggaggagtttatctaccaaatcaatagcctcaggtgttgcaagatgtctgttcctagcattcacaaacttgggccatggtttcctattatgtcttccaataagtctttcaagctgtgggtcaagctggaggccatatttttcaaggtagttatacaggtctcctgtgccaagaacctcagctatt

SEQ ID NO: 286591 - DNA, 419 bp, Zea mays
accccgctcacaaacccccacttcctcttcgcccccccttttctttttttttttttttttttttttttttttttttggcacaaaataaaaatcatgggtgtaaccttatattatttttatctcgtgcaatatatattgatacaggcaaaataacattttgctcatttcctccgctcttgctcatcacgtgtcctgacatactaaaacctggcatgccagcatcagaggaaccggacagctcttctctactatctcgacaagcttgcggtccaccctcgttgcattggaccaaccctaggactcttcctctgcgatatctgatagattgtttgaattcattggggaatcatcttcaacatcttcatcaaggatatgcaatttaaccccatgaatttctgcagagagaacttccctatctt

SEQ ID NO: 286592 - DNA, 447 bp, Zea mays
gccgaacaagcaaataaatcatcattgcccaacatgcaaatccactccaatgacacaacaacgtgcaaaaccactactaaaggggtttacaaaaattgggttaaaaacataagccattcctttacatgatcatatttgcaactaccaacaaaaaacaagaaaggaattagcttggagtaattgctcattataagccattcccatggtgccatggtggtaccagcgttccgcagcagctatggtaagttcatgtacaatgacaccggagcgggattgacacgccatcaggcttccgcttgtccctgatgattgcctcctgaatcattggcagtttctgctgaatcttcttccatatgtgactcacagcaccatcaatggaggtagagcctctgctgctggagtagctggtgtcatactcataagataggttggacacgagccaggttt

SEQ ID NO: 286593 - DNA, 252 bp, Zea mays
agatgatcttcctcccttgatgcatatatcgtagcatcaaagagccttgcttggggcatttctcttcgctcctcaaaatctctccaggatctttcattttccattggggctttgcttatttttccttccagacccagcctcctcccatgtgaggaattcacctggctgggttccccaccaacccaatgatcatcctctctacttttatcctcaaaactcgacaattctacaatttttcttggctttctgggg

SEQ ID NO: 286594 - DNA, 414 bp, Zea mays
cgcttcaaagcaggattccacattattttggcagtcattagttacgcagcgggacgtagacctcacggcggtaatgtgggctgttcttccgcgttgtgagtgcttggatgctgctgaccggtactaccattgggtctcttcttgagagcgttcttcacctccgcctccttcttatcaacgaaagagatcagcgacttgatggtagttagcctcgccggcctgttcagaacccggggctcagcgaactgcgcctccacctggttactgtatctgctggtctggcagaatatccggaggaagaaaatcaccagggcgaggaagcatgcgaggccgcatatgaggaagaggccccagaagctcgacaggctcaaggagttcgacggcccagccccgttgtctgcactgcactccgtc

SEQ ID NO: 286595 - DNA, 408 bp, Zea mays
tgctgtgaaatcattcgtcgcaatcaagatagattgccagaatagcctaaaataataagatcccagtttgcatatattcacttattagaccacattcaactcgacagaacgaagcttgaagagcggatacgtcgagatatctatagagcaagctagagtctcgatggcatgctaatacatatggaacacgctatatagttggttctagcgagaataaacactaatcatgagctctcacaaatcaaattacttagagtactccgtcttcgaagagccactgattgcgacctcagcctcgatgcagcacttgcccttgatgagataaccctttgacgagtccttgaagtcctccagcgagatgaacttcttccatccccagcgatggtgtttgctcgagaactggcacct

SEQ ID NO: 286596 - DNA, 464 bp, Zea mays
  unsure (1)..(464): unsure at all n locations
ttntaattacanttttttttttttttttttttcccgctggggaatttagagcggactggttaaaaaaagaaaatcctatttagtataataattggataatagaacctctaccctatcaacggatagcgagagaaccaaatctggataaataccaattcctattactggtaaaaagatccaaattaaaagaaagagttctcgtggtccagaatctacaaaatttttgtttggaacatgaaatagcttgtatccatagaacatctggcgtaacatagataataaataaatgggagttaatatcattcctattgccattacaaaagtaattagcatttttggcattaacataaatttaggactagtaattagtccaaaaaatactactaattctgcaacaaaaccgctcattcccagcaaggcaagagaagccattgaaaagctactaaacatggtaaaaatttttg

SEQ ID NO: 286597 - DNA, 505 bp, Zea mays
caattcaagcgcaaatcacgttgagaagcattgctagctcgacgcagatgcatgacctgatcaagggcacactggaaaatcagaggaatttcgtctgacatgtgcacggtgcaatcgttcacccatcctacagctggtttttttacatcaagcgaattacttatctagtccacttaggcattacattagatattaataaaggtcagtctagatgtaccgaaatagaccaagataaccttgattttcacagatgtgctacgggaggatgggtgaacgattgcaccgtgcacatgtcagacgaaattcctctgattttccagtgtgcccttgatcaggtcatgcatctgcgtcgagctagcaatgcttctcaacgtgatttgcgcttgaattgttcaggtggcctctgggagaacacgtggctgtcggcaacatgcggaaggcctttccctcctccaggaccaggattgtgaaggctaacggagctgacggagagctgggggaagac

SEQ ID NO: 286598 - DNA, 458 bp, Zea mays
  unsure (1)..(458): unsure at all n locations
aatgnngccaagnatggggggaaatatcaatatgttaaaatcataaaacagcacactagctttatgcttggaatggccagcacgactcctcaatgtgtcaatgtcacgtgagaactggaccagaacaaaaatctgaatcaaacatacataacgtcaggttgccatatgcacacagaatggctgcccaaggaatgatacatatatattgagaatatcttcactactagtacaacagatcatcgcatagctaattcgagcttggtgacatcgtatttggtcaagcaactatggcaggaacatgacaccagcttaccaaacagtttcctcattcttccatgatggtgtcatcatctgaaaccggttcaccttccaagagccactgttcaagctcgtcgagatcgtcgtcattatgccgataccagtcagaggaggtgtcccagagcatagtccctaattct

SEQ ID NO: 286599 - DNA, 486 bp, Zea mays
  unsure (1)..(486): unsure at all n locations
tccttccanttttttttcccataggngggggcgcggggcccgttgggggcggcgccatccactcttgaaatggctgagagcccgccggtggctgggagaccggtggcacccatgctgagactggctgcgatccttggggtggaggcgtccaagtgcttggaggtgcctgcgtccacccaacaccggtccactatggctgcgacgctggagcttgtcctggccactgtccccatccttgtgcctggggagggcgaaaagcgggcaagttcatatcagggccgagtcgagtagtcatttcctgaaaataagaagccatatattgcgtcagctgcccaacctgctcctgcgctgctcgagcctgctcctgtgctgctcgagcctgctcctgtgctgcccgagtctcctcctccagctgagcctctcgagcagacctggaggagcgagaactccctcccgaagacgatgccttcccttgacctattgtcc

SEQ ID NO: 286600 - DNA, 473 bp, Zea mays
ggttcagcaagagctcagggaaaacccttgcattagatagatgagtagtcctccagagttcacctaaaaagaagagcttaggggagagcatagttccaaaaagttggcaccaaaagaacaaaacaaattggaagtaaaaaaattataacttatgctagcttttttaacctatgatgccctgctcacttttttcccaggctaacagaaaaagattctgagtaattctgtaacagcttcatgatgttctggaatatacttaagcactagaaagtttgactttagttcgatttagaatagcacatgatgcgcagctcttttgagagaaaaatgaatatcggcacgagggcctagccggattctaagtaattctgtaacagcttcatgatgttctgaaatatcggcacgagcgcaacgagtgcgatctcaagatgttccgagctgttcagacgaatcccgacttggccagtcccctt

SEQ ID NO: 286601 - DNA, 448 bp, Zea mays
gcaaataagcaaaatatatatatttaaaatcaataattgcattacaaaaagttgatccatagtttcatatataattgcacacaacatggagactgagactaagctgctaattagagggtgcagacgagaagaaaaaggctgttcaactgtggacattttttctagaaatctgaccagaggcaattatccctagcgctggcgatgacaatcctttgaatggaggggatagctagaggcatagcaaagctccacctccacagtaagtgccgcaacatgggagcgccaggtttattacaaagttcaaagtacatattcatgcatccttaaatctttcgctgccactgtgttttgcgctgaggatgggcacaagcacgtctaaagttccttcaattcaccctttgcacttaattggtgcctactgtcttgctttaccatctccataagcatt

SEQ ID NO: 286602 - DNA, 315 bp, Zea mays
agaaccgagcacccctcactgatttctttagcaccaatcaaccaatttgtagcaagcataacgacacattcaactgtgcggttgaaggtcgtccaaatggtgagtctatatacatcgagaataatcacaatctaatctaaagctacgtacgcatgtacagatcgatggtagccgtgccgtgtatgttatatacactcaactactggccactgtagaaccactgtactccaaaccagccgtcttctgggccaagacctgcctgaaccactccacggacgccttgggtatccgtgtcaaattgttcggacgcgtggg

SEQ ID NO: 286603 - DNA, 382 bp, Zea mays
ggcaatgcaacaccatgtggcaacatttcgttcaggggagttgccagttgtccacccaggtaacaaaaaaaaaaaaccacaaatgtttcagaacaagacaatatcggaaaacagacgaacaacaccctagaacggatgcagtgcattgatttagtacacaaacagctaaggctctcagctaccttactccactcaccacagaattcagctaaacggctaccaagctaggcgtacaaaatgaaccagcaaaagatcagcacagaccggaacagagttagccttgctcatttacaattttctagagggggccaagcaaagtgggttcaaacttcaaacagagcgccaggtcacccactttatcatcaatccatgctgctgctca

SEQ ID NO: 286604 - DNA, 320 bp, Zea mays
gcgtatgcatgctgtgatattgatatacaatcatacggacaaacttcttgtaatcgtgaatacatgtggttgtatcgcctcaatgactttccccgcttttcctaatgacaactttgtatacctaggccaacaaatcacagccctgcgactgtttttcacaagccataatgttttttttttgaaacaaatggtaggagctctgccttttcagttgaaaaagaaatagaagtttcatgtacaagaacaaattcttctcacaagccataatgaattcagtaagagctgtccatgaactccacgagcagctccctcaccgtgcc

SEQ ID NO: 286605 - DNA, 386 bp, Zea mays
aatcacacagccatatatatacccagctgattctttttacagtcggattcttagagagagagaaaaaacatgctcatagatgcctgcctagctgcctactagtgctaggcatagatggtacgaggaggacgaggaactagctggggcgggcagtcgaaagggtcgtcgcgcggcaacaggtcggcggtgcgcagggcggggaagagcatgagcgcgagggtgacggccacggacagaacggcgagcgccagcatgagcgcgttggccgccgcctgccgcacctcccgcgcgtactccgccgtcgccagcgatagcagcgtcagcgggaaggagtaggcccaccaagcaacgctgaagcgacgcatggaacgcttgaacagcgatcg

SEQ ID NO: 286606 - DNA, 452 bp, Zea mays
ttcttttgtctttttttataaaaacagtagtgataaggggtctggtattcatcgctgtactcatctcacataatctcatcgggtccctgtttacatagactcgtgtactacagatttctcaaagtctaccgtattccagatatcgttcctcttttcaaacagtactccacagatacacaccgcaccaacaattccatttccttccattctctaaaccttctggcctcaaaacagtcacactcctatacctgtcacctcattgtaagcacaaaattctatacataactggtgcataatgaagagctttaggcagatccggccccacgcgtccgcccgcagttcatgtcgaatgcgtccccaccaacttgatcggcagtgaaatctcattggcagatgaaggatccgaagttcagcaagtataccaaaggttaaaaaaacagagggtaaacagc

SEQ ID NO: 286607 - DNA, 505 bp, Zea mays
atcaagcaataaataaataacatatgagcaatgtgatttatcttgtggttcagcttacaacaatggcttgcctacctccacgttgttgaggaagccaccaaggcttgaatttctcaaaccttatcctcgttcttaagtcaagaggcaaagctcttgagatgagtgtttattacttggttcttggagatgattacttttggtccttgctctcagatgctatacatcaagaacaaagcaacacaattgttaataataaaagaccttcgtcctttgaaacattatctcctttcgggtataatgattctcagacgaggggcgtgaaagggtgaaccttcatcatctcaataaacaggtataaatgaaggtatacaaaatacaaaggaatgcaaataatgatgacacatattccaattattcatatcctcattcgtaatcgcaagtgaatatccacaacattaatattacattaatacctttggtttgtcaaaatgtgagagtgtgagag

SEQ ID NO: 286608 - DNA, 412 bp, Zea mays
tgtcccgtgtggttggccgccaacgtgctgcccttcgtcccggcgaccaccatctccgccgtggccgtcggcaacgaggtgctggagtccggggacgccaccctgggcgccgcgctgctcccggccatgcagaacctccgcgccgccgccgcggcggcggggggcggcgccgcggggatcaggttctccaccgtgaacaccatgggcgtgatggcgcagtcggacccgccgtcgacgggcgcgttccacccggacgtggctccgcagctgcagcagatcctggggttcctcagcaggaccggcgcgccgttcatgatcaacccgtacccgtggttcgcgtaccagtcggacccgcggccggacacgctggccttctgcctgttccagcccaacgcggtgcgcgtggacggcg

SEQ ID NO: 286609 - DNA, 369 bp, Zea mays
ccaagcgggaaggctgaaactgcaattccggtgaaaatatgatactcacaaaagtttcatcctaaaatacaacccgggcagtgctttgaatacccgacgaataaaaagtttccaagcgggaaggctgaaactgcaattccggtgaaaatatgatactcacaaaagtttcatcctaaaatacaacccgggcagtgctttgaatacccgacgaataaaaagtttccaagcgggaaggctgaaactgcaattccggggaaaatatgatactcacaaaagtttcatcctaaaatacaacccgggcagtgctttgaatacccgacgaataaaacgcaatcacctttatcaagtaatctttatcacctgcggcga

SEQ ID NO: 286610 - DNA, 423 bp, Zea mays
ggactccagtccattaccatggattcattgggtatgcagtcggtttataactgatgtgatgttgctgctctcccgggaagctagaacagcttcactccataaaagcgccgctgcaggctgcagccttttcacattccataaaagaagcagaatcaactctcctgatccttacggagcatctgcaccaacaatttgcgtttgtaggagtatgccgttggagtcccagtgatgtctgaaagtaagagcttcctcgccatgttcttgaattcacaattggtagtctcatctggccgactgtaaaacaccccttccttaaggtcaaaggcaggaggtgatagcagctccgttctggtgctggtgccggcatggctgttgtcctcggcgggggcaaccttcttgaccccaataaaagcttcagcgaag

SEQ ID NO: 286611 - DNA, 573 bp, Zea mays
cccacattgggtttttttccttatttgattatttctccttggacaggtctagatacaacaacaacaatatagcctttttacttttaaatcagactagagtacaaacctaacagttacaattacaacttacaacaacaacaacaaaaccttttaatcccaggataggctagagttaaaatccaacatcaacagaacattttacttctaaggtaagctagagctgaaaccgaacaaaaaccacaaatcaaggttcagacacatggttagctattttccactggcccctatttaaagctaaatctttgagtatattagacacaacagcttttttttctttgaactgacaactttcacctcaaacccccactagttagcaaccaacctttcctcaggctgcaaccatcatccccagaaacctgggccaaaaccatatggtggcctctgcaccatcctattgtcgatgtactgcacttgctgagcaccattgataccgaatgggtgaaacccattcaccatggggtggtagacagctggaggaccgaagaaagcctggccttgatgctgcagctcaat

SEQ ID NO: 286612 - DNA, 279 bp, Zea mays
tgttcatgacatgaactcattgcaatgtctaaaaccagtctcatgatgggtaggttgaaccaatcaatgaccatatgtggcggattatatcagctgaagcatttggtcgggctgcagttagtgccttctgagacatgtctgccatcaatttttcatcaccagaaatttcatcaactgcagatgggagactgctagaatcaagttcatcttcagtgatgaccattgctcccatgatatcagccatgatatatgcattacacgtatgatactcgagtcgaa

SEQ ID NO: 286613 - DNA, 559 bp, Zea mays
acacagaagaactgcatctttaaattaagatagaataaaaaggaaggttcttacaaaagaaaaactacacccgtactccaaaccaagagtgaggggttgaaccgaggcaaacacttgaccaaggaaggagaaaacacttgaccaccgcacacactagtagagccctaaggaactccaaccccgggacccaactccctgagcttaaccgctcctgccaaacaccaaaggtggcgctcctccaaataggcatgcatgaaattgatgaataaagccaaggaatcaaggtccctccggaggaattcaacgtaagaacaagtcaagccgggaattcttcagacatgaatacccaacatcaccacacccggcacaacaaatactcacatcttgtagattttaaatacaaagaacataaagaaacctacactaacaaaacctcataacaccggcttcagagatgtatcagtttacaccaatgaacatataatgagcaagaaaaccagtccacagcaatgcaaacaggactcgataactaatatgaagatatattatatcccgaaag

SEQ ID NO: 286614 - DNA, 430 bp, Zea mays
cacaatggcgcatgaaattgattgataagttcatcagaaacaaacacatttcgtagcttaagcgtgcttcacgatcatatattcacatggagggcaaaaccctaaggctcccaagtcccagccacccactacatagtcatacagacattaagattcactcaacacataatcatatggcaataggtcatcccactacaggaacttgccctagcacccgggagccgggagcacgaacgccactagatctgggcctacttcttaccgccttcatgcacctcgagctcctggatgatgacgtatccgaccttcttggggctctcggtgtcagacgactcgtcctcgtcctcatagagcttcgtcgtacggggaagccgcggcggcgccggcgaccatggaccagacgaggtacacggagccagcggtgagcgcg

SEQ ID NO: 286615 - DNA, 618 bp, Zea mays
ggacgctgggcggacgcgtgggcggacgcgtgggttctaagatcgcgagcggcgccctttttttttatttttttttttatttttttttttactttttttttttttttttttttttttttttaaaaaagaaaacaaaagataagcaaccattaaagggtccgagaacaaataagcaccatgttgcatgttttgataaattgattactacaaattaatgatcgcttccctcaagattgaaacaaactgccgtttcaagacaaaacttgtgtacacaggagtggaacagatgagatatgtgcaagtcattgtgggttttggaatctgcaacagtcgtcaatatcgcttttcatgcttcacgtaggtctgtcatctcaaacctgacatttgggttcatgtacacatgggagcaatgctcatagattggtgttccatctaggggctcctcatgagggtggaatccagttgcatcacaatcatggatcacgcccatgccacatggctccgttagatgaaatatgccatgttttcttgttgtatccgtaggagccataactattgcaatcgcttccggaagcataatctgatatgcgtaatgattatgaagatcaatggaagata

SEQ ID NO: 286616 - DNA, 487 bp, Zea mays
atctaccattgggccaggaaaaaataaaggtccacatgaaaactcggcttctctaacatcctctcggctaccaatgttacaagagttcacctttgcaacccagcatagcaggtggcgaagcccatggcatcaaaagccaagcacaagaactaatagctacgggtgggtcatttacagagtgctcaaaagctaccaagaccactactctgcctgcaaaagggggcaacccactctgcatcacctagtccttgagtcggaaacaaaagcttgctgccacctacaattctacaaacttatgtcaaaccactggaagcctgctgtcaaacctacaattctacagtgtcaagccgaccagaagcattttacttcgccatgctaatgtgcttcttaatcatgctcaaggtctccataacgccggtgtagtgttgcagtactggagaatagtgatcaagtgcagtatagatttttgcaagaagatccgttaagg

SEQ ID NO: 286617 - DNA, 422 bp, Zea mays
caacaatatgtccaaaattcagtaccaccacatggtttctcatctgacggtgagctgaacctgatcgcatctccagaccagtttattcagcagatgaacatgaacctcgacgaactcacgcactcgatctcgaaccaaccagaccacaccagcgtatcaccatcagagcctgaggtccaagtcgatcttactcggctgaatcggctcacacgcttgctcatactccgagtgcggcgctctcagcctgaagctcccaggccaggccgagctcggcgcctcctcgcacgggcaccgttgcccaggccgccgccacgccgccctcgaggaacctcgccgccgtcctgaccgccggcgccggcgccgggttggctcggagggagcgcatgagggcggcgtgcgcgtgcagcggcaggccgcccacg

SEQ ID NO: 286618 - DNA, 447 bp, Zea mays
accatcaaaaaatatatatagactgactgggcagtgactaaaccatagcagagcaaccaatccatgttggaccataattcacacagcaacatccattgcaaggacaaggaagctaacattgactgactatggacagtggttaaacttaaaccatagcagaacaccacacacgctaactgcataccaggctacgagctgaaggctactaataaaagctaacaacagcattctacaaagtcgagcgagccaactcaggctaccaaaacccaacgcacgcgcaccctctaggccagccacaagtaaccaaccaaccatataagctaactcgattcctggaagtggcctggctcctcctcatcacttcacgaagtgagggttgagaagcttggcgatctcaaggaatcccactcgctcccgccccgcgaacaggaccttcagcttctcata

SEQ ID NO: 286619 - DNA, 487 bp, Zea mays
gttgcaaatccattgcaatagcatttatcaacaacgttcacaatacattttactcagcggtcagcacaattcaccgaacaaaacacatctacaaatatatgtattatctacagggccatctgataacacatggagacttgttgcggcacagaatggcaatgaaggtcactcctcactcgacaactttccttcattcatgcaggccaacgctacccccatctagcgctatattagctggacaaatgcatctatctattcaacaacatctgtgagcagacatctatctattcaacctcatctgtgagcagacatctatctattcaacatcatctgtgagcagaaatgtgcgaccaggcccatatgcacaaccccacttgcccagtcagcagccactaccaagccatgtttatcatatcaagcaccttcagacctttttacacttgaaaaagggattaatgctgacaaagtacaacccgatgcactggct

SEQ ID NO: 286620 - DNA, 513 bp, Zea mays
gaacaggataaatcactcgaatcaagggttcattaatagcctaaagctgaagaaaatcatcgtcaatgaagaacacagaagtgcatgttaagcatttctagacttacaatgggatggcaaaccccattcggaaattgggtggggggagggggaagagactaataatgtctttggatagctgcaacaatcagtgagaaaatgggggcagagtgcaacgggcattgctaccacaaaatgaatcctcaatgtcaatgggatcacatcaggcgttactgattttcaacgccgcattactgtagggcggaccatcacttgcgtggccgtcctctttttcctctgcccgaggttcctccggctttctgagcagaactctcggttttcttggggcggcctctgccccttccagatgtctttgcctcaggggtcgcctttttgcctcccctgcctctccctctattagcgggtttacggccacgcctgccctttgactcttctacaccaccattttcatcg

SEQ ID NO: 286621 - DNA, 625 bp, Zea mays
gttcataattaaacaatatagatataatcataaaaacactgaagaattgaaactaccacaagcattgtttatcatgagattgtaacccaagagcaagatcagattgtggacacggagaatagtagctaatagtaatgttctggaaaacttctccaaccgcctcttgtatataagatggtggcaggctcagattttctgagatgatgcacaacaatttgttgagcaaggtccttcatgctgtggctgtattttgcaataatatctctgtaaaaggtacatggtgttatctcccgagttataggtaaaattaacatgctgaatatggacataagatggaaacgtgatgcttaaatatcttgttcttagtaagatgatcactcataggtttcataatgatcatacaattagattctccagactataataacatattcaacagtcatccatgtctagtatgttatcaaagaaaccaatgcaaggttgtcatactaaagagtctatatttggtatagtaaattcaaaaatgaaaatcagtaaaattaaacatcttatgtgctttagtattcttggtttgtggtagcattgagttgtcttcatgagattcagcctattcaggtcattacat

SEQ ID NO: 286622 - DNA, 443 bp, Zea mays
tttccgccctttttttttttttttagtatgaaggatattttgggctatttcaagtgtttttttttctcacaaatagtatgaagtttactcctgaatttataacagttatacttttttgaaccagtgcatgcgcatcttattcagcatatttacaagataaaatagcaataacttactgggaatatttgacttgactggtaaatgatgccaaaaaaggaacaagcttttatgttctctgatgcagtgatgctcgagtattaccgagtctagtgtgactcgcattcctctggttgcagtagtagcgatgcagtgcctcccgagcttctcacttgcctgctcgtcccttttgcgtcctttgctcaggtgcttcgcctccccaccgcgtgatggcggtgataatccgatgtgcacgcacgctacgcccaatggggaggaacacaact

SEQ ID NO: 286623 - DNA, 557 bp, Zea mays
ctagcgaacggcctcccttttttttttttcttttcccaataccttttatttttttcgttttgggagcgcgcgcaaaggcccgcaacaagtacactttcctgccatgtattttttggaaagcacttttttaatataaaagttagagccatcccgcttttaaaaaagttgttacattacatgcatttttcttaactaatccaaaggaagtctatctttttatctttttaacatggaagatgaccacgggtgactgtaatcttcactagagactgcactattttacataggccactggcattatttatagccatgtttctccattacttcactagcaagcgagctcgtctccattctatacttgtcactcgtcatcaccttccttattggcagtaacatctccattgctcatcttaggggccttccctgctgggtctgctgctcctttgctatttggtgcctcgtctttctctttggcctctttctccttcgcctcctccggttcctccttggccgccctagcgtcagctagtgccttagcagcagcagcagcagcagca

SEQ ID NO: 286624 - DNA, 326 bp, Zea mays
aagaaatactataattttactggggtaaaataatattggaatacttatgttatatacaattggaaactatagtactatatgctttaaaactatagtattctaaaaatgcattaccaaacagacaatcaaatgtaatgtaacggttagccgttttttttttcgagagagttcctttctgcctttttttgggcgcccaaatttggccattatacggcctagacccatgtggacgtggccgtttttcgaggaaacatggacgtgaccgctgttgttggggatcatttccaacttccaaggggaccttaatcagccaagcgaccagggga

SEQ ID NO: 286625 - DNA, 512 bp, Zea mays
cacttcattcaaaccccagacttcctgctggcacataattcaacagacactagtacagactacatgaagtttcaacagctgatcttgggaacaacatatccatgcatgattgcagaaagagtagttctcgtattagtagctttggcaagcaaatctgaagatatacacacattgcccaccatcgagtggcccttctccagtccaaagaacaaatcaacgtgcaagtgattctggcatgttgaaatgaccagggcagactagaagtaatactgacagatgtacactcaacaactacattgcgtcaatactcttgttgacagaagcatgggccatcctcaacattgtaacttcgttactatttgtccggggtggtttgacatgattctgcaaactatgtatggacgagaagggatccatgaagacaccaaagaacgagataagtggatctgcacgcgcactgtcgatggtaagcttcaggtaccgagattcagtgactggaaacagtagcagcc

SEQ ID NO: 286626 - DNA, 406 bp, Zea mays
atcacggccgatgaggagtgccgcatcgtggagctccacgcgcagtggggcagccggtggtcgcgcatcgccaggagcctgcccgggcgcaccgacaacgagatcaagaacttctggaggacgcggaccaggaagaaggcgctcgaggagaggagggctgccgcagcagcaacgtcgacggcggcggagtcggcgtcctcggtgatgacggtgtcgtcgtcgtccgagtgccgccgcccgcccgtatcgtcgtcgtcgtcgtcgtcttcgctacggcgggacgaagcgcggcgcagcggcgacgagaccgaggaggcgtccacgcccaccgcggcgccggcgaccaagcacgatgaggaaccccagccgcagccgcaggagtgctacgacttccccatggaccagc

SEQ ID NO: 286627 - DNA, 692 bp, Zea mays
ggatattcataattcatcctttgataatcagattaaaaagaaaatgttataggtatcactaacagctgaggtaagcacaaagtgatacgaaaggcaaaattaaatacagcaggtgtgtctgtgttacagcttctccagaaagcagcaattgagtaagcacgaagtggcgcaaaagcataacaaagaagcttcacagcagttgatgggtcaaaaaacagaagaccacagcatcagttgtcaccgaaggcaggcgcaaccagaaggcagggtacctgttgcatcaggggctccagcgacataatgccagtgtcccatttgaaacatgataagaactgagattagcttatggatgccagctattccatcatttcagatcatacgaacagcagcagcagaggtaacttattcctacttttagaccagctgactcccaggcatggcacaagtaatcaggtctggttgtccacttcaccaacccttttgtgcttgtgcttgcacaccactgttggaaaaaaaatctgcctcaagtcatatgaacaggtagctgtctccagagacattgcttcaaggaagctggaaagcttgctgggaccttcccatcttcagactaatgagcttgctagagaaagctcgtgtatttcagttagcgtccactcttctccagtttgtcctccaagaactattgcctttgt

SEQ ID NO: 286628 - DNA, 385 bp, Zea mays
gttcaaagggcgtgtgattataatgccagcaaagcaattgtcgtcttcgcgatgccaattggctgaagcccaattagagtgccacaattgcaaaaatctcggtgatggaaatctatctgaaacatccgtgctactccaatcggcctattctaacagcaatggcatcaacggaaggtattatgaactatgatcgacacaggctagctaagggtagtctaaagggaaaaaatgaaccgcgtggcaacactagcgccagtgacacccatcaccggaacagatcgccgaaacattgcgcccatcccctagcgcaggggcatcgcacacaagcgtcaaccagggcggccgagatctagaagcggacttgatcggggggttcacctggttg

SEQ ID NO: 286629 - DNA, 612 bp, Zea mays
tctagttctagatcgcgagcggccgccctttttttttttttttttttttttgattcaactttgctattccattccctcttctttcaatcagtttatgcacagtcatggagctttctaataccatctatctctagtctctttctatctttttttttctggaaaaacacacacacaccacccgccaccgccagcccaagaatctctatcgaacaactctcctcctgaccctcaccggaagcccgccgctgatggacgcggtgagccccgacacgaacttgggcgcgcaggcggtggcgccactgtccccgaccacctcgacgtcgaacgccctcaccacggccacagcgaccaccttcatctcggtgacggcgagctccttgccgaggcagacgcggaggcccgcctggaacaccgggtacctgtacaggctctctgggacgaacgaggcgccggctccggtgagccaccggtcggggcggaaggcgccgtggtcggcgccccagatgcgcggcatccggcccattgcgtaggggtggtacgtcacgcgcgtgccgccggccacgtaggtgccgtcggggagcacgtcgggccccgcgcagaacttggagtcga

SEQ ID NO: 286630 - DNA, 337 bp, Zea mays
ggtacaactgagtttgaataacttgcaattacattggttttttttttcatacacatggaaggagttccttgctaatttggtccgatctatctccttcgcaaagaacccagaactatacaagcacatcgatcctacagccccaaatgatgatcatcgacaccaacatatacaagatggtaatttcatgcgggaaaaaaaagaacacaaatgacatgaagagcttctggaggacttcagatgtcagagcatccaacatgggagcctacattagacggccaatggattacacatacatatttgctacactttccaccgccaacacttcataacacctttg

SEQ ID NO: 286631 - DNA, 438 bp, Zea mays
attatgtccagtcacacagcactaatatcttcatctctctgttcataagctaatcttctctaacttaaccaactctacttacggaaactaatggctcattttggtgccaaatcagaacatactgagacaaaaaagaaccaatagctagcaatcctttaccaatacagcagaaaagtcgatgcaggccacgggcatcgtctgagagagacctgttgatgccaactgctttagaaaaacccgtattttgcgatcccccgagcagcacaatggtaatttagtttcaagccgaggttaagatctaactgagccagccccaggcatagttccagatcaataatcccctgccccccccatgtggcaaacacaagtattcaaccctagacatccaaagctttgcggcagcttacatgtatttcacgggggagaaaaaaaacatta

SEQ ID NO: 286632 - DNA, 518 bp, Zea mays
gacctgctgtgccgcgtctgcgtcgtcacggcgctggccagcgcgctcttcaccaacgacacctgctgcgtcgtgctcaccgagttcgtgctggagctcgccgccgagcgcaacctccccgccaagcccttcctgctggcgctggcctccagcgccaacatcggctccagcgccacgcccatcggcaacccgcagaacctggtgatcgccttcaacagcaagatctccttccccaagttcctgctcggcatcctgcccgccatgctcgccggcatggccgtcaacatggtcatgctcctctgcatgtactggaaggacctagacggcagcggcagcggcatggacctggacggcaagcggatggaggccgtcgaggagggggccgtcgtcgtcgtcgagccgagccccaagcagcagcagcagcagctgggcggcagcaacgggtacatgtcgccgctgatgacggagaacatctccaccaagcacccctggttcatgcagtgcacggagcagcggcg

SEQ ID NO: 286633 - DNA, 295 bp, Zea mays
aaagctaaagttcagatttaaatgaatgtgatagcaatacaaaggatatacatacgtacaatggtacaacgctacgcacaaaaagaaagcacgagacgcaggtgcaacaatactgacaaacaatgacatcactctcgcatacaccggtagtccggttacaccagcaccggtcaccaccacctctgctctacatggtgggcacggcgaacgcgaacctgcaggagcgcgccgcgcgcgtctatgccgacggaggcggtgccgcgaacggtatgggcacgttgacggtggggaccga

SEQ ID NO: 286634 - DNA, 491 bp, Zea mays
aactgaaatttccaattccactgtagatagctgaacaattcccagtctgaccttacaaaaggacagctagttcagaaatacctcaaatggtatgttttgtatgggtgagaatacatcaagaaaggggcatttaaaagaaacaaaaacatcggtgacatctgcagacttcataacatccaactgctatagcaagtgccatgtatgtatgaggggaaaaaactgcctttctggataatgtcaataccaaaagcggttttgtttaggccacacaatcttctcggcaattggagaatgaagacggctcatcccgacgccttctcggtcgatggctagactagacatcagggcggcgattcttcactcctgctcactttgggggccgacatgggcgggatactttgcagaaacatcagtccatgtgctttggccttccgtcagctgcttcaccatgggtgccacctcgtcgatgtccacgcggacctgctccttgc

SEQ ID NO: 286635 - DNA, 724 bp, Zea mays
ggaatgagttacttcaaaatgaaaaagccaacttggcagaagttgaacctgcaaccaaattctacttctgccagatattgctgctaggagacctagattcgtagctgttgttggaaaaataaaacctaaagcagcatctgcgtaactgttaactctgcattgagttgcactgaataattacatgtatccgctacgtagcacaaaactttacacgtttttaatcaaaagagcaaggagccagaacaggggttatatatcttcagctgatcgatcaccttctaccgtttctggaagttcaaagccttggtgccgtacgcgaagaggaagaccaacagaaggatgttgccgaaatgcgccagcacgacgtagccgaggaagtcgtgcttcatgcccaggttttgttccagaaattccttcaccacgactgtgccggcgttgccagtagccgtcacgttgcggcctacgtcgccgaactgcgacgccgtgacgccgtagatggtccaggacaccgtgttgcaccagtagaaccatcgccaccagataggcaacgccggtcggggtacgaggaatccggcgaagatgttccagccggttagactgaatgagacaacaatactcgcaagcattgcggaaggagtgcaggtaaccagcatcgcaccaaaaagtgaaaagtagaggaaggagcaggttaggaagaacatgaagtagaagaacttgtctgcct

SEQ ID NO: 286636 - DNA, 275 bp, Zea mays
atcgcgagccggccgccctttttttttttttttggagcagcgtttcttatttttattacatacagcttatgatgcacatacgacgaacacctcgctgccgatcgactgctacccccacgttctgatactattactatatacatctaagcatcggagagtcatggtctatagtaataatattacaatgtacaaggctgcaaaacttagtcgcggttatcttactgatggtaccactgctagtaactgtaaaagcaaaacaaaacctgagaagaagc

SEQ ID NO: 286637 - DNA, 457 bp, Zea mays
ggaaaggaaataaagtttactattttccattaatattagaacaattgcaatcgacagcaaattctcatatggccactaaacttaacaacatcaacatagatcgagtattaacacggtcgtactataacaccgagcaattgaagaatgtataagcaccctgcatcgtaaatgtatgtatagcagcaacccatccatgtccgtcatcaccgacgaatgaatcatatctcgtccatgagctcttggaaggcgtccatcgcggtggctggcaggccgagcagcacgttgatgctcttcctctccttcccgtgcgccaggaacaggatgacttccttctccggcagcgtgaccgggcccgacatgacgggctcgccccacccgaagtcggcgccgtcgaactcgagccgcgagcacgtcgtgatgatcagcgtggacgcgagcgacggccgcgatcgagccg

SEQ ID NO: 286638 - DNA, 360 bp, Zea mays
agggactctacttatatgattagcaagcttaaatagagattgttttttcaggaccattttttttccttagattacagaagccccataacacattccaaaaggtattgcatgcacccaagaatctgctaatgtcccgttgataaacagttaagtgttgaaaacaaccaaaactgtacttatcacttaatgaaatacatggcacaaacaaaaaaactgaatatgcctgcgaacatagcagaagtggttgtcatgtactagaaacattattgtgtcttcgaacaagctgctcatataatggaagatggttctttgcaacaaaaaccctgaacccttcaagaagtggaagtcttcctggggacg

SEQ ID NO: 286639 - DNA, 402 bp, Zea mays
aagaatacattttcttttattttccgagaaaattcaaacccaaccagtgcgccaagcatatgcgatggcatgcagataccccgcgattattgctgcaactgctactaggtatcatgatgcgacggggtggccattgaggaagtcgaggaggagctcgttgacccgatccgggagctgctcctgcacgaagtggcccccctccgggatgtagataatcttcagggccggcatgaagttgtccatggcgccgctgcgcacggcggtttgaaccccgggaacttgaagcagtagtccttctctcccatcaccatgagcaccggggcctggaacttggcgtccagccgctgcggcatcttgcgtagagacgtgtatggcatctggagcgggtagcggaagccggac

SEQ ID NO: 286640 - DNA, 259 bp, Zea mays
gggcgttttgtttttttttttttttttcttttttttttttttttttttttaaaaggtaaacacacatttattcaaatccgctttcgaaatcacatacgcaaacatgcatgtatcgtcgtatcgatcgatctgcacccggcccgtttttacaattgcaaacgacagccagaagctcggaatcagaagacgggcaacttgacccgatcggtgcacttggtgggcatggggagcgggcagtcgatgaggtcggacgcgtggg

SEQ ID NO: 286641 - DNA, 454 bp, Zea mays
caatgaacaaaattgaatattggtttggagatgttatgtacaacaacgatgaagagtaatatgaacaaatttcgccggggcacgattacaagccccagacctaagtaatggaacattgtttgtattccggtacacgctgtataagtgtgtgactgtgggagtatcaagactctgctactcgacgaaaacttaggtcacatagcacccaaaccaccggcgacgggtttcgggagacgccgtcgcgagctcgatttcttctcttttttccgcttcacggagggcttcttcgacggagtagccttcctgctacctgcccggactttccgagatggtgctgcgtcggtcaccaccacagcccccgaagggggcatcctacctgatgcaatcatctgctccagtagctctctgtggtacgcctgaacgacaaagttgcgcctctcgcagtccatgaaca

SEQ ID NO: 286642 - DNA, 435 bp, Zea mays
ttcgccaaggacgccttcatcgccgccggcctcatccgcctccacttccacgactgctttgtcaggggctgtgatggatccgtcctcctcaccgtgaatcctggcggcgggcagactgagcgtgacgccctcccaaacaacccgagcctccgcggcttcgacgtgatcgacgccgccaagaccgccgttgagcagagctgcccgcgcacagtctcgtgcgccgacatcgtcgccttcgccgcccgcgacagcatcagtctcaccgggagcgtctcgtaccaggtccccgcgggccggcgcgacggccgcgtgtccaacgcgacggagaccgtcgacctacccccgcccacctccacggcgcaaagcctgaccgacttgttcaaggtcaaggagcttagcgtggaggacatggtcgtcctctccggcgctcacacc

SEQ ID NO: 286643 - DNA, 462 bp, Zea mays
ggggacaactttgggtttcaaggcaacattatataaagctgaccccaaccttttgccttcaagtccagagaattcaagaaagtacggagcctattacattacataaaccaggtagcatatcacccgcgatcaggccatcaccataaactttctcactgaaagcgtgccaacaccaacagtagattcagaaaccgcagtgcagagctacctagcacatctctgttcttcggcaggacgatggactagccaaacttgttctcaatgtcagtggcctcgagctcgccttcctggtgcaacagcttcaccatggccatgagcagctcgggccactcgcagtacagggcctactcgatgccgacgtcgtccttgtgctcatgcaggtggctcctcacattcctgttgagccgcaatatgacggactggtgcgttcccttgtactcgtgctggacgttcatgacccac

SEQ ID NO: 286644 - DNA, 497 bp, Zea mays
atcccagaacgcaagtgcatgatcagatcagcattcacgaacgaacagaaacaaaaaggcaacagccaaagaccaatgccgccggccggtatcacactcactcatctccagtatacgaacgtgcagtatacacacacacacagagacacctaccatacattgaagatacacacactagctagctaacccaacccatcgtaaggcctactactctgaagatcagatcagatcagatagatatatagtgtgacgcccccgacgacgacgacgatgaggtgtatatatatatattacatagacagcggcaggcgggccggcgttggaggtcttttcctcctgcttccggcgccgcagcacgacgccccacgtgacggcctccagcgccacggcgacggcggccagcacggagacggcggcgacgtagcccgtcctccaccttcgcttcacgttcaggatggccatgcccttgaagacgttgacgacgcccagcacgatca

SEQ ID NO: 286645 - DNA, 310 bp, Zea mays
aatctttttttaagctgaatagacgcgaattcaaaagagtttttagctatataactcatgtcaacggagcacacgtgtattgtatatgcgcgcgcgcagtaataacaaggcatattcgtacatacaaagaggtataggtgatcgtcgatcgatccatcttagtagtagtagacttagacatgctccggcgtggcggcggcgtcggcctggatgacgttgcgcttgccgcgctctgagcggctgttctcggcgaacttgaggctggcgctatggagtcccttgctcttctcgtcgtcgttccactcggagg

SEQ ID NO: 286646 - DNA, 502 bp, Zea mays
gtagtagttgcttcacattacactcatgactcgtcttaggacgaatcctgcagctgcaaaacacagtaactttggccgagacctctttatctatttacaggtaagaggaggccatgctgcgcacatctgtcggcatgaaggccagtacaaccagcaagacgagcaggcagaccggcagccacaacagcagcgacggcggcggcggcaggggaggcagcaccagcggcagtatcagcagcgagacggtgaggcaggcgagcacgaggaacgccccgatgctgaagtaggtggacgcgatgaccttcttgtcgaggaaatccgcctccatgctgacgctgctgcagatgccgcttcacggcattcctcctttgtattgccgcccctccttccatcgcgctagatcggcttgccatgtgttctttggtgtaggtggaggtggagaccagtcgcagtgagtggttgccaaagtaagcaagaagtgaaaggcggtgtgagaacgcgt

SEQ ID NO: 286647 - DNA, 389 bp, Zea mays
atctcaatgtttcttattcaaaactgccaatgtttaacgaacaattcgtatatagttactgaaagatggcaatagaaaacaattggatcagctcacacgcggcagttcaatacaacacaaacaacaccatagtttgaaggagacgaaattgcagacgtacatatttcttaacgttttatgttcctgttgtgcgattaaatatgcgtgatcccttgggtgcagcgccatgccgacatccttcgatggttcctttgcagatcgaccatgggacgtgtgtatgcaaggtctgcaggtaaagtgaatcgttgcttccaaagagaacagaaatgcaacagaacgccaggaattaatggttaatgtaatttgaacctcacaagtacttggatagc

SEQ ID NO: 286648 - DNA, 287 bp, Zea mays
ctcataattccttcgacattatctgagcattattttaacctccaaaatttattggcactgggaactgccagtgcctgttacagaagtgtatgcttctggtacaccatttccttgcgtttgggagtaataactccctgaaaagcgaaagcttttgctccatgtgctggtatatgggttaaactgtcttaataagaccgtaagctgttagatatgaccttcctgatgtaaacggtgcgagaactgtctttctttagctccagttctgccaaaacttggtggtgagcctc

SEQ ID NO: 286649 - DNA, 575 bp, Zea mays
ggttgggcttgttccaaaaccgtggaaaccgttcattttcctgaaactgtgtttttttgttcgggctttaaattaaagtcaagggaagaatggagcctagtcgctgcaacactgaatgtctgtgtttaagagcagggcggtcatggagaaggagaaccagttgaacgttttgcatttctgtgcatgagtccccacaagcgtacgctggcacatgcaacctctccagctatgacgacggcgacgacctcgcgtcgacgccgtcgtggccggcgatcatccggtacttgtccctgcgcgtgagcccggtgcactcgaacccaagctcatcgccgatcatgcgctggacgccgttggccacgtcgaggctggacgcgccgccactgccactgcaggtggccaggatccggatctcgtaccacggcgccgggttcatgaggaagaagacggagtcgagccacttgtggccccgcacggtggagccgtggaacatgtgcgccgccggcccgcacggccgtcggcgtgaccttgtcggcgatctccgcgaacagcgggctgaagcgcagcaggtagggctc

SEQ ID NO: 286650 - DNA, 695 bp, Zea mays
agctggcccaatcgactgatacattatatatgtaacatataccttacacactggacgcactaacaatgtccagcataaaaaaacaaaagttgcgatgaaacaatcgaaaaaaaagaataatggcgcaacaacacatgacccctaataaacttgcttttacggatcttgtatgtctccgaaaccgaaacagggcagcgacaaaaccagacatcatcacaaaattcgcgttgcacaggccaatcgatttgagtcggttccgccatgtgcgcgtgcattgagctttgctcggatcaaaaccactgcagactaatgtctcgtgattgtatcaacacctggggatatcggacggtggaggtggcagcttctggttgggcagcggcccgtcgttgacgagccacgccattgccagaccccaggtcaggtgcacgtccaggtggcaatgcatgatccacacgccggggttgtcggcgacgaagcggatggcgacccagccggcggtggggacgctgacggtgttccgctgcaccgggtcgacgaggttgtacctggcggtgtcgttggtggcgtcgtagttgccgaagcccgtgccgacgacgaagaagtcgtagccgtgcaggtgcagcgggtggctctcggcgcccaggacgctggtgtcctgcagcaccacctcgacggtggtgttgaagctgagcggc

SEQ ID NO: 286651 - DNA, 643 bp, Zea mays
gcgaaccaaaaactatcctccaaacttgtcataacacaaaagaggtaaccatcggcaaaacaatgttacacttcgttacaacgaatgcaatgcaccttcagtgacaaaattggcatgaatgcaccacgttattgggcacagggcccgttggtttcagcatgaaacatccaggactgtcaaaacacctgcgtctgcctgtccaaaacatctgaaatcctacaccatctcatcctgggactcatctgtggcctcagaatcgtcttcttgcccttctacttccccagtttctgttcctttctttcccaccacttccttttccacaggccatgggtataagacatcttctgaacatagcccagcttcaactttaactaggcgcatagtcatccttggtccaatctcctggagtctgacagcgcttttttctggatgcccggtttaatttgtccacgtcacttggcacgcttcccattgctgcttcatcgtccgcttcactctctgatccataccccgcttttttcacccactcactaacatcttcaaattctcctagctcaggcacttgattgttttgcatgagctttctaatcctgccactgacccccacaggctggcgcttgatggagtaatgccggaattcact

SEQ ID NO: 286652 - DNA, 441 bp, Zea mays
cagacaaagatgtgtatgtatcttcacatagccaaccatatatatggttaacagtgacaagaacatataatatgctacatatgtataatacaatagtctcagcaaaggggttttttattttccaagccaccctaaacaagccatcgaaagaaggtgcaggcgtaaagtacaatcacaaccaccgagtttctcctgcagtctcgagcatcctatatatattatcatatcctatgtgttgacaaatctgcaggtcttcctgacctcgccgccggcagggttggtgatgttgcccatcttcaccatggagtcggagaactgcttgaagaaggcctcggggtcggcccagtacttgttgactgtgtcggaggtggagtagcccgcgatgctggaccacatcgcctggtcggagttgagcaggccctcgcccttgatgagggtctc

SEQ ID NO: 286653 - DNA, 553 bp, Zea mays
cacacctatgatccttatagcagtgaaacctttttacatagtaactcttgggtctcagatctaccctacctatacaaagaacacaagtaaaaaaacaatgtctggccatctaatagatttatacatgacatggtgaaaacatccccaatgatcctaccttcataaccacttcaaaaagtacaaagccaaaagaaaagatcacatttgttcaaaaagagagagaaaagatcacaactacaactcaaaattacgtaggagttggagaagcctgagtccttatgaacatgaatctcctcctcgcaatgctgtttgcattctcacctagggcagccaaatgaagcatcctccgccttgctgatgccacggcaacatcctctgtgcttggttttccagacatttcctctggtggtgaagtctcattcaaagcccctgctttcccatccaactccttgtgctgcattgcttgtttcaggctctcgaccacttctctcatcgttggacggtcccttctgtgctttgcaaggcaactattggccaacttggcaatttatct

SEQ ID NO: 286654 - DNA, 384 bp, Zea mays
tagttaaacgctagtagtagcatacataagtaaataaacaataccctcagaatttacatgttgcacattccgagggcaaaatcaaaacatgcatggcctatgttatctgctgctctagtctggtaattctaggctagagcacagtacaagtgcaaaccttacagtatccttccaacgatatcccatgcatctcacgaaatttacgctggcaagtcggctggtttatatacatatatctggtccgtggtacgtcgtaggtatatcaaattaattattaattggctactgcccgcgcggtcttagaacacgacgaaagaattggccatgtcgtacttcatcttctccaagttgggcgagatggcgaactggatcatcggcggtggt

SEQ ID NO: 286655 - DNA, 542 bp, Zea mays
agtcacaaacatatggcaaatcaccagaccacaatagtgcttcaaccatcgtatgcagtttacaaagtaatgtagccagatagtgcaaaaccaagtatccagtcaaggcatgcatggataaagcacccgctgcagttcactgctcgatgtcctatggtgtggcacgagtggcacatataaattcttccagaaggaagcaaaacatgagcatgagtcatctgtatatcaacaaaattcctgcaactgttgcagctgctgagatagggcacatgcaaaagcctgacatattttttctttatttcactttcactaactcgatttcatatatgactgaagaattttcgggtacttctcccactgatttaccgccagagagcattgaaggtggaactgtaagctttcttttctcgccaacacgcataccatgaataccaacatcccatccacggataacttttccagcaccaagcttgaacttgtaaggcttttcactaacattagactcaacaattttcccatccttcaacatgccaacatatttg

SEQ ID NO: 286656 - DNA, 251 bp, Zea mays
acaatatagaacggttctgggtatatatcaggattatttgacagcgtttgtgggaaagatcgacacgatgatatctgaggtcttgctcaggaacaatacagatcgggcttagggaaccttgacttgggtatgaccatcagtggcgtagccttcttcatcacgactccgaacttctcggataggtccagctcggtaccctgcggcagcttccagtcgaacgcctgcagcagcatggccagcgagtacgtagt

SEQ ID NO: 286657 - DNA, 359 bp, Zea mays
ttttgctttatacgtgaagcaacatatatgattatccatacttgttacttgatctctcaagcaatactggaagatagattcacaattaaattaaattccatatgggaaataagtcgcagcttattcaacccaaaatattatcagacacatgatgaatcgcatccacatttcctgattcccccacgccccagcttatccttgggggggacacctaaaagatggcaagagcatcgacgtttggctggcgtggagttgatgagcagaatatggcggtacatctctcctgcggaacgtatgggatagcattagcatgcttgttgcttctgccattcccatccatggacaaggcaggcgtgttc

SEQ ID NO: 286658 - DNA, 303 bp, Zea mays
cccaggaaaatgattggcgatactctcaagggaatcatcgtgagagatgattccactattctttattcataggacgctaacttgagcatatttcttcattatttacacaattacccaatgatacctgacaggtattccacgcacttcagctttcaagaaacgaaatggaaactgaatccatcgggtacttcgatctctgtagaatagaatgaaaatctgcagtgcacatcatgttagtttaccatccaggactgcagaagccttggacacagccctggcaaccctgtaaatctcgtgctgcag

SEQ ID NO: 286659 - DNA, 471 bp, Zea mays
ggccgtggcgctccttgttctctgctaccggtccagcagcgtggtcaccgtcaggccctgggcgacggggctcagcgggcagctgcagaaggcgttcgtcacgggcgtgccgtcgctcaagaggtcggagctcgaggccgcgtgcgaggacttcagcaacgtcatcggctccctgtcggattacatggtgtataaggggacgctgtccaccggcgtggagatcgccgtggtgtccaccaccaagaactctgccatggagtggtccaagcactgcgagtcacaattcaggaagaagataacaagcctgtccagagtgaaccacatgaacttcgtcaacctgctgggctactgccaggaagagcagccgtttacgaggatgatggtgttcgagtacgctccaaacggcacgctcttcgagcatctgcacgtcagagaagacggttaactggactggcgcactcgcctgcgcgt

SEQ ID NO: 286660 - DNA, 396 bp, Zea mays
gtctgtatttttgtttttccacaacttacgatgatatacacactatacagagcatgccagttagccccaaattacaggctattcaagcctagtagtctgaataacacactatacagcacctcaaagcttcacaaccgaaacgtacagctccaattactgtacgtggcaaaaggaaaaaagaaacaccaaagaaccaatacacatgcacaataaagctcaactgtttaaatctatggatttacgagcatttggctgctgcctgctggtatggagaaggccttagtcatctttgtggccttggcagacgccgccagggactcaacaacgtggatctgtcgagaagcagcaggaggccaaggaacgtagtcgacagaccaaaggtatacctacgaaata

SEQ ID NO: 286661 - DNA, 463 bp, Zea mays
  unsure (1)..(463): unsure at all n locations
tttnnttttttttttttattttttttttttttttatcttcttgccactggatgcatttaacaatgcaaggttctgatatacttactatacatgattgatggctagctagcctagctctggaactatgtatatatatagctgcgttttggagtactcgttggatgccatgtcgtacccatgcttgtggtggtcaaggaccagaagaggcccaggatacatgagaagggcagcgatatagccagcgcaacaatgccgtcatgggccaccagtagttcttccaagaagcagaagtaggccaggatgcttatgatcacaaggataggcgtcccgtgccacattctgtaccggtcgtatctgggcgtgttgctggcgccgccgcgattcaggaggtcccgccgctgcacgctctgaacccgcagcagggtcaccgggaggttctgcacgtcctgcttgcacacctcgc

SEQ ID NO: 286662 - DNA, 613 bp, Zea mays
ggactgtcaatcagaactagcattttacaccaaaatattacactaacatattaatcttgttcgaagacagagattaggtttagtcaccatgaaggtgttaaggaaaatatacagaacggctaggtacaactctcagtgaaggaatcctggaaaaactgtgaaatttttgtgacagcttccatttcaagatcatgttgatttaaccctttagattctaggtactttttgccgaccttaaaagagtgatcaccgccatcaatgatatgcagttcattcttgcaggtcatcttcttttgagtagacagaagtttatctaaggggcacagggcatctttacttccctgaacaaacatcgttggtaccttcagctgtaagagtgtctcatctctcactgctccattcactccctttagcgggtagcccaagcatacaacagcagaaacatcaacttcagtggagcttgccaccatgcagctgaccctcgatcccatggacttccccatcaaaataagagggtgcccctgatacttgacagcagcatccttcacgatgcccaggtggtgatcaacaagcttctctgcctttggcggcgccctgcgcttcccacccgacc

SEQ ID NO: 286663 - DNA, 448 bp, Zea mays
acagtgcaaatttcacatatataattatataaatataacagcgttacaaatatgacattacaaaaccacataataaacaaataaacgaatcacaacattgtgcatcccgtccccccacatagttctataacactcgacgcttgatttcccttccaaaaactcatggtccacttcagacctggaagggccagggccaggtgccggcgccgtcctcgccgccgaccttggcgctgcggcgcatggggttgccgccgcactccctgtcgacgtagacgtagtacctgagcacgaaggcgagcgcgagcgcgacccactcgaggcagaagatgccgacgccgaggccgccgaccatgcggaggatgacggcaccgtcctcctcgcggacgtacgacttgaggccgtcggagaggaactccgacgtgcgggagaaggcgagcacggcggcgga

SEQ ID NO: 286664 - DNA, 458 bp, Zea mays
  unsure (1)..(458): unsure at all n locations
gcgcggctcgcccggcctgtgggaactcgtcgccgccgtccgtggacggctccaacagcggccggcacctcctctcttctcccttagtggcctcgtcgccgcagtccatgtcagacgggagcgtgcagctgcagcaggcgcgcgtggcggagggcgcggctgtggcggaggaggtgatggcggcgctggagcgcaccggcgcgagcttcgtgggcggcgggctgggcaaggccaagaaggacggcagcgggaagcagctcatggggcgcgccgcgctgctgcagctgccggccacggtgcgcatcgacatcccgcccaccagccccggccgggccgcgctcaaggtgtgggaggagctcgtcaacgtgctccgcatagacggcgccgaccccgccgccgccttcgtccaccgcataaagngtcagcacgccgagaagagcatccgcgacgccttcctc

SEQ ID NO: 286665 - DNA, 490 bp, Zea mays
cccacccgtccgctagttctagatcgcgcaccgccgccctttttttttttttttttttttttttttttttttttgcattgcatgcacacctcgctccaaattaaacaccacaatacgtgtccgatcgatcaggagcaggagcaattatataacaaattaagctaagaagtacgtacatatacgatcgaggcatacaattatgcatgtagtgtagtatatatgagctacgatcgagttcagatgttgatctttccgatgagggggatgccgatggcggtgacgatgagggtggagggcacgccgaagacgatgtggttccagaaggtgaggtcgtaggcgttgcgtgcgcccgtcgagcctgctcgcacacgatcaggttcgccgccgatcccagcagcgacaggttgcccgccaccgtgctcacccacgccagcagcagccacgaccgcaccacagccgccggcgagatcagggccgccgccgaggccac

SEQ ID NO: 286666 - DNA, 349 bp, Zea mays
cgatcaaaaatatgttaaccaaacatataagaccaatttctcacaaaattaagtaggcacgcgaattcaaatataagacacacgctccagaatcttgctgcatagcttgccggtgcagctagcagccacagggtgcgtacggaacgaagctgatgcctcgttcattcgacggcgatggcggcgaagtcacactcacacctggttgacgacccggcagttctccctgacctccccttcgtcggcggtgagcgggctcaggctgcccagcttgagcatggccgcgccgaagtcctcccagaacttggtcgggttctcggcgtagtactccaccagatcgccagcggcgccg

SEQ ID NO: 286667 - DNA, 441 bp, Zea mays
acataatatttttaaatcaatcacatagattggcactttgaatagaggggttacatcaagggtaaacgaaagagtgtagaatacatcagaagaataaaataatatacttgttgaagcaattaagttcttacatcaagatcacgtagtggccaggtacaaaaatacataagcatctctataactaattcataatttatgggacttgaatggctaataagtgcacatttgtgtctaggctacatacagaaaaggaacaccaccccaccattgtgctcatcaataattcccgagtgacacataggttagccaaaggagtggttaagtctaaacactaaggatgacatttggattatgtagtttcacttgacaactttagagtgtgctatacttgatgggttttctagtcgatagtattagagctatgctacaagcctacaaatg

SEQ ID NO: 286668 - DNA, 564 bp, Zea mays
acccataatagttttgaattattacataatcagcaacaatatcaaaaggtagcaaatcacacagcggctgattgatttgctgcacacgagcacccagacacgcacgcgcgagcatggccagccagccagccagatacggttattcgtagcgtatgcgcagatacagtgacacaagcaaaaccacacaacaccatcggtgcatcacaacacaattcacatgtgcatctgcacgcagaggtgcagacggtctctctacacttcggcctcagcttcatcatccacgttctccttggagatctcctcaagcgacatgcccttggactccggcacgaacaccgacatgagcatgcccaggaagttggttccggcgagcacgaagagcgtgttgcggatgccgatgcccggcgagtagccatggtcgggcttcttggggtcctgcgccgcgtacaggaacccgaacgcgccgatgatggcgccgccttgccggccgctgccgatatgccgtggcacgtggaccggagcctcgccgggaagatctcggccggcacgatgaaggtggtgctg

SEQ ID NO: 286669 - DNA, 340 bp, Zea mays
gtcgaacgccgcggtttttctcggcgccggcaatgccgggtccaggcacccggggtcaacgcccagcgacacgcggcagatgacgtcgaacgagaagcgccggagcaggtcctgcatgtccacggcgtcgccgcgcgccgccgccaggcccagggccggcacgaggcgctcccgcgcctcgttctcgagcacggcgaactccaggtccctgagcgcgcgcgccgagaactcgtggctcaccagcttcctctgcgcgtaccacagctcgccgtcgacgttgaagatgccggtgccgagcaggtcgccgaggatgtcggtgaagggcttccccttggggtag

SEQ ID NO: 286670 - DNA, 477 bp, Zea mays
atgtaacgtacattttagcaaaaacaggcatttggtgttacaatggagacgcaatacactttagcaaagctacattattcagaacacgagaccaccaataaggcaacaatggtcttggttttttttttaacacatgctccactccacgcgtgatggttatctattaagcctccagcgccatccgacaggactggaagcctgtaacacgcagggcgggcgggcgatcacagtggatccgcacggtcgtcttgttcaacgttgacgctggccgtcccgagctcccaggcctccatcttggacacggtcactgggtgagctccgttgttgaacaggtacaggtggctactgccgcctgccgccacgtgctcagggtacactcgcgccgtgatgcacgtccgccccccgcatccgaagctctcgacgacagagtggtcgatcagtgttctcagcgatatgcccctgtccttctcgacgtcc

SEQ ID NO: 286671 - DNA, 285 bp, Zea mays
aggtatgtacacggtttccatctttatacgtgcagtattgtttgcaggaccgtacgttacatggcgcgcggtagcctagtcgctagctcgactgctacaagaacacgagcgctgaccgtccgaccgacctagttgtctttgatatgctatgctatatgctatgctatgctacgtgggggtgttcacaattaggacagcggacacgaacacgactcatcagacagataatctgtacacaaggttcttcctcctccctctttgatttcctgcccctccacaccatgg

SEQ ID NO: 286672 - DNA, 423 bp, Zea mays
tccttttttttttttttttttataaactgcatggtgaaccttgaatttagattagaaaaaaaggagtttcttgtgaatcatctctcaaattttagtatccacaacacaccttttagcgattcagatctttattttgaagagagcccttgccaattaccaaaatataacaatttctcttggcaacaaaagcaaaacaaattctttgtatcccacacccattataaaggtggcaacttgagcagatttctacacgttaagcggcatccactccatctccaactccagctcgccggactcggtgtgctgcagcttcagtgccatcccttgcttcaccttgccaccagagaccaccacggcgctgtccctgacgagagcgttatcctcggacttgagccaccggccgatctgaatgtcgcccagcag

SEQ ID NO: 286673 - DNA, 544 bp, Zea mays
gcgctgggcagcttctggtccgccacccacgccgaggtcgcccggcgctcgcggagttctgcgacaacgcggcaaggccggcctgcggcaggaggccgtggtcgcggacgccgtcccgcggctggtatggatgctggaggccaatcccgcgggcgagcgcgacgccacaccaactgcttctggtctctgtcccaagtttgttagccctcacgtttgcctgagatctttcagttacaattcctccggatcttagcccaataactaaaacttagtttcttgattacagacaagccagggcccaacgtatgcttctgtctggttcagctatttactttaaatctagagctagcagctgccctacttttcaatcttacatgattgtgctctgaaaattgaacccaggggtgagtggtggggtttgatgaatacaactcccaggtggatgtcgccgtgtccggtgaaatagccgcatctgtaaagcatatagacccaggcacagacagtgatgccgggattgggaattgggattaagtagcgccgtggc

SEQ ID NO: 286674 - DNA, 364 bp, Zea mays
  unsure (1)..(364): unsure at all n locations
gcacagtgaatcgctgaaaatagggtgtacttacatggnccgatacttagcgtctggtttaccgttcgttgctggaggatgcagcgaacgtttggatcgctaaatttaagcgacactcagggtatagagtttgttcctggcgtccgccttaacatgaattggtacgcaatattgttgtgaaagtcgtgcacatgtctttagcctaacaagatggccctaaactatttaacacaatctgacaacgagcaacttctaattggataacacagcagatgggaacagatacaaaccagggtttcttaacctgacctgtatccaatgcaaaggtaaacttcagtgatctttactcggggttgaccttttg

SEQ ID NO: 286675 - DNA, 272 bp, Zea mays
actgaaatatacacaactcatatttatttagttaacattacataaaaatgggacaaggacgttacatgacatgacatactcctagcaatttgaatgacagggaagaacaattcatccaaaaatgggcaatgaagtaaaaacgaaaagacaaacaagacccgcgaacgaaaaaaaaagggtgtagatgtcacgccaccggagagacctcacgagacactcctcgccgtgactacagcccccaccacacgacggcgagcgcaagagccgtggca

SEQ ID NO: 286676 - DNA, 291 bp, Zea mays
aaaagaactgaacttatatattcaactttatttgataatccaaatatagaaacacaaaccaaagaataataacagatacaaacctctccaggttttcaacaaatcaaaggcaaatggaaagataataacaacagttgccatatcatacaacaattaccacacgcttgcaaggtcatgaacaaattaaacaccaacacaactgaaccgatcgatccttcaccatccatcacccgtactgtgcagtttttctttttctgaaggtcttccacattgcagtggtgcaagctgatc

SEQ ID NO: 286677 - DNA, 410 bp, Zea mays
ccgatgcaatttccagttcatttctgcaaaaaatcggttaagggacgtatagtattcagtattcacgtcactctacagttatctgcagcacagtcgtcagcctgggttttctgtacctcctcaacagtagcgacgagcacactacacttacggacgagaaggccatgcaggcgccggccagccacggcggcatctggagcccggtaaacgggaacagcgcgcccgcggcaatagggatggccacgacgttgtaggccatcgcgaagaagtagttccaccggatccggctgaacgtcttcctggataggtcgatcgcggtgatcacgtcttccaggttgttccgcaccagcacgtagtccgcggcctcgatggcaatgtccgttcccccgccgatggccatcccgacgtcg

SEQ ID NO: 286678 - DNA, 459 bp, Zea mays
gcactgaacctaaatcagtacatagatagatacagtaagttgaaaaatacagaacgtagtgttacggtccacaataaacaggtactgatcgaaaacttggaatggaagccgatgaaatcgtaagcgatacacaacgcaaacactggagacacgaaatgcatgcacggcgaaaattggaatccatgtatcgtcgtgccgacgggaggatcagagattcagaagtgctggttgttgcgaaaggacgcgaaggccttggctgcgccggcgcggaggaccaactggtggtagagcatggcggcggcggcgccgatgagtgggccgacccagaatatccagtgatcctcccacgcctttcgctggttgtacacaacggccggccccaggctccttgccgggttgatgcccgtgccggtgacggggatggtggccaggtgcaccatgaacaccgcgaatccgatg

SEQ ID NO: 286679 - DNA, 452 bp, Zea mays
tcgtccagagcttcgccgccaagggcctctccgccgaggacatggtcgcgctctcgggcgcgcacaccgtcggccggtcccactgctcgtccttcgtctccgaccgcctcgcagtgccctccgacatcatcgcctccttcgccgcgtccctgagaggccagtgccccgcgagccccagctccagcgacgaccctaccgtcgtgcaggacgtcgtgacgccggacaggctagacaaccagtattacaagaacgtgctggcgcacagagtcctcttccacgtcggacgccacactcctcacgtcgccggcgacggcgaagctcggtggatgacaacgccaacgtccccgggtggtgggaggacagcttcaaggtggccatggtgaagatggccagtgtcgaggtgaagaccggcaatagcggcgagatcaggaggaactgccgtctcgtcaact

SEQ ID NO: 286680 - DNA, 532 bp, Zea mays
ggatcactaagctcatgatacttaaatgttaaagtactgttttccaccatcgagctgtaacagctacttccatatgcagaaacagacatcaaagctaagcaactaactagttaacagataagagttttccagtaccccaaaagaaggttcttggtcccacattaacctaatgacagcacgtctactcattacactaaaacaaaagatagcagagacctttactagaatttcacatgggtctgacttgaaagtgcagagagcaattcgttggttaggtttgcttggcccaactccagcttgaatgtttcaatctgttgcttcttgcacttagcgtcaagatcgcgggccttcttatcacatatggtcatgaccattcccatgattaagtcacccgagctgtgcgtttcggcatatgctttgacttctttggccaggtgaggatacagttttgatactacactgaagtccctagatgttggctcaacctgttcatcttcatcagcttggccccagagaatttcagacagcttat

SEQ ID NO: 286681 - DNA, 382 bp, Zea mays
cacaccaagcatcatgttattagattgcaatatcacaccaaatatatgagtgaacatcttatacaccattgcaatgtgtcacatacgctacgtggctaatgatgtttgataccaattccagctacatggttcacatgcctcctatatacagatatcctgaagttaggataaaaaaatggcaatgaagacagaactgacaggcaagtcatgcctacattttcgcagacgaaaaacagtaacaaggcgacgattattgtttttgcacgagcttcccggtccagtaagtcttgacagccactaggatcttgtcagtgttgaatggaccggactcatggtccatgatttggctcttccacctcatgcctccagtgatagcttgtac

SEQ ID NO: 286682 - DNA, 383 bp, Zea mays
acgaagtattaatatgctctattgtataatatagaattttttttatagtctagagggtccaccatgatcagttcgactagaggcctcaaaatcataggaccggggctggagatagtctgaaacagccacgagcgcatggcagcggcagagacatctacgggttctccgcctccacaagggcggccttgtccttgtggatgaagaacgcgtagaagccaccgccgatggtggcgaacgccatcgcccacacgacgagcgccagcagcggcggcatgatggcggccaccttctgcgtgaacatgacggtgaggcggtggtcagcccccagacgcaggccttgatccacccccggcgcggcgagtcatgcggcgtccgctcgtaca

SEQ ID NO: 286683 - DNA, 601 bp, Zea mays
gcttctggggactcgtggtgattttcagcacaataaataaaacaaggcggctggtaaataaccagtcatcgctcacaacagtcggtgccatgcaaaccatatccatccaagataaataaagctcaggccttggtaagcacagcaatcttgaactcaaattctgttgatgctatgtacactctccaaaatggccctcgaaaaaaaaacaaaaactctcaaacgaatcactgttttacaaaagcttcgtcggggactctccgaacttgggtgggggggtcatcaggctcttggtcagccagatcgccgtctccctagacgacacggcgccctcgccgaacggccggagaacgcccgcgagctcgtcgagcctctcctgctccaggagcttcgcgcagagctccaggagcgactccagcgcgtcggccctctgctggactatgttcaggtggtcccactccgcgggcgcgctctccgtgtgcgccagctttagcgtgctgatgggcgacgattcctccgttacggttgtgtcacacatctctggttttcctgcctggtaagagcgtggcttcacgtccttcctttgttcctgcactaccccgat

SEQ ID NO: 286684 - DNA, 639 bp, Zea mays
ttattgattcacacccttcacttttttctctgtggcttctattacattagacacctttttattttataaggtaaccaatgcctcaaaaaggcacatattgattttttcaatagtcgcacaaaattacatttgtaaagtttgaggtatagtttgtatgtccatgagagaacaaagagacaaaacaaattgatgcccccacacctagttttgttgttcaagcaatctcccggccagaataaaatagatgtagatggccacacccttcctttaaaataagtcatgctacatctgcacataataaggttattggggcttccatttggggtcttcatgcaaaagtaaaccccaacactccaacttgtcttgttgttctaagggctactttcatcactcgagctattcccatttctctcatttgccatggcttcatgatgttcactattttgaagtccatattcatcatttccatcaaatacttttgtgtccacatggccttgtgaatgtgaagcatttaaacgtgccttggaatttggcttttgtactttgttctctttcccaacaataacatctgttttggtttttgatgcccatagttgatttttcatgggacactcttctttactagaaattgttctcctt

SEQ ID NO: 286685 - DNA, 469 bp, Zea mays
cacatttcaatatttcacaaaagaatcacccctttattctgatagatacacacgtaatacaactgtgccacttaaatctactgaacatccactgactgccagtcatggaaagacagattatcgatggttgatggccggaagaggatagggttaacattccagcccttcaggcttcctctcgcccatctcatcctcacgttgtcaatctccagaccggagatatgctccagcatcatgccaccagtcttgtgcttcaccatctcctggcacccaggcctgtaatcatagagccctcccgtgtagtttgtccaacgcttgtaggtaaggtctatgttcttgaatttcaggttgcggagcagcccatgcttagatccagccagaaaaactccattttctgataccgatgagatgttgatgaatcttatgtctgaaatggcgccttcttttgaatctgggtgccttgggcaag

SEQ ID NO: 286686 - DNA, 333 bp, Zea mays
gaactcaaataaaataaattgatgtcgaacacacattacaatatcatatatattatttctaaagaatcaacatagaattacatgaacatataatatcatgtaatttatgtatacgaagtacaattccgactttctaaagcttgtgtggtgcttcagggtgtcggtcgaaaggagggtcctcttgagagtgacattaagttgctcaagcaaaccagttgtagtgagcaatggtgccgctagatgagaatcaacctactcatcattgatgaggcaccgtctcccccacatttatatctgagatgtatgaacatcaacctgatggagaattgttgt

SEQ ID NO: 286687 - DNA, 461 bp, Zea mays
ggattagaatgttgtattgatagctataaacatatatgggctgagcctaagcccattacagtacacgtattggcacagattaccattttagaatttatacagtaaacaagcttacatgtacgttgatctactttgtgaccctagaccactgtccactgattctgtgattctttgtacatcaaattgtgaaacttggaagaatcagcaagacctatgtacaacagataacttgtgaaacttgaatcaaactagaagctccttcacggcatgagcagctttgcaatttcccatggtatctgatctgaaggactaaatagaaaaacagagttcatatactccacttgttcctcctgttctttccatgtttaatttgagctaattttcaaagatgatataatatcagatcattctcttctatgtgatcttacgagtagagactcaagattcttcactgatcgatt

SEQ ID NO: 286688 - DNA, 527 bp, Zea mays
gaacgtaaagtaacattattcacttagtttggcatatatagctagcgctagctagtatacatgcgtattattgaacattacatgagataacattattctgggccgcgcgctactaggtgtcttgcagcttgccgcccgtccgcgacgagactgttcaagcgcgcggcactcgtccacgacggccggccatctctctagctagctttacgcgccctgggtacagttcttgtagcagctgtcgacgcagctcatcatgcagtaccccatatacctgtcgttgtagctcaggcatcgctggtactcgccacccacacgccccatggctgcgttaacagcggcacggcaagactgacagcagctgcttgcgtgggggttgtcgcaggaacagctgctgtcgcacacactgtgcacacaggacttgccagggcagctgttgttggtgcagctgccatagcacccttcgaaggcgccggcgcccaacgccgtgcagttcctggcggtggcgttgtagctggcttggcaggacg

SEQ ID NO: 286689 - DNA, 339 bp, Zea mays
gattaaagctatactttatatactgtgccgttgtcggaaagacatcggagggagtagtaatttacaaaagtcttattctatatatgcagcacctatatttacatagaccagatactagcaagtatgctggaaagatgatatatctcatctgtacaaaggagtaggacaccacagcctgaagcattctcttgggatttgtcatcccaacagccatgtcaccaccacccaacctccccaccctcacaaatcaccaagagacgctccactgctcattctacataccaccaaatccatctcctaaagataaaaccaaaaaatatcctaactccaagaggggaa

SEQ ID NO: 286690 - DNA, 407 bp, Zea mays
ggagtacaaaggcttggtttttttttatttatgtatccaacaccacactccatctgtacaaaagacgggcagtgtatgtacatccagctaggaaaaccagcacatcggaaaacgggtgctctctgctccgctaggtaaagagcgtccccaaaaacccgggggcaaaggaaaaccacaagcctataaagcttcttttgccgatcgatctgctctgcagctggcagcagctaccgtacactactacgtacgtacgtacaaaaacctcatacataacgtccgggattccttgccgtgcctgagtgctctacggcaatacacgtgcgtctggattcctcctcaggttggccgctccattgcccgggctgctccggcactcacgatccacgggtgagcgaggacttgctcgg

SEQ ID NO: 286691 - DNA, 678 bp, Zea mays
gaggaagaacagttctagcatcacatttacaatttacagtgtcaaacgacaacacacatacgggtacgatatatatacagcgaaattacaacacgagcactagcagcaatataatctgtgtaacacaaggccatgtccacgtacggctacgacatacggcgtgaataagcttgtgcaccctgagactgagactgagactatctgccctgaagatccgtgcacgtcaattgattccccgattcagtattactactgtcatccgcaggaggaagacgaggtgccctcccaacgaaaaacgcagcttgcttcggggacgggatcgcggcgtcaccactcagcatcctgagcaccaggggcatggctggcctctcggctggtacctcctgcacgcacaggagacccacctgaacgcatctgcaggcttcatcgtaagcgtacgttgctcccatgagcgggtcgatgagctccgagacgctgccttccttccacagggtccatgcatagcccaagaggttcattgaccactcatcgtcgaggagggagctgttctgcggccactcacgatctctaggaccagcacgccgaaactgaatacgtcagatttgtcagagaatttgccctccattgcgtactccggggagatgtagcccatgcgttccacagattcggacgcgtggg

SEQ ID NO: 286692 - DNA, 488 bp, Zea mays
ggtatcacattaagtttgaagtgtatagttttattgctctcataattcgaggtacaatcctgttgatgcatctctgcaaaacaatatggagactaactagtagtctaaaattgtacctgtgcggcatgagtgaaccaaataacgaacccagttccagagctcttcaggttcgaccgctctgactgatgcaatgacatgtaacaaacaagcagacagagaggtgcaatgcttgaaatggaagtgcagatggagaggaatcgccatagcctctgtcgcagggtgaagtagcattatggaagagtggtcatggacacatggtggaatcataagagccatgctcagctggattgaaataccctcggcattggataaggtcacatgaaggatatcactggttgccatttggtacttaagataccactcttgctattattatttaaacacccttgtgcctgccgtcaaagccaccacttctatcccaatttcta

SEQ ID NO: 286693 - DNA, 403 bp, Zea mays
ggcatccaataagctgtgttttcaacaatttatttatcatagaaatgaaacatgtacgcaagcaaaaaaaactttgaatagatacagctagtccataaatacatatgccataattaccacacccaatgaattgcagtaaaaaatagttttttttatctcatccgattcacgggaagaaaacgaatcatggagccgatccgttcccgttgacaagtgcagccttcagcttgccggcgacttccccgagcgcccgccgggaagacccttccgacgaccacgcacgcttcgaagcctcacgcagctctctcgtccggccgcgcaccgcgcttcctttctccccctccattagctccttcactgaagccgcgatctcttcgcgcgtgaccaagccgtggccgttgcc

SEQ ID NO: 286694 - DNA, 432 bp, Zea mays
gcgcccccccccttttttttttttgtttttttttttttttttgaacaaaatgctgcatcatataacccttgctgtagcagcaatctagcaacctagagtataaaatagtacggggggcatttgtgaggaatcgggagattcttagtttcatggtctcactgctaaccctttattgcggaagttgctgtcaacaacaaacgtcctagaggctcccacatgactataaatgaggtgtaaataggggataaatcgaagtcttttccccgcaaagacaaagaggtgcatcgaaactgcgacatgataacgagtaaggcagctctcaccattgcacttgcaccaagcatgcctctcaacagcaaacatcctaaatgagcaaaaacagaaaatgaaatgacagtctagcgacaactgcaaaaaaaaaaaaacaatcct

SEQ ID NO: 286695 - DNA, 407 bp, Zea mays
aatatcaatctctatttttatttatttttttatttagagctctaataaattgtaaagaagcaaatcacgccgattctgttgccgcatctgaaatggaaactgtcaactggccactataatctctcagatcgtcaatggcgcacgcgaaagccggagcgtctctgccggtgcccaacgtgcaggcactagctcagacttggcatggatcaggcgagccggtgcctttccggtacgtcaggacagaagagatcgtcgccggcgaagtcgtcgccggctgcgccatcccggtcgtggatctcagcaggttgcttgacccgcggtcgtccgaagaggagctcgcaaacctcggctctgcctgtcagcactggggtttctttcagcttatcaaccatggggtgccggacgag

SEQ ID NO: 286696 - DNA, 364 bp, Zea mays
ggggggggagaccaagcttaaaagttaccatgatcacgtgactaaagcatgcaaagtcaaaaaggggaaagcaattgatcaggcgaccactttgtttcagcaagcaagagatgctggctcgggagctgaaacaaaattcgagtcccggaaatcaaggtaaaaaaaacgaacaacaaaagggctttttctcgttgtttcctacccaactgcagatagatcaggcaggatccacacgatgtgtctcatgcagggcagcttcaaattactggggcggcttcatcatctgatcctcggcccgtctcctggggaccattcctgaacggacagggaagtggacgaacgctgtctccatccattgaaaccg

SEQ ID NO: 286697 - DNA, 407 bp, Zea mays
tttttgtaagcatatatgaaggatcacgtctcaattctcatatgtcatctatgtacataatatacatactattaatatgttttttaaacaaacttaacctgcggctagctagatcctcccacgcaagttgataaaatctttcttagacctcaccatccatatagctagcatgcagatgcaacatcactcctcaattcacataagtcatcaaccttctcatcaggtagactgagaaaacccttcttaaacatcgacaaaaccatactttttagagaccttcgtgtggcacaaagaagccaagcagcacagtgagtcagttgggtataaacttgaagcgaggcttggaaaacgccggagccggatcgtagcgcccataatcatttgtcgccacccctgcagccgtcgcc

SEQ ID NO: 286698 - DNA, 516 bp, Zea mays
attatagttcataacctagattatgataatcatatgtatatttcatagtataataatacagtggtgatcaaatatgccctgtatctaggaatcgaattacaagttcatcagttctcgattgatacttgaaatgacatgtacattctaaaattgtggataccatgaagcatttcttatacacaaaatatgggtatttctgttaatcaatttatgatacctcgctctctgaaatcagtctactactggcaaacttagggcttgttcggttattcctgtcccatgtggattggatgagattagaaaaaatatgaaggattttgacttgttcaggatttaaactcattcaatcccacccaatccacatggattgagatcacatggattgagaggaaagcgaacaaccccttatagttgaataaggtgagtctgcacactggatgaatatcactatcagttaataccaagcaatctcaaaccttaggtttggattctctggaccatgatggagctctaacg

SEQ ID NO: 286699 - DNA, 283 bp, Zea mays
aaaaaaggttacccatatctctcttcatttcgccaagccaattgttgggaaaggaaaaggcccaaccaaaaaaattgcctcaatccaaaaatcagctacttcggttcgacctttgattggaaagaatatcctccgctgtactcgaaggagtcggggctcacctccttgtcctttttagggaggggaggatcgttgtacgggtggcgaggagcccccttcgtaacgtcgaactcggtcgcggacgtcgaggcagacgtggaggcgctgctgagcacctcgctca

SEQ ID NO: 286700 - DNA, 342 bp, Zea mays
gggaggaagacgagtttatctgatatttgatagctaaattggtcatgcccctattacacaagggtttgtcttttatatagaactactcgaacataaagcgacccatagatagcggacccactacttggcccatattggctcagtaaccttggcgtttggacgatggactttcacgtgccggggcttggtctcgttgtctgctcattgctcctgtctgagatgctgacattccccaccgcttgaaatacagcttgtccccaagctgtgatatgcataaccaccaggatcccaaactaagactttgaaattgccttggccactagcaacagcacctagactaga

SEQ ID NO: 286701 - DNA, 335 bp, Zea mays
attcatacaagttactattacgaagaggaaacaagcaataataatgcgattaattctatcgcagcagcgcaatgatccgccacactcgcagggtgcatgcagacacgaaacacagatgttagctttctagacacgcagcctgtgaagccaaatcaccaataaacaagatagagagagagaggccgggaggacatggagtaatagctagagagacggagctcgtggccggcccgtcgttaagatctaaccgcggctttaatcaagcgatcgcgataggtaactaaacaagcacgtacgctagggtaggtacaagctcgggtcctggacgtccgccc

SEQ ID NO: 286702 - DNA, 309 bp, Zea mays
gatctagatcgcgagcagccgcccttattttttttttttttttttttagaaacagacatttcttctttttttttttatattcgttcagattagatcagtcctgtactgggatcggcccacaaagtgcgccggtccagacttactgtccgaaccgaacgtggtactgccaaggtacatctacacaccatgcagcacagtattggccaacgtccaccgccgaacagaagagcacccacaccagaagcgacagctgcaggtgacgacgattcaggacgctatccacgtagcacacagcagcgatcacaatca

SEQ ID NO: 286703 - DNA, 460 bp, Zea mays
agtactagtaattgttgccacacttgaagtacaacttgagtctcaccatcgcagatgtatatacaggacaggaggggctcaaagaaatcatgtcgctttgcatcttcaaggaagaactattgtctgcataaccggagctcaaggcacgacccggtagttgagcgcattgtcccatagcatttggaccgcagactccagcatctctttcacagcgctctccgccagatcatcttcctccagtttgcaagatatagcagttagtttgaatgtaacttcatcagaaactcccccagtcgaggtacggggatcgaatctgtcagcatgccttagcttgagcctcatggtctcgtttctgaaagctttgtagcccgtgtgccacaccccaactatgctgaacctctcgccaattgattcctttccaagtggccatctaactccccctttcacattaggatcaata

SEQ ID NO: 286704 - DNA, 344 bp, Zea mays
ggaatccaaccgtctcgtttcaggtggctcgaaagcgcatgagaaaaaatgaagaaggcagagatagacggatcgcagagtttcagggttacatgctgcaaacagcggccgcggagacgcagctcagcatcaaggaacaaaaaataacctcacgaccgccagaaacacagccctgtgtgtggcaagcaccgccgtcctccgacgctcccagcgcggcggcggctcaaggtgagcagccgcgaccgctcactcttgccctcaacgtctccgccgttcctccttctctagggccccttcttcctcgactcccacccccatggaagtatgtgcgccgcgcctccacc

SEQ ID NO: 286705 - DNA, 324 bp, Zea mays
aataaactagggtctcatttggtattgtagaggtgcatctaagaaagggttgggtacctttcttaaggacatttgggattacaaggtcgatttagttagtttacaagtggccatgaataagacagtattctgaattcaatgacactgctgatggcaagtgttcgttttcgtctcccttcagctgcttcagtgcatcaacagaagcgcgtctttcccgttctccagtgtatcaacactgctgataccctcaatcgcgtcatcgcttgagattcgccacctcaatcgcggcgatcctaacgggaaccgagcagggctggtatctgc

SEQ ID NO: 286706 - DNA, 378 bp, Zea mays
gcaggaatgtgtctgatttccaaaggggtgccggatggtagcacaggttgaacatagcaaattacagggggttggtcggggtatttgataaacatccatttgtgcttccaatcaacatgcattggactgtggtcttttagccagtccattcccaaaatcaagtcataacagggaatcggaatcactttaaaggtagagcgaaactgaaaaccttgcaggtaccaagctgcatccaacaactcctgggtacactgaatgatactgtcgttggccacaagaacgtgcaaaggttgttgcagtacagtaaacccactcagaagagaatgatgagcaacattcaagaatgagtgtgaactacctgaatcaagaaggacgagc

SEQ ID NO: 286707 - DNA, 311 bp, Zea mays
ggctcccatcgaagtaactagttgaagattaagttcgggtaatacagagtggaatgatatttacatgtgcaggcacagccgcataggttttaaggtttctttagcacatcagctagaatggaaacattaaagttgaaactacgagaacttttcaaactgggagccagatctctcgttttgtactcgagctgttaacggttgcctaccccgccttcctctctgctaccagtagtgccgctgctgcgttgctcatcttccactcttggaaggactggatatacatgcccaggcaaagtggtcattgctgatgg

SEQ ID NO: 286708 - DNA, 517 bp, Zea mays
gacgcaaataggtgcgggcgtgcggccccatcgatttgatcatccacaattatcgagcacaagtgttacacagcacagtcttaaattgcacaccacccatcccgccatccgaacgctgaccgccccctacactaacgtacgatacgcagccggcagctagccttgccagataaccagattcgagaaagcaacaactacacaaaccatcacggattcacgggggctcaccgatcgcccctgccgtcgtaactgggtacgcacgcgccatgtgcgtcagtcggcgccagcgggggtggagccggagccgctgttaccaccaccgtcactggcaccgccgccgccgtcggtgccgccgccggtgaggtcctttatgatccgcttcatgatgtcgcccctcttggggtctgttttcccgtggggcttcttcctctcatcctgcttgtccatgccgacgacccacgcaagcgcaggagcggcgttgcgcgcgccttgaggctggctgagagtgctcgagccg

SEQ ID NO: 286709 - DNA, 221 bp, Zea mays
tctctttttttttaagctaattacattttactatagtgcaccatgaccaagttacatgtcgtctaccaaaaacccggcaggtgaagtagaattagtgttcaccaagaattcaaattatgaaacattttacaacaacaaatttcaccccctacaagacttgactttaggcagggagggcggccgtcgttgtggctgggggaacccggttttctacagggatc

SEQ ID NO: 286710 - DNA, 523 bp, Zea mays
gaattcaggggtgtgatcatttttggccgtggggacaatccgaagcagcatgtagacctgctgcaccagcagctgcgacctcactcaggtatttcattcagtccacaacagtacagcacagtgcatcgatcttgaaatcaaaatccaacagcgacacaaaccgaatataatcgacaccaccgctcgctcacgacgccagggtggtgctggggcagttgtcgacgccgcaggccagaacgtcgcggtagtcgcgggagatggtgaagtggtcgtgcacgctgccatcccggctcttcttgtactccaacagcagcctcgtgtggttgaacgccgtcagcttcacgaacccaaagtcgcggtcccgcacgtggctccatcgcgcccgcgcggccgtgtagtcggcgaggttggcgccgccgccgcccaccacgacgtgcgtcgtcgccgtgaaggcgccggcgtagaggtcggaccccttggccacgcacgcgttctcatatactgggcaggtccgttcgtagcc

SEQ ID NO: 286711 - DNA, 473 bp, Zea mays
  unsure (1)..(473): unsure at all n locations
cnaaaaaacggaagctccttggagggaaagcaagccataacgtctacagttgcaggcgttctttcaaagaggaccacactgtagtatagcatacaatgtttttttggcaaaggacaaacaaattgaacaaactaaatatcctatcatcctattttttagatctaacccttgctgcagaaagttgcaatttcagaagcagaatttaatgtccattgaacagacagagcatgttggtcactcgggcgatgaaggaatgctgggatcttaagggacattgtagctgatcaattatcagaaagaagtcatcaaggattgttgcacatcagtattccaagaaccaaaacatacttggagttggagcaaatctgatttgtaggtatacttcaccctatcaccctattaattcaatcaattgcattgcctttcagagatttaggttcatcagtgagtgtttacaagcaatgcatgcttac

SEQ ID NO: 286712 - DNA, 333 bp, Zea mays
gagtaaactgctgatggcccagagtgaataccatttctgtactctatactaaaaacataagtgatacctcttgacgtacatttgatcatgtatccatacttcaatggtgaaatcaatgttggaagaaattatttgtaacttcatttcttcacttctatcatcttacatattatcagccccagctgaagccattcaggtcaaaatgtctgtaagcttgatttgtgtcatcgacattgcgggtgttcagatcaagtttgctcactgaacacggatgctcaaaatctactagcttgctttctctggggtattcaactgcctgtcttgcacactttt

SEQ ID NO: 286713 - DNA, 372 bp, Zea mays
gaatcaaatgcttcacacttgcccttttagctgggtcatttagccccctcacattccatgacaaaatacaacagttggcattcattaatcaaaagtagttcccctacatgcccaagtagagccacacaagacaggacctgaccagacaaccagcgacaacagcacattgcttgttgggaaaagcaagcatcccacgcctgaaataatgacagatagaaacaccgacagagcaagccaaaagaaaaaacactgctgacaatcccacaacctgctacccaaagcagtcatcaaaagtagttgggggacccacagactattacacatgcgagataacattctgcactagaccgacccacacaagatctaaaaaca

SEQ ID NO: 286714 - DNA, 310 bp, Zea mays
ggggaggaccccaatatttagtttttataacatcatataatacaccagtttacactttacaaaacacatccaaccaaataactcacacacctataatatttacgaaacccttcaaacaaatgggaaccatatttaacattacatcaaaattaagggttcagatcattaaataacatcatctattttgctcactcaaatctaacaaagaatattattggaccatcctttagccctccccttcttggcatttccaccgccattaatccctccccttgcgccaccaccgaaatgtccacccctttccttcttt

SEQ ID NO: 286715 - DNA, 192 bp, Zea mays
cccacgcgtccgggccgccctttttttttttgtttaaactgaagtgtttttttttattacaagtacaagttttttccttcagcatagctcatgaccaaactgaaaataagagccaagcaagttacaaggaactattttgcatgctccattgaagacatgagcaaacacatagagcaacaaccaaagtagtac

SEQ ID NO: 286716 - DNA, 343 bp, Zea mays
agcactggactgcactgcactcctatacaaatacaatacaacagatattgtcaagcaagccttggaatacaagagagaaaataacaaacagcacacacaccaagtgcacttgttgagaatacgaaattaatacacgcacgaaacagggcattctccatagcagaggtcacgctttcaagaggccaaagagcttggtggggccctcgcccttggcgcggtacttggcggccatctcctccgccaggatggtctcctcgccgcgcctggcctccgtctgcgccctcctctcctccgccgtcctgtgcagcatcgccagcttgttcttgagcttctcctcgtacgc

SEQ ID NO: 286717 - DNA, 481 bp, Zea mays
gatacaattactagtcccaggaggctagtaaccacattcattacttcaaatagttacagagtctgaataatgttattacaataccgggggatacaagctcgagagtgagccgaaaatcataaagcgcagtggaaggtaaaatagcctaggccacaggcagaactggatgaagacacagccccatcaatcaagcatagcagaaaagaagtcttcagctgcctccgtctacgctgaaaagaatcatgtgtcaagatccaagcgaggcataagtctcttcgctcaacctcgacttctcagctcgcttcagccgccttttacgatacctccatgcaacctgaatatcgagttgcagcaatggttcgccagtagggggattcatacctgatcgctccctgcactcgtggattacgcaggaatcgagcaaactgcgaggtgacttcttccagatcacttgctctgagtacaaaagcttcaacatttg

SEQ ID NO: 286718 - DNA, 276 bp, Zea mays
  unsure (1)..(276): unsure at all n locations
tttttntttttttttttttatttttttttttttttttggtttttggttttttatcgggcaaggcacagatgatctttatgtaagcaccaagagcttttggaacaagtgatagcaggagaggtacgagtacgactggctgcacacagcacacggcacagtgttcgtcccaaaattaagctccagctcattggcacatttgacagagcgagcccatccccaccgggccacggacgtgcatggatcgagagaagagcgacacatagacatagaccatga

SEQ ID NO: 286719 - DNA, 579 bp, Zea mays
cgttgtaatatttgaatgggatataatttaaatatatgggtcggcatggcccaacaaagataggaagtgttttagagcctgactaaaccactatttctacggctgacacggtatgatcaaaaaaaaaatttggaccttatgggcccagacccgtttgagcctaagcacgaggctcggggcccggcctgaccgtcccagtactaggtataacgctaaatatacaagcgcagtatatgtacagaacatgcatgtccgaaaagtggccggcaattgcatttgcagagtttgaatcagctcgtctccgacccgaacacgccaaccgcagagccgacggaggcgaacgcgctgatgagcaggcagacgaggctgaacgcatggatggcgagccactggttggtccacggcgccaccttgttcctcgtgaggtacatctcgacggggaagtagacggcgagcggccagaaggtgaaggagccgagcagcccgatgatctggttgaagtaggggaaccagacggccagcgccgtggtcgccgccacgtacgccgtgcggaagcacagcctgaacacgttcgcgttc

SEQ ID NO: 286720 - DNA, 411 bp, Zea mays
tcccaccatcttctttctccccccttcgcttttttcctcttaaaaatgcagaagtacttacactaattctatttacaagattttggataagagaagtagcaggtttgttaggaggttagagaattagatccatatctacatatagaaagtatttcttgaccctaacacacatttatccgaacaaggtgaccaaacccattgtcatgtacaataccatgcagcaagtgacgtggattatccaactgcctatagtcccaatcttccggatcatcagaggagatcacatatttgcatgtcgagcaccgtgttccaaacgactgggccataagcccacaatggtcacaatgcttgcaggttttgtattcattccgaattatgaaatggtacctccttccaaaacagggtgtctac

SEQ ID NO: 286721 - DNA, 410 bp, Zea mays
gactggttaaactgcatcggaaacagtccaaccataaagttttgtgaatcaagtcatatcatgctgcattttcttgccttgttatctgtgaaggtaatgaagacttagcaggtacattgttttttttcaaaagccatcaaaataagcatgtcttcataacatatgaaatgtcgatggatacaagtctcttcgaacattcaggacggtaaggaagatctgagagtcagcaaggagcttgggaccttaggcccgccatatcgagacgtgtcttgaaagaaatttggatttcatactgagccccaggtatccgcaggcgttttaaccagaagaacttcctgtgaagttcgtgtggtttggctgtctgttccacaaactgtttcttgacatgcatcgagaattgttccctggac

SEQ ID NO: 286722 - DNA, 416 bp, Zea mays
gaaaataactgaataaactgcaaataaattcgttgtctggaataatacaacaaatgattgtgtttttctaattcataatataagggagtggggttcatttattattggatgaagcataaaaaaagattgtagatctggctgccgtacgtcactccttgcattggcgcgcgcacacatggatggtcgtctaaatctcgatcgtagtcctcaaggtttactgccagtgtcacctaaagccagaccggctttccatccgttcatgggagtgtagtatgcatatatgcatatttcaaaggtcctgctgctactgtcctgttggattgttttgtactctataacacctcgtgccatggtaaattgtccagtgccgcccataatgctccactggcctgaagactcatgctgccccatcactt

SEQ ID NO: 286723 - DNA, 416 bp, Zea mays
agttcctaaaatttaggagggtgactaaagaaatcaaacatgccttaaatatggttacaacatgaaacagctgtcagtttacagtgctgaatcaatcaccggaaggattccacgagcacctcaactcaagccaacacatacaattacatcagcagttcaacattatcatacaaacgctataatcagaaggggacactaaagtacaaggacctgcagccttgacctcgcctccgcagctatattcaagtgctcctcgtcagggttctctctcgctgccgccagagcttcagcatatgtaaccctttccttgtctagcttgtcgacctcaatcttgtcaatttcactcattgattgaagtgtctctaattcatatgatgatggtattatatcatcataagagtcacctgaaacattct

SEQ ID NO: 286724 - DNA, 344 bp, Zea mays
gggacccaaactaatttttattttatttatattccccttatctcaatacaacaatacacaaccctccgagtgactccacacaccacagtatactgaaacaacatatagacaaatatgtgcatcacaattcacaacagtaccccttgcgactctgcaaacgtgccgtctcacttcatgcccttgtagagcgcgtcgattactccctggtagtgtttgagcatctgcggccgtgtcttcttgtacgtcggggtgatgaggtcgcgctcgatgtcaaacggcagagggtcgagatggacagcctttatgacatcaaagcctttcagcttcttgtccttggcgatctt

SEQ ID NO: 286725 - DNA, 542 bp, Zea mays
aaatcatgaatgcactcaagatcctcagtgggcgtacttggagggaggcccaacgagagggtatgtaataactgaaaaaaagggaaataaaacatggattgtgatgcatgcatgcttcctctcccacggctagatatggagagaggggctgctttattttctgcaaaaatatgacaagaacaatatgaaatccagcatgcatgcattctcaggcgcaaggcacgaaagtcccggcactgcagccagtgaagcagctgagcccacaggccaatatagccgcacgttggcatgtcgccaccgcgtcaggtggacaagtgccgctagaggcgcccgtcgagcagatcccctgagcaaagctcttgcatggctcaacacaggcggcggtacagtcaacggcggcagtcacaggtgaggtccccgtgcacagcagcagggcaagcaggaggacgaaggcagcagttgcgctggcagcacgagaagcagccattgtattgagacgtgggtttaattaggtgtgaagctgatggatgcggacgcgtggg

SEQ ID NO: 286726 - DNA, 425 bp, Zea mays
  unsure (1)..(425): unsure at all n locations
ttttnttttttttttttttttttttttttttttttttgtttttttttttttttttggggaaaaacccgaggtatcacattttattcattgtaaacatgttgctcataattacaagaacatccatccaatttcaaagagatttctggtctcgagcaattatgtctgtgttttctgtcaggctcggttccagttcagctagggactgctatgtactactatgatgtatacaaggcctagggcccatgcttccaacagctagatgagtacaattaacacttctatgcagcgtaaacagacagcactagtcctccagtgacctctttctcgccctcaagtcgcgctcgaggctttgaggcaatggaggaggtttttccgcgggggaaaaaaacagaaagggcttttattttacggcacatgctgaaaac

SEQ ID NO: 286727 - DNA, 300 bp, Zea mays
ctagttctagatcgcgagcggccgcccttttttttttttttttttttggttgcaataataaggcggccaccaccagatcgatatatatatctctctctctgctccatccatgtatagtacgtacacttactcgaccaacaccagtcacacacacacgtacagctagagagcgagctgaggccttattattgattggctctgatctgcctgccataacgcattgcattgggcgtagtagtttacgagttgagctttcagcagttgcgcctgaattgcccctgggttccggactgggggctg

SEQ ID NO: 286728 - DNA, 579 bp, Zea mays
ccatagaatagaaacataggaatcacagattgaattattaaacagaggcgcatactgtccactgtatacactttacaagtatatttttcacaacctgataaaacaccagatagaggggtttatgattttttttttgttttcttggaaaagcacaatttaatcagaagaggaggctggcccaagcagcaataaaagcaaagccccccaatggtgccggtgaagaaaacttcctgtcttcaagataagccacggtgtagcacgttccagagaagagcacgattccagcagtgaggagccctccgaaaacgttggggcgcttggtgatgggcgccccgagcagcgccgcggtgtggacaagatggtacagggacgccgtgtgccaaacctctttgtacacggggttcttggggcggaacatgtgcgcgccgtaggtgccgagccccaaagcggcaaccccggagacggcggccaccttgtgccacagcatcggatccgtcgccgccaacatcttcctcttctctctagttcgccttcaacctccttgacttgttgctcggccgcagccgcagcctgcttcag

SEQ ID NO: 286729 - DNA, 679 bp, Zea mays
ccgccctttttttttttttttgttaaaacacatatcttctgaaatgtattattacacaaacatcgttaatttatcatattgccatatacatataccgctcttaaggaatcagcgcgcggtgcagtatatacatgtacaagcagagggtagattttgtgatgctacaagactagggttttgtacatatatatatacatgtacaagatatatcacgaaaactagtgtttcggcaaaattacatatatatcctgggccttccacgcaaacagagcaacatgcatatatgtagaaactggcaccacacagagagaacatgagcagctgcatgcttgcgcactagttgtttgtatcaccaccactccctccgtcgtctcctccatgactgctgtactggtctcgtgggatggcatggtggttgtccacggcggttccgccgccaacaccaagggtgggcttataagcggacctggccgtggccgtcgtcgtcgtctctccgccggcacccttgttctcgagcatccccatggcagggctcatcaggccatggctgactacagcaaatacaagaacgatagctgcgaacttggtcgtcctggctttcatttcctccatcacgatgacaaaaaatctggaagtcctccgctgatagaagaatggacgtcgcgcgttagtcttctac

SEQ ID NO: 286730 - DNA, 373 bp, Zea mays
  unsure (1)..(373): unsure at all n locations
tttttgatgaagacagtctttatagtatttagattacggcaaacacacatcacanatgggaggaccncaacaaagtctagccagagagatctgcaatgagctccgaaaacatacaggtgcatcactggcatctggcaagttgcaaacgtgtcatatatatatatacaaagatcattactccattgctaaacactgggtacagttgtaataccgggggggcagagatagatgctatagttcaagctattagcctgcaagaccatatacagacaggggaagagaagaaaaactctgcaatccatgtacatgtggaaaatcacgcggtatcctgagtaccgcccaaagaatccctacccacagggacccaagaagg

SEQ ID NO: 286731 - DNA, 374 bp, Zea mays
cgctcaaagcaattaggatttattcagaataattattgtttacaattagaccaaccccatttgttcaacattaattcgcatgcagatgtcaacatgtctaacgtacagggcaagtccagatgtctaccgtacagggcaaataatcttgtcccggagatttcttcggtatgccagctaaacatggcattcacttgagatatactccatcatccagccgccttgataaaataaatacaagtattgatgaacagctattgcaagggtttgtcaccattaccatggacaacctggtgaacaagcttgttgggtaacctccttgttttctggaaatgccgcatatgcagaataggctcacacccaacctctgcaactgt

SEQ ID NO: 286732 - DNA, 439 bp, Zea mays
ttcgttttttttttttttttttttttttttttaacaaaagcaggggaaatgtgccattttatgctacaaaagcacaaatcatttaggcacccgttgaccatagatccaccgctcaccgcaatcttggggcagggcacacaccaacacatttgtatgacgcgtacattccacacacacgttaattaaactacacacttaagacttagcaacctacataagtacaagccccgcccgtaccgtataaccacaagattaacttgacgactgggaattaatatttatttaggctctcgctgagtcgctgctaggtcatcacttggtcgtcgtcgtggccatggcttcaaatctgggcgccttaggctggaacttctgcttgacgtacacctccatgtagttgccgaacacgaagctcgggtagtcgttgtcgccgacccctgcg

SEQ ID NO: 286733 - DNA, 282 bp, Zea mays
taaagaaagtcgaaggatccattagctctctcaaaaccatctttgccatgatgaagccaacacatctcatgtcaaaggctatcatcattttccgcctgtcattgttacttgcaattgtactgctgctaagatcattgtcttgaaaatcagcagcatttccaagaataccgactttaacatgcttgtctattgggctcacgtgaacattctctatcctaagctcggtgtgtgccagcccatggctatgtagataatttacaccaatcaaaaggtctctcatca

SEQ ID NO: 286734 - DNA, 495 bp, Zea mays
caagaacatgtagaagacccaggtaggattacactagcagatgttaagcttttagtgtgcaagtacaaaatacactactagaactgtagaacagtcactttccttccttccctccagcaacgttcttgcaggcagaaacttatgctgctggtgctgttggactgcacatctcgtggttaaatatgtgggtggcagtcagtaagagcatataccactacagcactatctcttcaaaacatgattcaccagactagagggtgcggggaaagatactacagtctaaccgacgtcacggttagcccatgttcagctggtcaatggccatccgaggacgctttgcagctgcagctgcagctgccacagcattaagttggaaggaaaccctctgaccatgctgaggagtgtgctgctgttgctgctccttactactctgatcctgcgaataggatggcttagaattcgccgggttacttgggtttggttcttcagtctcat

SEQ ID NO: 286735 - DNA, 518 bp, Zea mays
catggccttgggctacattacatggctcccaaacatacgaactaactttacaacagaattgcagttttttttctttttggtaagaacagcctactccagattacaagcgagacattatcaagtatgtcaagaatgaaataaaaaaacagggttaagagttcatgtctcgattcaggacaaacacctggcgagaggctgtggtagtcatcatctcctgtatgtcgcagagttacacgacctgccttcggaatcgttcagaccaaacacgttttagcagcttaatgggaaatcctttcacaaattagcaactactacctattgtgaatgtgctgctattttttttggtggtgtagataccggaagatcataggatgtacggtaccgaaggccatttccaacagtattcaatacagggcagagccagcaaaatatgttaggcccaagaactgaaataagattctcatagacaccaaggtcatatggatgatgatagagatctccacctttttctgccaacc

SEQ ID NO: 286736 - DNA, 465 bp, Zea mays
tttctttttttttttttggtttttttttttttttttttttttttttttttttttttcacttgaaaagagttaacagtaggatgcttcagtcttccatatcacacaggacatcatgggccagaatagtgaactgtagagattagattcactattgcgctagaggacttgatatgatctttatctaaccaaatgttaacactgtacaaagagctaaaacagcagacagcaagcatcaactagagatggtgccttcttgaatattacacagatgagacactcagctaaatgtaccatgcatagcaccaacaagctcgataccaagatggacaagattcctagaagccattcatctccagaaggtaagtgcgtctcttcatcagcgccttcacagcagctttaaatggcccatcgaatgctccaaagacgaatcctttggcttccttgtggttagggtggcttccattg

SEQ ID NO: 286737 - DNA, 426 bp, Zea mays
cggccgcccttttttttttttttttttttttttttttaacacgaagaacacagtcatcatcaaaatttatacaggtcacaacaaagtacaggtacatctacttgctcaagggggcatatatatatatatatatgacagcggtaccagaacaaacatgtgcgcactaacatttccacattcttcgcatcgggcgaataaacaaatgaaggcccatgttagcacacccagtgtatatgtcggctctacactcttcagcgatagaagctggcttttggacaaagcttttctacagatccatctgctggaccatctactgcccgtagcttgatctcatatagctttggccacagtttccctgtcacaaataatctgtgccttctttcatcccaagctatcccgtttaagacgtcaatattcgtgttgcca

SEQ ID NO: 286738 - DNA, 336 bp, Zea mays
ggggagaacactcagtttttgctaaaatgactctgaacaaaccagtttaaagccatgaattgatgtctaaaacacgtcataatgccacactgaaacatttggttttaactttcaaacattgtacataagcagagggaagtacatgtaagatgtatataataaaacaagattcccatgcttgtcaaaagttcctcattggatgttccacttctgctccagggcactgcatatccgatttaaacagcaggcagcactgagagggtagttgcaaatttgtatgtaatcatctgtatattccttggcgatctttccatgggccatggcaccaaccacaaa

SEQ ID NO: 286739 - DNA, 770 bp, Zea mays
catatgtcaaagggcattatgtagtccaattccttggaacgcatgctacagagacttgatactacagtcgaatatacattgtaaggctgggaccaacagatcgtacatatgcaaaacagaggtttacacagttttatacggtagacaacactgtttataaaggccaatctgaagtatgaggaggcacggtagacagcactatttacaaagtaaaatttaaaggctgatggtgtgataggagagctgccggagataaacggtttcctggaggtaggcaaatgtgtcgttcaactgcagcatccctggcataccttcaggacgtgatgtctactgctgttgagctcgctgctgaaaggagcggtagccaccttgcaggatcctcacgttcttgaaccccgcgttcagaaggtctgccgtcgcgaacctggatctgttccccgtgttgcaacccacaatgaagacatcagccttcccacagaaggcagccacttcctctacaaagtgtgggttcttctccttcccttgcggcgtgacggacaggtagtagggaacgttccgagcaccgggcgcatgcgccttgtggaagtccccccgcatcctgacatccacgtagccatggccggagctcagcagcgcgtgcgcttcgtcagcgtcgatggtagggtcggcctgctccttgtcgctgctggtcactgcagtcgccattgctgcagggatggatggatggatgacctgcccagcgtccgcggacgcgtgggcggacgcgtggg

SEQ ID NO: 286740 - DNA, 450 bp, Zea mays
attcccccccgggggggtacgagagatgtaagaaggcccaagagatgtaagatcatacattacagaccgcctcccagtaaaatcattgacattttgaactaacatcacaattaatcttctacgttgcacctatgtctatcaagcttatcttttatcagatcggtcgtggctcagtgtggccagatcactcgaaaccaaagttcagaatccagctggtttggttggctcgtcattgaaacatggagctaataagaattttattgatgctacaaatatcaaccaagaggcacagacttcttgatactcggtattaaatgctgtgtatcctcaagctcaatttcacctcctccccattcgtccccactgtcaaacatcatttcgatctgctccagtgttttcccttttgtgtctggcacacaaaagtacacaaacagtacagagatagtggag

SEQ ID NO: 286741 - DNA, 338 bp, Zea mays
agcaaaatctgaaagttcacacccaaagtttcttttccaaaaggaaaaaaaaaacaaagattgcaatacgatgtacagcaccttctgacatatgcacagctataacaagaatactataggtaatatcatcaaccaaaaccaacatgggaacgacgcttcttgtttgctgcttatttaccccaggaccatggtttcaaggagaggataatgatgagaatgattatgaggaggatgattatgcctatgcaggtccattttcgtgtgttcttctgcagcttcttcgctttctggagaaggtttgttccggcctgaatatgttcagctgcacctgtgacctg

SEQ ID NO: 286742 - DNA, 501 bp, Zea mays
ggaacagcagagtagttctgtgtccgcccttttttttgttacagttttttaagcatgatgaaatcacaaattcgcagttgaattctgtagcaacttgggactatatgattctgagttatactgcagtatcatttaacttgagaagataaatggtatggatcctaacgaaaatatctaacttttgactaacacacactgaacaaactaaactgcatgtacccccattttgtccacacaataaagaaaagaaaagaatagaatagaatagaataagagtagatattgccaccacatcatttgtgatcactatgctccattttctaccaacaattgtctccaaggttctgtataatgtggtgtttgaacatttttaggtagagcagcatgccctctttgtgtttcctgcagtgctgtcaatgctgataattttaccctgggagggcaacgaagcagttgcagctgctgcttctttggcagccagcgctttcctgttgacaatgc

SEQ ID NO: 286743 - DNA, 429 bp, Zea mays
ccaaaaacacggagcatctacagccacccccaaatatgatgtacactagcttggcaactccaacgcttctcattgagccaggtacatcacaccgcttgctgcaggtgctggtgctgaagttgaagccgcttcctgagctccttgcgcagtatcttgcccgacggggccttggggatcctgtcgacgaagaccacctcgcggaccttcttgttgtagaccacctccttggccacaaactgcttcacgtcgtcctcggtgagcccgtcgtcgcaccctttggccctggctacgaaggccaccgggatctccccgatctccggctccacttgtttcccgacgacggcggcgtcggcgatgcctgggtgggtgatgagcagcgcctccagctcggcgggggccacctggaggcccttgtacttgctcgagccg

SEQ ID NO: 286744 - DNA, 376 bp, Zea mays
cggtactaaagtcctctatatgaactccacatttgaaactggtactgatacttgtaccgggtttgaaacaaccagaacaaatgttgatggatggaagtctttcttctgtgtgtccttggattcgatgtctttagtttaattgtttggatacggtacaagttacatacatacgatcgaaattgcatgctaaaattaatttcctcgcacccaaaaattacagttcgcatgcagtacacaccgcacacgacacagttggcgctgcacacgccgggaacgcgcaagtgcaaaggtgggtcgacgtggacggccggccaaatggcaaatgaaatggtcgtccggacgtcggacgtgcagctagagggagtagagcttcctg

SEQ ID NO: 286745 - DNA, 275 bp, Zea mays
ctctaattcttaacagcctttactatagcaatcatgcgggtcatgtatatcttagagtacatgcaaaccattgatcgtgttcagcaggtatgaaactagaggaagcagtatgtctcctttcaaagaaagagattgatgggattggcatcagttgcattcaagggagcagagacttgcacaaagatttggagcagggtacgatcgggaagtgcgcagcgggaattgcgcgtatgcttgcgcgcccgctcccgatctagaatcgactcgagctcgag

SEQ ID NO: 286746 - DNA, 832 bp, Zea mays
gaaaatgccgtcgtgaggtgatgggggagctttgtggggaggtaggcggggattactaagtagaaaatttgggcggggtagatttgagcagcacgtccacactagtgggtgaaatgtaaatgtccctattattattagcacggcgatcccgggagctgctgcttcagtccttgttgttctggagcctgcgcgtgaaggcctcaagggacaggagcacctgcttgaggcgctccctggtgtcggcgtcgatgaggttcccgtcgctgtcgaaaaacttggccggctcgaagaaggcgaagacgaacagttccggcttgttgatgaaatggatgtccaagaacaccccgacctggcgcagatggtagctggacctgccgccgccgaagttgcctcccgcgctgacgatggcggccggcttgtctgcccagcagttcactcctctagaagcccagtcaagcgcgttcttcagtgggctggtgatggagtagttgtattcgggcgaggcgaagaggaagcagtcggcatggcggaccttggcgcggaacgcctcgacggcgggcgggaagcccgtaccaccgttcgtctcgaggtcggtgttgagcatcggcaggtcggcgacgtcgaggtggtcgacgcgcagccccgggatgcagtcctcgcacacctccgcggcggcgcggatgagcccgctgtgccaggaggccttgcgaatggagccgctgatggcggccacgcggaggacgcgttcgcagccggtgcttccatgcctgaatatggcggatgtggccgtcctgcctgtctgtctcagagccacggtccgcggacgcgtggg

SEQ ID NO: 286747 - DNA, 302 bp, Zea mays
cccacgcgtccgctagttctagatcgcgagccgccgcccttttttttttgttttttttttttagcgaagttcaccatgtattttattataggttcgagcacatatactttggtctgtaataagacgaccacgaattactaattgctgaaggaaggaagtagagattattattattagcacggcgatcccgggagctgctgcttcagtccttgttgttctggagcctgcgcgtgaaggcctcaagggacaggagcacctgcttgaggcgctccctggtgtcggcgtcgatgaggttcccgtcg

SEQ ID NO: 286748 - DNA, 343 bp, Zea mays
gttctagatcgcgagccgcgccctttttttttttttttttttttttttaggggtaaattaaccactttataccgaaagtgtagtatacatatagcaaagctaccacgaaactatacatttttttctcctatatatctccccaattttacccttctccctatcacttgaatgcttgaggatgatgccattgttccattcccctgtgctcatataaagctacacactgtctggtagataagcctcaaatgctacagttcaaacccacaaaaaaaatgagagctggcttacatttttttctatcccaagtgaagatgctttcgagttctgcaggtcatgtatagcg

SEQ ID NO: 286749 - DNA, 481 bp, Zea mays
atcgggggatatttagggactccgtccgtatggcatgtacaggtcattcacaaatctacacctacatatccgacaatcgtgatggttgttgcagtagcaatacttcagagatacatgagtcaacggcagtcatgtacattatgatggacggatgaccagggaaaagccgtaggattgacccaacacggggggggtaattgggtgttccagaattcgtcatcgtgcttgcaaaaatgatacttccaggcgtgagcttctagtcaaaagcataagggtcgtcagcatacggattcaaggaaccctcagagaataattcaccaatgtttgcaggatgtgcacgggatcttgtaggaccttttttagttttttaacatctttgtcagtagtattatgcaatggtttctgagagttcggttcaccagtacatgacagtgctcctagttttcctgcgctttgtgattcttccatttgctcgctcgag

SEQ ID NO: 286750 - DNA, 464 bp, Zea mays
  unsure (1)..(464): unsure at all n locations
tttnttttttttttttactcntaaaaactcatagtccatgtatataatgtatatcggtaaaagagtaaaatgagcacaaaaccaattgcattatccatgaaaatagacgagtgagacgggcggcctcgttgatcgtcgtgactcgacccaacctctggtgggtatatgtcggcttgttggaattcccggcaggccccttgcactgttgtttgagtaaatacgtatgattattgctccctcattcatacgcaacaaggacctcaggatcggagtgccgatccgttcagtactgcggcaggtcgcactcgtaccgcatctggccgttgaccaagcgcttggggtcgacgcagtagtcgtagatcctgtagctgccctgcacccagcgcatctcccccacctgcgcgtcgctcaggctgcagtggctggcggcgaacgccgcggcgcagctggagacgcaggcgcca

SEQ ID NO: 286751 - DNA, 354 bp, Zea mays
accctaccaccccacgaacttagctgatattacaactttatacgacacgggaagcacagacacatgaactaccgccacagcaaaactgagcgcgtggttagatgcggaacgaaccctccggaactggaggctctttacacttttgacgaggccgcgtctgccgaattcagacttgagaatcagcagcagcggcagcagcactacacacacgctggacaagggcctgccaccccctgtggctttgaccaccacgcgtctcgcggttttgtaaacccatccaatatttacatgcagcgacaaactgacagctaccaagcaacgaggggcgagctcgttatggtcttctgatggtcg

SEQ ID NO: 286752 - DNA, 453 bp, Zea mays
  unsure (1)..(453): unsure at all n locations
aaaggaacactcgnagaattgggggatggttaaaggccaccccagcgatagcttttcggacattctcttcagcactcgtgctgccactgtttcctcctgttcgtcattctgatccttggtgagccactcttgagtggcgacaaggtccgggagcaccgtggcgcctgactgcctccagctctcagcgtcggcagtcttgaaccggtccaggagcagcgcatgcatcccgatgctcctagctggggtgtagtccttccgcatgctgtcacctatgtggagcgcttcttccggagcgacgtttcctgccatctccagcgctatcttgtaaattcttgggtctggcttctcaacgccaacgacacctgagaacaccccaaagtcccattcggagctctgattcaatcctaaagctggcaggattacatctttgtagcggtattctgcattgctgac

SEQ ID NO: 286753 - DNA, 471 bp, Zea mays
ggcacaaatggatttttttttgggggggggactttgggggggtaaccagcgtttacatcaaacataaatttctctctagtaccgtcgtttttgaaatgtctgaaggatgcaaaactgtagctgcggcctcttagaaaagcgaagagatcctgatttagtttctaccactacttcaacacctcgttttttcctgtcatcgtgccatggagagcacaacaaaacattctgatatgatgttgcagccttgcgggtacctgagaagcctttcagatacagaggcacaacacgcaatttcctttttcatcgcagactcccctgtggatgttaaaaacgatataacaaagaaaagctactgatcatgttccagtaggggtggcatcagagacagtgtggttcgtgacccacgcgtccgcccacgcgtccgcccacgcgtccgcccacgcgtccgcccacgcgtccgcccaccgtcac

SEQ ID NO: 286754 - DNA, 431 bp, Zea mays
tgcgggtacctgagaagctgttcagatacagaggcacaacacgcaatttcctttttcatcgcagactcccctgtggatgttaaaaacgatataacaaagaaaagctactgatcatgttccagtaggggtggcatcagagacagtgtggttcgggcctcctccgtgctttccattcatctgcactcgttgtcgccaatctggtagcgtcgacagtgtttccatttaataatttatggaactcatccatcatcctcccgtccttctcaagcttatggagttcttccttcatcctcccgtctttatcctttgtgcttactggaagcagagacaatccatttgtacggtctgccatttctggcagcttgttatcaacaaaaaatacaaccaaattaaccgtgtaccaagcaacaacaacatcgacagtgtagtgc

SEQ ID NO: 286755 - DNA, 318 bp, Zea mays
ggcgggaacgtctgaactgaggaacagtttcagttcagagttcagacatgttcggttttcagggattcaagtgaatgcaggccgtgccagttcagaatctgaaaccagttgaacacgaagcaaccacagcactcacgcaacacagcacactcatggttccagcattattctctgccgagttgcttcggaaacagcagggggaaacggcttgcttgatgcggcatggtggcaggatcgggaccgctcgggaaccactcgccccgctctggtcagtggtcagtactgcgaggccgccgtcaggtgcatcaggctcgacgc

SEQ ID NO: 286756 - DNA, 340 bp, Zea mays
acataactgcatgactgatattgctcctcgcatgccagaagtggtgataacagcaggtcaaagatctttggaggaaacaagaatctactcatgtgcacaacatattcttccagaatccagacaaatgagttcgtaaggaacagcaaattgtgaatgatgcagactatcgatagtgcaagtaaatgatgttctctgaatctctccagggggaaacttcatcaaaggaaaccatttccaaaccatcatccgcaccattttgaaacttgaccccccacctttcaaagtgtacaggccttctgcaatcctcatgtttgcaacaaggactatcgctggatcctga

SEQ ID NO: 286757 - DNA, 1207 bp, Zea mays
tacaatgtcagagtatcagtaatacggattactgtgctactgatgtatcagtggcaatcaggctggctttattaggttgttagaaagaacatagaagaaatcagagctgggatctccaaataacatctctgtaataatacaacaacaatgtactccctcttttttttgtcgtgttttagttcaaaaataaacttgcagacgacaaatattcgaaaacggcggtgataataatttagtgcttcaggcgatattcaggtgaggcagatacagtcactttgcaggacgattagctggaagatccgatgctcggaaagacttctcgagcagctgaggaacagttagtttcagctcaaaggtcaatttctgaagcacgtaagagagggttgtcacatcctgcatggcacgatgcgcgctccctgtgagtgggattttgtagcgttccctcaggaacttcaatgacacagaactgagtcttgacccattagaatcgaccaattgttttgcgataggaagagtatccacaaagagccaatcactaggcatttctactttacaccgtcgaaactcaaacatgagaaagggtacgtcaaaggaacgcccattatgagcaacccagagaactggtttaccgtccatttgacgactccacacatattgtagcagaatgggaataatctctccaaatcttggaacatcaggcctgcagagcatactgttgttaataccatgaacatatgtatttttcacatctttctcaggatttatgagtgtctgaaaagtgctattctttccccccataagatcacggacagcaaactcaataattctgtcatcacgacgtgagaagccagtagtttcaatatcaaaaacaaggatagttgcaggccattcggtcttgacttcagaaaactcttcctcaacattgtagcaatgaagtgatttaagctgctcaagctctgactgcttgaacacttcaattgatgattcaaccgatttactgtgcaaatggcggccattgctaaatgactgcttacttccttgtcttgtgcttcttgctagcactgttgtactaggaggcctactttgatgtattctgcttgagaggaaagtgtcatatatcaatctgctatggtatttaagccatctgacactgcaagtgtcgcctatagattccttagtagatggaacttcgcacagcaaatagaag

SEQ ID NO: 286758 - DNA, 596 bp, Zea mays
  unsure (1)..(596): unsure at all n locations
attataacatgtgacacaagttaaataaacatggcatgtttacggtaaataccacaaagacaacctaatagattgacgcttagccaattgccacttgatatcatcaaactggagagtttacagtatacacacgtgtccatagcataaggatagccaatcattattggccaaatcacagtaacttgcgcgagtaatggaaggtacaaaatgtagaaatacaactgacacttccataccaccaatggcattcaggcattgtcatcatcatcctcgatatcccagcttaaatcctcatcatcttcggcaatgctcagcctcttgcgcagctcctccttcagagcagggcttgaggtctggatgccgcctttcttttcttcatgctctcctagatcctcaatctcatcccactcaagatcctcttcctccgcagttcgctgtctagacactatggagtaatcgctgtccttgctcgaatcactcgtctcatgttcgctccttccttcttggcacctgattcttcgacatgtgacttggagggctctgcattctcannccacgtcgccacgcgtccgcggacgcgtggncggatgtgtggg

SEQ ID NO: 286759 - DNA, 430 bp, Zea mays
tgcagcgtgcaaaaacgcaggcagcggatcgcagcgcctggcagcagcagcagcagcagcgaacgagctcaacttatctgatcaatccgtttcaattgatggaagggaaactaaactagtgttgcatcgagaacgaacatcaacaaagcagttttgacctctttgattacgaccaaccgacaacaggtcgactcggtaactcccttagcctcaactcgactcgaatgatgaacttgatagtaactcgaatgatgaacttgatagtaactcgaatgatgaacttgatagtaacagatacctgtagagagggagagggggggggggacgaaagggtcgatgcacggatctatcgacttggtcggcgacggcggcgggccccgcccagaagcgtctgctgctgcagctcgaggtcgttgagctgctgctcccg

SEQ ID NO: 286760 - DNA, 412 bp, Zea mays
gccaaaagggtaaagtcacagcaatgcttcagacccaagcatacccccatgcagtagatcacaatcatctatagagacctcaaagggaaagaacccacaacgccacaccaacacaacggcctcccagtaatgtcatatcagccaaagggaaaatatgaaaaatgaacaaaatgctaccaagacaagtgtacacaggtcagcatgaaggagacgccgacgatccaaactccggcacaacaccaatgtatcgcctgcctggcctgaccaagtgtgagaccagtcccaagaaggggaaccctatatgtactgctgctgctcctcctcccctttcagtcgccgtaatcagtgctgccactacacgagctgctgccatcccggctgtgctgcgacaggcccctcatgtggcccggaa

SEQ ID NO: 286761 - DNA, 462 bp, Zea mays
ccaccaaacaaaataggaagtgctcaaattatgactgtacaggcaatgccagactagaagacccttagacaacgaatctagacacatatataaaatacatacatcaaatattggatgaatctattaacaccctaaaacgaataatattttagaaaggaggaagcagttgacaggtgccatatgtagaagttcacaagattatcaataacagatgtctggcaaaaacaaaatactatctaagtttccaacagctaacaactatggctgactactcccgaaacggcgagccaaaatctcttgtttcatcaacttgaagtattgtttcgattcttcatccattgtgcttgtgtctgtttgcattatctctttgtcatgtcgatctcgctccaattcaagcttactcttttccaactcatagaacttgtcatcatgcgtctttcggtctcgttctgtttcttcccg

SEQ ID NO: 286762 - DNA, 424 bp, Zea mays
gggacgggtaacattttccattaactggtgggggggctatgcaatgggacctggttttacatcaatagataatgataatgcccaagggacatctatcgatgatgctcacctagagaagggccctaatttattggtacttatcaagaacaagggcagatgaaaaacagcggaatgttttgatccaccttcagaatttacacagctcaatccatccacgttttccttttcgcctttggaacttatacagctcaatccatccccatgttacttattatcttccgactctacacagctcaatcaatcctcatgttcctcttcaccttcagaatcagatcgtatatcatcgccaacgtgccctctagactgtatttgcttcacaagcatccgatacattaaaacccaccaatatatgtgtagaacaagt

SEQ ID NO: 286763 - DNA, 336 bp, Zea mays
cccttcttattaattatcattcaatgttcttgttagcatctttttaaagggtaagaatgtttacataactataattttatcttcatcaatgaagataaaatccataaaaacattctgttatagtttgcttttcatgacagcacaacgctagagacactgaccgagtcctcacatcgtcatctcgatgttgaggctaggtataccccaagatgtcggataggaggtccgagacttcgagagcctgtcgtggaggtctatgatcttgaagagtttctaggggggcgaccgatgctgatggcctcggcgaagctgaagaggtgcagcgcggcgccttct

SEQ ID NO: 286764 - DNA, 357 bp, Zea mays
ggcagagctatgccaggattgctataaacatgggttctgaaaaaggcattacaaaagcaagacgcaggcgaaacaatttacagggacagtgacaggtctctgggaagtaggatacaaactaaaaaggccgaaacaaacctgccctaagaagaaacggggactcccagcgtcgcaatcaacgtgcgtcttgatgccgggcgagcgagggtagattcttgggcagacatttggcgcaggggcaagcatcgcccctttgacttgatgcacttcttagggcatgtcacaatgatccgtttcagatttgatggatccagcaacgataagtgaacacgttcagcacaagatcttgagtataaa

SEQ ID NO: 286765 - DNA, 517 bp, Zea mays
  unsure (1)..(517): unsure at all n locations
aaanccacagaacaatatctaatcaactgaagtctgaagtcacatgaacggcaatttttacaagtgaggaccagaacatggaggatctcagttacgttcctgccgaagcgtcacagttcgtagcctgtacacgccacagcaaaatctgagctccaccagccggcggccggcccttcgtaccttgtgtacataacaaaaaaatgcattctgttctacaaaggggaaaaaaaagaggaactgggtacacatcaacgcgggatcttggagttctttgggtgctgcaggagtttcctggctttccgcgcacccaagatgctaccagatcagatcgctacctacgtcgcaagtactatcgtaacccattagctttacagtacgatccttgcataacactcctaacctagttctgtcatcttcgcttgacctttgtagccgatctgcctgctagcgagagacatcggcgtacagatggaaggccccagatgcgtggctgtggctgtgatcctgttggtcgccc

SEQ ID NO: 286766 - DNA, 365 bp, Zea mays
aacccttgtaccctgtcttattcaaagggcttaactagggaatcatatcgggcgttcagcatgtatcccgtatttgctgggaccctggggacaacaggggttgccagccaggcagccaatacaaggtcatttgcgagcatcgccagaatgggcccacatagcatttcgggtgtgccacatgggcacatccctccctccaactgttccccacaaatgcaatatgaccagccagtggccacctgtacattggaaatccagcacatctgctcatcaaacccaaaggctcccccttgcgacgctcatttgccctctgatcttcaaggaacaccacgagaaagagaacgatgccttcctgcatcttcgaa

SEQ ID NO: 286767 - DNA, 360 bp, Zea mays
ataatgaactcttaaaatgtttgatgggttgttccatacatttagaggtccattttatagcctcgagaatgggtacacatccccaaagcaggggatcgtcgcaacgcaactgatgagcaaagtaatgtggatatgtacgtcaatcttcctaccgtgttactagagaggacgtagtatattatgacgtgaagccacaaggttcgacatcattctgaacataagtaacttccagttactgccgcaggcctattctggagcagcaacggacgacgatggcgagcatctttccactgatgcggttgaactatgcttgccagctgcagcgatgaactctaccgccacttttaatgcattaatgga

SEQ ID NO: 286768 - DNA, 525 bp, Zea mays
aataaatgaagttcaacatggagattgactcgatgtctcgtggttacactagtatcttcacattctcattggggacaaaattgataactagggcaaattggtatgttggatatagccctatacaactaccttggtgcccatattcactaccgcattgatgtcggctgtgacaatttcaagaatacacaattaaagttctctaccagcaaatagctttctactagaaagcagtttgctccctagcaaaactagaatttacaggtaactctcaagctcattgcttaaaaacctcaagaattgggatcaaaggtcatttggtgactaccatacactgctgcggaaaggcaagctccatcggtaacgcgtaacgggtaaataccactggtgtggaaaggcaagctccattggcaacaggtacataccactgttgcggaaaggtaagctccattggtgactggtacatgctgctctataggaccatatgagacgctcgatgtggagagtagcaattaggggaggatgtgt

SEQ ID NO: 286769 - DNA, 460 bp, Zea mays
actcagtgccaaatcaaggagcttcctttcgttcatcgtcgtctgtgaattgcttgctacaggcgcgcgcggtgtgcgtaaagaaacaaaaagctttagtttttacaggcagacagacgtaatacatacatacatacaattgaggcggaattatatttgaagaagaaggagcaaattacacgcgagttcccattgcattgggttgttgttgttgaggtgttactactacttcatacaatagcaacctcacctcaccgttattgattgattaacaaatattccaaacgtgcacgccgcatgcatgatgacgatgacgatatagatgaacatggatgatcaggagctagcttggcctaggcggcctgctggctcatcatctgctcctggaactcgggcaggtgctgctcctggacgcacatggtcatgatgcgggcgccgggcttgggcttaggcggggcgc

SEQ ID NO: 286770 - DNA, 403 bp, Zea mays
ttcggtcgcccttttttttttttcttttttttttttttttttttttttaataagcgatgaatcatgtagtaattgtatcggttggtcactcaacaatgcagagtagcaaaatgaaaatacaacaatacattacgcatacaatttttagtttatagggacaaaaagggagaaaacggggtctggtttttgatcctgcaaaactgaatccctaacaaccattaattaatccacatgtcaataccgattattaggctcaaaggaattggtttatctcttttttttacagcattgcacccctcggatacctttgactcgccctctgctcttccatttcgttcatccaatcagaaagccagaaaatacctttccacaacaggtacagaccagcagcaacgattatgag

SEQ ID NO: 286771 - DNA, 330 bp, Zea mays
cacgaatacagcacagattttataaccatttatacagatgtagaaagggcattaataggacaaacaccaccaaccgaaggattttatcaataataatttacaggataacttggaataggctaaacaacagataatgacagagtccaaacacaagctagcctgatggagaggactgtaccttgtaaatccattactgtctgttcatgatctcgcggtagactaaatcgacgaattcatcattctccacaagtctcaataatgcatctctgactttgtctctagtcagcgctgggctcaagactggtgcagatgcaagagatggcgacggat

SEQ ID NO: 286772 - DNA, 517 bp, Zea mays
ctataaaaataggattctcggttactcaaatcatgggcaggtctgacagacgttatcctaatcgagaggcaatttacaaaacctccaggctccagccgaaagtatcctgtgttcacaggccaagtcctacttcaacagctgaaaaaactaaacgaaaagattcgggaaactcacatcaatctaaaattgcaacactatcaacgacgatgtttagcattattccaccaccataactcaagacgatgatgggggaccttgttctaggtctagatcgtccaccatcttctgtatagattcgatatcacctgttgctgatagggtgtgaatccgcaggctgtctgcatcctcatctgtaactccaaagatttctttgactacaagtgagctgtcccgtgaacagaactccggaagttctgataagtataggatttttccaaacagtgcttgtacagcaagcttccgcttaaaaccttgctctgtaaaaccagataagtccataactactggccctttttcc

SEQ ID NO: 286773 - DNA, 437 bp, Zea mays
ggcaacactttatggtcggtaaatgttataaaaattgcgtaagacaccactccaaataccaccatttagaggacttttaaaacacactcctagcttgggggccctgcataatgttcaccattaggagcttattgcacgcacatatgccgccacataattcagttcaggtacttgttgaaccagtggctcatgtcgcgcaaagcttcctccgcactcgtgacagccgctgcgtcgtcgtcgctgtacctcacagcccatccatgcgtacgccaggaaaaaccttgacaaagtgatcgacctcggggttcgctgaaagaacttgctcaaactgctgtagcaattcaggcggggctgacctgtcgatttcagctccaagtatggaaatggggcacttgacatctttcatatcatcgacagttagtaaagaagggtgtgcc

SEQ ID NO: 286774 - DNA, 300 bp, Zea mays
atattgcacatacttaactctccaggcccctttgttttttctttgccctgcaataaggtgatattttttccacacggagataatactttctccacggaccatatgctacagacagccagccgaaacccaatccaaaagcatgctacaaatgttagctgaacggacaattcgccaagttggaagatgacgcacattgttatgtaaattagggaatgacggatgcataacgcccattggtgatcagtaaatggaggcgtcaagatccaggaggctaaagtaaactgcaactactggctgttc

SEQ ID NO: 286775 - DNA, 364 bp, Zea mays
ggctgaaactgttaaagggggtattttctgcattctaggacgtcaagaacggctagcacttagctcatgggcttctatccagattcagcccatcatgctatttattcttgctctgctactgctacgtagaaaggggtatgccattttgccgggtgtctaaacatcttcgttcatcagatagacaaagcagcagagctatctacatggatctcgatgttgtcaattagcctgacctttccaaaccaagccgcgacacaaattacacaagggcggtccatcctctccacaggcaccaagctttcctgccccacaatctcaacatagtcaacctgaccgccagcttctgtaattgtacgcactattt

SEQ ID NO: 286776 - DNA, 247 bp, Zea mays
gaggctggctacggcggcgttcaacaaggccgaagacgtgatcatggacgagatgggccggcgagcggtccttcagggcgcgcgcgtcaggaagcacaccaagggcggacgcgcgaggcctcacggcaagtcgctgcgcatggtcgctgcggcgggcgtgctccggtggggcgggtcaagccggcgcaacgtgatctgccgggagccgaggtcggttgcagctcggcgttccagcggcacatgcaga

SEQ ID NO: 286777 - DNA, 242 bp, Zea mays
gtggagctgacacgtgatatcggccctttactttttagtctgattagaagagtgcgtgcgtgcgtgccgtgggcagtggagtgagctgtgatccaggaggacagacatggtggtggcggtggcgctgattcgcccgctccggggaacccgggcaaatggagctcttgacccggcaggggagatcagggtcctgactcccgacgaacttgtcagggccgaccggcggcagggaggcatggaca

SEQ ID NO: 286778 - DNA, 233 bp, Zea mays
ggccgacgacagcggcaccgtcgggatggccatcggcaccgcggtcggcggcacctccattgccctcttcaccggcgtgagctgctggttgggcatgaaggcttaccgtgacggccgattctcgagaggatggtggcggatgcgcgtctgcacgctcggcggcgtcaccaccctggggcaggcgctggcctacgactgcgccatgtgcggccgcagcctggaccagcgggagg

SEQ ID NO: 286779 - DNA, 310 bp, Zea mays
atttcgacggagaggaggacggcattggcaaggggagggccggcgatggtcaggacgacgaggtggaaagccatggccacgaggatgagtagctagctgcattgcattgcatgcatggcgccatggatgcgacgaccacaggacatacgatgcgagctgggcgccatctgtttaatttgttcgttcgttctttctttcttcttgctactaaatcagagtactactagcttttatcactaccttttgttattagctaccacctgcatgcatctgctgctgcttctagctagctgttattatgtatactact

SEQ ID NO: 286780 - DNA, 380 bp, Zea mays
agttcatctttctttggatatcgaggaattcaagcacaagggatcccacaaatcttttgttagatgtcttcctagttcacagagaaatgtaacagaaattagtcacatgcaacctgttgcaaggggacttcaagtagataagaccttcagtgataaagggtcgtgtcatgccagcagaactgtttcaggaatgcccattcgacctaagtattatctcagcagtcccaacaacaatttgaagagtcctcccactgtaaagagttgtagtcagatgagtgatttcagttatcgactggtcagaagtgctaaaaggtcagcttctccaggaatgggtttaaccagcacaaactactccctttatgagaaaatgtctttgctac

SEQ ID NO: 286781 - DNA, 578 bp, Zea mays
ggacaagaaggaagccgaggcggtgacggtggccaccgagccgaaagggaggaagaggggcaagaaggaagccgaggcggtggcaccagcggcagaggaggaggatggggttgatgtggcggctggagcgaagacgtcatcgtcgaggcctgcactcagtgcagacagtttaagatccgagctcagaaggtgaaggaggacctggaaagttatgtttcgggggtgtctgtgataatcaaccctcagaagccacgccgtggttgccttgagatacgtgaagaaggcggcgaagtgttcatatcactgctgaacatgccacgccccttcacaccaatgaagaagctcgacatggacaaggttatcaaggacatcgccaagaagatctcctaaatcatgctggctggctatggctcggcggcaccattttgtgattgaaatattcaatctaagatcgttatcttcaaagggtacggtgtgccttaggtgtaggtcccaatcagtggcgtttcctattgcattggccatgtgcccatgtctcgtactcgtacctatatgcttgtgctgcattgctggggcat

SEQ ID NO: 286782 - DNA, 476 bp, Zea mays
cccacgcgtccgcggacggtgggtttgcagcatgagtacagtggaaatgactgtctccaacttaaaggacatcagacatatactgaagtatcttctctccttgagcacttgatagctttgcatgttcttctcaaagaaatctttttcagcatttctgaagtttggtgggtacgaacaagtagacattcttattcacaaggctagggcgaggctcatgcagccttctttcgcattggtgtgtgacaaaagaaccaagtgcttgctgcttttcattcgaggtgctatcagcactaaagagcgcctgactgcagcaacttctgctgaagttccttttcaccatataattctatctgaaggaaagatcagcaatgtagttttagggtatgcacactgtgggatgcttgctggagctcgttggatcgcaaaacttgttattccccattttcataacaaaatgcaggaattttctgggtacc

SEQ ID NO: 286783 - DNA, 322 bp, Zea mays
gcagctagtgatcgtcgtcgggcggtacggtggtgggccggagtcggagcacgctggctacctgcccgcgtgtggtgactgcttggtgttgagttagttaaccgctactgatctcggctactcgcttggtaactgcatttgctccttgtttgagctgagccccggctccttcctcgggagctcggttgatgtagtctagtagtaaagtaagatggtgtgattgcatagtgacggcgattttttattggttccctacaaggttaaaaaaaaaagggcgccgctcgcgatctagaactagcggacgcgtgggcggacgcgtggg

SEQ ID NO: 286784 - DNA, 358 bp, Zea mays
ggcagtcctaccgccaagacgttcctgaggatgttcatcagatctgcccaagaagacaacaagaagtatcctagcctccagttggagttcctggggagctacctttctgagctgagcttgctggattatggcttgattcgctccttgccgtcacttgttgcagcctcagccgtctttgttgcaaggctgaccctggatccacacacccatccctggagcaagaagatgcaaacgctaacaggctataagccatctgagttgaaggactgtgttgctgccatacataatttgcagctcaaccggacatgtcaatccatggtggcgatccgggagaaatacaggcaacaccgattcaagg

SEQ ID NO: 286785 - DNA, 462 bp, Zea mays
agccaccaagcctcttttcgtccctcgagagcaaaccatgacaacacccttgtccacaagctccttcagggacagttttttgctgctggtcgacaaggtcctcggcatgacaagggtgaggtccagcctccctctggcctcgttaggaattctgagactgttaaccctaaagcgttcgagctaaggcatgcaaggcctggcacgctttcgttatgccttggacagaatgacgatgatgacgacatcaagctcaaccccaattatcacaatcttgaattcttggttactacagggccaggaccctgtcctgagcttgatggccagaacatcgtctttgggactgtattggaaggaatggatgtcatcaccagcatcgcaaccatacctacctacaaaccagctgaaaggatccgcctcttcaacggctttgcgcagttgattggtgatggaagggctcaaact

SEQ ID NO: 286786 - DNA, 245 bp, Zea mays
agctgaggattttgtttcaaggctgaagttcctttttggggcagtctaatggtgtactgtcctgagtatgtatctgaaggtcctgaatcaatggttcggaaaacaagatgagcttcaatggttgttggaagacgctgtaattttgcctgcctgcctttcatggttcggggaatgctattctgcagatgcagagccaaaattgacaattgacgaaggaaccgtatatgttcaacgtatcttcattc

SEQ ID NO: 286787 - DNA, 293 bp, Zea mays
aagccaaaggacgccccgaagaagaccaagaccggcgtgaagaagcccaaggccgctgccaaaccgaaggccaagtcccccgcgaacccaagcccgccacaaagcccaaggcggccgcgaacccgcttccaagccgaaagcagcagcaaaacccaaggcaccagccaagcccaaggccaagcctgctgccaaggcgaactcaaggctgccggcgctaagccgaagccagctgccaagaaggccggccgccccgccaaggcggccaagacgtcggccaaggccacgccaggaaa

SEQ ID NO: 286788 - DNA, 250 bp, Zea mays
gcgcggcgcaggcggcggccttccggaaggccaacgagggcaaggcgtactgcctgtgctgtgcatatgcatgtgtggttaattagctggagtgctccggtcgcttaatctgttggatttgatggtttgttggttgtgtgcgcgtgtgtttcagtgatttgctcctttttttttctttctcgtggatctatcgatggatgaacatgaatgaatgaaccgaactgcacagctccgttgtgagctgatgcat

SEQ ID NO: 286789 - DNA, 315 bp, Zea mays
  unsure (1)..(315): unsure at all n locations
ganacagaacacggcgcggcattggcccggtggttcatggtattggaggaaggcaagaaggtgtctgccaagaagctgcagggccaaaaaccggaacagagccaccaggaggaggacagggaggaagacgcggccccgccggcgaacgcgctgatgctgatgcggtgccggtcggcaccggcgaagggattagcgaggaggctagagccagaggaggagcgcaatgatgtgaagggcgccgccaagaagactccagatcaggaagagaaggagaacgagggcctggtgctcatgacatactcgccggacttcttc

SEQ ID NO: 286790 - DNA, 384 bp, Zea mays
agaaggcgatgttaccttgcaggatataaatcggcgaatccgtcctcctaagaaggccccagagatccttggaacttcagcattctctggcaagccagtgattaacaagacaagaatcagaacagaaggagggaaaggaagcatcacaatactaagaacaaagggctgagaaccggaaaataccttcgatccttatttatctgctcctctctcctcttttcagatgagaaaggggagaaggcagctccttggtggtcaattgtgcaagtctgagcacctgaaacttccattgattcacagttcaaggctgagcctgaggatgccattgattcttatttatctgccattctctcgattgcttttggcactttggtcaatgtgcag

SEQ ID NO: 286791 - DNA, 780 bp, Zea mays
cggacacgtctgttgtgacgcgccggtttgatgcagtgttcaccaatcccagtggtggggcagggactctgacgatcacaagcatcttcaacggccactggaacatgagcatgaactatctcggcttgcattccctccggaacagaggtttccggcagctcatccggtcctacttcatgtccggtgatcgtgttccggacgtcgtggtcctgaactctggcctgcacgatggctgctactggaccagcgtccgcatctacgcgcaggctgcggatttcgcagcacagttctggtccggagtcatggacaaagtccgggctcgcgggcgtgcagtgcccagggtgctctaccggacgacgaatgccactgggggctacgctagggacctggcattcaatccaaacaagatggaggcgttcaatggtgtgcttgttgagaagatgaggcggcacggggtgctaactggtggagtgattgacaattttgacatgacattcccatggcactatgacaaccgctgcaatgacggcgtgcactacgggcgtgcaccggcgaactggtgtgtgcgggatggcaaggttgggcaccagtacttcgtcgacctgatgctggggcatgtgctccgcaatgccatctgcaatgaatgaggattgctggttccatgttctgtaagtttcgtgcgttcaattgtggaaactggaataggatggttagggaactgaagctggggtgattagagatcaacaattgggtagtgcagtatgggtgtaaatctgatgg

SEQ ID NO: 286792 - DNA, 228 bp, Zea mays
gagagaactagtctcgagtttttttttttttttttttttttttttttttggtggaattataatgtacatatatatggatatagatatacatacatccgttcctgaaatcttattcaattctgcttaaaagaaacagctagcagaagaaacatgcaagccacattgttacatgatcaggcactagagagtaattaacttcccggggatagcattaccttgggtgccggg

SEQ ID NO: 286793 - DNA, 446 bp, Zea mays
gtcgatttcgcctctaggatcagttgaaatcaagtcggttcatttctctcgaggaaggtcatgagaaacttgtgctggcatgttctttgcaactgaaaacgacaagcggcaagcagtggctggccagtgctattgccgcaagggttacagccaatccgtgatcttttttggacccaagttgcataatggtgcagactgaggtattcgtgtgaatgtatggtgtggcaccataacaagaaggctgcccccacccaggtaacgcgaatgatcagcaatatgggtgaattgacctacttgtgctataccaaagacagcgtgccaactgtatatatgagttttattagtgtgcagatttcataaaattgccctgtacattctttcctttgcaaatgctaatttagttgtgcaaggaaaaaaggattataaatccgttttggttggataag

SEQ ID NO: 286794 - DNA, 516 bp, Zea mays
atcaacctgggaaagcgtgctggcaagagatctgcatctgctggtggtgtatcctccaactccaaggaaccaccagccgatccagcatctagtaacgaactaggcggccatcacgtgacaacgttgggagctagcgctgacggtctcctcccccacgcgacgaaacggcataaacgggacaacagctgatgatgggcctctctcactccgcctcgttcccagacgacagacggattgatcattctttttttttttctcccagcccgacgggaggctctctcttggattggttgcacatcgcgtgctcggtgatgggctgagaccccggctgtattctttttgatttgatcgctcccgccgccatcccctgtctagcccattgtttgttacgtagagatcgaacgaaccgtggagcttcccattgcggattgtgaagccgctcttcttgtacacaggcttccattcatctgagaagcttcttcccctccttgaacaggtctctccgcgttttagacc

SEQ ID NO: 286795 - DNA, 229 bp, Zea mays
cggcgcgccggaccccagcgcggactgctgcagcgcgctgagcgccgtgtcgcacgagtgcgcctgcagcaccatgggcatcatcaacagcctgcccggccggtgccacctcgcccaagccaactgctccgcttgaagcagggacctggcacgcgtgctgcaatggatggccggcggggagacgcataagaagtgtttccatttcacagtgagagcagtcgagctccaa

SEQ ID NO: 286796 - DNA, 252 bp, Zea mays
tgtggagcggcgttcagtaatgggctcttggttgcagttactaaaacatcaatacattgtacgttcaaatcttagttgcagtaatcgttcaggtggatccgtgttgttttctcgttacatttcctggtaagtagcggaggctggggcagagctctatgaagttttaactcatttactatgagaaacaaggaagtacttcgcatcatatggcatttatattgctgctcctaattgatcatgtgcacttttgcc

SEQ ID NO: 286797 - DNA, 317 bp, Zea mays
ggaactatgggaagtagcgaagttgcacaactgcgaatcttcgtacccatcagatctctttgacgtcaaatttcctttgtgctcggtggatctaagggaatggtgtgcagccaacacacgcaggccagatttactcgagatgatacctgactcctttttcaatcttgtggagaagtgtttggccgtcaaccccaggtgcaggctctcatcagaggacgcgctcatgcacgagttctttgctccatgacgcgataacttcaggaagctcaggatgctgaggaggtcagctggttctgatgcagcatgttcatcgtctc

SEQ ID NO: 286798 - DNA, 303 bp, Zea mays
gggggggagagccctatattgggggggccccccttttttttttttccccctttttaatattattctattttttttttttttttttttttcaaacaaaagaattcatatagatgatgatgacaataatgactcttctcccgacggataatgaatcctgtggtatcatggaatcaaaatttgacatgccaaaaattaataaaccttgtctaccatgcctacattccctgctacaaaacttcgatttttcttcttcggggacatagagataacttcactgctcatatcaaggaagggggggcccgg

SEQ ID NO: 286799 - DNA, 328 bp, Zea mays
tgtcgttcctcgacgaggcgcaggtcggtgctgggtacgcgctcacctgcgtcgcgtacccgacgtccgactgcgtcatccagacgcacagggaggaagacttgtactagaccgggctggtccccgtgcatggatcaaccttgcacttccattcagattcgatctttgagttattgacactgtccttggcacacgctgttgcggttgcagcttgctagaactaatcgtcgtccagataatttggcatgatgaccaagtgcaggttcttgtgaaaaaaaaaaaaaaaaaaaaaaaaaaaaaaagaaaaaaaaaagaaagaaaatagagg

SEQ ID NO: 286800 - DNA, 337 bp, Zea mays
agcaatttggccaatcgaggtatggtctgctcagcacttgcaaagcgcgcagtgcccaacgaagacgaagaccactactccaccttccacaacatccagccacggaaatatacgaagcaggaatgggaggacttcacccaggaatcgactaggaaggcgcttgcggagtgcacagctaccccagagtttgcctcagtgggtcggtgacaacgctcgtcgtctgcaagtagagaaagaggaggacaacttgtcagaggaagagatcatggagagctccagctcgtcggaagaaactggggatgaagctgatggagctcctggcctgatcagactgtgg

SEQ ID NO: 286801 - DNA, 236 bp, Zea mays
actcctctcaacccgaccacgccgcgcctccgcttcgaaccctagccgagcggggtaaggagggaaatggggaagggtacgggcagcttcggcaagcgccggaacaaaacgcacacgctgtgcatccgctgcggccgccgcagcttccacctccagaagagtacctgctcctcctgcggctaccccgcggcccgcatccgcaagtataattggagtgtgaaggccatcaggcgcaa

SEQ ID NO: 286802 - DNA, 423 bp, Zea mays
ccgccactcatccacaacttttttctttttcactctgtacaaactcatccacagcttcccgactttgtctgttctgcttcgctcgcgggcgctcatctccactcctccgatggcgccgccacccaccagcccctcattcctccgcccgccgccgctgccacaccacccgcaccctcgcctccttttgcgacctccctccgcctctttccgcgtcgccgaaatactcggcggtcggggcctctgcaatggtgaggtcggcgtccgcaaagaactcgcatccggctccaccacctcctcgcccgcgccctctcctcctccttcgacagattctcctccgcccgcggttgatccggacgcgttcgagaaggagatgatgggcctcacaggcggcttccctggcggtgaggtcggcctcaaggactt

SEQ ID NO: 286803 - DNA, 423 bp, Zea mays
ggagatgcttgagaattacaagccagggctcggcgatcaccggtggccactcgtcacacactttgtcgggtgcaagccgtgtggcaaatttggagactaccctgtcgagcgatgcctcaagaatatggaccgtgcattcaattttggggataaccagatcttgcagatgtatgggttcacacacaagtcactagcaagcaggagagtgaagaggatcaggaacgagaccagcaacccgcttgagacgaaggatgagcttgggctgcttcatccagcattcaaggctgtgaagacttccacatgataattagagtacagttccacttgtttattttgttggctcgttctagatcctgttgggtctataatccaaagtgttcttttttgtagaatcgggtgacgacagaagtttgggttggggtc

SEQ ID NO: 286804 - DNA, 320 bp, Zea mays
cggctcgagtttaggttctctggcgtattgtgcatgccatgattgaggaatcaacgatccatcgaggcgaggctatctatatagtactggaataggggcaagcccggcacacttaaagccattccaacaatcttattcgtcgtaagcccttctagcaggagctgagtaaaggtccgctcaaggccatggaaaggcagatagtacttgatacaggacgagcccagtctctatctagtacgatattctggtatgtttcactgaattggcatttctagataccaaacaagtgaaacacagcaagttagttagctcagttggca

SEQ ID NO: 286805 - DNA, 294 bp, Zea mays
ggtacatgtggcggctcattgagtccaaggtgccccagccggcgccgcccatccctgccctcccttcgccggacggccagattatgctacagcagcagcagcagcaatctgtcatccaaatgatcattcccttttagatgctcccagggatggggtgaattcggtatcacttctgcccattagtcactccatcttagatcaatgtttactctgcgcatccgatagtcagttccgcactttgttgttctggtatggaacggcaggagggtggacatgaaatgagtattttcgtcc

SEQ ID NO: 286806 - DNA, 362 bp, Zea mays
gcggcgggcgggtccgacggcgcggccgcggcgcaggcggccgccttcaggatggccaacgaggggaaggcgtagagatcgagcatgtgtacgtacgtgcatggtaaactggagtgtgtgctccggagcacggtacattcttggctgctgctgttgctttcatgcatggctacgacgtaatacgtgccttggttgtgtgcgtttgtgtgtgtgtgtgtgtttgagtgtttcatcgtagccatgcatgaaagcaacagcagcagccaagaatgtaccgtgctccggagcacacactccagtttaccatgcacgtacgtacacatgctcgatctctacgccttcccctcgttggccatcctgaa

SEQ ID NO: 286807 - DNA, 282 bp, Zea mays
gcaggacctggaatcttgggagtcaatcttggcaagaacaagactagtgaagatgctgctgctgattatgtgcaaggggttcatacattgtcacaatatgctgattacttggtcataaatatttcttccccaaatactcctggtcttcgcaaattacaaggtagaaaacaactgaaagatcttgtgaagaaggtgcaagctgcacgggatgagatgcagtgggctgaagatggacctccaccattgcttgtgaagattgcaccagacttgtctaagcaggat

SEQ ID NO: 286808 - DNA, 431 bp, Zea mays
aggtgttgattatggggttttgtgatggagggaaggtggaggtggcaatcagactccaagcagagatggctggaaaaggattcactgctggcagcgaggtgtactatgcatttattagtgcttatgagaagtctgaaaattatgagatggtcgagaagttgaggaaggaaatgtcggcgatgggcacttagagcatgtctagcagctcaccaataattcatccctaataaaatggtattggtggtcaccaatagtgctttttttggaatattggggagactctatagtagattaccaataatctttcccaatacatgggacccacatgtcagaatagaggatgtgggaggcagaagatgacgacagttgttgtggtcccaacacctatagagggagatgcaactccccttttatttgacgggagatgggag

SEQ ID NO: 286809 - DNA, 860 bp, Zea mays
caagatgaaccacacgcacctgaggaagatgctcgacgacggcaaggaactggggatgccagacggtgttttgatgaatggcaaggggccatataggtataatgactcgctagtgccagatggcattgagcacgagactatcaaagttgagccaggaaaaacataccgtttccgtgtccacaatgttggtgtctccacaagcttgaacttacggattcagaatcacaacatggcccttgttgaaacagaaggttcatacacgatgaagcagaattttactaatctcgacatccacgtgggccagtcttactcatttctggtcactatggatcagaacgcaagcagtgattattacatcgtggccagtgctaggtttgtgaacgaatcgctttggaccagagtcaccggtgttgcaattttgcaatattcaaattcaaagggaaaagcatctggtcctcttcctgatccaccaaatgatgagtatgacaaaactttttcaatgaaccaggcacgttccatcaggatgaacgtgagcactggtgctgctcgtccgaatcctcaaggatcatttcactatgggtctatcaatgtgagccaagtttacaagctgaggaatgaaccacctgttatcatcaatgggaagaaacggactacactgagtggtatctcttattccccacccgacactcctctgaggttggcagatctgtacgacaagaaggatgtctacacactcgacttccctacaatgccaattgatggaccgccagtgatcagaacatctgtcattaactccacatacaagaactttttggaaattgtatttcagaacaatgactcaactgtccagacctaccaca

SEQ ID NO: 286810 - DNA, 232 bp, Zea mays
gcgacctgccgctggcgcccatgccggagctcgtctcgccggaccgccccgcgctctactgccccatgaccttcgacgactaccgcatgtacatccgccgcaaggggcctcgcgggaagagccaggtcgactccctcaaggtcgccgacgcagtcgacgccgacgccgacgccgacggcagacggtgctactagctagtatatacctagccagcctgctgccgatcgagatt

SEQ ID NO: 286811 - DNA, 389 bp, Zea mays
gagcggctgagtcggccttttccgcccgatcccccctccccccgagcgccgctccggctgcaccgcgctcgctccgagtttcaggctcgtgctaagctagcgccgtcgtcgtctcccttcagtcgccatcatgattatctaccgggacctcatcagccacgatgagatgttctccgacatctacaagatccgggagatcgcggacgggttgtgcctggaggtggaggggaagatggtcagtaggacagaaggtaacattgatgactcgctcattggtggaaatgcctccgctgaaggccccgagggcgaaggtaccgaaagcacagtaatcactggtgtcgatattgtcatgaaccatcacctgcaggaaacaagtttcacaaaagaag

SEQ ID NO: 286812 - DNA, 853 bp, Zea mays
agggatctggaagtcatgtccgcaatctggtgggcctgattcagtttccaggtttcaacggggaattaatttgtccgatgtatcatgagttgtgtactactgtaccagttccaatgactggccaatgtccaaagtcatgcagttttaacggtgactgcattgatggaacctgtcactgctttcctggttttcatggccatgactgcagcagaagatcttgcccagacaagtgcagtaaccatggtacatgcaaagctaatgggatctgtgaatgtcaaagtggatggacagggattgactgctctacagcggtttgcgatgaacaatgtagtttacatggaggggtttgtgataatggtaaatgtgaattccgttgttcagattatgcaggctacacatgtcagaagggttctgcaatactgcccagtctgtcaatgtgtcatgatgtacttgttagagattcagatgggcagcattgtgcgccaagtgagctcagtatactacagcagcttgaaactgtagttctcgtgccaaattacaatagattgatgccaagtgggcggaccttccttaacttcttcaacaatgccaactgtgcagcagctgcaaagcggctagcctgctggatctcaattcaacggtgtgacgaggatggggacaacaggctcagggtatgctactctgcatgcgaattgtacaatacagcttgtggagcgggtctggattgttcagaccagaccctttttagcaaaagggaagaagaagagaagggtgttccgtgcacaggatatggcgagaagaagtctttctggctataacatctctgaagcttcttccgttatggctctggtag

SEQ ID NO: 286813 - DNA, 329 bp, Zea mays
cggaccgtgggaccgggtgggcgagctggttcgacccggcgaaccggcggtggggccccacccgtcgtctcggccccgacgccgccgttaccacgtggggcgtcgctcccggccgcgccggcgccgaggaccgcctccttctgttcggggctaagcgggcagacaaggaggcagagtgcacggtcgtcgtccaggcatgggaggtggacggcgacactctggaacagagcccctccgcatccagcgatgcgatgccgccggagctgtccgagaggctgtttcgtcgtgacgacactgatgacgacgacgacgaagaggaactggacgac

SEQ ID NO: 286814 - DNA, 238 bp, Zea mays
gccgagctggccgagcacccgcatcgtcggcctgcgggacccgtacccggagctggagcgcgcgtacgtggcgcaggtgtgcctcacgtgggaggccctgaactggaactacaccagcttccggcggcacaacggcagcgacgacggcaccctcgcggcgcggtgctgcccggcgcgcgtggcgcaggagttccagcagttccaggtgctgctgcaccgcttcgtcgagaactagccg

SEQ ID NO: 286815 - DNA, 409 bp, Zea mays
caattgttcaacagtttgcatctggtagtttggatggacgcataaaatatctttgaagacccaacccagtagtgaatgaagcataggtgttttgttacaccctcttaaagatcatcccaacaaaatctagagcatcaagaatccaacaatatctggagcatcaagatccgatatggggggtctatggcagttgggagaaggaaacacatttggtctgtcagtgtttcattgagtctaacaggcatctgcagctgtatcattcggtcacgtcaccttctatgcgcataattgtggtaccagcttgtcaaataagcattagtttctatacaccattctttgagggaaactgtgcgagcgatccaagataaactacatcattcgtcaggaaaactgagctatcatgccaaaa

SEQ ID NO: 286816 - DNA, 316 bp, Zea mays
gcatcaagccctctgagcttggtcttgtgctgttatagggcagtctaatcaggacagtcctgagtttacaccttccaggtctcactgtgcaatcccagtggtttcctcattttgtctattgtggtagtggtttctttgatatgattgccatgcccattgatgggagtccaagatgatttgcaaacaaggagactggaattagaaatcctttccttaatttaaggttattattcccattagtgacattttgtgtgcgtggtccacaacttgtatgctggcattgattttactgagaaattttgatacaacttgtgtt

SEQ ID NO: 286817 - DNA, 217 bp, Zea mays
gctggacatccaagaactgctgccttactcatatggatacaccgacatcaacccgtacggatacacggacctgaacttctactgaaacagggtttgagggattcagcgtccttcgaatgttgattcaatgcaagtgcaagtgcaagtgcaagtgcagttgatggaaagatccgaaatttgttgggccaaagcttcagcttctgatagatagcccggc

SEQ ID NO: 286818 - DNA, 250 bp, Zea mays
ggacagtcctgagtttacaccttcccttccgcagcaggtctcattgtgcaatcccagtggtttctcattttgcctactgtggtagtgattctccttgatatgattgccatggtcactgataggagtcccaagatgatttgcaaacaagggagactggaattagagatatcctttcctcaatttaaggttactgttcccattagtgacatttcgcgtgcatcgtccacaatgtgtatgctggcaccgattt

SEQ ID NO: 286819 - DNA, 424 bp, Zea mays
  unsure (1)..(424): unsure at all n locations
cggaactccaagcgcaagagcatccacgacatcaccaccccttgaccctgcccgccgacggcgaaacaagcagtagccagccaagtagggagctttgctgtggacgatctgagaaacagaggcagggagttccagtcagcagctagcacatggtctaggctcactcgtactagtcattaaaatagagttaggattgttgaaacatctaatggagtctgacgtggcaccgtcgtgtcgagtctaggcggatgcagatcgtcaatggagtgagtcactgttaggatggatggtgcctttatagttttgtatgtatgccggcgtggcggtgtcgaagctgcagtggatagacttgcacagttgttgtctccgggcgttccttccanagcaaacaggcaaatgcatactccgatccacgcaggtggcc

SEQ ID NO: 286820 - DNA, 236 bp, Zea mays
gaaagacgtgcttgtgctgtgcactgagacccatcatgtacacccccccggctccactccaatttgcctgagagcagagagactatgatgccgagtatttaacaggctgctggggccaacggtttccatatcatttctctgcgtctcatgagctctcccacatgtttgcgaggagaggtcagaagagaactgccgcggtcatgcatcaactgctggcccactgtgctcgcttgatt

SEQ ID NO: 286821 - DNA, 245 bp, Zea mays
ctctctcctcggcagcgattcgagcacccgattcaacagttctgggagagaattcggtagcagaaatggcgcgtccgacagatttagttttaggaaaggggtggagaggctttgcaggcatcccgtgtttcagttgaataggtccatgaagaagtctgcagatgccgtggtcttcgatgccccccgagaagcaagacaggcttgggtgtgatacaataacgacattgtatgtattatgtagttct

SEQ ID NO: 286822 - DNA, 303 bp, Zea mays
gggctaatactgtataagaaatgtgctggttcttgatactcctccaaccagttgtagaagaattctggtttggctgaagtagctttacatccgaaagatggactttgtacagatatattctctgtcaacaatatgtatatccaggcggagatgaacttggagggaagcagatgtacagtttggtgatattatatattatcaatcgcagtttattaatgttgcgcttcttctctattatcaaactattcacacaagacttcatgtgtgcgtgtgtgaaagattttattagtgtaaggtctttag

SEQ ID NO: 286823 - DNA, 355 bp, Zea mays
gagacctttgcgaaccttcgtaatcttaagaatttgcttataagcaacaatggccttacgtccttgccagcagcgtttttcaaaaagtgctcgcagcttactacactggatctccatggcacagaaatcacaaatgatgttcttcgacaggtggaggggtgggaagagttcgaccagcggcggaggcagaaacatcagaagcagctcgacttccgtgttggctcatctggtgtgttcgatgaaggcgcggatgatgataataggcgaaggtgactgcctgcctattgtgagcataatactttgctacgatatttctcccaaagaaccgtagaaatgtacaactgaaaactacttc

SEQ ID NO: 286824 - DNA, 434 bp, Zea mays
ccgtgcggctgccccacgctcagcacctgctactgcattgtccgatgactacctcagtcagtccccagagaatgacgctagctccgggaagcttgtcatgtttggcaagggcagccctgagttcagcgccggtgggcacgcgttgttgaacaaagactgtgagcttgggcgtggaggctttggggcagtctacaagacggtgctcagagacggacagccggtagccatcaagaagcttacagtctctagcttggtcaagtcaaaggatgacttcgagcgacaagtgaagacgctcagcaaggtgcggcaccacaatatcgtcgcgctcagaggcttctactggacttcgtcactgcagctcctcatctatgattacctacctggaggaaacctgcacaaacacctgcacgagtgcaacacagacagcttacttt

SEQ ID NO: 286825 - DNA, 272 bp, Zea mays
attaaggcttacaacactgggactaggaagcgtcgaaggataaacactgacgatgctgatgtccgttggcacaagacaggcaacacaaagccagtactagttgatggaaaacaccttggttgtaagaaaataatggtgctttatataagcccgttgaagggtggaaaggctgagaagaccaattgggtgatccaccagtaccacctaggcactggagaggatgagagagatggtgaatatgttgtctccaaaatattttttcagcaacagtt

SEQ ID NO: 286826 - DNA, 287 bp, Zea mays
gccccggcccatggtgatgacagcgtgatgagttgaagtggttgttgtcctggatgttgggacttgggaagtatgtcgaaactcttgacttgaagctgctgcttctcggtgtgttgtcctgacgacatgagtgagcttctatctggatgagcggatggtaggaggaagtcgaaactctacatagttcgaggagagcttgtgctctgtagttactttgcactgcggagttactcgtcaatttgtgctgtgtgatgtaaggagctagctatcacggggttcccttcttt

SEQ ID NO: 286827 - DNA, 268 bp, Zea mays
acctaatcaggacaatcaacatgaggcatcatctcagaagacggcttataataagcatggaaaaagcatggattcttgtgttgaagtagtcgaggttgagtcagctctacgacataaagcaaaattggaaaggcaccaacgcacagctgagcgagcggcgaaagccttgctgaaaagaatatgcgggatatgctggtgcagagggagcatgctgagaaacatagactggctgaatttcttgatcctgaagtcaagagatggtcaaatg

SEQ ID NO: 286828 - DNA, 457 bp, Zea mays
tcgagggctctccagctgctcaagaagaaggagaaggcagataatatcatcaagaaaaccaaagataagcgccagaagaagaaacaggagaacgctgatcccaaccggcccaagaggccagcctcttcctttcttcttttcagcaaggaagagaggaaacagctgatcgaggaacgcccgggcatcaataactcaaccctgaacgcgctcatcacggtgaagtggaaggaactgagcggcgaggagaggcaggcctggaatgcaaaggccgcgcctgccatggctgcgtacaagaaggagatggaggagtacactaaggcccaaagctcatctgcttgacagaataactaattcctgcgagtgagctttggttacaaggatcctcatctctgaatcctggtgtggtagattacttcgtgtgatctttagctttgtgtgaccttattagtcgcagcaa

SEQ ID NO: 286829 - DNA, 501 bp, Zea mays
gaaactgtggcaaattggaaccacttattcagttggtgttttgcaaattcagatttgggtgaattactgactctcaaatgccctgctgacagagcaatggtgctgctgatgtaccaaattgagttgagaccactcaattgggcctgggcagacgagtgtgtcttcaacctgtgtctacttcgattacacagtgttgttcatagcagcctagccaatgcttataaatcctggttgataacagtgattcaccgaacacactcaattggccaagatcatttttggcataacgtggataggggtgtggtgtgtggaattaaggatagatgctgtgcaagattggcaaagctagttttatctgctacactgacacaagattctggcaagctttctcaacttgaattgcaccatccattgttgttgaatactcagtcaagcggcttgaggacaagccgcatttcaagcggtggggaatgtcagcatatcatcttctcctcaagtcaa

SEQ ID NO: 286830 - DNA, 288 bp, Zea mays
acgtcaaattctgaaggaccataaatttatatcggcagatttgtctttcataaaacgctatccgcatatagtcaatgaacaagagtgtgcttggtctgctcgggagaccactctccgtgagtccctagaaatgagcactactttggcaaagaagaccatgaattcaaccagacctaatgttgcttctaaagggcctcattcaaatatgagcaagggcagggatggcccatctcaaggaagtgatgaccttgcgcgatctgttttgggacatgttttcactgccaataa

SEQ ID NO: 286831 - DNA, 648 bp, Zea mays
gcctcaagcgaccccgtccgccgaagccttttataaccccttcgtcgagaaacatcttctgccgggagctagagaggacctcgaaggctttaggtgcgcggcaggaagagaatggctctgccattgagcttaaggggagctacagctacgaagagcttgggaagagactaggggagctgcggccggcgggtgcaggtaaagacggtaaggagtggttctcgctcaaggagctgcaggggcgtatcgccaagctcgcggagcaggagagccagcttgccgggccgttttcggaaatgcggcggggcattaggaacctgcagaaacaaggaaaaccgggctcggcctgtaaacatccaagcactgctgaaccccgtcggtcagccgacgccagactacatgagtgggcctccgcacgtggaattgttagagaagtacttccatccagatcatatgtcatccgaagagaagatgagattggagctccaaagggtgagggacgaattcaagatgtccgagaatgactgtggttctgcacgagttcaaattgcccagctgactctgaaaatcaagcatctgtcaactgttctacacaagaaggataaacattctagaaaggggcttcaggagatggtccaaaggaggaagaaa

SEQ ID NO: 286832 - DNA, 292 bp, Zea mays
ctggcccctgctggagaaggcggcgccggatccaccacctctaaccctagccccagcgctggaggagtcgcccagtgctgtggaggggccagtgaccctgctgccagcgctggagaagccacgcgccgcgacggagcagcagcacgtacatctggtggatgacagaaggagatgttgatgaccacgcaggagatggttggattcacggaacacaaggaattggttggattcagtgacagtgaccacgcaggagatgttgacgacagaaggagcacaagcgggttgttcttct

SEQ ID NO: 286833 - DNA, 321 bp, Zea mays
gctcgcgcgcgcaagggccgccgtcgcccgccggcccgccaccaggctggccgcgctgctctggtaccagggcgaggccgacaccatcaggcgccaggccgccgacgcctacacgccccgcatggaggccttggtccgcgacgtccgccgggacctgggcatgccggacctgctggtcatccaggtggggctggccacggggcagggcaggtttgtggacatcgtcagggaggcgcagaggagggtcagcctccgcaacgtcaggtacgtggacgccaagggcctgcccgtcgccaacgactacacgcatctgacaacgcc

SEQ ID NO: 286834 - DNA, 392 bp, Zea mays
aagaacttatttcacaaccggagacaaggaaacaaaagcttggactattctttcaggcatgactgcgccacaagcagctggagttattcatagtgacttccagaaaggattcatcagagctgaaactgtatcctatgatgattttgttgcagctggttctcttggagtagcaagggagaaagggctgctgaggttggaagggaaggattatgttgtgcaggaaggagatgtcatgcttttcagattcaacgtgtgacagcaatagtagcaaaaggcttcaaaaacaccggaatttgtactaggcagaatatagtttgcccatattgtgagattttttttttgccacttgaccaccgattattgatctaccacgctggtagggcagctttctt

SEQ ID NO: 286835 - DNA, 447 bp, Zea mays
gaagagcccacacatgtgtcaaatgcgccagagaacttcaaagggagtttggtggattggataacgtacctgtcaaacaactctatacttcaggatgcagttgacaagtctttgattggaaaggacaacgatgctgagctgcttcagtgcatgaaggttgcatgctcttgtgtgctttcttctccaaaggaaaggcctacaatgtttgaagtttaccagcttctgagagctgttggagagaaatatcctttcagtgcagctgacgatgaattgacgatgctacctcaaaatgccaatcctgaagatgagcttattgtagcgaactagtttagcctatgtgatgagtgggtgcttgtcggataccaaatgttgcaggagttgcttcaacttggaataatcagaattatttctctatcttctctaaaaaactaaaaaaaaaaagggcgg

SEQ ID NO: 286836 - DNA, 275 bp, Zea mays
ggaacgagggcttctgaagagagtcggaatatgccacggtgtaagcgggaatgcctatgcgtttctctcactctacaggctaaccggtaatgttgagtacctctaccgggcaaaggcttttgcctgctttcttctggagaaagctgatcagttgatagccgagggggccatgcatggtggtgatcgcccgttttcactgtttgaagggaaagctgggatgtcatacctcctcttggacatggttgatccatctgaatcaaggttccctgcgtatg

SEQ ID NO: 286837 - DNA, 308 bp, Zea mays
taatcacgctctctcaaatactgctgtcttctatcgagtgggaggcaacacaggctgggaacagccaagtgtttagtggtcttgtggcggggaggtgatctggtcaacacaggctgctgtacatgctcttgagtgatctactcacctgatccaccggagacatattcgcctatggccctcctctttatatcttactggtcctttgtccagttgagcgattttcaggtttcttctgagctctgagagaatacctaccagagtgcaatatattttttggtgggtggtacagtatgtagcaacgtatgtat

SEQ ID NO: 286838 - DNA, 263 bp, Zea mays
gccaaccaatctgatcaatacaatgtcttcagcggtcaagtaatcactgcggttaaagaagcatgcagagcagctgttcttcagaacaagccaaggcttgttgaggctatgtatttctgtgagttgaccacgccaaccgagcagttaggtgcaacttatgcagttcttggtaagaggcgggcaaggattctgaaagaagagatgcaagaaggaacctcgttatttacagtgcacgcttacctgccagttgcggagagcgttgg

SEQ ID NO: 286839 - DNA, 434 bp, Zea mays
gcctcgtcctgcaccacgcgcagcgctccatcgccccgtcctgcaccatgcgcagcgttccatcgccccgtcatgtaccagtgccgtcacctgctgttgctgctccttccaaggtcggcatacaagcattggttgatagtgctagcatcgcctcaggttcagctgggattggaagaggggtcattgcctctggtgcagctggaatggtgaagaagagtggtgctagtcttcctgttggtgcaggggtgggaaggaagaccggttggctctcaaggtgggtgagctcatgctcagatgatgcgaagaccgtctttgccgctgtgaccgtgccactgctctataaatcatccctagctgagccgaggtccatcccatccaggtcaatgttcccaacatttgatgttggtgatcggatccttgctgagaagatttcg

SEQ ID NO: 286840 - DNA, 444 bp, Zea mays
ctcgagccgcgaggatgataaatggcaagacgagtaatttactatgctgagcttgggcatcagaggtgtgtagatcaggagccttctacatggtacagacatgggaagcacacagattatttaaccacacacctcccatactaaaatcagcgagatcaggtgattaggccgtcagtgcggtggtccgtagcaataagctgacagagggagagggtgttgccttttagaggcgagggctatatcctccagaggttaacatgcagtccacatctgcagtattcgttgtgctggctgtgaccataatggaggaggtggagggtccatgaccagcacacacagaaatagtttcgcgtaaagagggtagctatatctgtattggcgatagttttggtgttgataattaaagcaatggaacacggctggaaaatagctgccgtgatgttg

SEQ ID NO: 286841 - DNA, 466 bp, Zea mays
cgtcaaagtaatgtaaatgagctgtgggcttttgagcaagcagggagcgagggccactgcctgtggtcttgtttcttcaggtaaagaaaaacagttcttcctgagtgaggggtagccaagatcgacgactggcggcaggtgtacaagcccacaaccacaagtcgtcgtccaggctctcgactcgagggagaagcaactccgatcacttgttcagagttgcatgtcccgtgaactcagggccagaagtccatgcagtggcaaaagcagaacgcgtgttggaagtccaagcgcaagcccatcccgggaagctgcctgtcggatgtcgatgaacgcgtgttggaagtccaagcgcagaacgcgtgttggaagtccaagcgcaagtccatgcagtggcaaaagcagaacgagtcaatggtgatcgatgagacgccgcgttgtgttgttcttgcagtcttgctcatcgtgc

SEQ ID NO: 286842 - DNA, 546 bp, Zea mays
ctcgcttcagtcttaggtatttttatgtctctcttttatttcgagagttgcctgttccatatggaaaaaaaaaacgagagttaatgctgatcaaacagacgttgctgctgcgtttggcattcaggactccggacatctccgcgatgcaccatgacggcacgcctgacctgagagtcgtggcggagaagctggccgacaacctcagggtcagggacacgtccttggacacgaggaagatggtggtcgagatctgcgacatcgtcaccgggacgtctgcacggctggccgcggcggggatcgtcgggatcctcaggaagatcggtcgagcggcgccaggcgacgagcgccggtccgtcgtcgccatcgacggcggcctgttcgagcactacgccgagttcagggaagcgcctggaggccacgcctggtggagctgctcggggaggaggcgtctaggctggtggaggtcaagctcaccaaggacgggtctggcctcggagccgccctcattgcagctgcccactcgcagtactgaacgcccaacggccg

SEQ ID NO: 286843 - DNA, 221 bp, Zea mays
aggccgccggacccggaggcgtctcctcgaggcctctcaaggcggaccagcttctccgcaccatcgcgccacagcatcggcgggaggtgcagttcctttcctccgaccatcagccgcagccccgggggcctcccggcccaccacaccttattggcccagaggttcatgggacagtcgatggagcctttgattctgggtacctcgtgaccgccgtcgtgaac

SEQ ID NO: 286844 - DNA, 223 bp, Zea mays
gaacaagcaaacaacttcaaactttccttgggaaccaattttagtgataaaagagttaagcatgcaatatgtagtggctcaaatgattgttgtgtctataggatgttattgcttcgtcggtcagtaaaagaataattccttgtgatattgtgtaagagcaaaggttgattttgcaatttcttggtatttccttgtcaaatataacagaaattagtgccaaaaa

SEQ ID NO: 286845 - DNA, 427 bp, Zea mays
gtccaagcaaggcaccaaaaggagagaacgtctaatttgtatccagtgacctaatcacaatcgatgtcagctcgaagggggcgatctcgttgtctcggatccaccagggcatggcattagcgttctacacttgctgaatttgtgtggactcaatcggcagcgcttacattcttctgtacagcagcagtgtttctaacttggcatatcgtccgttctgatagtgacattgccacagctgcaatattttagtcgggtggacaaggcattttgttgggtacagtagctgttgttttgttagcctttttttggtaatgtttgtttggttgattgaacgctgtgagttttgtttgccgcgtatcttcgtcaggctcgggtatttacatcctgcaactgtgtaaatgattttgtctaacgaatgtctgttgac

SEQ ID NO: 286846 - DNA, 419 bp, Zea mays
gttcctgttctactgcgtcgtgatcccactgtctgtcatggtccccgaagtcagcatccctgcctggggaatgttctacattcccactgccatcaccatcatgacagccatcaggagtccttggtctatccatctggtcccaatatggatcctgttcgagaacgtcatgtccatgcaccgaatgcgcgcggcgctgacggggctgctggagaccacgtacgtggacgagtgggtggtcaccgagaaggtgggcgatcatgtgaaggacaagctcgaggtccctctccttacaccggtgaagccaaccgagtgcgtcgagaggatctactctcatgagctcctggtcgcgttctacctgttgctatgcgcgtcgtacgatgtcgtgctcggagccgggcactactacccgtacatcttcc

SEQ ID NO: 286847 - DNA, 253 bp, Zea mays
cccacgcgtccgcgatggagatgaaccgatcaacacacacgtacgtgctgctgttcttcaggatttcctattcctattctcatatctccccccttttggttacatgatgctcatgcatttcctgctgcgctgctgggaaatggtactagtagctgtgcttggtactgtacggtttgcagaatcctgcttgttttgtgtatgcagtgcaatgatgatggagatatagtataatggaatgcttaatttccaggtt

SEQ ID NO: 286848 - DNA, 464 bp, Zea mays
caggggttaaagggacttatccagtttcatttaccagttcctgtgaacaatctggactgcgaaatgcattgtgcacctcaaatcaacctggtgagtttcaagatactgatggcatggaacctgcatacatggaagccctgaactgtggtgattatgatgatctgattgacctaatggatagaactggaccagttctcgaaaagttgtcgtgtgagacgacaaatgagcttttgaggttatagctgaacaatttcttaataagaagttctttgacttggcactgccttggcttcaacagttagcagatttaagcacgatttataagccaactcaactttttgcatctgtgagagcacaaaaggagttcctttctgcattggaggaagctgcaacgggtggatctatggaaccagccttgaggattgcaattgcacagctcggatttaaactatccaaagcttttg

SEQ ID NO: 286849 - DNA, 271 bp, Zea mays
caaaggaggtgttgtcagccagaaaggctgcgatgacttgatggagagctttaacatccgaaggatactcaaagcaagcagatattctgtctaggatcttggcagagaatgcacagtcgacgcccaagaggggcagaagggttgccatgggtgcttagtgagctttgccagcttgtttagagcatctgtgttgttgttgttttacttcaagaaagatgtgattctttcttttcatcgatgctcttgagctattatcaagtggggatttggt

SEQ ID NO: 286850 - DNA, 279 bp, Zea mays
gccggtagagacagacacgcaaacgagaggactcgagagagattccgccgccaccaccgccggctcagatgccgccgccgcagtcgggcatgaccctctgccgccttcccaaggccacccttggccttcccctttctctcccctctgtgctatatcgtcccagcctgtccctcgccgcacgtcgcaccaaggccgtctccgccagggcctcctcctcctctccatcaccggactcttccttgcggtcgcggaaggaggattccggcaagaagacggtgc

SEQ ID NO: 286851 - DNA, 568 bp, Zea mays
ctctgtcatggccaagacgaagcaagggaagcgggatgtcgacgcctataccatcaagggcaccaacaaggtggtccgagtgggggactgcgtgctgatgcggccagcggacacggacaacccgccgtacgtggcgcgggtggagcggatggagtcggacgggcgcggcagcgtgagggtgcgggtgcgctggtactaccgccccgaggaggccaagggcggccgacgcccgttccacggtgccaaggagctcttcctctccgaccacttcgacacgcagagcgcccacaccattgagggcaagtgcatcgttcactccttcaagagctacaccaagctcgacaacgttggtccggaggcttctactgccgatttgactacaaggccgccaccggtgcattcacccccgaccgtgtcgccgtatattgcaagtgtgagatgccgtacaacccggatgacctcatggtgcagtgtgaaggatgcaaggactggttccatccgtcttgtatgggaatgaccattgagcaagcaaaaaagatagatcattacatgtgctcggattgtgcta

SEQ ID NO: 286852 - DNA, 263 bp, Zea mays
ggcggccgccctttttttttttttttctagcaaaggtccagcaaaacaatttattctctaacattcgcagcatatgtagagttcccacgatccagaagccatatggtgccaataatataaatattatacaccagactattttcccccctatcataaccatcattcagactatgacgatgacaacataagtacataactagccacccatgcgaagaactgtggtggtaatgaaccaaagaaagaaacagccacaagtggcgtgc

SEQ ID NO: 286853 - DNA, 335 bp, Zea mays
ctttattgatgccacaaggtctggaaatgtttcccgttatattagtcacagttgttccccgaatctcagtacccggttggttttggtagagagcaaagattgccagcttgctcacattggattgtttgctaatcaagatattgccgtaggagaagaactcgcctatgattaccgacaaaagcttgtagcaggcgatggctgcccatgccattgtggaactaccaattgccgaggccgtgtctattgattttgcaggaatacactaactgttcaatgctcggttgcagaactccagagatttcaacagttgtgtaggcttgctgagcgatttagca

SEQ ID NO: 286854 - DNA, 410 bp, Zea mays
ggcacgagaacgaggccattttgagtttttgacatcacttttgatgcagcttgtttgaactctgtagactctggagatatcagtagcaatggcaagttatcacttggtcttcatcaatctcagtcatctgcacaacagccagctacaccgtcacagacaacaacgcttgaccgtattgactcccgtgctaatcctgagggttcatctataagggctgcagccattgcagccggcgcacgcattgggtccccatctgatgcagcaacaatcataaaagcggctcagtcaaaaggcgccatccacatcatgcctggggaaaacctcccaaattacctgaaaccactagcaccaaaaccactttctgcactaccaccggcgaacccactcaacccggcacatgcacccccagg

SEQ ID NO: 286855 - DNA, 319 bp, Zea mays
actacgaggtaaggtgtgcgagcttaccacacacacactgctagctcttcactgaggtgctgctgctcaggtgtatgtcatttcatgtaggagtttgtttattaggtgatgggattttcgcattattagttattagctgctgctgctgcggctatattcgagcgaccgtgtgcctgtgtaactaaggtttaatcaagccgttccctagcttgaaactagacagccgttactgtttcattagttcttgctactgctactaccgttttacactattccatatattattattttttcttcaaaaaaaaaacggacgcgtggg

SEQ ID NO: 286856 - DNA, 553 bp, Zea mays
  unsure (1)..(553): unsure at all n locations
cggacatcctcgccgcggcggagaacgaccgccggaacgaggagggcgcgttccgccggatcctgcgccgggagtaccggccctacctggtgatggccgtggcgttcccggtgttcctcaacctcacaggggtggacgtcaccgccttcttctcgccgatactngtccggaccgtcggcatcgagagcagacgcgcgctcatgggcgccgtcatcctgggcctcatggacatcggcggcatcctcgcgtcgggcttcgcccatggaccgctacggccggaagctgctcttcatgatcggtggcgcgctcatgttcacgtgccaggtggcgatggcgagcataatcggatcacacctcggcaacgggagcaagatgcccaaggggtacgcggtgacggtgctggtggtggcgctgatcttctcggcgagcttcagctggtcgtggggcgcgctgtactggaccatccccggcgagatataccccgtggaggtgcggtcggcggggcagggcgcggccgtggcgctcaacctggggctcaacttcttgcaggcgc

SEQ ID NO: 286857 - DNA, 192 bp, Zea mays
gcggcgtcgagtcgactcggtgtcctcattccgtcattcgtagtgaatgctaaagcaaactcttgaaggtcgcgtgcccttttgcgatcttgtacgcacacgaccggcctgtggctgtgcaatgtgcaacatcgctttgattcaaagaaccaacaataatacagaacccactctgcacagcagggctcactg

SEQ ID NO: 286858 - DNA, 373 bp, Zea mays
cttagaggagcgaacatagaggtcaccgggacgtcattcctggagcttcatgaaggacagctcgtcagaactcgacaagatgtctgcatgcatcgaaagggtcgacacccttgtgcagcttctgaaagccagatatccgaacctgcctccaacttttatagatgttctaaaggtccagtacaatgtggatgtggggaatgcaatcgtggaggcatactctagggttcttgtcggggtagcattcagcatactgtcgcgcgtggcggagatactgctggaggatgacctggtcaagaggcccaacacccccatggcctcactgaagttcgacctctcctccgacgtgtacttggccggcataacagagacgccg

SEQ ID NO: 286859 - DNA, 334 bp, Zea mays
gccgacatgaatggtctcccctgttccggccggccggcggccgtcactaccgtcgaaggttaccgtgtcagactggatggacaccgtcacggatgcagagcacgttccagcctcggtgttcctggggcctgaatttctgcgccacaagctctaccagctgagcccaccggaggactacacgctgtcccagagcctggcccgggtgagctcctactacgtgcccgacctgcagagccagacgccgttcagcgaggccaggtacggcgcggtgagcaaggtgtacgtggtctgcaagcaggatcaggccatgaccgaggcgtaccagcacacgatg

SEQ ID NO: 286860 - DNA, 230 bp, Zea mays
gccaactccctggctcggaaatcttgggcgacgctctgtacacaatcgacatcgggcagaacgacttcacctcgaaccttggatccctcggggtcgaaagcgtcaagcgaacctaccttcagtcgtcagccagatctcctggacgatacaggacttgtacagcagcatcggagctcgcagcttcatggtgttcaacatggtgcccgtacgatgctacccggcattcctcg

SEQ ID NO: 286861 - DNA, 279 bp, Zea mays
ctcacgccaagagaccccgctcccgatcccgtctcctcctcgcagtcgctgcttcgcgaggagccgaagatgctgctcctgcgggcgtcgacgccgttcgcgtacgccaaggtggacaaggtggacgcggaggaggcgcggcacctcagggcgcagttcctcatccacaaggtgctcgagaagaagagtccccggccgtcagcgctggcgcgggccaggcccaggatcggcgtgcgcctcaagaagctcaggctcgccgtccgggccctcagggcgcgc

SEQ ID NO: 286862 - DNA, 295 bp, Zea mays
ggataacggactgacgacatcggagaaatacaacctcgaatcaattcctggactttagagacctcatctgtggtattagtaaattgggtcttgtagcttggggaagatcacgaaaactcgaacacccattacatgtgccatcctgtgatgggtttatactctgttatacgtgtttgtcttgagtgcaaaataaatggataagcagagatggtttgtgcgggagtatggactgatacgaagcaatttgctcgttcttgtacatgcccaagtccacaaggtcaggatttgaatcggt

SEQ ID NO: 286863 - DNA, 457 bp, Zea mays
cgtcaccatgccaagcaacggcgacgtgcctttcacccacgccaacgtcagccacgccgcgcacgacttcggctaccgccccaccacctccctcgaggccggcctccgccacttcgtcgactggttcgtcagctactacaagctcgacgccaagatcgccaagcccgccgccgccgccgacgacgacaagcccgcgaagaagaagaagaagaacaaagccatgtcggcgtcgtcgtgatcgtacgttcatcgatcaagcacacacgggcacacagaaacagagcaccgccaccgccaagcacagtcaccaagtgtgtattctctagctagttctcggaggcctttttcttttctttttgtctgtaaccatgtattgttcaagccctcgctacatacttgctcctcctccttatgctgatagtgcttagtaggaaggaataatgatgcaaataactgt

SEQ ID NO: 286864 - DNA, 244 bp, Zea mays
gcggcgggtggcccgggagagcgtggcggtggcggtggattcggcggagcgtgccgaggacttccgcgagtccatggtgcagatggtggtggagaaggagatctacgcgtgggacgacctccgcgacctcctccaccagttcctctccctcaactcgccgcgccaccacccgctcatcctccacgccttcgccgacctctggacccgcaacggcctcttctgcccgccatctccctgccagttc

SEQ ID NO: 286865 - DNA, 319 bp, Zea mays
atgaagagggccttctaaccaaactcgggagaaaaatggcagaatttccattggatccaccactttccaagatgctactagccagtgttgaccttggatgcagtgatgagatactgactatcatagctatgattcaaacagggaatatattctacaggccacgagaaaaacaagctcaagctgatcaaaagagggctaaattttttcagccagagggagaccaccttactctacttgctgtatatgaggcctggaaggctaagaacttttcagggccctggtgttttgagaactttgttcaatcaagatcattgaggag

SEQ ID NO: 286866 - DNA, 380 bp, Zea mays
  unsure (1)..(380): unsure at all n locations
gtccgtgccgacttcgccgcttgtgccagtcgctatagcgataggcncaggatggcgacggcacgcctgtggatttgaagctggcggagaaggcggaggcgggcggggaggaggaagtggaccggaaggccgacgagttcatcgccaagttcaggcagcagatcaggctccagacgcactagctgggcggccatgcatggcgtggcgtgtgcatgctctgctgagtcctgagctgagcatgcaccgacacacaaattacaaataccactgctggtgctggtccagcacgaagggagaacgcagcagtagtttgttcatctacgtctatgacaccagcatgtttcctgtatcattttgcttttcttttttttttgggttgt

SEQ ID NO: 286867 - DNA, 403 bp, Zea mays
accgcttcgacccctgggacctgccggagcgcgccctcttcggccgccgcgagtggtacttcttcacgccgcgggaccgcaagtaccccaacggctcccgccccaaccgcgccgccgggtcgggctactggaaggccacgggcgcggacaagcccgtggagcacggcggccggacggcggggatcaagaaggcgctcgtgttctaccacggcaagccgccgcgcggggtcaagacggagtggatcatgcacgagtaccgcctcgccgaagccggcggcgcccgcgccaagaagtccggcgccggcacgctcaggctggatgactgggtgctgtgccgcctgtacaacaagaagaacgagtgggagaagatgcagcagcagaaggagaaggagaagaaggcgat

SEQ ID NO: 286868 - DNA, 303 bp, Zea mays
tctggaccgataacattggcacaggtggcagtggtggttcttcctggggtggtggtggcggtggtgatgacagcaaccgttgcggtggaggagggggttggggatcagctggtggtggtgctgacaatgctggtggcggaaatggagcctggggagcagctgctggtggctctgatgacccagggttggcgagcgccagaaaggtcgtctcagcacaggatggtggaaccggctgggggtcagaaggtggcggcggcggtggtggcggaggctggtaactgggctgtgccctgcgttgtagtc

SEQ ID NO: 286869 - DNA, 364 bp, Zea mays
gtactttatggcgaagtacattaccctccctccgtagccaggagcggagatgtgcatcttgggtggcccagtggtcacttaatgccccaagtttgaccacgttgtgggactggtgctagtagtgacctctgcagtatagtaatattcactaatgttgtgggaatcatgtggtgtataaccggcgaacgggagggagtaatttatgttttattgtaattgtctatctttaccttgtaatgatattttagggagaatcccaagatctcagaatggccgttcactgtattgtcggtggtaaaagtggtgggcaatcatcgtgttcagattacctccagaagggtatgcaatggctcgaatgttccat

SEQ ID NO: 286870 - DNA, 240 bp, Zea mays
gttaattagcaatatctaagtagcttgtaaaatcagacgttacatagcttactaattacgtggtaatttgtataaacaaaatttaagatgtgtcttatgaggagactaagctgaaggaactctgcttcattgaatttcagtccaatggccaaaatatcgtccgaggaaaaaatggtgaaatcagggtttatatgatctcgaggatggggacaaacgcatcccggcgcgcctcgatgaaga

SEQ ID NO: 286871 - DNA, 305 bp, Zea mays
agatgacacatcggagcgtgttgttgtggccgtaggtcatcctgccattcacctagctctaatctgccggtgccttggtttgccgatggagtatctgtcttctttccacctggacgaaggcagcgtcagtgtgatcgatttcccagacgggccgagaggaagaggcgtcgtcagatgcacgaattacacggcccatctgggaagatgggcgatacccattacacggcccaactgaaaatgactaagaattctaatctaacatgctagttcccctctgtatagcatagcatcaccataccgatgta

SEQ ID NO: 286872 - DNA, 467 bp, Zea mays
ggcccacagctgatgcaccatccatgctggccgaggaggaatcttatccttttagtgcaaagcttgaaaatattgatgttgccaggatcaaaggtttattgatgaagaggaagagccggagagagatccaagaccgagccattgcttcagatggcctcagtgaagaagcctggattgagagagagctggagtctgggattgtcacaaaacaagaagccaattgtgccgccatctcagatgagctaagtgatgaagcctggattgagagagagctcgagtcagggattgtggccggaccaacaaacgagcaggcgatcacttttgatggtttgagtgaaaatgattggatcgagagagagcttgagtctgggatcatcattgagccagcacctgctatcaagaagcggaactggagtcaaccgttagctcttagctgtgcattcgaaggccagattccaagcaggtga

SEQ ID NO: 286873 - DNA, 410 bp, Zea mays
ggagaaggaagtgaaggagggcacagcgaggaaggtcgacagctgcgcaagggcgatcctgtggcttgctagatccatggatttcacagctgcgctgttacagaggctggaggaggactctacgcagcagcagcagcagagcctcgcgcactcgtggaggccgcgtacgaggccaccctgaagccgtggcacggctggatctcctcggcggcgtgcaagatagcgtggaagctcatccccgagaggaaggtcttcaccggcatgctgctcggggacgggccaggactgctctgcacttgaagacgacatcgggcggctcgcgctgttgcttcggccattccttgatgacatccactccatgatggccaagttcagactggacaggctcaagacaacgtgatccatggcga

SEQ ID NO: 286874 - DNA, 330 bp, Zea mays
gacagatcaagcaaagaagaagcggaagaaggcagacttaaccaagaacgttcagcctaacaatgttggctatggttacaatgtttcttttgaccctgcatattacaatcccttcatcaatggacatccttgggcaactgaaccctacatgtatagctcaatggggatgccgtacgctggttatccgatggatccatattgtgcaaatccaatggatccatattgtgtgaatccaatggatccatattgtgtaaattcgatgcaaggctatccagcaagctaccaaaggcctgaaactgagcccatgcgtcgtgggagcactgcggctgc

SEQ ID NO: 286875 - DNA, 437 bp, Zea mays
ctcgaggcaatgtgctgttcgatgatgatatgacagcacacgtagcagactttggcatcgcaaagttgctactgggtgatgacaactccatggtcgtttccaccatgcctggaacacttggatacatggcaccagagtatggatctcttggaaaggcatcgcgcaagagtgatgtgttcagctttggaatcatgctttttgaagtcttcactgggaagaggcccacagatacgatgtttgagggagaactgagcattaggcagtgggttcaacaagcatttccatctcagcttgacactgtcgtggacagccagctgctgcaggatgccatttcttcttcagccaacctgaacgaggttttgcccctaatatttgagctcggtttgctctgcacgactgattcacctaaccaaaggatgtcaatgagtgatgtagta

SEQ ID NO: 286876 - DNA, 249 bp, Zea mays
agtgggcgagatggattgatatcttctttagccttgggttatttccagctgaattttatcttttttccctacttagtaccttctggtttctgtttccatttgactactgtgttgtaggttgaaaacactgtggagatgaaagtaggggcaacttcttccagaaatgacgggagagctggccagttgaagtatgcaaacaacagggagactatcgccagcaaatacacttctattagagaacagaaccgg

SEQ ID NO: 286877 - DNA, 403 bp, Zea mays
tcgtccacaagtacgaggttgccaatgtcgcgcgcgtcataggcgccgccgacgccaccgacgcctatcccctccggggctaaggatgccgcctcctcctcccctggatggatggtggtcgggttcgaggttgtgccctgcagtatcaagcacaacccagaggacgtcaagtcgcgcaagatgtacgacagctaccccagcaagatcaagtgcgacccgaccaccgtgtccatgagcatcaaggagaacgagcctattgtctacacctatgaggtgaacttcgtggaaagcgacatcaagtggccctccaggtgggatgcctacctcaagatggagggggccaaggtgcactggttctccattctcaactccctcatggtgattgccttccttgctggtattg

SEQ ID NO: 286878 - DNA, 272 bp, Zea mays
tcccccttcccctaactccgccgccactgccgtccgcgctcgccgtcgccccgaacctatcgcccactgcatttttccggcggacgtatgcgatgaggctgctgcaagccgaggagctatttcggaaggttctggaggtcgggtcgaagagtaaggcggctcggctgctggggctcgacgtcggcagcaagtacgtcggggtggccatctccgatgagaagaacagggtcggtcgggtctgagtgttttgtgtcggacaaaacaaacatcac

SEQ ID NO: 286879 - DNA, 322 bp, Zea mays
cacaagaagaggcccccagtccccagccagtccacagctctccactcgagaaacctccagtccagctccacccttcgtccagaggcacaccacacacaccatggctcccagcaagcttgcggtggtcgtcgccttggtagcgtcgctcctcctgctcaccaccagcaacaccaaggtaacccgatcgatgaaccatgcatgcgtttgcacccttcgtccattcttgtcgtgccgccgcctgatctgttctctctctgcttggaacctgaaaacctccctgggctagcttggcctgttcgtgctcggccaggctgctccgggc

SEQ ID NO: 286880 - DNA, 274 bp, Zea mays
cggacgctggtgagcccgtcgtcgtctgcaacaccaccaccaccaccaccagcgcagcatccaccgcttgtgcgtgtgttctccgcctccgactccacattattggcggcagcggcagcagcagcgcccccagtgacggccgacgactccgtccacggctttgccttcgccagcgacctcctctgggacccttccaggtgggaccgcttccccacatccgagcccgaccagtcgcaggattcgatcaagttcgtgcaaaggttggtgatggcgg

SEQ ID NO: 286881 - DNA, 258 bp, Zea mays
ctcgcctccacgaggacgttcaaacccaggtcgcactcctcgaatcgatggaaaggagttctttcgtcaggccaggagtcgtctatcctacgagcaatttggagcattcttagccaacatcacagagctcaatgcccataagcagtcacgtgaggaaactctcaagaaagccgaagagatctttggtccagacaataaagatctgtacctgtctttccaaggcctgctgaaccgtagcatggtggcataaggcttcac

SEQ ID NO: 286882 - DNA, 284 bp, Zea mays
aaaaaaactagtacctaatgtctgtctgtctcactgtctgtacgtatgccatgccatatatgccgccgtatgcatcttctgcgacaggagtacgagccttaccacgacagggtggcgtccacgctcaactgggagaccacgatggaccacctggcctactgacgcccacgctgccagagccgctcagcacgcgactgggacgacatctctgatccatcgatgccattcaggaaacaagcttttagcttgccgtcagattggggcttttgtttcgtttttaactg

SEQ ID NO: 286883 - DNA, 394 bp, Zea mays
ggacaaagttgtgcgggacaccaggggtggaggctcgtcacctgcatctggctgcacgccggtgttgcccaccttctggccaacatgatcagcctcgtgctcatcggactcagactggagcaacagtttggatacgtgagagttggcatcatctaccttgtctctggcgtcggaggcagcgtgctttcgtctctgttcatccggaacaacatctctgtcggcgcttccggagctctgttcgggctccttggggccatgctgtcggagctcttcaccaactggaccatctacgcaaacaaggctgcagccctggtgaccctgctggtcgtcatcgccatcaacctcgccatcggcatcctcccgcacgtcgacaacttcgcgcacatcggagggt

SEQ ID NO: 286884 - DNA, 429 bp, Zea mays
cagacaagctgttggatttttggttatacaccaaaaaagaaaaaagacgcttgaggagatcaagcaagatctttgcccgtccttgagtgttcgccaaatctatagaatatgctcgatgtattgggatgacaaatacggtacccaaggcatttcaaccgaggtggttgctgcaatgcgggagatggtcaacaaagatacccagaatcttgtgtcaaattccttcttgttggatgatgacttaagtataccattctctaccgaggatctatcaatggcaatcccgtcaatagattatgctgacgtcgatcttccagaatctcttcagcactatacatcagtacagtttctactaaggcagcaggatccacagcctgcccaatagaatgaatgtggtcagcctgccctgaagatctgtctgtcccctggttg

SEQ ID NO: 286885 - DNA, 243 bp, Zea mays
gtgacgatggcagaagccggagcgtcaaacgagcctgaccacgacctctccgatgtgtccatgagccgcgtcttctctcagctgatcaaggccgaggggaggtaaatgtgcgtgacgcagcctgtagggtgtcggtggtggggaggaagccttcaaagtcatctcttgctgaagtttacgtgagagagatcatgtgtgattttttttcttcttttcgtctacaaatgtactactgaagtgaac

SEQ ID NO: 286886 - DNA, 183 bp, Zea mays
ggatacgatgtgtaggatatgatgggtgcttcgacggataccgatactacctttcatgatagcttcatatgcattaggggttggtatgtgattcgtgtctgggcgattgatcgtccggttggcgatcggtcatacatctgtctaccaaacggaactttcccgctataaaaagcctttcagcct

SEQ ID NO: 286887 - DNA, 373 bp, Zea mays
attcgggatgcctggctacatatacactataattgcagtctctcttttgtgcaagatcgcagcactgcggtcgttttcgttggagcgactgcagtacttcagagagagagaatctgggatgagctctctggcatacttccttgctagggacacgattgatcatttcagtactgttgtgaagccgatcatttacctgtctatgttctactacttcaataacccaagatcaacaattgctgataactacattgtgctcctcgcgcttgtgtactgtgtgactgggataggatacacttttgccatctgcttcagtcctggctcagcgcagctgtgttctgcacttgtaccggttgttctgaccctgttagccact

SEQ ID NO: 286888 - DNA, 305 bp, Zea mays
atttgcgcacccctgcgcgacgtcgtccacccgctagatgttgacgctgtgccacgcgcaccaagcgttcgacgaaatgcccaaccaacggacagcacgcgggtctcgaacccgattcggctaggttgttcgatttgtattttgtggtctactctaattacgctttggtcgatgtcgcatatatatgtgtgtgaatatgtttgtatggattcgagttagggaaggagaagaaagcgaagtagaaaagaacccggatgtttcttaggttttcagaggattgtggttgtattggatgtgtgttgaaa

SEQ ID NO: 286889 - DNA, 369 bp, Zea mays
cagtatttttttttttttttttgacatccaaagctctgcggcagcttacgtgtattccacgggggagaaaaaaaacattacgaattaactagagtgtaaacctaagataggcatgagtaggggggccaggtagacagcgtgatttcacagcaagaactactgacattgagatatttcgtccaccttcatcagaagggtaacgatgcaacattctttcacacagcgtgcagaggaaagatgttttacattgtagaggaaactggtcctgcaagggagccgacagcaggggaacgataaagctcagcgtggcccccggccccgaccacgtccacgacctcggccgcgcccacgcgtccgcccacgcgtccg

SEQ ID NO: 286890 - DNA, 370 bp, Zea mays
atggatttgagtgatctcagtgcttgccttgctgctgttgtgtgttcatcattgcaaccacctcttcgacctctgggatccccagcaggtgattgggcttctgtcatcataaagtatgtattggacagagcaacagttctactcactgatcaccatgtggcttctaactacagcatgcggaatcgatctctatggcaggcatcattcgacgccttttttgggctgcttacacagtactgcatgagtaagtttgatcgtgtggttcatactgcccaattgcaacctgctgctgcaaccgttataaccagggaaatgccagtagagcttctgcgtgccagcctccctcataccaatgaggctcaacgcaagc

SEQ ID NO: 286891 - DNA, 253 bp, Zea mays
gcgcaatcttcatctaattattttcaacctaatcctagcgtacttgcatttcaaaatgtaatttaatgaaatgagttgttttaaacaatgctagcaacagagggctactgcaaatgaccaatgtttgccatctcaagattgtgctaggttggcttagaatttgcacgccacacacaattaacactgaaacactagagaaacgtttaatcttagagattcatctcctagcaagtaaggccaggttgaacacttg

SEQ ID NO: 286892 - DNA, 479 bp, Zea mays
gctaggcgagctttagagatttgtagacgggcagcagagtttgcagactaccgtgtcaaacagtctcgacagtctgcacagactactgtttctgcaaagaaaggtgatgctgttgtttccatgggtgacatagaagctgctattcaggaagtcttccaggcacctcatattcaagtgatgaaattgcccaaagtttggaaaagttatactggttgccatggttcatgagctgtacaaaagtggactaggtgaaataatgtttgataagttagcaacaacagttttctcctggtgccatgccaacagagaactattgcctggatacgacactctcttgaaaatttgttgcaagcttggtgaaagcaagatcatcctctgtgaagagggtagtaagcacaagttgcagaaggttcagcttaactatccgagtgacgatgtgacatttgccctcaaggaatccccagatcttccttggctat

SEQ ID NO: 286893 - DNA, 333 bp, Zea mays
tgcgagcgcgtggctaatgttgtcatgaggtctgtccccggaggcaagaagatccgtggcccctactgcggcttctgcaagtcttcggagaacatagtgagaatcaatgtgccctatggcgcgaactgctctaccaggaactcttcagcatggggatctgcctcaagtttgagacccaagtctgctagaacttgtagacctgcttgcatccagttattacatatgtacatacagctagcctatgaggatctccaagctggtgtgccggtgtgtgatgctggcatagtaaggatgggcgagctagaaaccctgttgtgtttatgtgctgttttc

SEQ ID NO: 286894 - DNA, 236 bp, Zea mays
gcgccggcaggcgatgcccttgcatggctagcaactgccgtccgtcgtgtccattacgtacgtgggtgctccttgtgtccgtgtgtgttcgagttcgagttgatcagaaaggaattattgcgtagacccgttcttccatgggccagccatatgatgagaagctaaaagctcctaggtatgttggacattaggggtgccaatggaacgggtctaggtaataattctgcgtccctcgc

SEQ ID NO: 286895 - DNA, 491 bp, Zea mays
acgtgacgctcatgacatctctgcttcggccgagctccatgttcgtggaggacctggtgctccagcaaccctacaccaaggaaaggtacggctcggcgcgcaaggtctacgtcgtgtgcacggaggaccacgccatcgcggaggggttccagcgctggatggtggagaacagccccgtggacgaggtgagggagatcgcggcggaccacctcgtgatgctctcccggcccggcgacctggtgccctgcctcgcggacatcgccgacaagtacgcttgacggcgccgctgttctagcacgtgtgtgtgtgctgcctctcggtcggtcgagctcgagcctcagcatgcatgtcgatcgccgatcgtggtgtttttaatttgttgcattcggtttgacttttccctgctgttctcgaatcgggatggaccagaattctcgccgcgtggtgtgaatcttgtataattaataatgctattgaggcttgctaataat

SEQ ID NO: 286896 - DNA, 236 bp, Zea mays
  unsure (1)..(236): unsure at all n locations
ngagtgcgttcggagtgctatgtttagtaacggtttgtgcttatatatgtttcatatgagtggtgagtgtcgtcgtcgctttacttttgtttcctgtcgatgttgtttgcatgtacatgcagtctacgttagtgagtgagtctatggctggaactggcgatcggccggacgacgtctggttttgccgccggtatgatcagcagaggcggcttcatcaagttgtggatgtgtaattg

SEQ ID NO: 286897 - DNA, 402 bp, Zea mays
ctcgtctcttcgccatggtcgccatctccgctcacctcatcgccactcttccgtctctcccgacactccggccctgtcctcgccggcttcagccgagcgccttcgctacatccgaggccccgcaccgagtccccgcccccggcgtcgccctccgtggctgcaggcgttgcagcccttccgtaagaagatttcatgggtttcagaatgcaataagctttgggaaggagcacaacaggcaagccctattcgcttcaggcagaggttctcctagctccagtgacgatggctcgagttctcctgatggcccacctgtcctgaccattctggcaggtgtcaccgtgttccttcttgtcctctgggtcgttggatcggtcgttacctggattgtgggcttggtctttg

SEQ ID NO: 286898 - DNA, 329 bp, Zea mays
cacaacgagcgccggaggaggccgccgcctggaccccttgcgtcacgatacggccgtcacgctgcgtcgctcggcgaagagcccggcaggctcagatgcttcatgctggatttctcgtacccgagggtctcaagcgccatgaggggtgggtttccggcggtgaggcccggtggtgaaagggtgcctggcggtatccagtggcaagcgggcttggatcctcgtcaccaccaaggcgcggtcgcgggatacggcgcccactatgggagcgagggttgtagctcgtcgtcggcgaagccgccggtgttccctggcccggagcttcccccaag

SEQ ID NO: 286899 - DNA, 383 bp, Zea mays
gtgcctggcatcatacatcacagacgacgaaattcgaaaaggaatcctcttcccttcggtctccagtattaggcacatcaccgcacgtgtcggcgcacacgtcgtccgtgccgctgttgctgaagacctggctgaggggtgctgtgatgtgggtcctagggagcttgggagtatgtcagagtcggaagcagtggactacgtcgctcggaagatgtggtaccctatttacagccctcttgtgagcgacaaataataaatccgaagatctcgatgcctgcgcagaagcagatgttccattgaaggaatgtatcggatttgatatttttcttaaccatctctaaattagctgctcatctagaaagcatttcggcagagattggtgc

SEQ ID NO: 286900 - DNA, 339 bp, Zea mays
gcctcccggcctggcttaccaactctgagcacgcgccggaatccggaaactctgatcagagacttgggcactatatcgctgggcaggcttcaagttcaatacggttgtcagatctcgagcccttaattcacaacaagagaacagtgaagcatatcctaacaactatctctagcatcagaaatgctcagtctctccttttcaccaccatgtatgagcttgaggccagtgtcattgactcgctaaggtcagtactctcttgtccagtgtacccaataggcccctgcgttccatacatgatgcttgaagaccataccgtgtccagtggcaaagttgccaggc

SEQ ID NO: 286901 - DNA, 348 bp, Zea mays
cccccgccctcgcctctcacgatgtcgccggcgtccgccccctccgccgacgctccagccacgagccccgccggtgcgggatttggcgacgcgatggccccggcgggagcctccgctctgactccggccgccgcgcccgtcacggagaagagcacagccgcatctgcctccgccatcagcttcgtcgccatcgccggcgctgtggcagccgccgccgtcgtgttctagacatccggaagtggatctgaggagctgcagctgcacctgagccgctctgctgttgttgatagatgccctctgtttgctctgttttacgatccattgtctatatatttatttgtctgtttg

SEQ ID NO: 286902 - DNA, 337 bp, Zea mays
gacagcttagaccgggtggaacttgttatggcctttgaacaagagttctccgttgagatccctgatgacaaggctgacaagctgacctgttgtgcggatgttgccaagtacatcatatctgaatctcaaacgagtgatacaaatgccggtggatcctgagggacagatgaaaccgagtgcaatgtttcttttgtgtgtgtgtgtttatcataatgagtctgggttacaaaggacgatctgtgcgcatgatttccttttagtttttccagtatggaaaaaaatatctctacctcggttgattgttacaaagtgaaggttttttttatatgtcgatcat

SEQ ID NO: 286903 - DNA, 304 bp, Zea mays
cccacgcgtccgctcattctgttgagctcgttcgagcggatcagatccgttgaggctgacctcgagaggaccaaaagagtattgaatgcgaccgtggtgaagcagaaggcactggtggagactctggaatccgtacaggagtcgtcgtctagagtcaagaagaggatgttctgttcataggacattgagccgagctgagcaccagcagatcccaggaaccatgccatctgcgtcgtcattaaccaacaaactgtgaagctgacgtgcgaactgccagcagccggagcggagccgccattttgac

SEQ ID NO: 286904 - DNA, 384 bp, Zea mays
gctgggtcggcgggagtgtattctgtcgctgctggtgctggacttggcaataagataatcagccagggcagggatgggacttgtaaatgttgggtgattgaagaagctgggctttcaaggaagccactacttacaatcaaaacaagtacataccatttctgcaagatctcactggtgaagtcttcttttacacatgccactgaatctggctctagcagctcagctagtgacgtggaaccacaaatagtgccaactgaaaatgcagaatgccatggtgtaaaccctacaataggcccccaagaacatgatcaatgtatcgaggcaacacttaaaccgctcttgtaaagtcagataacttttttttggtgttattgaccttaacaa

SEQ ID NO: 286905 - DNA, 285 bp, Zea mays
ctcaccgctgggctcatcgaagagcgcgagcaacaggatggccgatccgtcgccgccgggccataactagtcttgtgcgagagccgagtcgtcagttccgcgaggagaaggacatgatcaagatcgaagaaaggcttccttctggagctcgggtcataatccagtccgcgccgttgtgtgaagaagaaagcgacgacagcagcgaatgaatcacactgtaagggtccgtgttgcatatgtttttttttacttcttttgttctttttttcatttcgttttgctgag

SEQ ID NO: 286906 - DNA, 283 bp, Zea mays
agaaaatttgtttaggtttggagattatgacgggactggctcagatgtgctacttcaacatcccttgggtgttgtttatgccaatgacaatcaagtatatatagctgattcctacaaccataagataaaaaagttagatcccgtcacaagaaaagttacaactattgctggaacggggagtgcaggatacagggatggtccaggcttgacagctcaactttctgaaccagcaggacttgttgaagttggagatggaaggcttcttgtagcagatacaaacaac

SEQ ID NO: 286907 - DNA, 245 bp, Zea mays
aagaacaatagcgctgttttaaacttttgggcttaaataaacagactgtcatgtttccatcaagataagcatatacatacttcaattcatatctacatggtggtgaccaggtgccagaacacccaccatgcacgaaacgaaagagtagcggcgaatttgaaggttaactgaagcagctaacgtttcaatgagtagctcttcccgctgaacgcttggaacctcagctcgtcgtccttctttgcggg

SEQ ID NO: 286908 - DNA, 242 bp, Zea mays
atgcaacctgattttaagaaatctgccacctgcaacatgactgggcagtggtatctctgagatataatgtggacaacggcaaagaatactatgcatacacaacagaagagtcctgcaacctgattttaagtccatttgtagcaaaccatcttggaagccattaactcgttgaatttgaagctgatgtgcagttttatttttatgtcagttttactgatgcagttagttcctaagaagatcca

SEQ ID NO: 286909 - DNA, 274 bp, Zea mays
gcatcttctcgcccagttcttccgtcgccagctccatcgcagaccccattactgcactgcgctctgtcgcctcctcgctgctccgatccagcaagagcaggaagtacagctccatccgcgcgcagggaggtcagatggagttcgtgctcatcatctcgctgccgctgctcatactcatcatcatcgtcgccgtcgtcctctgcatcatctgccgctaggctcgctgaacgtctacagagaagaaaggaggtcagccccgtccgtctctgactct

SEQ ID NO: 286910 - DNA, 375 bp, Zea mays
atctctcctcacgcacacctcctctgctctcatttcgttccccgacgccaccctcttctgatggcactctcctagtacctcctccctaagctcagttcggcgtggaggccagccaccagacttcgcacaccaatctcgccggctgctgcccttcttggtgcactcgccctcacctctactccagcggcgctcggcgcacgtgctcggccatggcgtcgggatcccgcactctgtccatgtcgagctccctctacgtcacgccctcagcgcctcgctgtccttaggcgtgtgttcctcagccccatggccacacccctgctcctctccatccatggctgcgctctcccctccgtgctcaagcttgccctcagctcc

SEQ ID NO: 286911 - DNA, 471 bp, Zea mays
cccacgcgtccgaaaaggatacacatcctgctccctcgattgcaataccagcgaaacaaattattatctgccttgtggcttcgcacctactgaacttcctctgattcttgaggaccaaaatacgtgtaaattattctttgagaccttgttgtgggagtcgagatgatactttttcacttctcccccatacctggagatgatgattctcgagtagcatctccaacacatgtgaaactcttcggaggaaaggcctgctcatagtggcagaataatccgacacggataacactgaacaaacagtgcccgcctggacagaagtgtctgggccacggttggtgtatgcacatgtacctgtataaagagtatctgtaacttgctgcttctatttcacggccacatgctgtgctggtgctgtccaccatgcttctgtaccatactgaaatttcaaaaccattctttgttgctcatttc

SEQ ID NO: 286912 - DNA, 308 bp, Zea mays
gccggatcgaccgggctacatacataagtacatagccagcccaaaaataggagcaagcaataaccagggccccatttgcacgccgcccgcgcttctggacggacgacgacgagggggccggtgcaatgcggctcgtgcggggtacggttacttccacttccatatagcagttactgtgctgggtaacaatggtttgggtttggtgcctcactgctagcagttactcttgtcgtcgtcagcctcagctactactaagttttgcgagttttacctataggtgtttgctagttttttttaccagttgcttg

SEQ ID NO: 286913 - DNA, 244 bp, Zea mays
gatgggaattgagttattgcttgtggtcttgggagttggagtttgatttcaaggcggacaaaatcttacagagatggctgaggaactgcctcatctgtagcctgtttcttaaaataatgtccagtttctttacttgcctgtagcctctataagtttgtatgcttattccatgtaaccagataataattattatctttctatactcaattttcatgttgtgtttaaataattcaatggaacatgt

SEQ ID NO: 286914 - DNA, 271 bp, Zea mays
ggcattgtcatatcgtatttgctcttggttaaggtattttccaaattgtattctgttttgactcaatttatacaattgtttttcttctgaacttccattgttgaactatggcatttgcagaattagcttgctggcttatagcccaatggcaatgggtatactttcaggaaagtatcacttatctgataactgtggtccgccagacgcaagaatgaatctgttcaaaggtactgtgttctgaaatttttaaaaggtttatagtctggttcca

SEQ ID NO: 286915 - DNA, 354 bp, Zea mays
tgaatccacaatggaatgagcagtacacttgggaggtgtttgatccttgcaccgtgatcacagtggtggtgtttgacaacgggcaaattgggagcaagaatggtggtggcccagatcagcgcattgggaaggtcaggatccggctctctacactggagacagacagagtgtacacgcatttctaccctttgctggttttacatccaagtggactcaagaagactggtgagcttcatttggctgtgcggtttacctgcacagcttgggtgaacatgatggcgctgtatggtcgtccgctgcttccaaagatgcactacacacatccaatcgcagtgatgcaattggactacctga

SEQ ID NO: 286916 - DNA, 277 bp, Zea mays
gttcactgccgcagggatggcgcttgtgacgggtgtcatgcatgtcttcatcatgttctcccaggctgagcggtcgagctcagccagggcggcacggaaccgggtcaagaaggaatgaaaaatggagggcggagatgaggttctcgtggggtttgttatgggcaaccttcaaaaggactctccattcatattagtattaattcatatatatgcagcgccaaattccagacattgatatgctctcaaataggatgttctagacccctcttgtatttgt

SEQ ID NO: 286917 - DNA, 305 bp, Zea mays
gtcccggcggccgcgcagtcaccggcgccgctgccgcaccactagggcgcgcaggccccgtgacggcatggagctagcgtcgctgcttgcattgcagccggtgttaattgctactaggttttggtcgccttgtaatatacaagcctcctctagggtcgtagaactcgatcacagcagagtcacgcaaaggcggctcgtgccgtgccgtgccgccgccgcgttgctttcccgcccgccctctgcctgatcggtccgtcggcattggtgtcgttttgttttcgtttggcttgccaccggtattaaaa

SEQ ID NO: 286918 - DNA, 311 bp, Zea mays
  unsure (1)..(311): unsure at all n locations
gtttcattggattcaagatctgattttgctattgttgataataaagttcgtaaacttattgaggatctaaaaaatgagcgtactgatcccgagagggcagcaataggagagctgctggtcctttcaaggcataacatggagagtagaatttccattgcaaaccacggtgctatacccttcttggtgaatcttctttactctgcagaccccagcatgcaggaaaatgctgtaacagtgatcctgaatttttcgntatgtgacaacaacaagatcaccatcgcaagcgcggacgccatcaagcctctcatcca

SEQ ID NO: 286919 - DNA, 310 bp, Zea mays
gcttcatcgagcggttctaccaggagatgaggctgcagaggcagcgctctctggtccagcgcctgctctagagacattcgtccgttgctgctgcttcaattccttggtcgatcgggcagaaccagtcgtggttgtcgctgctatcttagctgcacttcggttaaatctctccgtatcttgcatttgcgtcgttccatgtttttttgcttctcatgtggcaattctcttgtctgtggaaggagacattcgtctcccctgctgttgtactgttacttctagtccttacctatataatccatccttgtgttgc

SEQ ID NO: 286920 - DNA, 327 bp, Zea mays
agaaaagtagagttgttgaatgtgtcatgggctattgcatggcttggctttagagacaactaaagctttggttgagacaagtgaattggttacaaattctagtccagttactgttgaccccagccacttccatggcacccttcatagagcgatgactcaaaatgatcaaaattcttggagtgcacctggtggggagaagtttatgatcagagggaagacttacttaacagattatcacaaggaagctgacaagatgtggtcttttgagatgggttaagaaattagtgaacgaattgcctagctggaaggcttctctcaatcttgctg

SEQ ID NO: 286921 - DNA, 445 bp, Zea mays
cggctcgagatgcctcagatttgggaaatataccctcttggacgtgttgtgcatcagtttatgaacgcctttactgatcatcgtgattctgagattcttattgtcagccatttttcactcttactgggctgtgcacttccgaaatggatgtcatctggattaaatgaccgaccacttgccccttttgctggaattctcagcttggggataggtgataccatggcatcaatgatagggtacaagtatggcgtgttaagatggagcaagacaggaaagaaaacaatcgagggcacggcagcgggcataacatcggtgctagcagcctgctcgatcctggtgtcactcttggcttccagtgggtacattctttcgcagaattggctatcgctcctgatagctgtcacattgagcgggttattggaggcatacactgcacagctggaca

SEQ ID NO: 286922 - DNA, 417 bp, Zea mays
cgagactatttcagtactttctcaagccatgcaccatcatgtttgacaagaatgacaaggttcttcgctgcacattggagtccctcaaatcttttgtaacaggaggcgatcatctgctttcatctgtctccaccttaaactacccaggagagctgtcgtgtcgagtttgtgctgtcacaaccatactcattttcttatgcaatgaccggaaactccataggaatctttctcttggcaaatcggttattaaaggcatcctggaatatataaggcatcagctggattctagtgtgcctgatgtaacacatgtaggaaaacaaaagttaaaatctgcttttgagcaactcaagaccaaagcattgcagttgaattgctgggatagaagtgagctggagggtttttcgagtgctacatgat

SEQ ID NO: 286923 - DNA, 361 bp, Zea mays
agcaaataggtcagatgaaattaatcacagtctcgatgattttaaccaaagtaatcccaagccagtgctgaagggaagagtctccaaaatgatgtgcccaagacttgcgtttcaactgccaaaagtgttgcctgtatgcgaacatcacaaaagggagatgtcattgccttccaagcatgttagtccacggaaagcaacaaaaagtagctttagaaagcaatatgaaggaccaaacagacatgtttcacgtcatactgaacatcagaaaaccaaactcgttatgaaggacagaaatacaggtcctgctcatatgagaagttgtaggccaacaaagcaaattgattgtacttgctcaagtgct

SEQ ID NO: 286924 - DNA, 360 bp, Zea mays
agaagaagtccgccgccatcgccgagccgcccacggccgacgacgacgacaccggctccacctccgacgaccagaaggctgccgccgcgccgccacgcgctcacagggcggccgccgcgctctccgtgctcggcgccgctgttctcgtcggcggcctcttctgatgggaagaggatcggatcggaggaggatagaatgaatgcaccgtcattcagaccaagatcacacggcgtgtgtgcgattggccatcggctttattctttcttctctcttctcttgggggattttctctctctctctctctctcggcgatttgtatttgtaacttaatgtgatatacattagcagtggttgatcttc

SEQ ID NO: 286925 - DNA, 269 bp, Zea mays
gagctgcactatgtgaaggagtacgagtttgttgccatctttgacgcagacttccaacctcatcccgactttctgaagcgcactgtgccacatttcaaggacaatgatgagcttgggctagtgcaagcaagatggtcctttgtcaataaggatgagaacctgctgactcggttgcaatatattaacctttgcttccactttgaggtggaacagcaggtgaatggagtgttcttaaacttctttgggttcaatggcactggctggggtgt

SEQ ID NO: 286926 - DNA, 291 bp, Zea mays
gaggagtgcgtgcgtaggcgtactggagaaggtgtccgtacgtacgtagccaggcacggcacgcgtgacgcgtgtgtggggcactgccggccagcacgctgggccagtgcgacactgtgagcctgcgctggtgtgtctcctcgaccagcatgcgtccaccgcgtgtccgtgtgctgccacttgaatgcagatttggttctttcctgtggtcgtcttgtgagttgtgttgtgaccctcctttcctctccttgtcatctgtggttggttggcgacatgcagtggtggtggtgg

SEQ ID NO: 286927 - DNA, 385 bp, Zea mays
ggcacacgtaacgtacgtacggtaaccggtcggatcgatcgtcgtgtaaacatgcatgcaaacctttgcagtacttgtacatgcaggaggtgtgggcagtgaggaggaggccgacgacgcccggccgtccgagagaaggttccggtggcaatggagggaaccaccactagcgcgacgctgcaacgtacgtacggtgaccctagcttgttcgcttgcgcgtgatcagagtgcgtacttcttgtaagttgtaacttacttggtactcgtactagatttcgaaagtaacgtcgttaattagtaagtagtactagtacgtgagtgtggtttatgttatatgttctgtagcttcaatgcaaagaagactgtgtgcatgtgtttgaggatt

SEQ ID NO: 286928 - DNA, 305 bp, Zea mays
gacgctgcgcctgaagctgctgctgctgcggcggcggcggcgggcgatggcggcgacaaggcagccaccgaggtgtgggcagtgaggaggaggccgacgacgcccggccgtccgagagaaggttccggtggcaatggagggaaccaccactagctagctagcttagctagctctctagcgcgacgccgctgcaacgtacgtacggtgaccctagcttgttcgcttgcgcgtgatcagagtgcgtagttcttgtaagttgtaacttacttggtactcgtactagctttcgaaagtagcgtcgttaa

SEQ ID NO: 286929 - DNA, 648 bp, Zea mays
cccacgcgtccggaatcggtaagggtcacaaatttccaggttttacggatgccaaggctctccttctcaaccacaacaatttgtccggtccacttccgtcaaacctcggtttctcaaaactgagctaccttgccctcgccaacaacaaactcaccgggccaatcccaccgtcaatcagtaatctggaagactctctcttcgaggtactccttctcaacaaccagctctccggctgcctcccccacgagctcggcatgctcaccaaggcggccgtgattgacgccggcatgaaccagctcaccggcccaatcccgtcatctttctcgtgcctaatcagcgtcgagcagctcaacctggccggaaaccgcctctacggtcaggtacccgacgcgctctgcaagcttgctgggcccgctggccgcctcgccaacctcacgctgtccggcaactacttcacatccgccgggccggcatgcgcggcgctgatcaaagacggagtgctggacgtgaagaacaactgcattccggggctcaccaaccagaggcgcccggccgagtgcgcggcgttccagagccaaccaaagacttgcccggcagcgagcactcaggtgacatgccccgccgccgcagcttccaggaacgcggcgg

SEQ ID NO: 286930 - DNA, 386 bp, Zea mays
  unsure (1)..(386): unsure at all n locations
gtaaagccaccggagaagccttcagctggacctgtgaaggacgagcctatgaaaccatcggagaagccttctgctgaacctgtgaagaacgaacccagtgagccagctctagctggagaaaacaatcgagctcccagggtaagccagactacaagttctccaaataatgcaggtattgatgcaccagtagtcaagcatgataactcagaggcacggaagtgaagacgatagaggaagcccaaagtaccgatccatcgagatagcatatcacgcaaatcctgctggacaaaaatgcagagtgaaccggttgattccataggggctcagatttttcttgcccctatcgggggtanaattattcgctttgggctaatggacgaagagtc

SEQ ID NO: 286931 - DNA, 283 bp, Zea mays
ctcacacgtcgtctctctcgccgcgcaccttgtctctgtcctctcccatccatctccctccgcacactccgccgcctcaccttctccccctctctctccccgccgccgtggtccccgccgccacgctgtggcccttcttcgacgccgtctgctccgacaccgccgtcaccttcggctcgctcgtcgcgctccacgagtacctttgagaattcgtcggtctttactatgactgcaactttgaagtttgggattcatataatcaataggctcaacagtatgtccc

SEQ ID NO: 286932 - DNA, 326 bp, Zea mays
tgtgatacgttgcttgaaatggggatgacagatttacatcctaaataatacctttgcccccaccccaccacccggtctgtttgttttgtgttcgtgtagaataaagttaactgtgaccggcatgtgagaagtttgttaaatcgatatttgagaatcagcttgtaactacagatggcactcctgatgtgtccctggcagtttcaggtatcgtctgcaactggaaagatgttatacatagcattgtgttactgatggcactccttgaagcatttggactgaaacttagatattgaaaatgtggacgacataaaatgacagtaaagaaa

SEQ ID NO: 286933 - DNA, 429 bp, Zea mays
agcagagattggtccgctacgatgctggcctggaggtctatgcttatcaagatccattggagatatcgatgtttggcgaatttattgtccctgttccatatgtgaagcaagtgaagttgtcaaatgctggaggaagacttattattgcttcagatggcatttgggatgcattatcctcagaagccgctgctaagtcttgcagaggtttgcctgctgagcttgccgcaaagcaagttgttaaggaggcactcaggacaagagggctaaaggatgatacaacttgcattgttgttgacataatcccacctggtcaaacaatacggcctctgtctcctcctagaaagacgagcaagctgaagtcttttatttttagaaagaaagcgtaagacccttctcagaagttgactagacagcattcagctgttggta

SEQ ID NO: 286934 - DNA, 314 bp, Zea mays
tcggctcgaggttccttagaccttttgtgatcgttatgcagaggagcaatgctccagaggtacgagagctgattgttaggtgcgtctcacagatggttctgagtcgggttaataatataaagtctggttggaagggtgtttttatggtttttacttttgctgcagctgatgatacaagaagtactgtcctattggcatttgagacggtggaaaaaattgttcgagattattttcatcacataactgaaacagagacaacggcatttagctgattgtgcgacttgtcttattgcatttacaagtagtcaatttaa

SEQ ID NO: 286935 - DNA, 406 bp, Zea mays
ccacggtccgaagaacagtttttgtggaggtgactcctcgcctgtgtcgtcaaatcctccacaccctggactggagtggctgctgctcgtggccggcgatgagcggcggcgggcccggaggtgcgtgcgggccggactcccgcgtggagaccatctcccggctggcgcagtggcgcatcgataccttcggcccctgctcctaccgccggtcggacccctttaagctcggcatctggaactggtacctgtcggtggagaagagccgctccatctttgtgcgcctcttcccggagcccggccgggtggccaaggagcagccccctctcgcgcgcttcctgctccgcgtctcctgggccggcccgccgcgacgctcctgcgtctcgcctgtgcacgagatcttctggta

SEQ ID NO: 286936 - DNA, 403 bp, Zea mays
  unsure (1)..(403): unsure at all n locations
ataggtttggtcctccagaaaacatcccaggtggtctatctgatcactgtcgagactcgagaggcgcatgaggagcttgggtttgacagcggaagaacaggaagtggattcctatctccaatcccatgcagatagtcttcattgcaagatctccgattagttaagggcaacgcgaagaagggggtctcttgccggttgccaccagcttgagcttctcaaactgcaggagcagcacaaggatcatcgggaggaagagagtcgccgtctcgccgactccgggctcccggaccccgcactcgccatcacgcaccctgcgcaacagcgaagcgtnccgcttccacttccacatggacgacgccgtcaacctccttgagtcgctgccgctggatgtactgataaaaat

SEQ ID NO: 286937 - DNA, 486 bp, Zea mays
ttggagtttcttttgtgtggatactagatgtgcatgaggagtttaggttgaaatgccaattatgtgtagagtgctaagttagtattttgaatattttgcagggaagtggtgtcgaggttactgtgatgatttagttgtttgagtgaatatgtatgtgatggatgctttgcctactaactcacaattgtgatgtcttagctattgtatgattcaagtcatttggacatggtggtttagaaagtcaatagattgcttctatccatattttattctaggtgtctgttagtgaggaacctaaggttattagttttccgatgaatgcttaatcctaggagaatatagaacccaagtaaaacatgttgctagatgttggtttaggtccatttgacttgaaggtcatgtttgtgtaaagtcaaaagcatctaagtaaagttgaaatgtcttgctttaagtgcttaatctacttcgagtagcattatttagcac

SEQ ID NO: 286938 - DNA, 732 bp, Zea mays
cccacgcgtccgaacaaactcagcgatcgacaagctaagctagcagactacacatccaggatcggagccgctgctcaccgaccaatatggcgacggagtacttgtccgggtggccgctgtcgtcctggatcagccccggcgcggcgttcttcctcttcgtcaacgtgctcatcggcgccatcgtggtcacgtcccgcgggcaccaagctggcggtggccgcgcggcggcgtccacgcggaggctctgccgcagcgcgtcgtccatggtcctcgaccggctccgctccttctccatgttctccgtccatcccgaccccacggaaatggaagagcgctatagcacgtcgtcccccctcgagctggaagcagaggaggagcagcagccccaaccccaaccagccgtcgtggagcccgcaaggtcacctgttgcggcagtagcagctgctgcagacggtgcatcgtccgagatcgccaaggaagaggcggcggaagcgggaaaagacctgcccaccagctcgaacgaggcccacggtctgctgttgcagttgcagcagggtcacggcggccggcagcagccaccgtcgtcagtacatgtcgtcgtcacagccgccgatgcaactgcggcggtggagataaaggaggaggagaagaagaagaaggcagagcaggaagcaaccatgcagcgcgcacctgcgtgcaggcggggaacgacggaggaagcagcggagggga

SEQ ID NO: 286939 - DNA, 395 bp, Zea mays
cagagctacaggacttggggcggtggtatattctctatcatcttgcaaagtggcatgggtacactaacaattctgagctcgaccctggcgcactactgtcaagaaacatgaaggagctgctgcagcaccagtaaactcgctgagtgatatcaagtgtcgcttactgaactagggcagctcagcgactactaacaagtcaacccaacccgtgttatgctgaactgcgtataggaatatagaacccatagaacatactgctgctgtggatatgcctggcgcggtcgtgagaagccttctactgagccaaaggccttgggtttaacacaacctttctgcaaaaatgtagagataaaggctgactctgttatttcttctctagaacctcactcatgtgg

SEQ ID NO: 286940 - DNA, 364 bp, Zea mays
atcacaacagaagtggatgatatccagagggcagtggcataatcaagtaagaagaccacaatcagttttcaagaattacaccaaaatgagataccgcacgccactacttctagggattggcctacttgtactgccaaatcttagtggaatcaacggtgtactgttttatgcaagtggcatcttcgaagctgcaggggttacaaacagcgacttggccacctgttcacttggtgctattcaggtccttgctactggagttacaacatggctgttagaccgagctggacgacgcatccttctcattatttctacctctggcatgactctatgccttcttgccgtttctgttgtattttttctcaag

SEQ ID NO: 286941 - DNA, 337 bp, Zea mays
attgttgttggtgatcatacattgtcggtcttagagatatggggtgctgagtaccggctccaggtcgctcttcttgtaaaacttgagagcagaagcctcttagaatcgctttgtgagagggaaagagtttcgatggctgtcattgggaaaattgatggcagtggaaaaattgtggtgattgatagcgctgctgtggagtattccaagctgaatgacctccctcctccaacccctgttgaagaacttgagcttgaaaaggttttaggagatatgcctcagaagaccttcgagtttaggcgtgtttctcaagtcacagagcccttggacattgcacctg

SEQ ID NO: 286942 - DNA, 301 bp, Zea mays
gtattatgttcgaggcgctttctcctttcattttgtgttgaagtaccgcgtgcgagcgtcaacagctgtcaagtgccctttaatcgtgagtgtgcatcaagcacagaattagaaggcggttggctgctaattacccttaatcttgagtttgtcaagcacacaatttgaaggcagtcattagcgtcgaaactacgatgtccaccctatccaatcttccatggtttcacgcttctcttctatatttatgctaccctgggtgacaaatgtttaatgtatgccttccatgctagatgaacttttt

SEQ ID NO: 286943 - DNA, 344 bp, Zea mays
gatgcaccctcagctggttggcatggttccgtcctctcgagtgccactgccgatcgagccagccgctgaagagcccatctatgtcaacgcgaagcagtaccacgctattctccggaggagacagctccgtgcaaagctagaggctgaaaacaagctcgtgaaaagccgcaagccgtacctccacgagtctcggcacctgcacgcgatgaagagagctcggggaacaggcgggcggttcctgaacacgaagcagcagccggagtcccccggcagcggcggctcctcggacgcgcaacggtgcccgcgaccgcgagcggcggcctgttcacgaagcatgagcacag

SEQ ID NO: 286944 - DNA, 673 bp, Zea mays
cggacgcgtggcgagacgcgtgggggccgccttgacatgggccaggttgttgctatcaaacagcataatagggatggatatcaaggaaacaaagaatttctagtggaagttctcatgcttagtttgctgcatcatcaaaaccttgtcaatttggttggttattgtgctgatggagatcaacgccttctcgtgtatgagtacatgccacttggatcattggaggaccatttgcatgatctccctcctgacaaggagcctttggattggaacactaggatgaacattgctgcgggtgctgctaaagggctggagtacctgcatgactaggcacagccaccagttatttacagggatttcacgtcatcacatattctattgggcgagggcttccatccagagctatcagacttcggtcttgctaagttcgagtcctgttggtgacaagtctcatgtctcaacgcgtgttatgggaacatatggttattgtgctccagaatatgctatgacaggacaacttacagttaagtcagatgtttacagctttggagttgtcttgctcgagctgattactggccgaaaggcaattgacagcaccagaccagcgtcagagcaaaaccttgtgtcatgggcacggcccttttcaatgacaggcgcaactcaccaaagatggctg

SEQ ID NO: 286945 - DNA, 308 bp, Zea mays
ctccacagcacggcacgcgcacacgctgagtccaggatcatggcggcgggcctcaaggtccccgagatggcgctcaggctctgcgtcgtcccgctctccttggcctccctgtgggagatggccagcaacgcgcaggcagacgacacctacggggaggtcaagttctccgatctctccggattcagctatttggttggcgtccacgccgtcacagccgcctacgcggtagcctccgtcttggcgtcgtccttcaagcccctcgccgcgcgctacgactgagtagttctcgtcatggatcaggcgtcggc

SEQ ID NO: 286946 - DNA, 358 bp, Zea mays
tttacttcttacgatgatcatacgatatagttggacatgaaacagagtaccatatcatcgttatctttcctcccgcgggcaggtttgacatggaagcccttcctcctaccttgacatctgcttctgagcagccacctctctatgatggcacaaccagagctgcagattgtatatgtcctacgtttgcccgtatgcgcaacgggcatggatcacgaggaattacaagggtttgcaggagaagatcaagctagtccctatgaacatggcagataagcctggatggtataaggaggtttaccccaacaaccaggtgccttcgttggagcacaacaagagggtcataggagagagcttggat

SEQ ID NO: 286947 - DNA, 470 bp, Zea mays
agtaggtttaaccgcgggggctgttgatgatcattccagttggcccactcaaactcaaccgaggttcattgtttgtgttgtggttctgttatggcaagccaaagatgtagtgaagactatcaagaaacggattgcacacaagaactcaaaggtccagcttcttgcattaacgttgctggagaccttgattaaaaattgtggtgattttgttcatatgcaagttgctgagaaggatatgcttcatgaaatggtgaagatagctaagaagaagcctgactatcacgtcaaagagaagatattaattctgatagacacttggcaagaagcttttggtggtgcccgtgcaagatatccccagtattacgcagcatatcaagagatgctgcgtgctggagctgtatttcctcaaaggccggagagtactgtgccaatctatactcctccacagacacagcctctacggaactatc

SEQ ID NO: 286948 - DNA, 356 bp, Zea mays
agaaaatccgcaattttattgtcgtcctcgcccgctttctctgaccgaccggaaaggcgctgcccaaacaaacgcggaggaagaagggaactcgccgcctagggttccgccgccgcctactcttccgccgatcaaggagcgggaatcattgcgcgatgccccagtcggtgctggtggaacgcgcgacgagcgagtcgctcatcggccctgactggtctctcaaccttgagatctgcgacatcctcaaccacgacccctcgcaagccaaagatgtagtgaagactatcaagaaacggattgcacacaagaactcaaaggtccagcttcttgcattaacgttgctggagaccttgatt

SEQ ID NO: 286949 - DNA, 298 bp, Zea mays
ccagctttgctttgtagttgtagcgctagcagcttaactggtctgagctgaggctagctagtcgtgcaggaagaggaaggaatataatggctgagcgggaggtcgtcgaaggccggacgacgacgggaggcgggctgtggcggaggtatgcgccgctcagtccagatggtgctggcgcagctgtgctacacgcccatgtacttcatcaccgaggccgccttcaaccagggtctcaacccctacgtctacatcacctaccgccatctgctcgtcggcgtcctcatctggcccttcgcat

SEQ ID NO: 286950 - DNA, 457 bp, Zea mays
atgatggtgaacggtcgggatggagagcgaaggttttgcaatctatgatgcaatgatgcgtatgaaaactgagatccacacactttgtataggagctgcagcaggccatgcatgtcttgtgcttgcagctggaaaaaaaggcaaacgttatatgttccctcatgccaaagctatgattcagcaaccacgtattccttcttatgggatgatgcaagcatcagatgttgttattcgtgcaaaggaggttgtgcacaacaggaacacattggtcaaacttttagcaaggcatactggaaatccaccagagaaaatagacaaggtaatgagaggaccattttacatggactccttgaaggcaaaggagtttggagtcattgacaagatcctttggcgcggtcaggagaagtacatggctgacatgctctccaatgatgggcaattgccgagtcaaccgatc

SEQ ID NO: 286951 - DNA, 357 bp, Zea mays
gatggtgggcaacaaatccgacctgatccacttgagagctatctctgaggacgaaggcaaagcgttggctgagaaggaagggctgttcttcctcgagacgtcagctatggaggccatcaccgtggaggaagccttccagactattatcacggaggtgtatggcatcgtcaacaggaaagcgctggccgccaaggaagcagctgccacagctgccccattgccttcacagggcaaaaccatcagcattgacagcaatgcaggaaatacaaagaaggcatgctgctctacataaataaaaaagatgtaaccttttttaaaatatggtagaaaatggagcatatatagtcatcataaaat

SEQ ID NO: 286952 - DNA, 318 bp, Zea mays
tagattctttctccctgctcctgccatcgcctgctgaaggaagccgcctttgtggagtttggacgcgggaggacagcctccgcactttccgtccgtcgcgaggaatgcctgcccgggcgggcgtagagcagggcgaacattcgttggggacgaacgtttagggccggggatcggggaacacgaggctgcgcgttggcgcaagcaagcaaattttgggtcctagcttgaaggactgccatctgtttttttgcgggcgccggtaaaggaagctatgtacctccacaatatattcccttatacagcctagataccgaagag

SEQ ID NO: 286953 - DNA, 335 bp, Zea mays
attctttctccctgccctcccctgctgaaggaagccgcctttttggagtttggacgcgggaggacagcctccgcactttcagtccgtcgcgaggttttcctgcccgggcgggcgtagagcagatctcccctgctatcgtctgactctttggcgaccggaatccggctcggcccacgcatgcactggatgtgcacggcgtacattcgttggggacgaacgtctagggccggggatcggggaacacgaggctgtgggttggcgcaacaagcaaattttgggtcctagcttgaacgactgccatcttttcttggttggtgagctacacatcaaaggga

SEQ ID NO: 286954 - DNA, 281 bp, Zea mays
cgcaccgtcggcaccaagatgacgaccccgccgcgccgatcgccgccgctccggggaagaggccatgcgggacttcgggctctggcgcctatggtcaacatccacgagcgctcgcctgtgcccgcgtgcgtgccggcacacccggacccttcgtcgtcgatctccccggacgactggcggcgtttggagggcgcaacgttctctgtgatgtgcaagatccatcccaccgtctcctcccagcaccttcgcgccagggtaatcgactacgtccagcgcctctt

SEQ ID NO: 286955 - DNA, 318 bp, Zea mays
cgttgagtgcggaaattccacgaacgtgagctcaacatggagccggcgacccctccggcacccgccgccggcgtcacggctaccgtcgacctctcctcagtcgcagccgacctcggtggggcgcacctcctgccctgcggcatcaggcagaacggcggcgcccccgtatccgactacttcaagcctagggacacaggtgtggaggtggagggggtgaagatggaagaggccttctttcgtgggaggaaactgcagggcactaccctagctctcccggatggctaccgaggttatgtattggagaagagtcgcggacag

SEQ ID NO: 286956 - DNA, 341 bp, Zea mays
ccgtcctctactcccccaaatccgccgggccaaaccctagagaaggcgatcggcatttccccgacggcgagccggcggaagcggacaattatgccccgccgccgccgcgacaaggggcaggcgctcatcgacctcgacagcgacgccgaagacgagtgccaaagcaagggttctcaaacaagtagaacaacaacattgaagacatctgggagattgaacaatgtattaacaacaacattgaagacatctgggaggagatccaaaaatgtattgccttcattttatgataacctcccccaggtgcagagcctcacgcatgcaactagcaggaggaacaagac

SEQ ID NO: 286957 - DNA, 318 bp, Zea mays
tccatatttgccacatcttcttacgtagctctctccctcgctctctctctctcgctacaacgagtagagtagagtagaaggggtgctgctaatcgcggagcactagttcatcctctgtccattcattcatcagtactcccagccttttccggcacacgcatctatggccccgccatcacacttctacaacaacaatggcgccccgctggacgccgccagctacctccatgcgggaccaggaaatgcacctccacaggactcctgcttgctcgacgcagacgagttccgccggcacggtcaccaagtcatcgacttcat

SEQ ID NO: 286958 - DNA, 389 bp, Zea mays
gaagaagcagagctcttggcgcacgctcatgggaaggagccatctctacttcgccatgcgcaaggatcgccgtggtcaccggcgggaacaaaggtattgggctagaagtgtgccggcagctggccgggaacggcatcaccgtcgtcttaacagccagggacgagacgaggggcgcactgccttggaggagctcagagcgctgggtctttccgacgtcgttttccatctgctggacatcacggacgcgtcgagcatcgctaggctagccggtttcttgaaggcccgtttcgggaggctagacattctgataaataatgccgcgtttggcggcgtcgaatacgcccgggagtcctgctgctgctgctgggtcagtgacaagtgaagaagaa

SEQ ID NO: 286959 - DNA, 519 bp, Zea mays
gacattctctttctatctgcctctccaatcaaaccccaaattcattcctatcaaaatggcacctctgtcagggccaacaagcaagagtaagaagagagctctccgacacgtcctcctcctctccctcctcctcccatgtatctcccaaccactcccggctccttccccatctccaacggcggcgcctccggcgacgacgcttcccctctcgccgttcaacgaccgcctcgacgcggcgtacatcgcgctccaggcgtggaagcacgccatcatcgaggaccccaagaacctgaccgccgactggtgcgggcccttcgtgtgcaactacaccggcgtcttctgcacggcggcgcaggacgacccgcacatcctgaccgtcgccggaatcgacctcaaccacggccgcatcgccgggttcctccccgaccacatcggcctcctggccgacgtcgcgctcatccacctcaactccaaccgcttccacggcacgctgccgccgtccatgcagcacatgcgcct

SEQ ID NO: 286960 - DNA, 342 bp, Zea mays
gagctagctcgatctgcttaattaagcctctctaagtcatcttgattattatattaacagtgtaacaatgcagggcctcacgccaacttacaagctcagctcgatcagtgtcgtcatcttgttgcttgtgctgaccggcggcggcggcgtcgcccatggccggaagaagaagctcgtgtcgagctacgacgagccgtgccagcagatgacggtctactaccacgacatcctgtacgacggcaccaacacggcgaacgcgacgtcggcggtcgcggcgcagcgacgctgctgagccggtcggtgtccgtcaacgacacctacttcggcgaggtggtggtgttc

SEQ ID NO: 286961 - DNA, 375 bp, Zea mays
gtcatattctccttgctcgatgatttgctggagatcagccagaaccactcccagaaggactacagaaacatggaagggtcacttgtgctcgccatgaagctggttgcgaaggtatacctccagctcttgccggaccttttcggcctaagcagtttctgcaagctgtggctgggggtcctgagccggatggagaagtacgtcaaggtcaaggtccgaggcaagcggaccatccggctgcaggaggtggtcccggacctgctcaagaacatcctgctcgtgatgaagagcaagggcatccttgcgaagaggagcacgatcgggggcgacagcttgtgggagctgacgtggcttcacgcgaacaacatctcgaccagt

SEQ ID NO: 286962 - DNA, 336 bp, Zea mays
cttctgcggcttcttcgcagctgctgcggcaatcactgggggctcctcatcctcctcctcagccacaggtgggggtggcggacaggctcgacatcctcgtctttggcaggtgccgagcgaggtcccttgtccttcttctttttcttcttggccttgctgaaatcgaaatcgacgacgtcatcgtcgtcctccgccggatcgttgatggcctccggctcggctgcggcagacggggcggggtcctcctcatcctggtcctcgccctcctcgcacgagggcgctgaaggcgctgaagggagcggcgggagtggcgcccttcttcttctttttcttgcc

SEQ ID NO: 286963 - DNA, 308 bp, Zea mays
gcaactgctactacatcatgcgcgtgtcggcgcccgcggggaaggtggcgggcgcctcggtcgcggaggtggtgcggatcgtcaaggacggcaagcgccggatgcccgcggagttacgcgcgctgggcggcgggcgatgccgggcgccgccggcgtcgacccctaccagatcacggccgactaccgcacgctgctggtgtccgactggacgcgcctcggcttcgcggaggtggactacggctggggcccgcccgcgcacgtcgtgccgctgacaaacctggactacatcgccacgtgcatcctcgtga

SEQ ID NO: 286964 - DNA, 307 bp, Zea mays
acagatcgagcaattaatctatagctagaaaatcatcagcatcgattagcgaagaaagaacttagaaaggggccggccggccggcgggattgatgtcgaaaatgttccgcggcggcaacaacaaccaccctagtagcagggctgggtcagcaaccacgagcagttacgagctgccagtcgagagcgtggtgagggtgaagaaggtggagaggatcgaggcgaacaacctggccagcaagcccaagccgtggcagaccaaggtgaccaggagcctgaccgtcagcgttgtccggttcggggacgtgga

SEQ ID NO: 286965 - DNA, 297 bp, Zea mays
agatcgagcaattaatctatagctagaaaatcatcagcatcgattagcgaagaaagaacttagaaaggggccggccggccggccgggatcgatgtcgaaaatgttccgcggcaacaacaaccctagtagcaattacgagctgccagtggagagcgtggtgagggtgaagaaggtggagaggatcgaggcgaacaacctggtcagcaagcccaagccgtcgcagaccaaggtgaccaggagcctgaccgtcagcgttgtccgggtcggggacgtggacgaaatgcccgagacagccac

SEQ ID NO: 286966 - DNA, 341 bp, Zea mays
cttctttctcagcccacctctctctttcacgcacgcctctctctctctccctctccctatctgtcttcctgcctgaggcagccatttcctcttccgatcgtggagaggcttggagtggaaggaggctgctggttctcggcacggcggagatgtctgaggtgtcggtgataaaccaggcggaggtggaggacgcgggcgccgggcagctgatggacctgccgccgggcttccgcttccaccccaccgacgaggagatcagatcgcactacctcacccacaaggccctcgaccaccgcttcgtctccggcgtcatcggcgaggtcgacctcaacaggatcgag

SEQ ID NO: 286967 - DNA, 290 bp, Zea mays
cttgccttctatccctttcacacacgcctctccttccctctctctctctctatcttcctgcctgagcgcagcagccatttccgcttccgatcgtggaggcttggtgtggaaggaggaaaggaggccagctgctggttttcggtgcggcggagatgtctgaggtgtcggtgataaaccaggcggaggtggaggatgcgggtgccgggcagctggacctgccgccggggttccgcttccaccccaccgacgaggagatcatctcgcactacctcacccacaaggccctcaac

SEQ ID NO: 286968 - DNA, 407 bp, Zea mays
aatccaaccaaccattggccattgcagagaagagattactttaagaatgggctactcgaagcgcattgcactggtacttgtagcggctgttgtagcgctccacgtccatgtcccgatggccacagcagcgaactccaacctcttccgggactacatcggcgccatcttcaacggcgtcaagttcaccgacgtccccatcaacccgagggtccgcttcgactacatcctcgccttcgtgatcgactacatcaccgcgacggagccgcccaccccgaccaacggccagttcaacatcttctggcaggactcggtgctgacggcgtccggggtggccgccatcaagcagagcaacccgaacgtgcgggtggccgtcagcatcggcggcgccaccgtgaacgaccgccctg

SEQ ID NO: 286969 - DNA, 494 bp, Zea mays
aacaagcattgacaagtgctgaagaaccagatgagcctcctcttagtcccacttcacagaacattcgccaacaaagacttgtggaagaagctgacttcaagtcgaccaccgagctttttgcaaagaagggcagtgagcaaaagtcactagatacttttattccaaagtccgagagtgactttgcggaatacgcggagcttattgcaaacaaactacgcccctatgagaaaagctttcactacatggctctgcttaagaatgtcatgagactttccatgacatcgttgaaaggtgcggacgccaaagatatatcttcttccgtgacggcaattgctaacgagaagatcaaggctgagaaggaggctgcagcaggcaaaaagaaacaaggagcgaaaaagaagcaactccacatcgagaaaggagacgacgacttcatccccggccggggtggtggctacgatgaccccgatgagtacgacttcatgtgatctggc

SEQ ID NO: 286970 - DNA, 656 bp, Zea mays
ctggaaccgcggcatctccgcctgtgccgtctgtgacggtgccgcccccatcttccgtaacaagcccatcgccgtcataggcggcggcgactccgctatggaggagtccaatttcctcaccaagtacggctcccacgtctacatcatccaccgccgcaataccttccgtgcttccaagatcatgcaggccagggcgcttgagaaccccaaaattaaggtcctctgggactcggaagttgtcgaggcctatggcggcgcaaacggcggcccattggctggcgtaaaggttaagaacctactgaatggtgaggtctcggatcttcaggtgtctggcctcttcttcgccatcgggcatgagccggcgaccaaattcctgggcggacagcttgaactcgattcagatggttatgtggaaaccaagccaggttccactcacaccagtgtaaagggtgtatttgctgctggcgacgtgcaggacaagaagtaccgtcaggccattactgccgctggatcagggtgcatggctgcattggacgctgagcactacctgcaggagatcggtgcacaggagggaaagtctgattgactatatttaggtgtagcaaccagcaatccatcgaatagtcagttgtcggtgctgaaagccgctctctgat

SEQ ID NO: 286971 - DNA, 431 bp, Zea mays
attgagacaaggaagctcagcgattactaagacagggtttatacggagtgccaagaagttccggtgggtgaagcttgatgaccctgtggacactaacaagctttgccacccgcaagcacttaccaagttctgcttctttctgctggatgctctcaaggaaaggggtgcaaggatgaagccgttgatctgtgcttgcttagcaaaggagccagagaaggtgctagttgtcggggtatgtgggaagccaaggcttggggctggccaggggaatgcgtttggtaatgctttcaggtatgcggcagaggagattggtgcggactatttccatgacatgtttgagtcatcgtggattgttctggatgttgttgctgtcagttctttcatgattcgattaacggagaagctatgatcagatggcacgaggtttatac

SEQ ID NO: 286972 - DNA, 337 bp, Zea mays
cggctcgacaaaagcccttgcccacgccatgacgctcagcaagaagcaaggcgcaggcactgatcagcaggccttgctggatgctcagctgcagctctggcaccacaccatcgcttttgtcaagtccatggcgctcaaggccgccgtagacctccgcatagcggacgccatccacctgcacggcggctcagccaccctctcgcagatagtcaccaaggtcacactccacccgtccaagataccatgcctgcgacgcctcatgcgcgtgctcactctcaccggcgtcttcagcgtcaactccggcgccgttgtcgacgagcccgtttacgggtcacgc

SEQ ID NO: 286973 - DNA, 337 bp, Zea mays
gcagcccaacatgctagttattgatctggaaaagtttgcctctgaatcaacagataactggtttagtgttgatgagaagccacctatcgcatatgctcgagtggagatcctggaaggtgctgatatgaagccatctgatcctaatggactagctgatccatatgtgaaaggacaacttggaccctaccgttttcgcacaaagatccataagaaaactcttgatccaaaatggctcgaggagtttaaaataccaataacttcatgggaagcactcaatctgcttcatcttcaagtccgagataaggatcccatttttgatgacgctcttggcgattgt

SEQ ID NO: 286974 - DNA, 611 bp, Zea mays
ctccaattatcaaggcaaccagaggccaaactactaagtcattctacacgttgccagagtatgaagaatggagaaataatttaggagcaagtgcaagttcatggactataaaatactacaaggggttaggaacaagcacagccaaagaaggccgaaagtacttcgaagatattactgaacataaaaaagattttctctgggtagatgaccaagatggcaatcatattgaattagcattcagcaagaaacggattgctgataggaaacagtggcttacaaattttcagcctgggacatacattgaccaacgtgacaaacatgtcaagtatagcgatttcatcaacaaagagctgatactcttctcaatggcagacctgcagcgatcaataccttcaatggttgacggccttaaaccaggccagaggaaaattctgttttgctcattcaagaggaattttgttaaggaagctaaggtggctcagttctctggttatgtgtcagaacactcagcataccatcatggtgagcagagtttagcaggtacaattattggaatggctcagaactttgttggcagcaataacatcaaccttatgtaccctagtggtcag

SEQ ID NO: 286975 - DNA, 423 bp, Zea mays
cagcaacgtcctccttgacgagcgcctcaacgccaaggtctccgacttcggcctctccaagcccctcggagaggacggcaggggacaagtcaccacgcaagtcaagggcacgatgggctaccttgatcctgagtactacatgacgcagcagcttacggacaagagcgacgggtacagcttcggcgtgctgatgctggagatggccacggcgaggaagccgctggagcgcggccggtacattgtcagggagatgaaggtggcgctggaccgtaccaaggacctgtacggcctgcacgacctgctggacccggtgctgggctcgtcgccgtccgcgctggccgggctggagcagtacgtggatctggcgctgcgctgcgtcgaggaggccggcgccgaccggccatcgatgggcgaggtggtcgg

SEQ ID NO: 286976 - DNA, 323 bp, Zea mays
ctctacgagtgccccgttacccgtatcaaggacgacagatccggggtcggcgagacgatccggacgctcaaatacctggacaagatggatgccgacgagaacgagcgccccgtgtccgatgacgacgatgacgacggcgagggcgatggcgagggcgatggcgacgatgatgacgaagatgaagaagacgaggaagaccctgggagcggcgaggtagcgaacggcggcgtcgcccatgcgcgcgcgggcgtgccctcgcacccggtggaggtgaatggggtgatcgatgtggacgaggaggagagcgacgctgacgaggtcat

SEQ ID NO: 286977 - DNA, 510 bp, Zea mays
cggacgcgtggagagaattccctccgaagattgaagagatttaaatcccttcctagttatttttgacataagagaggatttaatgtcctctaatctctttctggattggtcacgggaatgggggatcggcgccattgccgtctctaccgaaaatccagacaaagcacgagctacgcacgcccccgctgcctcctttctgccgtcccaacgccgccggagtctgtcgccaccgtcgctgctctcccgccttcaccgcgcccaactctcgtccttgcctcccctgcgcgcttcagccgcttcactccccatcgttttcgcctggccaggatctactgggaccatggatcaagaaaaaaaaactagaagtatctaataccagccatacttacaagcatcattgtagcgttggagttgacgtccacgagatcttttttaagaggagcagattgcgggttgttctgtcatacattggcattattttccttcttgtgaatgcctgccaaccattgc

SEQ ID NO: 286978 - DNA, 304 bp, Zea mays
acatcccctggcccctgccgctccccacccatctccgatctgcgattccttccagccgacgcctccgcatccacctccccggagccaccagcggccagccactggccgtccaaccatcgtccccaagcggcgagttgcggggtgtggcgaagatgatcagcaggcagctcgtgctgacctacctctacctgctgatctacatctgcctctcttcgggcgtcatcctgttcaacaaatgggtcctttctccaaagtacttcaaattccctttccctatcacgcttacgatgattcacatggcatt

SEQ ID NO: 286979 - DNA, 295 bp, Zea mays
tcggctcgagcgacgactgcgctgaagctgaactcgatcctgcgtacagagaatccgtcaagtgcaagatattcctggggttcacttcgaaccttgtgtcttccggtgttcgggagatcatccggtttcttgttcagcatcgcatggtggacgttattgttacgactgctgggggtatagaggaggacctcatcaaatgccttgcgccaacctacagaggcgacttcactctgcccggagcgctgctgcggtccagaggacttaaccggataggaaacctgctggtgcccaatga

SEQ ID NO: 286980 - DNA, 465 bp, Zea mays
ctcatgtgaaaggaaggagacgagatggagagaagcaaagatggaatggtaaacagtggaaacaaggacgtctctggataacaatgttgaccgagatgatttacaaagaaaaattgtgaggccaccagcaaatctactggtgtttgaaggggacgttctggatagtgaagcgagtgagctagactcatatttgttatcaacatgtgatttttatggagatttccttctgctggatccttgtgatgcaccatctgtttttgactttctgcaaggaaaacattctggtaaagaaaatagtgtggctcatcaaggcagtgcagcaccttctaaaagccaagccaatattttcacttccccgaatgcaagatcagtgggcacaggtcgtaaatcagcccctggaaaagtcctaggaggtctagatccaactcaggagaaccaatcttcaactcaagaaaccagtccaga

SEQ ID NO: 286981 - DNA, 220 bp, Zea mays
atcgtcacgtcgccagatctaaccaagccccaaatctgcgcgccggcaatggcggtgcgcgcgagcctcgcctgcttcccctccgacccagcgctccacgcggcttgcggcatgccgtggggcgtcgccatcaccccgttctctgccacagatgagcgcggcttcccgccggccaccggcaccgagggccacctcctcccgcgctgccagtactgcttcg

SEQ ID NO: 286982 - DNA, 310 bp, Zea mays
tgccacatcatgctcgtcgatttcgacctctccacgcggctcccggcgccgcgcaggagcctgacgcgccggtgaccagtcccaatgccaagccggcgcttccggtcgccgcgccgtcgccgagccgcggcagtgcaaggaagccagcgggcgccgcactgtgcttcccattccgcaccgccatcgccacaaagcctgccgccccggccacggactcgaggtcgccgctgtccacctcgcgcacggcctcctcctcctcgtcgtcgtcgtcctcgacggcgaccacggcctcctccgcggcatccgccgg

SEQ ID NO: 286983 - DNA, 322 bp, Zea mays
ccacgcgtccggcatcacagcgagctatagccaggctccttgtgttccagattaaagcctttgttcgtaatttccctagctccaagtcgagtgtgtgtgatcgagagagctagctagcagatcgaccgcgcgcatgatggcgacgacgacgaggagtaggccgatgctgctcgccttggccgcggtggtggcgacgctgctggtggtggccgcgccggcgccggcgtccgggcagcccggccccggcggcgtcgttgggggcgccatgtcgtgcacggcgtcgctggtcaccagcttcacgccgtgcctcaacttcatcacc

SEQ ID NO: 286984 - DNA, 311 bp, Zea mays
ttgcaaacacaaacatgttgttagagaagcgtggcgacatcattaacgagaagcgaatacaggttgtgagcgagtctgggctgttcactcccgatgacgtggcatatgtgcaaaaagctggtgttttcgcggttttggtaggagagtccctgctgacgcaggaagaccctggccgagcgattgctgggctgttcgggaaggagctgttaccttaatgtatattctcccgttgttccgctcgtattgtttagctaattattatattgctgtacgtatacgtagcaataatcccggccgggctttcagagtga

SEQ ID NO: 286985 - DNA, 529 bp, Zea mays
gtggaactccgaactcgtcgccgtcgtgttcacaaagccggcgccttttgctccccgatctcagttcccgcccacctctaagctcccaaggcgacgctgcggcggcggggcaggcgggaggacaagaagcggacttgtctccctgcccccaccccctccctcgcttcgcgcgtacccccttcagttcagccgggcggtaccgtcgacggcgccggcattgtacttctgctgcgcactatcactgctctgagaaaatggttgcatcagcctttactgttgatttggacaagcctctagtattccaggttggccatctagaggagcagtatcaggagtgggttcaccagccgattgtttgcaaggaagggccacgattttttgaaaatgatatattggagttcttaacacgcacgaaatggtgggcagttcctcttatctggttgcctattgtatgttggtgcctgagtacttctatcaagatgggcaatactatcacagatgtagctatgatgattgggtttgggatatt

SEQ ID NO: 286986 - DNA, 304 bp, Zea mays
ctcgcccggagatcgcgtacccgaccctcccctgataaacagacgcaagcgtcagggagggatggagggacagagagaggtagagagggccggggcgaagggggcaaagatgcgttcttgaggagcctgtgcacgcggaggtccaatccagaggccgccattccttttcttttccccccaacctctgcaggctcttcagatccagcaatccggcttgtttcttttgctggttgatttatactctatagtggttctctacttagcatcaggtcttggcatggcaatggcctcgtagctcgcggct

SEQ ID NO: 286987 - DNA, 776 bp, Zea mays
cggacgcgtggcgtgacgcgtgggcggacgcgtgggttcccagactactgcttccacctatgtccattatttccgccaagtcgagaacgacatgcagtcgtagtatcatggataaccaccttatgtcgtccttcaccatcctactgctttcttcttttgctgcaacggttgcatatcctgctcgcaatgaattacagcctaaccagatgaaaaaccaccattcttctgtatcatcatacaacccacaaccgaaggatttcccaactgaacaactctaccgcgcctaccttataatccagcgcttcaagaacaccatcattagcgaccccaagaacgtcactgccacctggattggtcatgatctctgcggagaaacgacctatgtggggttctactgcggatcgccggcaggaggagataagaagttgacagtcacaggtgtcattttgaatgggtataatctacatgcaccaacgttggaaggtttcgtcaatcagctccctgatctagctcttttccatgctgcttccaacaattttggtggcgatataccccaactaaccggcctagggtacatgtacgagctcagtgtcgccgttaaagatctgcaattacaggctcggccaaaaagggatatccctccggattctacagtgggtttgggcggcaacactcacggtcacgggcatcttggtaactgtataattgcagattttaacttctcatttaacgtcggaatcggtaagggtcacaaatttccaggttttacggatgcc

SEQ ID NO: 286988 - DNA, 342 bp, Zea mays
tgcatggggcaggcagagaaggaattcagagttgaagttgaagccatcggtcatgttcggcacaagaatctggtccgccttctgggatattgcgtggaagggatacataggatgcttgtctacgagtatgttaataatggcaacctggaacaatggcttcatggcgtgaatcaacacggtgtccttagttgggaaaaccgtatgaaaattctccttggcactgcaaaagctctcgcgtaccttcatgaggccatagaccccaaagttgtgcacagagacatcaagtcaagtaatatcttaatcgacgatgaattcaacagcaaggtttctgattttgggttg

SEQ ID NO: 286989 - DNA, 327 bp, Zea mays
ctcaaatcgacaaattctatggagggtaaaatgagttgttcatctcatagtgagccgaatgttgcaaatgctttctgtggtcgcagccgcgataaagttgtggatgaacatcaaagaactgcaagctcaagtccagagcatccactgtccagagttcgtgggcgctcaatgctgggtgataaacaatatggtggtgctgtagcagtgtcaaggtcagatggcgcatcaacatcaaatacacatagagcacggagaagtactaatattactcctgaaatcagtgatgatattgtgagagcagttcgagcaatgagtgaaagcatgaga

SEQ ID NO: 286990 - DNA, 333 bp, Zea mays
tgcacacgcttccttctctacctcgttagctagcttagcccggccgagggagagaagcagaagcagtagaggcgaccttttttttctgttctctgatcgagctctgaagaccggggatggcgtcctgggcggctctcctggcgctgctgctctcggcgttctcggcggcggcgcagctggacgagaggttctacggccagtcgtgccccagcgtggaggacgtcgtgcggaaggagatggtgcgcgcgctctccgtcgcgccagcctcgccgggccgctcctcaggatgcacttcgacgactgcttcgtcagggcggtgcgacggctcggtgc

SEQ ID NO: 286991 - DNA, 521 bp, Zea mays
ctcgacgacctgccgagtgccgaggcaagcaagacgcgaggaggctgtaacctgccatcagcagcggcgatggcgggcgccgaggtgggagaagacaagtaccgctccttcatccacggcgagggcgagatggacaccgtgtggaggtacggcgccccgcccaactacgacgtggtcaacaagctcttcgaggaggagaggactcaggtgtggcccgagggctcgctggaggagaaggtgcagcggttgctcaagagctgggagatggagctggtgcacaaggtgcggcccgaggaccagaagaccgtcaactcggagaaatactctgccagcaccaacgggatgagcgctctgacccgggccgaggtgatggccatcggcggctacaacaacttcctgcgcaccaagctgcccccggagcaccgcatctacgacccggacagcgagaccgaggagtccgccatggccaccttcaccacggccttcccgcggggcttcgccatcgaggtgctcgacgtcta

SEQ ID NO: 286992 - DNA, 317 bp, Zea mays
tccaacaatactttgtacttgatgcctgaatccatttgattcagtagatagcgctttattgttttgccaatgcaaatacacatgcgatcaaacaagttccacgcactactcagtagaaacggtacaagtttcaaatgcaaccaaaccaaccatgccacgaaagtgggcaagcctcaagcagtcaccaggttttctgcgaattctccactagtagcttccttatcagatgggttgcctgaatctaaggcctcgggaacgattgcagtctcaaggtcttccaggatgcacgagctccattcagaaagctgtttcacaga

SEQ ID NO: 286993 - DNA, 397 bp, Zea mays
ctcggaccatggcacgacatccactccaagatcgaaggcccagccgcatgggacgtgctctacaacttcgaacagcggtggaggaagcaagggggcggcattgatctcctcgtcaacctcaaagctatggcggacctgatcataccgccgtcgccagtgatgttcccggaagaccaagattcatggaacgtgcagctattccgctccatcgatggcggcgcgtgctttggcttccctagcaccccagaggccgcagctcaatctggccttgtcagtggcaagaataatgtcctagacaggagcatccatgatgcctacatccacgccatacgccgtgccaaacacttcatctacatcgagaaccagtacttcctcggcagctcatttgcgtggaaag

SEQ ID NO: 286994 - DNA, 321 bp, Zea mays
cgcccatcacaagtgaaggaaggctactggtgctggtgccggcactggcagccggtgcctaaccatatctacctcatataactttccactggccgtagtcggcttcttctctgaactgaagcaggggggagacaagcgccatggctgaggatgccagaggagagaagaaggatgcctacgcggcggcgccggcgtccaagttgccggcgaacaacggggagggttcaggagcatgcccttcatcctagcgaatgacttctgcgaccggcttgcttcggtggggttcacgacgaacctgatctcgtacctcagcctgcagct

SEQ ID NO: 286995 - DNA, 651 bp, Zea mays
atcaggaggacggtggtttcctctcctccgttctagagaaccgaacctccattctagatccctcgcacaacgaaccttcccttgtcggtgcgcatgagaacctgtgtgtccgagccctagacgcagagtttggtttgtcgccttggaggagctgactcggccgcctccaggtgaccagggacggctgccctgtcatcttccatgacaacttcatctacacgcaacaagacggccaagtctcagcgaacgtcgttaccgagctgaacctggacgagttcctgtcctacgggccgcaaagagaccaggggaaggccggcaagccacttctccggaaactcaaggacgggaggatcctcaagtgggacgtgcggtccgaggacgcgctctgcacgctccgtgaggtcttcgagggcgtccaccggcgtgtcggcttcaacgtggagctcaagttcgatgacgacctcttctacacggaggagaggctacctgcatcctaaaatccgtctcaagttgtcttcgagcacgccaacgacagccatcatcttctccagcttccaacccgatgccgcgcagtcatccgaactgaagacatacctgtgctcttctgacaacgaggacgagtgtagcgaccggtcgaatcgctggagaggc

SEQ ID NO: 286996 - DNA, 468 bp, Zea mays
gcgctcaagtgggcgacgtcgcagccttccctcggcagcggctcgagcgggggcgcccgcgtgttcctgtcgggggacagctccggcggcaacatcgcccaccacgtggccgtccgcgccgccgacgccgggatcaacatatgcggcaacatcctgctgaacgccatgttcggcggcaccgagcgcaccgagtcggagcggcggctggacggcaagtacttcgtcacgctccaggacagggactggtactggaaggcgtacctgcccgaggacgccgaccgggaccatccggcgtgcaacccgttcgggccgaacgggcggcggctcagggggctccccttcaccaagagcctcatcatcgtgtcgggcctggacctcacctgcgatcggcagctggcctacgccgacggcctccgggaggacggacaccatgtgaagctcgtgtaccgcgagaaggccaccgtgggg

SEQ ID NO: 286997 - DNA, 353 bp, Zea mays
ctgtcgcgcgcgacgccgaggcttcgtgacggggacacgcgcgcaatttgtagcgcaccacacgccggctcggcctcggttgcgcctcgcctcgcatcgcatcgcctcgccacgccacgccaggggattactggcgggcagcgctcgtgcttgttctgcagccggtgcgtctgctcgtgccccgcggcgatggggcaggacctcgtcgagatccacccgcgcgagctccagttcacatttgaggtgaagaaacaaagttcatgtgttgtctgcctaaccaacaagtccaacgaatatgttgcttttaaggttaaaacgacatcccctaaaagatactgtgttcgaccaaatac

SEQ ID NO: 286998 - DNA, 413 bp, Zea mays
cccagcgccacggtttctccctcccccgagcttgtcgccatggccacgccgtccctgcccatctccctgcgcgcgcctgctgctcgtcgcgccctgctccctccgtctgggtccgaagctccctggcgcgttcgcccagccaagctccctcgccaaaccgcgcccccgctactcgctggtgctcgccgcgcgcgcccagctctctgttcgcctctgcgcacagcttcccaagctccatggccggttccctgctcgtgtcgtggtctcccagctcgtcagcacttgttcagtagtctcggctcgctcggcctcaaattccagcgcctcgccctgctctcgtggttcagcaacggccggcgcgaacctgaccgtggtggtgttgtggcatggcgacgtcgtgcgcgtcgcgacag

SEQ ID NO: 286999 - DNA, 378 bp, Zea mays
gccgcaatcaaataaataaataaaaacacgccgccgccatcaatggcgatgtcgcgcttcgggcgctccgggcagccggagaaccgcgaatctttctccctcctcgtcctcaacgtctccttccgcactacggctgacgatctcttcccgctcttcgatcgctacggcaaggtcttagacatctacatcccgcgcgaccacaggactggggatccgcgagggttcgcgttcgtgaggtacaattacgaggatgaggcgcgggatgccattgacgggcttgatgggatgaggtttgatgggcgtgcgctcatggtgcagtttgccaaatacggacccaatgctgaaaagattcataggggtagaattacagaagaaaat

SEQ ID NO: 287000 - DNA, 638 bp, Zea mays
cggctcgagcacggcatctaaagccataccatacaatacaacctcctctcctctccatacactgctccgcgtagcagctacagctagcgggatccgaaaaatggagagccagaacacctgcgaagaagtgttgccggtgagcacgctgagcgagcctctcctcccggggaaagccgacgacgacgacgacctggaggtgcagctcacaccgtacgaccgccgcgccaccgccaccggcgcgtcgtccttctccaggacgtgcctcaacctcaccaacgccgtctcggggatcggggtgctgtccatgccgtacgcggtggcgcagggcggctggctcagcctggcgctcttcgccctcgtcggcgccgtctgctactacaccggcaccctcatcgagcgctgcatgcgcgccgacccgggcgccatcgccagctacccggacatcggcaagttcgccttcggctccgcggggacggagcgccgtcgccttcttcatgtacgtcgagctctacctcgtggccatcagcttcctcgtcctcgacggcgacaacctcgacaagctcttcacgggatccagcgtccggctcgcgggcgactaccggctgcaggggaagcagctgttcatcgttctggcggcg

SEQ ID NO: 287001 - DNA, 385 bp, Zea mays
gagtacctcttcttcaccgtcggcctcggcctcttcaactgcaagccgggccagctctgcgccgggcccaacaacaacacccgcttcgcggccagcatgaacaacgtctccttcgtcttcccgcagaccgactccctcctccacgcgcactactacaagatccccggcgtcttcaccaccgacttcccggcatacccgccggtgcagttcgactacacggggcagaacgtcagccaggccctgtggcagccggtccccgccaccaagctgtacccgctcaggttcggctccgtggtgcagctcgtcctgcaggacaccagcatcgtcacgcccgagaacaaccccatccacttcaagggtacgatttcttcatcctcgccgaagg

SEQ ID NO: 287002 - DNA, 393 bp, Zea mays
cagacggtgggcgaagcgcgtgccgggcaccgacgacgtggaggaggagtacagcgacctggtggccgccagccacgagtccaagctggtggcgcacccctggcgcaacatcctgcagccgcgctaccgcccgcagctcgtcatggccatcgccatccccatgttccagcagctcacgggcatcaacgtcatcatgttctacgccccggtcctcttcaagacgctgggcttcgcggacgacgcctccctcatgtccgccgtcatcacgggcctcgtcaacgtcttcgccaccttcgtgtccatcgtcaccgtcgaccgcctcggccgccgcaagctgttcctgcatggcggcacccagatgctcgcgtgccagatcgtcgtgggcagcctcat

SEQ ID NO: 287003 - DNA, 302 bp, Zea mays
cgcacggcaccaccaccaatccatccatccttccgcattcgctacactccccggcgtcgagcccccgcgaaccctagaccgccgccctcgcatctccgctcgtcgccgcggggtactccctccacccgtctggtgggagtcgcggcggcacgtccccgatccgagctctctccgccttagggtttttggggccggccatggactccatggagcagccggagcccaaaaccgcgggccactactacgcccttcaggttggctccgttttcctgacgggctactacaacgtcctgacgaaccag

SEQ ID NO: 287004 - DNA, 349 bp, Zea mays
cggacgcgtggggtcgtccatcgttggcacgctcctgccgggatacgcggcgtacacggcgaccaacgccgccgtggaggcgatgacgaagatcctggccaaggaggtgcgcggcgaagggggtgaccgcgaacgtggtcgcgccggggcccgtgcgcaccgagctgttcttggccgggatcgacgaagcgttcctgcggagggtggagcagcagtccatgggccgcatcgccgagacgacggacgtggcgccggtggtggcgttcctggccagcgacgccgcggcttgggttaacggccaggtcatcagggtcaacggcggttttgtctaataagggtccaagtgcgc

SEQ ID NO: 287005 - DNA, 326 bp, Zea mays
ccggtacacgcttcccaccaaaagcaaccctgaccctgacctgcgctgcctgtgaccccgccgatccgagcgtctccatggccgcttcgtcctccgaggctgccacagccacgcccacgaccaccgtcggactcggagggagcgggaccccaggccctccgccgccaacgccatcgaaccaccacgcggcgccgtcctccgcggctggtggggccacggacgcctcgctctctgctttcctgcaccgcctcctcctctcgtccccggctccacagctacggtctccactcgcagctcggtcgcaggcgtcgccgccctcgcttccg

SEQ ID NO: 287006 - DNA, 589 bp, Zea mays
gcaggctgcgtgagatggtggacgtgctccagcaggctgtcaatgacgccgagacgagggccgtcaacgagagggaggcggcgaaggatgccatagcgcagttggaagcagcctcggcgatcgaagagaccgtggtgatggttgaggacactgagaaggtcaagtcgctgagtgccgaagttgaccgcctcaaggatttgctgggagctgaaatgagtgaaacttttgccgccaagaaggcgctttctgaagccgagctgaggaacgagaagctggccaggctgcttggagttgaggaagttaagaacaaacggcttcaagacaccctgaaaaggatggaggagaaggcttctagtctggacgaggaaaacagaatgctgcgacaggctgtggcgtcaaaccctgctattgtcaggtcgccatcgggcgaaaaccacgaagcacctggaattcaggcagctcctgataatgagaaatcaagaaatggcacggtgaatcccatagcagtggatcgggaggctaatgtccatgagaagggcgctgaacagcccagctcaaatggtcaagaagctgggaagcaacagcaaga

SEQ ID NO: 287007 - DNA, 737 bp, Zea mays
cagatcacaacctgacagatcacagataatgggttcttgggaggagaatgttaggcaatttttgttggaggaggaggaagatgatgatgaactattctttgttattctccctgctataatcccatacctctcggaagagaaaagacccatccacacctcctccctcaccggtgctaaaaaggttaaagaaattcttgaagggcatgagagctggtgcaaatctgagtttagaatggaaaaggaaatattcaaagccacgtcaaattttcttagaagggagaatttactacgtgacacacgaggagttagtgttgagaagcaacttgggatgttcatgtatatgatctcccacaacgccagtaaccaaatgctacaaaaggcttttcaacacagtggagagactatccatcgaaaaatatctgaagtttttgagatagttcccatactaactcaacgatttgtgaagcttcctagctcagttcaaactcatgctaggattgcaacagattctaggttcatgcccttttttcagaattgccttggtgccattgacggcacacatgtatccatcactatcgcagaagatagggcccctccatatagaaatagaaaaggaactctttcacacaatgttatggtagtctgcgactttgatctcaattttacatttgtctcgtgtggatgggaagggtcggcatcagacgcaggggtgcttcgatctgctattagcaaaagat

SEQ ID NO: 287008 - DNA, 303 bp, Zea mays
cagggcaaaagaagcgtcggggttttggctcctgttcaaaatccgcagctcgccgttggacaagtgaggaaaggagagagaaagagaaagagagagagagagacggtcagccatggcggcgaaggcaagggtctcgctgacggctgtgctcgccgccgcggcgtgggcgtgcttatctgtcgtggccgcctccgcattcgacgtcccgaccgtggccttcgaggaggggttctcgccgctgttcggcgacggcaacctcgtccgctcctccgacgacaggagcgtccgcctcctgctcgaccg

SEQ ID NO: 287009 - DNA, 284 bp, Zea mays
gtgacttcggccttgcgaggctgtatgaccatggcacggacccgcagacgacacatatggttggcaccatggggtacctggctcctgaactggtgcgcacgggcaaggcctccactgacacggacgtgttcgccttcggcatgttccttctcgaggtcacctgtggcaaaagaccactgatgatgatgatgatgcagagcaccgccgaggggcggcgagaccgtcagtttttcttggtcgattgggttctcgagcactggaagaatgggtcgctcacagaagca

SEQ ID NO: 287010 - DNA, 373 bp, Zea mays
gtcaatgactgtccactgtggctttgttagaggaaagaagcctggccaaggtactggattcgatatcaaggatgatgatctgctagagatggagcaatgccgtgagctagtcgtagcttctgctatttttggaaattatgatatgattcagcatccgaggaacatcagtgaattttcaaaggcaaatgcatgtttctatatgtttgtagatgaagaaacagaggcttatgtcaagagtgggctagttctttgtacaataataataaagttggactgtggaggctggtggttgtccgaaacctcccttatgaagatccaaggcgtacgggaaagattccaaaacttctgctccataggctttttccaaacgtga

SEQ ID NO: 287011 - DNA, 525 bp, Zea mays
tggaagagggttgtatggaagacagcaacatgagcaattgtattcatgtcagtgataatcttgtatttgcagatgaaggcattgcagatagagttcatggaaatgaagagacagctgatggcgctggagaaaatgaacagagcctaatggaaaatgaaaatgtgaatgttgctgttgcagctgagttcattgcgaagaagattcacgagaatgagcatggtagggatcagcggtccctggaggacggaagtgcacagctgtatgaaggagtcatcactccattcagtgccagatacgttgaatctgaacaaagttttcaacaagatgagccaatacctgatgccactgaagaaaaggaagatgattttatggaagatggaaatatggccaactgcattgaagaaagcatggcagctgttgctaggttctcaagcttgccaaataagaggaatcagtccaagttagctagctttaataagaacaaagaacaaatgacctacagatctagaggtagccaacttcgtc

SEQ ID NO: 287012 - DNA, 694 bp, Zea mays
gtcgacgagctcgcagtgcacgctcatggaaggcgctatctcccttcctcgcaacacaagaattcccgtggttaccggcgcgaacagaggtatcgggctagaggtgtgccggcagctggctggcaatggcgtcaccgtcgtcttgacagcagtggacgaggagctaggcgcgaaagccgtcggcaatctccaagggctagctctctccgatgttctttctcaccagctggatatcacggatgcttccagcatcgctcggttggccaacttcttgaaggcccgattcgggaagttggatatcctggtcaataatgctgcggttgctggggtcgtgtactctcaagatcatttggatgatctagaaccgagagaggaaaagttcaatcgcatggatagggatcagaggcttgaatggctgtggaggaactgccgggagacctaccatgctgccaaggaatgcctgcagacaaactactacggcacaaagcctgtgatcgaagccttgctgcctctgctgaacgcctccgatgatggaagaatcgtcaatatatcctccgactttgggttgttaaggctgccctctcacctcggtactcgccactcaacaattggatcagtgtggtcgtcagtcgtcctaattgaagttcttcaacacagcatttcagaaacgaggatctgaagcaagtgctgaacg

SEQ ID NO: 287013 - DNA, 532 bp, Zea mays
ccttcctccacgacgatgtcgtacgccgccctctcgtctggtccgaggtacatgatgagctgcgagttgagcttgctccgtggacacttgtgctgatgcaagtccctgccgttgccgacgtccagccagtagaagacgggctcgcagctggagctggcggaccagatgtcgtagtagagatgcaggttgtggccgtagcggtggcgcgggtcaatagcttcgagccagtgctggagcgcgagcttctgcgccttgtcgtccttggagagccccttgccgaccttggcgaccctcttgccggccctggaccagcgggacgcggcggtctcctgcctgtcctcgtcgaagaaggagatggacttgatgttgaggtacaccgagtcgaccgtcttccaccacagctcctcggcgacgatggcgccgtcggcgaggctgcggcgcgtgccgaggcccttgtaggccttctgcagcgtggtggccgcctggtcgagctccacgcgggggcgaggggagatgtactcgatgatggcct

SEQ ID NO: 287014 - DNA, 296 bp, Zea mays
gtgcctgtgcgcgcgatcgacctgaacgtgcatgatgcaggtgttgacgaacgggaggttcaggagcgtgaggcacagggtggtggtgaacagcgagaactcccgggtgtccatggtcttcttcggcggcccgccgcccggcgagaggctgggcccgctgccgcagctcctgggcgacggcggccggagccggtaccgggacttcacctggagcgagttcaagaccagcgggtgcaggaccaggctcgcggaagaccgcctgtcccgcttcgagaagaagtagctagaggctacgt

SEQ ID NO: 287015 - DNA, 304 bp, Zea mays
ctgccacacacacctcgccagcaccacagccaccgccacagtcacacagtcagcgagagagagagagcatggacctgctgaaccccgagcagatctccgagttccgggaggcgttcgcgttcttcgacaaggacggcgacgggtgcatcacggtggaggagctggcgacggtgatggggtcgctgcaggggcagcggcccagcgcggaggagctgcgcgagatgatccgcgacgccgacgccgacggcaacggcgccatcgacttcgccgagttcctgggcctcatggcacgcaagaccgcggg

SEQ ID NO: 287016 - DNA, 460 bp, Zea mays
ttacgtcctcttccgtgctctgcgttgccgcctgctggcgccgcaagccgtgcgtgcccgcgggttccccgatttgtagtttatttacggaagtttacaattgatcaacaagacttagtccaaccctacttttcaaatcactatggttaccctttcctacagctgggcaagcgtagaatgtcagtcataatgttgggctctaagaaaggaaaggaatctcagcatgcactttcaatcagaccagaaatcttctgctaaattttgtttgttttcacaagtccaatctgccagcccaccaccaggaatacactggtttatctaaatgtgtatgatttgacaccagtaaacggctatgtttactgggctggtctaggggtatttcattctggcattgaagttcatggtgttgagtatgcatttggagcacatgactattcgattagtggagtattgaggtgga

SEQ ID NO: 287017 - DNA, 296 bp, Zea mays
ctcacttcttgcacgtggaggatcatctcatccgtcattccattctacacacagtcagacatgggcaacggcccctctctctcgccgtgcctgaacccgcacctgccggagtcgtccgcgacggtgcgcctggtgtactggggcgggcgggcgaggcagctggcgctcacgggcggcggcgacgacgccattgtcacggccggtgacgtcgcggcggagctcccaccgccggccacgggctacgccgtgtgccccgccgacgccttcttcatcggcctcccgatcccggccatgtc

SEQ ID NO: 287018 - DNA, 368 bp, Zea mays
cccacgcgtccgcccacgcgtccgcggacgcggggtacacgcaccaactagaggagccccttccgtcacttcgcctccaacaacagcagcgccgccaccgccgccgccgccgcttgctcgccgggatcgtcgccggaggaaagcgccatggatcggtaccagcgggtggagaagccgccgcccgaggccgccgccatcggcgagaatgagatccgcatcaccactcagggcctcgtccgcaactacgtcacctacgccacctccctcgtccaggaaaaacaggtgaaggaaattgtgttgaaggctatgggacaggctataagcaaggcagtggctattgctgagatcataaagaagaggattcctgg

SEQ ID NO: 287019 - DNA, 563 bp, Zea mays
gactgcgctaccgctgaggcggtcgtcgctctcgggcgccgagcagcagtggaggaagacaaggctcatctccctcatggatgacgtctgcaggcgatacaagcagtactaccagcagctgcaatccgtgatctcctcgttcgagactgttgcagggctgagcaacgcggcccccttcgctttcatggctcttcggacgatgtcgaagcacttcaagtgtctgaaggggatggtgatgagccagctacggaacacgagcaaggtcatcgccaaccatgggattattgccaaggacgatatggcgaacttcgcgctcatgggtggtggagcaggcctcctgaggggaaacagcgtgaacgcgttcagccagcctcacaacatttggaggcctcaaagagggcttcctgagcgtgcagtgtctgttcttcgctcatggctgtttgagcacttcttgcatccgtatccaactgatagtgacaagcagatgctggctaaacagacagggttaacaaggaaccaggtgtccaattggttcatcaacgcaagggtgcgtctctggaagc

SEQ ID NO: 287020 - DNA, 666 bp, Zea mays
gagaccataacgttctgctacatcaacgacatcgacgggccgagcaagaactactgcgaccggcacgacacgcagtggccgtgccaggcggggaacgggtactacggccgcggcccgctgcagatctcctggaacttcagctacgggcccgcggggcagagcatcggcttcgacgggctgggcgaccccgacgcggtggcgcgcagccagtgacgtcgcgttccgctccgcgctctggtactggatgaacaacgtgcacggggccatcgtctccggccagggcttcggcgccaccatccgggccatcaacggcgcgctcgagtgcgacggcaagaaccccaactccgtcaacaaccgcgtcgcctactacaagcagttctgccaggatttcggcgtcgacccgggcaacaacctcacctgctgaatgatctctctctcattgggttgttgtcctgtacttacacatgtgttggttgatggatagatggcgattgcgtggtgcggatgtttcggtttggcggtgtcaattctgatatgcgcgtcggtgctgttctgatactgactatatacggaaataaaaatctgatttgcattaaaacaaaaaaaaaaaaaaaaaaaaaaaaaaaaaaaaaaaaaacaaacccaaaagggggggccccgcaatga

SEQ ID NO: 287021 - DNA, 377 bp, Zea mays
tgcacattgaaattttcgcaccgtcagtcttcaatcaaccaccgtctcgaagtcaacacctttcacaaccacacacaaatcaaacaaaatggagaacgataagggagagattgtcgatctctacgtcccccgcaaatgcagcgctaccaaccgcatcatcaaggccaatgaccacgcctctgtgcaaatctccatcggcaacgttgacgagaacggccgctacaccggcgagaacggcgtctatgcgctcagcggatttgtgcgcgctcgcgcgcgaggctgacgactcgcttaaccgacttgcgcaacgcgatggatacttgaagaatgtctggagtgctcagcgataaatcctcagatttctcgtcgaggggggt

SEQ ID NO: 287022 - DNA, 362 bp, Zea mays
cggctcgagaagctctcttcattggttcatagctagctagttcgcctcccaaaaacacctgccctcgtgcgtggcaggagcacgggcacgatgatcagcacagcgcacagccggcagcagcaccatgccttcgagaagagccctggcaacagccacatgaagagcatcgacaggaagctgcagcaggccatgagccaggcggccagcaagtacatgcagaggatctaccctctaggcatgcagaggagcagctccagcctcacattgtcgtcgctctcgctgtcgcagaactccaacgactcctccatcagcagctccaacgccagctagggacgctaggtgccgctgctctacgccggcac

SEQ ID NO: 287023 - DNA, 377 bp, Zea mays
aaaaagaacaaaagtgcagctgcaacatctaaaaaaagaaggaaccataaaaggggatccaagaacagtctgagagttgaccataaatttcttggtagctcatatcacagcagtatcatatctgggctttctttagttgcatcttctctgagtgctgctgcttcatctggagaaaaagtcagcatcaccgttgtaggccttggtgctggttgtttcccaatgtttctccgtggatgtctgccttttgtagatattgaggtcgttgagttggaccccttggtggctgagctagcagagaaatattttggcttttcaatggatgagcaattgaaggtccatttgggagatggcatcaagttcattgaagacagtgttgc

SEQ ID NO: 287024 - DNA, 321 bp, Zea mays
tgaaggaaccgacgaccccttctcctagcccctatttatacgtccccgatcgcgatcgagctctccgccctatcccatgcgccgcgccgcgccgcgccgcgccgcgttgcgttcgtccagaatccaaacagtacggtacatcacctcctcccttgacctctcgtctccgaagaagagattctgccgagacaagatgatggagaagcagagcagggagcaccaggaaggctggcggcggcagaagcagcagcaggaggaggaggtggtgatggtgatgcacagccaggtgatgcggatcaagcaggaggaggacgagcgggc

SEQ ID NO: 287025 - DNA, 299 bp, Zea mays
cccaaatcttcgagtgcttgttgtgatgtctatggacattggacagtgataaatgatgacgcaactgacatacatccgcttatctagagaacaaagggagggcacatatgaacagaacagtaagaaacgagctaacaactatgcatttccttctagcaaaattcctcttgcagtggagagcagagatcagtaatatgccgactgacctgcaagctgaagcagaaggggtccatggagcgagctgaggtcgcacaacaagcgcagaaactgtgagcgcggctgctgctgctgctgtaagt

SEQ ID NO: 287026 - DNA, 302 bp, Zea mays
ctgcacatggtgggggtccaggacaaggacaaggtgctgctcctggaggacccggccgtcaaggagacgaagctcaggtcaaccaccttggcgcagtcatgggcgtgccctgtcactccttcatccaagtgtagagagaaacccccggggaatatttcttgccatttttctcccgtctcgtcgtcgtcgttctccaatttgcctgcgtgagcgaagggtttcagtccagtctaaccgcgtttgttcagagcctgctgagttccatctcaggccttgaattcggccaatcgaatcaagacagt

SEQ ID NO: 287027 - DNA, 327 bp, Zea mays
agcgattgctagttaggctcacaatggctagcaaagaacttgcactagcacttagcctctttgttctcttgagcattggatcagccagcgccatcagggtggctagatactccagctctcaagggcaaggagccggagatggtaatggtagcgggtatctgaacggtggtggctctggatccggagttggatctggatccggtgagagtgatggggctggagtccatgcaagctgtgggggcggaggcggggccagttcttggtcgcagccggcgggttctggggctgcggctgggtatggcacagggtacgagtctagttatagct

SEQ ID NO: 287028 - DNA, 412 bp, Zea mays
ccttccactacggcgccatcccgacgtccaggacgctggtgctggccagctccgcttccctcgacggcgccgggcgtaggcgctgcgccgtcaacgccgtgtccttcgtcgtgcccgacacgccgctcaagctcgccgacagatacgacatcgccggcgtcatcgactgggccggcctccccgcgcggctcgacggcgccgcggcggtgccgcgcgccgggacgcccgtgctcaggctcggcctgcacgagttcgtggaggtggtgttccagaacacggaggaggagctgcagtcgtggcacctcgacggatacgacttctgggttgtagggttggtggggttggggttactttcttcttggcttctcctctccttgtcaaacgccattgcccgtggacttctttctccagg

SEQ ID NO: 287029 - DNA, 298 bp, Zea mays
cccacgcgtccgctccctccctctgtttacatctaattcttatcgatttagctatagcaggtctcgatcggcggccatgagcggtagccgcagcaagaagtcgtggccggaggtggaggggctgccgtccgaggtggccaagcagaaaattctggccgaccgcccggacgtccaggtggtcgttctgcccgacggctccttcgtcaccactgatttcaacgacaagcgcgtccgggtcttcgtcgacaacgccgacaacgtcgccaaagtcccaagatcggctagctagctagttagg

SEQ ID NO: 287030 - DNA, 392 bp, Zea mays
cggctcgagctagaacagatagaccgagatgtaaagcgaacacatcctgatatttcatttttctcatcaaagtctaaccaggaatccttgaggagaattttaattatattttcaaaattgaaccccagtataagatatgtgcaagcggatgaatgaagttttggcacctttattttatgtattcgagaatgaccctgacccaagccactcagcgtcactgacagcagacgcatacttttgctttgtcgaattgttgagtggctttagagacaactattgcaagcatcttgaccatagcagcgtgggtattcgatctacactttcaaaattatcacaactcttgaagcgacatgatgaggaactatggcgtcacatggaggtcaccacaaagg

SEQ ID NO: 287031 - DNA, 515 bp, Zea mays
gataatgttcatcctgatgaacagatggaagtggtaactgctgacgaagtgctagaggacacagggataactgttgaagatgttgaggagaagcaaaagagcacaattacagtggatagagatgctgttgatgatccttttttcaaaactgatgatgttcatgccgatgaacagatggaagcgtcaactactgatgaagtaccagaactcacagaggcagattacgaagttgttgaggagaagcaacagagcacatatacaatgaatggaggcattgaggatgatcatttcaaaacccatgttgctcatgctgatgaaaagaaggaagttgttgctactgatgtgccagaagtcacagggacggtcggtgaaattgaggagaagacatcagttacaatggatggagatgttgtctttgatcatgcagatggacagaaggaagtgatagttactgaagtgccagatgaagtcacagtgactggcgatgaaggtgttgagagaaaagcagctgtgat

SEQ ID NO: 287032 - DNA, 300 bp, Zea mays
agcacctcagctcatcctcgcagatacgtttcagttccggagcgactagcgcgagcgttcagggattatttactgaaagagagagtgttcagggattttagcacctgttcatggctgctgcgtgcatcagccatcgctttcgccactccaagctcccggtactggtcctggcgctggcgacggtggtggccgccgcacgggctcagctgtcgccgccgacgttctacgcctcgtcgtgccctgccgcgctcgtcaccatcaacgccgccgtgagggctgccgtgctgctggaccgccgca

SEQ ID NO: 287033 - DNA, 526 bp, Zea mays
cggacgcgtgggttcaagagccgaatcgaatatggttgatgctttgactgcaaaaaatgcagagattgaatctcttgtcaaatcattggactcttggaagaaaagagcagcagcttcagaagaaaagcttgcttctttagaggaagatatggatggtctcaagaggaaccgggaacttactgaaaccagggttatacaggctttacgggaggaacttgctaccgcagagcgtagggctgaagaagagcgcatttctcataatgccacaaagatggcagctgttgagagagaagtagaattagaacatcgagctgttgaggcatcaaatgctctagctagaatccagagagctgctgatcaaagctcatcaagagtgctggaattggagcacaaggtggctgtgcttgaggttgaatatgcttcattgcaacaagaactgcaggagatggaagctcgtaaccgccgcacacagaaaaaaccttcagaagaagccaatcaagttcttcagatgcaggcttggcaggaa

SEQ ID NO: 287034 - DNA, 288 bp, Zea mays
aaatgttctggagacgggcgtatccgtgtcagaaaggagatcaaagtagaaatccctccaggagtgagcaaaggcagtactcttcgtgtacgtggggaaggtgatgctggaccaaaaggtgggcctcctggagatctctttgtttgcctcgatatagaggagccatcagatatcaagagggatggtataaacttgtattcaactgtgtcaataagctatcttgaagctattttgggcactgttatgcaagtcagaactgttgatggaaccagtgaccttcgaatacct

SEQ ID NO: 287035 - DNA, 328 bp, Zea mays
ccacgcgtccgcgacgctggaaacgcaaccgcagctacagcacagcacagcacagcacaacacgtcggcatgtatccgcccaaggccagcggcgatccggccgccggggcggcgccggtgactggcttccccgtcggcgggcctgccgcctcctcccagtggtcctccggcctgttggactgcttcgacgactgcggcctctgctgcctgacgtgctggtgcccgtgcatcacgttcgggcgcgtggcggagatcgtggaccgcggcgcgacgtcgtgcggcacggcgggggcgctgtacgcggtgctggcctacttcacgggatgcc

SEQ ID NO: 287036 - DNA, 336 bp, Zea mays
cccacgcctccgctctcgcagctagcttcgagctcgctgaacaagtgaagccatagcgggagcagctacaacgaagtgagtcctccatgggcaacaccttcggcttccgtggtggcctccgcgccgacgtcgccgatctgatgcaggatgctggcgaacacctgaggagcagtggggtgttcgtcaagagagcggtggcttctcagtaccaaagcaaccgcaccgggaacgacgaaatcgacgagtcgtccgccgaggagctgcgcgacgcggcgagctacgtgcagcacaacgcgatgctgatccaggtgccggtggtagggacagcgaggacgt

SEQ ID NO: 287037 - DNA, 312 bp, Zea mays
tgtggactgccccaagattggccggaagtccccagttcccccactggccaccgatgcaccgtcggtccaaccgctgccaaagtaacagaagccgcctccgctcagctcatttctttggactatacagataaagctaccagacagtgcatgtagtcttggacacttccgtcgtctaaaagtccctttgtttcgacgtataaaaacataggtaaaaagtttagttatccgtgcctccgctccccttgctgtagaatagcattgttgttttcgtgtaaaatagatgagagcagtgacttgcaaaagtcttgcggt

SEQ ID NO: 287038 - DNA, 267 bp, Zea mays
ggcatggtgaaagaaccagtcccgatgggactagggccatggggtggggagggaggccgggcatgggacgacggggtctacactggcgtgaagcagatctacgtcatgagaggagcgtgcatcgggtcgatacagatcgagtatgacaggagcggccactccatctggtcttcaaggcacgggaacagcggccacatcacccacagggtgaagctggacttcccgcacgaggtgctgacgtgcgtgtacggctactacgacacgagc

SEQ ID NO: 287039 - DNA, 351 bp, Zea mays
gtgacctgttccaccaggcgtccaagcaacccggccggctgggtggctcgtcgtcgtagaactccttggtggccgggcgcgcggcgaacgatcgcctatttcagctgctgagcgggcggctgatcggcggcgttccacggcttgggttacctaccactaccaacgacggaacggaaccggccgggccggcggcatggcggcgtggatgcggtcgctcttgtcgccgctcaggaagctctggatccgaatgcattcggcgcagaacaagagggcgcggcgccgctacctcccgtcgtccgtcctctttctcgcggcgcgtgcatgcatgcttcgatcgcttactgcatgaaa

SEQ ID NO: 287040 - DNA, 408 bp, Zea mays
cggctcgagtgacttttcaagtgaagcacccgcaattggtggtactaagttcactgcttttacaggaaatgttcatgatccagctagtgatgttccagcaccctggaattctcgtcttccacagctgtccccttacatgaacgataatacagatgctgatacattcgctggttcaccgtctggaagtccaccatggaattctcattcacttgatgaaataacagatgctgatgtatctcggatgcggaaaaagtggggcagtgcacagatgccttttgttggtgtcagtgcatctcaacagccacgcaaagatgtttccaaaggattgaagaaactgtggaaatttggtaggaagactagagggggtgatggtttagtagatgattgggtatctgcttccactgcctc

SEQ ID NO: 287041 - DNA, 372 bp, Zea mays
gttcgggaagagtaagagaggattgatcatggggatatggaacgcacacacctctgtcgggaatatagcaggctcgctgctcgccgcgttcctcctgaagttcgggtggcgctggtcgtttgccgtccccagccttatcatggcgctcgttgggttgatggtgtatgttttcctgccggttagtcctgaggccatggagattgacagtgacggcggtgagcttaactgcgagaaggacgctgtgaaggagcctctcttggaaccaggccaagaagtgagacatagtgcagtggggttcttagaggcatggaggattcctggggtcgcgccgtttgctctgtgcctcttcttctccaaactggtcgcgtatac

SEQ ID NO: 287042 - DNA, 404 bp, Zea mays
aggcgcggcgccacggcgacgtgctggtgctggactgcgcggagaacatgaacgacgggaagacgcacgcgtacctgtcctccgtgccgcgcctcttcgcgtccgcgccctacgactacgtcatgaagaccgacgacgacacgtacctgcgcgtggcggcgctggtggcggagctgcgccccacgccccgcgacgacgtctacctgggctacggcttccccgtcggcgccgaccccatgccgttcatgcacggcatgggctacgtcgtgtcctgggacgtggcgcgctgagtgtccgccaacggggacatcctgcgccacaacgacacgcacgggcccgaggacctgctcgtcggcaagtggctcaacatcggcggcatgggcaggaaccgctacgacctcaag

SEQ ID NO: 287043 - DNA, 314 bp, Zea mays
aggagaactggcgccgcgccttggtgctggcgttgtggttcgcggccatggcggcgctgttcgtgtggaagttcgtccagtaccggcgcatggcggcgttccaggtgatggggtactgcctccccacggccaagggcgtcgcggagacgctcaagctcaacatggcgctcgtgctgctccccgtctgccgcaacacgctcacgtggctccgctcctcctgggcccgcttcttcgtccccttcgacgacagcatcgccttccacaagatcatcgcgacggcgatcgcgctgggcatctgcctgcacgccgggaac

SEQ ID NO: 287044 - DNA, 365 bp, Zea mays
gccgcagcgccctgaaagagggaggcttccactcttctttctccccgagcacccgcccaggttcagatttagcctgggtgcgtctgcaggttccggttcatggagagatggagcctgggtgccaaagtggtagctctcgcactcctgctgtctgctgcttctcatggaagagagttgcctgtcaagagtagtgaccgcagttttatctacaatcatactcttgcaaagacgcttgtggaatatgcatcagcggtgtatatgacagatttaaccgctctgtttacgtggacatgctcaagatgcaatgacttgactcaaggattcgagatgagatctctaattgttgatgtggagaactgcttgca

SEQ ID NO: 287045 - DNA, 347 bp, Zea mays
  unsure (1)..(347): unsure at all n locations
gaaaaaataccagtttcaacagtttgtgtgtgatccacaattttcatgccctttaccacttaacagaaagcatgcaccaccagataaaaatcaccagcagcataatagcagcaagtatggttttggccatacttttaggaatagctggagaaaaaaggattcagatagcaaaagcctaaagaaaatgtcggatgtgggaatgatagaatttgttggattagtaaaggtcaatatcgtaaaaggcacagatttagctgttcgtgatgtgatgtcgagcgatccgtatgtcttgattcatctagggcaccagtcgatgagaacaanagtgataagaacacactgaatct

SEQ ID NO: 287046 - DNA, 410 bp, Zea mays
ataccagtttcaacagtttgtgtgtgatccacaattttcatgccctataccacttaacagaaagcatgcaccacctgataaaaatcaccagcagcataatagcagcaagtatggttattgccatacttttaggaatagcttggagaaaaaaggattcagatagcaaaagcctaaagaaaatggtgcggccaccccaccgatgctaatttttgagtgtatgtggcccttgatatatcatgtttacattgattctgtgttttctgtttcagtcggatgtgggaatgatagaatttgttggattagtaaaggtcaatatcgtaaaaggcacagatttagctgttcgtgatgtgatgtcgagcgatccgtatgtcttgattcatctagggcatcaggtaagcacatttctgttg

SEQ ID NO: 287047 - DNA, 275 bp, Zea mays
tggaagtcatggttgctaattaaattgcactgcatctgtgattgttttttggtgtcgttctcttcgttgccatgtttcttttgcctgcgtctgaaacttcagagatcacgtttccgaaaattgctcagcgaagtgcttgtatatttgagtttatgttgttactatctcctcaccgaatcgtgtaatcgctttatcaatttcatcatgtgttttgtattacaaacaacatccaataaccctaaaaaaaaaacaccacgcgtccgcggacgcgtgtt

SEQ ID NO: 287048 - DNA, 542 bp, Zea mays
aacgcgtggaacgggaaagccggaaaggcccccgcccgcacacgccgccgccgctgccaattcggtcaacgtacgataccagccgcgggccggcgagtccaggcggtcgcagtcgcacgtcgcgacgcgccttagcattggaccgagccgcggccacttgctttgcaattgcatttgccgggatccatgccatcagctccgtcctatatgtgaagcacccggccgcaagctctctcgctcattcacggcatattaagcgagcgccggccgaggcagacacaacccgcagcaacaacttgcatcggcacggacgaccgattgagagcctcggcgttcgtacgccacgccaccaagagactctgtgcaacaagtgaagggacgaaatgtatccggccaagcccgccgcctcctccagccagccagcggccgagatggcgcagcgggtggtcggcatccccatcagcagccccggcgcggtcgcggtcgggccggtcgtcggcaagtgggcctccggcctctgcgcctgctccgacgactgcggc

SEQ ID NO: 287049 - DNA, 382 bp, Zea mays
ctcataaaacatttcataggtatgtcgtaagagcaaaggctggtaaaaggcaatctggaaaagatgctactggaaaagttgcacactcagcaggttcttctctacggcgctataatgaagcagcactgaaaaaggaagttcaagaattaattgtttcatggaagtcatactttgagacatgtgtttgtgccttcatttatgctccatctaggaaccgccaaatgctcttcgacggggagaagactcagtcagtaattcagtcttgtgatgttcgtccagttccattgactgttcatcgccccaccttgaaggaagcgaaacgggtatattgtaacctaacacaactctactatgagatggaatgttcaaccacagatgaaac

SEQ ID NO: 287050 - DNA, 406 bp, Zea mays
gcagtgcctggcccgccgtctgccgcgcggcgtcgtgaaggcgttcggcagcgcgctgtacgagtccgcgggcggcggcgccaacgccgtcagccccgggtacaccaagggcgacggcctcggcgccgaggtcgtgggcacgttcgtgctcgtgtacaccgtcgtctccgccaccgacgccaagcgcaccgccagggactcccacgtccccgcgctggccccgctgcccatcggcttcgccgtattcctggtgcacctcgccaccatccccatcaccggcaccggcatcaaccccgccaggagcctcggcgccgccatcatctacgacaacccgcacgggtggcacggccactggatcttctgggtgggcccgttcgccggagcggcgcttgcggcggtgtaccac

SEQ ID NO: 287051 - DNA, 289 bp, Zea mays
gccgtgcgctcgaacgaactccacacgaaattatccgcgtaaagttggggagcagcgaacccgtagcgcgcgccccggatccctccacggggggcaatggcctcgtcggcgttcctgcccgagctgggcacgcaggtggtggtgcccgtcgcggccgtggtaggcatcgcgttcgcggtgctgcagtgggtgctggtctccaaggtgaagctctcccccgagccgcgccgcggagacggctccgccgggaagagcggcgccggcgccggcgcagcgtagtacctcatcg

SEQ ID NO: 287052 - DNA, 334 bp, Zea mays
ggtacgccgcagtacggtcggaatccgggcgaccaccagccagccgcctttcgaaaccgagcaccagggagcagacgcggtctctggaacccaggttccagcgagcaaaccatctaaccaggcgctgagaattctgtgcggaggaggcggatggcaatggtggcggccgcggaggggagcgggcgcagggacgccgaggcggagctcaacctgccgccagggttccggttccacccaacggatgaggagctcgtggtgtactatctctgcaggaaggtagcgcggcagcaggtgcccgtgcccatcatcgcggaagtggatctttacaagttcg

SEQ ID NO: 287053 - DNA, 472 bp, Zea mays
ggcgagtgacacacgcggcagtgcggcacccttctatcttgcgcgcgtgcggccggccggccatggatccgttcctacttcggcccggaccagctggatgccgccgccgccgtcgacgaggactacctgacgagcctcggcctggtggtcctctcgccggagccagtggcgccgttgcctggcggcgcatttgaggcgtaccagcggcgtgcgccggcgttgctggagcactccctgcagacgatgagccggcggtacagtggagagcacaacatgcaccggaggatgttcagttacctgagacgcgtactcatgacgccggcgccgccgtggtggcggccccagcgttcccggcgcccgcgcgcgagatcgttcccggcttcggggttggcacgtcgcaggcgccgcgaactcgcggttccggaacatcatgcgcgacagctgcggcgggacgcctcagccaggattcgcg

SEQ ID NO: 287054 - DNA, 549 bp, Zea mays
cggacgcgtgggatggatcccacggtggttccgcttgacccagtcacgccggcgaccttcgacaaccagtactacaagaacgtgctggcgcacaaggtcctgttcatctccgacaacacactgctcgacaacccatggacggccggaatggtccacttcaacgccgcagtcgagaaggcatggcaggtcaagttcgccaaggccatggttaagatgggcaaggtccaggtgctcaccggcgacgatggagagatcagggagaagtgcttcgccgtcaacccacactactagtcgtcaagtttagctaattaccccgcgaattatgtttgtttatacgttccatacatcaacattatgtagagtgtttttcgttctcttcaagggtgtgaaatcaaacaagtttatcaagtaacattctttgtgtttcaagatttctacagcagtaggtaccatacatatatcgactttaataccatgtgttggagacttgttctcaaatgctatgaattaagaacaaggcaacacaccagaaaaatattaaatgttgaa

SEQ ID NO: 287055 - DNA, 298 bp, Zea mays
cgcacttgcgcgcgccccacccgacccacaccctgcacgcagcagcaacgagtctccctgggaggagcgagcgagagagcggtatggccggtggcagcatggtgttcgagccccacgcgggcacggtggcgggcggcgacgtcgtgttctgcgcggccatcgtgtgcctgtcgctcctgtccatgatcatcttcgcggcttccggctcctctggcgctggggacttcgaggaatgggtgaagccgctgctgcgcggacgatccaacgggcctgtgttcgtgggctgcagtggctgcgg

SEQ ID NO: 287056 - DNA, 478 bp, Zea mays
ctgcgccggcgcgcctcatcttccaccttaccgtcctcgtctcctccacggccacgatcctacgatgctgcggattcatggatggcgcggaacaggaggcgaagtgctcgccgccgcggctgggctgcagctgctggcggcgcggcctgccgtgcaaatgtacctcaatgaggctgtgttctgctggtaccagcgtctgcacgcgagccgtgcgccggacactgagtacggccgggccaaggttttcttgcacaaccaccacctctgcgccgtggccacgcagctcgttgcgccgccactgctcgtgctgtcgctgcttgcattgtggcgggttcaagggaaggacttctttgagggcttagaggggatgtactggcttgttggatggtctgttgccatgaaggaggccgcattgcttgcggcccggtggatcgtggctgtgtggtcggcggcgacggtgatcacactcatgtgctac

SEQ ID NO: 287057 - DNA, 301 bp, Zea mays
tggaagctcccaagagcttagcatcatggcgttttttaccttgcttggccaaaggagcatgattatatgcttagatgttattagaaatttctccaaacaatgatgtttccttaactcctaactgaacactgagatgcagaaaagagtcccccttttgtactccctgtggtcgaaattaaatggtgttttggacagctatttgacttagcgaaatagaagatgattcaagatcttagggatgtagctggctggtaagtgctagctgcagcgtctagtgcctcacatctctgtttgatcttgc

SEQ ID NO: 287058 - DNA, 410 bp, Zea mays
gcacacagcaatggcgttcacgcggcggcgtccgtgcggcatcctcctcctctccctgctggcggcatccggctcgctgtcgctggccgccaccggcccgggcgacgtggccgtcttctggggccggaacaaggacgagggcacgctgcgcgaggcctgcgacacgggcacctacaccaccgtcatcatctccttcctccgcggcttcggccacggcgccgcctactactcgctcgacctctcgggccacccgctcgcgggcgtcggcgccgacgtcaagcactgccaggccaagggcatcctcgtgctcctctccatcggccggccgcccaacaccaacaccggcggcggcgccggctactcgctcccgtccgcgcgggctgcggctgacctcgccgggtacctgtggg

SEQ ID NO: 287059 - DNA, 415 bp, Zea mays
ggcggtttgaccttctgaccggaggagagagagagagagagagagaggagaatcatagctgctgcgttcgatttgcggagggctggaggggacgcgagacgggacaggacggatcttcgacggagcgttgcccgattcgtcgcagttcccggacaagggaggaaaggcgtgggaagagggaggacgcgcgttggtctccgatccaagagctttgttaacaccagagattaaaagatagcgccgtagcgcaatgaaggcaccatcgctactggttcggtgtttccctggcttgcttcccagcaaggacactagttgtgtgccaattgtgtccgagaaggatctgcagctaccatcactagccgttgaaataattccctcaaagagtgctcacccgtacaaatatgctggagagaag

SEQ ID NO: 287060 - DNA, 324 bp, Zea mays
ctcgacgtcgcgccggcgcgcgagaccgtgcgcggcccgggcacgtggccgcgctcgccagggcgcaggtggactacgtgctcggcaccaaccccacgggcgtcactaccttcgtcggctacggcctccaactaccccacgccgggtgcaccaccgcgccgcgtccatcgtgccgtacaagcacagcaaggagttcatcggctgcacgcagggcttcgaccactggttcggccgccggagctccaaccccaacgtgctcgtcggcgccatcgtcggcgggccggaccggcgggacacgttcacggacaaccgggagaactacat

SEQ ID NO: 287061 - DNA, 775 bp, Zea mays
gacgcacagctgcagaaggaggatcagagcgggcgcggcggccacgtccacgtggaggtcgagctgagcagccgcttcgaggagctcaccgccgacgtcatctcgcacaccgcgttcgggagcagctacaacgaggggaagcgagtcttcctggcacagagggagctgcagcacatcgccttctcaaccattttcaacgtccagatcccagctctcaagtacctcccgaccgagaagaatctcaggacacggaagctggacaggcaggtgagggccatgctcatggacatcatcgaggcccgcctcgccagcaaggacaccgccggcggctacgggaacgacctgctcgggctcatgctggacgcgtgcgcgccgccaccggagcaccatggcgagacggcgccgaccacgctgagcatggacgagatcgtcgacgagtgcaagaccttcttcttcgccggccacgacaccacgtcgcacctgctcacctgggcctccttcctgttgagcacgcacccggagtggcagcacaggctacgggacgaggtccggcggcagtgcggacgacgacgaggtccccaccggcgacgcgctcaacaggctgaagcttgtcaacatgttcctcctggagaccctgcggctgtacggcccggtgtccctgatccagagggaggcgggctcagatctcgacctcggcggcatcacgggtatccgagggcgcgatcatgaccattccgatgggcacaatccaccgcgacaaggaggtctggggtga

SEQ ID NO: 287062 - DNA, 418 bp, Zea mays
cagtacggtcggaattccgggtcgaaccccgtccgggacctggcggacgcgtggggccaagaaggtggtgctgaagctggacctgcacgacaactgggacaagcaataggtgctcaaggcagtctccactctccacggtatcgactccatcgcggtggacatgaaggagtccaagctgacggtggtcgggctggcggaccccgtcgacgtcgtgggcaggctgcgcaaggtcggctccgcgccatcgtctccgtcgggccggccacggaggagaaaaagaaagacggcgacaagaaggaggccggcgacaagaagggcgacgacaagaagcccccgccgcccccggtgtacccgtacccgtacccgtggcacgcgtacgccgccgcgcagtaccagtaccagtaccacccccggccgt

SEQ ID NO: 287063 - DNA, 317 bp, Zea mays
cacagagacacgtcggagagatacaccggcacacaaacacacacactgcacgctcaggcctgccgcctgcgcacacgctgcgatcgaaatggttggtgccagcgctagaccatctgcaggccgggacgggggcccggagacggcgctcccgaagctgcagctgctgccatgttggcttgacggagcggtagtgaagctcgtcgcggccgatggcgacggtgacgacctcctcgccggttcagcgtcgtcagggaagcggcggccgacggcgcaggctgccgctggccttgcgcgcggcgtgaaggcgttgctgagcg

SEQ ID NO: 287064 - DNA, 343 bp, Zea mays
tccatgtcccccgggctggacctgtcgggcctgttcggcgagggcaggcgccgccgcgagaagcggttcatgacgacggcgtccccggagcgggcggtggagcggctcgcgcaggccggcgcgaggctcggctacttcatggtggggaagaacggggccgagcgcctgccgctgggcgtcctgccgggcctcgtggccatgtcgatggagatgtcggaggtgtcgccggagctgatgctggtggacctgaggctgagagggcggccacggcgacgaggacgaggcgttcgggtgggaggagctccgggtggagctgggggacgtggtaacagcatggcacgtg

SEQ ID NO: 287065 - DNA, 342 bp, Zea mays
  unsure (1)..(342): unsure at all n locations
catgattataatctangacaggatgaagctgatcgggtctcagtacgagcacttattgctttatttcttatcctttcatggggtgtgatcattgtccaatgcttcacggggtctgatatattgaggtggcgatcattttatgcaacacatgatatggcatggagagctcattacagggaagtgttcgaccatggaatccgagaagctttgtgctgcctaggacgtgcaagatatctaactgtgattggatgaagatgaggtgtattctgttgcaagactccttggtgattgggttgcatatcgtgcttctgggacaggacatttggagctcttagcagggct

SEQ ID NO: 287066 - DNA, 485 bp, Zea mays
tttctaatctgcattggaaggcatgttgttggtaagcattgtcgatgctctggtagaatatatcttgagttacaaatgcgagcttcagttttcacgcaacttcatgaaagcttagctttatagcgcagttcagtgttaattatttaattttgtaggcaataaaaatgcatttcttatcctttatggtagacatttctgtcctttgctactatctaactgaatagctgatatacaatgttttcattggtcgattaatattctatccacttgaatcacaatcactcccataaagaaaatttcttttccgtaattgaagttaatgaacaatacaaccagggaattgttttgcatccattgcatgtcatttttaggtaccaaagtaaacaagctctggacagattcagtttcagtttcagtgatcctgtttgcaacatccaagcatcctgtaatcacctgtatagcagttacacctgttcatgtacatg

SEQ ID NO: 287067 - DNA, 628 bp, Zea mays
attagggtcccgcaagatctggtcgtcaccggaggcccctgcacgctctacaagtgggtgcgagaggatagactggcagctttgaaggctaaggacaagaagcatggggcagaatctgcaactcctgaacccaactctgaggttctcttcctgtgcagctacgaaggatgtgggaagacattttttgatgcaggggctcttaggaagcatgctcacgtccatggggagaggcaatatatctgtcactatgagaactgtggcaagaaattcttagatagttctaagttgaagagacattttcttattcatacaggagaaaagaattttgtgtgcccacatgaaggttgtgggaaggctttttcgttggattttaatttaaaggcacacatgaaaacacattctgcagataactatcatgtgtgccagtacccagaatgtggccgaagatttacacaagaatcaaaactaagagctcatatcagggcacaacatgagaaagctgtttgcctgcagaatccaggtgcttcggctatgaaccatagtgcaattggagaacagcatcagccccctaagccagcaaaggtctcagcaacgcctccagctccctcagctgagcgcccttacgtct

SEQ ID NO: 287068 - DNA, 329 bp, Zea mays
atcgagcagctgctacctctccgatccgaggcctgagcgagcgagctgagctgagctgaggactcagcctatataatatctagactagagtacaccacaacgacgaggcacatatatatacacgcggcggcggcgggcagatccatcttggtatacacgtaatatatacacacgcacacgatgggcagcgccggcgtgcgctggcgagagcaagctggagagcccgctgctgggcgcgtcgtcgacgggccacggcgaggcggtgatcttctcgggccacctcggcacgctcgagctcgccgccgcctcgctcggcaacaccggcatcc

SEQ ID NO: 287069 - DNA, 339 bp, Zea mays
cttcgctggccctggctacttgcggcaactcccatctccacgcgctctcccatccgagatctcaaccgcctcgccggcgagcgactgacgggcggacggtcccgccggctatggggaactgctgctccgatgaggtgagccacgccggcgctcatcccgtcggctccgccaccgccaaagccgcctccgcagcctccgccgcggccgatcgctttctccgctcccgtggtgccggcgcgtccacgcagatcgagttatctctctctgcatcaaatttgggtgatcaagaatattttcccaagagtaaacccatggttgttgtgtattccaaaaagagag

SEQ ID NO: 287070 - DNA, 595 bp, Zea mays
gccgccctttttttttttttttaacgcagaatattgtactggtatagactccccttgacactaaggttcaccttaagctcacaacattttacacggttaataaagagcagggtgagggaggccgtgtggcagcaactgctgacaatgaataaacccccttcaacggggggaaaaatcagaacaaataatacacacatttttacaatgttaactatggcactcttcaacagtaaaaaaatactaatcacgattttcccccaacccaatcgcaacaaccctaccaatagcccatctcatcaagcttgatcattgttttcttacatcggtggctgaaggaagcttggctgggtagctagacagatcaatatcaagcaattctgtgaggtcgtagagccctccaggaggatcaactttgtccttgattggggttgtcattgtttcttcctgatctgcctggttggatgatacacttgacgacactggactgtttgaggccgccacggtgatgccagccaactctacaccctgcccacttgtggcggtgctccccgagggatactttgtttgtgcactgtctccctcattgtgattgtag

SEQ ID NO: 287071 - DNA, 354 bp, Zea mays
cgccgagccaagcaatacacagtagtgagcaatagtaggcagcgcagcaggatacatagcagttagcaccacagcgagcagctgcccgtacgcacgcttgatggcgatggcgatggcgagcttcgtcgctcagctcaaggacatgttcctcggcctcgtcgaccgcgtcaccggctgccgcggctgtggcggagacaagcaggacgtgccggaggcaaccaagttagcaagcctccagcccgttgagatcaggtcgagagacccgttgtgggcggaggatccgtggctggggccaattgattgctaatactgccagacaagctgcacgagactgcaacgtatgtgtgcgttcag

SEQ ID NO: 287072 - DNA, 466 bp, Zea mays
ctccttctatggtgagaaacttccagaagcttcctaaactgcaggccctgaagctggaaggctgcaaattcatggccaatggactaaaagccattgggacctcttgtgtttctttaagggagctaagtcttagcaagtcatctggagtgacagatacagaactctcttttgttgtgtcaaggctaaagaacctgctgaagctggacattacctgttgtcgcagtattactgatgtttcactagcggccataaccagttcatgcacttccctcatctctctgaggatggagtcttgtagccatgtttccagtggagcactccaactgattgggaagcactgttctcacttggaagagttggaccttactgatagtgatttggatgatgaaggattgaaagctcttgccagatgtagcgactttcgagcctaaaaattggcatttgcttgaagataagtgatgaaggt

SEQ ID NO: 287073 - DNA, 611 bp, Zea mays
tgttaagcctggcatttatgttacatacaacggtgacttttttgactggccatttttagacaagagggctgcacaccatggaataaaaatgaatgaggagattggtttccaatgtgacaataaccagggcgagtgtcgggctaaattttcttgccatcttgactgttttgcttgggtgaagcgagacagttaccttccacaaggaagccaaggtctaaagcacacttgcaggctgttacaaaagccaagctacgttacgatcctctggaggttaatccagaagatatggttcgctttgcaatggagcagccacagacaatggcttcgtattctgtatcagacgatgttgcaacatactatctatacatgacttatgtccatcctttcatcttttctcttgcaaccataatacctatgttacctgatgaggtactgtggaaaggaagtgggacactttgtgaaattctgctaatggttcaggcattcaaggctggaggcacacaactatgaatagtgcatcttctaaaatctctcactaaatcagctagctcttctcactaaatcagccagctcttctgcttgtcccatcgtcatccagatacttatttggg

SEQ ID NO: 287074 - DNA, 431 bp, Zea mays
ctcctgcctcgttgccggagccggagccgacggggcggggcggatcgacaccgccgccgagtacatgcccacctacgaggacaaggacggcgactggatgctcgtcggagacgtccccttcaagatgttcgtggactcgtgcaagaggatccgcctcatgaagagctccgaggccgtcaacctatctccgaggacatcatcccggcagtgattgttgttggtgtggacgccatatgccctacgcggcttatctctccgaattagttcacagagtgtgtgctggaagaggcttggctgctcaggtcctccatgcacacgtcatacaccgtacgtagggtgagggttcagtctgctgctgtgtgttctgtacaggccacaccacacacgcccccatggaaaactttttcagtttcgagtgcccctccctctcg

SEQ ID NO: 287075 - DNA, 352 bp, Zea mays
taccctcccttcccactccctccccctctttctcgctcgcctcccacttgcgggcgtctcgctgaactggttgcgccgtaccagctgcgctccgtctccacagaaactgcttccaagtctctagctctctgcgggtgcatctgcggttgtatttgtaaagatgggttgctgctttatgttcggaaagaaagctaagcaggccgttgaaggcgatgaagatctacatagcgtcaaggtgttttcttacaacgacttgaggaaggctacacaagatttcagtgacgcaaacaagattggcgagggcggtttcggttctgtcttccggggagtgcttaaagatgggacactagtg

SEQ ID NO: 287076 - DNA, 340 bp, Zea mays
cgggcaagcgcgtggaccaggccgtgtacggcggcgtcgggcacgcgttccaggtgctccacaactgccacctgtcccagccgcggacgcaggagatgctcgcgcacatcaaggccttcgtcagcgccaggtagcaggcgcctccgccgcagcagccgcctcctccattcgtcgttcgtccctaacaaacagacactcgccatgttaattaatccactacctaatcctcatccaatcgaagagtagatgccgtgtaagcaaccagaaccagccttgtgcagtactgtatcagtagtgtgtgacttggagcagaaacgtccaatgcccacccgggttgttg

SEQ ID NO: 287077 - DNA, 240 bp, Zea mays
gagccggtgacgctctccgtcggcggcttcggctccggctactcgctcccgtccacgcaggcggcgctggacctgttcgactacctctggaacgccttcctcggcgggtcgaagccaggcgtgcgccgccccttcggcgacgcgtggctcgacggcgtcgacctgttcctggagcgcggctcgcccgccgaccgctacgacgtgctggcgctcgagctcgccaagcacaacatccgcggc

SEQ ID NO: 287078 - DNA, 557 bp, Zea mays
atcacaagcaagcgccaaccatcgagcagaaagaagatcgtcgagatcgagcataagccatggcggcctctgtttctgcctcttgccttattggcctgtcgtcgttggcggtggtgctggtggcgctggcgtcggcggcgtcggcgcagctgtcgtcgacgttctacgacaggtcatgccccaacgcgctgtccaccatcaggagcggcgtgaactccgcggtgaggcaggagcctcgcgtgggggcgtcgctgctcaggctccatttccacgactgctttgtccggggctgcgacgcgtcccttctgctgaacgacacgtcaggggagcagagccagggcccgaatctaactctgaacccgaggggcttcgttgtcgtgaacagcatcaaggcgcaggtggagtccgtgtgcccggggatcgtctcctgcgccgacatactcgccgtggccgcccgcgacggagtcgtagcgctcggcgggccttcgtggacagttctactagggccaagggactctaccgcttcattcccaggccagacaagcgacctcccacct

SEQ ID NO: 287079 - DNA, 467 bp, Zea mays
gtgcaagaccgcaatgcagcttcagatatgaactgcttctgcttctgcatcgatctgctgcttgcaggttgtgtcggtgaccttcatcaaaggaggaggcggactttcaatgtcatcccagaatccgtcaccatgggcggcaccttgaggagcatgacgaacgatggcatgtcctatctcgtgagaagaatcagagaggtgatacaaggacaagccgccgtgagccgctgcgccgctacggtggacttgatggaggagaggatgaggccgtacccggccaccgtgaacgacgaggccatgtactcccacgccaaggcggtggcggagagcatgctgggcgaggccagcgtgatgctgtgcccccagttcatggcggcggaggacttcggcttctacgcgcaggagtcccggcggccttcttcagcgtcggcgtccgcgacgaggcgacggggaaggtccaccacgtg

SEQ ID NO: 287080 - DNA, 665 bp, Zea mays
  unsure (1)..(665): unsure at all n locations
ctcgagccgccgtatgggatatcgtgcgctctcactctcaggaccgaagccatcaagaacaacctcgagctggtgctgctcacaacaccatctacgccagcggacaggatggaggagataacacgagcttcacgaggattcgtctatctcgcgagcgtcaatggagttacaggtccacgcgcaaacgtgaacacacgtgtccagtctctcattcaggaggttaaacaggtcactgacatacccgtggctgtcgggtttggcatatcgaacctgagcatgtanagcagattgcagagtggggtgcagatggtgtgatcattggtagcgcaatggtgagacagttaggcgaacagcctctcccaaggaaggattgaagaggctagagaaatacgccaggagcatgaagaacgcgctaccatgccagtgaactagtcgtattgacgcgatataggctgtgttagcaagcacgttggagaacaatgttgcagaagtagcacaattaataatgatccattcggcaaggttgcttttttacaaattgcaacaataagttatcaatataaaatcaacgattcctttgtttaaaaaaaaggaagaaatgttacatcattgcatgatgcttcgattcaaaaaaaaaaaaaaagggcggccgctcgcgatctaga

SEQ ID NO: 287081 - DNA, 443 bp, Zea mays
  unsure (1)..(443): unsure at all n locations
tggggatgttggttttgaccgtatagtttgacattttttctcctgttcttttctttattagggcttattaagactaatttagaaactttaaaagggatttacatatttctaagagaaattagtttattttttctgggtaagattagaatctactggaagaacagtgttctcaaactagaccttagataaaaaaaaagtggagtgaataaaagatcctgtgtttcataacgaacggcacgaattgaaaagggcagcgacgagtttcctgtactgcacgacgccatggctgccctgcccctcacatgtcgattgcacgtggaaaacgatgggcacgtgttcgagccacccgcaagtcgcgccgtggctggttccatcatgcatgaattattagtactagcactagcaggaacacaacaaatctattntccacatgcttgatagcg

SEQ ID NO: 287082 - DNA, 639 bp, Zea mays
cctgctgcccctcctgctcctgttcctgctcctgctgcagctccttctcttatcccagctcctgctcctgtttctggggacgccttggcctcggctgatggcaatgcgttctggacggtgtgcccctactgctgccatgtgtatcaataccagcgtgcgctggtgagggcgcgcgctcaggtgccagagcgcgggttgccggcgagcgttcgaggccacagagatcccgaacgcgccgcctattgtgcccggcacagacatgtactactgcgcgtggggcttcttccccatgggtttccctaaggcagctgatttgagcaccaactggaggccattttgccccatgtttcctgggaattctgaatctccgctgcagccagcacctgcggtcactgtgaatgttgatgtacagaatcttgagaataatggcggcactgatgtacaaaatgttgagagtaatggcattgacgacaattcaacgccagcacgtgtgcagcccccaggtaagagtggtgacattgaccgtgcagcaggtccatctagaggaaggatgaagaagacaacagcccgcaagaaagttggtgctgtatctaagaagcacagttccagtggcgtggacagtggcattgagccatctat

SEQ ID NO: 287083 - DNA, 499 bp, Zea mays
cggacgcgtggacgagctccgcctccgctccgcgccagacggagcgcccagccgctgcgacgtccgccaccacgtccccgccgtcgtcttctccaccggcggctacacgggcaacgtgtaccacgagttcaacgacggcatcatcccgctctacatcaccgcgcgccactataacaagaaggtggtcttcgtcatgctcgagtaccacgactggtggatgaccaagtacggccacatcgttgagcagctctccgactacccgcccatcgatttcaccaacgaccgccgcacgcactgcttccccgaggccgtggttgggcttcgcatccacgacgagcttgctatcgacgccgcgcggatgccagccaaccagacgatccaggatttccgtctgatgctcgatgacgctcaccgtggtcgcatccagacgatcatcgaggaggagaagaaggaagctgctgctgcgaggagacaggaacatcgcggaagcaagaggagc

SEQ ID NO: 287084 - DNA, 293 bp, Zea mays
gcgagccacaccgcccgcacaccccaccggccggccacataggccccgacggcgactcgtagatgacggccgggcagcttctgcgcaccgagccatcagcccagccccagcgggtgcgccacagcaccccgccggcggcactccaagcagacatcgtgccgtcgtacccgccgcccgagtcggacggtgacgagtcgtgggtctggtcccagatcaaggcggaggcgcggcgcgacgcggccgcgagcaccggcgctggactccttcctctacgcgacggtgactgtcgcacg

SEQ ID NO: 287085 - DNA, 475 bp, Zea mays
aatacttcatgtggtgcacctatgatgtacacttctatgcctcctttgctcttttggatctgtttcctaagattgaattgagcattcaacgtgattttgctagagctgttttgcgggaagataacagaagagtcagatttcttgctgatggtacctggggtattcgtaaagtaatcggtgctgtcgcccatgatcttggagcacatgatccttggcatgaattgaatgcttacaacatacatgacacaagtagatggaaagatcttaatcccaagttctgtgcttcagatttacagggattttgctgcaacaggtgacaagtcatttggcaaggatgtctggcctgcagtctgtactgctatggaatacatggaacaattcgatcatgatggtgatggtatgattgacaatgatggatttcctgatcaaacttacgatgcttggacagttcaaggagtaagtgcatattgtggtt

SEQ ID NO: 287086 - DNA, 452 bp, Zea mays
cccacgcgtccgcccttttcccctcccgcgcctctgcctccctcgtcgtcttctaccggcacgtcgcacagcggagcatggagatggacccgccgccgccgccacccctgcccgccgaccgccgccgccgcttcggcgactacctgctcgcgctggaggaggagcgacgcaagatccaggtgttccagcgcgagctgcccctctgcctcgacctcgtcacacagactatcgaggggatgaggagtcacatggacagcgtcgtcgtcggcagcgaggagacggtgagcgagagcatccacggcggccccgtgctggaggagttcatgccgctcaagcccacaaccctctcgtcgtcctcctcccagccccattaccaggacgagcacgacagcgcacactaccttgaacaccgccgtggttccgccgccacggccaacgacgtcgtcgatgcc

SEQ ID NO: 287087 - DNA, 318 bp, Zea mays
ggctcgaagtctcttccactctcccttgacctgtctccttcacctgctgattgctgtgccgctccgctccgctccggtggcatctgcatctgcatctccatccctcgatctgtcttctctcagggtggaataagcgtgacaatggaggctccacccgtggcgctgttcgacaccctcaaggcagccaaaccgttcttcttgttggctggtcccaacgtgattgaatcggaggagcacgtcctgaagatggccaaacacatcaaagcaattacgaccaagcttggaattccactcgtgttcaagtccagctttgataaa

SEQ ID NO: 287088 - DNA, 295 bp, Zea mays
cggacgcgtgggcggacgcgtgggcgcctccaaagcaccagacatccgtccatgacgacgtcgtccagcgaggtcacggtgtgctcgcacctgttcacggtgagaggctacacccacacaaggggcatcggcgtcggcaggtccatcgagtcgcaggcgttcgacgcggccggccaccgctggtccgtcgtgttctacccggacggcgacgaccaggacgcgaggggccacatctctatcttcgtcaggctcatcggcagcggcggcgccggagacgtcacggtgctctacggct

SEQ ID NO: 287089 - DNA, 299 bp, Zea mays
ctcgagcgctcgagccgcccgtccagtgttcaccggtggaaaactcaagggctacaagaagatcctggtactctacaccaactacgggaagcagcggaagccggagaagacaaactgggtgatgcatcagtaccacctagggtccgatgaggaggagaaggacggcgagctcgtcgtctccaaggtgttctaccagacgcagccgaggcagtgcggcagcggttcggcgacggctaaggacgccatcccgctcgctgccaacgcagcgactgaccaccaccaccaccaccaccatgacg

SEQ ID NO: 287090 - DNA, 476 bp, Zea mays
ccaacgtcaacctcatcgtcgtcgggcaccagctcaggatcccgctgccctgcacatgcgacccggtggacggcgccgacgtcatgcacttcgcctacagcgtcgccaagggggacgacccgcccggcatcgccgccaggttcggggtcaccgagaccacgctgctgagtgtgaataagatcaccgaccccaagaccagcctgcagcaggggcagatcctggatgtccccctccctgtgtgcaagtcatcggtcggcaacgcctcggctgactacaacctgctcgtcccgaacggcacctacgtgctcaccgccgacgactgcatccagtgcagctgcagcgcgagcaactacgagcatctacactgcactccggtgaaacgcggaaggtgcccggcggtgccgccgtgcagtggaggcctgacgctcgggcacgtcaacggcaccggttgcgcgtccaggatgtgcgcttacagc

SEQ ID NO: 287091 - DNA, 304 bp, Zea mays
  unsure (1)..(304): unsure at all n locations
gcaaaacattgattgcttgtgcccagtctgcaacttgtgtcaatgtgaagataattctttaaaaattgtatctgttaactcgggctatgcttcacttgtaaccaatttgatgccttatgggacagtgtcgtgcattctgatatttgaaccaaattacattgtagctattgaagacagcagaaacctgcatatctgggaaatggttgatgggtggagtgagatatctgagcagtatatgattcctagtttgggtaacatgggtcctatactggagcttacaaggatgccanaaaacacatctctc

SEQ ID NO: 287092 - DNA, 478 bp, Zea mays
agcatcttcatgacgtcggccatggagggttgagcgtcgtcacccatggtgatgaacctggacgtagcggtggacggggaggtgggggctggtggtggtggtgcggctgcggtggctgaagggctgggggtggtgctaaaggatcgccgacttcctgataccaggttgtcaagggcgtcgggcccgagggtaggaggaccgcggctccgaagatcgtaaccgccgtccgtgttgccgaccgggttatgcccccaggaacggcgttcttcgtcaacgggttatgccccctgttgccgactagagagagagagatagatggagaatgagataaatctgtcttgtcccatcacgagtgcttacagggggtatataaggccataggtcagggctactaaaggaaagccactaatcactcttattcccttctaaatctagcccagactaataaaggaaagccatcaatcactaatcactctta

SEQ ID NO: 287093 - DNA, 289 bp, Zea mays
cggctcgagggagatcgagacagctagcaagcaacaagcaagctgaaatggagcgctactcttgctgccgttgggtgcctgcgtgttctatccttgccctgtgcctcggtgggcagggcgcgaggtgccagctgacgtcggatttctacgacagcacctgccctcagctgtactacgtcgtgcagcagcacgtgttcgacgccatgagagaggagatgacgatgggcgcctccctcctcaggctgcatttccacgactgctttgtcaatgggtgtgacgcttcgatcct

SEQ ID NO: 287094 - DNA, 295 bp, Zea mays
cagaagagtggcccggggccgggccggccgtgtgcccctgcgctggtcgagaagatgcgtgccggtggcggccccgccagccgggcgccgcggcgccgtcgtccatggcgagagcgtccgccggccagccggggtgaattgcgttcgtgccggtgtgatcgactgcgtgagtgagactggggtgctgtgtgtcagtgtgtgtgtgtgttcaggtctatccgagagcaagccctgcctgaccgcctgacgccgcgccggcgagcggcgaaccggccggccagccggagcagtacca

SEQ ID NO: 287095 - DNA, 427 bp, Zea mays
caggggcaccgtccgccgcttcctccgcaacgtcttcggctgcttcgggcgcggccacgcctcgtcctcctcgcgctcccacgccgtgcctgagctcaacgacgacgcgttcagccatgggtccaggagccggagcaccagctggaggctcgaggacgggcatgccgacgccacggtgcagagttgacggacgaaccaactcctgctgcctgcctccctgtctctagtacagcacgctgcaagaagcgaatcttgttgcttttgtttcataattcattcgtcttgtattgtgtttaccatactgctgctcctactcctgcctgctacttagaagaaaaagaggaaggggaaggggaaggcgaaggcgaaggaggaattggaggatttgtagaacaggtcgattgcaaggagaccatgcaagggtttt

SEQ ID NO: 287096 - DNA, 580 bp, Zea mays
aacaagtttggggctggcccaaccctcagcatacaacaggcacgaaacctcgcgccgccaccaaatctccagcgagcgaagaggcggctccggcgagtgcgcggcaaggacgaaggcgtcggggccagtggcgagaggaagagcatgctgaagttcctgtccaaggtggtggtggagtactgccctctggacccgcggaaggcggcggcagtggagctcctcgcgcagtgcaacggccgcaaggccaaggactccaacccggcttgctcggtcgagctccgccgcctcccctccccagctccgtccacggacctcaagtcgcagccgactctcccgcctccgagggtcctcgtgacctacttcaccggagctgaagaggccatcgtctttgctgagggagctacggcgcagggcatccgggaccagatcgtcgcacggggccggctcatcgatacggagaagatgttccgcgacggcggggagaagtggcccgtcgtcatccccgaggaggagcttggcatgtcgttccctggcatcaagccaaagaaagccgaggataagccccaggccgagtgaccaa

SEQ ID NO: 287097 - DNA, 628 bp, Zea mays
  unsure (1)..(628): unsure at all n locations
aaagatgaagattttggaagacaaaactgacaagttggacaagtcactggctgagcttagtgacatgggatttctttctanaaatgagtctgaggagattttgagccagtcgaagaaaaagaagggattcggtggtacagatgatgaaataagcttggatgatataaggctatatgccaaagatgtggttgagatggagatagcaaggcattccgcagatggccttggtatggtggattatgcattgggatctggtggtgctaaagtggtaagtcactcagagcctttcatgcatggcaagaactatttacctggtcgcagcaatgtgcacacaacagcccaaaagatgctggagccaagttttgggcagccaggagagtgttttgcagtgaaaggaagtagtgggtttgtgaaggtgaagctaagaacagcaataattcctgaagccgtcactctagaacatgttgacaagagtgtggcctatgatagatcaagagcttccaatgattttcaggtccgtggatggtagcaaggagcacatgatgattcagaaaaggattcagatgtgatgtctactttaggagagtctcttatgacttgacaagagcaatctcagactgtcaactag

SEQ ID NO: 287098 - DNA, 441 bp, Zea mays
gtttttggaacaatagcagctataagtcgaaaagtagtggccgatgagcttcaagtttttgacccagaaggggccatgtgcctcgctgttcaccaaacacattacatgccaaagcgatggcgtggtaaagagaacagcgaacttgtacgaagagaatttgagacattatttccgtatactataatcatgctacttgaagagatggcctccattttcatcactccttacttgcttatttctgaggtaccaaagcgagttgatgacattctgcgcttcatctcagacttcacaatatatgtagacggagtgggagatgtatgcagtctaagcttgtttgactttcaaaaacatggaaatagaaactatgggtcaccattcaatgctcttaaaggtctcaggagctcccaagggaagatggagaaatcattcttaagtttccag

SEQ ID NO: 287099 - DNA, 313 bp, Zea mays
gacaagttctcgaaacatctgcgaagatgagagccaaatggagaaagaagcgcgttcgccgtctcaagcgtaagacaagaaaggtcagggccagatccaaataaacgctcggcccctccatctcagttctttcatgatgaagccttccgttgaataaccaaacacgacatgatgagttttattcgaaacatcatttctttctcaatcgggattgtccaagagctcgcctagcgatttgatcttctttatcgccagtcgaaaaatcgtttatctggagctgtcacatctttcagcaattcattccagtcgccga

SEQ ID NO: 287100 - DNA, 529 bp, Zea mays
ggataacaataacatactaacaacaacagactgtgacggtggactgccagcaagccctcgtttgagattcaatagagaaggttcattacttgcagttaccacaagtgataatggaataaaaatacttgccaacactgatggacaacgcttgcttaggatgcttgagagtagagcatttgagggctctagaggacctcctcaacaaataaacaccaagcctccaattgtcgcccttggtcctgtttcaaatgtcagcagtcctatagcagtaaatgccgagcgacctgatcggatcttgcctgcagtgtcgacaagtggcttgaactccagatgttaagccaagaataacagatgaatccgaaaaggtcaaaacctggaagttggctgacattgttgataatggacatcttcgagccctgcatttgacagacacagacactaatccaagcaaaattgtccgtttgttatatacaaataatggggttgcactcttggctcttggctccaatgctgttcataagttgtggaa

SEQ ID NO: 287101 - DNA, 449 bp, Zea mays
tgcatcttcttggttagtgtaatgtgcaacctggttagtgtttcaagtaggtgcaagaggaggtgaacagataatgaagatttcaagtaaatggcgagttgaatccattgaacagataataagaatagttttaagtgtcattaatagtgcaagctactacactaggattttcaacatgatgaacagatcggccgatggatgctatgtggctgtatccagccaagggaacttctatttgatgtgggagcttgggcaggtctggtagaaccaccaattacctggtccttggtctacatgcctttgttgttatgtttgtatggacctttgtctctgtgtgcagccgttttggcaaccccacatcaaggtggtggcatggagattctgaacatggggtggagagcggacagtggactttttgctgttgcgcggtggtgggctcttcctcagta

SEQ ID NO: 287102 - DNA, 308 bp, Zea mays
cagatagccagatcacattcttatcccacatcatccatcaactcggagcgcagatttttgggaactcgaagcagagccagacacagcacagcccaggagaagcgagcgcagacgatggcggcggtgtggtggtggtgggcgccgctgccggcgtggctgacctccagtgcgttatggttcctcgtcgtcaacgcggtcgtcgccgcggtcgccgtcctttcctccaggccgctgccgctgcaatcgccccgctgcggtgccggggcctcgctcacgcggagggcctcgtccgcggtgctgcagcgcct

SEQ ID NO: 287103 - DNA, 312 bp, Zea mays
caggcacgatatggaacacgaagcatggtggcactagcagcgaaattggaaggtgaggtaacattctatgaaaggtacttggagaacagtttgtggaaggagaatctcatacagttccagatggagaaggcacaataggacttgagagacgcttaagaacactcgcaaagactggtcgattgcttattatttggctatcactttatctttaaagtgtatagcaaggcatatacaagagcagtgtataatatggctactattaattacccttttgtgcagatgtacagtaatgtttatccagataccacaaga

SEQ ID NO: 287104 - DNA, 290 bp, Zea mays
gcagggaagcatcagcagcgccgccgccatcactgctacgctgccggcgctagagccctaaaccctagctagggctaggccatccatggccgcctctccccagactctgtcagctcccccgcccgccgccgcggccgtcccgaacctcggcggcaagcgcaagaggcaacccaagggcaagaagaataagaagaacaaactcgcgcgctccgaccaggatgactccgtccgccgccgccgcaacaagccgagcgccaagttcctcaagctgctccgcaagcgggcccgcg

SEQ ID NO: 287105 - DNA, 457 bp, Zea mays
aacttgacaagctaaaagaacaaagggcagaagagcaggcaaagatgttacttgaagcttttaacaaagaccgtgcttctttaataaactctcttcaaaatgccactcaaacaactacacctgtcccccctgctgctccggatgcacggacacaagaaatgataaacgagaaactgaaaaaggcagaagaactaggtgagaatgggatggttgatgaagcccaaaaattgttggatgaggcggaagctctgaagaagctggccacccgaccacaggctgttccagactctacaaaaatgagcgctcatgtccagataactgaccaaaagctgcgcctgtgtgacatatgtggagcattcttgagcgtatatgacaggtaaattcttgtttagctgctggatagatttatactactaggaccatggatatcgcagtgtttggtttgttttacagttct

SEQ ID NO: 287106 - DNA, 254 bp, Zea mays
gtctgcgcccctgcggcgcgcatggcgccacgactgaccgtggccttgggcggcgctcgggcatgagtacctggcgctcggtggcctcgcgtcgcgttactcacccaccggcatcgcgccacggccgcgctcgtctcaacaggagccgatggccactctcgcgccacggccacatatcctcctcggcttgacaaggccgcagcccatagcggttcgtgcctgcggcgccttctcccgctcccgccacgcgccag

SEQ ID NO: 287107 - DNA, 349 bp, Zea mays
ccgcaacctgcaggtcgtcgacgccgacaacagcctcgtcgccgccgcccccctccgcctcgtcgccgaccgcccgggctgctacgacatccagggcggctacaacaccgcctgcgggaactacttctactacggagggcccggcaggaacgtgcactgcccgtgatctgtctctgtctctgttggtagccgacgcccgacgacgtacgaccatgagtatacgtgcacagatagacatacagagagtgaagaagaacgtacggatcaccgaccctgccggagttgcatcgtcgtcgctcatcaaccgagcggacatggatcgtataatagctacactgctagtcatata

SEQ ID NO: 287108 - DNA, 298 bp, Zea mays
ggccgccagcgccgcaggccgcagcgttgatggccgccgcacctggcgcaccagaggagcgactcggcgtcctcactcctcaatgcctccgggagaagaccggaatctccgagcccaggtcggaggtgcacagggacggaaactaccaccgagcggtgaacgtgtggatctacagcgagagcaccggagctgctgctgcagcgccgagctgattgcgaggaattgtggcctgggcagtgagacatcattagcgccggccacatctccgccggcgattcctcgcactctcggcagaggg

SEQ ID NO: 287109 - DNA, 415 bp, Zea mays
ctcctcctcctgctgctctggcctctggagtcgccgcccctcccaagaacaccaggctctaatttaatttaagcggagggaagtttgatcgatcagtctgacactgccctcgttaagttatagcaaatgcctcccgcttcgacggatgcaaacaacgcgatccagaagctgtacgaggtctgcagagcctcactgtccgagaaggggcctctatctcctcctgactctctcgacaacgtccgtgctgcgttagacatggttaccccgtccgacgtcggccttgaacgcgaggctggagctgtgcgtgcttggaggagcccacgggcggccctgggtcggaagaggattttccattccagcccagccatcagatatcgccatatatacgagtgcgcaactatctcgattgggatgt

SEQ ID NO: 287110 - DNA, 361 bp, Zea mays
atgagctcacagtcacatgcacaggccggtgctatatataatcatatcagagagttagattgtgacaggtggttttagctagctaaggtacgtacaaccagtgccagggcaattatcatcaattaagaaaaagagagatcagagagaggaacttactaatcatgagtgatctgaagtactcatcctacacgaggctgggcctgcggcggtggcgacggacggcgaggggagtccggctcagcccgacgcgcatcaccgtgcgcaggctccgtgccaagctgtggacgctgctggggctcctgggccgttgcgtgcgcaacctacggctactcacgaagggccggatggcagcggcagccgg

SEQ ID NO: 287111 - DNA, 330 bp, Zea mays
  unsure (1)..(330): unsure at all n locations
gcaaaatctcttatatcggaagggctttaagaatatattctagaatagtggtaaaaacatgcactgaagatcgtgcaaaatcaaatgtgtcaagttgtgaccagatggagtgtacatgtttaacataaataacttaattgttgtaactgatttgtggccccgtcgtgcttcctctgtaactatgagttgctcctaccaggaggaattgacgatgctccatgcctgaaccttgcaacttgttgtatctataatgtttgtctctagcagtgtactctatacctattctatgtgttcgttctttatgatcttctctanaagattcactctata

SEQ ID NO: 287112 - DNA, 316 bp, Zea mays
cggctcgacacgctcgcctctcgatcttcttcaagcccggtgaaaagttttcggaaattgtgggaagtccatactacatggctcctgaagtcttgaacacgaactatggacctgagatacacatatggagcgctggtgttatcttgtacactttgttatgtggcgttcctccgttttgggctgagactgaacaacgagttgcacaagctattctccggggaaatatacactttaagcgagaaccctggcccaatgtttctgacaatgctagagatcctgttcggcagatgcttcaacctgatccacaactcacgct

SEQ ID NO: 287113 - DNA, 615 bp, Zea mays
atcaaatagtaaaggggctagtaggagctgggagaggaatgagcttccacaagatcaccgctactctacatctgagggtgccatttcgtatctcaacagcccagatatcagcttccagaaccaccatatctatgctaccgatgctgcaagatctctagtgttgatgaatacatgagagtctcagtcgctgagcctattggttctttattattgtcagacggaatgtcaggtcaacataatagtggtggttccacctcctcttgctctgatggaagcgaatatgatattgtacctagatcatacacatcaacgccccgcaacttcccaagtcgtcgatcattcctgtcgaagccaatccaccctgtttcatttccagaacatgcactagaagcccaggaaactcgaagtcatgttgcaagcgcaagctccaacaatcctctgtgctctgaatacaagggaacaggagaactttgcttcccggactacggtagcggccgtcatggggagtcaggaaattggagtgctgcaacagcatggatcttactgatctatcagaacaacctgaagctggacaagctggactactgcgtcctaacaatgtaatgcagaaaacaa

SEQ ID NO: 287114 - DNA, 560 bp, Zea mays
  unsure (1)..(560): unsure at all n locations
ggaacggcggcggcggcgcggccaggccgacctctacgtggcgtcctacttctacgacagggcctcgcaggtcgggatcatcggcggcgacgcgcccaacgggaggagcaccccggccgcgttcgccgacgccgcgctcaaggtctgctcgctgagcgttgccgatgccgaggccgcgttccccgatgcctgggacgccgagtacctctgcatggaccttgtgtacgagtacacgctgctcgtcgatggcttcggtttggagccgaccaaggagttcacgctggtgacaaaggtgaagtacggagaatactacgtcgacgcagcatggccgctaggcgatgcgatagaacccttgtcgtcccagaagctgaaccaaatcgcgtgaccagtaataataatgcttaatggagtggtaaaaagacgacgtgctacagttgatgtaatggcgtaataaatggatgtatatatctatgtcncttggctacgcctgctaatatatatcagagaggaagatcgatgagaggaggaaattgtaagttctgcaataattagcatgttca

SEQ ID NO: 287115 - DNA, 491 bp, Zea mays
aagagaggcagcgcagggtgcaagaagctgtccctcactccctcccctgtgcttctgctagctaggtgcctgcggaggagagatacggatacgatggccggcggtggcatcgtgaacacgggcggtggcaaggactaccccggcaagctcaccctcttcgtgttgctcacctgcatcgtcgccgccaccggcggtctcatcttcggatatgacatcggtatctcaggcggcgtgacgtccatgaacccgttcctggagaagttcttcccggaggtgtaccggaagaagcaggaggccaagacgaaccagtactgcaagtacgacaaccagctgctgcagaccttcacctcctccctctacctggccgcgctggtcgcctcgttcttcgccgccaccgtcacccgcgccgtcggccgcaagtggtccatgctcgtcggcggcctcaccttcctcgtcggcgccgccctcaacggcgccgcccagaacatcgc

SEQ ID NO: 287116 - DNA, 288 bp, Zea mays
cgctgctcgcttcgcagcaacgccccaatcctccgtcctcggaaccaaacgacgccgtccggccgtccggccactcgtgcggatggcggagatcgccggcgacgaggccccaacacctcctaccatctccggcgaagtatccggagacccgcatacttctgccggcagcagcaacaagccaccgttgcgcgcgacgaagcccggagtgaagcgcctcattctcaccgcctccgtcctcctctcctttctcgtcgggctgccctcctgctgaagtccaccgagatccat

SEQ ID NO: 287117 - DNA, 280 bp, Zea mays
cgcacttctgcctgtctatctaaaggcctattaccgggacaatggtttgatgcagtatgctcgctctgtgcttgtgatacacaacattgctcatcagggtcgtggccctgtagacgacttcgtcaattttgacttgcctgaacactacatcgaccacttcaaactgtatgacaacattggtggggatcacagcaacgtttttgctgcggggctgaagacggcagaccgcgtggtgaccgttagcaatggctacatgtgggagctgaagacttcggaaggc

SEQ ID NO: 287118 - DNA, 382 bp, Zea mays
tgaagatgtcatcgattttgatctattggaagacttgatatgctatattgatgagaactgtcctcagggtgctattcttgtttttcttcctggagttgcagagattgacttgttgattgatagattatctgctttagttagatttggaggggcatcatctgattggatccttcctttacattcactgcttggaccctctgatcaaaggaaagtgttccagtctccaccagataacttccgcaaggttattattgccacagacatagcagagaccagcattacaattgatgatgtagtatatgtagttgatactggaaagcaccaggagaaccgttataatccacaacaagataatgtcaagcatagtagaagattggatttc

SEQ ID NO: 287119 - DNA, 301 bp, Zea mays
cggcactcgtgcccaccatgccgtcgcaccgccgccgccgctggtgaacggatccgtgcaccccgtacacctgccttggcctcctcccccctcccctcaacctagctccaccactcgcgcccacctccgtccgccggtggcgcaggggaggagccggccatcctcagggtggcgctgggctccggcaagctgcgcatcgaggggtcgctgggctttggcaagcttccgcacgcggcgccagctcaccgaccgcgccgtgctcgtggagcagagctggtggaagctgctggactgtggcgtg

SEQ ID NO: 287120 - DNA, 225 bp, Zea mays
tgacgcttcaggcaaccggtggccgaactacatcgctgttgatttttacatgagaagtgacggtggaggacctcccttggctacggacattgcgaacggtcatatggtgtgcggatgcgacaacatcgcgtattgcaaggcgaattcgacattcgggacctgcgtgatacccccaccgccgccgccgtcaccgcccaaggcatccacccccggcagcagaggctc

SEQ ID NO: 287121 - DNA, 659 bp, Zea mays
tttttctctctctattgtactgttcaaacttgtagatccgcattgctgctgtacaagccctaactaccattgcaataaggtctggtgaaccttataggctgcagatatatgaatttcttcatgctttggctcttggaggtgtgcagtcaaacttttcagaattgcagctaagtaatggggaaaatcaaggtgccagtggtactggtcttggatctttaataagcccaatgcttaaggtcctagatgaaatgtatagaggccaagatgatcttgccagagatattcgccagcatgataacagcaaacaggaatggagtgatgaggaactcaagaaactttatgaaacccatgagaggcttcttgattttgtttccttattctgttttgttccaagggctaaatacttgccccttggtcctaccagtgccaagctaattgagatctaccgcaaccgtcataacataagtgcttctggtggtctaagtgatcctgctgttgccactggaatatctgatcttatgtatgagtccaaagaagtacataaagagaccaatactgtccagtctggtattgatcccgatctggcaatggcctgggcagcaggtttggaagacgatgtttgggcaaacaacgctccagctgtggataaagtaaaggac

SEQ ID NO: 287122 - DNA, 288 bp, Zea mays
ccctcctgcagcgttgccgtccacaggaacaggacgggacgggttgagaaaatttcagcgaaaccatcggcggattacataagccgacagccaccggtcgttgcgtcttgctcatcagaacgctagctaggactaggagaagcttaacctctgcaaccaccgataagagttactactatttacataggagcggcagctgccaccgcgtgcgccggcgatggggtggtgggagaacgccaagagcgtgttcggcgacgccgggaacgtcggctgcttcccgaggatcgg

SEQ ID NO: 287123 - DNA, 341 bp, Zea mays
ggagtgcttccaaatgggatggtcgtcgccgtgaagaagcttcttgacaagatcgatgtcctagaggcgaatttccaaagcgaggttgcttgtctcatagaggtcaagcacaggaacatagtccgatgtctagggtactcatccgagacgcaacatgtgagggcaccctaccaaggaagatttgtctgggcagacctgcgccaaaggttgttttgcttcgaatacctaagcaaagggagccttgccgattatctgaccggggcatcttttgcacttcagtggagtgtgcgctaccaaataatcaaggggatttgtgagggtgtgggttatcttcaccagca

SEQ ID NO: 287124 - DNA, 310 bp, Zea mays
gacctgatgaagctggacgaaggcgagccctggctccatccagcctcaagcgcttggaattgaaatttgaaacgcccgcgatcagatcccagccgttcaactagtttgaaataggagcatcctagcctttcgctatgcttctttttttttcttccctccttaactcttctttttctaacctctgttgtacttatttggacaaagcagagttttgtaaattacagcggagcccgccctaccagtgcttattgaacaggcaattttggagtgtaatttctaaaaaaaaaaaaaaaaaaaaaccacgcgtccg

SEQ ID NO: 287125 - DNA, 393 bp, Zea mays
atcctctacaattggccttgtatgaagtatctatcttgatatatagcaatgcctaattgggctggaaggtaagtttttcttcatgtttgagttttcatcttccgatgaaagacaaacgagatgccattgctgtcaagatcaataggtgtaaaatttgtaaatcagattcattaccgcaacaaatatttcacttcctttcccttgccaaaatcccttatcctcggtgctagcactgtgaatatggtgtatttatctttctcgtttttactggatcatgcatgcttccattccattacctgtccattggagcaaaattcttgatttatttatttaattaataatatggattattgaagggtcaaaaggagtacatgattatacaatcagaaatga

SEQ ID NO: 287126 - DNA, 264 bp, Zea mays
agtatcttgtgtactgtgctactgctcggaaggcgacaacatgccagaatctttccagttagctgaagcaatatgcaaacttctaggtcatggccctgagaaattccatggaaatgggtcaaatgggtggatcgttcccttgtcatggaaatcagtttatggaccaccacctgatatgtctatcttttagtgttgaattatgatctggtgaagttgccatcacggaaaatgctgagtagaatcgaggatgttgaactcttaatt

SEQ ID NO: 287127 - DNA, 456 bp, Zea mays
cattatcagcgaggagctgagactcaaggatattgagtttgtggagaaggctcttgagaaccagaagaagaagacccgcatgggcggccagagtcttgagctgaagaaggctaagatcgaacaggagatgattgagaaggtcctggcttggcttcaggatggcaaggaggtccgcaagggcaactggacccccaaggagattgaggtcatcaaccctctcttcctgctgacggccaagcctgtcgtctaccttgtcaacttgtctgagaaggattatatcagaaagaagaacaagtacctccccaaggttgccgagtggatcaaggagcacgccgagggcgaccccatcattcccatctcagtctcgttccaggagcgtctgacccgctacgagaccgaggaggaggccaaggaagagcagaagaacgttggcgccgagtccgccctgcccaagct

SEQ ID NO: 287128 - DNA, 455 bp, Zea mays
ccaaaatggtgggtctggatatggttcaggatcagggtcagggtcggggtcaagtacatacggtcagggagggtattattcgggttatggagaatcttctaatgctggtggtactggtggaggtgggggtggaggacaagctggaggttatgggaattccaatgctcaaggatctggtagtggcaccggttctggctctagctatgctaacaggtattgggatggatcaagtgaaggaggtgcaaatgctaatggcaatggtggtggcacaggaaatagtcaaaatggtggcggcggcggtggttcaggtgaggggtctggatatggcaatgcctacccatgaacttgatatcagttaatctaatgttgggcccaccatctttccttgtttgaagttgtaggattattattttccttgcctctttgttgtgcttttggtagaaccgaattaataa

SEQ ID NO: 287129 - DNA, 365 bp, Zea mays
tgtcgctgaagaaagccagcaggcttaaggattgcatgcacatatgctagctgctagcttggtagtgtgacagaccataaaggtgtgagttccacacaggtacctcaaagctagctagtagctgccatggcagcactcaagctgaggctgagacatttgtgctgcgcggttgtgcttattgcgttgtccatctcttgttgcagaggacaaggaggaggaggtgctgctggtgcagcagggggcgcggcagtgtggtgctgtggttccagggacacaggatgccatccagatcgtgtcacaggctgctctctgctttgacaatagacaggtgataaaccgggtgctccagcaatgggcaacaatgt

SEQ ID NO: 287130 - DNA, 339 bp, Zea mays
ctgcaggccatttcttcccaccagtgtgccgttgtcgctgaagccccagcccccagtagtgtgattcgttcataaaggtgtgagatcatccacacaactagctagctcgaagctagtagctgctgccatggtagtagcactgaggctgggacacttgtgctgcgcggttgtgcttgcgttgtccatctcctggtgcagaggacaaggaggaggaggaggaggtgctgctggtgcaggtggtgctggtgcagcagggggcgcggcaggtggtgctgtggttccagggacacaggatgccatccagatcgtgtcacaggctgctctctgctttgacaatag

SEQ ID NO: 287131 - DNA, 403 bp, Zea mays
gcgtttcaaacggtaaggaagccaccccgctgtgaggttacttaaggcacggtgacccgacgcgagcaaagctccaagacccgcacgctaacgccctccctgccgctccgccgtttcgcgtgggagtcgtttcgaaaaagtctgtttcgcgagcggtgaggactgaggagtgtggaggcctaaaaccatggcggcgagcatcgggatcatggacggcgcctacttcgtcggcaggggcgagatcctgcactggatcaatgcgaccctccagctctccctcgccaaggtcgaggaggcagcgtctggcgcagtgcagtgccagctcatggatatggttcaccctggagtggtgcccatgcataaggtcaatttcgatgcgaagacagaatatgacatgatccag

SEQ ID NO: 287132 - DNA, 280 bp, Zea mays
aacattctcggcaactaccagcagcaaaacatgcacatcctctacgacattgggcaggagacattgtcgtttgctccggccaaatgcagcgcgctctgatcagagctttacagaactgaaaatacgcgcgcgcaattgcataaggatcgtgattttttttaactatatattatgtaaaaatggcgtgttgctcgggttgggttgtaaagcaggagatatttttccttctcggatccatgtgctttattctttatttttagggtcttctcggacgcgtggg

SEQ ID NO: 287133 - DNA, 521 bp, Zea mays
tctctctctagtctctctcctctgcgcctctgcctctatgtcttctcgtcctcccaggacctcaagtccctctcctgcctgatgctcagtccccacccacccacccgggtccggtgccgcgctctgcaggcggaggagaccagcgacgggcggacgtgcttcatgaggagtgtgccgtgagacaactctgcgagtcaagaacaactggtgaggcaaagcgaagaaagccgagaggggagaccagatggcaactgattcctcagctctgcaggcttcctctgagtcgattgcgcaaaagatggggttcttcagagtccctgaccttcttgtaaaactgagcgccaaatgtttgagcgaactggatgtggttcgcagcccaacatcgcccttggacctcaagtttttcactggccttggcaacaaatcacccggatcgtcctcctccgttgacgccagccagaaccagaagatcttgcttggtgacagggttgggcttggacttgtggattccctcgctgatg

SEQ ID NO: 287134 - DNA, 424 bp, Zea mays
cctcccacgcacattcttggcagctactctactcaatggcgctgtcctcctccggccacccggcgacgacccgcctgatcttctcgcttctgctcgtgggctcggcggcgggcttgccggagcgggcggccatcgacagggtcaaccggcgaggcccttccctcggcctcgtcatgtcctacgtcgacgaggccaccgcgctgcaggcctccggctacttccagccttggcgtgccctccctttcgttgacctctacggacggcggtatcacatcggcagcattcggggcgtgaacgtgatatacgcactgacagggcaacgcaggctgaacgccgccgtcactgtacagacgctgatcgacgtcttcagcgtgtccggcattgttcactacggcacggcagggagctgcaacgactccatctc

SEQ ID NO: 287135 - DNA, 473 bp, Zea mays
tccctttcccatccgcgcgtccctactcctccccttccctcctcaacgacgcgagaagacgcaatcctgggagctccgaaccctagctcctaatttgagccccggtgtcatcgattcctcaggagcccgccgcgattcggctcccgtagcagcatagggctccaccgctccccagctgcatcagcatcgacggcggcggcgcgccgccgcgactacgctcgaggaagcacctagtctcggcgggttctcgttcttggaggccttccataaggcggtttcgtggtgtccgagcccggatctacggcgatctgcaagcggaaggcgatagatgaggcgattcagtggtaacccccaatccggtgggtttccggctggcagaggcggaaaggttcgggccttcggcgggtgatcagatttctccgtgcggcgcgcggcttgtgtctaccgcaacggtgtaggactggagcgcagga

SEQ ID NO: 287136 - DNA, 336 bp, Zea mays
acaaaatcgccgattagtccccttcgctccgacaaagtccagatatacccttcccatttctcgtggcgcccacgggccacggccacgccgtagatctcctcctcgtcgcagggctccggcggtctcgccggcggtgagctgaagcgatggagctctggagcaagctgcgaaacctggatgcctacccgaaagtgaacgaggacttctacagccgcaccctctccggcggcctcatcaccatcctctccgccctcgccatcctcctcctcttcttcttcgagatccgactttatctatattctgccacggaaagtaagctcactgttgatacctcga

SEQ ID NO: 287137 - DNA, 394 bp, Zea mays
gagatggagaaatgtcacaaaacacaggatgaagacgactccaggaatccacccatgcctctcagtgactcagtggcacaaacgacagcctagtcagccttcagcgatggaggcctccacagaagctactaggatggcctccagcttatgacctctcactgccgaccgcaccttcctcagaatatgttgcttcatcaccgccctctcagcagactggagtttcttgcacatgttcaatccctggatgtacctcgacaccgcgccgccgaaaggatcaccggctttctcaagggccacgagcttctcgacgatctgagaagcgagcattctctcgatacagggtttggttccaacctccgtgatgtccaccagaaattgcatggctagatccttg

SEQ ID NO: 287138 - DNA, 426 bp, Zea mays
acgagttgggctgggatctttcggagaagtgtatagaggtgaatggcatgaaacagaagtcgcagtcaagaaattcttgcaacaagatatttcaagtgatgctctggaagaatttagaactgaggtgggaataatgagaagactgcgtcatcctaatgttgttctttttatgggtgctgtcactcgtgttcctcatctttctatcgtgactgaatttctgccaaggggtagtttatttcggttaatccataggcccaataaccagttggatcaaaaaggcgtttaaggatggcacttgatgtggcacgtggtatgaattatttacacaattgcaccccagtcatagttcaccgagacttgaaatctccaaatctacttgttgacaaaaattgggttgtgaaggtctgtgattttggtttatcacgt

SEQ ID NO: 287139 - DNA, 323 bp, Zea mays
cccacgcgtccgacacgcgtccgcggaccgtgggccagtgacgcgcacacaggagattaatatggcgagcagcggcggcgacgagaaggcggctgcggtggtgcagaacaagaaggtggtgctaaggaggtacgtcaccggcctccccaccgaagaggatatggagatcgtcgtggacactatcgttctgcgcgtgccggcggggcagaccgccgtcctagtcaagaacctctacctgtcctgcgacccctggatgcgtgaccgcatgagcaagcacgatgacggcgaccccaccgtcctcgccccggactttgtgatcggag

SEQ ID NO: 287140 - DNA, 398 bp, Zea mays
cccacgcgtccgcgcgcacgcaaggtccaaagaagcaggccatccgggacgcgcgacgcgtcctgcgttccattccaccctcctcctcctccgtctccgatcctcgccttcaactccactccctcgctctctcgggccttcttccctagcggcgacgacggggtgatcactgattcactgccgcccgcgccaggttggccagaactagtgggcgccgccgccaagcatcgtagcgaccatggaggtggtctcttgcagccactcctgcccggcattacatcaaacaccagcaagcacatggaggcttcggggcagtgctcttggtcttggtcttgggcatgccaggccttcccggaccagaagatacacagttgcgtgtgtaggaaccacaagtggag

SEQ ID NO: 287141 - DNA, 322 bp, Zea mays
agaaaaacgcattccgcagacgcgcggcgagggagtaggacgcgacggcgggtgccgaggcccgcagcacggggaagctaccggcttgcgtacctgggcgggctcgcgctgtgctgtcgctccatgtcggtcgccggcgagagcggcggggatccggcggcggcacgacgccggtgcggatctctccaacaagggccccgacagcactccaatgttgaaagaggctgtggaaatgtctacagatgaagaatcggatggcgttgttatatgccatccgaatggtaaccctgatggatgtgacgaagccattagtggcagtcat

SEQ ID NO: 287142 - DNA, 533 bp, Zea mays
cggacgcgtgggcgagacgcgtggggttctctcgtccagaggcctggccagctagctagcactgacactgacccgagaccctgcagctagcagctgatcgatccatatccatccatggccatgggctgctgctacggtgatttcttcgacaaggccaagccttacctcgccatgatctccctgcagttcggctatgccggcatgaacgtcatcaccaaggtctccctcaaccacggcatgagccactacgtgctcgtcgtctaccgccacgccttcgccaccgtctctattgcaccgtttgctctcatccttgagaggaaggtgaggcccaacatgacgtggtccgtcttcctccagatcttcgtgttggcactgctcgggcctgtgatagaccagaacttctactacgccggcctcaagttcaccgggccgaccttcgcgtgcgccatgagcaacatccttcctgccatgaccttcgtcatggccgtgattttcaggatggagaaggtggacctgaagaaggtgcggtgcca

SEQ ID NO: 287143 - DNA, 356 bp, Zea mays
  unsure (1)..(356): unsure at all n locations
ctgctagcttgatctctcctagtcctagctcattcgcttcacctgttcgtcgctcttaanttgcttgctcgatccctggacgtagctgctgctgcaatggactccggtggcgcgtcgtcactggccttggctgcgctgctcctcgtgagctgcgccacggcggctgtggcgaccaagtacaccgtcggggacgcgtccggctggacgaccaccggcgactacgccacctgggccagcggcaagaagttcaaagtcggcgacagtctcgagtgcaaagacgccggcggggcgcacacggtggacgaggtgagcgcggcggactacgccgcctgctcctccagcaacgcgctcagcac

SEQ ID NO: 287144 - DNA, 346 bp, Zea mays
caagtatactgattttcttgatgaccaggttgtttttactggctttgcctatggtggtctgtcagaattatctgaagctgagtatacttcatgctcaatgggttcgaccatagcaggagaaattggcacttttggctacagaccttctgtcttgatggacatgcttgctggcaagagagccgaagttggtacaaaagtgggggcctacatgagaacattttctggcgattgctcaccttcagatcttgagacagctttgcagcttgtttatcaactatttacaacaaatgtggagccaagggaggaagaagtacaaatagtgatgcaaatggcagaggaagctatc

SEQ ID NO: 287145 - DNA, 596 bp, Zea mays
cggacgcgtgggcagtagtgccaacattaaatggctgcgtcctcgtacttccttcttgctgcttttctagctgtaacagcttctcatgccaccgcttccgatcctagcccgctccaggatttctgtgttgctgatattcactctcctgtgaaggtgaatggagttgtttgtaaggatcctatggcggtgaccccagatgacttcttcaaagcagccaatcttgataaagctagagacaccatgaagagtaaggtggggtccaatgtcactttgatcaacgtcatccagctccctggcctcaacacggaacacaactcttcatggtgtctccctggcacgtatcgactacgcgccattgggcgagaacccgccgcacacccacccacgtgccacggagatcctcacggttctcgaggggacactgtacgtcgggtttgtcacctccaacccaaacaagctatttgccaaggtgctcaacaagggcgatgtgttcgtgttcccccaaggtctcatccattttcaattcaacccggtctatgacaagccggccgttgctatcgcggctctcagcagccagaaccctggggttattacca

SEQ ID NO: 287146 - DNA, 305 bp, Zea mays
cagaagcaaacataattaagcagttggtggtcattagcgtactgcacagagtgcctacagaaaagctagagaagtaaacaaaatggctgcgtcctcgtacttccttcttgctgcttttctagcggtggttgcttcccatgccaccgcttccgatcctagcccgctccaggatttctgtgttgcggacatgcactctcctgtgaaggtgaatggatttgtttgcaaggactccatggccgtgaccgcagatgacttcttcaaagcagccaatcttgataaggctagagacaccatgaagagcaagg

SEQ ID NO: 287147 - DNA, 464 bp, Zea mays
ccaaatctccactcccaatcaaccacttgctgcaaagaggaatacgattcagcttagctcagctccaccaccaccaagaacaagatctcgacgaagcagccagacgacaggcaggtagcaccggggtcaacgcggcagacaaacaggctctcccgctcgtcagctagcagccatgagtaccatgaagttttgccgtgaatgcaacaacatcctgtaccccaaggaggaccgggagcagaaggtgctcctctacgcctgccggaactgcgaccaccaggaggtcgcggacaacaactgcgtgtaccggaacgtggtgcaccacagcgccggggagttcacccaggtgctccaggacgtggccggcgaccccacgctgccccgcaccaagtccgtgcgttgctcctcctgcggccacggcgaggccgtcttcttccaggccactgcgagaggggaggaagggatga

SEQ ID NO: 287148 - DNA, 440 bp, Zea mays
cagacggacgcacacaaagcgaaatggagagagagagagagagagagagagagagagagagggaggaagggggcagtccagagcaggagagagaaattcgaggggaataaaaagggagagaaataaagtgagggaggggagagtcccatttccccaagtacacgagggagagagagagcagaggagcacgctacgctacgtgacgcgagagaagagagagggaggtcgagggagggaggcagcaggggttgcagcagaggccagaagcattagaagcggcagtcgtaaccaagtggcatcagtagatagagccagccatctatctatccatctatctagctctacaggtataaatcctcacgcatcggtaggagggcgagaggggggccgactggggacgggagaggccgcctgccagcaggcccactaacgagttgggg

SEQ ID NO: 287149 - DNA, 432 bp, Zea mays
ccagtccaatgcaatgcaacattcatcttgtaccctgcgcttatttccggtgcagtttttcagcggcgaggagctccggcaggagctgagcagcgtcgacacgctgaccacgcagcggctggacgagctgtcggcgctgttcctggaggactacaggagcggccggctggagccccgcggatggccgaccgaccgggtgtacgcggcgtaccaggcgtccaaggcgctcgtctccgcctacgccagggtcctcgccagggacaaccccgcgctgcgggtcaactgcgtgcacccgggctacgtccagacggagatgaaccgcaacaccggggacctcacggccgcggaaggcgccagggtctccgtcgccgtcgctctcgccgaccagggcggcgtcaccggcgcttacttcgatcgcactcagatagcttc

SEQ ID NO: 287150 - DNA, 629 bp, Zea mays
gcaatccaaccgaacgaaccgacctaggtcgtcgtcggctcgtcccctccgcaggaccggttcgccgtctcgtcccgatctcgccgcctgcccgccgcgccctattaccgccatggaggcgctgtggaagcaggcctccaggctcaaggaccaggtctctcggcagggtgtgttcaagcagtttggctacgggaattctgataatgcgtttacagatgagtcagaggttaaactgcatcagagattggaaaagctttacttatcgactcgtgctgctaaacattttcaaagggacattgttcggggcgtggagggctatatagtcacaggatctaaacaagtcgaaatagggaataaattgtctgatgacagccagaaatacggtgttggaaacacatgtacaagtggtgatactttgtccaaagctgctacatatttcggaaaggcacgctcacagatggaaaaggagcgtggcaatatgttgaaagcatttggcacacaggtggcagagccactgcgggcgatggttatgggtgcacctttagaggatgccagacatatggcccagagatatgacagaacgaggcaagaagctgaagcacaggctgtcgaagtatcaagacggcaga

SEQ ID NO: 287151 - DNA, 350 bp, Zea mays
ggacagggagtcatctggctttctgctgttctacataagtatggagtgcaggcaggcattgggtaataaggtgaaagatgccggagaccatatcagaatttggcggtgcttcaggacacgcaccacaccaggggtgaaaacaacggggagaagggggaaaaaaaaggtccaatggtgcttgctttgctgcttccccgcccgtgtaccacccccaccacaaggctctcgaacgatgctgtgggcaacgactggcgtgcagcattgcgaagagcgtcttcaaccgaagcgaggcgggtatgttttccgtcgtccatttgtggcggacaacatggaggccaaagatccatcca

SEQ ID NO: 287152 - DNA, 377 bp, Zea mays
  unsure (1)..(377): unsure at all n locations
cctgggcgtgccgccgctgcggcggccgacacgggcgcggcagcgngggccgcggcgtcggtcctggccgtggcttgctctgccgtcttcttcatcctcgtcgccggtggcgtcgtgcagtaggcgctgccgtcgacgtggtggctcgctgctggttcggggtcaggcggagcgctgttcgatcgttttcgccttagttagtagtagaagtagcagtcatgggctgtgttgattgtgtccctgtctcccacctggtgggcgttgtgatcttgtgccattgcttattctttttgtaccatactgcattgttcgacgtataccttgtgttcaggcgtgtgttgtatgaataaagacgatggatctcgttcgtcatcgtc

SEQ ID NO: 287153 - DNA, 464 bp, Zea mays
ggcacttgttgcattccttataagggatactatggtcctgcaatatcagccctgagtgcaactccaaatttcgttcctacagtccgtagttctgaagacagcaagagcagccataaaactggccggatcgctggggttgcagttggtgtttcagtttttgcattgatcgcactggccggaatcttcttgtggtgtcagaaaaggagaaagctattgttagagctagaagaattgtataccatagttggaaggccaaatgtcttcagttacagtgagcttaggtcagctacagagaacttttgttctagtaacctacttggtgaaggaggatatggatcagtttacaagggtaagttgagtgatggaaaagtggtggcagtgaagcagctctctcagtcctctaaccagggaaagatgcagtttgcggcagaaatcgaaaccatttcccgagtgcagcaccgtaa

SEQ ID NO: 287154 - DNA, 303 bp, Zea mays
acaggcgagcgcggaccgagcagagcctcgagatcccgcccgccatttgccctccggccgacgcggactcgatcgcttcaccggcagcgaggacgatgggttccgtcgcggaggactccaccgcggcagggcagcagcggcgtcggtagtgttccgctccaagctacccgacatcgagatcccgcggcacctctcgctgcaggcctactgcttcgagcggctccccgaggtgtcctcccgcccctgcctcatcgacgggcagacgggcgccgtgcacacctacgccgatgtggaccgcctgtc

SEQ ID NO: 287155 - DNA, 383 bp, Zea mays
cgctgctggtcaacgtatacccgtacttcgcctactcgagcagcggcgggcaggtagcgctcgggtacgcgctgctgtcggcggacgccggcgcggcgtcgtcggtcacggacgccggggtggtctacaccaacatgttcgacgcgatcgtgggcgcgacgcacgccgcggtggagaaggccggggtccaggggctggagctggtggtgtcggagaccggctggccgtcggccggcggcgagggcgccaccgtggagaacgcggcggcgtacaacaacaacgtggtgcggcacgtcgacggcggcacccctcggcggcccgggaaggccctggagacctacctgttcgccatgttcaacgagaacggcaaggccgagggcgtg

SEQ ID NO: 287156 - DNA, 351 bp, Zea mays
tggatagggatggatttcgtcagattaacttaagcatcaggaactgtagtggccctttatggttccgccagatgatgtattcacgcacacatcaatctgttgcgccagacgagtcgtcggaaggtaaaattatccatcgaagggggcgcttccaggttacatcagatagtatttctgaaaaggtagctacatcatcctgcaacagcagcaggataaatctaccaattgatgcagcacgttcaagtcccaagttgtctgcaattcttccaactttgcaattcttgatgaagcagaatactatgcaaaaggaagtactcagtaggctgatttcttcaattgaggaaacatctg

SEQ ID NO: 287157 - DNA, 570 bp, Zea mays
ccgagctcttcttcccggccaccacctacggctgcgacccgcgggaccgggactgcggcatgggcctcgccttcagggccttcgtccacccgccccgcctcgcgcactccatgaccgacgacgagctcttctggcgggcctccctcgtgcctagggccgaggagttcccgttccagcgggtgcccaaggtcgccttcctcttcatggcgcgcggccccatccccttcgcgccgctctgggacaagttcttccgcggacaccaggggctctactccgtctacgtccacaccgtgccggactacaagctcaatgtgtccaagagctccgctttctacggcagacagatccccagcgaggaggtgtcctggggatcaattaccttggtggacgctgagaagcgcctgctggccaatgccttgctggatttctcgaatgagcgcttcgtgctgctctcagagagctcgcattcccgtgttcaacttcccgacggtctacgagtacctcatcaattcggcgcacagtttcgtgagtcctacaacatcgacacccctcagtgtgctggccggtaca

SEQ ID NO: 287158 - DNA, 352 bp, Zea mays
tgaagccgtcagcgtcgacccgcctcacgcttgttcgcccgttctccctcttcccggagttaggtacgacgacgtgccgccgctaggtacctccgcgcgaagacgacgcgccgctggtaggtaggccgtaggcgcgcacccgcagccgtagagctgcccaggcccggccgactcccgatctgcatctctcggaccgcccgatgccctgcgggctgcgtccagcgtaacctcgcctcccagcgccagggtaaaccggccccagcgacggacgcgcctcaagggagcccaacagaccggcagctgaaacccttgccaactggctcctgttttgccgggttgaggagaaccatgc

SEQ ID NO: 287159 - DNA, 590 bp, Zea mays
cccacgcgtccgtctcgcgtctcgcctgtctcctctagtagcacaagaccacgagggattaagcgatgacaacctctaagctcgctgtcctcactctgtttgccctgctcggctccgtgtcatgccagtccggtggctactacttctacccaaccccgcagcaaccatctccaacacccagccctccttctagtccgcaactcatggtcggatactacaaggacaagtgtgccgcttacgtggatgttgaagctattgtcaagaagcacgtcaaggccaccgatgctggcatgcaggccgggcttgtccgtctcttcttccacgactgcttcgtccgtggatgcgacggctccgtcctcctcgacacgttcagcaacgacaccagcctgaccccggagaagttcggcgtgcccaacttccccagcctgcggggcttcgaggtgatcgacgcggccaaagccgagatcgaggcggcgtgcccgggcaaggtctcgtgcgcggacatcgtcgccttcgccgcccgcgacgcgtcctacttcctcagcgccggcggcatcagcttcgccatgcccgcgggccgctacgacggg

SEQ ID NO: 287160 - DNA, 488 bp, Zea mays
aactccttacaagcgaggaaaatgtggaacgtgatgctgttcataaagcactcatgtcccttatacgagaagatgttaaaaattctttacaacctttatttaagcatgtggagcaaggatcagagattcgtgagaagattatttgttttcttcgagacaaggtttttcctcttaaagcagagctactgaaacctcaagcagaaatggagagatttataacggatttggtaaagaaaagtgtgcaagatgtaactggttcagaatttgaactattcatggggtttctgcgaactttgagcatatttggggattctgctcctagagagtcctttcaagaactaattgaaattattcaagcacaggctgatctcaactcacaattcaatgtttcggacattgaccacattgaaaggtggatttcatgcatgtatatggctcttcctatcttcatgagaggagcatcagcaagcaagttcctcaattacttc

SEQ ID NO: 287161 - DNA, 614 bp, Zea mays
tgatgagagagcttttgagctatttcagatgatggaaagctgtggagtaaaaagggacacggcttcatggaatgcactcattgctggttcggtgcataatggtcattctgatagagccctgagaatattctggcagatgcaatcactcttggtgagaccagacttcattacaatattaagtatcattccagcttttgcgaacctagctggattttggaaagtacgggagatccacgcctgcatttatcacaacaatttagaaatggatggcaaaatagcaaatgcactcatcaatgcctattcaaaatctggtgaccttgctggtgcttgtgctgtttttgataggcactcatcaagggacattatttcttggaattgtataattcttgcacacttgctgcatggttctccaagtgaagcactggatcgcttttgtgagatgaaacaagaaggcgtgctgccagatcatacaactttgactgccgtaatcaaggcctatggcctccagggaaaggtatctgaggcgaaacggatatttcacaatatgacccacgatcacaacattactccagatttagatcattacacagctatagttgatctccttggccgct

SEQ ID NO: 287162 - DNA, 341 bp, Zea mays
ggaagcttaagaggttgccggtggaggaagatgctgcaaataaggccaacggtgaggaagagaagacgctagatgagtacgaggctttcctcagggatttggagctggacccagggatgcggtccggggtgaatctgtacaagaatgaggactataggtctgagatggcatcaacagttggtgatgatatccctacggtgccaatcgaggagctgattgaggacttgacccttggtgacgatgaggaggatgtaggggaagaagctgtggaagggaacactcatactggaatggtggagtgagcaatactgtctactatttgtttccgaattgctgactgg

SEQ ID NO: 287163 - DNA, 360 bp, Zea mays
cggacgcgtgggcttcagttctgagcgatcaacatcaccatcgacttgaactcaagcgactacagcaaacttgctgagactgcagctgatcatggggtcgatgacatggttggcggccgtgctggcagcactcgtcgtcgccgcctcctcatcggtggcatcacacgcctcgccgccggggaaacttgaggtcggtttctacgagcactcgtgcccacaggccgaggacatcgtgcgcaacgccgtccgccgcggcatagcccgcgagcccggcgtcggcgcggggctcatccgcatgcacttccacgactgcttcgtccggggctgcgacggctccatcctcatcaactccacgccggg

SEQ ID NO: 287164 - DNA, 305 bp, Zea mays
gtcgtgtcctgcagtggctcacattcgacgagacacagtagagggtagctagcagtggtgctcctggcctgtgacgatggtttcctcgtcgtcgtctccttccgccaccgccgccgccgtggtcctggcggtggccctgatgacgacgacgtgcttccatggcgcgacggcgcactgtgcgaggactactatgacagcacctgcccggacgcctacgacatcgtgaagcaggtgctcgtcgacgcagtgcagtcggacacccgcatcttcgccagcctcatccgcctgcacttccacgactgctt

SEQ ID NO: 287165 - DNA, 353 bp, Zea mays
ggtcaggcatgctggacaacatcgacctgaacgacgcctacgcccggtacgccaagcccggcggctggaacgaccctgacatgctggaggtcgggaacggaggcatggcgtacaacgagtacgtcgtgcacttcagcctctgggccatcgccaaggctcccctggtcatcggctgcgacgtgacgagagtctccaatgagacgctcggaatcctctccaacgcggaggtcatcgcgatcagccaagatcggctgggtgtccaatgacagaaagtgagcaagtacggcaacgatctcgaggtatgggacaggcagctctcggggcacaggaaggcggtgctgctgctcaaccgg

SEQ ID NO: 287166 - DNA, 353 bp, Zea mays
ctccaaagcagcaaccccagcagctttagctcctcctcatcgcagccgcatcgccgtcccctactcttccagcgaccaactgctgtctctccgtcgacggcatatccgtcgcggcaggtgcagggagggacccgggagatgagtctggggctgctcaacacagagcgcaaccaccttctctccccgatgccgccgagccctcgcgatgccgccgtgtcgtcgctgctgaggtcacccagggcgtcctgcggctcctgcagccagagccccaagccgaagcccaccaagatggcgcacggcggcctggagcgctcgctcagcttcaagaactgggaggcggacgacagccgggg

SEQ ID NO: 287167 - DNA, 439 bp, Zea mays
caacggtgtcagcggcctccctacgccaccgtcctcatccgccgccgacgtgcactacaccgccacggtcgtcctcggtcgcgaccgcgcccttcgttctcatccagcgccacggtctagggcttgagcactcctccatcgtctccttgcctcttctccatcatctccttgcctcttctctcctctgtgttctccctctggtcacggtcttgtttgctcttttgtttttcattcaaatcgtcgtgcatccagatctggcgtctatttttgggccaaatgctgtatttcttgcagaaaccaggcatccagctctagcgtgttctgagcacaaaagttgtacaggcatgacctattgatcaggaaagttgtagcagacacgttcgtcgtcgcgaacatcgtcgagccgtgtggctactgcgctggccggtgagcatcgtca

SEQ ID NO: 287168 - DNA, 216 bp, Zea mays
acggtgtcagcggcctccctacgccaccgtcctcatccgccgccgtcgtccactacaccgccacggtcgtcctcggtcgcgaccgcgcccttcgttctcatccagcgccacggtctaggaaaccaggcatccagatctagcgtgttctgagcaccaaagttgtacaggcatgacctattgatcaggaaagttgtagcagacacgttcgtcgtcgcg

SEQ ID NO: 287169 - DNA, 343 bp, Zea mays
agctaaacatcccaactatgcttatctggagaagacagctatgaagtggatggagagtcttggtcatgaagcacagagacacagtactgttgttgatatcttttgtgctggacagtgtcctgtgagggtccctgttctgctaccattggcaaagtgttctggaggtgtgctcttagctcatgatgactttggagaggcctttggggtcaatttgcaaagggcatcaactagagcagctggttcccatggcttatttgagatcaggtgttcagataacatgtatgttactcaagttattggccctggtgaagacgcttctcctgattctcatgacacgttcaaa

SEQ ID NO: 287170 - DNA, 469 bp, Zea mays
aggctctgctgcaaccagcgcctttcgaccagctccacctcggaggactcctgatgcagagaagtcactttcagcttcttcacataaaacaagcaacatattatgtgatttaaatgtagctgacaacggcagtgctacttctggtgaaccactttcgacagcaatcctgccagcttcttctgaactaccttccgaggttgcttccaaagcagttgatgtgagcggaggactgaaacttgaccttaatttctcatgtggtgatgaggaagatgctatcactgcaagcaatgtgccgtcattgtggaatcaccaacaatttaatggcaactggagtcagccttctttctcatcttcaaagcaacctgcagccagaaactttgacttgaatgacaacatgtcgttcgctgatgtttctgtgcgaggactggacgggccttctgtcaagactccttcaaggccaagggatatg

SEQ ID NO: 287171 - DNA, 325 bp, Zea mays
acttgctaaaccagcggaaacctaaccagctagcagcattagcttttcaacaagcctcgctcgcgcgccgtgaccgatagatggccatcacccacgacgactacgtctccctgtgcctcatggcgctcgcagccgctggaggaggaggagggcacgctgcggctgccagtgccaggacgacgacgatgacgacgcaagagtgcgagctccgcttccggtgctccgtctgcggcaaggccttcgcgtcgcaccaggcgctgggcgggcacaaggccagccaccggaagccgccgccgacgctcgtacaggcggcgtcgtcgtcgtc

SEQ ID NO: 287172 - DNA, 377 bp, Zea mays
  unsure (1)..(377): unsure at all n locations
cccttctcaaactcctgctctagaattcatgaaaggtggctccgagtcagagaagccaaaacaggagggagatggtaaagaaggtgttgatactgtggcccctagagttgaatctctgactataaatgaagatgtaaaagaaaacgagccagaagatgacgagggccttccgatttacctgtatgaacgtctgaagaccacagctgctgatcctgttactgaaattgatgtcacgaggcgagagacctacttatcttcaactgagttcaaagagaagtttgggatgacaaaggaagcatttagcaagcttccgaagtggaagcagaacaggctanaaattgctcttcaacttttttacctgatcatcaacacttcca

SEQ ID NO: 287173 - DNA, 325 bp, Zea mays
gagcgtcttgcgcgttcgatttgaaccacttggcgctgctgccggaccggtcctcacccctcaacccgccgaacttcctcgtcaccgccggcggcgatcgatcgttgccaagtctcccaccatcgcctccacgggaaaaaaaatggcgcaggaggctgcaccggcgaggccggcgggccccaccaggctcgtctacttcgatgatatgggggcactccaccactcatccgccaccgttctctccgtccaccaggtggtccgcggccgggtagcggtggtgctggacgccacggtcttccacccgcagggcggcggccaaccggcg

SEQ ID NO: 287174 - DNA, 474 bp, Zea mays
cggacgcgtgggcggacgcgtgggcaaagggaacgtttgtggcgataagcatggcaacccaaatttgcaggagctggatgttagatactggatgaatccgaatcaagtctaccaaagcggactcaagaacagcaaggttaacctggctgatgccaaagccatctgcctgatggagtgcccaaatccagctgtagatggattgaactatatttgtgattatccagaagggaacatagacctctctgttgatgattggatcaatagggactatgactattatgagtttctcacaccagacatgaagaatagctcacttcaactccagggtccatgctaccctataatatttccaactgtaaatgtctattggagctgccaatttattgcacgtgcatccaatgtttctttgaagcactggcatgagacgggtggtgtcagcattgatgaaaatatcctcattgataaaacagtgca

SEQ ID NO: 287175 - DNA, 366 bp, Zea mays
gcgctggcaatggcgggaccgacgacctgaaggtgctgggcctgtggacgagcccgtttgtgatccgagtccgcatcgtgctcaacctcaagggcctggcgtacgagtacgtggaggacgacctcggcaacaagagcgcgctcctgctcagctccaacccggtgcacaagaccgtgcccgtgctgctccacgcgggtcgccccgtaaacgagtcccagatcatcctgcagtacatcgacgaggtctgggcggggaccgggccggccgtgctgccgcgcgacccctacgagcgcgcggcggcgcggttctgggcggcctacatcgacgacgaggtgaggtccgcgtggctgggcatgctgttcgagt

SEQ ID NO: 287176 - DNA, 494 bp, Zea mays
gtctccctcccacctttcccttccccgccgctctcgcatgcccgcgcaccgagatttcctgcccgctcgctccgctgctctcctcgactcctcctgcgtgcctgccgaccggtccgaggcacgccgcggcggaggctctgccggccgggtcgtcggattcggccttaggttggttggttggttggttgggtcgcgggcatgtccacggcggtggcgcggccggcgcacggcggattccggcggtcggggagcgggaagccggatccggacgaggcggacaggatgatgcggacgccaacgcgtacttggtccaagaagaggaggaggaagagcatggcgatgaagcggcggcgaggagagctgaggaggaggaggaggcggtgtcggaggcctcgtcgatcggggcggcgtcgtccgacagctcctcctccatcggggagaactccgcgtccgacaaggaggaggaggaggaggttgagagcaaggcgcagggg

SEQ ID NO: 287177 - DNA, 410 bp, Zea mays
cgcatgggttccatggacacgaacccctgcctcataaggtgctcgaggttcgggtctggccttgggcggtcggcttcccagagagagggggctaccagaagagcttggcctgtgacgttcagccccattgctgccaccggcagctgaattggcggttttgtgccccccgtttttttgaggtcgggttttgtttgccaattttttggttggtttgatctaatgttcaccgttgtgatcgatatggtatgaactcgctggttaccaactccttgttgattcggagtacttatatatgtctgatcagaagcagcacgtaactgcttactaccttggtatgtaaataaccccgtggtgtttgttgtatgtttctgggaggcaatgaaatgcaaattgaaggaatcagttttttc

SEQ ID NO: 287178 - DNA, 383 bp, Zea mays
gtcagccacggtgctcctgctgctggtccggaggcagccacgcttgcaagatggatctgccagagttacaggttccatttcggggctgagcttatcaaatccgcagacggtagcggctgtggtgaagcagtgctgaaaactctctggcaccatgccggcgctatactctgctgctctctcaaggccttgccagtgttcacgttcgcgaaccagtccgggctcgacatgctggagacgacgctggtggcgctgcaggacatcgcgctggagagagtgttcgacgaccaagggaggaagaacctgtgcgcggactccccggcgtcatggagcaggggttcgcgtgcgtccccggcgggatgtgcgtgtcgggcctaggccggccg

SEQ ID NO: 287179 - DNA, 485 bp, Zea mays
agcagatacatagcggttctgtgtgcaggaagccgggaagccgtgcaatccccttgtgagcctgctgcttgaggttgcggctgggttcatgtacccaaaggcacttgctgagggttcgagggggaatgatccatgtatgtttccgggtgttacttgcatccaaggtaacattactgggctgacttttgccaacaagggtctcagtggtagtatctcaccggccattgggaagattagctcacttaaggtgctagatcttgctaacaataacatcactggtactgtgcctgaggaggttgccgtgttgcctttgctgacaaaaattgatttgtcaaacaacaatctctatgggaaacttcctacctttgcttccaagaatgtggcggtgaatactgctggtaaccctaacataggcaaggatgctcctgcaccaactgcaggaccaggtagtagcaacaacagtccatcgggaggaagcagtagcg

SEQ ID NO: 287180 - DNA, 265 bp, Zea mays
  unsure (1)..(265): unsure at all n locations
atattggacacggtctaagatacggacgntatcaagattctcaatggatggagataaaccaccatggagaatcttgataacgttcgcagtttagacgtgtcaagaggttccctcatgagggacctatgtgcgaccttctgtggtctgatccagacgatagatgtggctggggcatatctccacgtggtgctggatacacttttggccaagacatatcggagcagtttaatcacaccaacaatcttaaactcgtaactcgggctca

SEQ ID NO: 287181 - DNA, 271 bp, Zea mays
gccaaaccaaacaatttcacctcacgcacgaaaccgggaagcaagcaaggtcctcccaactcccagcaacccaaggtagcgcgcggcagcagcaagcagctcgacggcgacgatggcggcaacagcggttactactccagtaggcacgggcggcgctgcggcagcgagaagccggttcgcggcggcgtgcggggcgcccagccagtacgtcaaggcggccgaatccgagaggatgcacgcgaggccgcccgcgcctctgcggccgccgact

SEQ ID NO: 287182 - DNA, 301 bp, Zea mays
cttattctgacaagtccttttgggtggataaccaagcaagggaaagtgatacagtagatgatggttctgttccactgtatgaccgggagtttaccttgcactcgactcctctaggtggttcatcaaacactgatagggtggataaggacgattcacgctgcttcaattgtggttcttatagccatgctatgaaggattgcccaaagcctcgggacaatgttgcaattagcaatgcacgaaaacagcataatttgaaaagaaaccaatctaatgttaaccgtgtacaaaaccgatactacca

SEQ ID NO: 287183 - DNA, 308 bp, Zea mays
caacattttggactatttgtccagcttgtggcatgagatatcagtactacctctcgatcttgaagaaggctttgcgctgtcagaattgtttgaagccatttatcgcacatgatttgaaggaccaagctattccttccggggcaaatcagcgatctgccggggtttggaaaaatgcaggcacaccacagaactctgcaggacctcaatcaaatgtcactggtcagaaaggctggtctgccacttcaggagttcatgttaataccagttctcatcatgctaatgtgaatacaaagcggaaagctgatggt

SEQ ID NO: 287184 - DNA, 283 bp, Zea mays
ctgaacctgatcatcatcgccgccatcaacctggcgctcgggatactcccgcacgttgacaacttcgcgcacatcggcgggttcgccacaggcttcctcctcggcttcgtgctgctgatccagccccagttcgggtggctggagcagcccttcggtgccaagaccaagtccaagtacaaggcatatcagatcatcctcctgcttgctgccctcgtcttgctggctgcagggttcgctgttggattggtaatggtgttcagaggagagaacggcaacgatcact

SEQ ID NO: 287185 - DNA, 298 bp, Zea mays
ttcgatttcaagtcgaacaactctaaaatcaactattaaccttacaaactctgcatttttgtttaaacatgactaaattgcttgccgtatttgcagctttgctgttcggcccaagttgctttggccggatacgaccaatggatcgacttgcgcattgaaaacaagcgcaacgaaccaatccgtgttactggtagcttgtcctggggcaaatggtacgccaacggtgacaagagccacgaagtttctgctccaaatgtagtcttgcaaccaggtgaaaccgcccgtgtttctgcttgcg

SEQ ID NO: 287186 - DNA, 410 bp, Zea mays
ctgcttggtgttttgtgtcgcatgcaggcgctgcccgaggagtgccttccgggcgacatcacggagcccgggaagctagacgaggtgttcgacgagatggacgccaacggcgacggcaaggtgagcttcgaggagttcaaggcggccatgcagaaggacagcgccctccaggacgtcgtcctctcgtccctccggccgccgccgccgccatagctagaccgggagagagattccaactcgttcaacttcattcccacgagaacgcaccattgattacagtaccgttcgaatcatttaatcagtctccggcctgtgccgttgtccgatccggccggctagttgttggaaactccggtcgtgggagaacctcgatggatcctgctagatatggctgtgctgttatgtgtttc

SEQ ID NO: 287187 - DNA, 356 bp, Zea mays
cggcactccaaggttgatggggcttattgtttgggtgtattccaaaatggtaaagatccaacaacactattaggaggcatcattgttcgtaatacacttgtgacctatgaccgtcacaatgaaaagattggcttttggaaaactaactgttcagagatgtgggagagactacatatcggtgatgctccttcaccagccccttcaagtgacacaatttcacaaactgatttgtcacctgctccttcccctagtagcttgccagagtttgatgttggtctcatcaccgttgatatgtccataaatgtcacttacccaaatctgaaacctcatctccatgagctggatgagctgatagc

SEQ ID NO: 287188 - DNA, 518 bp, Zea mays
cccacgcgtccgacacgatcgagagtgctgtgcacagcctggcccagtcgacgggagaagaggatcaaaggctgaaagactggttgcgcacgctgatcgtgagcttcatcgagtcgatcaggttcaactcggtggccagcgcggtggccgaagcgctgcgcaacgaccaagtaaatcagctcgaggagcaccacatccaccaaatccgcaactggagtgccatctccacggcgctactcgccgccgccaacgacgtcgtccaagaccccgacaccaacctcttcagccagttcgccaacgagtgcaggatacgcaacgcctaccaagccgccatcacgctcggcctggcgctcgtcacggccaggcccaatcgccgccatccccgcgcgacgacttcgtcatccacgtccacctcatggactggcacacagatccatcgccggacgatgaggtggccaacgggatggtggcgtggcactcccgccacgcgctcagcagccaccgcaacgtcgtgacga

SEQ ID NO: 287189 - DNA, 453 bp, Zea mays
gcaacgcctaccaagcggccatcacgctcggcctggtgctcgtcacggccaggaccaatcgccgccatccccgcgccgccgacaccgccgccctcgggctcacccttgtggaagtcgtgtcggtgcggatcctctacatcgacggggaaagacccggcgacctctacgggacggtcagagtcgtcgactccttcggcggcgtgcacgtgtacgaccagcccagagccagcgcgcagtcggtctaccccggggacaacgccaagctcgtctggccgtctcgtgtcgtgtcggccgccgacgacttcgtcatcgacgtccacctcatggaccgggacacagacccatcgccggacgatgaggtggccaaggggatggtggcgtggaactcccccgacgccctcagcagccaccgcaacgtcgtgacgagccagctcatcacgggcgagtacggct

SEQ ID NO: 287190 - DNA, 363 bp, Zea mays
ggctggaggcgacgccgagggcgacgaaggcgagcgcgagggagacgacgcccctgtcgcagtagaggcggtagagacggcagacggcgaaccacccgctggttcccccacaaggccaccgaccctatggccgcggcgccggcggtcgacgccgcctgaaggttcaccgtgaactgatggacgacggagacgatcgatagattagattagatggcagccatgaatactgaacggttgattagatggcagccgccatgcatgaataacaacgcacctggtcccatgtggtgcagcggagccagtgcttgctgacgagcttcttcgcgtagacggccgtgagcagcgcgtaggcggcgcaggcgg

SEQ ID NO: 287191 - DNA, 333 bp, Zea mays
cccgggcgccgcgcacctgctgcgctactacgccggcgccgccgacaaggtgcacggcgcgacgctcaagatggcgcacggatgcacgggtacacgctcaaggagcccgtgggcgtggtgggccacatcgtgccctggaactaccccaccaccatgttcttcttcaaggtagggcccgcgctcgccgccggctgcgccgtcgtcgtcaagcccgccgagcagacgccgctgtccgcgctcttctacgcgcacctcgccagggaggccggcgtccccgcaggcgtgctcaacgtcgtgccgggattcgggcccacggccggggacgccgtcgcc

SEQ ID NO: 287192 - DNA, 499 bp, Zea mays
caaaccctcacgctcaattctttggtgattctcaagctaacagacagcccatgcggatactagaacggccagactcccgaagtcatgatgctggtatccgtgcatcaatgtctaaactgacaatccaagaagggccaaggcctcatcaaaataacaggatgcagaattccgggtactggcccaatcaaccacatcctactcactttactggacccccagcccagcggcctatgcagaacatcagttttacacctcagcgacctttccaaaccgggggatttccgcagcagagacctgtaaatggggctccaccaccattacctcccagtaactggattggtaagcaaccaagtggatgccacatgagtgtatcacctgcaaaactcgatccaaggacagctccagacagacagcccaagcaggataacccaagatctcaacaggataagaggcagcaggcgaccaaggtataccgtgtacaaactccagctactaatgt

SEQ ID NO: 287193 - DNA, 620 bp, Zea mays
ggagtaccggagacatcgtcaacgccatggccggaggaggtgcaacggtgtgcgtgaccggagccggcgggttcatcgcctcgtgggtagtgaagctcctgctctcccgcgggtacaccgtgcacggcaccgtccgccacctcagtgacgagaagacaggccacctgaagcgcctggagaatgctgccggaaaccttaggatcttcaaggctgacctgctggactacgacgccatggcagctgcggtcgtcgggtgccaggggggtttccatgtggccactcctgtgccttcggaggacctgactgacccagagctacaaatgctgggtcctgctgttaccggcaccacgaatgtgctcaaagctgcctccagcgcgaacgtccagcgagtggtggtggtgtcgtccatggttgccgtcgagatcagccccaaagattggcctgaaggtaaggtccgagatgagaggtgctggtcagaccgagagttctgcaggagcattgagagctggtacccggtggctaagatcatctcagaggaggcggcgctggcgtacgggcagcaaaccgggctcgacgtggtgactatcaatccagggttggtgttcggccccatgctgcag

SEQ ID NO: 287194 - DNA, 377 bp, Zea mays
cttgccttcttccgtcgtgctctcattatcccataattaattacttgccacaggccttgatctccctcgcgtacacagagcgagcgatggtggagcacgagatggagcagaaggggtgtctctgccggatcaggctgcgctgtcgagctcttctcggcgatggaggaggacctggacacggacgacgagggctcgtgggaccttgttgggagggacatccggctaaaggccgccttcctgtgcattgacctcggccgtgtgatcgccttgtgcgggggcgaagagcgcaagaaggcgctcactgctcttgccaacaagctcttctactccatggatgagctgggcgacgcatggtagagcaggagcctccctctgac

SEQ ID NO: 287195 - DNA, 349 bp, Zea mays
cgagcagccaaggcaacgtcccgatacagttgcccagcatgtcgctcgtcacgggagagaagacgaacttccagttcatcttgcgtcttctgaacaccaacgttgatggcaagcagaaggttatgtacgccttgaccaagatcaagggtgtcggtcgccgatactctaacttggtctgcaagaaggctgatgtcgatctgaacaagcgtgctggtgagcttacctccgaagagctcgagcgtattgtgacgatcatccaaaaccccacacaatacaagatcccttcctggttcctcaacagacaacgcgacattgttgacggcatagactctcacatcctggccaacgg

SEQ ID NO: 287196 - DNA, 253 bp, Zea mays
tctttatcctccccgtctcccgccgtcgtcttcactgattcactccgacgcctcccctgccgctgccgcaactgggaggcggtccctgtcgcgcgcgacgacgagccttcatgacggggacacgctgctgattcatagcgcaccacccgccggttcgccctcgggctctctcgcgcccctccaacggattactggtgcccaacgcttgtgcttgctgtgtagcctggcgcgtctgctcgcggccgatacctcc

SEQ ID NO: 287197 - DNA, 277 bp, Zea mays
tcggctcgagagctgcacatcgtggacggcgactgctggaacgaggcgctgttccacgaggccatgacgaaggccgtgcacgacgcgacctcgccttcctcctcgccctcctgcgccgccgtggcccccctcgtggccgcagcctaagctcctgcatatgcatgcatgccgcggatcttccgccaagggtcgcatggctgtgggctgtgagagccgaccggttcagccgcgccatcgatcgtcatgcgtgcgtcagtcgcttcagcctctcggcagc

SEQ ID NO: 287198 - DNA, 289 bp, Zea mays
cccacgcgtccgctgccggccagcctagtgctctcggctttctttcatctccctccttttgccacttgctgtagctttaatttgcctggcactttgcacgttgtggccggccggggcctgtgcttccattggtcggcagcaagcaagcaaggctagctagcgtccgtggatcagtcatgggcagccagaggcagaggcaccgagcggtcactggcctcccggcggcgggcgcgcggatgctggccctgctgtgcgcgtcgtcgtgggtgctggtgctcacgacggcgca

SEQ ID NO: 287199 - DNA, 309 bp, Zea mays
cggattcgatgaacagccagctcaaccggggtttcagaggttgcatggagatggttcagaggcagagcctgaaggcgaagctaccttgaagctcggatggagagccagaagattcagctccgccatgtgctcaaccagaaaacttaagttagaaccgcactgtgtcgaaataaaattccaagcattggatttattacatttcccttgtccattgtagtatgtagcttagtctcatgtgtttctgcttcatagaactatatagctagctatagccttgtaggctgacctggccatggttgatgcagctgt

SEQ ID NO: 287200 - DNA, 493 bp, Zea mays
attcaaaccgtcgccgccgtcgccgagagagttgtgactcccccagcggcggcctgcgaccacccgttccccagtcgtctcttctctccagaccgcatttgcgcccgtcccgtcccctcccctctccctcggcgaggtccgagagcagagctgcctcgggagggtcgtagtccagtccacccgtccgctgcggcggcggttacgaggcggggaattccggcgcgggttgccgcgatccccgcagtgatgtgcggatcgggtcatgggtgtgacccagccgggaagtagtggaggctgctggaggactagggccgggacctgcggccacgacgatgtacgtcgcccgggagtctaccaagctgtggaggagggtgtgcgcggagacgacagcggactgcagcttctgttcgagaagtggcaattgctccttgcagggttggtgtttcagtacatccatggattggctgctcgaggagtgcattacttgcatcgg

SEQ ID NO: 287201 - DNA, 790 bp, Zea mays
cccacgcgtccgcggacgcgtgggcggctgaccggcggcgcgccaagtacgtcctgaggcacgtggtgcgcacgcacaagggcgcggacgacagggccttcaactgcgtgtaccaggagcaggacggcgaggggaagaccggcgtgtcgctgtccaaggacctgatggccatcgcggagcggcgcgctcaagaccaacatcacgacgctgggcccgctcgtgctgcccgtgagcgagcagctgctcttcttcgcgacgctggtggccaagaagctgctcgtgagcgccacgacgaagccctacatcccggacttcaagctggcgttcgagcacttctgcatccacgcgggcgggcgcgccgtgatcgacgagctggagaagaacctgcagctgagccccgcgcacgtggaggcgtcccggatgacgctccaccggttcggcaacacctccagcagctccatctggtacgagctcgcctacatggaggccaagggccgcgtccgccgcggccaccgcgtctggcagatcgccttcagcagcgggttcaagtgcaacagcgccgtctggcacgcactgcgcaacgtcaagccgtcgcccgatagcccctgggaggactgcattgaccgctacccggtggagctcgtcgacggcttccccacgcagcaatagtaccttcttttctctatattcccctcccacccgtccgtcccccagcttgtcgtcgctgcacctgcacctgaacctgaaccagaaccagaacctgcggtaagtttgagtagtcctgatgatg

SEQ ID NO: 287202 - DNA, 320 bp, Zea mays
tgttttccctcttctattcattcttctttttaccattgcagtctggcaaccagagtatctggttcttgagtcgtttcgatggaaaacaagaacgaggagattaaagatgccatccgaaaggaattagaaggcacagagtatgaagtatcatcgctaacaccgctttctgggggcactgcaaatttcatctacctggctagacttcacaagccgctatcgggtggtgtaagcgaagtggtattgaaacacggagaagcatacgttgctctgcatcctgacttcaagctggaaatggttcgatgtaacattgaagaagaagg

SEQ ID NO: 287203 - DNA, 284 bp, Zea mays
gaagactgaaaagtatttggtaaggaaactgcctttcccttacacttcgaaagatgtgtatgagcagagcattcgaatgcctattgggcctgatttcaacccagcgatatcagtttctgctctcaatcgacctgcgattgttaagaagcctggtgttatcattaaaccaatacaatacgaggaggttaatccccatgagaagctcgatgaaccaaaacgtgtcattcagagagcaaccccaaaccggaatgcaaagaaagcctttgccaaacaaggaaaaagcg

SEQ ID NO: 287204 - DNA, 401 bp, Zea mays
tgaccattgcagttcagatagaggaagttctcatggtcgcaagtcacatagaaaggggaagaggtccggaaagaaaaaacctagtgtggttgttatcaagaatgtgaatgtaacatctaaaaagcatggctcatcagagagcgaatcacaatcaagttctgaagttgagtctgcggacagtgacaattcacactccaaatcaagtgaaaggcagcataaaagctcaagttcaaagaaaaaggagggtaggagaactacttttgcctccggagatgaatatagcaaggatgaaatgtcaaatgcccacgatgctgagcaagggaactggagcgcattccaaaatttcttgttgagagccagagaaaaaaccagatctagtgatgcagacctgtttgcttgtg

SEQ ID NO: 287205 - DNA, 331 bp, Zea mays
cccagtctccaccccggaaatggccagaacctgaggcactagaacccacccgcccgcggctctctccagcagccccccaatccatcgacgccgttggcgagggcgcacaggcgcgcgtcgcaccacatccgccacccacaacacaccaccgtcctcatctccggtgtgcaggcagagacgcgggatggcctcgcgccagtagtatccgcccggcactttctaccccacccatccggccgcgggtgggtttgaccgagatcggcaggcggccgtcggcgtctcgctcgctcgatccgcctcgtctcagtcctacctaggtatggcggcggcg

SEQ ID NO: 287206 - DNA, 274 bp, Zea mays
ccgtctcctccacgctgcctccccggacctcgtcctgggcctcgtgccctgcgccgtcggggcaccaggatctggatgtgggccaagggggagcctctctacgaggccgccgtcgcccgggggcgcgccgctgttgccgccggcggaggcaccctcggcgccgtgctctggttccacggggagagcgacaccatcgagctcgacgacgccacggcctacggcggcaggatggagcgcctcgtcaacgatttcagggctgatctcggcatgccga

SEQ ID NO: 287207 - DNA, 275 bp, Zea mays
ggaggtgacgcagacggtgcaggtgaagccagggtggaggaaagggaggcaggtggtgctggaaggcatgggggacgagcggccggggtgcctgccgggcgacgccgtcctgacggtgtccgagaggaggcacccggcgttcaagcgggtgggcgacgacctggtgctcagggcggaggtgccgctggcgggcgcgctcaccggctggtccctctcgttccggctcctcggcggccggaaggtgacctgctcgttcgaggacgaggtcatccgcc

SEQ ID NO: 287208 - DNA, 389 bp, Zea mays
tgacggtaccgtggctctcggtgcatattggctgttggacggcgtgtgcggtttgtaagatacagtcaagattcattagcctccttgcagaaggtttgtgaaccctaacctgatcctgtcattgaactcggaggctccccccagcccacccaaataattagccatacctaggctataaccaaaatgtaaatagccagcgcattcgggttatactttgccagcattcaagtgtaaaaaggtctgaagatggttgatgtgataaacggggcttggtaggggcttctgcctgggcaagtggggttgtgcatatgggcccaggtagaatggttgcacaagtctgcccacagatgttgaacagaaaagtgtatttgtccagctaaaatatggcg

SEQ ID NO: 287209 - DNA, 425 bp, Zea mays
aagtaatccgcaacaagcagactgggcagtccgaagatacgggttcgtcgagttctacagccacgctgcggctgaaaaagttctcgaagggttttctggccatatcatgccgaacaccgaccagcctttcaggctaaactgggcatcgtttagcatgggagacaggcgctcggattctgcctcggaccattccatattcgtaggcgaccttgcctctgacgtcaatgacgccacgctgctggaggccttctccagcaggtactcctctgtcaaaggtgccaaggttgttatcgatgctaacactggtagatccaagggctatggctttcttaagttttgaaatgacaacgagaagacacaggccatgactgagatgaacggcgtgtattgctcgtctaggcccatgagaattggcccggcaactc

SEQ ID NO: 287210 - DNA, 283 bp, Zea mays
cacgaatgcctacaaactcgggacaagtggaaatgtggaaccaagcaaacaagctgtagacagagatgctcccaaagacttggaggagagtggagcctctggaatccggcaacctgacaaagctgaggcaggcactgcagagtacctcattgagcttgaagaacggcgatcaatcaaggtattcggttcaaacaccttcatcgggctggggatcgtcttcttcgcgggcgtgtgcttctcgctcttctccccggcgttcaacctggccactaacgaccagtgg

SEQ ID NO: 287211 - DNA, 239 bp, Zea mays
gtagacagaggtgttcattgtctatctgaagaagaaagaacaaatctaatttcagatgctcccaaagacttggaggagagtggagcctctggaatccggcaacctgacaaagctgaggcaggcactgcagagtacctcattgagcttgaagaacggcgatcaattaaggtattcggttcaaacaccttcatcgggctggggatcgtcttcttcgcgggcgtgtgcttctcgctcttctc

SEQ ID NO: 287212 - DNA, 324 bp, Zea mays
agctgtagctgaagaagagcaggttgttggagaggcatctcgggctcagtcaaactcagatgaacctcttctctgtcgcgaagacccaaattccttaaacgacgaagcattgcttccctgggactatccgattctgtcgcaatgcacggagtgagatttttgatcggagcctgaatggatacgggttgcctgatctccataatgtggatctcggcacgcctccagatcttcagcttgctgatttccagtttggctctcaggaaagcctcggcagctggctggatcgcatataggaagatactaaaccacgtactccctccgttt

SEQ ID NO: 287213 - DNA, 188 bp, Zea mays
gcagcgtccgacagcgtgctcacctgggacaccttccgggagatggctaggatctacttccccaaggaaggcagcctggagccgtgcgccggcgtgctctacggcctcgagctcccaaactgaattcttcttgttcgtgtacagtacacagcctcccagacggagaaataacgattctttgattactt

SEQ ID NO: 287214 - DNA, 361 bp, Zea mays
cccacgcgtccgcccacgcgtccgcagcactcacctccctactcgcgtagtagtcgtcgtcgtcgtcctcctcccgacgtctggtggtatcggacttgcgtggcgtggaggtccttccgaacttgggatcgatttgcttgtcagcgccgaaccctagctttgcttcgacgggcacccacctacggtacgcccgcggccccaagcagtcaggcgacaccgaataatttggttacagaggacgagcgggtgcgccggcgagagggcccgattctcaccgcgccggcgatggcgagcagctcgtctccgtcacaggtcatctgcgcctccttcaatcaggacaacagcatgttttctgtcggga

SEQ ID NO: 287215 - DNA, 388 bp, Zea mays
gccctagggaaggattaggagtgatcgagatcgaatcggcggccacccggcaccctgcccgcctgtcgacactgtcgggtccggttggtgccccagcgaaaagcaaaagagatactactaccggaagaaactgcctcctcctctcctcgcttctctctttgccgcccgcccctcccgggcgagtggtccggtacacctctagctgcagatcccagctcgcgcggtccagcaggccagcacttagctccctccctcctgtccacctggacagcgcgcccgatcgtgaatcgtcgcttgctctggagaaagcttgcatttatatatcgtttcttcttctaatctacttcttcttcttctttaaaaaaaaagccccgcatccttataactg

SEQ ID NO: 287216 - DNA, 367 bp, Zea mays
ctcggcaccgccttcgtgtcctccttcctcgacctcggcgagtggttccagcacgagctgccggacccgtccccgttcaagctggcgcacgggcagcacgtgtgggacatggcccgccacgacgcgagcttcgccaagctctgcgacacggcatggtcgcggacagccggttcatcatggacgtcatggtcgaggagtgcgccgacgatgttttccgagggatcagctccctggtcgacgtcgccggcgggctcggcggcgctgcccaggccatcgcgaaggcgttcccgcacatcgactgcagcgtgctggacctcccgaacgtcgtcgccgctgcgcccactagcaccgacgtgaagtacatcgc

SEQ ID NO: 287217 - DNA, 296 bp, Zea mays
cgcaaacctccccctctcccatcgacttcctccgtcgtccgtcgcactgccacggatcaccctcttccttcgtcttcctccacaaaacctacagcgctggtgcgccgaggagctagctagctagcccggccggccggccgcgccatgcctcccgtgaaggccgaggacctggttgtgcacgccgtcaaggagcagttcgccggcctcgactactgcatcaccagccccccgccatggatcacgacggtgctcgttggcttccagcactacctggtcatgctcggcaacaccgtcct

SEQ ID NO: 287218 - DNA, 373 bp, Zea mays
ctcacacaagactttactttcgctcaagaccagcgataacaaagaccttctctcttccgattaccatctatccacatcacttccgcgacagatcaccgccatcatgcagatcttcgtcaagaccctgaccggcaagaccatcaccctcgaggttgagtcttctgacactatcgacaacgtcaaatccaagattcaggacaaggagggtatcccccccgaccagcaacgcttgattttcgccggcaagcagcttgaggacggccgcactctctctgattacaacattcagaaggagtccacccttcatcttgtcctccgcctccgtggtggtatgcaattttcgtcaagaccctcactggcaagaccatcaccc

SEQ ID NO: 287219 - DNA, 278 bp, Zea mays
ccgacttggactactggctcggagtgttcatgaagtccggcgacgcgcaccaacaactgccgcagtttagagcgcgcacgggcccgagaattttcagttccctggctaattgattcatcgttctttctctctccctgcacgtcttgcaatcggaattcggaggggacagtcacaatagcagctaattaatagaggggtgtgtgtgttgaggaccacgacgagattaggaagaaacaacgcgacatgccattgcatctatctcttgtttgccttcttgt

SEQ ID NO: 287220 - DNA, 330 bp, Zea mays
gagcagaggtccaactgggctgctgcgtcctctgcctcttctccttcctgtcgttctgcgctgccccgacccccgagtgcccctggtcttgtcctcctctccctgctgacctcggagcggacggagctagcaagcagccgccaggagggaaggatccatggccgggagatcgcggtacgacaaccccttcgaagagggcggcgccgacgaggtcaaccctttcgcggaccaagctaagagaggaggatcgagtgctcagtccggctactctggtggcgcgttctacacgacgcaatcgctacgccctgctcctcctagcacacgcctttg

SEQ ID NO: 287221 - DNA, 229 bp, Zea mays
tgcggttggtgacttttttaatgaaggattatatgaagagcaagcccgattaaggggcatccctttactggactccaggcctaagcaagtcatgagaaatatgaatgcaagggatgcgtgcaagaatcaaaaggttgtctgcctaccacgtgtttcaagggttgttgatatcatttctgttttgcgaactaacaagcataatggtttccctgttgttgaccgtgggcaa

SEQ ID NO: 287222 - DNA, 393 bp, Zea mays
gggagagcgagaacggagtgcggaagatggagacggtgaagagccttctgaagccaaagccgacgccgcagcagcagctgcgcgagctggcagcgccgcctccgcaacgagggccgcaacatcgaccggcagatccgaggcgaggcagcccgcttctcccattctccgggcccagactcaccctcgccgagtgtggactaacgacggccaggctgtcgccctcgatctcgatgtgctgcagatgtgcagagggaggagaagaaggtggagaaggccatcagggaggccgccaagcgcaacgacatgggatccgccaaggcgctggtcaaggaggtggtgcgctcgaggaaggcagtcaaccgcctgtacgagaacaaggcccagctcaactcc

SEQ ID NO: 287223 - DNA, 232 bp, Zea mays
tgcgggcagggagagcgagaacggagtgtggaagatggagacggtgaagagccttctgaagccaaagccgacgccgcagcagcagctggcgcgtggcagcgccgcctccgctacgagggccgcaacatcgaccggcagatccgagatgtgcagagggaggagaagaaggtggagatggccatcagggaggccgccaagcgcaacgacatgggatctgccaaggcgctggcca

SEQ ID NO: 287224 - DNA, 361 bp, Zea mays
cggaaggagtaggagatcgaggagagaggacacgggacagagagatgtgcctggtggtggtctgcgacgagccggagcgcgtggtggcgacgtaccaggtgcccgggcggtgcccgtactgcggcggcgtggtggtagcggccgacgtggagagcacgccgcggctctgcttcgttccgctctgcttccgcatccgacgccgcttctactgctccctctgctcacgtcgcctcgtctccgtcgcctgaacggtcgccggaacaggaaggcaggcacgcggacgcgacagagctctgtctggcggcgcgttgtcaagcgctctgtacgtatgcgcttatggagtattttagcaaggtacctc

SEQ ID NO: 287225 - DNA, 314 bp, Zea mays
gctttggaggcccaccagagtgactacaaggacaaggacgaacagattccaagtttggatgacaagaagagtttgctcaagaactggcccttcatgtcatccttaattacgtactgtgtgttttccttccatgatatggcttattcagaggtgttctctttatgggccgaaagcgataggaagtatggcggcctcagtctatcatctgaggatgtaggtcaagtgctttcagtcacaggcgtcagtcttctcatataccaactctctgtgtaccctcgtaccaacaaaatccttggacctatcaagacttctcg

SEQ ID NO: 287226 - DNA, 281 bp, Zea mays
tgctcgagctccatccgagtcagagtcttcggctccaagccgccccactgttcctcctcgactccaagcaccgcgccggcagcgtgaggagagggctgtcgcgggccgcccgcaggctcctctgctgcggcagggccgcctccccggaggacctatctgatgaaggaagtggatcattgaggtgggtgttctcattgagagagcttcgatcagcaacaaacagcttcaattacgataacaagattggagaagggccacttgggagtgtgtattggggacaa

SEQ ID NO: 287227 - DNA, 331 bp, Zea mays
acgagtcagagtcttcggctccaagccgccccactgttcctcctcggctccgcgcaccgcgccggcagcgggaggagaggggtcagggtgacgccgatgcaccccaagctgtcgcgggccgcccgcaggctcctctgctgcggcagggccgcctccccggaggacctatctgatgaaggaagtggatcattgaggtgggtgttctcattgagagagcttcgatcagcaacaaacagcttcaattacgataacaagattggagaagggccacttgggagcgtgtattgggggcaagtctgggatggttctcagattgctgtcaagaggttaa

SEQ ID NO: 287228 - DNA, 357 bp, Zea mays
gcagctagctcaagggaaaggcaagagactccttgctagccatggccttctactatgcaatagcattgcttggcatgcttgctgtcttctcctcgggggggaatgcactcgatgacaatatgctgaaaaccactgtatacatacaacagcttccctaccaaaaccagagaggtgtagcagaaggtacggcagtaattagctggtacataaaggatgggccaggtgcttctgcgaatacaatcgggcatgcggagggcctggtaatcttgacagatatagccaggtcttcgtggctaatcactacggacttggtgttcgacggtggaagcctcgcagggtcctcacttcaagtgatgg

SEQ ID NO: 287229 - DNA, 456 bp, Zea mays
cccacgcgtccgactggaccttcaagcgcaccgcgcgtcattgttctcgttggcctttcttcatcagcaaatgtcggatcacttgccaaggatcttttggcatttgcagaaggagatgatcggaaactgaaattatctaccattgcttctcctacttataagcttcgaaccacagtactgcaagcaccatatggtgatcttaccacatgcatggaactggcgaaggttgctgatttgttagcgttcgtactgccagccaattcattctacagtggtgatttgaatagcccaattgatgagtttggatctcaatgcctgtctgtatttagggccatgggcttacctagtacagctgtttttattcgtgatcttccagcggataataaaagtaggcaggtattgaagtaagcagcaacttctttcctttctgcagactgactgatgactgcaatttta

SEQ ID NO: 287230 - DNA, 425 bp, Zea mays
gttcagtcaatatgaaaaagatgcagaggatgttccaaaatgctgcggaagaaaacgttaggagcatcagggcttacgtgactgaactgaaggagcgagttgcaaaacttcagtaccagaagcagctgctagtctgccaggtcctggagctggaatctaacgagggcaagccgaatggagaggataattctgggcctctacaggatggtcctgattcatgggacagattattcaaagagcagatgcagtgcatcattcatctgtgggatcagtgccaagtatcgatcatacacaggacccagttctacctgttattcaggggggacaaggctgatcagatatacatcgaggtcgaagtaagaagactggtatggttgcagcagcactttgccgaggtcggtgatgcaagccctggtgctgttgaa

SEQ ID NO: 287231 - DNA, 411 bp, Zea mays
ggatatctctgacgcttctatccaagccggcttagaggagacccaacttcctggcaggagccagtttctcacagcagaggaagcctcggcacttgggttcgatggcgcatccactgtactaattgatggagctcatactgaggaatctgcaaaggcattatcaggcgtgatcgaagctgtcagaccagaagggcctctagcgcttgttgtcggaatggctagtgacaaggagcatcttgcgtttgccgagcagcttctctcaggtcaaaccccagatgtcgtgctactgacagaggcgagtatcgccggaggaagctcccgtgcaatgccagcctcatccctgaaagaagtatggattgccgcggcacgccatcgtgacatcgagtacgtggacatcggtggcatcagtgg

SEQ ID NO: 287232 - DNA, 614 bp, Zea mays
gacgcggcggagggccggggctcctcctgcatcacccccgacagcctgcgccgcatgctcgccaggctcggcgcgcaccagggcgtggccgactgccgcgccatgatctgcaggttcgacctcgacggcgacggcgtgctcagcttccacgagttcaaggtcatgatgggcgccgcgtgacccgatccagttccgccgccgccgctgctgctgcttagatggtccttgttcatatgtgggttgcttcattcattggttgattcattcgttgcttgtgtgtcatcaaaataataagtcattagttgcaggtagctaggattattagccatgctgtgatgtacatcattttcgtgcagcctgtgttgtgcagttgtgctccttcccccttgcgtgtgaagatgaattgccaattttttatttgatatatacatcgccatctaaaataaatattgaatctgtactagccttcaaaagtcaaacttcaaagtgcgcattgaattacaacaccagaacagtacaccttttggacgcatatctcgcttttcccacaagtttaagaagatttacgaaaaaaataacttaatattatcgcttttcccagaagtttaagaaga

SEQ ID NO: 287233 - DNA, 371 bp, Zea mays
ctcttgtgtcgagtgtgcgcggaccgtgaagtgaagttgcgtgcggacagtccgacagcttgctgcaccattccctcaacatgtcttcatcacgtggtcttggtggtctacgcaagaaacttgcaggtcgctttaaatccaagcgccctcgaggaaatgatgatgattatgtaccaaccactgattcagaagcccaatcctcagctgggggcactgaatccatggatgcggaagattttcctcatgttcatcctgattatcccattgatatccaaggatggactttcccaaagcggagattttctatgactgagtactgctctcgacggactgtgaatcagtatgctctgccatcagataccaacatccag

SEQ ID NO: 287234 - DNA, 160 bp, Zea mays
ctactaacaaaactgacaccaccaaagtttaattattttgaggttcttacgttacatccattgtagaagaagactttccttttgtttccttctctttttgtacaatcggcgcatatgtatatcctaggggttaatatatggcgatgcaggtgtctgtacc

SEQ ID NO: 287235 - DNA, 343 bp, Zea mays
gcagcagccggcggcggccatagcccaggagcccggagctgtttcttcgtcgcaggaatgggcaaggacggcatccagtacgcatggtggacgccttcacggcggacccgttcaagggcaaccccgccgcggtgtgcctcctcgaggacgccgccaaggccgccgacgagcggtggatgcagtccgtcgccgccgagttcaacatctccgagaccgccttcctcctccgggaaaagtcctccgcggccggcgccgtcccgctgttccagctccgatggttcacccccgtcgctgaggtggagctctgcggccacgccacgctggctttcgcccacttcctctt

SEQ ID NO: 287236 - DNA, 464 bp, Zea mays
cccacgcgtccgcccacgcgtccgcccacgcgtccgcccacgcgtccgcgagcacgtcatgagcgcgctgccgccggacatcggccgcgaagactggctgcaggcgctgccgcgcgcgctcgtcgccggcttcgtcaaggccgacatcgatttccagcgcaagggggaggtgtcgggaaccacggcgacactggtggtcatcgatgggttcacggtcacagtggcgtcggtgggagactcgcgctgcatcctggacacgcagggcggcgagttgcagctgctaaccgtggaccaccgcctggaggagaatgcagaggagcgggagcgcgtcacggccagcggtggggaagtaggccggctcaatctcttcggtggtcaggaggttggtcctctccggtgctggcctggtggcttgtgcctttcaagatccattggggacatggatgttggggagtacattgtgc

SEQ ID NO: 287237 - DNA, 278 bp, Zea mays
cttcattctagatgatgctgatgagacatagctttatactatgagccaaccggtacaacaagttgtcctgtgtgttgagttcctgtactatagtagggatgagttcgtgtttaatgagctctcttggctgttaatattgcacatttgttcgggtggggtgaactctaaattagctcaagaaaaaggaataaatttttaggattgcattaaatcgcaaggcaggcatatgaggaagtcatttcgatgtaacagtacattcagttacaatagagtatcat

SEQ ID NO: 287238 - DNA, 454 bp, Zea mays
gaactgttgattgtgctgtatgttggtgttctgtctgcggttgaaactattggtcattggcatggcttttcttgaacagccgagccaccatatactcgtgatgatggttttctctcacgggaggcgtttctcaaagactgtgctaaggcttttagtgtccccccaataaactctgaggaaaatccgcaagtattctccaaaaagtttgtgaatatagttgacccattgaagcagagtaacaatcttggacgcagtatcagcaaaggaaaccttggccggatacgcaaggcattctattttggggcttgcaagcccggcaagattcttcaggcgcccgcgggtttctctgccaacgaaatcaaccggtttttcaggaccacattaagcagggcagatgtcccggtgagccctcctgatgatgtcctacaggccgcaattgttcctgcgtcaccgg

SEQ ID NO: 287239 - DNA, 308 bp, Zea mays
tgggcaccgactattgattgtccagtcaagggcacttctggtaagaagatggatgatgaataccagaacttcctggctgagcttggtggcggcagtgcacctgagtccatgaacaaatctggtggtccaatgttggctcttacaggaagtggtggtagcggtggtgcttctgctggaacggggagtaacccgccttggtcagccggtggtggtgctgctggcattgggctcaatggtatcaagaaagactatgacgagacaaatctgtatatcggctacctgccacctacaatggatgatgatggatt

SEQ ID NO: 287240 - DNA, 410 bp, Zea mays
cacacgcgtccgcacacgcgtccgcacacgcgtccgcggacgcgtgggcggcggtggatggctcgtggaggccgacgacgcggcgccggcgccgcagcccgacttcctcagccggtgctgcctctgtgactagaggcttgatgggctcgatatctacatgtacagaggggacaaagccttctgcagctcagagtgccgatgccagcagatgctactggacgaccgtgctgccaagtgtggatcatccgaagccctcatcaggtccggcgactactccgtgtcgccgcactccgccccgatggccttctccccgagcgtcgcagcagcctagtagtctactcgccctcgatcgagctgctccgatccgctatgactctgtgagcaataatgcaaaggagtctagctagaag

SEQ ID NO: 287241 - DNA, 303 bp, Zea mays
gataaacactggaacaaccttgttgagagtgccaaggagcgaaattgcttattcaaggtccccaagccattgaccgcattctttgcagaggataacctgaagactatgaaggtggaaaggcgtcctccgccagagatgaatgctcgagtactggaagagatcaaccaagaagttgtaaggtcaggagctcatgaatgtcgatgatgccgccgaccatgcagacgcaggggacgacgatgatgctgatatggatgctgacgatggaggcggcgatgattgattgtaagattcaaaggcttgggt

SEQ ID NO: 287242 - DNA, 408 bp, Zea mays
gagacacaaacaacgggtggtcgctgggaagaggaagaagaggcccgcggggaagcggagggatccagaagaagatgaggcagtgggtccgggccgtcgccattctcgccgctgcttcggcggcggcgctcctcctcggggccgaggcccagcagcagggccaccagacagagaggatctcaggaagcgccggcgacgtgctggaagacaaccccgtcgggaggctgaaggtgtacgtgtacgacctccccagcaagtacaacaagaagctgctgaagaaggaccccaggtgcctgagccacatgttcgccgcggagatcttcatgcaccggttcctgctgtcgagcgccgtccggaccttcaaccccgaggaggcggactggttctacacgcccgtgtacaccacct

SEQ ID NO: 287243 - DNA, 463 bp, Zea mays
tctatatgtatgttgctggcttttacacatactcgatatttgcccttttgttttgggaaataaggcgctcagacttcggtatttcaatgactcatcatgtagcaaccgtctgtctgatagcactgtcttacatattcagatttgctcgggtgggttcagttgtccttgccattcatgatgctactgatgtgttcctggagcttggaaaaatttccaagtatagtggccatgagttgtttgcagatgtttcatttcttgttttcgtcagttcttgggtactcctccgccttatatattatccgttctggattctctggagcacgagctatgaagttgttctgactctagacaaggaaaagcataaagttgacgggccaatatactactatgtattcaacagtcttctcttctctctacttgttctacacatatattggtgggttttaatgtatcggatgcttgt

SEQ ID NO: 287244 - DNA, 348 bp, Zea mays
cgcaaaactcccccactccacgcccggccgcacctctcctatcttgctccaagtagcaagttccaactcgagtagattcacttcgccactccgttgccctctcctccgccgcccgatcctttccccgtctgagatggcatctccggcatcggcgtcgcttaaggaagccgtgggcagcctcgaccgcgacggctttgttggtctcctctccaacctcatcggcgagaccgcacacctgcagaacgacccgccgacctacaggcctcaggaggagcgcgtggcgcacacgtagtcgacgtgctccgcccggtgtccgcggacacgggggcggccccctccttgtgcgga

SEQ ID NO: 287245 - DNA, 549 bp, Zea mays
attctatttgtggcagtcattccgtagctattcctcttgttctcgtgtttccctacttgtggcgtttcttccaatgtctccgtcagtacaaggatacaaaggagaagacatgtcttttcaatgctctcaagtactcgacagcaattcctgtgattttcctttccgctctcaagtaccatgtacatcctgatcaatgggttggcttctaccgccccctctggcttatctctagtgttgtaaattcactgtattccttctactgggatataaagcgagattgggatttgagcatcctaaccaggattttcatgttcaaaaacccaagcatatggacatatcttctttacgggcagaactgggtactctactgggtactgggcagcaatttggtcctgcgatgcacatggacgtacaagctctcggcgcatctccggcacaactacctgacagtgttcaccatagcagctctggagatactgagacggtggcagtgggtgttcctccgggtcgagaacgagtggaacaagatgacagccaaacagaacatgg

SEQ ID NO: 287246 - DNA, 419 bp, Zea mays
ggaatgcccatgccatccctgaatgcttgtggtcaaagaacgataagaacttgtgctccaaaccatcggcaaaagagagacgcgcccaagtctcgtcagcagggtgcgtcatctacaatgaataccttgcagagatactatggcctaacaccacctcagaaaggaggaaataccatggatagcagcactgaactgtctgtgtaccataagggcggcggctgccagagtaacctcagcgaaacattgctcaatccttccgcagctccaggcaccgacagcagctggaattttgaagcgctaggcttttcagcgaccgagggcgatggcggggcaccgaaaccagagcaagatggttctatgcggcggcgacagaaagtggaagcagagtctaacgcccagggtgattttctagtgaaggc

SEQ ID NO: 287247 - DNA, 310 bp, Zea mays
gtgcgattgatctttttaaagagtgccattgtagtaggaagactggttttgctgagcctgtaaaggaagcaattgacacaatggaagcacttgtggctgagcctggagtagaagggaaagaatctaagacccctacagaagcagttgctcaagtgttgtcttcatcaaaatttctttataatatcggtcttgtacccgccacaaagaaaagctgcaatggtggtgttcctacacgcgtggcagaacttgaggctgaacttgaatcagagaagcagaactcattagaatttagagctcagttagatgccct

SEQ ID NO: 287248 - DNA, 294 bp, Zea mays
gcattcatcactttcctgactcacctcactcgatcatcctccagtcttgtcgtcgcctgctagcttgaatattacgccagcatctcgccaggataatggcgggcactactccgcgccgcgtgctcctggtcatcgtccccctcgtcgccgtcgtgccggcgtccgcaaaagactacatggtcggcgactcgtccgggtggaagtccggagtggactacgctgcctgggccaagggcaagccgttcgccatcggcacacgctctcgttccagtacagctcggcgcactcggtgct

SEQ ID NO: 287249 - DNA, 305 bp, Zea mays
tctgcattttcaggctctgagccccggaagaggagacgcatcatcatcctcatggctgcaaggggtttccagctgaggctttcgcgctggtttcagcgatcccatgcaagtgtttcccagtcccaggacgaagacgaccgcggcggcgagaggaacggcttgctgaggagccacttggaccagatcgtgccagtcacggatttcgccggcacgtccaactccaaggcgttagctgttcgtgtggaaccaaagaccgtggcgctgaaggtgtccatgcactgctatggctgcgcaaggaaggtcga

SEQ ID NO: 287250 - DNA, 281 bp, Zea mays
tacactagtaccgccacacgaattcccgaccccgatggcgacatcgccaccgcacaaccctagctccggcgagccctccgatgcgtcgagcctcgcagccgcggcgctcgaggcgcccgtgcgcgtatggagatccctcgtcgcgcgcttccctcccctcccggactcctccagcttccttgctggcgtgtccgacctgcagctccgctacttcggcaacagccggccccgccgccgcaagctaccgctgtacgtctccctgtccgcacggtggccgcgca

SEQ ID NO: 287251 - DNA, 284 bp, Zea mays
cggacggtgggcggccgctcgcgcggacggtgggatgacagcaactctggagtttggtattcatatgatcaacagactcaacaatatgtcccttgtaatgaccagagcaacactaaggcagccgggcgaggcggccagcgaaaacacgagaacctcagatagtaatagtggcaaaaaggttgtgatctctgcgcctgctgccacaattaaacaaagtgagaaaacttcacttcctgacgctgttcaagctgctgcaaatgctgcactggctgcagaaaagagag

SEQ ID NO: 287252 - DNA, 287 bp, Zea mays
gcaagcaggagccgccttgacgagtgtgtggagcagcagccgtaagaaaggggagggcaaagtaagcttcatatattttccatggcaaagctcttcggaaaggtggcgatcgtcacgggcgccgccagcaaactgggcgaggccatcgccaggaagttcgtcgacaacggcgccaaggtcatcctcgccgacatcaaccgccactcctgcgagaacatagtagcggctctcaacaagaccaaccacggccccgcggtggctcacgcgatgcgcatcgacgtcagcga

SEQ ID NO: 287253 - DNA, 277 bp, Zea mays
cacaaacgtccccacacatttcccctaccatctccctcttcttccacgagctaattctagacagaacacaagcgcccgccatcgccatggaagcaacagcagactcgttgccgtgggcggcgcagtgcgcgggcgcggcactgttcgccgccgccctctgcgtgacggctctgggcgtcgtgctggtgttcctccggcggtggccctggtgcagctgccacgtgtgccgggcgtacctgacggggtcgtgggcgcgggacttcaccaacctcggcga

SEQ ID NO: 287254 - DNA, 245 bp, Zea mays
actagacattgtagaatggacgtgtttgttcattcccgaataaaaaagaaatggacttgtatagatgatggtgatagaactacggctaagaagaatgtaacttacgagaacacggagattcatctgggttcctgcatccggtcttgtgttgtgtaacatagcagttgttcttggtacccacctccattgtgaccttcgaaattatggcaatcatgttgaaagatgtatacacttttcactgtatt

SEQ ID NO: 287255 - DNA, 285 bp, Zea mays
cggacggcacgccgtggtggcacgcgcacagctcctggctcagggccaccgtctaccgcgcgctcatcatccgccccagggagaacaagacctacccattcgccaagccctcgcgagacgtccccgtcatcctcggtgagtggtgggatgcgaacccgatcgacgtcatccgggaggcgcagaggaccggcggcggtcccaacgtctccgacgcgttcaccagcaacggccagcccggcgacctgtacaaatgctccaacaaagagactacggccatcccggtga

SEQ ID NO: 287256 - DNA, 331 bp, Zea mays
attggagagagagaaaagaaagaaagaaagaacggcgaaaaatggtcgatgccggcgacataacggccggagggccgccgcgcgctcacgaggaggagcaagcgggaactccggcatacggttcggtggtcctcggcggcacttttgaccgcctccacgacggccaccgccgccttctcaaggcctccgcggatttggggagagaccggatcgtggtgggcgtctgcacgggacctatgctcgccaagaaggagtatgcggagcttattgagcccgttgacaagcgcacaagggtgtggaggatacatcaatctataaagccgaactgata

SEQ ID NO: 287257 - DNA, 411 bp, Zea mays
gagcttgtgctgctactgctactataccagcgctactagcagcagccaccggcctgctcgcgcaactaaggaaggatcgacatgacgatggggctccgcgtccgcgactcctccgcgctgctggcgctggccgtcgcgctcgcctgctgctccgttgcagtggtggcctacgaccccctggacccgaacggcaacatcaccatcaagtgggacgtgatctcgtggacgcccgacgggtacgtggcgatggtgacgatgagcaactaccagatgtaccggcacatcatggcgcccgggtggacgttggggtggtcgtgggccaagaaggaggtgatctggtccatcgtgtcggcgcaggccacggagcatggggactgctccaacttcaacggctgcatgccgcactgctgc

SEQ ID NO: 287258 - DNA, 521 bp, Zea mays
aaacaatcgaaagggacaggaccagtacatgacgaatcttgctctaaagatcaacggcaagcttgggggcagcaacgttcagctgtttgactcgctcccacgggtcggtggtggggtacctttcatgttcatcggtgctgacgttaaccacccgtcccccggtaacgtggagagcccatcgatcgcagccgtggtcgcctctgtcaactctggtgtcaacaagtatgtgaccagaatccgtgcccagccgcaccgctgcgaggtgatccagcagcttggtgagatctgccgggagctcattggagtctttgagaagcagaaccgcgtgaagccgcagaagatcatctacttccgtgatggcgtgagcgacgggcagttcgatatggtcctgaacgaggagctggctgacctggagaaggcgatcaaggtgaatggctatgcgccaaccatcaccgtggtcgtggccaagaagcggcaccacactcggctgttccccagggacgaacagcagccgcagacga

SEQ ID NO: 287259 - DNA, 392 bp, Zea mays
ccatcgcgtacatccaggagctggaggaccggctccgcggcggcggcggcggcggcggcggctgctcggcggcgcgcccggacagcccggacgtggaggtgaaggcaatgcaggacgaggtggtgctgcgcgtgaccacgcccctgtacgcgcaccccgtctccagggtgttccacgccatcagggacgccgagctgatcgtgagcggcgtcggacgtggcggtggcggacgaagccgtcacgcacacgctcgtgctgcggtcgcccggccccgagcagctcaccgcggagacggtactcgccgccatgtcacgggggatgaccagcgccaccccctccccgtgactctgtagcggtaactgtaagtcgtaaacgtactcgcctcgtgcgtg

SEQ ID NO: 287260 - DNA, 292 bp, Zea mays
atgctcctcaaaacacaaatcagctgagctccccaactacatcatcaagcatacctcccatgcagccacttgatactcaacctcaggaggctgagccaagcgactcgcaaagctcggttcagaagatcttgcaagatctgatgtcatcctgtgttggccactcaggtaatgatacgaagacaccaaatggactaacccatggtgttaatggggttaattgcttagttggcaatgctgtcacgaataactcgggaatgggaggaatgggatttggcgccatgaatgggttcgg

SEQ ID NO: 287261 - DNA, 291 bp, Zea mays
ctccggatgcacccgccggggcccctcctgtcgtggcgccacagggccatatccgacacgtacgtcgacggccacctcgtcccggcgggcaccacggccatggtgaaccagtgggccatcagccgcgaccccgaggtgtgggacgcgccgctcgagttccggcccgagcggttcctccccggcggcgagggccaggacgtgtccgtgctcggcgccgacggccgcctcgtgccgttcgggtccggcaggaggagctgccccggaaagtccctggccatgaccaccgtgacc

SEQ ID NO: 287262 - DNA, 377 bp, Zea mays
cgcaggcatgcttaatctgtccaggttagtagtagatcttctcgacgcataatatgagttgtagccaatcaataattcattctacagccccccgcgtcgtcgtgagggacggcacgggcgtatcccgcaacgccgccaccaaccctctcgctcctcatctccctcccctcgcccccgtccgagctcgctgccggaggtccgcctggcggcaatgaaggtggcggcggggcctctttcccacgggctctctcgccacgctcgccatcaggcttgtcaccatggtagcgacgtcggtggtggctgacttttgagtggcgggtgctctcgtggttcggcccggtggtggcagatccggtgacgccggatccggtataaag

SEQ ID NO: 287263 - DNA, 281 bp, Zea mays
tggcaagctaagcgcggctacacataaatatattccggccttccctctcttgtgctcttggcatctcgttgctttcgtgcacaaggtcgtcagaggccaggtgtggcagcttgggcacgagaggtcgagcagcagcaggccggtgcagctagcaatggcggccattatgggcgtgaagaagggtctgctggtgctggctcttgggctcgccatggccgctacctcgtcggccgtcatctacaaggtcggcgacacctccgggtggaccatccttggcaacg

SEQ ID NO: 287264 - DNA, 339 bp, Zea mays
cggaccgtgggcaaagcgcaaaactgagcaaccgagtggcatggcaccagccagctccacggaaaagcaactccagcaagcaagctctctctctctctcatcgcgtggtgtgtacagtacagtagtgccctgtgctcctctgctgtcccgcagccgcagtgctggagctcaagcaccaaggcatccagccggcgcccacaggacactgctagccccattcaagaatcttccagctttcccaaacagaaccaaccttcggccatggcttcttcttgatctgtggtgcgcgtgggtctccgtctcccctaccggtgtcgcaatctgcagtattttttcccc

SEQ ID NO: 287265 - DNA, 295 bp, Zea mays
cccccttctcgtcctcctcccgactcccacccaaaaaaaaaaaaaacttcgaaggaggtttcgatcgcgaaaccgcccagggcccgccccgcaagtgcatggcagtgagcttcctggccaatgaggtgtcggacctgtgcatcggcaagccggccgtgaggtcgctcccgctctccgccgccgccggcgaccttgccgccgcgctccggagggtggcccgctctggcgcaccatcctgtgtcgcggtgactggaccagcgcgcgccgtcgtcggccgggtcggcttcgcggacgt

SEQ ID NO: 287266 - DNA, 446 bp, Zea mays
agaagttctgaaggagatgctgcaggctcttcctgctcttgctatgacaacaaattctgtaaacgctacggccctggacaccgccgcgattcagggccatgttgacatcgtcaatctcctgctggaaaccgatgctagcctcgccaggatcacgaggaacaacgggaaaacggttttacactcagcagcaagaatgggccacgtggaagttgtaagatcgttgctgaataaggatcccaggattggtttgaggacagacaagaaggggcaaactgcgctgcatatggcttcgaaagcgcagaatgctgagatcgtggtcgagttgttgaagccagatgtctcggtcatccatatcgaagacaacaagggaaacaggcccttgcatgttgctactcggaaggggaatatcattgtagggcagcccctgttatcagttgaggggatcg

SEQ ID NO: 287267 - DNA, 420 bp, Zea mays
cggacgcgtggctatgacttacaaccttaggcctgtcattgaagaaattcaaaggtctgcggaggatagtggtgacagacgaactttgaagatgtgcttggggatgctaaagtccatgagaaatcgctctgatcagaactttgttgcttatagaaagggtcttggtgttgtttgcaacaaaaaaggtggatttggtgtagatgactttgttgttgaattctttggggaggtttacccttcttggagatggtatgaaaagcaagatggtattaaacatatacaaaacaacagtgaagatcaagctcctgagttttacaacattatgttagaaaggccacacggagacggagatggatatgacttggtttttgttgatgcgatgcacaatgccaactacgctagtagaatctgccactcctg

SEQ ID NO: 287268 - DNA, 233 bp, Zea mays
tgggcccgacgtcaggcagtgtggcatcaactgctgagctgtctatcacggttcaaaaaagttctagagcttgtgcataggggagaaacaacagtttagaaattttgtattgtcatgttttggagctcatacgctacgttttgtgtaatgttcttggacccagaattgtcggacgaggaattgaacaaaggacaaggtttgaatgaatgttaaatagcaaatgatattcctgt

SEQ ID NO: 287269 - DNA, 299 bp, Zea mays
cgccagggtcgcaagcttatagcagtcaacaaatactagtgcccattaccgccggatcgatcgcaagccggccggcggcaaggaaggagtatcccaccgcagcaccgactgatccacgacttggccatcaatcatcatccatcgcagtatcgcaccgcagcaacagacaccgaccgaggatggttgttgccgtcgccgcgcggtcgtcgtcgtccgcgaccagcagcagcagcgagctggggtcgctgttcgcggcgttcgacgcggacgcggacgggcggatctcggcggccgagctg

SEQ ID NO: 287270 - DNA, 297 bp, Zea mays
ctaacaatggctggaggattaccgtcacctcaatctgccatgcctgctatgtcagagcggtttaataatggaggaatgggaagggatctgatgattggacagcctacaggcagtgaagtaggtgattgtgaaacctcatatgaatctcggggtccgagttcaaggaagcgtaaccttgaggaaggtgggagcacagctgacaatccacaagataggctgcagcatgctgatagcatacaaggaaatttcattgatcgtgatggtgaggaagttgatgatgctgcacaggattcagat

SEQ ID NO: 287271 - DNA, 395 bp, Zea mays
tctagatcgcgagcggccaccctttttttttttttttttttttgggaaaggattctcaattaaaaaaaaggtgaaacttgaacaagaatataaaagtgctagtcaaacatttgggtaaatcgcacagtacatgttagcttaaaagagctaaggttttttacagataggagcaccatggcgagttggcgagacatccttcagatgtctcctctaggctatatacgccttcaaaaaggccggcaaatttctgactactctgtctgttagccacttgactttgacagaagcgtttgccaccaaactgtcaatttcttcctcgcattgttcatagacaatgaagacaatgaacaaggatgccagtacaagtcccatcaaaaatctgaactgaaagttca

SEQ ID NO: 287272 - DNA, 317 bp, Zea mays
agcaaagcacacacgtgataaaatcccctctaccaaattgcaagcaacttcatattctacgcgaggtttctggtcgcggagatcaacgtccacctaccgcggcggcggcgcaacaaggatgacgtgcggtaactgccgcggggagctggacctggatcggaggtcgtgaagagcatggcgagtggggcggttgaggctgctggccctgctggggctgtcgaagctggaggtggaggccatccgggtcgagggggagtgcgcgttcccggagctgcggctccttgagacgagggggtgccctcggctgaagaggattc

SEQ ID NO: 287273 - DNA, 413 bp, Zea mays
gcaaaggcagcggttgatgccattgttgaacagcaaggtatgctgaaatgtacgatgtctgatatggaacatattattgaagatctgaagggtaaagtttcaaaaactgaaaccagagctgagtgtccggagtcaaaatgcacactgttaacagacacaaatttagaacttagtgaagagctagcatttctaagaggtcgagtagaaagtctagagaactcgttacgtgaagccaaccatgcgaaggtgtccactgccaaggacattggtgtgaaaactacaattattactgatttggtatttgactctgtaagcttcttctccagaagtcagataaggccagtcttttggagaagaagcttacagagtcaaatacccaattagagcatgcaaaggcagcggttgatgccatt

SEQ ID NO: 287274 - DNA, 280 bp, Zea mays
cagagaaacacatggcagcagcagcagtgaagtcgtcggcgtcggccgggacgaagaagtcccggaagccgtacgtggtgagcaggccgcgggagacgtggaccgccgacgagcacggccgcttcctccacgcgctgctgctgttcggccgcgactggaagatggtccatgcgttcgtcgccaccaagacgggcacgcagatacgcagccacgcccagaagcactttctcagagcggacaagaagctgggcctcgccgtgccgccgcggcaccctcaccg

SEQ ID NO: 287275 - DNA, 278 bp, Zea mays
ccctctgttcaagcggagagagagtgatagagagagagagagagagagagaagaagcaacaagagcgaacgcgtaaagtacggcacagctcctgagatggccgcgccggcgccgcagcaggaggagctgcagccgcacgccgtcagcgaccagctgccttccgtctcctactgcctcaccagcccgcccccatggccggagcccgtcctcctcggctgccagcactacctcgtcatgctcggcaccaccgtcatcatccccaccgcgctcgtccccca

SEQ ID NO: 287276 - DNA, 413 bp, Zea mays
acgcatcatacaggcaatgattgatgtatgcgcgaatagtggatggcttacgagtgcattgacttgcatgcatctcttgcagatgatcatacagggtctctggtttgagagagattatgaatccctctggatgttgccatccatgaatgatgatatattagaccatctcaagagtagaggagtctcaacagtcccctccttactagatctttcccgtgaagaattgcgtagggtacttcaaccattttctgcgtcagagttgtatcaggatctgcaacatttccctcatgttgatgtgaaagttaagcttcataatgaacaggagcgatccaaacctccaactttaaacatcaggttgcaattgaaaaattcgcgacggtcagcatcaagagcatttgcccctagatttccca

SEQ ID NO: 287277 - DNA, 342 bp, Zea mays
cccacgcgtccgagcagcagctgcccagtgtgtcgtatcaaatggaaggagctcccatttcgaggtcccttgcctgctgaattacctcaaggaaatgcgaggattaatccagttaatgggtaccaaaatggaggccatatgaacatattgcgtccacttcctcgtgcacgctcttctggccggcttcatcatctggccacgttgctgcctgacactgaccctagtactttcaacgatgatgaacccttggacttgtcgtctgaagaggctaatgacaatcatcagggctgtttgagaacagtagagataaaaacatatccagagttcactgaagtacctgaa

SEQ ID NO: 287278 - DNA, 379 bp, Zea mays
aacattgtgaaggcaatgcagatccagaaagcctttctgacattgacgatgcagaggttgatgggtaccttcacaatgaggaagaaacacaatataaaaagattatctgggaggaaatgaacaaagagtaccttgaggaacaagcagccaaggaagctttggcagctgaattggcagctagagggattgatccagaagcgggaaagaaaaaacgaaaacgtaatgaaggcacgaagagctcgacacctgctgaaacaccagcagaagccacgtgcaacatgctgaaacggaagggacttggttcaaagatcaatgtgggagctgttgacgaattgtacaagactaaagatgaagttggcagcgcaaacaatgaagaaga

SEQ ID NO: 287279 - DNA, 286 bp, Zea mays
ctcatactttttttttttttttttttttttttttttttttttttttttcttctcccaaaaaatgtatatttcgtagttgttttgtttgccccttttgattacaaggatcgaagtgcgagcagaaaagtgaaggtgaagatgtgattttacatgggaagctagctttcacacaatctcatgagacaagaaattaaatcctcaatctacttacagagaaaaatagaacatggggaaacaaaacagctggacctttttctttggatgcagagaacattaaatttaccaa

SEQ ID NO: 287280 - DNA, 356 bp, Zea mays
caagctcgtcgtcgtgctcggcctcaccgtcgccgtcctctcaatcctcatgctccctgccgacgtcgccaatcgccaggcctgccgcaaggccgtctacaacggcgcctgcagtctcacgctccccatgaggacgctctggctcgtcgtctacatcgtagacgccgtcctcgtcttcctcgtcatccccttcgccatgttctactacgagggcgaccaggacaagtccgtcgggaagaggctcaggactgcgctcatctgggtcgtcgcgtccgcggtggtgtgcggcctcgtcctcggcattctatacggacttgttggtaaagtggacttcactgtgaggcacctatcttcat

SEQ ID NO: 287281 - DNA, 230 bp, Zea mays
acatttttggagtggaagagttgatcatcgttttgtgcccgttggcaagattctcaagccaatgataaatgagtgcgtgacaccggtgacctgttactggagcttggcgctgcttctgcgtgatgaagaggaacttctgctcgttttccagagatctcgtcctcctgtcaaaatgttggttccaatatggaaagctctctgcacgttgacaaactctcaacacccaagcc

SEQ ID NO: 287282 - DNA, 345 bp, Zea mays
cggacgcgtgggcggacgcgtgggcgggcccgggcgcaagaaccagcacggcaccgccgccagtccgctacatggaagccgcagcctccgcccttctcctccttggcctcagcgccagcctcgctcccttcgcctcggccgcggctccgtacgacccgccgacggtgccggagctcatggaccagttaggcctcccgcgcgcgctgctcccggagacagcccggcggtacctcctacacgacgatggcacctttgagctcttcctcgacgacggttgcgtggtagaggcggggggctaccgcgtcggctacgacatcaagctctccggcaccgtgtcccctgggt

SEQ ID NO: 287283 - DNA, 393 bp, Zea mays
tctcgagcggcttcttcatcggggccagcttcatcgtcaagaagaaggggcttaagaagtgcggtgcgtccggcgtccgcgcaggtgttggtggttactcttacttgtatggaccattatggtgggcaggaatgataacaatgagtgttggagaagtggctaactttgcagcatatgcttttgctcctgctatcttggtcacaccacttggtgcacttagcatcataattagtgctgctcttgcagacattatgttgaaggaaaagctgcatatatttggtatacttgggtgtgttctttgtgttgtgggttcaacaactattgtacttcatgcccctcaggagcgcacaattgaatctgtagcagaagtgtgggatcttgctactgaaccag

SEQ ID NO: 287284 - DNA, 433 bp, Zea mays
cggacgcgtgggggcgacatcgatgagtccagccctcgctggttgctgaagcaagaggtcccaaaagttgtcaagtctatcaacaggcagttacgtgaaaaatcaatcaagacaaaggttggggcattttcagtactgaaggagcttgtggttgtattaccagactgtcttgctgatcatttcgggtcacttgttcctgggattgagaaggctttgaatgacaagtcttctacctccaacctgaagattgaagcccttgtattaacaaggcttgttatggcttcacattcaccatctgtgtttcatccatacatcaaggctctttctgcacctatactgtctgctatcagagatagatattataaagtcactgctgaggctttgcgggtgtgtggagagctagtccgtgtccttcgtccagatctcgagacaa

SEQ ID NO: 287285 - DNA, 404 bp, Zea mays
cccacgcgtccgcttcgtgccggcgctccggtggctcgacccgcaggcgtggcggccaagatgaagaagctgcaccgccggttcgacgacatgatggacgagatcattgcaggttatagggaggccaggagggttgcggcagacggagaggagagcaaggatttgcttggcttgctgctgtcgatggttgacgagcggccgttcgacagcggggaagaagtcaggatcaccgaaaccgatgtcaaggcactcattttgaacctgttcgtggcagggaccgacacgacgtcgaccatagtggagtggtctctcgcagagctgatccgccacccggaaatcctgaggcaagcgcaggaggagatggacgcggtggccgggcgcgggaggctggtcacggagtcgga

SEQ ID NO: 287286 - DNA, 413 bp, Zea mays
cggggctgggcgaggacacgtaccttccccccgccgtcacgcgggtgccgcccaacccgtccatggacgaggcgcgcgcggaggcgcgggaggtcatgttcggcgccgttgacgagctgctcgccaagacgggggtcaagcccaaggacatcgggatcctcgtggtgaactgcagcctgttcaacccgacgccgtcgctgtcggccatggtggtcaaccactacaagctgcgcgggaacgtggtgagctacaacctcggtgggatggggtgtagcgccgggctgctgtccgtcgacctcgccaaggacctgctgcagacgcacccggggtcgtacgcgctggtcatcagcacggagaacatcacgctcaactggtactcgggcaacgaccgctccaagctggtgtccaactgc

SEQ ID NO: 287287 - DNA, 496 bp, Zea mays
cttcatgtaggggtgatagagctgccacgacaggcactctgatcttacaaatgaccaaactggacttcacctctgaagttgacggctcactagttcactgattcccagtacggactgctgagttgatcacatctggggaccttataactccacccagagaagatgcaaaatccacaccttacttctggtgcactggtggtcttctcagaccatagacaatggccaccgaactagatgtgagcaagtctcgccgcttcgacattgccatgtcgaggcgaacccggcgatcgacaagcctggtagcctgcttccaagatcagtatacaccgtccctggcacagcatcgccaccaagagctgaaggcgtttctgcaacgccaggatgaagagctgaaggcactccagcgatgcgaggatgcagagcacaagacactgtgtttgaatgaagatgaggagctgaagattccacaagtaccactgcagtatgaagatgacaa

SEQ ID NO: 287288 - DNA, 499 bp, Zea mays
ttgcatattcctgttcttgatggagatgggcaggttgctgcttgcttggacgttctgcaacttacccatgctgccatttcaatggttgaaggaggtcctggtggcgcaaatgatgtggcaaacacaataatgcagaaattctgggactctgcactagagcctccagatgaggattttgatagtcacagtgaattatctttagtggtgccatcagatgctggggatggcaggagttgtatttatcctcctgctgttggtaattcatttgtatttaagcttcaggacagaaagggacgtatgcatagatttacttgtggctctgagagtttagatgagctgatgtcttctgtaatccaaaggttaggcatgggtgatgagaagagtgtgattcaactgttgtatgatgatgatgaaggcgacaaggtgctgttgacaaccaattctgatcttactggtgctgtgttgtatgcaaaatcatctggattgaaggccttgagat

SEQ ID NO: 287289 - DNA, 305 bp, Zea mays
cgaaaaaccaatctgatacgcgtgctgcagatttccaccccaagggagtgtggcagctctcccacagatcctacccaaaccacaatctcgccgcggtctccaatgggagccgagccggtggacttctcgccgccgccgccgccggagccgacgctttcgccggagccggagatctccggcaaggacagaggagggaactggaaggcggacatgatgtcagctctcggggagtcggtttccttcggccgcttcctctcggagccgctcgaatgggggaagaggtccgccttcgcgcacaaccgcta

SEQ ID NO: 287290 - DNA, 502 bp, Zea mays
gtcatagaacaaataaatcactcagtacagaaactcacacactccacaagctttctgcaatttctagggcagcatgcacttatcgttccgggggatatgcagagcggctcagatctcggtgatgacaaggattaccatttcctgtcactgctgctgaacctagtaaacacgtttctgtacatggttaacacatacatcatcgttccaactgccgatgactattcagtaagcctcggagctgcagcgactgtttgcggtgtgattatcggatcaatggcagttgcacaaatcttctcctcggtatatttcagtgcctggtcgaacagatcgtacttcagacccctcgtatttagctgcatcatgttgtttctggggaacctattgtatgctttggcatacgatctgaattccctaactgttcttattgctggccggctactgtgcggtttgggttcggccagagccgtgaaccgccgctacatcagcgactgtgtactcctga

SEQ ID NO: 287291 - DNA, 477 bp, Zea mays
gaagaactagagcaacagcagattcctcagtcgaagcaatctggagtgctgatacagtcacgcaggacacgggaggtgacatcagacacaaagagagatggtcgtttccaaaccggagctcagtatggtgatgaaactgagagtgtgacaagtaagacacaagtccatcaaggattcaacagctcaagtactgaacggagtgaaaggagggatccaagtgtgtaccccagggttgcagtacagcgctcttcgtctaaagctgagcagattgaatctccgatggagagagggaagccacaaggagctgagatgagaagcaccttatttcgaggaaatgaagaggacccggaaacctcatctggaactccaaaagaaagcagccccaaaacaccccctgcacatgttcatcccaagcttccaacagactatgattctttcgccgcacattttaggtctcgtcgaacaaaccggccttag

SEQ ID NO: 287292 - DNA, 480 bp, Zea mays
gcaatttcctcaaggggccgaagcccggggagccgaaccgccggcggccccaggtgacggccggagaggaggacgacgcgctttggcaccaacgaccagttcgaccgaagaatgatccacctagaaatgacaacgaagaagtggaccgtgcaattgcagagtctctcacagaggacgtcagaacccccaaagagaaaacccgcaagggagacaaggacgacgaagatcttgcgagggccatacaggacagcctcaacatgaacccttacacgccttacaacccctatgctccctctcacgcccaacctagagggcacaggctgtgcgcaggctgcaagcatgagatagggcatggccattacttgagctgcatggggatttactggcaccctcagtgcttccgctgcaactcctgcggccaccctatccgtgagaccgagttcacattgctgagtacagatccataccacaagctgtgct

SEQ ID NO: 287293 - DNA, 331 bp, Zea mays
tgtcagatccgctgtcagaattgcaggcagaatttctttgcacaccagacaagtacagaggatgtgccttctgcattctcatcaaaaacagcaaatagtgctgcgcagcaaggctgctctacaaatatcttttctagagagaacaaagaggggcctgtgatggaaggagttaaattttcagcaaagaattctactgtaccagattttggtgacaggacaaacctaggtggtggggtggatacatcagcagggccaggttctgcagaaatccctactccacggagatcttctaagaagaaagcttgtgctgatgcaacaacatctggaatct

SEQ ID NO: 287294 - DNA, 304 bp, Zea mays
gctcttccttgtccccggcgccaccaggcgagttctacgacccgcggcggggtccaatgaccccgctgcacatgtcgcacgtgcaatcgacgacgccatcctcgacgccgccactgatgcactcgtggcagcagagcagccacggtctgtccgagtccccgctgccgccactgaacccttcgccggccatcacgggcggcacattcgcgtacgacgacctggcggcggcgacggacgggttctcggacgccaacctgctcgggcagggcgggttcgggcatgtgtaccgcggcacggtggccgg

SEQ ID NO: 287295 - DNA, 417 bp, Zea mays
atgtctacgattagcagcgaggttacgagtcacctgaagagcaagttggtacctaggatctcgagtctaaggcaagttgtgccctgatcacttttctttaacctaatgttcctgttaatcactgtgacatgctcaggttaatctgatgggacctaatatgttttcctagacttgtttatcccacaccttgtttaccactgaacttttgggtagttttgctattgctctacctggttttgggattaatattacattatgatcatgttccaattatagtgttttttaattattgttcatgacaagatcattgtgttaattggaacatggagcttaacttgagaaacacgtgctacacaagggggaatgggacaccttggctgactaattaggacagctagtggaggactaccttacccg

SEQ ID NO: 287296 - DNA, 277 bp, Zea mays
ccgccggcgacctcggaggccgtgtgatctccaatcggacccgaccgatcattttcatacggcggaggagtgtatgcatgcatctgtcatcgcgcctcatcatcagcatgcatgttaggttaatccatctccatccgtcacctatcacatggctcgatctgagtaccactacaagcagttgcgtggcgagtaacatgtacaacgattgcaacctttcgtcagcgaactgcagctgctcccgtttttatatgatattgcaactggacctatatatttt

SEQ ID NO: 287297 - DNA, 448 bp, Zea mays
gtatactcgcagtgcagacaccgtaagtgttcatgttgcaacacagtgaaccttgttagaccagtgaataatatagctcatgtgaactgcggccagtgccggacaactttgatgtatccatacggcgcaccttcagtaaaatgtgccgtatgcaattatgtcacagctactggagtaaatactgtggcacccaccccatctgcgaggccaacatcagatgggtcttcatatagtggctcatctacttctgctcctaaatctcaatctcagaatgtaactgttgttgttgagaaccctatgacagttgatgacaagggaaaacttgtcagcagcgttgtagttggagtcacagctgggaaagagtgattttattgacacttcgtacatcattgttgtgttttctatacacgaagttggaaaataccatgtagcatccaatgatgggttg

SEQ ID NO: 287298 - DNA, 376 bp, Zea mays
cacacacacaggcagcagccatggacgccgccggctccttcagcgactactcctctggaacccgtccctggttcgcggggcgcggcggcgacgacttcggctcctcctcctacatgacgatgacgacgacggtgaggtcaagctctggagctactgatggccgatcgcacgtgtgtctgaaggaagacaggttgcattgggcaaataacttccctgtacagccttgggaagaaccggtaccggtgaaatgtactggccgtggccctttcccttcggttcgtctatgctatgtaatgttatgtatcctgctcttctgatgattaagggtattcaggagaagcagaagactgggtttactcggtttgatcgtttaatt

SEQ ID NO: 287299 - DNA, 302 bp, Zea mays
ccaaaatcaaagaaggtcactgcagacctgaagcctagcaactaagttgtgcctaaaaggtctcttcagccaaaaccccgcaagctcagttttccattgagaagatgcctggagattgcagggtggacagctgttgatgaggttccgaggaggactatatggcatactgaagatccaatcagtaaagaaacatatatttttatccttcagcctttgaaacaagaacagagaggttttctcgcaaagaagcgcttcaggagcccaaaagtctgcacatcatatttttctgcctcttctaactt

SEQ ID NO: 287300 - DNA, 346 bp, Zea mays
gcaaagaatctccttgaactggacccatttgatgactcggcctatgttcttttgtcaaacttatatgctacaaatgcaagatgggtagatgttgacaaattaagaagtcacatgaagactattaagttaaacaaaagacctgcctgcagctggcttaagttgaagaatgaggtgagcacctttggtataggtgaccggagtcatatgcacgcagaaaagatctatgtgaagttggatgaaatcttgctaaagctcagagaagtaggttacgtcgctgatacctcatctgcactacatgatacggatgaagagcaaaaagagcataacctttggaaccacagcgaga

SEQ ID NO: 287301 - DNA, 356 bp, Zea mays
gtgctctgcttcgagtgaggcctggttcagattttacgggggttcggttcgatctggtgtccgacggaggcggcggctcctctgctgttccagtgggagaggggccatggaaaacccggcgccgccgaccaacccggcctccgccacgccgtcgccgtcgcggcagctgccggacttccagcagtcggttcgtctcaagtacgtgaagctggggtaccattacctcatcacccacggcatgtacctgctgctcaccccgctgatggtgctcgtggccgtgtacctctccacgctctccccgcgcgacgtcgccgacctgtgggcgcacctccgcctcaacctcatctccgtgctcg

SEQ ID NO: 287302 - DNA, 392 bp, Zea mays
cactcttccggcggcgtcggccgccgcccctcccccacgcccacaccatgtacggcgtcggccgccgcggcggcttcaacgcgccctccaccgctgcctctcggcgccgcaacccaggcgacgaagaggaggacgaggcggatgagggcggtgagggccgcgtcctggaggcgtgggagcgcgcgtacgcggacgaccggtcgtgggagtcactgcaggaggatgagtcgggcctcctccgtcccgtcgacaccaagaccctcgtccacgcgcagtaccgccggcgcctcctactccggtctgccgccgccgccgctgcccgcatccaaaaggggctcatccgctacctctacatcgtcatagacctctcccgggcggcttcagagatggat

SEQ ID NO: 287303 - DNA, 416 bp, Zea mays
ctgagcttttgttgggtgctactaactatggtgctgctgttgatctatggagtgccggttgcattcttgctgagttgctatcagggaagcctatcatgccaggacgaactgaggtggaacagttgcacaaaatttttaagctctgcggttcaccatcagaggagttttgggctaatttgaagttatcccgagctaccatattcaagcctcagcatccgtaccgccgatgtgtgaatgatgtatataaggactttcctactactgctttaacacttttggaccatctacttgccgtagaacctgggaataggggtaccgctgcatctgcccttgacagtgaattttttacaacaaagccatatgcctgcgatccatcaagtctacccaagtatcccccaagcaaggaatatgatgct

SEQ ID NO: 287304 - DNA, 286 bp, Zea mays
agcaaaaccacagctttcctccatccccagcaagaaaaccgagcgatctagcataccaccacagaagatttcctactcggccgcacgtgcagacccagatctgactgaaagaggcaggcagcagctcaatcggcagtaaccgtgagcgagccatgggactggcctggatggtgacggcggccgtcgcggcggtgctggcgtcgtgggcgttcaacgcgctggttcacctcgtctggcgtccctacgacatcacccggaggctccgcgcgctaggcgtgcgcgggcc

SEQ ID NO: 287305 - DNA, 401 bp, Zea mays
atctggtctaatagtggacatctttgctgatgttgctgttattgcttcatctgctgcttgggttgagaaatataggcaagaaatacaatttcttgttagcacagttaatggcgtcagcactataaagtggaggccatcgacagatattttgaaaggagaaggattggatatatcagagcataaggagcctgcttcaccatgctcaactgtcaaggtcatggagaatggcattgtctacttagtctcattagagggtcagaagacagggttttatgcagatcaacgggaaaaccgctatatcatatcattactttcaaaggatcaaagagtccttgacctttgctgctacagtggcggctttgctcttaacgcagctaagggtggcgctgataatgtcattg

SEQ ID NO: 287306 - DNA, 293 bp, Zea mays
tacacgccgcgtgcgcgcgccgtgctctctctcgctcgtggggacagctgcgcgaccgccgccgccctacgccaggcgcccaggtcttcggcagtaccttcgccggcgacgaactagcacccacaggaaaatggcaagcagagcaggtggcgatggcaaggaagccataaacgagcaggtaatcgccaacacctacgccaacatgcgcaccgaaatgaaccagctctacacaaagatcacggagctggagatggaggtcagcgagcactccctcgtgatgggcgcgatcgagc

SEQ ID NO: 287307 - DNA, 489 bp, Zea mays
gcaagatgaagacaacgacgacggcgatgcgctccttgtccgtcgccgtcctcctcctcgtcgccgccgccgcttcagcatccgccgccaaggatcgctgccacttcggcgacaaggcggcgctgctggccatcaaggcggcgctcggcaacccgtaccacttcgcgtcgtggacgcccgacaacccctgctgcgactggtacgacgtggactgcgacgccaccaccggccgcgtcgtcggcctcgccgtgttccaggacgccaacctgacgggcaccatccccgacgccgtcgcgggcctcgtccacctccagaacctcatgctgcaccactctcccgggcatctccgggcccatcccgccggccatcggcaggctctccaacctctccttcctcaccatctcctggacgggcgtctccggccccgtgccgtcgttcctgggcacgctcaccaggctcaaccagctggacctctccttcaacgccctc

SEQ ID NO: 287308 - DNA, 430 bp, Zea mays
gtcgagcagaagcagagtttgcagtctgagaagacccctgtgctgtccggccaacttttccacctccgtccctttgctgttcagtctttggatgctccccctccgccgtctagatctccccaactcctccgtcctcttgcttcctgtcgtcgacctcggtggccgccgcgagctgcgggtggttcatcgccgtcgacctcgcctctccgctccttctgcactgcctgttaccggcttcctggtggtcgaccggtgcggcgcgggtcgtcagtgaagctccgactatccggattgactcggatcgacctctcctctcgtgggtttttggattttgatcagttatatcagaggactgcttatggatgatttcatggctgtagcttgctaggccctgctttcctgagtgtacagatacatcatggcaccacgc

SEQ ID NO: 287309 - DNA, 294 bp, Zea mays
cagaagcagagtttgcagtctgagaagacccctgtgctgtccagccaacttttccacctcagtcttggatgccccccctccgccgtctagatctccccaactcctccgtcctcttgcttcctgtcgtcgacctcggtggccgccgcgagctgcgggtggttcatcgccgtcgacctcgcctctccgctccttctgcactgcctgttaccggcttcctggtggtcgaccggtgcggcgcgggtcgtcagtgaagctccgactatccggattgactcggatcgacctctcctctcg

SEQ ID NO: 287310 - DNA, 334 bp, Zea mays
  unsure (1)..(334): unsure at all n locations
cgcgctcgccaatcgccattgctaacaggaggagagagaaccgtgagcgccaaaccaggatccgatccctgtgaacagagagaaggggtagccaccaccgaaggattacgattgtcaggcggccgggtttgagaacgccaatgccgggagagagattaagaacgacctgtacggatcttcctcaagcctcgttcgttttcagaggatcagcccattccaggccttgttccgggtggaacgaatgagcctggtttggaatttggtagaacttatttatattgttcgtttcggcccgaattggaatgganactggcctgngataaaattttccttc

SEQ ID NO: 287311 - DNA, 314 bp, Zea mays
gctaggtgatctcaactataggatcaacttaccatatgagaagacacatgaactcatatccaagcaggactggaacgaattgtttgggaaagaccagctgaaagtagagctgaagaaggggcatctgtttgaaggatggaccgaaggggtcatcaactttcctccaacgtataagtacaaggttaactcagaaaagtacataagtgatgataacaaatctggaaggagaacacctgcatggtgtgaccgaattctttcccatggtaagggtatgagattactgtcatataagacagttgatctcagactatcag

SEQ ID NO: 287312 - DNA, 326 bp, Zea mays
tgtgccgtgccaagtctctggacgatttggccgaagtgttcagagcgtattccttcggggaaatcatgtcgttggaagatctgtttgcacgagcttcaccaccaatctgtgcggagtggttccctaggcactcatctttggcctttgggcacctgctgaggctcctggagagaggccctctggattaccagcgggtggttcttctgatgcttaaatcgctgctgcagcaaacccctgtggatccgtcacagataccccaggtgtacaacttcgtgtcgcagctggtggagagcacattatgctcggaggcgctgaatgtgctggag

SEQ ID NO: 287313 - DNA, 445 bp, Zea mays
gcgtcgcctgccccatctcctcctgcctgcgcgatccagtagtaggagtaggcgcgcgtgccgcctctctcgctcgctcctccggttgatcccccatcgccaggagcccaggactcgcagccagcccttcgcgttattcgcgcgcgccgaacggccgtagcgtgtgggtggcgtcgccgtgcggtctcttggtgccggtgcgggccgcgtgacggtgtgtgagtgtgtgacgaccacgcggaggaggtcgttctgttggttggttggtccgcggccatgatggcggtaccggcggagaggcggtctccgtagcgctcctcttctccctcgttttcttctgcgcacgcttcctgctcgacctcctcgtctacaagacattggcagtctaccttttcaacactaaagcttctaagttgatgagtgatgaggccaggcaagcaaagat

SEQ ID NO: 287314 - DNA, 214 bp, Zea mays
caaaatttcgagtgagagaagcacatacgctaacagtctccagccagccagccatccaccgtcctctcctctcctcatctgttgtgtcggccggcaggggcgcgcggctgctgaggtaagtagtagcgcgatgggcaaggtgtgctgcagctaggacgcgcaggatgaggccgggatcgacctccttgggctgctggtcgccgccatcatcgcc

SEQ ID NO: 287315 - DNA, 421 bp, Zea mays
  unsure (1)..(421): unsure at all n locations
gtttcttctcctgttcaaactaggcgtgactgggatttgttagggaatgaaaatcgtcaggtcattcgaagtgaggttgccacaacaagtgcagagcatgataatgttgggaggacctctccttcaaccagcagccataatatgaaggatgcccctcaaagaaccgatcatgattcccgcgctgttcgatttaacattgaatccaaggatcagaacccatcattcaaggaccttattaagagtgatgcctcagaaagtctggacggagctgaggccanattccaaagaactttctgcgcagcagattctggaggctcactaatttgcatctggtctgatgacgcaatccacataccttatcttctactgtcttgaggagctagtcttcttttccgagtgcagagagatcgctcagcataga

SEQ ID NO: 287316 - DNA, 521 bp, Zea mays
cgacgaccatgtcgttgctggaggcgcacatgcggggcgcgccggacggcgtgtacacgcgcgacttccccgaccggccgccggtgatgttcgacttcacgggcgacgccacggcggccaaccggtcgttcatgctcacgtccaagggcaccaaggtgaagacgctgcggtacaacgagacggtggaggtggtgctgcagaacacagccgtccttggcgccgagaaccacccgctgcacctccacggcttcaacttcttcgtgctggcgcagggcacgggcaacttcaacgcgcacaggcacgtccgcaagtacaatctcgtcaacccgcagcagcgcaacaccgtcgccgtccctggcggtggctgggccgtcatccgcttcacagcggacaacccgggcgtctggatcatgcactgccacctggacgcgcatctgcccttcggcttggccatggccttcgaggttgaagacgggcccacgcccgacgccgtgctcccgcagcccccgcaagactacccg

SEQ ID NO: 287317 - DNA, 357 bp, Zea mays
ggtgtgtctagtctctagtctagctaggcactactctagctcccaagtggccaagtatactcgccagagtacgtagagtgtagttgagcgtcgtccaaggatggcgtggacctcccgccgcatggtcgcgtccgcgctcgtcttcctgctgatgctgctcgccgcctcagagatggggacgacgagggtggcggaggcgaggcactgcacgtcgcagagccaccggttcgtcggcgcctgcatgagcaagagcaactgcgagaacgtctgcaggacggagggcttcccgtggggcgagtgcaggtggcacggcatagagcgcaagtgccactgcaagcggatctgctagtaattaac

SEQ ID NO: 287318 - DNA, 317 bp, Zea mays
  unsure (1)..(317): unsure at all n locations
gctcggatatcggctcgatgctaactggattntctaaacattctgttcaggtgataatatctggtagatcatatcacaatgttttcccagtatctgaaggagtgctctcaggtgatgagagctacacagaagattcccatgttcgacatgcattaactccttaccttgaatacattgcgtacctatatcggaagatggatccgcttcctgagcaggaacgcattgagattaattacagggactttttgcagtctcctctgcagcctctaatggacaatttggaagctcanacttatgagacatttgagaaggatgtt

SEQ ID NO: 287319 - DNA, 351 bp, Zea mays
cttatgaacagccttcctacacttcatatgatcgatcttatgaacagccctacagttttcacgctgttcccgatgagactacctggtttcctaatcagacctaccaggatgtctacaaagaggaggaaccacaattccaggaattcttctcgtatgatgaagacaataaaatttcgtctcaacctatttttagctacaatcagcattttggtgaacaatcgctgcatattcatgttgagcctccagaaacagtttcttctcacaagctggagtactatgagaatttctcgatgtacaacaaccaaaatgatggtgataatctggagagttcaagacaatcatatgagacac

SEQ ID NO: 287320 - DNA, 341 bp, Zea mays
cccccggcctctatctctatctctctcgtcttgtcttggcctccttgccttctcccccctccgtgccgtggccagtgggtgctgttgcaagttgcaacttgtccctcccaacccaaggcagcaagcaaagcacagcagtgctgttgcttcacgcccggcaggagcagcgacgagccgacgagaacagccaaggagagatctgcagaccggtcggtcgatcgagatgaagagccggatgcagagcagcgggggcagctcgggcgcctgcgccgcgggggagaggaacgcgcacagcagcggcggggggtgcaagctggagatgaaggacgtggagaagaacc

SEQ ID NO: 287321 - DNA, 281 bp, Zea mays
gttgcaacttgtccctcccaagtcccaaccaaaggctgcgcgcttcacgcccggcaggagcagcgacgagaacagccaaggagagatctgcagaccggtcggtcgatcgagatgaagagccggaggcagagcagcgggggcagctcgggcgcctgcgccgcgggggagaggaacgcgcacagcagcggcggggggtgcaagctggagaggaaggacgtggagaagaaccggaggctgcacatgaagggcctctgcctcaagctctcctccctcatccctcc

SEQ ID NO: 287322 - DNA, 274 bp, Zea mays
caaaaatatggtcttgcgtgaattctatgactatgctgctgcccctgaggtcaacagtgagcaccccctggcaaaagcgatagtggagcatgccaaaaagttgcgtccagaaggaaaccacatgtggccggaagcaagggaatttatttcagtaaccgggcaaggcgtcaaggcggaggttagtggctagagtgtcatcgtggggaacaaaggcctcatgctgtcctctggcattggtatccccttggaagcttcagaaatcctcgtggaagag

SEQ ID NO: 287323 - DNA, 878 bp, Zea mays
  unsure (1)..(878): unsure at all n locations
ctcgcaccgttccccgacgcggtcggtccccccacgtagagctaacgaaccgaagcgcgccataatatattgcagggcagcgcacangcaaaaggggcgcttcttccatgatcatcataccataccaaaaccttccacaagcttcagggcaatcttgtgcggctgtgccccatccaagctgcttttgtgctgctttttattcattttcggattggtttcgtttagtttccctgctggtctagtagagcgttttgcgaggtaaaaggcctgagcatttcagaagtttggaagaaaaaaaagatgcccctggatttttgaggtgggcatgagtggagagtacagggcagagatacagccatacaggtccagcttgctgctgctgctcctcctctactcctgccattgtttagtacacgcaacaagggttcgtatctgtgccttacttctgaggaggggtggtcgagaattggttagcacagatgctgctagggagaagaaggctcctccttgtgtgcgcgagcctcgtgcttctttcactcctcgggccatccaatggcgcatcgaactccacggggaataatctcggcgagagccgcaacaggaccagccatcctctggaggtgacaccgggagtgtcgttccagctcaggctgcacgcgctgttccactggtcttcgtttggtttcttgatgcctctggggataatcctggtgagaatgtcgagcaagtgccgcggcggcagatgcgtcagagccctcttctactgccatgccatctcgcagactgtggccgtcctcctcgccaccggcggcgctgttctgtcgctgatgaacttcgagaactccttcagcaacagccaccagagagtggggctggcg

SEQ ID NO: 287324 - DNA, 328 bp, Zea mays
agaaaacccaacctgctgatgtcgcggtgaccatcaggtatacttgctgcgggcgagcgggatcctgcttccgttctacctcgtcatgaggctcatctccgtgatacagcaggggcagaggcagtaccgcctccggctgctccaggagcagaggagacacgcgttgaggtcgggccggctgcacggccaggaacagcaacaacagcatgtcatcctggttcgctgaggaacgagccattcattcaccttgccttggtgtccatacattccattcatccgtcgtacgcgtacaaggttgtaagatgtaccgctccattttttctttttg

SEQ ID NO: 287325 - DNA, 206 bp, Zea mays
  unsure (1)..(206): unsure at all n locations
ctgccaccanaatcggagcgactgagcggggggtgggtgagtcgcctaagtgtgcttagtgtgttttgattttcggcctcctcttgttgttgctagctaatgcatgcatgcatgccagcctctctcctttgttttggcttggtgcttctcgatcgtcactgtaatccatcttcagagagagagagagagatagagagagagagaga

SEQ ID NO: 287326 - DNA, 429 bp, Zea mays
tatatttatcgggcgtatcaccttttcaataccatgaaagataaggggttcacgattgagaaagatatctatgacccattcctcttgtatcttatggacacggggatgtttgaggaatttgaggtgttcagtgcattctttaaggaggcgaatccgaagtccttctctagaatagcttattatgagatgttgctttgtattagagttcaagatgaagaaaaaatccaggaactttgtcactctgttgaagactacgatgagaaagttcactatgacctagcagagagttacatgctggcctttgctgaaagcggcagaaaggaagatctggttgccttgttggatatggttgatctatccaaagtttcaggttcaaagtacataactaatattttgacatcatcctctcaagaagtttctctagatcgc

SEQ ID NO: 287327 - DNA, 418 bp, Zea mays
cgtcgagtgacatgtgtaaaacaggaaattgataggtgtgggggaaaaaaaacggtgagtcaccatggctggaagtgctgggagatgagggggatgtgttatttctggctggctgccatggcacggcggcatggcatggcatggcagcagctcttgggcgcttcttggctgagattcggaacatgcgtcgtgcggttgagccttcccggatctgtcctggctgcacggcatggtatcccacacgtgagagagcaacctcctccgcctgtacggaggtgtagatacagttttctcttgttttttcatgtgtgtgggcctgttcgcctgtacgaatggtgaaggtaaacagagagtcgccgctggattaaggagacgccgtgtactgctgctgacgctgatctgtgctgctgctcactgt

SEQ ID NO: 287328 - DNA, 349 bp, Zea mays
  unsure (1)..(349): unsure at all n locations
tacgtagctcgaattcgctcgaggtgaatattttgcttgggttccggtgctacaattgcgcatggagttcaaaatttatggaattctcatcctccagagaatattcactgggctgcattagtgattggtgggtccttcctaattgaaggtgcttcactgcttgttgctataaaggctgttaggaaaggtgcagaagcagagggaatgagtatctgggactatatctggcgtggtcatgatccaacttccgttgctgttatgactgaagatggtgctgctgttacaggccttgctattgctgcagcatctttggtagctgttcanatgacaggagatgctatgtatgatc

SEQ ID NO: 287329 - DNA, 331 bp, Zea mays
  unsure (1)..(331): unsure at all n locations
gtccaaatgcgccgcttgtcctcaaaggaatcacttgcacttttgctgctgggaacaagattggggttgcagggaggacagcaagtggaaaatcaacacttatcagctcattgttccgtctcgttgatccggcgggcgggaggatacttattgacaagttggatatttgctccattggccttaaggatctaagaactaaactaagtattatccctcaagaacctacacttttcaggggaaccgtgcgcaacaatttggcatcccttggccagcattctgatgnagagatattggaagcctttgagaagtgtcaactgaagacagcaatcag

SEQ ID NO: 287330 - DNA, 330 bp, Zea mays
agagaacctagtgcagtccctaagcagataataagtagaacagaggaatccaaaactaatgtgaatgcaaccaaagatggtacaacacaggaccgtgcgaaactgaatggcgatgctaggctatttgtggacatacaaccagtgtcagcggctcaagttaaagagagtgctcgccacgttaagaatgaatcacgagagcaaatacctttctccgggccattgagtgtttcttcatctagtggctttgcatgggccagaagaccacaggaggaccgtgcctttgctagatcacggaccagatctagctcaagggtgcagtttcctgctgat

SEQ ID NO: 287331 - DNA, 449 bp, Zea mays
gagtgatacacaaatggagagggaaattaagatagtgaagaggcaagcgaaggaaaattcaaaccttattgatgctgatgacagtgacgagttaagaagtatatgccctgagagtgatgaagatgatatgactctctggagtggcagtgaagatgacgatgacggcgatattccctctgaggcacatcctagtgaacgcatgactcatatcttgataaggtgtttgaatttgaggagtcaccaaagtaccacacaatctcagagctgttgaaagcagagaacgaaccacctgagctatctccgggaaagcaagcaaggaaacttgctgtagaaaatgctcttaagaagttaaagaaaggccctgatggacgctacattaacgtatttgatgttgttactgatatagatatcctgattggtgcatttgagaacattgtttcaggaccaga

SEQ ID NO: 287332 - DNA, 284 bp, Zea mays
cacccacctctctctctctctccccctctccctctctctctctcttgttgggacctggagaagaggaaggaacagggagcaggggggaagaagaggttgctgcgacggctcaagcctcaaatttttggatccaggcagacaagcagagaaacaccagttggtcaagatgtcagctggtttccagctcggtgtgatcgggtcacttgcactctctgtcgcatcctcagttgccattgtcatctgcaacaaggctctcatcagcacgcttggttttccgttcgcca

SEQ ID NO: 287333 - DNA, 401 bp, Zea mays
gatagcccttgattcaggattatccacaggtggctttactgactgtttacttcagcatggagcatcacatgtttatggtgtagatgttggctatggacaggtggctgaaaaaattcgcacacatgaacgtgtttcagtgatcgaacgcacaaatttaagatatctatctcaactgccagaaccagttgacttggtgacactagacctatcatttatctccattctcttggtcatgcctgctgttatcaaagtaatgaaaacggattctacattgataacacttatcaaccctcaatttgaagcacgtagatcacaggtaggaggtggtgggattgttcgagatcctttggttcatcaagaggtactggatagaataatttcaggcgtggaagaattttgat

SEQ ID NO: 287334 - DNA, 346 bp, Zea mays
caagtatccgagtcgcccagatatccagatattcagcgatttcaccttgcacatcgcctccggcaagactgttgcactcgtgggagagagtggcagtggcaagtcaacggtgatctctttgctggaacggttctacaaccctgactctggcaccatctcactggatggggtcgagatcaagagcctgaaagtcaattggttgagggaccagatgggtctggtggggcaagagccaatcctcttcaacgacacgatccgtgccaacatagcctacgggaagcatggggaggtaaccgaggaggagcttgtcaaggtcgcaaggacggccaacgcgcacgagttcata

SEQ ID NO: 287335 - DNA, 190 bp, Zea mays
accaacctcaaggcaagaagaaaaggaggagagcaccatggagacagtggaactgtagacctgccttttggaaaggccacatgagtcacattcccaggggtatttcgtttggctataatttcttcgcattcaagcaggttcgtgagcctcctgattgaagaagcccaacgtgtgagcacaccatcggatc

SEQ ID NO: 287336 - DNA, 295 bp, Zea mays
gacgacgtgcccgagatactccacctccagctccggaactacctctactcgttccagttcctgctcgacgacaggagctggcgggcctcggtgcacaggtacagggccgggaggacgaggtacgcgcacttccggcagacggacgacctcctggccgattccgggtggcactgcagcttctgcttccgccgcatagacgacttcgtcctcaagatgaaggctacatgcacgtggaccggatcaggttcgggtacttcctgaacccacagatgatccagcacgtgatctgcgaggg

SEQ ID NO: 287337 - DNA, 397 bp, Zea mays
cccacgcgtccgcggagacgaagcgacacctcgacgtgttcgccgtcggtcccatggtcgccggcgccggtggtggctcgggctcctctggtgcgtcagacgacgagcgacggatccatctgtacaggcacgacgacgccgacaggaagaggtacatggagtggctcggagagcaccggagagctcggtggtgtacgtgtcgttcgggagcatagcgacgcacaccgtgcagcagatggaggaggttgtccaagggctgctgcaggctggacggccgtacttgctggccgcgcgcactggcacgggctcgaggacgacggtgcgcgccgcgtcctggacaacgccgcccagagcagcggcggccgtgggacggtcgtggactggtgcgaccagccgg

SEQ ID NO: 287338 - DNA, 685 bp, Zea mays
ggtactttgatgatgcattactggcgatgcagaagttgggaaagaatagggctagcttagtagacattgcagagtcctttaaatcaagagggaatgaattcatctgatcaaaccaacaccttaaagcggtagagctgtacacctgtgccattgcattgaaccaacaaaatgccatttactattgcaacagggctgctgcatatacccttcttaatatgaacaacaaagctattgaggactgcctgaagtcaattgaaattgaccctcactacagcaaagcatatagccgactcggatctgcttattttgctatggggaattatcacgatgctctgtacaagggatacttgaaagccgccgagcttgatcccagtaatgaaaatgtcaggcagaatattgaggtcacaaaaaagaaactggctgaacaacgagtcccaccagaagagcagaacacacatgcaggccaagctcaaggaccacatccaatatttacaagtggtggtgttcctttcaatctgtttccaccaggtagttctccagttcaagaattcttcgctggctggtcgtccgatgttggtgcaccaccaccaggacattcgataagtataaatttgaatgatatttttggccaagcaaatgtcaatgctagcggtcaaggatcaagtcaaacagggaattcaaataa

SEQ ID NO: 287339 - DNA, 307 bp, Zea mays
gactagttctagatcgcgagccgccgccctttttttttttttttagaatgaaccatcgatcaatcagatagcaccaataatgtcatatatagaccacatcctggtgacattgatgtacagtaagactgcgagctgtatatctatctattcatggaaatgcttgctcgaaaaggtcccatgggcggccatgggctctatcctggcttcaagtccattttgtcagcacgccgatcttcacttcccacagctccatctggaggtcggaacacagctgaggtagtggcaccagccgcagtgatcattcgcg

SEQ ID NO: 287340 - DNA, 225 bp, Zea mays
cgcgacaaggaggtctggggcgaggacgccggcgagttcaggctggagaggttcgagaacggggtgacgagggcggccgagcaccccgacgcgctgctatccttctccagcgggccaaggtcgtgcatcggccagaacttcgccatgatcgaggcaaaggccgtggtcgccatgatcctgcagaggtttgcactcgagctgtcaccgaaatacgtccacgcgccc

SEQ ID NO: 287341 - DNA, 616 bp, Zea mays
gttcgtgaaactgttggtcactatctcccagctatacgtcgatgaagcagatacgacactcactgatcttcagagagcagtagatcgctaacatccactctataccgcgtcattgccattctctcggtccgttaatttgtggacatcaggtgagtgatcgtcagctgcttccttttctgaggataagttctgagtcttttcatttcgactatggttgactccaccatttatatactcgctacaaccggtccattttcatgagacccctgttggtctttttggtctccagaagacacatccgaattttgtgttccatccgcgactctagattcagaacttaactgttctgattgtttaccttgtctcataacctcttttctcatagattcttcctccttcagtttcctaaatctgcatctcctctctggtagccacggtgcctggaccatcttccaggcgacgagccaccacgcccaggcccccagtttcccaccaatacataccatagggtgtttggcagggtcttgtcttagagttctgctctggagccaatgccaaacacgccctaaatacccatgacactacattgtcaaaatgtcactagcagcatgcatct

SEQ ID NO: 287342 - DNA, 449 bp, Zea mays
cgacgccgtgcgctccatcgccatcgaggtcggcaacccgcccaccgccggcgctgggaccgcccacgtgcccgtcatctgcggcctgtcgcggtgcaacaggaaggacatcgacgccgcatgggaggccgtcagcacgctcggaggccccggatccacacccgcatcgccaccagcgagatccatatgcagcataagctcaggaagacgcccgagcaggtcgtcgctattgccagggagatggtggcgtacgcgcgcagcctcgggtgccccgatgttgaattcagccctgaggatgccggcaggtcaaatcgagaattcctgtatcatatactggaggaagtcattaaagctggagcaaccactcttaatatcccagacactgtcggatacactcttccttatgaatttgggaaattaattgctgacataaaggcaaacacttctgg

SEQ ID NO: 287343 - DNA, 260 bp, Zea mays
gccacgcgtccgcggacgcgtggcaggacgtcgccgtcgccgtcgccaaggccgatgcgcgacccccgccgataaggatacctgcagtggccatgcgcgtcgggccctcgcaggtggctgccgtcagcatggacgactcggactcgctcgtcgcgaggccatgactactcctgccgtacccgtacgtacgtgcttacagtgctgagtgaagagcaagtatacgtggcacttgttagttgttactacaggatcatacttgt

SEQ ID NO: 287344 - DNA, 232 bp, Zea mays
ccctgttgtaccactaccattgctgccgtgagcagaacaagagaaaaagatgtcaagaacgatgcaaacaaccagacggaaagaacgtactctcattttaaatagttagtagattcattatgtttttatatgtgtctagctagattcaacatcatctacacataaaaccaagagctaaaataaatattattttgagacggagggagtacatgtttcgacatcctgagcaact

SEQ ID NO: 287345 - DNA, 523 bp, Zea mays
ccaaatctcaacccaagaacaaaaatggccaccgccaccactgaagccgaagtccgtgagtccctcggcacgaagttcggtcgcctcaaggaacaggcgaaagacatggcctccaggcaccccgtcgctggagccgcggccgtcatcgctgtcagcgccgtgggcgcctacttcttgtggcccgtggcggccccggccgtggccatgatgaaggcgcctggatccggcggtgtgctcgtctcccgcgcggcgtttctcgcgaagaaggagctgtacttcaagctcttgcgcaccgggggcgttgcggcggcggtcgccgctttggcgtactgcgcatgcagtagtggtacatgctgttcgtgaacgagcggcgggccggacgtttcaggttgtatgttgaccaagtggttattagtactttcctttcgttggtgttgagtctcgactctcgagtttggattatctgtcaaaaacctatgtatgcgtgcatgatcagtttgatgaataatggaactcttttaag

SEQ ID NO: 287346 - DNA, 324 bp, Zea mays
acacgcagaatggaactgcgggatgttgctgcggtcacacggctgctgagggcttaccttgcgaggttcgtggtggcaccggattttgatgaggtcgatgtggagcactggctgctgccgcaagaggatgtcgtggacagctaccttgtggagagccctgagacgcatgaggtcacggatttctgcagcttttacacgctgccctcgtcggtgctgaacaatgctaactatgcaacgctcaaagccgcatactcatattacaacgtctctaccaaaactgcactgcagcagctgatgaatgatgctctgattgttgccaagcag

SEQ ID NO: 287347 - DNA, 335 bp, Zea mays
cgaggatcctccgggcaggcggcgtggagaaggcgttccgccggtaggtctccgtcgtcggcaagggcgagaggctccctcagggcctcgcagtgctacctgtccaccaccgccggcccgatcgccggcacgctcttcgtgtccacggagaggatcgcgttccggagcgaccgctcgctggcgctgacctctcccaagcgcggcacggtggtgcgggtgccgtacaaggtctccatcccgctgggcagggtcaagacggccacgccgggcgggaacaaggaccggccggagcacaagtacgtgcaggtcgtcacggacgacggcttcgagttctg

SEQ ID NO: 287348 - DNA, 408 bp, Zea mays
tacacatttaattggaatctacgtcaagcaacctcgggccggcgcgtgatcgagatggcaaccagtggaccgagcgccgccgccgccgctcccaaggactcgtggccggaggttgtgggcatgtcatcggaggaggccaagaagaagatcaaggaggacaagccgggcgccgacgtgcaggtggtcccagccgacgccttcgtcaccatggactacagcaccggccgagtcagggtcttcgtcgactccaacgacaaggtcgccaaagctccccggatcggctagctggataggagggacatgcatacatgcagcaggtgcccagctgccaacgtgcatggaattatttatagttttgtatgaacaattgataaataaaaggcaaggtgtatccgtgtatatatatgt

SEQ ID NO: 287349 - DNA, 328 bp, Zea mays
ggctggaaaaggaagctatgtacctccacagtatactcccttctacagcatggatacccaagaggatcgtgtccatgccgtggaacgcaaccatgctacgcgccctaaactagaccaggatccaacacaatggtcatctggcatctgtgcatgttttgatgatcccagagctgttgtattggtgcgacttgcccctgcttcctttttggacagaatgcacaattcttgggatctggaacgcttgctggatcatgcactacacattgcatgttgtggggccttctcacaagtctatgctgtgtatttactggaggtctagtattagcag

SEQ ID NO: 287350 - DNA, 329 bp, Zea mays
cccacgcgtccgaggtcggctcatcaacatcaggccatccaccaattcactccgacagctaacacgtttgccgccgatggggtcgtcggtgaagaaggcggcagtggcggagacgacggcgcgggtggtggaccaggcggtggcgtacgtgctcatggccgccgcgctcgccgtcacctacctcgtgcactgagcaccgcgcggtgaacaccagtgccaattttgatacatcctacggaaaggaggacagacaagctggagatgacgtactatgattcaatcgcagcggcagcggaggattcgactatctacgggtcacacgtactact

SEQ ID NO: 287351 - DNA, 384 bp, Zea mays
cggacgcgtgggcggacgcgtgggcggacgcgtgggcggacgcgtgggcggttgggttggagtcttcgtcgccgtgtcctctcatctctcctccctccccatgcacgcgaacagccctctgctgctgcaaccaaagcggtggccgtggcgatgtgccgctactcagacaccagagtacggcaacagcggcaaatggtggtggtggccgcagagatgggcatggaccggctctacgtcatggacggaagcttctgcggtacgatatcaggtaagacagctctcgggcgttcttctttccccgctactggtgaccgtgttctgggtggagaatcgagtcacggtgggcggtcgggttgatcctatggcaacaccgtcgcggcatgt

SEQ ID NO: 287352 - DNA, 294 bp, Zea mays
caggaagtcgggaacgtcccatatgtcgtggacaacggtgccggcgtgttctccaaggacccaggggaggccgcgagacaggtcgcccgctggttcagcagcagcagcacagacggggacgagctcaggagatactcgcgtaacgcgctgaggctagcgcacccgaggcggtgttccacatcgtcagggacatccacaagcagctccaccgacagcctgccgcggtcacccggatcccctcccgctcgctgacctcgtccttcccgtaccatatgtgaaatcaagaatgctact

SEQ ID NO: 287353 - DNA, 271 bp, Zea mays
cgacgatgaattcaacagcaaggtttctgattttgggttggctaaacttctgaattctgacaaaagtcatatcaatacaagagtgatgggaacatatgggtatgtagcacctgagtacgcaaacagtgggatgctaaatgaaaaaagtgacatctacagttttggagtggtgttgttagaatgtgtgacccctagggatccagttgattacagtaagcctgcagatgaggtgaatctcatagagtggcttaagatgatggttaccagtaag

SEQ ID NO: 287354 - DNA, 300 bp, Zea mays
tataattacaaaataactaaacattaacagagacaagtctaacatccatgtccaaaggttccaacgcttacgactttttggctaaagtcctcatcattggtgattcacgtgtcggtaaaacttgtctcctccctccgttctgtgagaataactttactacctcccacttagccactattggtattgatttcaaaatgaagacaatcgaagttgatgggaagaacgtcaaggttcaaatctgggatactgctggccaagagagattcaagaccattactcagacttactataaaggcgcta

SEQ ID NO: 287355 - DNA, 374 bp, Zea mays
aacgacaactccgtgtccgacgtcgtcatcttctccgcggccacggggatcatggtcaccgcgccggccaactccatctccggcgtgcactgctacaacaaggccacgggcttcggcggcaccggcatccacctcaagatcccgggcctcacgcaggcgtggatcagcaactgctacatggactacaccagcatcgtcgccgaggaccccgtgctgctccacgtctccggatccttcttcctcggcgacgccaacgtcgtcctcaaggccgtcagcggcgtcgccaggggcgtccaggtcgtcggcaacatcttcagcggcagggacaagggcgtcgacatcgtgcagctggacggcgccttcgccaccgtgga

SEQ ID NO: 287356 - DNA, 382 bp, Zea mays
cccacgcgtccgcccacgcgtccgcccacgcgtccgcccacgcgtccgattcactggacaacattccaagccctgtctctgtccttgatacatccttctatcataaaaggatctcagattcattcaaagatggtgagacacattcttcagaggaatgctggaacccaaacagcctgcctgacacaccacagtcaaaagcgagcagtgaagccaaccagattaaaccagaaaatctggaagttctgatccagaagctcgagcagctgcagtccatgagcgaagaagacgcaagtatcaaagaagtcatggcgtcagtcgctgcaaacaaagatcaccagtatatctacgagatactgttggcatctggtcttctgcacaaaga

SEQ ID NO: 287357 - DNA, 268 bp, Zea mays
ggcaagctcctctctcaagtctcggcacctccaactacgcagcaaccaaccatgagcaccagcgatgccgccgcgaccgtgatccccatcgacgtcgtgccccgccagcacggcaaggccccggccgtggacacggtcacggcggcgcctcctcctctcgctgcagcagcaccccccgctgcgacgacggcgcctcggaagacgctggtcccgttcttccggcgcgccgaccgcgtgcagcggtgcgtggctgtccttgacttggtgc

SEQ ID NO: 287358 - DNA, 327 bp, Zea mays
  unsure (1)..(327): unsure at all n locations
ganagaaggcgcgcggttgctgtcgttgattcttgatggttggtggcttggtgccctgccagctagtgcttcttcatcctttctctaacgagtgagggacgatgatgcactcccagtcgcaggctcccactcccaccttgcggtgctgccgcactctagctgagctgccagctcggatctccatggcctctcttttcctcctcctcctcgtcgtcgtggcggcgctcctctggccgcctgccgtcgcggcgcccgaggagcacctcgtcaccggtctcccgggcttccatggcgccttcccctccaagcactactccgggtacgtga

SEQ ID NO: 287359 - DNA, 244 bp, Zea mays
gttctagatcgcgagcggccgcccttttttttttgtgttttttttttttttaaagttaaggcatcaagaccttttttaacagaaacacttcgtcgtccaacaaacacacaaccaaccaatatttgctcagttcctgctaatcccagatcactacagtactacacgtgcggacatcaccactgacacactacacaacgcaaaagctccatccgctgctctgctctccgccggtcgctcagtaccc

SEQ ID NO: 287360 - DNA, 313 bp, Zea mays
tagagaccagaaaagtgttggagcacatcattaactatgtacttcacaagggaacttttctcccgctggctgtgcctcctacttctcagcaaattatcctttggcgtctacttggttggtcattctttgttcgctgaagatgtttcaatcattggccagagaacgtctagagcagctcaatgcttctccctcagcgactccttcaaaatattttcgtgtgtactctgcattgcttctggttttatcagctgatctactttggatgtggctctgtgcagggttttgcagcttctgtaattccaagttgttttgg

SEQ ID NO: 287361 - DNA, 290 bp, Zea mays
ctcgctcaggacgtcgccaccgggaggtctccgtgctctacgacgcacggcaaaccatcgctgacctcgccacgcccgtcgtgcatgcctcacagggcgtgtccgcctcggagtccgccgtggtctgggccgaggtcagcgccgcgatcctgaacaaggactgggaggcggccaggcaggcgaacgcgcgggtggaggagacggcgaggcggctcgccaaggagaggaacgagcgcggggaggtgtggactcccagccacttctcgctgtggcagaacaagcacggcgac

SEQ ID NO: 287362 - DNA, 290 bp, Zea mays
ccgtcaccccaattgctacattcttattggtcattcttgccatgactccttgccttatcaaagcattctctaatcctcaaccaaagcatattattagatgggtctcgtatgcatgcacatgtgggtttatgtttggatggcatgtacatgagaaggcatcacttcatttcactatcccacttgccctaatcgccatggatagcttgaacgatgccaggcattactttttgttgtccatagtttcatgctactctctattcccgttgctgtttgagaaccaagagtacctg

SEQ ID NO: 287363 - DNA, 472 bp, Zea mays
aaacctaatgtccttaaatggataaaagctaagagaatattttcaagacaatatgtttttgttcctattgtttgttttggacactggagcctccttgtcttatgccactttggtgatgcaaactgttcggatattaagaaaggaccacggatgatggtgctggactcactcaatacgacagatccgacaaggttgcgatcagcaatcagaaaattcattattgacatttacaagactgaggagcgggaagaaagcaagcagttcataaacaaaatctgcctcgagtttcccaaagtgccacagcaaaatggggatgaatgtggaatttatgttctttatttcatccgctgttttctactgaacaaaaaactgacagaagttcttgaaaacaaaaaattggaagaaaaatttacccagctgtttgatgatggctggtttaacccagaggaactagagaacttccgcaaggata

SEQ ID NO: 287364 - DNA, 308 bp, Zea mays
agctagcgcaaccttacatggatgattacgctgaagcacagcgacgagtaggagagagagagaatagagccgctgcgaccacgcctcgcgttcaccatcgcccagcctctcgatcgctgggggatcgggcgagatcaccaagtcgtgcagatcgtgcgtgtggtcagcagagcaaggaagttggcgggggagacgaattgcttgccggtgattggccgaatcctcaccgggaatctctgggcggaattgcaaggtagaccggcagcatcgtcgtcttctcgagtggtgagaccctactaaattactcg

SEQ ID NO: 287365 - DNA, 542 bp, Zea mays
cccggaacaggcgcggcggatataacacactccaccctctccgcgactccgcctcgcggcggagacgtgccgcggccattcgtacggcgtggctaggagcactccttcgaatcggcatcgcaattcatacggctacaacgtctattctgtgggcacttcgtctccgatcgattcacggcaagagcgagagttcatggattcgacagggcccatgagggtctccatcaaagcccaccgccccgactggaaatcggagcttagaacaaattgcctcagaagagttagaaaggacagaaatgacttgctttggaagatcaggaagcagggactgcccggcaatgtcatggaaaaggtcagatctgctgtcaggagcgtcatatctgatgaggtagagaaactcaaacagtccaatacagaaaacgaggaccaagaaatggatgtcatatgggagtatcaaggactgcatgctgctaagcctgctgaaattgaaagtgaagatatattgcttgaaatggaaagacttgtttgtgaagatattagag

SEQ ID NO: 287366 - DNA, 168 bp, Zea mays
gctggcaaccgtcatgagcagcgtgctgtcccgcagccgcggaccgagggacgccttccaccaggtcctcaacgggctggcgcgcaagccgccccaccccaaggacgtcttcctcaagcccggccagaaggtgctcaactggacagagggcgcccaggatgacctcaa

SEQ ID NO: 287367 - DNA, 254 bp, Zea mays
caaaaattgttgtgaagaaagtttgttttgcgtagtactaaattaattgatttgggtttagagttatatatagcgtgcctgtgtgatacttgtgtgaagatctatgagggacgcagaaatccttaggcgatctcaaatcatacatactagacactatagtgtgtgtctgtaaaagctagatatggctgcgtggagcgaggatattctgcaatggttctgcattatatatatatactacaattataatttgtgtc

SEQ ID NO: 287368 - DNA, 375 bp, Zea mays
tgtttgagacattttttggagcaagcatgggtggtttttctggtatggaccagagcgcgtttaggacaagcaggcgaacactgctattcagggtgaagacatcagatatgatgtgattctggggttcacagaggcgatatttggaacagagaaagatattatattatctcatttggaaacatgtgatacatgtggtggttctggatcaaaggctggctccaagttgagaatatgttccacatgtggtgggcgagggcaagtaatgcgaactgagcaaacaccatttggtctgttctcccaggtttctatttgccccacttgcgcaggagacggcgaagtcatctcagagtattgtaggaaatgttctggagaggg

SEQ ID NO: 287369 - DNA, 303 bp, Zea mays
cacccatcaacaacgcaccggcaagcatcagcggatcatcatcaagcagatcgaacgaaccccaagacacaaccggccgtcgactagcgcatctccaacgactgaaacaatggcgcaccacttcctgggcaacaagcaccatggaggagaggcggccaaggtgaccgactggcgcaaggaggagaagcaccacaagcacatggagcagctcggccagctcggcgccgtcgctgcaggagcctacgctatgcacgagaagcagaaggcgaagaaggacccggagcacgcgcactcgcacaagat

SEQ ID NO: 287370 - DNA, 288 bp, Zea mays
caccgcctctctcccccgtctatctcttcttggagcctggagaagaggaaggatcagggaacgggggaagaggttgctgccacagctcaggtctcaagtttggattcagacaagtagacaaacaccagttggttaagatggcagctggtttccagatcggtgtgatcggagtcacttgcactctctgttgcatcttcagtttccattgtcctctgcaacaaagctctcatcagcacacttggttttccattcgctacaacattaacaagctggcatctgatggtgacc

SEQ ID NO: 287371 - DNA, 324 bp, Zea mays
gcaatgctgcggttgagactttggtgaagaccactcaccatgccctgtacagtactaatggcaacttgggtgcaaatggtagtgtcagtggcaatgccaatggagctggcgaagggtgggtggagacggtgtcgagcacgttggcagttcctagcaacaggaagtttgtgcttgatgttacagggagggtcacatttgagacggtgcggtcatttctggagtttgttctgtggaagctgcaggatccggcaaggaacggcggtggctccgtggttgacagtcggctgcgtgtcgtgatgtatatgagcgataagtcaatggtta

SEQ ID NO: 287372 - DNA, 507 bp, Zea mays
cagtggtggtcgtcatgttcgagtcgaccggcgcgcgcctccccgcctgcagcctggctgctgcactgctgcctatatattgtctccgcacctggcggtgctgcgacacgcatccgaccgacaccgtcgacgacgcttgcgatcgagcgttccggtcgagagccagaggggggatatattacttagagagagagaggctagtgtctgcgtgtggtggcgcgcggtcggcggcggccatggcggcgtggaaggacggctacttggacatggtgctcatcccgctcgccgtcctcttccccgccgtgtaccacctctggctgtaccgcgccgtccgccgcagcccgctcagctccaccgtcggcatcagcgccgccgcgcgccgcatctgggtcttctccatgatgaagaacaacgagaagcaggcgatcatcgtagtgcagtcgatcaggaacgtgctaatggcctccacgctggtgggcacgacgtcgatcctcttctgcacgggcg

SEQ ID NO: 287373 - DNA, 285 bp, Zea mays
gtcctcaaagaagggaatcatcaaggcaagaatgatgccgtgatggctctgtacaacctctccacaatcacagacaaccttcaagctatcctttctgttcagccgattccccctttaataaagctactgaagggtagcaagaagtcctccaaaacagcagacaaatgctgtgctcttctcgagtcactgcttgcttttaatcaatgtcggctggccttgacatctgaggaaggcggagtgctcgccatcgtagaggtacttgaggaaggctccgcttcaggcaga

SEQ ID NO: 287374 - DNA, 290 bp, Zea mays
agcgccggtccccgcggccgtcgtcctcgcccccgtcctcctcttccccggtctcctccgacccgctccgcgcgcccgcagccggcggcggtggcggcggatccgaccagcagaagcagccgcccttcaagttccagcgcatctggtccgagtccgacgagctccgcttcctgcagggcctcctcggctgcggcgcgcagggcctcgtcttcccgcgcgacctcaacgtcttctacgaccgcttctccgagtccatgccccagccctacacccgcgcccagctctccgag

SEQ ID NO: 287375 - DNA, 296 bp, Zea mays
cggacgcgtcatcaacggacagacacacacaagcaaggcggctagcggtgcaagtagtgcgaactagctaggtgctggtgcatgcaatggcggcttcgctgggtctgaaccctgaagctgtcttcacttcctacacctcctcgccgccgttcatgtcggactacgtggcggcgagcttcctgccgccggccgtcgtcgactccacggacttctctgcagagctcgatgatcttcaccaccacttggattactcatcgccggcgccgaccttggccggggctcggagcgatcgcagc

SEQ ID NO: 287376 - DNA, 364 bp, Zea mays
cacaaagctgctgcactcgtttagattctctgaccctgctcccgagaactcatcgacgccgtccatgctgtcctcctctccggcgccgtcacaagatggcgccgccgttccctcctcctgggcggaagctgcgtcctcggcggcgctccggcactaccgctcactggccaagaaagggaagccgcaggggcgcgagtccacggtcctcgccgccatcctcctctctgccccgcaggactcgcacagcctcactgtgctctccatgggcaccggcaccaagtgcctcggtgcctcgatgctcagcgcacgtggggacctcgttcacgacgcgcacgctgaggtcatcgctcgccgcgcgctgctt

SEQ ID NO: 287377 - DNA, 288 bp, Zea mays
tcgcagttggcgcgcgctcccgtcctaaccaagcaaaacccacaaccctagcctccgccggcgccgccatctgccgggcctccctccggtcccggccgaccgtagcctcgcagcaccctaaccctatccctcccccgctgccgcgggagcagggtaaaataatgccgcgtgagatcatcacgatccaggtggggcaatgtggaaaccagatcgggatggagttctggaagcagctctgtctcgagcacggtatcggcaaggacggcctgctcgaggacttcgccactc

SEQ ID NO: 287378 - DNA, 283 bp, Zea mays
tctcgagtctcgacacatagcagctgcttgcctctgcacacgcgctcagtcaggcaccccaggcatccctcataagtcataggatcgagctcctgcgcggctccgtactgcgtggatccggccatgggctgtccaccgcggctgctctgctgcgtcttgctgtcgctgtcgctggcagcagtggtctcgcgcaccgccacgcggcactcgggagtgggagctcagctaccagttcaagagccccgactgggcgtggcagatggccctgaccatcaacggggag

SEQ ID NO: 287379 - DNA, 373 bp, Zea mays
atcccggacaaatccaatccgaaatcatctccccctcgcctcgcctagaagaggaaggaagaacagagataagcgacaacgcgtccctcctcgccttcctcccgcctcgagctcttcccggagcaaccggagccacagacgtcaggacagcctagcgcgttccacgccggtatgcagaaccagatcatgtgccatgcttgccggacccttctgctctacccgcgtggcgcgtccagcgtctgctgcgcggtttgccaggccatcaccaccgtgccgccaccaggattggagatggctcagcttatatgtggtggctgtcgaactttgctgatgtatactcgcagtgcagacaccgtaaggtgttcatgttgca

SEQ ID NO: 287380 - DNA, 403 bp, Zea mays
ttatcgtgtaatccatcttttctagcctttgtttgataatgtagctcgtgaacccggcagaagctgtctgcaaatggttccattgcttggcttcggagtgcccagatataaacaataagcctaacgatagcgttaggggtcagctgatgaaaatagataccgaacctcttcagcacctctccaatgatcccatgtagggggaaccttaatccagcctttagaaagctcttgaaaatagcaatctcatccttctccggcttcggggtagtctcttctcccccgaagcgcaaaagcttcttctgattttcagtgaaaaagcccgattttaccatcttggacagatcagccttcgaaacagtagattttccgaagtccaagtggctcggcttgcttggcatggcaa

SEQ ID NO: 287381 - DNA, 484 bp, Zea mays
cggctcgaggagaagttgtccgcagccctatggttgaagcacagtgctttgtacaactagcagttcctgttgttcttaagaacacaatgatgactgaagatattcactatgttgggtttcttagtaaacttctggaaacaaaaatcatgcaagtacttcgcttcaaatatgggcagatctattcagttaatgtagctgtcttcttggggggcaacaaaccctcaagaactggagatgttcgtggagatataagcgtgaatttctcatgtgatccagacatatcatctaaactggttgattttgttctggaggagatatcatgcctacaaacagaaggtccttctgaagaagatgtattgtccatcctcgaaattgaacaaagagctcatgaaaatggattacaggagaattacttctggttggatcgtattctacggagctatcaatcaaggcttttttctggagatattggatccacctttgc

SEQ ID NO: 287382 - DNA, 307 bp, Zea mays
gtagcatccaatgatgggttgcttggacttccttgaagaacagagatacaccacgaaatatttgtaggaccttcctaatgaaaccatggtcggacgttgtgtattgattcttttgtgtgtatcatatgagctccgttagacttgtgtaatcagatcattggggggacatacagcatagtttcgctgtacgtgcattgttacacaatttgtttgtttgttagtttgtgctgtcttggttgttcatagctcgttactgctttacttgtataccgtattcatgtgaaacgagtaagctgcaatttttgtt

SEQ ID NO: 287383 - DNA, 315 bp, Zea mays
ctgagctgcagcatcccgtccaacagcaggaccagcgagggtgtgcctccgcctcgcgagtcgggaccatgtggacgggcagcccgctgctccgggacgttggcgccgccgtggctgcacggggagtcgtgcgcggctgccgtgctccgcttctgggaagatatcgccaaccgcgccctgctggaccaggtcacgcttttcctttgtttttttccccagtttctgtgctccgtatagaatccggtatctattgcttgcgctaacaagtacagtagtacattgaagttttggtttcgattcgttccaaattgccct

SEQ ID NO: 287384 - DNA, 333 bp, Zea mays
  unsure (1)..(333): unsure at all n locations
cccacgcgtccgcgcacctcgtatcgtcgtctagctccgtttcgtttccgggaagcaaccaaccttcgttcccgggcagccgacgacccttgcgccgtcttcgtctgtcaagagtacagtttgacgcgagcagctgccggttccttctctcgtgcgcctttgctagctttgggatcgatcaaagccggtgagcgagcgagcgagtgaggaccggaacatctgccagcatcatggcctccgagcatgcgcagctgtctgccaaggccgccgccggcagcacgttcgcggtgacgtacggcctgctgaggcagtacatgaaggagcanggcggca

SEQ ID NO: 287385 - DNA, 366 bp, Zea mays
gccagcgcttcatcgcgctctccaagatcgtcccgggcctcaagaagatggacaaggcatccgtgctcggcgacgcgatcaagtacgtgaagcagctgcaggaccaggtgaaggggctggaggatgacgcccggtggcgcccggtggaggcggcggtgctggtcaagaagtcgcagctgtccgccgacgacgacgagggctcctcctgcgacgacaactccgtgggcgccgaggcctccgccacgcttctgccggagatcgagagcccggctgtcgggccgcacggtgctggtgagggtccactgcgacaaccgcaaggtggtgctcatcgccgccctctccgaggtggagcgcctcggctctccg

SEQ ID NO: 287386 - DNA, 390 bp, Zea mays
cgcacagctgaggtgcagtttctactagcagcaatatcatggattctgaggtagtgcatgtggtagagtcgtcgcttgtagtgccgagcgagccgacaccgtcggaggggctctcgctctctccgctggacctcgttctgcccagcagaggccacaccccaacagtctacctgtacagccccagcgatgttgccgccgccgatggtttcttcgacgtggccaggctcaaggaggctatggccaagaccttggtggccttctaccccctcgctggccgcctcggcgtcaacaacgatggcagggtagagatcacctgcaccggcgagggcgcactctttgtggtcgctcatgctgacctcagtgttggtgacatcgaggacgacttcaagc

SEQ ID NO: 287387 - DNA, 380 bp, Zea mays
cccacgcgtccgtgaaaaggttctcgtacagccggtatatgaagaataagcttgatacatttgtgaactttccgatccatgacctcaatatgagcaagtatgtgaagcctacatcaagaggtgaccagcaccccgtgtatgaactctatgcagtgataaatcattatggcggtctcggtggtggacactactctgcatatgcgaagctagttgaagaggacaattggtatcattttgatgacagtcatgtttcctctgttaatgaggatgagatcaggcgatctgcagcatatgttcttttctaccgacgagttggaggttcaagtacagcggcaaacggtggtccagttgacattgaaatggttgattcgctagagaca

SEQ ID NO: 287388 - DNA, 299 bp, Zea mays
ctccctcctccctcctccctctctcttgtcttctcccttgcggcgatccggattccgccgcaacggcccctctcgccttctccctcgcggcgctcgatccctccggattggcgcgtggaggggacagtgatcagctggttcaacaaaactagtaaagatggcatcagaagggaacaaagacgtacctcatgaagctttgaccgtggatcactcatcgatttcgggttcaaagcgcaacgtgtggccgcccaaggaaatatgagtatcctgtaaatgaactaccacagaaggtacagccc

SEQ ID NO: 287389 - DNA, 255 bp, Zea mays
ttgtctctttttttttctattttttttttttttttttttgagacctgcaacagtatgcggtagctcagtattatgaaattatgatgcaattacatatcgcctgtgtgagctgccgggggaacaaaacaaacaaaccactagcctgcaaatccatgctacagtttctcgcctcgtttcagtgattttgtacagattgcaatgcccccagtaccaagctcggtccaaatttgatgcttacaattacatattgccaac

SEQ ID NO: 287390 - DNA, 315 bp, Zea mays
cggcaaccctccagctcctatccccaaactcgattgcagctcgtgcaccacacacggacacgaatcctcctccggtcctccctctgggaaaccaggactacctcggatcagatgcagtgcctaccctgcggaccgtccaccaacgcgcccgctgcgcatgccgcggccaggagcgtcagccgtcggagggttgtcgtcgagggcgtcacctcggcaacccacgacagcgaggaagcgcctccaaggtcaatgagggcaacaggtgaccgtggtgcaatgtcaagcaaaacattatggctcgtgtcaaagaggaag

SEQ ID NO: 287391 - DNA, 432 bp, Zea mays
  unsure (1)..(432): unsure at all n locations
ctaactcccggttgaccattccaacacgccccacccgctaacagcgacgacgactgcttccccagtgggagacctgcaatcctcagccanctgttccttccccttcccccatttcggtcacctcttcccctcttccctaccttcctgtattcgcggcgtcgagtgccgccgcccttcgccggcgccgagcacggagcaacgcaccagtttcagtacctggattcgaactgagagtggattacgaagtcatggcaaggttatgttgcttcggcgccggttgctccgatttcacggggcaagggtcaatagcatccggtaaagggaaaggctgtcaagggcaagtcaagatctgctatggatataaccttgtaggagggatgacgaatcatccaatggaggactatcattttgccgaacttgttgatgtcaaag

SEQ ID NO: 287392 - DNA, 510 bp, Zea mays
ctcgtctcggctttctcgcctcctcggcggcacggtgttccactcccatcgcgtcgggacatagaaagggggagcgcgggcgacacgcgagcgttagttgccatggacgcgcccttcttccacgagctcaggcggcaggcctcctcctacctcaccggcaagatccgctccgcgcggctggcgctcaccgacgtcaccccgacgcagctcatgacggaggaggcgacgaacggggacgcgtcgccgccgaacgtcaagacgatgggcctcatagcccggcaggcgttcgaggtcgacgagtacgtcaggatcacggacatcctgcacaggcgcttcgcgagcttcgaccccaggcaggggcaggggcagtggcagtggacggtaggcgtacaaggcgctgctcctcctggaccacctcctcacgcacgggccccgcagcgtcgcggtcgagttccagaacgacagggaggccatcgagcggatgtgcaccttccaacacatcgacgagag

SEQ ID NO: 287393 - DNA, 337 bp, Zea mays
cacgcctcccaggctcccagcgcgcacgcaccagggtccatgagaggaggacaccgtcgcctcctggttggttcatctcgtcagtcgtcaccgcctcctgcagccaaccggcgggggattcctgtcctggatgcgacaaggccagcaggagagaccctccccctctccttcttctccctgagcaggaagcggaaagccttccgcgcttttcaaagatcgtaggccgcacgcctgcagcagccgccgactcagggcgagcgttgagaggaggacgaagaagagactgaagaagagcagaccgaagtgaggccgcgagaagggatcgggccttgcggga

SEQ ID NO: 287394 - DNA, 351 bp, Zea mays
  unsure (1)..(351): unsure at all n locations
cccacgcgtccgcccacgcgtccgctttcgacctttcgacgcgttccccaatccagctgaaatcaatccctgatccccaatccccgtccaccctccccaacaaaccctaaccctacccctcaaccgagcgcaaccggcggcgatccaagatgccggcgacggcggggcgcgtccgcatgcccgcaaacaaccgcgtgcacagcagcgcggcgttgcagactcacggcatctggcagagcgccatcggatacgacccctacgcgcccgagaacgacaagcaacagccggggcggccttcgtcctccgtctccgncaacgccgccgccgcagctgccaacgacgccaacgcag

SEQ ID NO: 287395 - DNA, 291 bp, Zea mays
atattttgattcctgtactttatatctttttcctctcttcactatgttaattttttctattctaatgcttgttcacaccatttgagcagtagcattatctatacgattagtaatttcaaatgattttgtgatatattccttgccatattcatgcctccctttgtattcaaagtaaagaatgattaagttttcttttgtttgtttcaatcttctgtgttattcatctgttttggtactattatctgtatatactgttcctgttatgtttttctgtgatggttgttgttggtg

SEQ ID NO: 287396 - DNA, 360 bp, Zea mays
gaataataaaggaggacccagaaactaaaaagccacgggtgaagatttatactgataaggaaaccggcaggaagaagggtgatgccttggtaacatatttcaaggaaccttctgtagctttagcggttcaattgttggatgggacatcattccgttctggtggtaagactcctatgtctgtaagtccagccaaatttgagcagaaaggcgatgttttcatttcaaagaaaagtgacaagcaaaagaaaaggaagataaaaaaggttgaagacaaaatgcttggatggggtgggcatgacgataagaagctgatgattcctgctacagtaattttaaggcacatgttcactcctgctgagc

SEQ ID NO: 287397 - DNA, 436 bp, Zea mays
gccatccgcgtccagaccgcgttccgcggttcttggctcggcgggcgctccgggcgctcaaggggctggtgcggctccaggcgatcgtgcgcgggcggcaggtgcggaagctggcggccgtgacgctgcggtgcatgcaggcgctggtgcgggtgcaggcgcgcatccgggcgcgccgcgtgcgcatgtccaccgagggccaggccgtgcagaagctgctcgaggcgcgccgcacccagatcggtatcctcagggaagccgaggtctcaattgccttctccttttctacaagatgattctggcctggttctcaaacgcatcgggtagaagacgaacagaccctcattgctgctgtaatctctctctttcccaggaaggatggtgtgacagccagggaacacttgaacaagtgagggtcaagctgcagaagcggcag

SEQ ID NO: 287398 - DNA, 355 bp, Zea mays
gcaactcacttctccacaaattatacacacatactgttgttgttacgtgccgcgaaactgcacggccagattgcaacgttctccccttcccgtacagcacaggatgccacgtacccaagatgatgcaactagtgcatgtatgatctgtggcctcatcctcgtcgttgacactaacatacatgatttccactgatccactgcacgactcaactctccactgagctgtagcagtacccctatcccagtacactactgtatacactatacacacagctacgagtccacacgaagcgacggttatgtgctagacggctttccccggacgcgtgggcggacgcgtgggcggacgcgtggg

SEQ ID NO: 287399 - DNA, 386 bp, Zea mays
ggaccgtggtagacctttcctccaattctcttactggcaatctaccacaaagtttcacttctttgtcgagcctgaaaacactgtatttgcagaacaatcaacttactggttcaatcaatgtacttgcaaatcttccccttgatgatctgaatgttgcaaacaaccgcttcactggttggattcctgaggagttaaagaagataaatagtctgcaaactgacggcaactcttggagcacaggctcagcaccaccaccaccaccatttacagctcctccacgttcgcgcaaccgtcgaaagagcccaggccagcactccaatggaagtaaccactcgagttcaggtggaagctctagcataggtgctggagccatagcaagcattatc

SEQ ID NO: 287400 - DNA, 352 bp, Zea mays
gcatatggggaaaatatggtataacaaggagcctcagctctgcaaatcgcgaactcaagcccaagctgccagtctgtggcatcctgatcggtaggcgattctcaatccaccgccaacatgtccggcagcacggcgccgccgcacgtcgtggaggacttcttaggcgtcatccagatcttcagcgatggctccatcgtccgcggcgacgagtcgaccatcaggccgtcagggccgtgctcggacgtccccggcgtccagtggaaggacgccgtgtacgaggcgactcgcggcctcaaggtccgcgtgtacaagccgccgccgacccccggcggcggcaaccagggcaagctcc

SEQ ID NO: 287401 - DNA, 373 bp, Zea mays
accgcgccatatatagccgcagtaagcaggcgagaacgacgaagaggtcacgcaccacaccgatcaatccagctcgagcgaccgatcacgtgcagcacagcacagcacagcggtgctcgatcggcgaagagagatgacggggttcgggtcaccgtgcggggcgtgcaagttcctgcgccgcaagtgcgtgcgcggctgcgtcttcgcgccctacttctgccacgagcagggcgcggcgcacttcgccgccatccacaaggtgttcggcgccagccgcgtgtccgagctgctcgcgcacctgccgctcgccgaccgcgctgaggccgccgtcaccatctcctacgaggcgcaggcgatgcagcggtaccccatc

SEQ ID NO: 287402 - DNA, 283 bp, Zea mays
gctggcttctcctcaccctcttaccaagtcctcctcgggttagggttccttagggttttgtggacgggcgatggcggcggctgatgtggagtaccgttgcttcgtcggcgggcttgcctgggccaccagcaacgtagtcgctggaggatgcctgcgcctcctacggcgagattctcgactccaaggtcatcaccgacctgtatacggggaggtctctcgtcttcggcttcttgaccttctcctccgagaactccatgctcgacgctatcgagaacatgatcgg

SEQ ID NO: 287403 - DNA, 433 bp, Zea mays
ccgacatggttccaccacggcgtgacgaggtgctactgcccctcggccgaggtggcgagccgggccctgctccggggcctcagcccgtcccaggtccgcgtcttcgggctgcccatccggccctccttctgccgcgccgtgctcgacaaggatgaggtgaggaaagagctggggctggaccctcagctgcccgctgttctgctgatgggaggcggcgaggggatcggccccgtggaggagaccgcgtgggcgctcggcgaggagctctacgaccgccggagacggcgccgggtgggacaggtcgtggtcgtgtgcggcaggaaccgggcgctgcggtccaccctgcagtccctcagatggaaggtccctgatcaagtagggtgccactggcatgcatgatcatgacagaatggatatgccgccgtatctaagg

SEQ ID NO: 287404 - DNA, 400 bp, Zea mays
tatagattttctttctcacgctgctgggaggtcatcttcatattctccagtttatcaatctgtggatgcactaactaatatactattttcttcaggaacaaccggggagccaaaagcaataccatggacacaactttctcccataagatgtgcatccgatacctgggcacatttggatgttcgtccttgtgacataggttgctggcctactaatctgggctgggttatgggaccaataatcatctactcatgctttctgactggggcaactttggctttataccatggatctccacttggacgcgatttctgcaaatttgtacaggatgctggtgtgactgtattaggaagtgtgcctagcttggtgaagtcatggaaagctgggaactgcgctgaaggg

SEQ ID NO: 287405 - DNA, 287 bp, Zea mays
cagctcgagcaccgctcatctatcaagctagccacgccgccaaaacaaactagctagtgctcagctcagctcaggcaccaccacactagcaccagaagcgtgaccagctagctacagctcgctctcccatggccagcttcactgctcagctcagggacaagttcctcggcgtcatcgaccacatcaccggctcggccagcggcgtcgccaaaggatacgcccggccagaggagtccaccaagttacagtcacgcaccgtgcagcagcccgttgaggtccgatcgaga

SEQ ID NO: 287406 - DNA, 304 bp, Zea mays
ccgacgaggaagagcacccatccccactgcgcatcctcgattcgattccgtccccttgcctcttgcctcttgggcgtctccgcggctagatggcgtctccccctcccttcgacctctgcggcgatctcgacgacgacgacatcgatgaacccgtcaccgccgtccccaaggatcgccatctccctgccgccgcccctacgccgaacggcctcaacgaccacctcctccgcttcacccgcagcctccagcgccccacccaaaaccctaaccctagccccaatccgccaccgcctccgcccccagc

SEQ ID NO: 287407 - DNA, 281 bp, Zea mays
cccactgcactgctgctccgctgccgctaccctttccctctcccttctcgtcctcggtcctccccaacccatggccacggccaccaccacccactgccccttctcccaccacgctatttatcgcggctgcacgactcctgcccatcaggcgccatagagacgcgtgggaccgaagccgccgatcaagcgctgctcggggcggacagcggccggcggtggtgagtgctggcagacaggccggcaggtcaggcagagtgaccagctggttagtcgaagcttga

SEQ ID NO: 287408 - DNA, 231 bp, Zea mays
gtcgccgtgaagcgagggcacgtcgcgtgcgcggcgctgctgaacccgtcgtccgcggacccctggtctggccgtccgctctcaagttcatcagcgagctggaacccgacgccaaatctctcctcgaagcagccctgatggaggccaacagagagagggagaggaggatcctgaataggactaagaatgcgttgccgtcgccaccgcaccacgatgacggcgctcatgaca

SEQ ID NO: 287409 - DNA, 398 bp, Zea mays
agaagaagcggccctgtaacaggagcaccaataagaagatgaagcaggaggagccacctcaaggagccccatcatcgaatggaaaacctgcagatggtccagccggccttattctagatttcagcagtccagaagccattccgtctgttgatgacatcaatagcatattccgtattcatggacctattgtggagcgtgagactgtgatcactaagaagtcaaagattgcaaaagtagttttctctaagagtgttgatgcagagcaggcacatcacagttccggaaagcgtaatgcatttggtccatcgcttacagcatctgaaattaagtacttgccatcggcacctcaggtttcttaaatgccgcagtctggactggtggatacgccgtgaaatgcg

SEQ ID NO: 287410 - DNA, 413 bp, Zea mays
caagctgaagacgagtttaggtgttcagaagatgcagcagctaccagacttcactgcagaagggcttcacttgtctgagatttctacagagtgcagaacaatgctatatacactgtctagaataggggcaaacaatgccacagtgagggaggctcttgggattcacaagggaacagttcccctatggttaagatgcaacacggacataccgtatttgaaagatattaagagttcagtgaagtaccatttggatgtgaccaccaaaggatacaaaagtctagtttacagtggtgatcatgacatgggtgtaccttatattggcacacaatcctggattaggtcacttaatttctctattgtggatgactggagaccatggtatgttgatgggcaagttgcaggatatacagtgt

SEQ ID NO: 287411 - DNA, 372 bp, Zea mays
agcgagacgcacccgtggcacctgcacggccacgacttctgggtgctgggctacggcatcggccgcttcgacccggcggtgcacccggcgtcctacaacctcagggaccccattctcaagaacaccgtcgcggtgcacccctacggctggacggcgctgcggttcagggccgacaaccccggcgtctgggcgttccattgccacatcgagtcccatttcttcatggggatggggatcgccttcgaggaaggcgtcgaccgcgtcgctccgctcccgccacagatcatggggtgcgggaaaaccaggggtggccactaactgatggtgttcagaagcttaactgaaccacaccgttgatccattcggtggttt

SEQ ID NO: 287412 - DNA, 312 bp, Zea mays
gaaggtcttcgccggactctacgcccactgaacacgcccttgagggctgaggccttgacccactgaacacgcccttggcgaccgccgccgctctactcccagttgccctgttcttcgccggacccttcgccggcgacaagcactaaccaacgaccaacacgttttgttgcgatggggttattcaggggcagcttcactctcttggtgggaatgggatgtggtgtctatatagctcagaactacaatgtgccgaacggcaagaagctattcaacacatatgttttactggcaaagcacattgaggaaacctac

SEQ ID NO: 287413 - DNA, 317 bp, Zea mays
ctactgctcacgatcctagctagccacctccctcgattcacaagtcacagggacagcggctggttagcttctgagatttctcaaaaccactctactaccaactagtgctctagcctctttcaagctttcttcgacccatggaaggcatcatcccgttcatcttcaaggtcatagcgcagtacaaagaagaagggcaggctgcctccttcggtggcatggcctccgacggttctgtcgaaccctccccgccggtgtcgtcgtcgtacgtgctcctgcctagtgactccgaccggcgccaccgcgacgagaggaacgac

SEQ ID NO: 287414 - DNA, 319 bp, Zea mays
cgcttgatggcatgaggggaggagggcaggtggcttctaccgccggtgcgcccgaactcttccctgagccagcctcatttgggcggccttgggagtccaggcacatgtaccggcagggtggtggcatgccaatgccacgcagggagaagaatggagggcgccatggtccgtccagctcatttggtgagcatgcgcttggtcatgtgcccaatggggtgaatacgaaggcccatggcgatgcggcttatgaccagaggattgtaatagagagaaaggagggcctgaggcactctcagtcggagactgacaccaaacgagc

SEQ ID NO: 287415 - DNA, 419 bp, Zea mays
cgatgcatgtgatgatcaagaaatgattacagatgaggaaaaatacatagagcagaacgcttactatcaaagattgaagcttctttggtacttgccgatccatgtgatgatcaagaaatgattacagatgaggaaaagtctgttttccgtaggattggtttacggcttaaggcatatttgccacttggagttcgtggtgtttttgatggtgtaattgaaaatatgcacttgcattggaagcacagggaagttgttaaactaatttcaaagcagaagaccttgtcattcgttgaagagacggcacggcttcttgcatatgagagtggtggtatactagttgcaattgaaagagttccaaagggttatgcactcattttttaccgtgggaagaactataggagacctattaacataaggcc

SEQ ID NO: 287416 - DNA, 323 bp, Zea mays
agcacccaaagtcgacaaaattgaaggacacctagccggcaaaacatgagggggaaggtcgacgagtgctgggacgagtgctgctacaactggggcgagtggaaatactgcctgctgtgcctcggcatcgtggtggccatcgtcctcatcgtggtgttcgtcgccgccttcggtttcgtgcgccacatcgacgtctccgtggacgacgcttcgctgacgcggttcgagctggcgacgtcgccggtgacgtcgctgtcgtacaacctgtccgtgaccctggtgattcgcaacgcgaactgggccatgagctcaagaacaccaag

SEQ ID NO: 287417 - DNA, 281 bp, Zea mays
agcagatccgtctagtgcactagggctcacaatctcgaagctactagctatatcttctcttagtttgctcgtcaccaccggcaatggctacggcgacgactaagccggcggcggggcgcggcgggaggcgctacgcgctgctgctggcgctctgggactcggagtacgccaaggaggtgtacggcgggtactacaacgtctttgtcgccgcgttcggcgccgacgacgtcgtcggcggcggtggggaaggcccggccggcgataggtggcactgcttccgt

SEQ ID NO: 287418 - DNA, 388 bp, Zea mays
ctctcatattggcataattccaaatttctctcgtccgcaccgccgccactcgccttttcattccgcaccgccgccaacccgccgcctcttctttccatggaagtggacgacggtagccgcgccaccccgccactggacgccgtggccgccgccttcaagtcccaagtcatggagttgcaggacctcgtcctcgcccgcagcatgttcccggccacggcgctgcccgacctcgccaacgtggacgcgttggtgacggcgatggagtcgcaggtggaaaccatcagccgccgccttcaggaggagcttgacgccatccctaaggccaagaagctagtccagcggtccttgaaggaggaagagaagctgcagcatatgcttgcgaacttac

SEQ ID NO: 287419 - DNA, 262 bp, Zea mays
ggcaaatggaaatactgacactggagttacaatacaaagccgcagagcaaccacatctcctgctaacatttcactagcagctggcaagattaaaatgcaggttggaattaataggatggccacaagtagttccgtatccatcaaccagaccatgcggtttacagataacagtggccgacgtcttgatctcaagactgatgatgttgagcaccagaagaaaactacgaacagtgccatttctgccgagcagtctagggcagcc

SEQ ID NO: 287420 - DNA, 518 bp, Zea mays
tgcgagagaggctggtgggtttcacctttgccgcggtcgtgaaacggacagcgtgtctgttcaacggcacctccaccgcaaattgctggttccctgtcggcgtcgcccagatggattcttgggtatccatgaactacgaaaaggtgcacggtcagctgcagtcgatcagatcgaagatcaaagagctaggaagcaggatcgacggatactctgacgtagaaagctgcccctactgctcttcgccggtccatttcgagtcgcctgacgtagccatctgtggggaaaggcacacactgccgcggtgcagggcgtccatgatcctgtgctccgttgtgcagcctttgtggcactgcgtgtgctgcggaggcacggtcaacaagctgttgccggagtcgttcttcaccatgcaggcgtccaccatgcatgatgaaggatcgctcgatctgtcagcagcctccgtcccactttgccccttctgtggcatcctcctgcagaggtcgatgccggcgttcctgctc

SEQ ID NO: 287421 - DNA, 447 bp, Zea mays
cccacgcgtccgcccacgcgtccgggtgaactcggcggacgtgatgatgggcgtgcacggcgccgggctcaccaacatggtgttcctgcccagccgcgccgtgctggtgcaggtggtgccgttcggcgggctggagtggctcacccgcgtcaccttcaaggaccccgcaaggacatggacgtcacgtacatggagtacaacgtgtcgctggaggagagctcgctcagggacctctacccggacgaccacttctacctgaagcacccctacgacgtgcacaagaaggggtgggacgccatcaagacggtgtacctggacaagcagaacgtcaggctcaacctcaccaggttcaccaggacgctggagcaggcgcgagatctcttgccgacgccatgactgatgatgacctccccctctttcctctgctctgctgcaggtttcattcac

SEQ ID NO: 287422 - DNA, 458 bp, Zea mays
agggcagcgagctgcttgcttattactgtcctattgtctgcctccacctgccgcaagcaagggatgtggaacagcagatcacacttcgccggcgggcaggacaacgacggcaacgacgaccagccatacggatacggatacggtggcggccagcagtatgaagcaaccggcggcaagaaacgagcgtcctcgaggctgaagaagagcagcggcagcaagaaagacgacgagtacaccaagtacgcaggcaacagcaacgaggccgacgacaaccgccgcaacaggccgaacgacgacaataactacaacggcggcggcggcaaccactacagcggcgccggcgccgcaataggtgcgccctactacggcgctgctggcgccggcggctacgggagcagctctccctactacggcaacgccgctgtccacggcaccggcggcgacggcgacgcggctac

SEQ ID NO: 287423 - DNA, 661 bp, Zea mays
acagctcgcccgccgaccgctacgacgtgctgtcgctcgagctcgccaagcacaacatccgcagcgggcccggcaagccgctgcacctgacggccacgccgcgctgcgtgttcccgcccgccggctacctgcgccgcgcgtgcgacacgggcatcttcgagcgcgtccacgtccggatctacgacgacgccgactgcgaggccaggtggcacctcgcgtgggacgagtggacggcggcgtacccggccaccaggttctacgtcggcctcacggcgtcggagatgacgcacggctgggtgcactcccaagaacgtctactacgacgtcgcgccgtccgcgcagaaggcggacaactacggcggcttcatgatctgggaccgctactacgacaaactctccaactacaccagcatggtcaaggactacgcttgattggatttctcgactcagttcagagcagacatgcatgctagctgcgtcagcgcttcgatctagctcaccgacctatataagccgaagtactgtgtagtgtgtttgcattttattgtaagaaactaagaaggaataaattggcgaataaacaagagtaaaatacaccgggttgttgagtgaaaaagaaggcagctcaaacatccttctaaacaacataaaagtggggccc

SEQ ID NO: 287424 - DNA, 346 bp, Zea mays
cgcggcgttgcgtcagatggggaagtacatgcgcaagtgcaggggggccgcaggcggtaggtcgccgccgtcgaggttacgcaggtcgtcggcgtccgcacgaggtccaggtccgcggcggcgaccggcggtgtcgcgaaggtcgtcgccccgaggaggaagagggcgccggcgggggagcctgctgccgccgtgggcgctggtggggacggcggaagctgctacatccacctgcgtaccgcatgctgttcatggcaccgcctcagccgcagccgccgtcggttccgaccccggcggaggctgctgatggcgctgcaggacagcagggcgcggcgctcgcggccgg

SEQ ID NO: 287425 - DNA, 281 bp, Zea mays
tcgagggtgggctttgtgcagaggccattccctcgctctctatactggagtagatagcagcaggaggaagataacatctcctcgaaaatagatatagcttcctcctctttggttctcttcgttcctttccttcctcttcgatctaaacacgccttcgatccatcctagtatccttgctgttttttcttccccaaggattttgctagctctcctgttgcagagttcctctcaaactaatacgagttctctcagctccctaacacctgagatctttttaggga

SEQ ID NO: 287426 - DNA, 564 bp, Zea mays
catcgtcgcaacctgacaatatgccgcgcaagatatttgttggtaatgtgcatgctgatgtggacgtggaccgcctatataactattttgcacaatttggtgagattgaagagggtccgtttggctttgacaagaacactggcaaaccaaagggatttgcattatttgtttacaagtctgtggagagtgctcgccgtgctttggaggagccaataaagaattttgatggcaagacgctcaatgtgcagaaagccatagatgggaggaccaagggctcatctggaatgaatacaaatactgactccaatcccactactgcatctgtgctcgccgcccagatgactgctccttccagtgttgccatcagcccatatgatgcatcagcatatagtgctactgtggttcctgacatgagttttgcacagcaagctgctatgctgggattaggtgcacagtaacaggcattcactcaaccgaatgcaatgcttgccatgatagcagcaatgcagaacccagctgcgctagggatgagtccagccatgcttgctgctatgaacccagcct

SEQ ID NO: 287427 - DNA, 300 bp, Zea mays
cggacgcgtggttgtgagggatttcgtgccgagcgcgctggcgtttctgatgaatggcgagccagatatcgtcaagaacttccttctgaagaccctgctgctgcagggctgggagaagaaagtcgatcggttcaagctcggggagggagccatgccggctagcttcaaggttatgcatgacgccaagaagggggtcgagaccctacatgctgattttggggagagcgccattgggacggttgcgcctgtggattcggggttctggtggatcatactcctccgggcctacacaaaaaccac

SEQ ID NO: 287428 - DNA, 308 bp, Zea mays
ggagacggtcgccgccgccgccgccgcgtccgaggagcccgaggcgggcgagaccgaagaggagctgatctggggcgtgccgctggcgggcgacgacgagcgcacggacacggtgctgctcaagttcctccgcgcgcgcgagttcaaggtgaaggaggcgatggcgatgctcaagtcggcggtgctgtggcgcaacgagttcggcatcgacgagctcctcctggacgccgacctcggcctgcgggagctggagggcgtggtgttctaccgcggcgccgaccgcgaaggaccaccggtctgctacaacg

SEQ ID NO: 287429 - DNA, 444 bp, Zea mays
cttctttgcaggtgcatggtatggattggttgaacatcagtacaatcggggcagtgtgaagttgttgcaacgctttagggagatccgcgatcttcacatcacgatcttctatccaattaagatcgtttacttccactactgcacggaaggcctgacctcgctgctggctaagaaattacacctgatccttctaacatgtggacatgctattggctcttgtgtgttccatctccttaagatttctactaggataagaagtctgtttctggatatacgtgaatccattaaggaacgagctgcttgttcaccagactgtgcttgtcaccagcagcatgactgggaaagcgaggagctcgtgctgaactctctccaggaactgaacgtttgcggacttagagcaaaccgtgacttccatgttgtgaaacgactgctgggctggatggg

SEQ ID NO: 287430 - DNA, 636 bp, Zea mays
ataatcctgatcctcgatcttgcgttgtcgtcgtcaaagagacgactcgatcatcatctcatctcagagcacgcaagcaacaatggttactagcatccgcgtcatagttggaatcataggatctgtagtctgtgtgctcctctacgcggttccagtgctgacgtttaagagagtggtgaaggaggccagcgttggggagttctcgtgcgtgccatacatcctcgcccttttcagcgccttcacctggggctggtacggcttccccatcgtcagtgacgggtgggagaacctgtcgctcttcggcacgtgcgccgtcggagtgctcttcgaagcttcgttcgtcgtcatatacgtatggtttgcgccgagagacaaaaagaaatctgtcgtcctaatggtgtctctggttgtggcaacgctctgcgtcatcgtatccttgtcaagcttcgtgttccacacgcaccatacgctcgagctatttgtcggtagcattggtatagtcacctccatatccatgtacagcgctccgcttgtagccgtgaagcaagtcatcctgaccaagagcgtggagttcatgcctttctacctgtcgttgttctccttgctgaccagttttacatggatgctgtacggcat

SEQ ID NO: 287431 - DNA, 255 bp, Zea mays
tggggcgcgcgcgtgtatggtcgcaagccgagccaaagcagctgcagaccgaccaccacgcgacgctcctgctggctgctgccgcggaacccgggacaagcgacctcctccacctccccagctagctatagcttcctgcctgcagctgcaggtgccagccgagccgcctaccgggtacagccgcacaggcaggcggcggcatgcgctccagcctccagcagtgagggagggagctgtcccgctcccgccccttct

SEQ ID NO: 287432 - DNA, 335 bp, Zea mays
gaagctgctcagcaggaccgacctggtcgctctctcaggcgcgcacacgatcgggctggcacagtgcaagaacttccgggcgcacatatacaacgacaccaacgtgaacgcggcgttcgcgacgctgcgcagggccaactgccccgcggcggccggcaacggcgacggcaacctggcgccgctggacaccgccacgcccaccgcgttcgacaacgcctactacaccaacctgctggcgcagagagggctgctacactccgaccagcagctcttcaacggcggcgccacggacggcctggtccgcacgtacgcgtccacgccgacgaggttcagcg

SEQ ID NO: 287433 - DNA, 518 bp, Zea mays
cgaatagcgcaaaagatttggtcaagaagatgctgcgccaagaccccaaggagcggcttactgctgctgaaattctgaaccatccatggattagagaggatggagaggccccagacaagccactagacataacagtaataagcagaatgaagcagttccgggccatgaacaagcttaagaaggttgccttgaaggttgttgcagagaacttgtcagaggaagagatcgtgggcttgaaggaaatgttcaaatccctggatactgacaacagtgggacaataacgctggaagaattgagagctggtttaccaaagctcggcaccaaaatctctgaatcagaaataaggcagttgatggaagcagctgatgttgatgggaatggcaccattgattatgttgaatttatatcagcaacaatgcacatgaatagactagagaaggaggatcatatatttaaagcattcgagtattttgacaaggaccatagcgggcacattacagttgatgagttggaagaa

SEQ ID NO: 287434 - DNA, 432 bp, Zea mays
ggaccttcacgaaaacagccgccctctactttccgttgccctttccctggttatataagtcgccgcgccggggctgagttccattccattccatctcatcgcaacgttacgcaaagcgtcctccacctcctgccttgccttgcctgcctgcctgcgtcgtagtttgcacaccgcaacgccgccgggttcgtctccgccgtcgacgtcgccgcctcgctgcctccgggctcggcgagcgtgtgcatcaagatcacggcgctctgcccgatacgcgctgctggagatggcgatcgacctgctgcgttggcagaagaagcacccgtcgttcagcctgccgtggaaggtgcactccttcccggtgctgtctgagtcgagcccgctccacctgaccgcgtcggagctggcggcgctgatggcgtagtacgagaggga

SEQ ID NO: 287435 - DNA, 329 bp, Zea mays
attgtgtataagctataatctagccagataacacctgtaggagaagaaaagggtcacatagaagaaagagagggaggccctgattgggattgtaagctagctaggttgtccgcctgaaagcaggctggcagctaggcacaataatccatggacggatggatggattggatgggtcgccggagtcaaaaggaggccacgtcgtcttccccgcaggcgcagccaaggactacggcccgggacggcgaccccgccttgtatttgtttcgtgatttcgtccaatgcaaaaaagacagtgactgctttcacagcaccaactgcccgtattacta

SEQ ID NO: 287436 - DNA, 502 bp, Zea mays
agcactgctacttcgctgctctgggccgtttgccgttgatgctgcggacaagtatgggatagtgctgctgtgctgtgcagttcttgcttcttacaactggtagtggtggtggtggtctggtctccgtgtgagcatttggtctagaagagcgtgaagctgcgcggctcttctttcgtgttcaagatgaagttcatgaagcttggatcgaatccggatacctttcaggacgatgggaatgaagtcagtattgcggcatctgaattggtgagcgacatcactgttcgtatagggactacaaagttttaccttcacaagtttccgctcctctccaagtgtgctcgctttcagaagttgattccaaccactggtgatgaaaatattgagatccacatccatgatattcctggtggcgcaaaggcttttggggtctgtgccaagttttgctacggcatgattgtcacactcaatgcctacaatgtgattgcagcccgctgtgctgcag

SEQ ID NO: 287437 - DNA, 258 bp, Zea mays
atggtcttggtatgatgatttatttgaatattaggattaggtagtagttccaagtgctcaagggtgataagtcggagggttgttgagctgcgattggttgagtgaactgaacttgtggattggtggtgtataccaaggtgccatcatgtcaaaggtagataatttccccccgtggtttacctcatttgagcgtgagcattggcagtgttacacaggcagttcaactttgagctatcatggtaatgttccctttccgaa

SEQ ID NO: 287438 - DNA, 497 bp, Zea mays
cccgacctcgtcgtggcgctgctcccggccatgcgccgcctgtaccaggcgctgcagctggagggcctgcccaaggtccgcgtcaccacgccgcactacctcggcatcctggcgccctcggacgggatcccctccaacgcgagcttccgcccggggctggacgccaaggtgctggcgcccatgctcaggttccacaacgacaccggctcccccttcatggtgaacgcctacccctacttcagctacaacgccgccacgctggactacgcggtgttccgcccgaacgccggcgtgtacgacccggcgacgcggctcaactacaccagcatgttcgacgcgcagatggacgccatccacacggcgatgaagaagctcgggtacggcggcgtgcagatcgccgtgggcgaggccgggtggcccaccaaggcggaggccgggcaggtcggcgtaggccccgaggaggccagggatttcaacgccggcatgatccgggtgtg

SEQ ID NO: 287439 - DNA, 301 bp, Zea mays
gaaccaagcatctgtttctgtgccaacaagaaatgtaccatcaggtgcaccaggtatcactagcaggtccctgacaaggagggcttactatcctgtggttggaagtagcaactcaagcgttgatgccgttccaactatctgtggatcatctggcgcacaatatttgctaatggtggctatgctcttaatgctgatgctggaactgtttctatctaccctaatccagctcctgctacttcatctggctctataaccatgcccatgcccatgctccatcagatggtcattcagagccatccac

SEQ ID NO: 287440 - DNA, 310 bp, Zea mays
gcagcttcagccaccaagagaccagggctgaactgctgaagctgagataggattgagaatcgctgccagtggaaagcggcactagcagcagggcagaagcaagaaccagcaagaaaggggagagagaaagcggaaggactttttctcggattggatccttcgcttttgggggaaggagaaggcccctctctgtcctctctccatccttgcggagggcgctagcaggagcagcggaaggaggaagagatgttcccgcctggcctgatccaccaccgccctgacgcccccgttcccggcgatggggcgacac

SEQ ID NO: 287441 - DNA, 393 bp, Zea mays
gccttagctatgctactgctgccgcggttgacatcgattggtcggctgagcccgggcccgcgcggacagggatcatctactggtgcccgcgccaggctctccctgcagagcatgctgccattgccatcgacgtcgtcgtcgtttctagcacgaggctaccggcggcgtcggcgactgtcctcgatgacgacggacgaccacgagctggtcactgtcaccagcagcggcgccgttgcgcgcggagcagttggcgcggacctgtccctgggagcccgtgagcacgttgacctgccccatcttgacgtaggagtagacgaactggtggaagaaggcgtcctggtcgacggcgaagcgcgtgacgatggggcgcgtggtagcgttggtcagcaggtc

SEQ ID NO: 287442 - DNA, 324 bp, Zea mays
ctagttctagatcgcgagcggccgccctttttttttttttttgtaataacgatcgctactagctgctttatttccaatcgatcgatcgctactagctgcttatttgttgcaacatgcatgcgaacaagcttcaaactgcttatttgcttattatctagagcacgaggctaccggcggcgtccgcgacggtctcgatgacgacggacgaccacggcaggtcactgtcaccagcagcggcgccgttgcgcgcggagcagttggcgcggacctgtccctgggtagccgtgagcacgttgacctgccccatcttgacgtaggagtaga

SEQ ID NO: 287443 - DNA, 372 bp, Zea mays
gcgcgacaagatctacttcaagtccaacgtcgggatcggccgctcgttccccgcctccgccttcgctgacgaggacgagcaagcggaggaggaggagaagaagaagaagaatgagaacaaggaggaggagaacggcgacaagccagccgccgccgccgccgatgccgccggcaagtgagacggagacgcgagcgcgcgcgtgttgtcgtcgtgccgggtactgtgcgcggttgcacagggcaccgttgcgcgacgcatctcgcgcgtaaccacgcgtgaagatgcacgtatctatcgtctttcattgtgacttttgtgttgcttgtcctttttcctattattttttctttcaaaaaaaatgtattattgcct

SEQ ID NO: 287444 - DNA, 307 bp, Zea mays
ctagatctttcaagctatccttgcttcctagctccctttggcgtgctgtaccggtcgacaggggtaggtaggtaggtaggtgtagctagctcggcgagcgagggagcaatccggccaacagcacacgcgtcgatcgccatgccgagaagcggcggcggccgcaatggcggtggcattagtagtagtagtagggtgatgcccaacctcccggccgggttccgcttccaccccacggacgaggagctcatggtgcactacctcatgaggcaggccgcctccatgccgtgccccgtccccatcatcgccg

SEQ ID NO: 287445 - DNA, 342 bp, Zea mays
gatcgaacgacccccgcggccctgccccagaaacaaagctagggtttgcctcccaaccctcctcccgttctcccgcctcctcctgtgaaccgcgcgagccaaggaccgcccgtcgtctctcgccgctcgccgccatggggacggagcggaagcgcaaggtgagcctgttcgacgtggtcgacgagacgtccgtctccgccaagctgcgcgccgcctccaacggtgccgccgccaccgcgactgggggcaacccgtctgtcaaccggtggaacgggcggccctacacggcacggtacttcgatatcctcgagaagcgccgtacgctccccgtgtggcagcaga

SEQ ID NO: 287446 - DNA, 467 bp, Zea mays
gaagggctcacgatcgtggataacaagacctccagtattattgaggaaacaaagaaaattcagatcaggaggaaacctgctggctcaagccctcacgtgccgaattcagcggtagatacgcatacgctcagcacccctgatctttcactccggcagcctgaatctgctgcccaggagactggactgaaagcttctcgcgacgttgctaatgcaatggctgctaaagcaaaacttgtactccgtgaactaaaatctgttaaagcagatctagcctttgcgaacagctgatgcgctcagctggaggaagagaacaggctcttgcgagaaacaaagcagaaagggagcaaaactgaagaagacgatgacttggtaatcttccccccccccccctgatcaaacgtatctgttgtcaggttcaatgtctttttcgtggattacatgcatataccttggccttcaattcatca

SEQ ID NO: 287447 - DNA, 545 bp, Zea mays
cggacgcgtgggtgcggttcaccgagcagaacggcgtgataatccagtggactgggttcccggttgggtaacaacccgatagggagcaacgaggattatatcattaaccacctcaagttcagagtcttggtccatcagtaccaggcgcagggcgacgttgtggtcacgagtgaggatggtgttgcaatggtagagtctgatcgcaagagtgggttccagattgttgggtttgaggtcgtgccttgcagcgtaagacgtgatcctgagtccatgtccaagctcaagatgtatgacaaggtcgactctgtgaattgcccgttggagcttgagaaatctcaggcgatccgtgagaatgagcggatcacatttacctatgaggttgagtatgtcaagagcaacatcaagtggccgtccaggtgggatgcgtatctgaagatggatggtgccaaggtccactggttctcgatcatgaactcgatgatggttgtcttcttcctggctggtattgtgtttgtactattcttgaggacggttcgaaaggatct

SEQ ID NO: 287448 - DNA, 652 bp, Zea mays
gtcggcgtagccccgaggaggccagggatttcaacgccggcatgatccgggtgtgcagcggcgggaagggcccgccgctgatgcctgggaggacgttcgagacgtacgtcttctcgctgttcgacgagaaccagaagcccgggccggtcgcggaggcgaacttcggcatcttcaacacggatctcacacccaaatacgacctggggctgctccgccaaggaccgcagtctggatctccaaccccatctccggagccctcgccgtcggtcggcggaggcaagtggtgcgtggccaagtccggcgcgagcgcaaccgacctgcagaacaacattaactacgcctgtgcctacgtcgactgtaggccgatccagagcggcggcgcgtgcttggaccccaacaacatccactcacatgcctcgtacgtcatgaacgcgtactaccaggccaatggcatgcacgactatgactgcgacttcaagggcaccggcgtggtcacctccagtgaccccagttacgggagctgcaaatacaacgcctcctcctgacggcgcgcacaagtccagctggcactactgcaccagcctccagtccacatcgtcctccagctccaggctccagccatggccacgccggggacgggaagaggtcgtac

SEQ ID NO: 287449 - DNA, 605 bp, Zea mays
gttgaaaacttgctcgactttgactttatggacccaccgccccaggagaatatcctcaactcaatgtaccaactctgggtgttaggtgcattgaacaatgttggtggccttacagaaattggctggaagatggtggagttcccgttggatccaactctggtaaaaatgcttcttatgggggagcagctagagtgccttgatgaggtgctgaccattgtatccatgctatcagtgccgtcagtcttcttccggccaaaagaccgagcagaggagagtgacgcagcaagggagaaattctttgtcccagagtctgaccacctgacactcctgaacgtgtatcttcagtggaagtcgaatcagtatcgaggcgattggtgcaacgaccacttcctccatgtcaagggtctccgcaaggctcgtgaggtgagatctcagctgctggacatactgaaaaccctgaagatccccctgacatcatgccatatggaatgggacgtggtgaggaaggctatctgctctgcgtacttccacaattccgcccggttgaagggtattggggagtacgtcaactgccggaatgggatgccgtgccacctgcaccccag

SEQ ID NO: 287450 - DNA, 297 bp, Zea mays
aagttcccgcggacagcaccaacggcatggacctgccgcagtgggtggcgtccatcgtgaaggaggagtggaccagcgaggtgttcgacctggagctggtgcgcgacgccgccgcggggacggccgcggacgagcagctcatggacacgctgaagctcgcgctgcactgcgtcgacccggcgccggcggtcaggcccgatgcgcacgaggtgctgcggcagctcgagcagatcaggcctggtggcagcgagggcggcgctgggccaagcgaagaaggtggtggttgcgccgccgccg

SEQ ID NO: 287451 - DNA, 368 bp, Zea mays
agctgctggtgacggcggcgaagagcaggagttgctgtcccggtgagcgatcgttgcacgaggcggagggccaccgcgccgcgctgctgcacaagtacctcgaggaccagatggagctcgtggccggcgacgccgttgccgtggacccgacgccgagctcgcagcgaagccacccacatcagaagcagcagtagcgtgggctacaagacggcgcaggaaacagagcttgatgactacgggcggatgatctgattagaggacttcggtgttcttgcgtcactttgttctcttaggacggacttgtttgtagatggttgttcccgctgtaaattcctcttttttttttgacaaagataaagttgagctca

SEQ ID NO: 287452 - DNA, 298 bp, Zea mays
gtcatggccatccccatcgagctatccgaccgggaatccctcgtcaagtctgcgtccacggctctcaactccaaggtcgtctcccagtactccacccttctctcgcccctcgccgtcgacgccgccctctctgtggtggaccccgctcaccctgaccttctcgacctccgggacatccgcatcgtgaagaagcttggtggcaccgtggacgatactgagctcatccctggcctcatctttgacaagaaggctagccatgctgctgggggcccaactcggatggagaatgctaagatcg

SEQ ID NO: 287453 - DNA, 312 bp, Zea mays
ctgaaatagaagtaggcttcttccctcccgaggttgaggctaagattaaaaagggcttagacgaggttcgcgctgcgaagagggactttcgcagggaaggaagacgagctttggcaaagcaaagccagctagaagcaagtagtgttggtgatgaccaaacgagtgaagtcatagatacaaagcaagaggtatctgatgctgccgctaaagtcggagcctaggcctatgtgcctgtcttgaatgatcaaaggaggcggcaaatcattggatgcacctgggcaaataatggaaggcttgctacttgcgcactaa

SEQ ID NO: 287454 - DNA, 380 bp, Zea mays
gttaaatcactcggagtgaagaaatgtatatcgaacagtaaagaggggaaaacaagccctattcaagaacttcagggaaaagtgtcaataggaacaaaaaggggttcaagtacaaaggttcttgcctgtaagaaattggctaagaggagaagatccaaggaactgtgcaatctaaatagttcattggatgtgactaggactgaccagcagagaggaagaaaggaagcggcagagccaatgaaagatcacccctttcgcattggagtgttcgaaatctgatgctcaagggcagcttggcagaactttggaggatgcacagaacataactgaattatcaaatcaggagaacctgttacccacggtgtctcctggctttatat

SEQ ID NO: 287455 - DNA, 420 bp, Zea mays
ccacgcgtccgcgacgcgtgggtgtgatctgagtagtccaccatggatacctcgaacgccttcgcggtcgtcactctcctactactcccgctgcttctcgccctagcgcaacttgtacgacgtggatctccccagtacccgccggggccgatggctcttcctgtcatcggtcaccttcacctgcacctcttcgagaggcccctccaccgcaccctggcgtgcctcgcagctcgccacggcactgtcttccagctctggttcggttcccgccgcgtcatcgtcgtgtcgtcggctgatgccgccaaggagtgcctggccacgctcgacgtggcgttcgccaaccggccgcgtctgccgtcagccggatcctctcctacgactggaccaccatggggcactctaactacggaccctactggc

SEQ ID NO: 287456 - DNA, 513 bp, Zea mays
tctaaatagattgacacaagctctaaaaaggtcgggagtagacccatctcaagctagtatatctgtagagatcagtatggacagaagagcaacagaacctaataatatacatgacaatttgaaggatcatgaatgtgaagatattatacatgtgaccaagaagcttcggggcgagagaagcaagatctccagctcaaactgaaattcaaactgtggcgacaagccgacaacagaccaggactttgtcgacgaaattgacaattgatggaatgctcttatttatattgaaatcacaattactgacctaagcctccattcaggtacaaaggaagctgctcaggggagggtagtcataaagctccccaagtcagacattcctcctcatttgtaaatgcaattcagattgtaaaacagtgtacatgtactgctctctcaaaatttgtcaattcaacaaatatggtagtattgcaacgtttttgtatcaaccttccacagtacatgcattcaatcggc

SEQ ID NO: 287457 - DNA, 300 bp, Zea mays
  unsure (1)..(300): unsure at all n locations
agcaacctgaccacgccaccccgcgaggtccgcgataccgtccaaatccacgcgataacaaccaggccgtcccccttccttccttccctcccgtatatagctagcgaggggcgtggcaatggttcttcagctccgcctgatcccgcgcctggctgccgcagccaggttgacgcccgcgacttcctgcgctccccggctgctcctgcggcgcgcgccgttaccaccggccctcgcgatggcgtcggcgtacagcgccggttacggcggntgcaggaggctgctattcaggcagctgttcga

SEQ ID NO: 287458 - DNA, 304 bp, Zea mays
gccaactgcagtagctagcagcctgcctaacacagttcgtcatcgacctcgagggccggcaagcaatcaatcacccaagctaagccatggcgcctcgcagccgcctcctcgacctcgagaagcacgacgtgctcttcttctacggcgatgatggcgcctaccaccagagcgagcgcgtcagcgtggtcaccagagcgatcgccttctggcccgtcttcctcgtcgccgccctgctcctccacctcatcgcgccgttcccgcacgcggctgccgtctgcggggcgctctacgtcttcctcctcga

SEQ ID NO: 287459 - DNA, 220 bp, Zea mays
gagcgccatacatacacaaacagcgtacaagactcaaccactccctccttgtttgtttatataccttggcaccaccaaggcagcaccctgtaaactaaccaccaaagccgaagaaggcggcttgccctgcccgccgccttggtgccgcgcgcgccatggccaagagcaagtcgtccgccaaggccggccccccgctcctcggcaaggacgagctcggcca

SEQ ID NO: 287460 - DNA, 356 bp, Zea mays
gtacgaagcgtcgaactcgcctcgagctcggagcgccgggatgagctccggcggctgctcgacgtgcctcgaggtcatcttcgccgccatcctcccgccgctcggcgtcttcttccgctacggctgctgcagctccgagttcttcgtctccctcctcctgacgctgctgtgctacgtccccggcgtcgcgtactccctctacgtcatcctccggacgccgcccgagccgccgggcatcgacggggagcggccctacgacatgctcgcctgacggctttgcttgcacttgtgacagctccacccaacaacaacaacgcgtaggcctgtgcaatgcaacacacactcgctgtatgtag

SEQ ID NO: 287461 - DNA, 326 bp, Zea mays
  unsure (1)..(326): unsure at all n locations
cgttttctcgcattcggcggcacatggtggcgcgccttgctccacgttctcggcatatgctatggcccacaaggggaaggcgacgtccgacgtcacctacaacccgaatgacgggcccgaggcgtacaccaaccccgccgtccacaaccgcctcagtgagtacaccgccatggccaaggaggtccacgggccagattacgatccgaggaccgaggacatcgacggagatgtcctcatgagggtcggaggaggcaagaggcatgggcggtactggattgccgacggggcaatcgactcgtcctcncactccactctctctcaggtgc

SEQ ID NO: 287462 - DNA, 327 bp, Zea mays
aagctctggacaactcgggtgccacgtacttaactatgcatgataatagtagctagctagtgttcttgatatgcaggatgatttcttgattgtttaattaatccatggagacagtagctttgttcagcagaaagttagtgtgtatctcagtaggacggttcatgtgtgtgtatccaggtgttcagtcctggcgtacgaactcgctggcatttcggatgcgggcaagtctgtgcaatctgtatttgcaatgcttgttgcccgcagaggaagcttgcttaccagtgcttgtaacctagtattgtgcagttcatgagctaggcatgttga

SEQ ID NO: 287463 - DNA, 333 bp, Zea mays
atccttggctgtcgagatgccgcgcgacgcccttcctccccaaatgctgctgagtccccccaccaatggcgcccttccttctccggctgccgagatgtcgtacggccttcaacgcgggatctcgccccatggccaccaacgacgctcttccttccccggctgcaaggatgcgactaccccaccaacggcaacggcgccgttcctcccccacatgctgcgcgcggccttcaacgccggatctcaccccatgtccaccaacggcgtcgttccttttccggctgcacagatgcgactaccccaccaacggcaacgctgcccttcctcccccacatg

SEQ ID NO: 287464 - DNA, 366 bp, Zea mays
cagacggtgggcgcgcccgcgccaggcgtcggcattcgcgagcttcggtacaggctgtctcttctagaatgctaggagtggagaattgatgccggagaaatgcaagtttgaggacagaagacctcttcaggactagcagttcttgacatctacacggttcaacacctgtttcttctggggaagaaagcacagcaattcattatgaagagcagcgacggaaaccaaatcaagttacaaccaatgtggagaaaagttgcctatgggggaaggcagtcaggatatgatgataactacactgacgagtccttccttgaggagatggttatgaatgccaatgtcgtcaagagggaccttctgaaagtgatg

SEQ ID NO: 287465 - DNA, 300 bp, Zea mays
tagatgagaatggtggcggtgaaagagagaaagaaaacatgggaaagcagaaggataagtgtagacgagtgagcttcactgatcatgtggaggtgtttaatataggtggtagtgatgatgtagagggtgatgggagtggtgaaactgaacttgtgcatggacgacggtttagccctgaggaagatgcaaagctaatggaagcgatattgaaatatgcagagttgaagcaattaggagagaaagggttacagatgattggggaaagtaataagcatccagagaccaggggttgttgggctg

SEQ ID NO: 287466 - DNA, 347 bp, Zea mays
cccacgcgtccgcccacgcgtccgcgatctgctccccccaaaccacacggacgcacacacacggacgcacgcacgaatcaatcaggcaccacaccacccccttccctgcgtcccggagacagaaaagtctcctcccatctccgccctggccccctctcaaacatccccgcggcgatggatctccgtctcgcccactagcccgccagcgcgaccgtgggtgtgggtgggtacggggatgggactcctcgggcggaggccgtggctgctgctcctcgccctcgcttccgcggccgtcgccgtcgccgtcgccgtggaagcctccgagggcgacgctgatccgctctaca

SEQ ID NO: 287467 - DNA, 289 bp, Zea mays
gtagtacctcacaatggcagacaaaaagctaataccgttggggctcattatcctcatgagcataggattagccaatgctgttagggtggttagatactctaatgccgatggtactggcacaggacacggagaaggtggtggatatgtgaatggcggaggatcaggatctgggtctggcaccggatcaggtgatagtggtccttatggtacacatgcaagcgctaggagaggtagtggagggggtggaactagccagtacggtgggtctggatatggttctgggtcgggg

SEQ ID NO: 287468 - DNA, 529 bp, Zea mays
ctctgacagaaataccagccaaggtcgaagaggatgaagtcaaaccagatgaggttatacatgaagttgcagtaggaaagggtttagctggtgctttaaagattcttaaggagcgaggaagcctcaacgagggaacagattggggaggcagaacaacagacaagaaaaagagcaagcttataggtgtcgaggatggacctaaagacattcgcattgaaagaatagatgactttggcagagtgatgacacctaaggaggcattccgtcatctttcgcacaagtttcatggcaaggggcctggtaaaatgaaacaagaaaaacgccagaagaaatatcatgatgagctgaagaccaactcctatgtaatcttctagacacaccattattggccgcggaaaagatgagagaggctcaatctcgtaatcaaacaccatacctcattttaagtggcatgcaaatacaggtcgaacagtgtacggcggtatgctactggagacagagaactaggacctaagccatgcttgggaca

SEQ ID NO: 287469 - DNA, 489 bp, Zea mays
ctcgcttgccgccggcctcgccgtccgcttcctcgtgccgcggccggccgaggtaaccccagaggcctggcagctcctctccatcttcctctccaccatcgcggggctcgtcctcggcccgctccccgtcggtgcgtgggcgttccttggcctcacagccaccgtcgccacccgcacgctccccttcaccgccgcgttcggggcgttcactaacgaagtcatctggctcatcgtcatatccttcttcttcgcgcgcggctttgtcaaaaccggactcggcgaccgcgtcgcacctacttcgtcaaatggctggggcgcacactttgggcctatcctatgggcttgccatcagcgaggctctcatctcccctgccatgcccagcaccacggccagggctggaggtgttttccttcccatcgtcaagtcgctatcgctctcgtccggaagcaagcccaacgatccatcggcgaagaaactcggctcttatc

SEQ ID NO: 287470 - DNA, 289 bp, Zea mays
cccaacggacattgcctaggaggctaggacagaaccacccagagcgcacaaccttacccgaatcgccgttgcatggaggccgtgcgcgcgtcggcggcgtgggtcgccagtcgctcctcccatgtcacggtcgaccttcaagaaattgagaaggtagtggaccaaatccaaggagatgttccaaaagttgagtgggattacgaaggaattcactactttgacaatgggccactcacagtccagtacctgttcgtcttggatgcactaaacttctgcttctggccagata

SEQ ID NO: 287471 - DNA, 291 bp, Zea mays
ctcattgctggtcatgagacttcagcagctgtcttgacatggacattttatcttctatctaagtatccaaaggtaatggccaagctccaagatgaggctgatagtgttctaggtgatggtttgccaacaattgaggatgtgaagaaactaaagtacacgactcgggttattaatgaatcattgagactatatccacagccgccggttttaattcgtaggtcacttgaggacgatatcctgggagggtaccaattggccgaggagaagatatttttatttctgtctggaatc

SEQ ID NO: 287472 - DNA, 508 bp, Zea mays
ccatgatgcccatggtgtggatgcacccgaggacgttgagaaaatcgaagcactgatgcgaacgagaaacattcagtagaaaacgaagagaaagcaagtgctttgcattgctatcggcgttggcttggtgggatacttttggttgtgctttcccgtcttctgaatagcatgataccaagtgaagttgctgcatcacttcttgaagttttgtgcttgctaaaacgttcattgattggatatgtcacttgcattagtcctcaatcagcagttcagcgcgcaggtggattgtatctgtacttcagtagttagtagcattactttcagtcttctttacattgaaaaacaaatcgtttctggagatgaagcaattggcagtgtaaaacaaaaggctaaagacccatccatgccgcgaggcgtgattgatataaggccagactcatcggaaaaaaaaaaaaaaaaaaaaaataaaaaaaaaaaagaagaaaaaaaaaaaaaataaatgtccgaa

SEQ ID NO: 287473 - DNA, 281 bp, Zea mays
ccaagatgaagttatgaccaaagaagacggagtgacaggccatacctgtgaaggtcgtgcgacgtgttggagttgtcttaagcaggcgaacaccacaaagacaaatgatgctccaaatttaggttcattgttggttggtaacgaacacatgcaaggcctcatgagtaatttgagagataattcatcccatttgtttgacaagaatcattcaagacaccaaagggatgatccatgtgaatatagagaaacaaacttgaagtttcctaataggatccaatcag

SEQ ID NO: 287474 - DNA, 428 bp, Zea mays
cgccttctacctcggcaactccagcagcatgatcgcccagatgaaccgccagtttaccgtcaccaatgtgctgcttggaagggacacgtttggcgtcactgtgttcccgcacgttgactacgtgttcgtcgctgctcttgttgtgatactggatgagattcatagggaacggtccgactgaggaacataccacaccacaccaccaagcttctccaccgttgctcgaccatgctatgcgcatgtatcatcatcacaggttattcttgtcaattatatactttccatgtatgtatatgtaagtattaatgagttagtacactatctcctgatgtataagtttttcttcatccatttgaatatagacataaaaatcaaatgactattattttgggatgaaaaaaaaaaccacgcgtccgcggacgcgtggg

SEQ ID NO: 287475 - DNA, 320 bp, Zea mays
  unsure (1)..(320): unsure at all n locations
gtcttcacactcctcgccatcacataaaaccagtgcaagcagaagcagcgcaatggcgagcagcaccatggccctctcctccacagccttcgccggcaaggcagtgaacgtgccgtcgtctctcttcggcgaggcccgcgtgacgatgcgcaagacggcggcgaaggcaaagccggcggcgagctccggcagcccgtggtacggccccgaccgcgtgctctacctgggcccgctgtccggcgcgcccccgagctacctgactggcgagttcncgggcgactacggctgggacactgcggggctgtcggcggctcggagac

SEQ ID NO: 287476 - DNA, 254 bp, Zea mays
ttttcttaagagagtcatggaccgacttccaggagcaaggattgcatttattggagacggaccattcagagctgagctcgagcagatgttctcaggtatgccggtggtgttcacgggcacgttgcaaggggaggagctatcacaggcctatgccagtggggatgtgtttgtgatgccttccgagtcagagacactggggtttgtggtgctggaggccatgtcatcaggagttccggtagtcggggctcgcgccg

SEQ ID NO: 287477 - DNA, 327 bp, Zea mays
tcaagcaagcgtgtgaagatgctcacaagaatggtgcaatcattgctgttactgcatcagatgtatcttgcatcaagcgttgctacaatgactttcgggacattgtaagacactatgcagatatactgttcgccaacgccaatgaagcaagggcgttgtgcgagctaccctcaacagacagtcccatgtcagccacaagatacttaagccactctgttcccctagtatctgtgactgacggcatgcatggctcctacattggggtgaaaggtgaagcaatatacatccctccaccacaatgcgtggctgtggacacttgtggcgctg

SEQ ID NO: 287478 - DNA, 323 bp, Zea mays
ctttaaacgagtattcaaacatccgatgtgacgggactaaaatttagtcccttggatccaaacgggcccttaaatatagctcttaattctgagtcacagattaattaacctgcctgttgactgtttacatgttatttgtgatgctatagtatctagtccgttatctatagttttagaacagtaagaaatgtaagacaggaggcagttgattatccttccatggcatggcacaatgtctgaagccgatacttgttacagtacttataatgcaagggaggcaagacatatgtgtagcctttcctttttgatgtttctgtttggca

SEQ ID NO: 287479 - DNA, 574 bp, Zea mays
cggacgcgtgggcggacgcgtggggttatgcaagtcagaactgttgatggaaccagtgaccttcgaatacctccaggtatccaacctggtgatgtaattgtcttagcgaacataggagttccatcattgaataagccgactatacgtggtgatcatctgttcactgttaaagttgcaatacccaagcgcataagtgggcgtgaaagggaattactggaggaacttgcatctttgagtaatggtggctttgctcgaacagatgccaagccaaaacctgcccagccaaaacgtgtacatctagagaaagaagttggtgctagccaagaagatacaggcaaatctaaagcagcagagggtgactggttgaagaaacttacagattttgctgggtccattgttaatggcgctgcgaagtggctgaacgacaacctgtaggctgtaaatatttactgcaggatagaagattgtcttacatggtgctgtagtccaatcaaaatttttagattcattgggggtccccacgagctcgtatattcgttttattggagagctgcaagattttcaggctgagtgg

SEQ ID NO: 287480 - DNA, 414 bp, Zea mays
ctcgtctcccccgttcggcggcgcgacggtagagagattccgtcgaacacatggccgctctcgcctcagccgcccgctcgaggcgccggctccttccctatctgtaccgcctcctccactccgcgtccacaaccgctgtctccccgtcgccctccaccagccgcttcctccgccacgcctcgccggtgccccgcacccctgaccactccccttaccttcgggtccccggccgcgcgcgtctctacgcgcccctcagggctccgcgtcgtcacgcaggcctacccggtcgccacacggattgcctccgtcggcgtctgggtcgatgcggggagccgcttcgagctccctggaaccaacggaaccgcacacttcctggagcacatggccttcaagggcacacggcgccggcccaac

SEQ ID NO: 287481 - DNA, 385 bp, Zea mays
tccccatgtccccaaaattaatggagaaatcccatcaattgatgaagccactatggaccatgaaaggctgacagaaaggttgaggctgtatgagctggttgaaaacaaggtgaaaggagatggcaactgtcagttccgagcactatcagatcagctttaccaaagtccggatcaccatgaatttgtgaggtcgcagataattaaccagcttaaaactaaccgtgacgcctatgatggatacgttcccatggcatatgatgattacttggagaaagttgcacggaacggtgaatggggtgaccatgtgacgctgcaggctggttgctgacaagtatggagtaaaaatcttcgggatgacatcggtcaaggatacttgctacatcga

SEQ ID NO: 287482 - DNA, 369 bp, Zea mays
ctggaagcatccacatctcagccactcaaccaccagtcatcacccctctgtttctgcaagtcactgtgggcaacagagaatacagtggaaacatagaacaagatgctttatctttccccgttacatcacttcgggagagtatggtaataatgctgtacagtgcagacggggcattgatatcaaaatcagagctgaagacaaaagagattgtggagtcaggaactatggacacagtatttgctcttgatagcgggggagaaatagttcttcagattcagttcttgctcaacgatgatgaccgcaagcgaatccaagaaatgagaaattctgcgatgaagatgaagcagcaagggctgcttggggatggca

SEQ ID NO: 287483 - DNA, 267 bp, Zea mays
tggtactttgccttttgctttttcctgttagatgatgaagtagaaactatggcaaagaggcacatcatctcgtgacattatgcttaatttcttattgaggtcgctagtgagaagccgcttgggtagtaggtttgccatcctatttttcagccagcggtctttcaccatctgctatttgttttcactcagaattttctggtggctgcaggtccagaaaaggtttgaggcacttaagaaaaggaaggatccaagtgcctttactgaaga

SEQ ID NO: 287484 - DNA, 301 bp, Zea mays
cagtacggtcggaattccgggtcaccacgcgtccgggacgctggcagaaaaagcttcagttggatcaaaaatattttccactttcattggtttcctcaaaagcaaagatccaagcgatggaacagaagaggcactacttaatgagcttacttcatttgatagttatctaaaagacaatggtccatttattaatggtggaataatttctgctgctgatctctctctgggtcctaaactatatcacatggagataactctgggccactacaagaattggtctgttccagattcactttcttat

SEQ ID NO: 287485 - DNA, 421 bp, Zea mays
ggtcggtaccagctggatctccggacactaccacctccgcgtcaactgccccgcgctgctcaccgtcaacgacggcaggggcagctacggcgccaacaccggcggcggcaccggatacttccgcttccagcaggcagcggcctgccccgtagacgtctagcagtgctctctctctctctgtaccagctagctgtgtttgccaattcgtcgatcgaatcaaaggacgatgcttccttcgtcggtgttcatcactcacgcactagctagcttctttctgcgactgccgacttttcgtccggttggttggttggttgattgattgatatcgctactatatcagctagcttttcgatcgatcgattcgtgtaaaagcaaagcaaaggaaaggaaaggaaatgaaaaaggctatcttttttttgtt

SEQ ID NO: 287486 - DNA, 462 bp, Zea mays
aatagttgctcggcagctggagctcgtagagagctaccagctacttgctgaaacctttggaagtgactccaattctaggttacagattctccccatgaaaataaccaagaggggttctagtaaagacaatggagcatcaaagcccactaaacaaaccggatcagatttgatcgtcagtgagaatggtggtggctcaagtttttctcggctgccatttctgccaaagtgatcgtctagatcttctgatcaccactgtcgaaaatgtacatcattcctctctcttgttgttcattgtacaacattgtgcagtgttgtaaatagtgtgtcgaatgttgaagaagcgaaagagcaaaagctaactgcaattgccttccattcttttgctgggaataaaatccgttcaattctgggtgtcagccacggccgctcaaaagtcatccgcgacgccgtcacctataccga

SEQ ID NO: 287487 - DNA, 274 bp, Zea mays
aatctttccactcgccaattcgctcgatctccaatccggcaaatcccctcatctctcacacaacctccgaatcaaacgctgaatcgcgccaaatttactcttgatctatctccaaacccgccgctatctctcatcctgctattgcaatttcatccaaaacttgctccctcggaagccatcgccatggccgcggaggcgggcagtcggcgcggcgcggcggcgcggaggaaggcgaaggaagcggcggtgggcgccgcgcgagggttctcttcta

SEQ ID NO: 287488 - DNA, 675 bp, Zea mays
gagagtatgaaatagaatcactgccactctatcaggaagttatggtcacgaggtcattatcatcagatggcaacttcagcgatgattttgctgcatccaggcaaacaaaaagcaagagtatgccatcagaagataattttggtgataattttgtttatacaaggaaagcaaaagggaataaacctgtgcatggaaagtctctagtccaagtatacacataccagatttcagaagctgatattttactagtagcaacaatgatgggatttgatgatgaactagatgtaacagatgacattggagcagctgatgtgattcttgcatcgagttctgaaatgaagcagaatccttggattcataatgttgccaaataccacaagcttcccatatttgttgtcaagactaatacgatggctcaaatagttaaggctatcagaatgattgttggaagggacaacacatcatcaagtaagcagcctgaggttatggagggagagatagagattgaggatgatgctccgaaacgtaagccatctttggaggaaattgatgccttggaggaggctcgtcttgcaatcgagtacatcgttattccaggtggggagccagttgagctcctcccaagatgttcagaaatagttgctcggcagctggagctcgtagagagcgtacagc

SEQ ID NO: 287489 - DNA, 293 bp, Zea mays
ctcaaagcctatcttccgtcagctactgaaccgattcagttgtgaataattttggaatccgctagagtccgtgaggtagtgatgaaaccattgcaaaacgtttgtgcttgaatggtttattttcctcctgcatagcgcactgcagagcctgagaaccagattgctgtagtcgatttgcgaggggttctcttttttttttggtttttggtacctttcgcgaggaactcgccattgtttttgggtactgaagcatgtactcgagcagctttgctaaggagaaatgaactattctc

SEQ ID NO: 287490 - DNA, 301 bp, Zea mays
cgtgccagtcccagtcccgagcgcccgagcccttactcctcttcttccgaccccccgctggcttggaaaaaaggggcagaaaactcgcgcagtcggtcaccgaatggaggagcgcggtcgaggtgccgcccacacggagctgcgaggtgtttgtaggatctcctaggtgagcccctgctgcttggagacagccatggccaccggcgtggctccagctcctctcccacatgtcagagtgcgtcatgggggcgtcgggttcaccaggagcgtcgattttgcgaaggtcttgtctgctcccggt

SEQ ID NO: 287491 - DNA, 399 bp, Zea mays
gtcctcatgccgtcgccgctgggtggacgaatccaattcgggcctggcaaggctggcctgccgtcggcctccctagctcgccgcctcctctctactatatcatctccagcgatcccttcacgcagtaccagcaccagcgccagcaacagcaacagctgtggtttcagcacaagaagggccaggaagaagcgcactgcgtttcttggacggtgagcgcggctactccggcggacatggcgaccaacagcggcagtgccctggcgaactggcgccgctggaagccatcctgttcgacatcgacggcacgctctgcgactccgaccccatccacttctgcgccttccgagagctcctgcagcaggccggcttcaacggcggtgtccccatcacggaggagtt

SEQ ID NO: 287492 - DNA, 449 bp, Zea mays
cagaagctaaggcaccttttagctgacaggtttgctgatgagaagcagacggagttcagatatttcatcggagtggaagcacctaaaggtctgttgaacctggaagaactacagactcttgaaacagtgcaagcgagcaaagacttgcctgaacagctgaagaaactgatgcaactcagaagcttatggatcgacaatgtaagcggtgcagattgtgataaccttttcgcgactctttcaaccatgccacttctttccagcctcctaatctccgcaagagatgtgaatgagacactttgcctccaagcccttggtccggaatttcccaagctccacaggctaattgtaaggggccgctgggctgccgagacactggaatatccaatattttgcaaccatgggaaacatctaaaatatttagcgcttagctggtgtcagcttggtgaaga

SEQ ID NO: 287493 - DNA, 424 bp, Zea mays
agaagaggggactaaaggacgaagatgatgataatgactacagcagcgatgatgagcctgagaatgatgatgatctctttgcagatgaacagtctgatgaagaacctaagtcgagcaaaagcaagaaacacaaggcaaaggcaaaaggcgaacaaagaggaaaggaaatgatggaaccacagatgaacatttggaacaagaagcaaccaaagatgagttggagctcttggttgctggtgaccaggatactgccaatggtgcaaagggttataacttgaagcgtaaaaagggcaagaagggcaaagaggaatctgctgatgacaaacttcctgacattgaccttagcaaggatgagaggttctcagcaatgtttacttcccacttgttcgcattggatccaactgatccccagtacaagaggagt

SEQ ID NO: 287494 - DNA, 235 bp, Zea mays
cacggctctgcgcattgccgcgcgccgccggccggcactcgccgtcctgacgcgagaaggaagatgctctaggaagttgggggcctggctagggacagcctgtgtcccgccgtgggatcggtgggagagcgggaggcaggcatgtgtgatctggtggcccgcacgggccggcacctgcagcgctacgagaacggccgtcgccttgtggccggctgcataccattcagatataggg

SEQ ID NO: 287495 - DNA, 291 bp, Zea mays
gatggattatcggcaagcctgcaattctactgcacacctcagatgctggcgagagctgggaaagaatacccctgagtgcccaacttcctgggaacatggtttacataaaagctactggggagcagagcgcagagatggttaccgatgagggagcaatctatgttacctctaaccgtggatacaactggaaggctgccgtgcaggagaccgtttcagctactctgaacagaacagtttcaagtggcattagcggtgcaagctactacactgggactttcaacacggtgaaca

SEQ ID NO: 287496 - DNA, 465 bp, Zea mays
tgcacctattcctattggcaaagtggagtctgcaacctccattgttgaacgtttttgtactggtggaatgtccctaggagccatttcaagggaaacgcatgaagctattgcaattgcaatgaatagaataggtgggaaatctaattcaggagaaggtggtgaggatccaatccgttggaatcccctcactgatgttgtagatggttattctccaacacttcctcatctcaagggtcttcagaatggtgacacagccacaagtgccattaagcaggttgcatctggacgttttggagttacaccaacattcttagtaaatgctgaccaaattgagataaagattgcgcaaggtgcaaagcctggtgaaggaggtcaacttcctgggaaaaaagtcagtgcatacattgctcgtctgacgaactccaaacctggagttcctctaatctccccgcctccacaccatga

SEQ ID NO: 287497 - DNA, 425 bp, Zea mays
ggcaacaacgcaaggagcgtaagaagcgacagaagtggttctggggttcagttgggcttgcagtcacccttggtgccacggccattgcctggtcttatctaccttcatcgcagccccgagctagtgcagattcaaatagtaccgccagtgactagagctaggatgaagatatctcatttcagaagcctaacaaacctctaactatactcctagaggagaaaaaaaaacgttgtataagttctcttttggtgatcgtccatgatcgctacaatcttcatttgctgctttgtatgtaaaaatgttgggtgggccatctccgtcaggattggctccattccaatcaccgtaaatctctgcatagatgattcatggttgagcaaataatacaaagggatgtggatatggttagtaatccatgcccaccg

SEQ ID NO: 287498 - DNA, 294 bp, Zea mays
cacctccccgtggaggagtccacagctcccgggacacatgttatggtggcaacaagagacaacaaagaaacaacagaggccatttgccgtaagattggggtttccagccctatgaaggtcaaactggcatggtccggcatggatcctgccttgcccacctgggaggatgctacagctttgaaggaacgctccctgcacgcgtcggcttggggacaagccgcatttgaagacccggggaatgtcagcactgatgatccacaagagaaggagacgatggagctgaagactgacaaa

SEQ ID NO: 287499 - DNA, 285 bp, Zea mays
caccgcccggcgcccgccatgtattcggccaaccactggggcggctcgttcgagatcgccgatggcgcggcggaggacgaccacagccgcaacatggacctggaccgcggcgcgctctcggcgcggcagcaccacgagctggacgagacccagcagagctggctgctgggcccgccggaggccaagaagaaggacaagtacctggacctcgcgtgcgtcgtcgtcaagcgcaagatgctctggtgggccttgtggtgcgtcgtcgccgctttcgtcctcatcggc

SEQ ID NO: 287500 - DNA, 267 bp, Zea mays
ggggttcattcctaccgagaaaacagacatccgcgacctaggaccgatggatgaggccatcttcaacctggtaaacaacgtctacgctgccccgaaccaaataccgtcgatctacgacatgcaagagcgcaccgtggacggcaagaactactggacgtttgagtacgatctggaggctccgggctacggcgtttctgcgtttgcgacggtcgccattggaaacggtcggtactacacgctgatcgtgaccgcgaacgagcgccggtg

SEQ ID NO: 287501 - DNA, 265 bp, Zea mays
tgattccatccctgagaatgaaacaactgaacagcagacagaagagtcagctgaggacactttgaaggtatcagagttccaggattccaaatctgagacggatgttgatgttgactataacagtttgtactcaaggcaggactttctagaaggcgaggacggtgagctttcatggtttaatgctggtgtccgtgttggagttggaatcggtctgggcgtgtgtgtgggtatcggattaggcgtcggcctgctggttcgtacatac

SEQ ID NO: 287502 - DNA, 401 bp, Zea mays
tgcagagaatgctagagaggaccttgggatccatcacattgtggttgatgattgggacaaaggagttgatggtgaacaaaatgttgttttgatatccgttcccagtgttcttagcaaggacctggcaccgcccggaaagcacattcttcatgcatatactccagggacagaacctttcagtttgtgggagggactggacaggaaaagtgcagaatatcgaagactgaaggaagaacgttctgaggtgatgtggaaagctgtggagcttgctctcggcccaaaatttagccgcgaaaaatgcgacgtgaaattggtcgggacaccgctaacgcacaggagatttctccgaaggaacaggggaacctatggtccagccataaaagccggagaagccactttcc

SEQ ID NO: 287503 - DNA, 333 bp, Zea mays
cagtacggtccgaattccgggtcaccacgcgtccggagaggtcggacgcgtggggtccaaagtcgcgtctcccagcctccctccactgtcccacaccccaacactgttccagtccagcggctagcactagcagacagagcccctcctccccctagctcttgctcttccacaggcacagcgcaacgcttccagctagtctcgagacgaccggcagagatgatgaggcgttgcagcatcgccgccctcgccatcttcctcctcctcctcgtgtgctcctcatcctcctccaactgcgcggcagccgctcgcctcctgcctggcgccggacatctc

SEQ ID NO: 287504 - DNA, 252 bp, Zea mays
atccaacgctgttgctgtgccgtcctctgttctctgttccccccttttttttctttcttcttttacgacgaccggccggtgcagtacttcgtgtaccagctgctccgcgggctcaagtacgtgcactcggcgaacgtcctgcacagggacctgaggccgagcaacatgctgctgaacgcctagtgcgacctgaagatcggggacttcgggctggcgaggaccacgacggagaccgacttcatgatggagtac

SEQ ID NO: 287505 - DNA, 380 bp, Zea mays
gcaggagctcgccaggaacacgcgcctgcgacctcttcttcgtcaaggacctcaacaaggagcagctactggagctggagagcggcaccttcgatgccgtgctctgcaccgtcagcgctgagtacctgcagtcccctgaacaggttttcgcggagatcttccgggtgctgaagccagggggcgtgtgcatcgtcagcctcagcaaccggatgttctacgagaaggccatcagcgcgtggcgggacgggaccgcgtacagccgcgtgcagctcgtcacgcagtacttccagtgcgtggaggggttcacgcagcccgaggtgatcaggaagctgccgtcggccggcggatcgccgtcctcgccgctggacgccgtgatgagg

SEQ ID NO: 287506 - DNA, 278 bp, Zea mays
gcttactcttcccttccatggcggcatacgccggaaccctagttccacccttcctcaccgtccgcctcgcggtctcccacctcagatccattaccccggggtcctactccctgagccactgtctcccccgcctcgcgggcgcccgtgcggcctcccgcggaaacggagacggcgacggcgggcctccagcggagggggagaaggagcgccggcgcttcgtcactcccagcgctgtcggagatccggtggggggagctggtatccccggaccccaccaa

SEQ ID NO: 287507 - DNA, 280 bp, Zea mays
gaataaaggccctcgcttccccagcggaacgaggcggcacgcagtgtgatggacgacatcgtgggcgtgggcgccggccggaggaccgtgccttccttcacgggatccataaggagtgtcctgcccatcgagaacgggcacgaccatgccgccctctaggcgctcagccacctccgctaccactccacgtacgtcgttcaactcacccgacttgctcaatgttcgctgctgctctgctcttgtattcgattgtgcagggagaggaaccaagcggcgcggg

SEQ ID NO: 287508 - DNA, 442 bp, Zea mays
gtgtttgtattggtgctaattgtttctgccgatttgggcgtgattatccaggctgagtggtattggtgatgtcggctgattagatttgggggtgtattggtagaggggattcgttttttttaggagggggacgtctggacgtctacccccccggcggtgggcttgggctccgtgatcgagactgctccgtgaagtttttggtcctagggattgtgtttttttgatcggcccggaccaggaatagagggttcttctcttgagaagatctagggccgcgtgttctatcgtcgtctgtagataaaatcaaaagacaaaagaaaaaaagaaaatagagagggagaaaaaaaagagagagcgagagatatagagaggtagtggaagggaggctggaggttatggcgctgaattactcgtcacgctcgctcctggtgaccgatgaatg

SEQ ID NO: 287509 - DNA, 351 bp, Zea mays
cgcggggagatgagctgcttaccgtgctccggttcctcggggaaggaggacaagagcttggcggcgctctcgccgagcccccggcctgcgcgcaaggcggcaccagttcgatcaaattcacgtgcttcgagctccaggaaggaagattctgtacctgttcgcagaggaggaaacgctgcacatggcccggcacagattttcagtttccgggagttggctgttgccaccaaaaatttcagaagagattgcctgttgggagaaggtggctttggtcgtgtgtataaaggacatatggaaaatgggcaggtcattgctgtgaagcaacttgatagaaatggttttcaaggaaat

SEQ ID NO: 287510 - DNA, 281 bp, Zea mays
cccacgcgtccgctcgctcgcaagctcaacccacccacgtctacggtctaccacacgaagcatcgtagccagccagccagctaaacccacaccacacatggccgggatcgtggtggtgttcgacttcgacaagacgatcatcgacgtggacagcgacaactgggtggtggacagcctcggcctcaccgacctgttcgagcgcctcctccccaccacgccctggaacacgctcatggacacgatgatgggggagctgcacgctcggtgcaggacgctggccg

SEQ ID NO: 287511 - DNA, 295 bp, Zea mays
cacatttctactcaaaccacgcagacaccgacaccacacgggttcatcttctagctcccctagattgcccggacggggtactggccaccagttcaccatgggcgactcctcgtcgtcatcggcagcctacatcaaaatggttcaccatatgatagagaagtgcatctgcttcaacctgagcaaggaagagtgcatggacgcgctggagaagcatgccaacgtcaagcctgtcgtcacttccacggtgtggaaggagctagagaaagagaacaaggagttcttcgagacgtacaac

SEQ ID NO: 287512 - DNA, 294 bp, Zea mays
ggcagtggcgcacacacagccacccgggttcatcttctagctcccctagattgcagctatctcgctgctggtgtggtactggccaccagttcaccatgggcgactcctcgtcgtcatcggcagcctacatcagaatggttcaccatatgatcgagaagtgcatctgcttcaacctgagcaaggaagagtgcatggacgcgctggagaagcatgccaacgtcaagcctgtcgtcacttccacggtgtggaaggagcttgagaaagagaacaggacttcttcgagacgtacaacaa

SEQ ID NO: 287513 - DNA, 408 bp, Zea mays
actagttctagatcgcgagctgccgccctttttttttttttttgtggttaacatagatattcgcatagattttatagcttgacagaattgtgctctaaatgtacagtatgttgctctcgaatgaagtatacaaaaaagatgactgttgccatagaatgccttcactcatcatcgagacctggtatgtacagtaaattgacgtcgaaaacgacagggctgcttgggggtactcttggccttccaggagcagaagtaagacccttagggaacgctaatggcccaggtatgtacagccgacgtagtcctccaaccttcatcgacaaaatcccctcatcaagccccttgatcacctgccctgatccaacgcggaatatgtagggctgacctttctccagcgaactgcatcac

SEQ ID NO: 287514 - DNA, 372 bp, Zea mays
agttgatctgggcggacttagcaaaaaagtcagcaactttgtaatgggtggctggtggagtggcagctcaacattgtccttgaataagaactttgtacagcaggttgaggagaagttttcaaaagatacagatataatgctagtgtgccagaaaggacttagatcacttgccgcctgtgaacagctgtacaatgctggttttgaaaatttgttctgggtacaaggaggccttgaagctgccgaagaggaggattttgaaagggaaggttcccagcctttcaagcttgctgcaattggagggatttctgaattctttgggtggacggaccagcaacgcgcgcaggctgcaaaggaagggctgggataccggct

SEQ ID NO: 287515 - DNA, 285 bp, Zea mays
gaaagatgttgagctggatggaagctttattattctagctgacaacgtcatgggttcaaccaagaatagcaaaaatggtgaacagatactgcactatggttccaggtgtgggagatgcagactgcaaagtgttaaaattgttaatgaagggatcaattggacttctcccaataatgtctattggaagcatgatgtagagagatcagaatctgtaaagattattcttcatggaaacgcagaatttgaggcaaaagatgtagtcttgaagggtaaccatgtatttga

SEQ ID NO: 287516 - DNA, 417 bp, Zea mays
  unsure (1)..(417): unsure at all n locations
nccacgcgtcctcggacgctggccggccgtgggctggagcccagggaaagcgacgagcaaaccaaacatggcggcgatcctcgcgcgcgccggcgtcatcgccaccgccggcaaaggtttctcgggccgccgccggggcaatggtatcgtcgtcgcggcggtcactaaaacgggggctgctgtgccacaggagggggcgctggaacggccggcgtggtccggcgagaccacgctgtcgcgtctggttggcgcgctcatcgcgttgaagccgctctactctgtattgaagctcgcctcccgcaaggtcatcatcaggtagtcatacaaaacagaaacctctgccgctctttctagacatttatgcagttcttcacttgttctccttggggatggcggagatgtcggtgagagaatgca

SEQ ID NO: 287517 - DNA, 439 bp, Zea mays
gaaaacgaatctagagaacaccccagagactgagaaggagcaaaagatcagcgcaactcatcaaggcatatacaagcagttagttgaaacactaagatatttgggtgtgggagttgtggaaacagttggcaagccatttgatccttcggtccatgaggccatctcacgagaagcatccatgcaattcaaggcagggattgtcatgcatgaagtccgcagagggttccatttgaaggagaggctgctaaggcctgctactgtgaaggtctctactggctctggcaaacaaagtgcaagctcataggcgggggacaaagatgctgctttgtgaatctgatcaaacgaccaacaggaactgatagacacacatttttctgttcataacatgccgaatgtgtttgatctcaaatgagacgggatcagctatgtatggtgttga

SEQ ID NO: 287518 - DNA, 370 bp, Zea mays
cgctatagcattccattcctgagctcgctaactgcgcttcttcggttcgccggaaagccacgggttgggttcggcgggaggccgggaaacgggaatttatttcaccagtatgcaacagatggccatgccatcgttcgccgtaacctcacctccgtcacatggcactaccttatgggcgcctcatgctcgtcgtcctcaaagactgcacaggagacacgtgcgcagcaagtccgggcagtggcacaagcacagctgcagtaccagaagctgggggactcagacctcctcatcagtgaggtcactcttggaacgatgacttttggcgagcaaaacacggagaaggaagcacatgacattatcgcttattctt

SEQ ID NO: 287519 - DNA, 368 bp, Zea mays
caggttttagtgccattgtggaatcatgcaagggcctcaggcggctttctgtttcaggccttctcacggacagtgtatttaaatccatcggggcacatgctgaccgtcttgagatgctctcgattgccttcgccgggaacagtgatttgggcctccattacatcctatcgggctgcaagagcttgaagaagctagagattagggactgcccatttggtgacaagcccttgctggcaaacgctgccaagctggagacaatgcgatccctttggatgtcgacgtgctcaatgaccttgggcgcatgccggcagcttgcgcgcaagatgccccgtcttagtgtggaggtcatgaatgatcctcgacgggga

SEQ ID NO: 287520 - DNA, 399 bp, Zea mays
cagcctcggagcaacagacccccgcccacgaccacacgcaggctgcaagcagcagccgcgcgctcgcctaggactaccgactacgagtagtgctcagccctccatcctcagcgcgcgagtggctgctgcgcattcctctctttatctgtctctgtgcttgtttaatttgtgttcgtgagtaggcggccggcacatatggcagcgcagtccatgctcatgtcgaccagcgtcaacggcggccgcgcgctgccgtctcttcaggccgtccgaccggctccatacccgcggctaccgctgccgtcgtcgtcatcctcgtcaggctacaggcactccaagtccgtctccgtgaagacgctcgccctgttcggcaaatccaaggtcaagaccgcgccggcgaag

SEQ ID NO: 287521 - DNA, 325 bp, Zea mays
cgtttctctcacccccgccactcgccagcaacgcggacacgccctccgccgctcttcctctgcaccccagtcctctcccacaaccacttccggcggccacgccctcggcttctccgtacttgctgctcgcccgtcccaccaccataattttccaccagcgattgtaaatttgtgggaggcacattcgccgaggatggctgtaaccctacttcgagggatgagaacgccgataccattcagatccaactccggcttcttctccactgtcctacggcctcggttgtcccgcttcacgactagggcggagagtgcgcaggccacagaa

SEQ ID NO: 287522 - DNA, 456 bp, Zea mays
ccacgcgtccgcctacgtctcctacctcgtcaccagcctccgccgggcggacccgaccagcgccgccattcagtgcgccgccgcttccgcgacttcgtcacgcttgccgaccgcctcgccgacgccttccggggccatttcgtgccgccgcgcccggacaagaacaccgtcgagagccaggtcatgcagcgggacgagttcgtggctcagcgccgtgctgcgctcgagcggtatctctggcgactcgccgagcacccggccatcggccccagcgacgagctgcgcgtctttctgcaggccgagggcaagatgccactgcccggcaccactgatatggcatcgcggatgctggatggtgcagcaaggctgccgcggcagctcattgctggggaagataccgtcaccgcaccacaggaagtcgtgcagcctgccaagggcggcagggacctgcttagg

SEQ ID NO: 287523 - DNA, 279 bp, Zea mays
cctccccgccgcggccagggccaccgcgacgctgcccctccgcctcctcccctccaaaacgctgactctctccactctcccctccctcgcgccgctccctctccgtcgccgctttggagccccggcgctggcgcctccgagccgccgccgaggaggcgcctgaggccgtggaggttgagttcgtggagcccgagacggaggctgaggagaaacccgcggtaccggagcccatcgaggctcagctggaagccgcgggggccgggaaggacgcggacatct

SEQ ID NO: 287524 - DNA, 471 bp, Zea mays
aaaaaaaacatgcgcgagcgtgacgggcaagaagactccagcagatcgagctgggcatggcgagcgcgctggagacgctgtgcgggcagtcgtacggggcgaacagtaccacatgctgggcatctacctgcagcggtcgtggatcatcctgtcggcgtgcgccgtggtgcagctccccgtgtacctgttcacggagccgctgctggtggcgctggggcaggacccggacatctcggcggtggcggggaccgtggcgctctggtacatccccgtgctcttctccttcgtctgggccttcccgctgcagatgtacctgcaggcgcagatcaagaacatgatcatcacgtacctcgccatgctcaacctcggcctccacctcgccctgtcctggctcgccgccgtccacctccgcctcggcctcgccggcgtcatgggctccatggtcgtcgccatgtggatccccgtgttcgg

SEQ ID NO: 287525 - DNA, 409 bp, Zea mays
cggcatggtggtgctggtcaagaaccccaacaacgcctaccacatgtactgcggtatcgtgcagcgcgtcagcgacggcaaggtcgcggtgctcttcgagggaggagtgtgggacaggctcatcaccttcaacctcgacgagctcgagggcagggagaagggaccccctatggccaaccccaagtccgtggtgctagaggatcttgtcgcggacctcgaggatgacgatgatgataaggaggacgaagcggccaagaagaaggaaccggagggcgcggcggcggcggcgacatgaccaggcttcttgttcctgttatacacatcctctgtatgtatgcatgtatacagctcaaataaaatatttggagctaattaaaaaggaacgataatataactcttattatgaagt

SEQ ID NO: 287526 - DNA, 256 bp, Zea mays
ctgccgcttcgcagctcctctctctgttcttcctcctcctcctccctgcttgtgatgccatctactgcgacgaagacgactgctacgacctcctaggggttaagcaggacgcgaacgcgtcagacatcaagaaagcgtactacaagctctctctcaaacaccacccggacaagaatcccgatccggagtcgcggaagctcttcgtcaagatcgccaatgcttacgagattctgaaggatgaatccactagggcgca

SEQ ID NO: 287527 - DNA, 285 bp, Zea mays
aaacggctaaaccgtaaatacagacaggagactgtcgcggcggcggcgctcctctgcgcatgtgctcggcgtctcggctatcagcttctccagttctccttccggcgcaccgtgattcaggcgttcagcgccacgctgccgtcgctcgctcccaggcctggcgtcgctcaccgagtctcagcgttcagcgccacgctgccgtcgctcgccgagtctcaggtgtcaggtaggctcgccgcttgcccgcttgtcctcgccttagttgctcgttgactggtgtggacc

SEQ ID NO: 287528 - DNA, 254 bp, Zea mays
ggagcttaaagcgcaaaaaagtctgaacactataagcccaagctcagatgaagcaagggcatatttccagcgtgaggcctttttgaggtactcaatacctgatagagcattttgctatactgctgttgatggggagaagtctatagttgctcccttgagaagaggaggtggaaagccaacggcgaaagccaggggtcaccccatgctcctacctgatcggccgccacatgtcactatcctctgtcttgtaaggg

SEQ ID NO: 287529 - DNA, 875 bp, Zea mays
caggtacaaggagaaggtcatactcaagaagatcaaggtcatgacggtgggggcgaaggagtgtggggactacgaggagtggttcaactaccgcgtgtcgagagcggcgccggagtcgtgcgccgacttcctcgggagcttcgtcgccgacaagaacaaggcggagttcgtcaagggcggcaagtggctcgtctggaagtttgagggcgacaggacgctggccaattacctgagcgagcgcggcttcccgtccaacctggagcgtctcatgttcgggcgcgtgctgcagggcctgggcccgctggagcgcgaggcgctggtggtgaagcaggtgatgcggcagctgatcacgtcgctgaagcgcatccacgccacgggcggcgtgcaccgcgacatcaagccgtccaacctcgtcgtgacccgccgcgcgcaggtgaagctcatcgacttcggagccgccaccgacctccgcatcggcaagaactacgtgcccgaccgcgcgctgctcgacccggactactgcccgcccgagctctacgtcctccccgaggagacgcccgagcccccgccggagcccatcgccgccatcctctccccgatcctctggcagctgaacagcccggacctgttcgacatgtactcggcggggatagtgctgatgcagatggccataccgacgctgcggacgcatgtcggggctcaagaacttcaacgccgagctcaggtccgccggctacgacctcaacaggtggcggcagagcgcgcggcggagacccgacctgcagatcctggacctcgactccggccgaggctgggacctcgcggccaagctcatctcggagaggggcgccaacggcggtggccgcctgtctgcc

SEQ ID NO: 287530 - DNA, 349 bp, Zea mays
aagctgttgccccaaaatcttgtgcttgttctttctgtctcaaggctgcttttatgtggatggatctccattatcaggatgcaagaagccggctttctgtattgaagaaaagcatcaagtttgccaggtcattggaggaaaaatgtagaggaaatgaatatgcggccaatgtagctggatatgaatcaaagcgagctgtgggagtggagtttgaactatctcaacaacagagatcactctttctttatacagaaaatgcccttgtccgtgagtcaacgcagcttcattctgcttttgtgaaactgaaagaattgagagagaactgcaagacagatcttgagacgctcag

SEQ ID NO: 287531 - DNA, 722 bp, Zea mays
gtggacgtgttcaaaaaattctacctggtgttggtgggctcgtcgttcagattggacctcatctccatgggagggttcattatactgaaattgttgactcttgggtgtctgaacccttgtctggattccatgagggccagtttgtgaagtgcaaggtcctgtctgtgagccgctcatcagaaggatcacttcgagttgatctatcactccgttcatcaaacctgatcagagactctaacaactcaagactagatgatctggaaacctgtacctcccggattgagaagatcaaggatctgctccctggaactgagattaagggctatgtgaagaacgtgaattccaaaggatgttttattatgctttctcgaatggttgatgctaggattactctatcaaatttatcagatgaatatgttgaaaatccacagaaggatttccccgttggaatgcttgtacacggaaggatcctgtctacagacccatcatcagggagagttgaggcatcacttaggaagaccactggttcaaaattggaaaagctggatgatattagttatagtgacttgcatgttggggatatcgttgatggccaagttaagcgggtggaatcctttggattattcgttacaattcggagaagtgaattggttggtctgtgccatgtatcagaactttctgatgaacctgtcgttgatattaactctggctataaagctggt

SEQ ID NO: 287532 - DNA, 341 bp, Zea mays
gccacaatggtttccctgtgcttgatgagccacccataacggaaaccccggaactggttgggcttgtgactaggtctcatttattagttttgctgaacagcaagaatttcatgaagggacgggttaaaactagtggtagcttcgttctgcgaagatttggtgcatttgactttgcgaaaccaggttcaggtaaaggtttgaaaattgaggacctggatttcactgatgaggagatggacatgtatgtggatctccacccgatcacaaatacatcaccttacacagtggttgagacgatgtcactggctaaagcagcaatccttctcgggaacttggtttga

SEQ ID NO: 287533 - DNA, 520 bp, Zea mays
gtgcacagtgccaatgcaaaaaattagcgctttggatggtatgcggtagagctgcaagttccgtatccagtccagtccagtgaggggaattgctttggatggtgcagggcagatggaggggctgacgtccagtgagatcgccggattcgtggtgggtgccctgctgctcggcgccaccatcgctgcccccaaggtcgacggcttcatcgcctcctcccagagaaggtcactagggatgtgtaagaggtgcggtgaccttcggattgtagcatgctcgcagtgcaagggaacaggatcagctcggagcggagggatgctcagtttgggcgtgctggatgacctctacgagtctcttggagccgaagccaagactgagaatctggctccctgcacaaagtgcaggtcgagaggccgtctcatgtgtccagaatgctccaaggtcgcatgaccctggcctggagccgtgtactcggtcagaacacatgtacggctctgacaaacacaaatcactgctgtcact

SEQ ID NO: 287534 - DNA, 308 bp, Zea mays
gtagatttcattgaacagttcaatgacgatcttctggtcaagcaggaaggggagaacctccaaattcttgatgtaaggaacttccaattgacagaagtgagcagaactgagtttatgactccatccgcctttatttttctacatgagctgcaactgttcttgacattccggaatcgagcagtatcagtttggaactttcgaggtgaactggtcacgtcatttgaagatcacctgttgtggcaccccgactgcaacacaaacaacatatacatcacaagcgatcaagatcttattatctcgtactgcaa

SEQ ID NO: 287535 - DNA, 343 bp, Zea mays
gggatgcgccgccgtgggtcaaggaggcgctcggctacaaccagcaggcgctcaccatgctcggcgtcggcaacgacatcggcgagaacgtcgccatgccttgttggatgtgcaacagacacagctcgaaaagttcaagcagaaataatttcccagaaatataagaatattgagttctatgatgtcaaccgttttggccaatagttgatctcactggtcattcttttcaacctgtacttagatttttatttgtgtaattgaatatcggatccgtaaggccgtaactaagtatttccttgttgttcacttggatcttaatttttttctactgtgtatagtactg

SEQ ID NO: 287536 - DNA, 286 bp, Zea mays
gaagcatggaaggaattcaattcggtcacttttggatagtactaggagtttatttcactactgtattggtcccatgatctatcgcacaggcatattgcttcccggtgtctgcaacagttagttggttgaaacaacctagaacagtacagcaaatgggcaaccgagagttcggtttgtgaatttcggtgcacagtcaatgccgacctccgccatttcttcaaaattccgactgtaacaagtgtaatatgtaatattggttaatcaggtttaatggatccagacgatg

SEQ ID NO: 287537 - DNA, 454 bp, Zea mays
ggcagattgggcccttgctggtgtcgatggtagcgacgacgacaacaactgcagtgctcgaggaacggcgttcaagatgacgcacggcgaggacgtctgggatgtcctcgcgcgcgacgcctttctgggcgacttcttcaacggcgcgctcgcgtcagagactcggttcctcatggacatagccatccgcggatccccccaggtgttcgagggaatagcatcgctagtggacgccggcggtggcaccggcgcacagcccaagcggtggctgcagcattcccggacacccggtgcacggtgctggagcttccgcaggtggtagacgctgctccgattgatgggccggttcgctttgtcggaggtgacatgacgaagttcatccctcctgctgatgccgttcttctaaaggttgtgtttctacgaagatccaaaattccttggaccaaaagcttca

SEQ ID NO: 287538 - DNA, 402 bp, Zea mays
gtttcgtcttccccgctcgctgcagctccactcagagcctccgttcccaactcgaatctccccagatcctccgcatcatctgaaaacccagatgcttctcctccagcccagtgcagtccctgcgcctgctctgcgggggaggcctcggccacgtcggcggctggtgccgcctcccctcgcctccgcgcccgcttccatcgtcgtcagctccgacgaggacgcattcaccaggtgctccgggtacctgttcgaggagggcgcggccaccgagtcggagctccccaccgcgtacgacctccccggcatcgcggccgtgtaccgccggcgcccgctcctcgtgctccgccgctccctgcagatcggcaactccttcggccggtggttcgcgctgcggtacctcga

SEQ ID NO: 287539 - DNA, 347 bp, Zea mays
ggcccttagtcagcatatagatcaactggaaagcaatataaagcagatgaagttggatttgggtattgaggactatgaggaacaagatgaggatagctcagattcagaaaatgaatatgacaacgcagtcacctctgttagctatgatgaggatcaagacgattttgacgaatcagctgatgaagatgaatatgatgattacgacgatgaagatgacgagattgacagctagtggtttggaattgtttcttgtgatgtgccgctctgaattagtgattctctggacgttgtacttctgtctctgggacatttcgtggtacgagaaaacaaagttgattcttgtgttc

SEQ ID NO: 287540 - DNA, 427 bp, Zea mays
agagggaactgaaggagctgctgattgcctgcgctagggcagtggaacgtaacaacagctacgccattgatctgatgatcccagagctgaggaagatggtttcggtgtccggcgagccgcttgagaggctgggagcctacatggtggaaggtcttgttgccaggctcgccgcctccggcagctcaatctacaaggctttgaagtgtaaggagcccaggagctctgatctcctctcctacatgcacttcctgtatgaggcctgcccctacttcaagttcggctacatgtcggccaacggcgcgatcgcggaggccctcaagggagaggacaggatccatatcatcgacttccacatcgcccggggctcatggctctctcctccaagcctgcagcagcctgcggcacgtcgtagcacgcagagatcacc

SEQ ID NO: 287541 - DNA, 279 bp, Zea mays
gcaatattgaaaacaatatggcaaaggaatatgcaattcttatagtccttattagcatggtacttgtggtctcctgcaatgttgtggacggtagtgcagcagacatgacgcatgcaacgcttccacgcaaaggtctaaaggaagacatcaagctcgccatcaatggagtgaattctccggttagcagtatatctggacaggcatctagcaactctgaaaccggcacagacaacgatatgtcaagcgctacagcctttacctcaaaggtgacaactaccc

SEQ ID NO: 287542 - DNA, 287 bp, Zea mays
gctccaacaagacacaccaaaacacctagctagcttaccgcacctgctgcttggggctgccaagtaagtagtaagctagagaagcaaagcaaagcaaagctccgatccaatccaatccatcgcaaggattatgtctctggtaaggctcctggacacgctggccctggactcgtgggtgcggaaccccttcaccatcttcggcacggcggtggccgccgacgcgtggctggccagcgacacgtcggcgttcgccaacacgcacatcgagagccgggacacggcggccg

SEQ ID NO: 287543 - DNA, 622 bp, Zea mays
gagctttcagaggcttcccagatccttaattgtctgtctgatttggtctactggacggtttgtgcatgtatgcagacgcagcacaaagtcgaaatggacaagagggatggaaagttcagcccacagcctatggcagtgcccccggtgcaacaaatgtcacgcatcgatcagcctatgccgcctcctgctggatatgcaccgcaaccagcatatgggcagccttatggtggctatccatctcctcctggccaaggttatccacctcctcctggccaaggttatccgccagctggatactcccagggcggtgcataccctccacccgctcaaggttacccacagggtggtggatatcctccacctggtcaaggttacccccagggtcagggtggtgcatatcctccgcctggttcttaccctccacaaggttcctaccccccagcagagggctcctatccagcacaaggttcctaccccccagcacagggctcatacccagcacaaggttcctattccccagcacagggctcctacctacgcacaaggttcatatcccccacccccagcacaaggttcatatcccccagcacagggctcgtacccagcacaaggttcctacccc

SEQ ID NO: 287544 - DNA, 502 bp, Zea mays
cactgataatctctgaagagctcactctttgtgattgccctggtctggtcttcccttccttttcaagctcaaggcatgagatggtggcatgtggtgtgttaccgattgataggatgacaaagcaccgggaagctattcaagtggtggcagatcgtgtcccaagggacatccttgagcagatttacaaaattgcattgccaaagccaaagccatatgaaccccagtcccggccgccaactgctgctgagctgttgcgggcctactgcgcgtctcgtgggcatgtcagccatgctgggctgcctgatgagaccagggctgctcgacagatactgaaggattacattgatggtaaaatcccacactttgagctccctcctggcgtgacaggccctgaggtggactttgaacaaatcgctggatcagaaagtccaactacttcagcagctaatgaatcagttactgatgatctcgatgaagatgatgatgatgcaagtgatctgct

SEQ ID NO: 287545 - DNA, 274 bp, Zea mays
gaagttgcagcgagggcacggcacttgataggagccgcgagccaagatcatggatgcctggcgatgatgtccggcgaagctgaccagcgcatataattccggtgcctctcatattgttgcaatcagttgagcaagcccggacgcccggttgctaactcagctccgacggccatccgcacgcttctgcatctgagtaatccatgacatgattgcttcctgaaactcgcacaggttgctgaaaatttctgtttgtgtacatatctactagctgttt

SEQ ID NO: 287546 - DNA, 310 bp, Zea mays
gggaaaacaagtgtggaagagggaaaactggaaaaggcacagcaaaccgagaaaatggcggctcggcgtgggcgagagtgggacggggacgagcagggcgcggcgctgccaacgccggcgcccctcggcgcgccggtcgtctgccttctcagctccgccggagacctagccgccggcgccttcgtaggctccctcgtcggatacggaaaaggtttgatcacaaaccaaggcacgaaggcttgtcttagcattgctggatcttctgcagagacatttggtgctcttgctggtgtccaaagtttcatcatgg

SEQ ID NO: 287547 - DNA, 473 bp, Zea mays
ggcgccagatgatggtaacaatattgttgtagcgtatgaatgctaactcaacactacggaccttccaggggcagcagcatagcagtttctgtaatcagtccatcagcgacagcactgagcaacccaacacatcaagtacgtcagatgagagacctccaaccattacccagaaggacgccaacagtgagtctgataaggagacaaccttgaaatttggaggcgagaaggcactcgaatctgcgcaaacgctgctcagcatcaaaactaactccgatgacatgaagaactctgtcctgaaggaaacttctgctgcagttccagtccaaaacaattgagcatgctgagatagggtgattctattgacatctcttaggctgtcatatttattggttgagtgatatgctattatgttaacttgtatgacgtgaggcttggtgttcggtattccgtgtggagcatttgaggaagcatta

SEQ ID NO: 287548 - DNA, 544 bp, Zea mays
atgatctgcgtgacagacagcatggcgcaataccagcacaaccaaatctcgcaaggcatgatcctagctctagcagccaacgtgatgaacctttctcatactggaacatggggaggttccgaagaaatactgcaacttcgtcggtcacacctttgggtgccgctcctgccaatttcggcacgaagaggaacgctgactcgaacgatttcctccctctgaagctcaggaaactaagcggggctatttagtggctgatttatgaaaaatatctggccgaccgttttttgatatgcataagaagcacaagtatgctgttacctgaaacagcatgcagtaatacttaaccacgttagggcttcagaaggctggagatggacgcatttggtggtggcaaccattgtaaattgtacgtttgctcccaaatcgttgcatctggcatcctctgacccactggcctgcatgtttgtatattgtttgtgtgatatacggggagatgtcttgtgccacgtttcctccgtggcgtgtacattcaaacaaattggca

SEQ ID NO: 287549 - DNA, 457 bp, Zea mays
cgccggcctcgtctggcggcgtcagcgtcagcgacgtgctctggccttctgccggagcattcctggccatggcggtactggggaaaatggaccaagtggtggcgttcaagggagtatccttgacgattgcgccccttggagcagtctgctgcgtgcttttcagcgctccagagtcgcctgcggccaagaaatacaatatgttcgtcgcgcagattgcttgcgcggcctttggcgtattagccctctcgttgtttgggcctggctggttagcgagaggcgccgctctttcagcctgcatagcattcatgatcatcacgggtacctcgcatcctccagctgcgagcttgcccctcttgtttatcgatggccccaagtttcacagtttgcagctttggtacgcgcttttccctggagctgcaggctgcatcgtcctttgcttgattcaagaggtggtggt

SEQ ID NO: 287550 - DNA, 518 bp, Zea mays
gatgctttccaaggacaggagcgtgacataattattatgtcatgtgtccgtgcatcaaaccatggtgtgggtttcgttgctgatatacggcgtatgaatgtagctctaactagagctaggagagctttatgggttgttggtaatgctaatgctctcatgcagtctgaggactgggcatcgctaatagcggatgcgaaggccaggaaatgttttatggacctggattgcattcccaaggacttcttaccaatgaaggttccatctaatactccaggtaggaattcttccaacaacatccggaacatgaggactggtggtggacctagaccaagacgcttggacatgttctcagaaccgagggctggtatgaacatgaggcccgatgaagatgagcgtctgaatactgttccaagaaatggtagctacaggaatttggatgattttgtccacactggagatcgctccagggataatatgcagtttggacatcctaggacgccaaatgcttctaatggtag

SEQ ID NO: 287551 - DNA, 287 bp, Zea mays
gccgccccttcctcaatcgcacccagcggctcccatggcgagctcgccgggatgccctgctccagccgacttccctccccgtcttctccctgcttctgctcggagctccagctcagctccctccgtgcgtccgcgacctttgccgtggggctccttcctgcgcgcgccggacgccgggttgtcttcaacctccagccgtggatttcctgccgtggagcttcgttttcccgtgcgcgcgtctcatctccatagcgctcggctctcctcctccctgtcctctgtgcgcg

SEQ ID NO: 287552 - DNA, 319 bp, Zea mays
tacacttcaggcatcttggtgtcaatgcagttttgctggagccagttttcccattccaccaagtgaagggaccatattttccataccattttttttcacctatgagcttgtatagcagtgaatgctccagtgtttcagctatcaagtctatgaaggatagggtcagaacaatgcacagaaatggaatagaggttctcttggaggttgttttcacgcatactgctgaaggaggggcggagtgtcagatgatatcacttcgaggcatcgatggttcctcgtactacattgctgatggaatcgctggatgcaaggcaagtgt

SEQ ID NO: 287553 - DNA, 423 bp, Zea mays
cacttcacgttctacaaccgactccaacagtaatgacatcactagttcagccacaagaatcacaagcttcatgacagcacttagtgagcatcgtcttaataccagtgggcaaacaatgtccagtctctttcgagtccggcatgctatcctgaagttccttaaacagagtgacagtgacttgaaagacgacttcatttgtctatccattcatcaaattcataagatgccttggaatttgttccatcaattacatgctggaggacttgccagctgtgccaaggatagcagaattagcaccagtaatgattccgcacagtctggaattctgactggcagtcttctccagctgttgggctctttacttgaccaaagttacctgagagacacagacggacaagatatgtttgtgaaacttgtggatgt

SEQ ID NO: 287554 - DNA, 322 bp, Zea mays
gtagcttggttttattcctgaaggggttaacttggatcctatcttgcctgtactggccaaggtttttgatcaggcactagaaggaggcggtgccaagaatattaacttccgagaattggcagcagatctagcacagataacttttgattatccattcaggatacctccgtattttgctttgattattagagccatcggagtattagaaggcatagctttggtgggagatcctgaatttgccattgtggatgaagcatacccatacatcgcacagaggctactaacggacgaatcgcctcggctaaggagcgccttgcgttac

SEQ ID NO: 287555 - DNA, 327 bp, Zea mays
tgttggtgacccaagctgtgcaaagtctcagttcctaaaatatactgctggtattgttccaagatctgtttacacgtcagggaagtcatcatctgctgctggtctgcacagcaactgttgctaaagaaccggagactggtgaattctgtattgtggctggcgccctgatgttagctgataatggcgtttgttgtatcgatgaatttgataaaatggacatcaaggatcaggtcgctatacatgaagcaatggaacagcaaacaattagcataaccaaagcaggaatacaggcaactttgaatgcacgaacatcaattttagctgcag

SEQ ID NO: 287556 - DNA, 466 bp, Zea mays
cccacgcgtccgcccacgcgtccgcccacgcgtccgcccacgcgtccgcgcgggcgcggaggcaacgctatggtggctcgccgcttcgtggtccggcatggccccgcagccggaggatcagccgaggcggcggaggagcaacagcacgaggtggagtacgacacggagcacggcctcgacgtcctccgcctccagatcttttccctcaccgccgtcccgcccgacctccagaagatcgtggtggaggcggatgggtcggtggtggacgacggcaccgacctggaagccgtctctgagcgcctgcgcctccttgctatcggcgaggagggggaggacgacggggcagcggccagggcgcaggagaagtccgacgaggaattcgcacggatgcttcaggcggaagaagaggcacttctcctacaacagtacaatatacaaaatgatggtggagatgtgtttagacaaa

SEQ ID NO: 287557 - DNA, 545 bp, Zea mays
cccacgcgtccggaagcctctttctttgcattggtagatggcacaaatgctttacctcttgaatcagcacaggatcacaaaagagttggtgatggtgatgttggcccaaataccggtggtatgggtgcatactcccctgctccaatagtgacagatgagctcaaacgcactgtaatggaaagtataattatccctactgttaaaggaatgtcaaccgaagttgcaagtttgttggtgtattatatgctgggcttatgatcgagaagaagtctgggctgcctaagcttattgagtacaatgtaagatttggtgacccagaatgccaggttctgatgatgcgattagaatctgatttggcacaagttctgttatctgcttgccagggagagttgggcaatgtttcactgacctggtctcccgaaatggctatggtggttgtgatggcaagccagggatacccgggcccttataaaaaggggaccgtgataaaaaacgtggacaaggctgagcaggtgtctccggctgtcaagatattccatgctggg

SEQ ID NO: 287558 - DNA, 338 bp, Zea mays
ttgatttgttctgtgataagtaccagatcaataaatggtattcggatggttcaaaggcagggcaggtatacttggtgattatgggccatccgaataccatttattgatttgttctgtgataagtaccagatcatgaaaggttaaaaaaaaaactagtagtagtaagactgaagaacagaagaggtaccagaggcgcccaaacagaaagttcttttcttttttcttaccataggtcatgttatactgtagcccattgctcacaattgtacattcttgtgtcagtctgaacttccagtaatcttatccgatagaaatcgatcgtgggatttggagcggtg

SEQ ID NO: 287559 - DNA, 402 bp, Zea mays
gtgttaatagaaagtgcatgctcagtggagagagttgaagaaactttggatacactgataccaatgcttcctgaaatgcaatatttccgctttaatccagtggatgaacgatgtggtatggaattagatgaaactgatcctgctatctggcttaagttggaagctgcaactgatgagtacattcagaagaactttctggctgtcaagaatctttgtgagcttctggtcccaaggtaccaagaggaagaaaagccgtctgatatttacaaatccctttcattttcaaggctgacatcgttaaatcaaggtttcagtgaaagtaatcctatcttaggatggaggcgtgtggttttacttgtagaggcttcatttagtcctgattttggatagagaataaatcat

SEQ ID NO: 287560 - DNA, 320 bp, Zea mays
ctcgttcgcgctgttcactggcggactctcgaatcctaagcttatcgcagtatcgaacgccattgctttcgcgaacccaaaggctccagtctacccacgcctggcgcaagggaaatcctggaacgagatgactgtgacgtggacaagtggctacgagagcgacgaggcgtacccgtttgtggagtggggaatgaaatggagccccccggtgcgcacgcagctggcaccgtcacttttgaccgtgaaagcgtctgtggagagcctgcccggtctgtcggctggagagatcctgggttcatacacacagccttcctcacaga

SEQ ID NO: 287561 - DNA, 211 bp, Zea mays
cccacgcgtccgaggaacatatactagtaccagtatatataaattataaaacaatttattcatacgaattgtttgatcaatttcttgcttcaaaaattatgttcattcaagatttatgggatatgttgtttcatttatccgtacttgtgttccaacatgaaattcttgcttcatactacattattacatatattccgtgtgtttttatact

SEQ ID NO: 287562 - DNA, 317 bp, Zea mays
ggctcttgccttggtagccgtacttgggttcctatggatctgcttgctgtccaggaagaagagcattggtggaaactatgtaaagatggacaaacagactgttcctgatggtgcaaagcttgtgacataccagtggaaccttccatattcatcaagcgagattattagaaggttggagctgcttgatgaagaggacgtggtcggttgtgggggctttggcacggtgtacaggatggtgatggatgatggcacgtcgtttgccgtcaagaggattgacctcagccgcgaaagtcgcgacaggaccttcgagaaggagc

SEQ ID NO: 287563 - DNA, 368 bp, Zea mays
cgcacacacacatcctgtccctctctctctctccactccacctagctttgttcatcttgttctcccaaaagtcttctttctagctaggtcttcggtctcggacatgagcgggagaaactttggggacagcatggagttgagcagcagtgggagatcgtctggctcgagaaggggcaagagaggaggcggcggcggcggcggcaccgacaggcccaagcagccgcagcgagggctgggcgtggcgcactgtgagaagattaggttacagagcgaaatggtggagtacttccatcctctcggccagcaccacagcttgatccacagaacgggcagcctcagcttgatgccatacggagagagagacgtac

SEQ ID NO: 287564 - DNA, 483 bp, Zea mays
ctctgcgacgactgggtgcgccgccgccgccgctgtcctacgtcaggtgtcgaagccttcgccggcgaagagcgctcaccagattatccatctactagattcacccctggtggaggaggagaagaaggtaagcgaagatgctacggcggaacatacgtcagcgtcgggagtacctgtactccaagagcctcgagggcccccagcgggcgctgttcgagaagaagcgccggatccgggcggcgctcgaggagggcaagcccatccccaccgagctccgcaacgaggagcacgacctgcggaggcagatcgacctcgaggaccaggagcgtcaagttcccaagagcatcgttgacaacgagtacgctactgccaccattcgggagcccaagatactattgaccacttctcgcaatcctagcgcgcccctaactcagtttgttaaggagctcaaggttgtcttcccaaactcacaaagaatgaacc

SEQ ID NO: 287565 - DNA, 326 bp, Zea mays
agtacaactctcatcctcactccccccactcgcccgcatcttccggtcttcctcatggcgtcgagcgacctcgccgagagcctcctccccggcggcgggggcggagctccgcctcacatgacgaatacgaggagcgcgcgtacgactccgaggacaagatctccatcgccgtgtcggattccgacggcgaagacgacggcacgccggcgtcgagcccgcccttctcgtggcggaagctctggcgcttcacgggcccgggttttctcatgtgcatcgcgttcctggacccgggcaatctggagggggacctacaggcgggcgccgcg

SEQ ID NO: 287566 - DNA, 304 bp, Zea mays
cgcgagcccgtccaccaggaccgtgctgtccgttggcacggacgagtacagggtgggcgagtcgaacgccgccttctccaggatggcgtcggacgcgggcctccgggcggtgttcatcaactcctccctggacctggcccgcgccaacggcttcgacggcctggacctgtcgtggatcttcccggccacgcaggcgggacatgcagaacctcggcgccctgctcgcggagtggcgggcgaggatcacggaggaatccggcgccaagtctttgcctcctcaacctcaaccccttctccacacaac

SEQ ID NO: 287567 - DNA, 246 bp, Zea mays
attgacacagaggaggactacccctatcgtgcagcagatgggacatgtaacaagaacaagctgaaaaagcgagttgtgactattgatggttacactgatgtaccttccaacaaagaagatttgttacttcaggctgttgcccagcaacctgttagtgtagggatatgtggtagcgctagagcatttcagttatactaccagagtatctgtgatggtccatgtccgacatctcttgatcatgctgtg

SEQ ID NO: 287568 - DNA, 388 bp, Zea mays
ccacgcgtccgcccgttcacccgtgcacgctctttcccttcctcgtgccgacgaccgggcgaccgccgcgccccggcccgcgcccccttgtctcaggccactcgccggcaacgagcagccaccaggtccgcagatggcaccgacttttatggagctagcactcgagcaggctaagtttgcgctggataacctcgaggtccctgttgggtgtgtgattgtggaggacgggaaagtgatttcctctgggagcaacaagacgaatgccactcggaatgctaccagacatgctgagatggaagctattgacgtcctgcttcgggagtggcagagcatgggtcttgatcagccacaggtcgcggagaaatttgcaggatgcgacctttatgtc

SEQ ID NO: 287569 - DNA, 420 bp, Zea mays
ccctaggtgatttttcttctctatgaaactggggataatgactgcgttgacaaactggagataacctcaacttcaagtatcaggaccctggtagactataagtacgaccgaagatcgagctccctacatccaattgaggaagagaagaggcgataagcacactaatggctgacgagtcatggagggtgccaaccccagtgcaagaactggccgcagcgtggtggagccaccgacccagttcgtgctgcaggagcaggatcgtcctggatctgggaccctgctcttcgccactgacatgccggagcccattcccgtcgttgacctcagcaggctggcggctgccgacgaggcttccaagctccggtcagcactggagacctgggggctcttcctggttactaagcatgggatagaagcatc

SEQ ID NO: 287570 - DNA, 487 bp, Zea mays
ctggcctcagcgcacctggatggcagggctggaggagttgaagaagaagctacaacccttgctgttcgatgacctggacagagttggcgccagtaccagggtgcccttaccagaagatacttgcgattcctacgcagtttctgatggtgggactgttaatttacttagtagatccttgggtgagtataaaatcaatgagcatggctttcataaacgaagtcctgggccagacgagttagattctgatgagaaggcttaccgttgtgcctctcatgagatgcatatatttggtcccatcggtaatggtgcaagcagtgtagtggagagagctatatttattccagttcatcgaatcttggccttgaagaagataaacatattcgagaaggagaagaggcaacaaattctgaatgagatgagaacattatgtgaagcatgttgttatcctggtttagttgaattccagggtgcattttacatgcctgat

SEQ ID NO: 287571 - DNA, 306 bp, Zea mays
ggagagtcccggagctggaagaagaagatacagagcgcatgctcctgtgaacatacaccactgaacccatagaaagcagcacacagtctgcataggtgcattgttgttccggcctctcctagaggaaaggaaggtcaggactcaggaggatgcctcgagccccgaccatgaccgctttccttgtcgccgtgcttgccgccctcgttctcacgtccgagggccgcgtttctcggaaggacctgggcatcgacctcggcggtggcagcggggcaggcatcgggatcggtgctgggattagcattggca

SEQ ID NO: 287572 - DNA, 413 bp, Zea mays
  unsure (1)..(413): unsure at all n locations
gcaacatccgcagcttcaacctgtcggggatgggatgcagcgccgggctcatctccatcgacctcgcgcgggacatgctccaggttcacccgaactcgaacgcgctggtggtttcgaccgagatcatcacccccaacttctaccaggggagccggcgcgacatgcttcttcccaactgcctgttccggatgggcgcggctgcgatcctgctgtcgaaccggcggcgcgaggcccggcgcgccaagtaccggctggtgcacgtggtgaggacgcacaagggctcggacgaccgcgcgtaccggagcgtgtacgaggaggaggacgagcagggcatcgcgggcaacccgcagnccaaggagcatantgccaacgccggcgacgcgcgcaagnccaacagcacgacgagcgggccg

SEQ ID NO: 287573 - DNA, 287 bp, Zea mays
cccacgcgtccgaggaggttcctcgctcagtacctggattaactgtggaggttcacaaattggatccgctagttcagcgtgctttagctgctgctttacgatccaaagatcttcgaggtttgtatgacaggattccccctcatctcgagtcaaagcttatgccatttcagcgtgaaggcatcaggtttgttttacagcatggtggcagagccctgattgcagatgaaatgggtcttggaaagacactacaggcaattgctgttgcttcgtgccttcgtgatgcctgg

SEQ ID NO: 287574 - DNA, 191 bp, Zea mays
ctgacctggcgcaagtacacaacacagtacttcagatacaggacgcgggctcgacgacacaccgatcaggcgcgccgaagcagcgtccgcagccgacggtcatctcccggcgccggtcgcggccatgtcgaagaagaaggcggtcacgacgatgacgctcaaagacttccacggcggctccatcccctccg

SEQ ID NO: 287575 - DNA, 533 bp, Zea mays
  unsure (1)..(533): unsure at all n locations
atcggacccttctgaagagtttcttatgagctgcgctccgaacattgctgcaattgtgcaggctaactctaaagttgatgacgaagtgtctaaataccttcacattactccagtgggttctgatgactttgatttcgataatcttgagccagaggagaaagaatttgaaaatcagaatatctcagagaagggcctatcagatgcttaccaaaatgtcttaaataggcttgcccagctacagaaacttgggaaggttggtaaaggtactgacaggaggaagcgattgacaggaggactggagctggagccatgcatggacacagtgaataatggttggagaaaggacatgctgcttgaggatgtggtggatattgacgttggctatgatgcacctccaccatcgtttactgctggtttggagttgcagaagcagaggagagcacgtattgaagctgctaagcagcgaattgatgcaactaggaaggctcctgctgctccagctncaaaagcaaataactcagaagacgttgtaa

SEQ ID NO: 287576 - DNA, 369 bp, Zea mays
aacccttattatccgaatttgcaccctggtaatgcttttccaacctcaattggaactggagggtacgctgtaagtggttccattttgccaccttttgtggctggctttgctccccaaggtcctcttgctacacctctcgacagtcctatgactccaagctttagtggtaggccatctggattttctccagcagggaatcttacagggggaacagagtttatgcagtcatataaagtatacggacaacctggggctggtatgcagccatccattcccgattcgaactttattcatttctttcagcatccctctttaattcagtatactggtggaaatccatacaataccatgggtccaagatttactgtt

SEQ ID NO: 287577 - DNA, 512 bp, Zea mays
cacgtcgtgtcctgcgccgccgtctgccgcgcgtggagggagatgtgccgggagatcgtgctcagcccggaggtctgcgggaagcttaccttcccggtctctctcaagcagcctgggcctcgagacgggatgattcagtgtttcataaagcgcgataaatccaagtccacgtatcgtctctacttgtggctgagtactgctgtgctcatggagaacggcaagttcctcttatcagctaaaaggagccgcagaacaacctgcacgcagtatatcatctcgatggacgccgacaacatatcgagatctagcagcacgtacatcggaaagctgaggtaacagaatcgaaaacgcaatgcaatgcaacaagcgaacgtacgggaacttcatttgactacgtacgttggctattaattgagacgattccggccattcccaggtcaaacttcctgggcacgaagttcgtggtctcagacacgcagccgcccccatacagatacagcggggctgcaccc

SEQ ID NO: 287578 - DNA, 343 bp, Zea mays
ctctgctttctccagtttcacttgagagctagctgagactgagagcaaaatggttcttggagcgttggcgagtgcagtcgcctcgatgagcctcctcatcgtctacggtgtcctgggcgctctgctcctgtggaaggccgcccggctgctggatcggctgtggtgggagccgcggcggctggagcgggcgctgcgcggcagggcccgcggggcacgtcgtaccgcttcctcacgggcgacctcagggagtaccgccggtcaaaagaggaggcctggggcaggcccctgccgctgcggtgccacgacatcgccggccacgtcgagccgttcatccacggcgccg

SEQ ID NO: 287579 - DNA, 369 bp, Zea mays
cccacgcgtccgccgcacgcgtccggagagagatccggagcagccgcagtcccaccgacctcgccgccggtcgccctccatctcctcgccgctgcctctcgatacgagcatagactacaggctcaaagttccaattccaacccacccgacgtccgacgacagctggtccgggtctcctccatttcccggggacccgtccgatccgatcccagtcctcaacgccaacggtgggagatctagatcggagctagccagccagccggccgacgctgtccgccggccgccccggcgattctgacccgagatggcggtcgtccctgctgcagagaccctcgacgggctcaaggacaggtcgatctcggggtcttc

SEQ ID NO: 287580 - DNA, 382 bp, Zea mays
tgcaccttcaaagggtgctctagagagtgttaggatccaaacagccatcaatgacgggatactcaatcttgttgacaagttctttgagatgcagagagatgacgcaataagggcactgggcatgtatagaagagcaatcgagcaggcagaacaactttcagaattttatgaagtgtgtaaaagtatacatattgggcggggtgagagattcctaaaaatcgaacagccgcctgcatccttcttggcggctatggaggaatatgtgagcaatgctccccttgcttcgacagttcaaagaaatcaggctgtactggccatagaggacagcaaaaaatcagaagttgaagaatcacaaccaacgctgcctcctccccactctcca

SEQ ID NO: 287581 - DNA, 342 bp, Zea mays
ccctcgccgcgagatcgccggtcgctcccatgtcgactccagccgccgctgcgaacaatacttttgctaccaatgcaaccgcaccgtcctcatcgcggcctccgccgtcgccgccggggagctctcgtgccccgagtgccacggcaacttcctcgaggaggtcaccatccctgccccaaccttcatccagctccctttcccttttgcttccaccacgatccctaccgccagtaccgccccgcgccccgccccagcagccggcaccggcaggcccccttccttctcgtcctcctccgctgcgacctctcggtccgagccccgctacatctcctccatcctcaa

SEQ ID NO: 287582 - DNA, 403 bp, Zea mays
gcctggaagaccttcaaatcatccagaccatgtcaaagatatatctcaaagtgttactgtagcagatggtaacactttgagatatatctttgacatggcctggaagaccttcaaagatatatctcaaagtgttaccatctgctacagtaacagaagttcttaatctgttgcctgatagacagcaaaattgtgccctggttgtggaccctgaagatatttcttgaaggaataattacattaggggatatacggcgcatgggatatgggttacatgtggaaagtttcatcactggagatcaccccaaggctgacgataactcttcttccatttcatcgtgtcttactcgaggattccagtatcgtgggagcgaacgtggattgttaacatgctttccagatactg

SEQ ID NO: 287583 - DNA, 319 bp, Zea mays
tgcatgactaccatcgtcggtgatggcaccgcagacggcaacgcgggtcgcctccggccggctcgtgttcggcgcgccaacaacaacagatggcaagctgcaggtaaaaggtggaagcaggctgcgtgtgaggagccttgacaataatggcacgcgtgttgcggtggaagccgtcaacggcgctgccaggccgaacggcgcacgagcggtggccgacgtccgccggcaagtgcccgcgccgccgccaccggaaggcgacggcgacggcgtcgcattccggctggcgtaagtttgcggaagggaggctcgtgtacaggca

SEQ ID NO: 287584 - DNA, 374 bp, Zea mays
ggtgtctcgatccgacttggtacttggcggctccactgctcacgtcacgtgccgcccgcgttctctctccgactcccatgcctctccggtgagctagtctggtatccatcggcgagctagttttgtctccaccggcgagcacgcgtctgtaacctcctccacccccatcgaactcctcctgctctccaatccgctagatctcggctccgtgcagctatgctgattgtgaggaatttggtagcacctctatcagggtttttaaactagagtgctgccgccccagcatacataatatggacgaagaaaatgttgttgagctgctgcaacgttatcgccgtgaccgtcaagtattactcaactacattctttctggc

SEQ ID NO: 287585 - DNA, 234 bp, Zea mays
cccacgcgtccggactagttctagatcgcgggcggccgcccgcgatctagaactagccaccggcgagcacgcgtctgtgacctcctccacccccatcgtgctcctcctgctctccaatccgctagatctcggctccgcgcagctatgctgattgtgaggaatttggtagcacctctatcaggggttttaaactagagtgctgccgccccagcatacataatatggacgaagaaa

SEQ ID NO: 287586 - DNA, 438 bp, Zea mays
  unsure (1)..(438): unsure at all n locations
aacaataccagaggatggttacacactaatagcgctttttggcataaaggatccagtccgtcccggtgtgaggtatgcagtgatgacctgcatggctgctggaattaaagttacaatggtgactggagacaacatcaatactgctaaagccattgccaaggaatgtgggatattaaccgaggatggaatcgcaatagaaggaagagagcttcacgataagagcacggatgaactgaaggagatcctgcctaaaattcaggtaatggcccggtccttgccgatggacaaatataaactggtgactagcctanaaagtatgtatcaagaggtggtggcagttactggtgatggaaccaatgatgccccagcattgagtgagtcagacataggtctggccatgggaattgccggcactgaggtcgcaaaagaaaatgccga

SEQ ID NO: 287587 - DNA, 169 bp, Zea mays
cggacggtggtcacaacacaacatcacagtaggacccaactatctacattataccacgtgatacacggagatagatcgatcccatttgatatggtgtccaggagaaccatgccgtcctcctccctcgccttcctcgtggcactgctgctgctctcttgcagcaccacca

SEQ ID NO: 287588 - DNA, 304 bp, Zea mays
cggacgcgtggcactgcctctcctcctctgtaggtctgcttttttttttttgtttcttggattcaacctggtcgttaggttttcatttgtaactccacaccgtgttagagtctggaggtgaatcgcatcactgccgcacacaggtgtccgccatgggttcctgtacctccaagtccgcgcttgatcacaggaggccggcgaggtactacaccagggggcggcgagtccacagccgccggtccatcatgccggaggcgccccagtcgcagcagctgggcgatgccagcagaggccgcatgaccgg

SEQ ID NO: 287589 - DNA, 908 bp, Zea mays
ccacttccgggacccgcgcgacgctggccgcgtcgacccggtcatggacgagggcaagtacatgcgcgccatccaccgcatcctcgagctcgagggcggcgagtcgctcgacgtcgatgcgcacgacgtgtttgaccacgacccagacctctacagcaagatggttcgctatccgctcgaggtgctcgccatcttcgacatcgtgctcatggacctcgtcgcgcgcatcgagccgctcttcgagaagcacatccagaccaggatctacaacctcaagtcgtccatttgcttgaggaatctcaacccatctgatattgagaagatggtatccatcaagggtatgataattagatgcagctcggtcataccggagctcaaggaggctgtgttccgctgcctggtttgcggtttctactcagagcccgtcatggttgatagaggaagagtaactgaaccgcacatttgtcagaaagaacaatgtaaagccacaaattctatgaccctagtgcacaaccgatgcagattttcagacaagcagatcataaagttgcaggaaacaccagacgagataccagaaggtggcactccacatacagttagtgtcttgatgcatgataagcttgttgatgctggaaagcctggagatagggttgagataactggaatatacagagctatgagtattcgaattggaccaactcaaaggacagtgaagtctatattcaagacatatattgattgccttcacataaagaagacagacaagtctaggcttcatgtggaggacaccatggatattgataattctaacgctagcaaatctactgaagaggattttcttagtgataaggttgagaaactaaaagagctttcaaagttgcctgatatctatgacagattgactagat

SEQ ID NO: 287590 - DNA, 289 bp, Zea mays
cccacgcgtccgcccacgcgtccgccacaagcttcctcctccattttttttatctgctttttccccctcggcggttcctactcaggctgggcagcagagctagctagcagtggtccctggtgcttcaggcgaccggccatggtggagctggagcctagtgtgaagtcggagcatggtggaggagtcggcctggtcctgcctcctggcttcaggttccatcccacagacgaagaggtcatcaccagctacctcctgcacaagttcctgaaccctagcttcgcgccgcacg

SEQ ID NO: 287591 - DNA, 316 bp, Zea mays
ttatcatcctcaacgccatggccgtgctgatgctcccgctctacctcttcgccacccctatcctgcgcttcttccaccaggacgccgagattgccgcgctcgccggccgcctagcgctctacatgatcccgcagctcttcgcctacgccttcaacttccccatccagaagttcctgcaggcgcagagcaaggtgatggccatggcggtcgtgtcggtggcggcgctgctgctccacgtcgccatcagctggctcctcatggggcccatggggatggggatcgtcggcctggccgtcgcgctcaacgcgtcttggtg

SEQ ID NO: 287592 - DNA, 294 bp, Zea mays
cgcagaccctctgttattagttgtatacacgtactcgacgtcctgtgttggcgcacgtgcaatggagtgcgagaccggcctggtcgaccgccccctcaacagctcagcgccgcgcaccggcgaccccttgaagtggggcaaggcggcggagggtcttactgggagccacctggacgaggtgaagaggatggtggaggagtaccgcgtgccgctggtgaagatcgacggcgccgtgctcagcgtcgctaaggtggcagccgtcgccggccgggtacaggtggcgctggacgaatc

SEQ ID NO: 287593 - DNA, 421 bp, Zea mays
caaactaggagaggtcgctgtggagaatgggcgaattgcttcacattctattgtcgagcttttggatatgatgctcgtttgattctggatttcactgatcacgtgtggacagaatgtttttcaaacttgtatggaagatggatgcacctagatccatgcgaaggagtccatgataatcccctactgtacgagaaagggtggaacaagaagttaaattatgttattgcgatttctaaagatggagtacgggacgtaacaaaacgctacaccagaaagtggcatgaggttctctctaggcgaataattacctccgaagaaactgttgtgtctgttctatcatctataacagggaagtatcgcacaggtttgtcacctgatgctctatcagtcatagaaaaccgtgaaaaggagagtctgagga

SEQ ID NO: 287594 - DNA, 303 bp, Zea mays
cgctctcctctctcctccgagccgcagctcttctctctccctctcccctgcgcgccgccactgcgggcaccctgcacgccgccgctgcgtggccctacacgccaccgctacgggtgccctacgcgccgccgtcactgctccagctctcctctgtttcccagccaatgccgccgctctaactccccaaggcatcgccccgacgacggctcaacgaagccccgtcgacgcctcgcggacgccctgcgccgcagcgggcgctttacgctccatggcaaggcgcgttagatgcctcaggttccacag

SEQ ID NO: 287595 - DNA, 306 bp, Zea mays
cccacgcgtccgtcttcctccactcgccgacacacacggcgcaaatccccacaaccccaagcgggcgggcggacttccccccaccttctcgcgcggcgacgtgctcggctcgcttccagccacctcgctcgccgcccgcctcggaatccccgccgcgagatcttgttccccggaggatggacgtgaaaacagtaaccgttagcaatctttcattacatgctttggaaagagagatcacagagttcttcagtttctcgggagatatagaatatgttgaaatgcaaagtgaatctgaatggtcacagc

SEQ ID NO: 287596 - DNA, 339 bp, Zea mays
catatttgagcacacaagaatccctccagttggtgaagttcttaccccgttctataagactactgttaagaaacttcagcattatgatcttcctttagtcagccatgtgaaccacaatttctctgtgcatgccatacacatgggagaagatgtcttatctgtttttgagcatgctataaaagttctatcctgtaaagatgatctcgtggattccagagaaaatgaagagatttttttgcaagtggatagtgctcaaatggaacatatattttcaactcttgttgatcaccttcagatacaagaggcttacaatatctttgttctgaaccccaagcctat

SEQ ID NO: 287597 - DNA, 357 bp, Zea mays
cgcacacaccttttccgtttgcagtggtgcaggtcttttcggtcctcaggcttcatccctgtgcaagtgcagggataattgcttctgatctcccgaggctgcataacctgattcagaggcagagcaagggggcgtgagggagatgagggagatcatcagcatccatatcgggcaggcaggcatccaggtagggaattcttgctgggagctctactgcctcgagcacggtatccagcctgacggcctcatgcccagtgacacctctgtcgggatcgcgagggatgcgttcaacacgttcttcagtgaaacgcgcgcagggaagcacgttccaagggccctgtttgtcgacttggagcc

SEQ ID NO: 287598 - DNA, 358 bp, Zea mays
actagcagcaaatggcgatctttgggcctatgagaagaagatcctggcaccacagttctttgtagaaaaggtttagggtatgatagggctaattgtggatgcaaccgttccactgttacaatcatgggagaatatgctcgatggcacaggaggtagtaaggagatctatgttgatggatacctgaggaacctttcagcggatgtgattgctagagcatgtttcgggagcgatttcgtagaaggaaaagacatattttgcaagctcaggcagctccaaaagctgatttctgaacaggatacacttgttgggctgtctgcagtgtggaaatacttgcctaccaagagaaaccgggagata

SEQ ID NO: 287599 - DNA, 324 bp, Zea mays
cccacgcgtccggtggtcttggttccgtggagggagatggcgaaggcgatgtcaaggtttatgggtgggttgcccgagctgaggactacgatgcaacgactgtggtaggaagattcttgagaaagcacactgtcctgcaaacaatagacgaggtttccaagactgaattagagaaatcaggggagatggtggcgatactggcatcccagatcgaggaaaagaaccgatacttgcaggatttggagacaaagaagaatgcgacagaactctccatctcaaggcttgaggaggacaacaggaaacttcatgaggcatacaatgaag

SEQ ID NO: 287600 - DNA, 339 bp, Zea mays
ggaccgggtctactgacaactccagtgctccgatggttcgttcatgtcatcgcctgcacccacagcctacgctctcatgcagaccggcgacacgaaatgcctcgagttcctcgatggaatcgtcagcaagtttagcgggggagtgccctttacctaccctgtggatctgttcgagcacttatgggtagtggacaggatagagcggctgggcatagggaggcacttcacaggtgaaatcaaggagtgcctagaatacgtacacaggtactggggtgaccaaaggcttgccggcacgaaggaccgtccggtctcaaaatgtcgatgacacggccaatgggg

SEQ ID NO: 287601 - DNA, 391 bp, Zea mays
cgtcccccctcaagaactgtacccatcacgcgccgccatcgattgaccttgaccgacccgaccacccatcacgcttcttgttgccgccgctgttgcttgccgatacgcggtggctgcgctcgccggcggggaagaggggtcgcgggctgcgcgcctccagtctttcttcgcctccgtgctctcgggcctcttcttcggccaggccgatcaggacgaggaccaagagatggcctcgcgcaaccacaacgccgccgctccgcagcttcaccatcacaaccgagccggtgttcccgctcttggaaagaccaaggccgtgcccgcccgacctgacgctctgaaccggcgaccccctctcggcgatatcggcaacctcgtcagcgtccgcccagcc

SEQ ID NO: 287602 - DNA, 317 bp, Zea mays
cccacgcgtccggtctcctcgagaactgtagcatcacgcgccgcctttgattgagcagggactgggagagaggagaagagagggtgaaagggggcaagaaaacgcttcttgttgcctttgtgcttcagcggatccgcggtggctgcgcacgccggcggggaagaggagtcgcgggcggcgcgcctccagtctttcttcgcctccgtgctctccgggctcttcggccaggccgaggccgaggacgaggacgaggacgaagagatgcccacgcgcaaccacaacgctgccgcggctgccagtctgcagcatcaccatca

SEQ ID NO: 287603 - DNA, 268 bp, Zea mays
cccacgcgtccgggccgtcaacgtcgagtccgtcatagccagcatcaaccacgccggcgccgtgatgcgcagcaacaagatcggcggcgggtgcatcctgtgcacgggcagtcccgtgggctcgctcggcgacgtggtgccctcggcgtacagcatctccaaggccgcggtcgtgggcgtcgtgcgcgccgccgcggccgagctggggggacacggcgtcagggtcaatgccatctcgccgtacgcgtcgccgccaggtttgataagg

SEQ ID NO: 287604 - DNA, 375 bp, Zea mays
ggctgctgaaaactatttggatgctggaggtacctatccaagattagatggaggtatttttcagtttgacatagacaaggaaagcagtgttagtgattcccatgtctcaagaacttacctttcagattatccatataaatcatttggcttgtctatttcatctgatcctctccagctcagtgagaagctgtcagcatatggtggagtgacaaatactattcctaacatacatcagaaagaacatcactcatgccatgcttcatacagctcacatagcttaacaggatccagaaatccttgctttgctacctctgaacatactttcggtagcccatctcttctagcaacttctcatctgggaatacagtcccatca

SEQ ID NO: 287605 - DNA, 222 bp, Zea mays
cacacacaccgggagccgcgcaccccacggcacactatctcgtggcgtcgtgggtgtggtcgtgtggctaaacctgttcgctgcgcgccactcgccgtgcgacacggctgcgcacgcctgtggcagacgcgcagctgtattgctactcgttgcggtggtcgtcgccgccgccgccctccccgacggggcgatagccgcggcggcggggcggtgcacgacgtc

SEQ ID NO: 287606 - DNA, 514 bp, Zea mays
caatggtaatgtgatgggtgctgtagagacttgcatggagacattccattaccattgaggttgatagtgaacaattctgacaagtccttctgaacaacaatatcaacctcaatggtaatgtgatgggtgctgtagagacttgcatggagacattccacagattcataagtatcttaaccattcccaccctctaatctctgctcattttgaccctgatgcatgcggctgggcatttggtatgaacgtgcttgatctggttgaatggaggaacaagaatgtgacaggcatatatcattattggcaggagcgcaatgctgatcatactctatggaagcttgggtctttaccacctggacttcttgctttctatggcttggttgaagcattggatcccaaatggcatgtcttgggacttggctacacaaatgtggatcttgctactatcaaggaaggtgcagtactgcactacaatggaaatatgaagccatggctcaaaatcgggatggagaagtac

SEQ ID NO: 287607 - DNA, 343 bp, Zea mays
gagctgtctgcagatagcaaaggcctttggagcttccgaggtcatcgcggtggacgttctcgacgagaagctccggaacgccacaacgctcggcgcgacgcacactgtgaacgcggcgaaagaggacgccgttgagaggataaaggagatcactggcggtaggggtgtcgacgtggctgtcgcggcgctcggtaaggcgctcacgttttcccagtgcgccaggagcgtgcgcgacggaggcaaggcggtgatgatcgggctcgcggcgacgaatgtagtgggggaggtcgacataacccgcctcgtacggcgacaggtgaagatcatcggctcgtacggcgcg

SEQ ID NO: 287608 - DNA, 391 bp, Zea mays
cgttaaccgggattttgccagcaatcagcttgataggcgacacgtcattgttgggatcttctacttcattggctttgcattgttctgcctggaggctttgctaagcgtgtgggtcattcagcgcgtctacctgtacttccgagggagcgggaaagaagcggagatgaggcgtgaagcagcacgcggtgcagcgagggcagcgttttgatgaaaaccgtatatagatgatatatataggcacgacttacatactgttcataatagtttgaagtgctttaggtcaagaggcatgtgtgtacagtagggttggcgtcttgtacatctttaaggccggtttggtgaaacatggaaatggaatgaatccataaaggagagatccgttgttattcaa

SEQ ID NO: 287609 - DNA, 307 bp, Zea mays
gtcaagatgtactccctctacctcgagggcgcccacgacgcctacgcggatgcgatgctggagttcgactcgtagtcctgctgatgacattgggtgtgtgaatgatgaggtgctggagttcgacatgcgccattgccaggactcaggaggtgtacagattcgatgtacgcttctgtgtctgaatccaaatgtgttttgtgatgtgagcagtgaataaacagactggttgtgacgagaatgtcgggatccggaatgtatctcgaaccggaattcgatcaatcttcatatccaaagttcaaatctgtag

SEQ ID NO: 287610 - DNA, 454 bp, Zea mays
cccacgcgtccgcccacgcgtccgccttatacagccagaactggcgcaaccccgccgcagccaacccgccctcttcgcttctgcccaccgtcgccgccggcagctccttcggagcgcaccaccgcatggccgccttctacgataagcccgacgccgcggggctcaaggaaacgtttgccaagtatatggcggacagcggtgggaggacatgaagcttctgttcgaccactgggtgcgctccctcgacgccgccacggggaagcccaaccaccccgacgtcgacctcttcaatcactacctccgcgccaacctcatgaccagggccctgccgcacgagatgctcgatctcgctgaccacatgctcgagttcgagctccaacccaacactgcatcgtacaacctcgtgctcaagagcatggtcgccagccaggagaccgagggcgccgagaagctc

SEQ ID NO: 287611 - DNA, 322 bp, Zea mays
cccacgcgtccgcccacgcgtccgcccacgcgtccggtggttttcacatgtgtggaaggccgtgaggaaccggtgcgcgccaccttggcggcgacggaactggtgatccggcctctgagctgtgatggagcaagatgttggtggtgagaacagtcattcgcagttcatcaacaatgatctgaggattgtgctcgctgatgaggatggtccatctcagtccattaataatggtagcagtccattaacatgtgtgaaaagtgaactgtgtacaatgtttaataaatatgatatgaagtttggtgcagttgggcaacaagtggct

SEQ ID NO: 287612 - DNA, 323 bp, Zea mays
atcaaatatgcccacaataagttctaagcagtcttgcataactaggagcaagagagactgggatgctgccagaaaagagcaccccgagaagttggcggccaagtattatctggacgcccctccagtgcatggcagtagagtccatgaggatgttccatttatgacaggtgataaatcacaacacggttctgctatccctgttgcaaaatcagaatggactaaagacccggatcatgctgttcgagaattgtttcatcaagaaactgggaaggcgacaagtttctttcgaaacatcgttcagccaaggacgccacttgtgtctt

SEQ ID NO: 287613 - DNA, 190 bp, Zea mays
ctcaacgataccaccaccgctagcgctagtgctctactgctctgctctttagggagagagagacgggagtgagagagcagagatggcagctgagagctagactgagcacgcacgtaacgtaacaagctcttctcccatctccgtatctggcaagagagagagagagcgcagaagatgatgtggtcgcacg

SEQ ID NO: 287614 - DNA, 476 bp, Zea mays
ctgttctacttcgccggcatggagaccacgtcggtgctgctcacgtggaccatggtcgtgctctccatgcacccggactggcagcaccgggccagggaggaggtgctccacgtcctgggtcacacgacgacggcgccggactacgatgccctgagccgcctcagaatcgtaatacaagcagtgctgcagtgcagacccatcggcacattctaataaccgctaaccgctccatttattgtggttgtaacgcaggtgacgatggttctgtacgaggtgcttcgtctgtacacgccgctgacggcgctccagcgccagacgtacaagccgatggagctcggcggcgtcaggtacccggccggcgtgatgctgatgctgcggctgctgtgcatccaccacgacagggacgtctggggccccgacgccagcgagttcaggccggagaggtttgccgagggggtctccaaggcgtccaggga

SEQ ID NO: 287615 - DNA, 423 bp, Zea mays
atcaaagaaggacagatgtccttctcatgttttacaagtcattgaagaagagcttaccaagcttcagcttttagaagccagctctagtgacgttcagtgtaactcgtaattatttggactggctgacagtattgccatggggaaattatagtgatgaaaactttgatgtccaccgtgctcagaaaattctcgatgaagaccattatggtttgagtgacgtgaaagagaggatactggaattcatagcagttgggaagttaagagggacttcacaaggcaagatcatatgtctttctgggccaccaggagttgggaaaactagtattggtcgttcaattgcacgtgcactgaaccgccagttctacaggttttctgttggaggtttggctgatgtggctgaaatcaagggccatcggcgcacgt

SEQ ID NO: 287616 - DNA, 519 bp, Zea mays
cccacgcgtccgcccacgcgtccgttcacgttgagcatcctctctttccttttttccccaaactccaaaatccaatccaagcaactcctccccatgctcctcccgctcctcctcgccgccttcctccatggcttggcggaggcgcagggcggcctcccgtcgctgccgatcggggtgaactacggcgcgaacgcagacaacctaccctcgcccgccgccgtggcggcgttcctgaccaagagcacgaccatcgaccgcgtgaagctgttcgacgcgaacccggccttcctcgacgcgttcgccgccaacgcgccctccatcgccctcgccgtctccatccccaactccgccctcccgtccttcgccgacagatccacgggcctggacgcggcgcgcgggtgggtccgcgacaacctgtccccgcacgtgtccgcgggcgccaacatcaccctcctcatggcggggaacgaggtgctgggccccaccgtggtgcccgacctcgtcgtggcgctgctcccg

SEQ ID NO: 287617 - DNA, 484 bp, Zea mays
ggacaagcatatggctactctcgttaaagataggtttggatctacagaacagttgaaggtcattgaagaagacatcacaaaatttcacatccgttcccattttcttcctttcatgaaggagaaatacggtgccaccaaaaaacttgcaaaggttgcatcaaacttaccattcaatgtcagcaccgaagttgtcaaactactactcccaatgggggatgttttctctgtcgtggtgcttatgcttcaggatgaaacagcagtacgccttgcagatgcttcaatacaaagtccagagtaccgatctatcaatgtgtttgtggatttttactcggaacctgaatacaagttcagagtagacagagagaattttttccctcggcctaaggttgatggtgctgttatcagcttcaaactaaagaatgcggaggagtatccgccagttagttccccaaaaagcttcttgttcaatgcgtgaattcccgct

SEQ ID NO: 287618 - DNA, 697 bp, Zea mays
ctgtgatcaacgattgattaaattaaaagagctttatgatggtgaacaacctctgagtgcagagttgggtgaagagcttggaaagactcagccactcagatggcaaagacagaatagaagatgggaacaggtcgatggtacaaaggtttagatctcaactgacccatcagatggatgccttgcataaaaccgtatcaagttctgttgcagttctatcatgcaacagaaggaccaccttaatgaaatgaaacatgaaagtggttagagccgaagtcttgttgaaagacagaatagaagatgggaacaggtcgatggtacaaaggtttagatctcaactgaccctccgcaaacggagaggaatttcgaattgtggcaggtgctgcctccacctggtaacggtgggctgaaatactatggttgtgagcagtaaattcgaccaaatcatctgctccacagaagccagcagcgcctcgaccgtgacagtgacataggtgatccacaggtacgtcatgtacacggcaagagagttggaagagtggtcagaaaatcatgattcctttcgccacgagcagaatttggttcagtggactgaggaaagacggccatgatgttgaagcccttttcatcgtggttgtgagtctattggatgctttaatgctcaaattatcatgtgtcacttcagcttttagctccaatt

SEQ ID NO: 287619 - DNA, 317 bp, Zea mays
gttgagttccgctccgccacaccaaaaagaaacaaaagcctacggcgatcgatcgagaagctggtcatcgtcaggatgtcatcgccgcagtcagcagcgccgcccgtgaagctgatcacggcgttcggcagcccgttcgcccaccgcgtggaggtggcgctcgctctcaagggggtgccgtacgagctggtcgtggaggacctagccaacaagagcgagctgctgctcacgcacaacccagtccaccagtcggtccctgtcctcctccacggtgaccgcgctgtctgcgagtccctcgtcatcgtcgagtacgtcga

SEQ ID NO: 287620 - DNA, 298 bp, Zea mays
ccttcctcgccgtttcgggcctcgcctcgtccccaaatccaacccttcgtactcagtttccatcattggcatggcgtccgataccgagggcatcgccgccctcttctcgatgtacaacgacgacgaggaagaggaggatgccgacgagcccagccctcctttcccagcgcttcccgccgccgtcagctcctcctcgccgctgtcccctcaagccggggccgaggaccccaacccttctgtggcgcctccgtcaccttcccgtcccgaggaattggccagtctcaaaaccctagcgagt

SEQ ID NO: 287621 - DNA, 336 bp, Zea mays
ccctttcgctctactgctctctctctctctctggaccttgccgttctctccctcgtcggcaatcagcccgcttcctgtgctctctatgctccccttccgttcgtagcctcggccttcgtctccctccatggacccgcgctaaatgcatcgcgagattccaaaccggtagcgtttcttcctgctccatccgccgcaagatgtaagcaagggcctcacttcacacccggagtgggagaccatccagaatacatcctcagatcttcttgtgtctgagaaaaaagcgacgcccttcaatggaggagagcttcgtgcccttgcggggcatcaagaacgacc

SEQ ID NO: 287622 - DNA, 383 bp, Zea mays
gcaggtcaggtaggtttgaactctctcctataataatcctagctagcacacttgcccagattatattgcctgctccgatcttgaatcactggccgtttaatttctactctacatccctgaatgagctagagatccatctgctgctgtacgtgctcgtcaggtacgctcgtaaaaaagaaaagaaaaatctcagatcgagatcgatctgttgacgacgcccccgtcgccgatgggcgacctctctgtccgccatagccgccgctggtgcggccgtttcgcggccgtcctttgcctgtgcgcggccttctgcaagccaggtgcgtgctcaccgtcaacacacgcaccattattccaccctcccaaggagcacagtacaacgcaca

SEQ ID NO: 287623 - DNA, 510 bp, Zea mays
atcagcaatccttacttccattgatagacgatcgagtcgtgtgcgcaacaaccgagctagctaggatggcaggatgctgggcagtgttgctgccatcggcgctgctcgtgtggatcgtttgctgcaactgggtgctgatcatgagtgtggacgccgggtcaccgtacggcgcaaacatgactgatctgatgcgccatgtgcagttcttcgacgaggacagagacggccttcttactattccggagagtactaaaggttttattgcgatcggattgacccctgccttcgcactttctttggccacagcgacccatgctgctttcggccctttgacaacccctcctggaaagttaccgagcataaatatctacgtgtcccacatccacggagcagttcatccaagtgactcgggagccattgataagaagggaaactttgtccccaaaaagtttgaaagaatattccagaagttttcacacagtgaggaggacgccttgtcatggttggaga

SEQ ID NO: 287624 - DNA, 341 bp, Zea mays
gtcccatcccctccctagcctccgctccgccgctccccccaactccaccaggctccagtgtctcctccgcttctcgccgctttcccctcctccgcctgggcgcggcgcccgcccgcccctcccgatcccgtggacgtcctcgcaggcggcgtgttgcacgagagcttagggaatgttttaccagtattgttcatggtaaactcagagtttctatcaactgcccgggaaagtgaacttgtttccactccatctttagtgtcaaaaccaatttcttctacaggggcaacggaactacttcgaagtgaattatgggtgggttctgctgctgcctcagtgctgaa

SEQ ID NO: 287625 - DNA, 461 bp, Zea mays
ttcgcctcgagcaagctttcagcagaggacttcacatttctcaaatcattactggctaataggcacatgtgttttgagctcaatacatattccaactgaccattttccaaagtgagctgcttcgtcattctggaggactagtttgtctccatggcctatggtttatacaagctttatggcgtgtagagtagatggatgatagctcttccctgtacaggcaatctatttgtcgccgattcttcttaactttcgatatacacttggatgttcatgctagagatgatagtccatctaatgagatgtcgatgctgtccgtattcgtaaaatcgtaactccagatttttggtagcctttagatatctagttaaggctgtacaaaacttcatcatgagcgctattcaagctatggtttctgtcccctactcttttgttgtaaagggtacgatatttctgcatacctg

SEQ ID NO: 287626 - DNA, 570 bp, Zea mays
cccacgcgtccggtttctgtgtctgtgtcaacaagatgttctagcatcaacaagatcctgattagcatgtccaacttccagacaaaaagagtagagcagcaaaatggagaaccatggaaaatttgatgggtgggatgaagttctggaagaagaagatgagttagcgagtgtatgcaaatatcctattagcacatcgtacctttcttatggaacaagcagaagtatgttatctcatttccagcatctctcctcttagagagaatgttgtgagcaaaggaggactttgttttgttaaactataccaggtggacaatctaatgcgtgtcctctgtttccatactgcagggggcaaaagtgtaaagaagcctagattctcattacgaggatatgattttgttccattagatgttaagactgataacttgtgcattggggagcaagatggttcttctgcagtgccatcaactaaagcttcacaaaccatggtggctgaacggttggaaaacgttgaggaacaaactgaagatttggcaccagagtttgcccttccacccaaagcaaatactttag

SEQ ID NO: 287627 - DNA, 486 bp, Zea mays
gtggagatgaagcctgctgaagaggcgaaggaagctcctactgaaactgatgacgctgagaaggctgcagacaaggcggacgatactcctgctccggcgccaatggaagaagatgagaaagaaactgagaaaccagctgaagctgttgtagctcctcctgcgcaatcggaggagaagacagaagatgccaagccagatgagcctgaagctgtggctccagctccagtaagcaacccaactgagaactcagcccgtgctcctgccgagcctgctgctgttcctgccccagcgcctgagaccgaaccagttgccgagcctgctgctgttctcgccccagcgcctgaaaccaaaccagatgccaagcctgctgctgttcctgccccagcgcctgaaaccaaaccagatgccgagcctgctgctgctgctgctccagtgccctgacaccacatcagttgctgagcctgctgctgctgctgctccagcgcc

SEQ ID NO: 287628 - DNA, 466 bp, Zea mays
atggcctcttgctgtccacaaattagcccaggagtttatggatccaaatccgataaaggttgttattggatcagaagaccttgctgctaaccatgacgtgatgcaaattgttgaagtattggatgatagaacaagggattcaagattacttgccttgcttgacaaataccatcaagcacaaagcaacagggttttggtttttgtgctgtacaagaaagaagctgcacgagtggaaacaatgcttcagagaaggggatggaaggctgtttcagtccatggcgacaaggctcagcatgatagaacaaaagctttatctttatttacagaagggaaatgcccattaatgattgctacagatgtcgcttatgatggacttgatattcctgatgttgaagtagtgattaactatagttatcctttgtccactgaggactacgtccacaggataggaaggactggtcgtgct

SEQ ID NO: 287629 - DNA, 446 bp, Zea mays
gttcaatccattcaagttgctagatcaccttttcatagagtgtaagcaccatggcaaggatctggtcgctgaaggagtgataacctcaaaagatatagaaggaacaaaggcaggcaaagccagcactggggtacttaatgttgggttaccagcatatgttatccttaaggctctcctccgatctgctaaagccaattctgatggtctcgttctaagtaatggatctgagataacatccgacaataggcctacgagtaaaatctttgagtggttttttgaccctctgatggtcatcaaagatcaaatcaaagctgaaaacttcacagaagaagaggaagcataccttgagaagcaagtgctcttgattagtgatccaaagcgcatcaaggagaatctcattcggcttccaccattgagtgagcgaaaacaagcagaaatagaagcat

SEQ ID NO: 287630 - DNA, 609 bp, Zea mays
ccgaattcagcacatggaccaaatcgatcaacgaaataaaggtatcaccaaccggtggcggctgtcaaaaaccctactccaccttccgccgctataaaccctacgaagagcggaagagggtaaaagggtggccagctagccgaagaaacacccagacgaagcggccgtttttggcatctcgtatgtgcaacttcgctggaaccctcctcgactgattttaccgcacagcagaaaaggagataaaacacgacaaaaattgaaggaaaacgcattcacatcttctcttcgtccgccgccgccgcctctcttcattggtagcaccttaatccgaccccagtccagcccgccgccatggaggcgctgacggccacggacaaatgcttctccccggccagggcgatgttcccgatgccgattgtgaggccacctgcatcaccagaccatgccagtcagtatctggaggacttgttgcaggagcaacagaagctcgggccattcgtgcaggtgctcccaatctgcggcaggctgttgaatcaagagataatgagaacatcaaacctgctttctaactttggagttagaggagatgagaggttgccaccaattgca

SEQ ID NO: 287631 - DNA, 364 bp, Zea mays
gggagctacaaaggacccgcgcgccggccacgcgctctggccggccggcacagcggcagtttaacgcggatgccaagagctatgttctggtcagcatgttagaccctgaggtgtacagcaagtacgtcgaggacaaggccgccgcccatctgtccggcttcgctttcgctgtcattggcattattcatcttgctggtggcaaaatgcccgaagaggacctctggcatcagttgaagcgggtgggtttgaacgagactgatgaagctcaccttgttcttggcaacaataagcaggcgctcgaacacctagtgcagcaaaggtacttgctgaaggagaaaattgctggaccggaaggtcatttcgt

SEQ ID NO: 287632 - DNA, 341 bp, Zea mays
  unsure (1)..(341): unsure at all n locations
cttaagaactctccanctgggaccaatgggaagttagaacctaagagttgggacagcagcactggtcataatttatattctccagttagaccgcaacacgataaatcaccacatggcttctctgggaatcctcctcagaagttgtcatcgcctatcagaattgaatctacacagcagcatagtaatcaaactgcttttggtgaacatagtggatctcttggtcatggcaactttggaggtgggctgcaagcgttccacccgcactcactgccagagtgtcacaatggtatttgcaatggctataactccatgacattaaatgcaaggaattctaacttcag

SEQ ID NO: 287633 - DNA, 327 bp, Zea mays
ggaggacagcgattcctctgattcagacatcgaccctgagctggagaagataattgctcagcgcgacgctccaggaatggagcaaggtggcccaggaaggaaaagaagtcgtccagccaccaccataggaacagcagcagcaagagaaaatcaaagcacacaaggagtaggagtgatgatagtgaggaggatgaaggcagaagaggccgggacaggaagaagatgtccggcagatcgaagaagcatgaaagatctgatgaggctagcagcgatgacactgattcagatagacagaggcacaggaagagcaggaaggacaggaagagc

SEQ ID NO: 287634 - DNA, 422 bp, Zea mays
cttgttgcttcctgcggtcgtcatcgccggctcgagttgtcgtgctggtgtttttggtcgcacacccgagcgaggctggtttggatgtggaagtaatggaggttgagatgaatggggatggtggggaggaggtagggctacttggggaggataagaaagaggttcaagggaatgaggataacgagttcgagctggaaatggggtcacaattgccgagggcaatcgggttcgtggaggcatggaaacttcctggcgtggcaccatatgcattctgcttatttttctccaaactcgtcgcctacaccttcctctactggttgccattctatatcaggaataatgccgtggcaggtcagttcttgtcacacaaggcttcaggaattttaacgattgtaatcggcattggaggcgtcttaggaggg

SEQ ID NO: 287635 - DNA, 433 bp, Zea mays
aggatgtgtctccacgctcacatccacaggcccaacaaggcaacaaccaccacctcctccggcggcctctcggcggcagccaagaccttagggagggatgggccgcaggaagagagagacggacgacagtcatggaagggtcaaaccattagtggagctggaaggaagcgaagatccggatcagattcagatgggggatctggagatcgtgtgtggcggtgacagtgatccgctgatgcaagaaacagaacatctcgacccgatgaggatcgtcggcgatgagttggatgaaggccaggttcgatctgcctaccttgtggcatgccactgggattggtccaggaattccatgccctactccgtgtacaagatggacgtcgccacttcctttccttcgcgggtgaagcggaaacgcctgcaccgagttacccgt

SEQ ID NO: 287636 - DNA, 391 bp, Zea mays
acacgggacttcatcttaagagaatttagaacaaaaaaagagagcatgtcagacctgcttcctgaagatgtacttgtcaacatcattggtcgtcttgcaccacggtaccttgccatatcccggtgcgtttgccggacatggtgcaccaccattgatgcccataatctgctgcgtatggatctactcccacactcagtgtctggactctttattaacttcaatgagttaagcatgtcggaattcttatcccgcccctcaaaaggaccagcaatatctggtaaatttgactatttgcctagcgcgggccaagtcatagaccactgcaacgggctcatcttgttacacgaatgtgtagttaacccggccacacgacagtgggcgctgctgcccc

SEQ ID NO: 287637 - DNA, 220 bp, Zea mays
ggaagatgcagctgcgattccgggacatggaatggtcgatgaggcggaggcaactaccgtcccggctgaggcaaagggtgcgcaaatacgagcgcgaacgctgggccgccgtcacgggagacgaggagatggagatgatcaaggatctgcctgagggctgatgcgggacatcaagcgctacctgtgccttgagctagttaagcaggttccacacaacata

SEQ ID NO: 287638 - DNA, 294 bp, Zea mays
gtcttcgtctcccgctcccccgggtccattcgcacccaacgcagctacagacggtctccatggcgaagaaaggggcgaagagaaagcagcagttgccgccggctcccacggcgaagaacgggagcaaggctgtgctcccactgaaggccgcgaagagagcgcccaagaagcagaaggttctggagtcctccgacgattctgatacggagcagcagcagcagcttcaggaggaggactccgacctcgacgtttcctctgattccgacgccgaggagctctctgggtcggacgctg

SEQ ID NO: 287639 - DNA, 318 bp, Zea mays
gcggcttctgaactgccaggctccaaaaggagcaaggcagtgatcattggtgcagttgttggcggagttgctgcagttttaattgtcctttctattgtggcatacttcctatttcagaaataccgccgagagaggactctcaggatacccaagactgctgggggcacactgatcgcctttagatacagtgatctgcagcatgtcactaataacttctcggagaggctgggtggaggtgcctttggctcggtgttcaaagggaagctcccagattcaacagccattgctgtgaagaggctcgatggagttcaccaaggg

SEQ ID NO: 287640 - DNA, 357 bp, Zea mays
ggtgtcgctcgccatatccccttttcccccctcccttcgtctcccgactcctgcgatccgccccacctgagccctactccacgtcgcctcgcctcgcctcgccggttgggttgtggctgagccgatctgacccgatcgggtgggtccttgcgccgccgctgcgtgggctcatctcggtcgcccgcctgctcggctcgatcggccggggacggcggcggctagatctgcgatggagggcaacaaggacgacgcggccaagtgcctgcgcatcggcaagggcgcgctcgaatccggggaccgcgcgcgcgccatcaaatttatgtccaaggcaaagcgcctcgacccctcgctacccat

SEQ ID NO: 287641 - DNA, 423 bp, Zea mays
cggatcagaactttgatgaggaaacccaagggactggagaatcaaaacatgaatacaacccgaagcgactgaaatctgctgatggcacaagggatcatcaggttgtgaatgcagaagctcatcaggtgggctgccttgatgtgagtgacaaaaatagcgagaacttcagtgcatcgtcaaaagtgcttgctgcatcacttgatgttgaagctgggtctccctccggcgactgcaaggatcatggaccaaaaggataatgcaatgtccaccgagtgttttctggagttgactaacacacccacctggcgcgccgcaactgaatcagagataggaagtcaatcagtgcaagtttgtaagataagctagcttgcccgttattctggtttggaagtcaaaatagttcgttcaacttagcctaggcag

SEQ ID NO: 287642 - DNA, 335 bp, Zea mays
gacaggctaacagccgccgcccgccagctttggagagccacggtgacatgccgccagcagccatcgacggccctccctccacctcgccgtcgtccctcttcccccatctcgccgagccatcgtccctccacagcaggaccacctcaccgagccgtcgtccctccacagcaggagtgcaggaccgcatcgccgagtcgtcgtctctccacaccaggttcgccgtcgcggcgcggctacctcgctccggctcccagctcgtccggtccagctcactcgcgggtcgcgaccatctccgtccacctcatccctccggcaagcagttgctatactcatcc

SEQ ID NO: 287643 - DNA, 516 bp, Zea mays
gctggacgagatcataaactacgtacagtcgctgcagtgccaggtggagttcctgtcgatgaagctgtcgaccgtcgacccgcgccgggagctcgacgtgggctgcttcgtcgtccccagagacgacgtaacgatgcaggccaacaggctgtgcgcgcccgcgacgtcgtcatcgagcacagccttctgctacgccgcgcggagtgttgttacgaacgccaaaggattcgagacgccggtgcccttggcgaaccatggcgtcgcggcggacgacaggccacttgagcggcgtactcgagacgcaggtccccaggcggggagcttgtgggaagaggacgatctgcagagcctggtcctgatgggattccggggccgttgatcgttgacgctctgattaggctagggacgacagttcgtttccaccgaccgccaaccaaagcgagagttgcagggccacgtaacagcagggttgggctccaatcattgggaactctccatgattgtgcacaaacagga

SEQ ID NO: 287644 - DNA, 308 bp, Zea mays
ctgattcgtctcctgttggctgttgccttcgaccgcctccacctcgtctccgacgatgtcctccgtcgccggtgagggggaaggagagggaggaggacggcgccgacgggaggagccaaggagccaacaacatgaggacggggtcgaggtggccgacggaaaactggatttgggtgacctttacggcgcggcggcggggtgggtagaggcgcggaccagctgcccgcacctcggcaccatgccgcccgctggtgctgaattgctgatgaccttgctcgcgtgcctccgcccgactctccgtgctccag

SEQ ID NO: 287645 - DNA, 309 bp, Zea mays
  unsure (1)..(309): unsure at all n locations
ccctcctctccttccccacctgcgtgctgccgctgctgacaccttctcctccccacaaatctcgcctctgccgccgactctggctgcgaatccaccgcagatcggcgcgggggctccgcttgatgcccgatctgtgagagcggctcgccaccatgagggccgtgctgctgctggcgctgctcctgtctgcttgcaccgcggcggncggcgcaaggagccaactccacggcgttcgtgccgcgggacgacatccgcctggactgcggcgccaaggggcagggtaacgacactgacggccgggtgtggacc

SEQ ID NO: 287646 - DNA, 266 bp, Zea mays
gcgagcgtgacccctctccgtctctcgtcatcgtcggcccgtcgcagccacctccatcggcctgcgatccctccacgagcctcaggtcgaatccgaggagcaggatccgcggccgcgggcggcggtcgcccggcgatggcgcaccgtatggacaacgagtacgactacctcttcaagatcgtgctcatcggtgactccggcgtcggcaaatccaacatcctctcccgattcacccgcaacgagttctgcctcgagtccaagtccac

SEQ ID NO: 287647 - DNA, 424 bp, Zea mays
gccttcgacccccacttcccggacaactgttcctgccaaaactggagcttctgtgtcaaggtcgtcaacaaccgacttctgagatcaacacttccatcagccaggtcagcggaccccttcaagcagggcagttggtcctgctagcaggacttcagctcctataggcagagcatcgcccctgctagtaggtcatcaacacctacttgcaaggtcatcaatacctgctaccaggtcaacaacaccatcatccagaccctccataccagcacaaagccagcctacatcaagggcgtcaaccccaacaaggcgaccttctgccccttcggcccagcatggtaacttggctgtaccagttagatcgtcctcaatctccaaaccaggttctacaatgcccaaaggttcttcaccagcgaaaactgcagcg

SEQ ID NO: 287648 - DNA, 293 bp, Zea mays
gaattatggcaggcatttccatacagaaaacaagcacttatggttactccctggcctaccactgaccttcctaaagatttgaggtccatcaagcggttccagaatttgcaatcattgataagaggaatcagaaatgttcgagcagaatattctgttgagccagctaaacggatatcagcttctgttgttgctactgcagatgtcctggaatatgtatcaagggagaagcaggtcctagcattactttcaaagcttgacgttcagaacgtacattttactgaatcagcaccagg

SEQ ID NO: 287649 - DNA, 329 bp, Zea mays
ggacgaccggtttcagtctcttcctggtgcttctgttcctctcgccgcccgtgtcagctggacaaccaaaaggtgtgtgtgtctcaccaggtggacggttccctgccttttcatctgaaggcaagcctcctggaagagcacccaaggggcgcagagatctagcactgtgtaggatattccgtcagaaaacatgttgcgatgtgatgcagacatttcctgctctggtctcagtgagaaaccttgcattggctggtgaaggcagtcaagaatgtattcatttgtgggaattgcttgagtgctcaatatgcgatccacgagtgggtatcagg

SEQ ID NO: 287650 - DNA, 386 bp, Zea mays
attgacatttcgacggctccagagcttgcaaaggaagctcgtagatgccataccccatgtttgtggattaaatccaagatcgttcaggcatttcaagtcaaatggcaaggcacatcgtcctggaccagataacatcattgactttgagcttctttctcactatgagatgatgtctttagaagagcagctcgagattgcgcacagagttggaactacccgctctcagattctttctaactttagtgacttttcactgggcactagtttcttgtaagtggtaacctgtggctaagtaacaccatgcttctgatgaaagtggtgcttgccattcattagccacgtcaagaattaggcccaattccatcaacatggtcacttccaccagt

SEQ ID NO: 287651 - DNA, 302 bp, Zea mays
tgcttctcctctcctcgcggcgcgcatccatggcggcctcgtccgcctccctcctcgcccgtcgcctcatcatgtcccgccgcttcctgtcatccccactcggctccctctctaccacaaccgcgacgcgcagtttctcgatctcttctcccgggtttaaaagcttcgttgtggagtccgaccttgagaacgagcaggaccagccccccgcggaccagaaccgccagcagacgtcgaacagcccgcgcccgcccgacaccacccgccctctcgagaacggcctcgatcccggcatctacaag

SEQ ID NO: 287652 - DNA, 329 bp, Zea mays
ccacgcgtcccttccatattttccctcatctcccgccgcctgcacccaacaagcctctcgacgctagtcatggccgcttccaacggcgccgccgcggtcgacgagaccgtcgccgccaccgactccgtgcaggagcctccccagaagatctccaagatctctcccctgctcaaggtgaagaagctctccgagaaggccgtgctgccgtcccgcggctccgctctcgccgccggctacgacctctcgagtgccgaggagatggtggtgccggcgcgtggcaaggcgctcgtgccgaccgacctcagcgtcgccatcccgcacggaaccta

SEQ ID NO: 287653 - DNA, 318 bp, Zea mays
cccacgcgtccgtctagatccaagctaacggaccactgctgtcattgctgcctgggaccgggagcaagagaacgacgacgaagagatcggctgaacaagagggtcgcgtagagccatgcttgcgagcgcgacgagggcagggacgtcgtccaccaagcccggcctcgcggagggcgccgtccgcagagccagagccagagccagagccggagacggcggcagcggcacccccatcgtcgtcaccgatgtcgggcaggaggtcaccgtctcgcagttcgtcgcgcacctagatgaggcggcccggcggaggctggacag

SEQ ID NO: 287654 - DNA, 320 bp, Zea mays
ctcaactgaacccacagcatcagtcccagctgatccaacaattgtctcagaaaagccaggaaattctccagcaacaagttcttcaacatcagtttggtggtgctgatgccatgggtcagctcaaacatttacagcaaacacctttgaaccataatacaggatccttgccaccccagcaacttgtaagatcacactcagcactcactgagagcgaagaaccttccagctcaacagttccatctggcagccgtatctccccaataaattcatttagtagagcaaaccaagggaccagaaatttgcctgagatgccagcaaca

SEQ ID NO: 287655 - DNA, 301 bp, Zea mays
ctatagccctgcagttagtagcatctcgtttcagagctcagaggagggaggtggaagaagaagcagcagcaaggcatggattgctgcatctgcagccccgtggcgtccgtgtacaggctgccaaggaacgccctctgcgctccctgccaccaaggcgccaaggccctcatcggtttcctcgacagggatggtgcgcgggaagaggacgacggcggtggccgttctgtccagctccagcctcgcggctcggccaaggggctgagagatgcgtgggagcaggtgaaggagatgagagccaggg

SEQ ID NO: 287656 - DNA, 319 bp, Zea mays
cacacattattcttcctccaccatctcttgagtcgcctggccggcggcttggtttccctctagagctcaacagcagctagctgtgtagcctagaggtttaaccatcagcggagcacatcgccatggcgatctcctctgctcttccgtgctccctcctcgtggcggccctgatgctcctcgcctccgtcgtccaagtgcaaggcatcacgaggcgctacgacttcaatgtaaccatggcgaacgtgacacggctgtgcgccagcaagagcatcatcacggtgaacgggcagttccccggacccaagatcgtggcgaggga

SEQ ID NO: 287657 - DNA, 508 bp, Zea mays
gacacacgacacaatcgtgaaggaaggaacaaagagcgtgttgatttgagaaaaggtgatttttctgtgttccagcatggagttgatctacttggagcaccaaggcttacatatcttgaagataattatgacagaatggtttggtttgtgctaaacaattgtccggaggttgagcaatatttgaagtataacaccctgatataattctaatttatgtgtgtgacttgctaattattagattcgatgttcgaattaactatgtttcataattgcaggatatacaaggaagagttagcggatcaaggaactccttatgttcaaaaaacccatgataagcaattttctttctggtttaagaagcatattgcaaaactacgttacgtggatggagaagacattagtgatgacctatttgcattgtcatgtgaaccggaccttcgggttcgaatattttcagcatgtcttgtcgatggggttcgatatcacactattgaccgtgaaagaaata

SEQ ID NO: 287658 - DNA, 460 bp, Zea mays
gagaccgtggggtgcgctatggatacaatgataaagtggaagacccaagagaatttgagggcttagttattgaacatctgaaacaatttatccatcatgaatcattttacagccaaggagataattcaacagaagaagtagaagatgcaaatgagccttccgtcagagttcaaggggcaacattgtccgatagttcttcagatagaagcactgctgctccatcaaatggatgcatctatgagatccaaacaatacaaagagagatggaggatggtgttgtccatatgctaggagaagtaatgtggtggcagaaccaaatgcagatttcttcaagaagataatagttgactacgcttacaatttcatgaggaagaacttcagacaaccagagaagataacatgtgtccctcataacagactgctccgggttggaatgacatatgagatctagggcgatgct

SEQ ID NO: 287659 - DNA, 319 bp, Zea mays
cccgctcctggtgatgctgatgagctgtctgtcattgaaggccaaattgcatggatggttcacataattgcggccattgtcaaagttaggcaggtaacaggtgttagtcaagacacacaagagttgattgacgcagaactctctgcccgtgtactacagttgataagtgtgactgatacaggagcgcacacacagagatatcaagaattaagtaagcaaaggcttgaccgagctattctcatttttgtacaaagtttcagaaggtcatatgtaggagaccaagctatgcattcttcaaagttgtatggaagattgtctg

SEQ ID NO: 287660 - DNA, 503 bp, Zea mays
cggacgcgtggccaagccgcagcagggatttctcagatgtctaaagccaggcttcctcacgtcgagacggattcttccggcgacgacgatgggccgaagccaaggctagtgttccgtagacgcacgcgcacaccagttaagctgctcggtggccggaaagtctcggacgtcctgctatggaggaacaggaacctgtcagcggggatcctcgcgggggcgacgctggtctggttcctgttcgacgtggcggagtacaacgtggtgacgctcctttgccacgtcgcgctgctcgggatggtcctgctcttcgtctggtccaacgccgcgcctctccttggcaggccgcctccacagatcccggaggtgatcgtttctgaacacgcgttcacagaagctgcgcggaccacccattacagactggctacgtctgtatccgtcctctacgacgtcgcgtgcgggaaggacctcaagaagttcctcatggtgattggttctctgtggat

SEQ ID NO: 287661 - DNA, 307 bp, Zea mays
gaggagatgagcctgggcgagaaggccgtggacctctacgtcggcgagaagggcctgctcttctggctcaacaagttcgcctacgcctccatcttcatcatggtcggcgcctgggtcctgttccgcttcgtcggcccctcgctcggcctctaccagctcgacgccccgccgctgccgcccaccgccgtgttcagcggcggctcgccgtgacggcgtcgagtcgttcccgagtgggcgtacactgtcactaggtcgaggcgtagagctagcgtaccgcggattaataatggtgacatgatatggaaag

SEQ ID NO: 287662 - DNA, 543 bp, Zea mays
gggtgcgtttatgatggatggtgagaacgtcgaccagatccttgcggggatggaggatcctcagctcatggatgagcctgaaccagaggaggtgaaagctcaggattctgtggctgcccctgatgcggatgatgccacgggaaagaaatcaaagaagaagaaaaagaagggagggtttacgatggatgtggatggtgaggagtttgaccagatccttgcagttatagatgaccttccgcctcctgaggaggagcctgagcccaaggaccccaaggatgagggtactgcagctactgctgcccttgtggatgatgctgaagggaagaaatcgaagaagaaaaagaagaaaagtggaaggacagcgaaggaagaagaggagttggacaagattcttgctgagcttgatggagtccctccagtggaggaggacaaacccactcaggcaccacaatctgctgctttggccaaggaggacgttggtgctgcagaggatggtaatgtggaggacaaagctgaggaaggaggagaggtggaatctgctgc

SEQ ID NO: 287663 - DNA, 828 bp, Zea mays
agaaagggatgacgagggacagttgcaagttgtggtggagaagggcgacgaccccatgacaacatggggtgaatttctatatcagttgccaatcataagaaacaaatcttattattgcactccagcaataaaagggccagatgctattattgttggctatatcagacagtttgtcatcaagcctttgtctggattcctttttggcactcttatggagtactaagccacactaaagaatttgggcttaagggtgaggttttgaaggtgactcttgcaacttacgtcgtgaactgagtgtgaatatctactgcatgggcaagcaagtttccaaccccttgccctcccatcgattctgctgcctgccctacttgatccggctagagtttattgggactcgcagctacctcggagttcactgctgtaaatatgggtaacgccctgccagtgcacgatatgtcggaatccacaggtaaaatcgaatctatgttgcttcaaaagttactcccttttgtctgttcttggctagaacaaggtctggtcaaaataagaatgttttttgttccattttagttggagtttgggttttcaaatctgggccagattagttggatttaataatttggtttctaaggtgcagcagccataggatctcccaacaaggaggatcttgcaacaatgacattgatcaagaattggatgttggaaattatggtttggcattgttacttctcttactcctgtttcatgtcccaatctgaggtgactcgtgttggtaatcatggcatctcagattgggagtgggaggaggatgaggagatgatttggtgc

SEQ ID NO: 287664 - DNA, 444 bp, Zea mays
ggttagggaagttgccctctctgtagttagtggcattaactcaagtgtttttgcatatggacaaacgagtagtggaaagacttataccatgaatggagtaacagaatatacagtagcagacatatatgattacattaataagcatgaagagagagcatttgttctgaaattctcagcaattgaaatatacgatgaagctgtaagggatcttctgagtgcagaaaacactcctcttagactctgggacgatgcagagaagggcacctatgtggagaaccttacagaggttgtgttaagggactggaaccacttcaaggggcttatttctgtatgtgaagctcaaagaaggacaggggagaccttcttgaatgaaaaaagctccagatctcatcagatactgagatgcaatgaaattctgcacgggagttctagggaaggacaagt

SEQ ID NO: 287665 - DNA, 353 bp, Zea mays
cccacgcgtccggaacgccagcaaacaaacagcgccgcaacccaccctatagcgcaggaggagaggagcccctcctcccgttcccataaatcccattcgcacggcgaggcgagacgaggcgagggcaactgggcctgggctgccggcagagcttggaccgctcgccatggccggcggcggggagagcgagggcgcgcaggccatggactccggcgagaagcgcctcaacgagctcggctacaagcaggagctccgcagggagatgacgctgttcaagacgctggccatctcctgctccacgatgacgctcttcactcggatcacgccgctgtacgggaacaagcctgcagtac

SEQ ID NO: 287666 - DNA, 446 bp, Zea mays
aaggaaatgaaacaatccacgcggaacgccgccgccgccattcccatggttttccatgctcggttgcgagccagcaattccatttcagtgtcctccctcgtctcgagaccttgccccatccagcccaacgctccgtccatcaactgaatagcttggcggtgtaaccctgtcgtgtgcgatgagctcctcgccgttgatcaccgccgcggcgtcggctgccgtggtggcgctggctgtcgccaaccgcgtgctctacaagctcgcgcttgtgcctctcaaggcgtaccctttcttcctcgcccagctcaccaccttcgggtacgttgccgtgtacttctcgatgctctacacgaggtaccgcactgggttggtgactagagacatgctggcgctccccaagcaccggttcgtcgctatcggtttgctggaggcacttggagtctttg

SEQ ID NO: 287667 - DNA, 294 bp, Zea mays
tgttctacaggaaaagtatgacgaagctatggcttcacttgcccaaatggagaacagagctgtaatggcagaaacaatgttagaagctacactgcagtaccaatctagccagcagaaagcactgtccccttgcccttctccaagaccatcgatgctcgacgcatcccctagtcagtcaagccagaattcatcgcaggagttccagccaagaaggaaaaacttgcttggcccattttccctgagttggcgtgataagaacaaggaaaaaccgaacaatgctgatgactccaccaa

SEQ ID NO: 287668 - DNA, 467 bp, Zea mays
gccaagtggcaccgacgcagtcagcagtatcaggaccgtagcttctttctgtgctgagaaaagagtgacgacgatttacgatgacaaatgtgaagcctcgaagaaactaggggtcagaacagggatggttggaggcctcggtttcggcttctcgttcttgatgctgtaccttacatatggactttgtttctatgttggagcgcagttcgttcgtcacaacaagtctacttttggggacgttttcaaggtgttttttgcactgatgctggcgacaattggggtgtctcagacaagcgcgttggcttctgattctacgaaggccaaggattcagccgtctccatatttgcgttgctggacaggaagtcccagatcgactggagcatcgatttaggctcgacgctagacgaggtcaggggcgacatcgatttccggcacgtcggcttcaagtatccgagtggccagatat

SEQ ID NO: 287669 - DNA, 354 bp, Zea mays
aagaaaaaggagagagatataagacggaagagcaatttggcaagtggtgactatggcgagtcagtaaaaccttcccaaactaatggttctactctgaaacatcaatcagatatgccaccaccaccggctccaccccctcggaacaataatttcaatgggaaggagaaacaaccagtccctgtttctagagaagatgatgatgacatttttgttggagatggagttgactatttagttcctaacaaggaaatgagtcagagccctgtctctgatatggatgaatccccacataaccatcagaagcagtccaatttcactgaaccgctgtatggcccagttccaccatctgaatct

SEQ ID NO: 287670 - DNA, 507 bp, Zea mays
caagagcgctcccctaccctttttcccctcctcgcagtcgcagcagcagcgcacaccagaaaagcttttctgcctcctctccaccttgcttcccgcaactaccacgcacgccgaatacttggcaagaagaaaccctttctcgtcccgttgaactggcgccgtcgactccaccggggcacgctgtcgcgggttgctctccggtcctcgttctccttgctgctgaatccgctagtggagatcgacctgatttctcctgtcctgtcaattggattttagcccggctttcaaggtagagaaagaagctgtctggtccatcatggccttcccaactccagcttctgtttttgttgacgagaaccaacagataaatagaggtaagagggctgctggatcaaggaccaaagggctgaagccgtcggagaatcctgggaatctagagaggagagctcttcaggatttgtccaactttgccaaaggcacaggtttgaagggcacttccaccctgaa

SEQ ID NO: 287671 - DNA, 641 bp, Zea mays
ggccgactggaatggtcagtgggtctgacacttccaatgtgcctaatcaggttttggatcccaatgggtatgatcctattgttgctgaattggttgctgagattaaaccaagatatcacattgctggcacaaaaggtgtcttttactcaagggaaccatatgtcaatgattctgctgctcatgttacccgctttattggacttgctaatgttggaaacaaagagaagcagaaatttattcatgcgatttctcctactccagcatctgtcatgtccagtgctgatatcaatgccaagcctccaaacgccactttgtcaccatatgttggttcagcaaaatcagttcctatcgaagaagctccaaaacgtgcagcggagaacatagattcacaatattggcgttatgatgtcaagcggcaaaggcatggggaagctggtgggggtggattgtgtttcaaatttgtatcctcaggatcctgtcaaagagggagtagatgcagttataggcatgatgaagaggcagtggagcattaccagagaaatgtctgttttgattttctaaacaaaggaaaatgtgagaggggcccagaatgcaagtttgttcacagtctttctggggagactgctctaagggatgcaaga

SEQ ID NO: 287672 - DNA, 582 bp, Zea mays
aggaactgcactgcactcacgacacgactcatccttgcgtttggcaagcgcagatccatccctggggttcccgggcataaccgccaaggtcgaggagctcaagaaggagctgcccaacgtgcacgtcctcgaccagttctccaacagatcgaatcctgaagcgcatgttggacgcactgggcctgagatctggaaggacaccgccggtaaggtggacatattcgtggccggttcaggctcgggaggcacggtgtctggcgtcggcaagtacctcaagacgcagaaccccagcgtcaaggtcatctgcgttgagcctgccgagagcccagttgtttcaggcggggaaccaggcagccacaagatccagggaatagggccgggattcataccggaagtgctggacacctcggtcatcgacgaggccgtcacggtgaccaccgaggaggcgatggcgggcgcccggaggctggccagggaggagggcctgctcgtcggcatctcctccggggccaacctggcggcctgcttgaaggtcgcggcgcgagaagagagcaaggggaagatgattgtcaccgtgtttcc

SEQ ID NO: 287673 - DNA, 324 bp, Zea mays
cggacgcgtgggcgcagcgctctgagaatgatcgaagacgcagaggagagggggctgatctcgcccggcaccacgacgctcgtggacccgacgagcgccaacctggggctgggcctggtcctcgtcgccctccgcatgggctacaggttcgtcgcggtcatgccaggccagtactcgctcgacaagcagatcctgctgacatacatgggcgcagagctgtacgtaacaggtccctccctcggggcccccgccataaccgccaaggtcgaggagctcaagaaggagctgcccaacgtgcacgtcctcgaccagttctccaacaga

SEQ ID NO: 287674 - DNA, 283 bp, Zea mays
cccacgcgtccgcgagacaccagaggagcgctacagaacggagattttgccgcctccctcccctccaccgttctggtcgctcgccggtagctgctccccgctaactactcttccccgccccgccgccatcggtcctcgcgacgcccctctccactgcctgtcctgctgccccacgccgcggacagatcacctcgcccccctccgcttgcagccgcgccggcacgaaggacggaaggacgggacatccgtggggaactcaaaaaagatcccgatacctggtcgc

SEQ ID NO: 287675 - DNA, 269 bp, Zea mays
cccacgcgtccgcgttcatccgcccctcaccgtcgcccaatctcacatggctcggcgtctccacggccaatccgacctcaccgacggcgcgcgcctccgtttctcgcacctccaactccagctccagctcttcctcccggttcctcctcgccgccccctccgacgacgcctccctctgtcggatccaccgctgaccgcgcgccgctacgcctgcgcctgatcaccggctggttcttggcctcttcgcttcctggaccgcccagacgtcg

SEQ ID NO: 287676 - DNA, 435 bp, Zea mays
cccacgcgtccgcaatcgtgcgtgttcctcactcagctccgaccttcacggggcccacggggcccgacgcccggcggctttactcagggcaccatggccttcacttcgtcactggcgccgttcttcccaccttctggaaccttccgagcccatcccgctaggaggctgcgggccgatgcacccgggagattcgtggcgtcctgcttgccccctcccgacgtcgtggtgacgcgcgagcagggaaagaacgccaggctcatctccgcgctggaaaagcataatgtacaccctctggaacttccacttattaagcatgttgaaggccctgatacagataggctttcagatgtcctacgtaatgacaagttcgactggattattgtaacctctcctgaggcagctgcagtgttccttcagggatggaagactgctgga

SEQ ID NO: 287677 - DNA, 373 bp, Zea mays
gtcgaggctgttgctgttcttgtatcaatgatgccccgcatgagaccgaatttgccaactggtaaattaggccagtgctgcaaaacaagacctgattttatcaaggcatgggaaaagtggcgaggtcaagtaactaaactggagtgcagtgcattttggatccagtgcggccaccaaaaaaacccgtgatggtttgaagaatttgcttcatattatgatggggaacataaaggaaattactgctgctacttcccattggctggagctgtttgcttctcattttctttacataaaaccattaactgtgggttttgaagggatgcaccatttagcacagaaatgcatacagcttatgccatcctctggcactaat

SEQ ID NO: 287678 - DNA, 243 bp, Zea mays
gaaaatcgatgacctaaattccatagagagagcgagagaaaaaaatcccaatccatccaccctcgccgcgagatcgccgggcgccgccatgtcgactccagccgccgcctactacgccgccgccgcgcgcaagcaatacttttgctaccaatgcaaccgcaccgttctcatcgcggcctccgccgccgccgccggggagctctcgttccccgagtgccacggcgacttcctcgaggaggtcac

SEQ ID NO: 287679 - DNA, 414 bp, Zea mays
cgggtgctggtggaggaagaagcagcgcagcaggtggcagggatgggtcgcggcggcgggatggggaacccagtcaacgtgggcatcgcggtgcaggcggactgggagaaccgcgagttcatctccaacatctccctcaacgtccgacgcctcttcgacttcctcctcagattcgaagctacgacgaagagcaagctggcaagtttgaacgagaagctggacatcctagagcggaagctggaggtgcttgaagtccaagtgggcagcgcgacgaccaacccttccgtcttcaactaggaggggcgggtttatatgtttaaataaataaatgtaggtatgaatgttgcttgtaccaacgaattctggtcgctatctatcgtgtagtgtgttgtggaggatgttattattaatgtg

SEQ ID NO: 287680 - DNA, 306 bp, Zea mays
catttctttcattctctccagccgaaacatctggccggtggcgtttctctttgccgcacagccgccctatggcatgctgttgtccttcgctccctcgtttgtttttggttctagcatctacagtcgaccatcttttctcggttggtactttacgcatggccatctttgccttggtgttgcacctactctctgtttctattttctttcacttcttcaacaattttctagccaacgtgttctctgtacacgtccgcttgcaatggaggtgcgtgctgcatacatgcgcatgctccttttctctctgtt

SEQ ID NO: 287681 - DNA, 402 bp, Zea mays
  unsure (1)..(402): unsure at all n locations
cggacgcgtggntccgggtgcaccttccgtccgagatcccgatcgtgggctgcgaggtcacgccctacgtgctactgcggcggcccgacggtgcagtcatccaccgacgatgtccctgaaactgcgcccgctgatggccagttcatgcggtacagatggtaccgcatacagagcgaccggaaagtccctatctgcagtgtgcatccaatggaacaagcgacgattcagtgcctcggttgtctcaagtcaaaaatacctgttgctaagagctaccactgttcagccaaatgcttctctgatgcatggcagcaccacaaagttttgcatgatcgagctagtagtgctctaaatgataattgggctgaagaagaggagttatttggcagatttggcagtggtggt

SEQ ID NO: 287682 - DNA, 318 bp, Zea mays
cccacgcgtcattaataatccagcgaacacactatactactgagcaaataaagccaccgatgtcatcactcctgttgcgagtgctgctcatccagcttgcagcagtggagtgcctctccgccgcgattccaggctgcccaacgcaatgtggaggcgtagagataccctatccattcggcgtcggcaccaactgctcccgcaaagggttccggatcaagtgcatcaacggcagcgcgggcgaggagattccagtgctgctacctactacgcgctaccagaacatccgggtgctgaacctgtccgtgtcgccgttgccgg

SEQ ID NO: 287683 - DNA, 309 bp, Zea mays
cccactcgtccgccacgcgtccggttgatacttcctttctattctttcacattattttgtgtcattcttccattaaccatgtttgttcccgaggccgagttgccggtgtgggtcatctgttatgtgccgatttgcatgtccttcttgaatattctgccatccccaagatcatttcccttcattgtaccatacctcctcttcgagaacaccatgtctgttaccaaattcaacgcaatggtgtccgggctgttcaaactcgggagctcctacgaatgggttgtcaccaagaagtctggccgatcatctgaa

SEQ ID NO: 287684 - DNA, 263 bp, Zea mays
cccacgcgtccgggtttcccagccaaagaaccagcatcctggttgtgaaaatggggggtgtgcgtactacttcttcatcatcgccgccgcggtcgttgccgtcgtcctcgcgcttctcccggccggcgccacaggtgccggcctcaaggtcggcttctacagcaagacatgcccgtcggcggagtccctggtgcagcaggcggtggctgccgccttcaagaacaacagcggcatcgcgccggcctcatccgcctgcacttcca

SEQ ID NO: 287685 - DNA, 337 bp, Zea mays
caaatcccgtttttcccatcccgtgaagaaccatggcacggtactccccaccgtcgctgcgctgcttcttccgctgcgccgccagctccgcctcccgagccgtagcagcggcactgggaagaagaaccttgtattcttgggctctccccaggtcgccgcctcggtcctggacaagctgctgggcgcgtccggctccccggaatccgcatttcaggtggctgccgtcgtgacgcagccgccggccgccaagaacagggggaggaagttgatgccgtcggccgtcgcgcagttagcgctcgatcgcgggttcccagaggaactcatcttcacgccagaa

SEQ ID NO: 287686 - DNA, 329 bp, Zea mays
ccacgcgtccgcaaaaccgaacccgcgcctctgcccttcccatggcggccacgctattctccacctccctcttgccccagttcctctccctctccgctaagcccgccgccgccgccgccgccccgtccgccgccgccttcccatcggggctgccgcagctccacgcgctgtccgccgcggcggtgggctttaggccgctcgagcccgtgcgagccgccgcgaccgcggtcgtgtacggaggagctcgaggcggacgggcgttcgggcggggacgagttttcagatgatctcagggtcttcgtcggtaaccttccgttcagcgtcgacag

SEQ ID NO: 287687 - DNA, 309 bp, Zea mays
atcgagtcgtttaattttctactaggagctagcagcgagcgggtcatttgcaacgacggcatcgtcttggcgttggcgggcgtgtttggcaccatgggcgactactactaccgccgccgctcgccgcacctcctcccggcggcggtgctggcgctgctcgccgtcgtcgtcgtcgtgagcagcagcctcccgagtgccgcggcggcgggggcgggccggaatgtgatcacgcacatcaagggcttcgaaggcccctctgcccttccacctcgagacagggtacgtggaggtagacgaggagcacggcgc

SEQ ID NO: 287688 - DNA, 302 bp, Zea mays
tttatttctttgccatgctattggttgtcactttgcggtatttgattccactcgcatatagaactatcatatatcctgcgataaccctacccttctgagaagggaagaggatcagagttcaactgatgaggagggaagatgaatagatgatggtaggggtcgcgtcacgctgtaggaggggcggtaggtcattattgtgggatgaacaatgatctaaatagtattgttcattggatttgaataagagtggagaggaggttatacaacgatttaatttagtgtgttaagtctggatgtaattt

SEQ ID NO: 287689 - DNA, 360 bp, Zea mays
cccacgcgtccggaaaaagcttcttcctggatccagccatttggttggtttttggcttttaggggggcaaaagccaaagccaaaattcaaaccaaacacacccagtcattttggcttttctatatacaatgctttaactatgtatttagatatagtgtatatttaagtgcactataaaagatgccccctccatcccctaataaaatgtgttttacctttttagttgatacatgcaataatgaatatatttgtcctacatatgtgtctagattcatcatcatccatttgaacatagacataagatcaagtataaaatgactaatatttggggatgagggatatgtatgtagaaagctaaca

SEQ ID NO: 287690 - DNA, 471 bp, Zea mays
gcccgcccccgctgttccctcacacgccggccgccgcgcaagaaccgtggccccgtcgacgtccgcccgcacaggactctccgagtgtgggattgagccgtagttttttttttttggtggctcgggccgatatccggtactgtatgagggttgccaactactagactttaagatcgctgattcaatggaggcctccgaggcagcacctgcagcggcggccaccgtcatggaagcagaggatgtgagcggcgggaagggcgaatggtacgtgcttggggagcgggcgctgatggtgccgtacacgcgggagcacgtgccgcggtaccacgactggatgcaggacccggcgctgctggaggccaccgcgtcggagcccctctccctctcgcaggagttcgaggtccaccgctcatggaccctcgaccctctaaagcacatttcatagtgttggataaggagctcatagaggga

SEQ ID NO: 287691 - DNA, 314 bp, Zea mays
cagaggcgggggtcattcagagcaccacgctgtgagcggtcgcgcagagtggaaggttttggaaggaggagatatccgccagcgattcgacctgtgagcggtcgcgcagagtcgaaggttttggaaggagcagatacccgccagcgattcgacggaggacagccaccaaaggactgcacgctctgaggactgaggtaaagcttgtcaactcccgcggtctttcgcaaaagtttcttgcgggcatggatcggttcgggaactacaagaactaccagacaaggcgctatgaggatggagacgagatgcaaagcaaa

SEQ ID NO: 287692 - DNA, 346 bp, Zea mays
attggtagtaggctgctcttgttgcgccggcagcggcaggcggcacgcaaaacattaaaccatcatttgcggcggcggctgctgccggcgacgcgatgtccaagcaaaagtccgtgatcaggctgggcgtaccgaacgacaagaaccggtctaaggccatgcagatggcatccaagttcgtgggagtgaactcggtggggatcgccggcgacgccaaggaccggctggccgtcgtgggggacagcgtcgacatcacctgcatgatcaacctgctgcgcaaggcggtctgccgcgccgacatcgtcgtggtggaggaggtcaaggacaagaagaaggatgaggagga

SEQ ID NO: 287693 - DNA, 315 bp, Zea mays
tatcggccatcgccatgtcgtcgtccctgtacaagcagctgggcctttcgggagccggctccccgctctccggccgccacctcgccctcctcgtcctcggcgccggcttcctcgcgctcaccgtcttcgtcgtccaccctaacgagttccggatccaatctttcttctcaggcagcagctgtggcggccgtcccggcacggacgcagccgccgccgcagtcgccagtcctcacggtgacaccaccacggagaaggaggacgacgcgcgcgccctcgtcggcatccaaacgctgccgagcaagcgcgcgcggcggc

SEQ ID NO: 287694 - DNA, 367 bp, Zea mays
ataactctttgtgatcaaagtatccatgctccatggaaactggttcttggatgttacaactcaaaggattacccaagagagtcgtgctccagtgctttcaggttagaactggagtctgtgaggccggagccacaggctcctttggaagactacaggctccatctcgagattttgcctctacagttgcatcttgatcaagagcaacttaacttcctaatcaatttcttcaagaatgattcatgtaacatggaccctcattcgcattgcgaaaatgagactgtcgacgtgaagaacacaagcaatggaagcaatacagttgtggatgaggcattacttcctttctttcagaaatttgatgtaaagccgc

SEQ ID NO: 287695 - DNA, 296 bp, Zea mays
tgtgaaaaaaagggatcattagtgggcatttggaatgttctactcagctactacacatcaaattcaagttgtcagctaatttttggtgccacattaacaatggctttagacaactactgtctaccttttgctataagctccaaattttcagtttatgacaatgcatttttttctttgaaaataggttaccgtgcaactgaactcacaatgactgagagagttgtactccagttcatcatcgtatgtgattgctgatgcctgtccaaataactcctactggaaatgtcagcctcgtc

SEQ ID NO: 287696 - DNA, 308 bp, Zea mays
cgctcagagagaaataagcaagcagaggtagatgctctggttagtgctggtggaagcattcatgatcgatatgcattgttatggaaacagcaaatggaaaggagggtgcaattagcacagcttggttctgcaacaggtgtatataagactcttgttaggtatttggtcggtgttccacaggttttattggattttattcgacaaataaatgacgataatgggcctatggaagaacaaagagaacgttatggtccagccctttacacccttacaaaactggtgcttgcaattcggttgtatttgcatgt

SEQ ID NO: 287697 - DNA, 374 bp, Zea mays
  unsure (1)..(374): unsure at all n locations
cgattctcaaacagacgcggctatccagaagatcatccgcgaggagttcactgaatgtaccgtcatcagcgttgcacatcggatcccgactgtcatggacagtgaccgtgtcctggtgctggacgcaggtcaagtggcagaattcgacgcaccctccaagttgatgacggaggccatcactctttggtgcgatggttcaggagtacgcaagtcgctcatctagcgtgaaggaaaccgttggatgagatgagagtatgagaccacttctcatggccanaagacgacggtatcggagaaatttaggcatacgcatgatgggctctgttcgcaagganaaataaattgtactaggactttctgtaagcttgcaagca

SEQ ID NO: 287698 - DNA, 325 bp, Zea mays
aacgcgcgaccgtcgccgctgcggccgtgggaaaggaaacacagataaaggacaacgccgtcgtctcttcctcgcaccagcttcccgcgaagggatcccctctactcggttgaggcgcctcgcctccgggacctggatccggtcaggtccacgctgatgccagcgaggtgcagccgtcttttgattcccctcctgcaactgcatcctcatgccgaccatcacgcactacgtgctggattccttcctcgagacagggtcgcctgcgcaagccgagaaagccacgcccaagccgcggccgtcgcttcaagacagggcgacacgtgta

SEQ ID NO: 287699 - DNA, 451 bp, Zea mays
aaatgcttgtttcattgagtgatattcaaaatccagataagcgcccagcaattgtttctattgatatcccttctggatggcatgttgtccggggagatgtcgatggaggcattaaacctgatatgctggtgtcattgactgcacctaagctctgtgcaaaaaagttcactggcccacaccattttcttgggaggaaggttggtcccccgcacctatgttaaacaaatacggacttcagcttcctccttaccctggcacatcaatgtgtgtgagaattggaaaagctccatctgttgaaatttcatctctcagggagaactatatttcccctgaacttcttgagagtcaagtgatgtctgatccatttgatcagttccttaaatggtttgatgaagcagtaacagccggtctgcgtgagcccaatgcaatggctttgacaactgccaacaag

SEQ ID NO: 287700 - DNA, 485 bp, Zea mays
agaagccgttcccgacatacgtgctgtacctcgtcgtcatcatagccatgacagagctgatcggcatggtggagatcaagtgggcaggcctcacgctgctggactggatccgcaacgagcagttctacatcatcggggcgacagccgtggtacccgttagcgacgctgcacatcgtgctgaagctagtccttcgcgggaacggcgtttcgttcaagctgacggcgaacaggctaagagcaccgtgaacgagaagtacgctgagatgtacgtggtgcagtggacgccactgctgatccccacaatagcggtgatcgccgtgaacgtcggggccatcggggcggcgatcggcaaggcggtcgtcggggggtggtcgctcctgcagatggccgacgcgtcccttggactggtgttcaacgcgtggatcctgctgctgatctacccgttcgcgctcggggtcatggggcggtggagcaagaggccctat

SEQ ID NO: 287701 - DNA, 228 bp, Zea mays
cttgtgccaagaatcgaaccacggcggtgcgagcgctaaaaggccacatttggaggagccctcgggccagatctgcatatgcaggtcgcaacgcggtagtagtagctaccaccagccgccgcagttgttggcgagcaaggaggccggaggtggcggcggcggggtgagattatggagtcggtgaagatgaggacggcaatggcgacgaagcgggagtacaggtggatg

SEQ ID NO: 287702 - DNA, 418 bp, Zea mays
gctggctgcaacagcaaagctgccagatggcctcgcagttgcaatgcaaagtggagttgccccacaagttgcacagccacccataacaaatcccatcacataccatacggctgattatggacagaacccggggttaaaatattttgatagggctcgtgaaacgagctccagtgcaatccctgatgacggcaacagaattgctggtgaggtcaagaagaagaaaagaaaacctgaatatgaccctgtagatacacaagctaacctaccaagggctcccatgccgcacgggagcgagaagcaaaagccttctaagcctgctgacgaggccagtgctggtagcctgccctccatggcgacaactcaaactgtgcttggcctaccgtcggtgcttggtcataaccaacaacctagctgattc

SEQ ID NO: 287703 - DNA, 355 bp, Zea mays
tttctccattcccacgtaaaagatagaaaggcgagcatcgcagtgcacacgcgcaatggaaggctcgccggtggcgcgcctcccggaggctaattctctccccgacggcttcgtccccgacagcgagagctcagacacggacgcggctcctccctcctccgcgcccatagttgacgatgcaatcgactccgatagtcccgacgccaccatccccggtggtgaggaaaccctaagtgatccctcccttcccgcgtccaccgccgaagatgtctcctcagccgccgctgctgaagcattggacacactttgtctggacgttgttgcggatccggagcgcgctctaggggacaacgga

SEQ ID NO: 287704 - DNA, 303 bp, Zea mays
cccgtgtcctcctctccgagacgagacggacgggacggcaggcaccaccgcaccggcgccaccccacccgccggctcagagcgggggcccggccacccgaatcacacagatcggaacgccggacgaggagcaacgcgcgcgcggagaggcccgccagcgaaggcgcagtgcaagctctgggttcccggatccgataccaccggcctctcggcgagtgtgtaatccagcgagcgagcgctcggtttttgccgtgagagcgggagatgagtgctctgaagaaatccgacaagaaagccgccctcg

SEQ ID NO: 287705 - DNA, 261 bp, Zea mays
cggacgcgtgggcggctcatctcttccggcgcggcgcacgcggacgacaagtcatcgggggattgggacagcgcacgggctccccgtcaacatgacggtgccgctcacgaagctgagcgggctgaagaggtataagctgtctgagctcaagttctttgatcgggcagctgccagcggtggcgcctatacggggccagaggattccttcttcgaaatggtgacactgcagcctggtggcgtgtacaccaagtcgcagctgtt

SEQ ID NO: 287706 - DNA, 236 bp, Zea mays
ctggtccggccaaagtggaggcagttgtatcctggcctacaccaactaactctaaggagttgcgaggttttcttgggttgacaggttattaccgcaaattcggtcaaaacttcggtgtcattgccaagccccttactgctctcctgaagaagcatgttgtgtttttttatgaacatcggatcatgctactgcttttgccttgttgaaatcagcctttgtcttcagcacccgtgtgg

SEQ ID NO: 287707 - DNA, 249 bp, Zea mays
tccaaaaagaaagcagggaggtgtctttagaggacgtggtggtggacaaggtggtagaactcgtggtattagccgtggtaacttcagaggcagcagagctcgaacatactatcatgatggcagcaagaactacagctatgttccaaaggaatctcatgcataccgtgataacaccaagaatgcccgtcattcttcatactctaatgggaaaaatagagttccaaaaccatctcgtgatcactatgatga

SEQ ID NO: 287708 - DNA, 273 bp, Zea mays
atgagaaccgagatggccgtgcagctgcatttggcgatgatattgccattgaatgcctagctactgagttcaagagagaagtttacgtggtgcaagcccatggagcggatgcaatggttgacgaggataactgtgtgttcttcctcccacaccgtcctcgaggagaagtttgcgagccaccgatttttcttttcatgaaaggaacagcatggtgtggtgctggtgctgaccattatgagcctttgatcgccactgtcctccagcatgttactc

SEQ ID NO: 287709 - DNA, 319 bp, Zea mays
cccacgcgtccgcgaacctgagcttcgtttcgtaatactgcgagcacgtgacgctcgaagcaaatcctcgccgccgccgccgccaccaccatcaccgcagccatgagaggcgccaaccgccgccgcacgggagcctccagctcggcctccatcgcctctacgtctaccaagcgcgaacgcgaagaagaatccgccagcgccgccgacgaatcgagcgacggcgaggaggtcccctcgtcgtccgcgtcggagtcggagtcggagagcggcggcgaggacgcggagctggagcgggagctaggacgcgcgctcgcagacg

SEQ ID NO: 287710 - DNA, 381 bp, Zea mays
gcattgacgaccttcacaggttgtttcaatctaactccttcgatgaaaattccgtgaagatagtggcttcaaacactgggtctggagtgtacaaggatcaagacctttatgacaagtacattgacatcaaaggaatcccagagctttcagtcatcaacaaaagcagcaaaggaattgagcttggatcagttgtgtccatctctaaagcgattgagctgctgtcagatggaaatgtggttttcgaaaagattgcagatcacctgaacaaagtggcctctccgtttgttcggaacacagcaaccattggtggaaacatcattatggcgcaacggttgcaatttcactcggacattgtgactgtactactagctgcaggtacaa

SEQ ID NO: 287711 - DNA, 339 bp, Zea mays
gcgtggccgcaagtcgcgcacgagtcgtggcgacggcatccaagcaaggaaaagaaataaagcggaaaactttaaacgggtacgcaggagatccagcgaaatggcggcgccgccgccgtcatatccagcggccttgaagccggagatcggccctgacggcctcgctcgagattctcccgtaatcgcctacaccgagaaggtcattttggaggagcagctgcagctgaagaaatacattcaggagaactattccaaaattcgtgatgtagaaaaggagttagagagtcttactttagaaatgaaactgacagctggaccaaagaaagcagcactagagca

SEQ ID NO: 287712 - DNA, 310 bp, Zea mays
atcccactgactccacccacccgcccgctgcctccgccggatctcgtcggactcggatccgcccgaccaccccgcgccgccgccgcgcagcagcagcaggccgaacccgaaggcaacgaggactagtagattcatacttccgccgccccgccgccgcgatgcagtatcacctacgccgatgcggcggaggcgccctcgccgctctctggcggctccgccacaacgcttcctctgccgtagcgtcgcctcctgtggcctggaggcgaccctgccttcctccacggttctactccaccgccgagatgagcca

SEQ ID NO: 287713 - DNA, 277 bp, Zea mays
ccgtttagtgcccaccgaaatctttctaccacccacgttccggcatccatggctcgtctgttcgcggcgcgagcccttacgctggcccgcccctcggcggcgccatccgccctccgcttctgcccctcccgcgcgctgtcggacaaggtggacttcatcgagatcgacctctccgaggagtccccttcctcttcatccggaggaggaggcgcgggcgaccccgccacggttcaggcgcagatggggtcgcggcgcctggaggacgccatccatgggg

SEQ ID NO: 287714 - DNA, 257 bp, Zea mays
cggaagctttgcttcggttgactgcactgcactgcacctgctgcctgctgccgagttcagttggtccagggccatggccatgtcctcgtcgcgcgccctcctccgccggatcgggggggctctccgccgccgctccttctccgacgccgcggccggccccgactccgccgccgtagggtaccacgtcgcgggcgggcccagctacatgcgcggcgccgtgttctgggagctccgtcgccgctcacgctggaggagtt

SEQ ID NO: 287715 - DNA, 443 bp, Zea mays
gcggaagcacagattgcacggtaaaaatttgggatccaagtttgcgtggttctgaacttcgagcaacacttaaagggcatactagggcaattcgaacaatcagttcagatcgtggcaaaatagtttctggagctgatgatcagtctgtcatagtatgggataagcagacttttaagcttttggaagaactgaagggccacgaggcaccagttagttctgtccggatgctctcaggagaacgtgtccttattgcatcccatgatggtactgtgaagatgtgggatgtccggactgatacttgtgttgttaccgtgggtcgttgccaaagtgctgttctctgtatggaatatgatgattccactgggattctggcggctgctggaagagatatcacggcacatgtctgggatattcgctccagcaagcagatgttcaagcttcaa

SEQ ID NO: 287716 - DNA, 379 bp, Zea mays
ggacttccgctttggcaggaccgcaggaggcccagcccgactagggttctgaccaccttccaggtccttcgaacttccccgcctcccgtccactcctggctcccgcgacctaacgccgccactcctgacttcgccatccggcgatcaccagagccctagctccggcgtctctagcgatccccaaaacccactccgccgcatttctgccgacttggccggattggtcgcttattgagatggctacgccacttatagcgggacttgcaattgcagcaactgcccttgctggccgatatggcgtccaaccctggcaagcttataaggcaaggcctatagttccaaggatgcggaaattctatgaaggtggctttcaacctac

SEQ ID NO: 287717 - DNA, 343 bp, Zea mays
  unsure (1)..(343): unsure at all n locations
gtgcaccagagggggaggaagagggaaagcaagaaagtggtgggaggagtcatggactgctgcatctgcagccccacggcgtccgtgtacaggcttccgagggactccatctgtgctccatgccacgagggcgccaaggcagtcatcgcttttctgaacaaggatggtgagcggcaggaggaagacgccggtggccaccaccaccatggctctgccctcaagtccagagggtccacgacgcagcctcatagcgcaccaaggggatgagggacgcgtgggagcaggtgaaggagatgagaggcagggangaggaggccaccggagagccgccttcctcgcgatg

SEQ ID NO: 287718 - DNA, 261 bp, Zea mays
catcgcctcatcttcctcttctcgcacctgcgaagtccccccgctttctatccccccgcctggccgcctctaagacaacagagacagcaatggccgtgcgcgccatcgatacgccgctcctcctgtgcaccatggtggtggtgctgaccggcctcgtgtccccgtccaccgccgggctcagcctggacacggtgagggacttcctgacgcgggaggaggacaccattgtgttcagcctcatcgagagggccaagtacccgc

SEQ ID NO: 287719 - DNA, 386 bp, Zea mays
ggtacagattatgattttgaatcttgtgaaccacataaagcccgagaggaacttgaaaatcttcaagctcaacaatccagtcttgagaagagggtcaataagaaagtaatggcaatgtttgagaaggcggaggatgagtacaatgatttgatgtcaaagaaaaacatcatcgagaatgacaaggcaaaaatcaagaaagtgatagaggagttggatgagaagaagaaggaaacattgaaggtcacttggctcaaagtaaacaaggatttcgggtctatattcagtactcttttacctggtacaatggcaaaacttgatcctccagaaggtggtacttttttggatggtcttgaagttcgtgtggcatttgggacagtttggaagta

SEQ ID NO: 287720 - DNA, 321 bp, Zea mays
cccacgcgtccgaatgatgataatgcctatatttcatcttcaactcgaagttcagaaaagaatttggaatctccatccatgaaagctgtgacaaacaatgctgatatgatacccaaagtcaagattaaaggcagtaaggtttcgagtttgcattacaaagatggtgaagaaaatactcccaaggctgacactggaaaagctaccaagttggttatccatcttggttcacggcataaaactaggagtggctctcctaagtcggagctgtccaattctcaaagagagcaagatttgggttcaatacatggagggacaatagat

SEQ ID NO: 287721 - DNA, 341 bp, Zea mays
ccacgcgtccggtcacatctccaagcagcagccagccaacctcaccacctcactcacatctggaaccgcaaacaagaatccttctccaagctcgtcgattatcctagctagatagaggctcaattggcagggccggggcacgccgcacgcacgccacgccatgatgaaggacgcggtgatcgagcacggggagagctccaaggcgcccctggtggcggcaccggtggcggcgggcggcgtcggccgcgcggtgtccatcgccgacgtcttcctcaggttccttgccatcgtggccaccatcggcagcgcgtctccatgggcaccaccaacgagacgctccc

SEQ ID NO: 287722 - DNA, 276 bp, Zea mays
caaataggcgccagttcatccgcttccattcctagttctcaccacccagaagtccacctccttgttgccttcctccaatcccaaatctcacctccttccagttccagctatcgctgctcgtgttggctcgcctcttcctccattcagtggctccttagatcggctcagggacacaccagctgatcgtgtcggcgccgaatctagtggcaatttctcgctattgttgccccggagcagtggtttggatccaagaacggcgaccttcttggttgtata

SEQ ID NO: 287723 - DNA, 509 bp, Zea mays
cacaaattacatcttcagtcaacactctatgcactgaatgcccctcggtgaattttctcaaggttaacatcgacagcagcccaacggtggcgaaggcagagaacgtgcggatagtcccgacgttcaagatatacaaaggaggggtgaaggtgaaggagatgatctgcccgagcttgcatgttctgcgctactccgtgcggcactattctgtatccagttcttgagaagctttaggtacccgtaccccaatttcccatttttcgctaatgcatagagctctccgtcaaacttgcaaacaccactagcagcctccagaacagaacattttcaccaccagcataactactcccctcccccattgagcatgagcataataacgggataaaactgtctggtggaagagccccccaaattccccacctcccctgtcaatttcgccttttcaccgttcatataccaacccattcaattcaatatctttgttcatgttccaggctctctccacctca

SEQ ID NO: 287724 - DNA, 346 bp, Zea mays
tccacctgcaagcaagagactctgcagccatctgggcgaaaactcaagcacgcggcgatgctgcgccttcgcgcttgcggcggcacggcaccggcatcggtgcccgcgctcgtcaggtcccgcctctccaggagatcctcctccacagcctacgccgccgctaccgtcgcttccgcttcctcctcttcgtccaccctggaagacctcgccgccgagcacagaggtttggcaaaggtcattttaaagaaggggaagacccaaatattccgagatgggagcccaatggtgtatagcggtgctgttgataggataattggtcgactcctccgaatctggcgatatgtct

SEQ ID NO: 287725 - DNA, 267 bp, Zea mays
cccacgcgtccgggaagctgggccacaccctctcccgcatcgtcacgtccaagccgcgcttcgccttctcccagcccaggcctaggcccaggcccaggcccgcacaacccggtctgccttcctcacaacccgtctcgatcccgccgcagccgccggagcttccccccttcgtccccaccgccatgccgcaccacggcagcgaccgcccgccggcgccgccgccggggggccccgtgttcccgcgcgcaacgtccacggtggtgcccg

SEQ ID NO: 287726 - DNA, 268 bp, Zea mays
caatcgactcgacccggcccgaccgagctccccgtgcccaacaaaccctcacaattaccagttccccatcgccgacgccgtacaccggagctcgaccgctccgcgtggtgtccgattctacttcgtcgaagactacaagcggcctcctagagttccacctcaactgcgcaggggaagggaggctcccaacgcatccccgccgacctcaacgccgacggtcctttcctaacccgcagccgccggccgcagtctctctcttccggtccag

SEQ ID NO: 287727 - DNA, 297 bp, Zea mays
cttaaacctggaagcctggaggatggaacgggtactagcctgctagggttcgtgtccggcggcggcgactgcagctggtcagctggaacgccggcggcgcagctcagtggacgctcccatcgaccattcccggtctcgcttggcaaccgacgccggcgccgccgccgcggacaaggcaggcacgtgcgcccagcgaacaccacgctcaaggtgggcgatcgtactgacgaaccgctgcagcggcggcaggagcttgcgtggcctgggcggaatgagccgattgaggacgctattggc

SEQ ID NO: 287728 - DNA, 469 bp, Zea mays
cggggaacgtcctgaccgtaaccatgtcgaagccctacgggttccgctacaggagcgggcagtacattttcctccagtgcccaacaatctccccgttcgagtggtacgtacatacgcacgcatagttggcactctcatgcatgcatctcttgatacttctccgcgtcggtggcgtatgtggcaggcaccctttctccatcacctcagctcccggagacgactgcgtcacgtccacgtccagaccaggggcgactggacacaggagctcaagcgcatcttcgtcgagaactacttcacgccgtgcgtgcccagacgggctgcctgcggggacctagcaggcgcggtggaccacaagaccaagagcccgccgaggttgctggtcgacgggccttacggcgccccggcgaaggacttcaggaactacgacgtgctgctcctcgtcggcctcgggatcggcgccacgcccttc

SEQ ID NO: 287729 - DNA, 328 bp, Zea mays
cggagaggaagctggtggagaagctgaaaggtttgggctacattaaaaccgcagctgtgaatgctaacacttccacggcaccatgatccgtggcatgatctagtgagctttcggtcgacgttcatcactagatgcatcatgatcatgagcagttgtgatgtttggtgggcttgattggctaactgtttcatctgttctttcgcgtggtaaaagttattatgaacattttggtgtatggagtgtttaaaagcactagagctaatagatagttggctaaaactactggtgaatttagctagttaactattagctaacttgctaaaaatag

SEQ ID NO: 287730 - DNA, 336 bp, Zea mays
cttgcttcacccatgcattcaccgtcatccatggatccacgcagcatctctccagccgctcggactccaccacgcccggtcgtgcgctcgccctgcttcctgttcccacgctcgtccttggttccatggccggtgctccctcaagcttagtttccatggccgttcgtcctggccgcggttccctggcatccgcgcgcgcccatctctctgctgccgccctcccatggacgcgcgcagtccccatctcccacgcgcgcccctgcttccctgttctctgttcccggtgccggatttcctgacgggctccctctcccacggccgtctccttcgcctagc

SEQ ID NO: 287731 - DNA, 352 bp, Zea mays
agaaaggccgatcatctcgagcgtcttctcccagaccagctgcgaggtgatcggcctaccgccggatgccctggacaagctcatcgccggagaaacagtgccgtgccgttatggacaataggatgtcgtcgcacagatccaaacaacaccacttttcagttaacagtttcgaggtggtttgttccagcctttgattagagcacctctgttgtatcctttttttatcctaaatttgcaggggggaaacaccgtgtaaggaagaaaaagcaactgttaacatctacaaccgttgctctttcttgtactgtgtcgtagaaacatttcaatatgttgactgacttgatttcttgtc

SEQ ID NO: 287732 - DNA, 292 bp, Zea mays
ccctaaccggctaaacctgagacaggcatcccgagtgcaccgtcggccgcaccagccggcagcatcccgccgccgccgttccccagcaggcagcagcaggtcgccgccgttccccagcaggcagcaacaggttgccagctcgcccccgcgttttgcttccggtcagctgatgtcgcatgcttttcggcagcgctagtcctcgacggacggcgaccagcatcagccggcgccccagtcgaccaacatccacggcggcacgagcccacgagcagcagatcaacgcggtggcaga

SEQ ID NO: 287733 - DNA, 548 bp, Zea mays
atctccaagaatattgtaatgaattggagaatcgactactggctcggtttgatgctgcatcacagagacgggagttgtctacaatggcagaatgtgctaaaatattgtcacagttcaaccggggaaccagtgctatgcaacactatgttgcaatacgaccaatgtttattgatgtggaaatcatgaacactgatattcaagttgttctgggtgatgaggggttgcaagctgattgcgacagtattgcagatggtctctctacattgtataaggaaattgcagatactgtgaggaaagaggcagctacaataacggctgtctttccttctccgaatgaggtcatggcacttcttgtccagcgagtgctagaacaaagggtaacgaccattcttgacagaattatagtaaagccctctcttgctagtttgcctcctctcgaaggaggccttctacaatacctaagaattctggcagttgcatgacaaaacaaaagaactggctaaggatttgcagtctattggttgtggggatttggatattgaaggtct

SEQ ID NO: 287734 - DNA, 390 bp, Zea mays
atcaaggggcggtggctttgaagcgccaagaggaactcattcgtgaagaggaagcagctgggctagctgaaattgaacttgaggcaaagcgtagtgctgctgaaaaggaaaaacgtgccaagaaaaaacaggcaaaacagaagaaaaatagtcgaagaagtaataaagggaagagtggcaagtctgacatcaataaggaaatacttatgtacagcagtccttcaggtgatagaatcctggatgatttttctggacaaacggaagaaatgtcctcaaatgctgacaaccctgaagaagtttctgatatatctgacagcagagacgataattcagatgcgcttcatgttgatattgaagaccgtgaaagtagccctgttaattgggagacag

SEQ ID NO: 287735 - DNA, 457 bp, Zea mays
agtctggggctatgttgatcgtatcctgggtcagccatcactgataagggagtcatcacgtgggaaatatccctggtctggtttcctctcacgtgctacaagtaccctgactagcaaactgaagaatggaagcaacctagggaaggacagaaatgggtttggtgatgttattctaaatccttctctccagaagagagtgaagcagcttgctaatgccacggccaatacaaaacttcatcaagctcctttcaggaacatgcttttctatgggcctcctggcacagggaaaaccatggcagcacgagaacttgctcgcaattctggattagattatgcactaatgactggtggagatgttgcaccattgggatcacaagcagtcaccaagattcatcagttgtttgactgggcgaagaaatctaacaggggtttgcttctcttcatagatgaagcagat

SEQ ID NO: 287736 - DNA, 291 bp, Zea mays
gatattcacaagagtattaagtacaatgtttgggcaagtactcctaatggaaataaaaggcttgacaatgcctataggcttgcacaggatccgcccgcgcgtccgggaaccaaatgtcctgttttccttttcttctcagttaatgcaagtggtcagttctgtggcgtggctgagatggttggcccagtagatttcaacaggaacatgaacttctggcaacaggacaagtggaatggtttcttctcggtaaaatggcacattatcaaggatgttcccaatccacaatttcgc

SEQ ID NO: 287737 - DNA, 409 bp, Zea mays
ccctgcgctgtcgccgtctgccgagcccgagcccggaaaaggggaaggcggctacgcaaacgcaaggcaccccaccccgttcaccgcagccgaatcaattaaaaagccggcggcgagaaggtgggttggggaatctgaagcgatcagagaaggcaagcttgcttgcttgcttctccaccgaatcccccatctcgcgccctccgtctctcgccgcggagactcgcccccccgctgatggaccagctcgtcaatttcatcatccgcccgcccagagctgactacagtccaaatgatgatctattagagcaggagtttatgctgaagggaagatggttcctgaggaaggatttggaggtaaaaaatggtcagggcaagaagttacaatgtagtcactacatgcctgttgtga

SEQ ID NO: 287738 - DNA, 345 bp, Zea mays
agccggcgaagtttgaagagcgacggccgacgactgaagcaataatggccgctcctctatgctcttccgtgtctctcatgctgctactgctagtgctctcggcctcagcggacgggaagctgatccacctccacttctacttccacgaggtcgacgccggcacgcccaacgccaccgtggtcaacgtcgccagcctgcacaagaacgcctcgacgttcggtgacctgaacgtgttcgacaacgcgctgcgggagggggcggacccggcgtcgcggctcatcggcagggcgcaggggatcggggtgcacgcgtcgctggacgaatccggcggcctcaccgccatcg

SEQ ID NO: 287739 - DNA, 421 bp, Zea mays
atcttttcgagggaggcacgatggaaggaaataacctaccctctggaagcttgatgcaaggaacaccttacagtaatgtggacttgcagcatcataaacatatgcaaatgcctgcaccaagctctggaaaccaggctttcaactactctcaggtgcctggcaatttccccattttgtctgaaccaggttacagattccgaccagctacctgaattccaatttggagagcacggcaaggtcagtcaccaccatcatcctcaccatcacaagcatcatgcaacgaatagcatgagcgatgatgaggagcatggtgtgcatgaggatgccactgatagccagatcggctatggaaagaagggttccacatggcatcggatgaagtggactgattcgatggttaggcttttgattactgcagcat

SEQ ID NO: 287740 - DNA, 371 bp, Zea mays
gcagtagcaggaatcataatatgtttgctggttgttggcgcaatagttgcattccttgtgatcaaaaggaaatcatggaggttatcacagggacaagaccctgaacaaaacgaacctctcagcccttttgcttctggacttaaacagatgaaatcaatcaaatctatcaaaatcgtatcaacaatgggcaaagaagaattgcagaagactgtttcgatgagtttgaagcctccaacaaaaattgacctgcacaagtcctttgatgaaaatgataccactaacaaggccatctcaaggaatgtaagcttgtcttccatcacaatacccgcatacacagtggcagaccttcaggttgcaacaggcagcttcag

SEQ ID NO: 287741 - DNA, 394 bp, Zea mays
actttctgtgctatttgacgaatataaggatgcacaacaaacagcctagtgcacttgacattaagaattagtgaattactccattcgctggggcaagatgttccagggtctggtggttctaactggactgaccatgagacattgcttcttttggaagcttttagacttttcaaaggaaaagaatggcatgagattgctgagcatgttgctacaaaaacaacagaacagtgcatgttacacttccttcaaatgccaatttctgaaccgtttcttgatggcgatgatttcaatgaaacaccccagaagatcacaaaacaggattcagcagaaactggtccttctgatgtacctgacaagatggatgtagatggtaatgcggaaggaaaagagagca

SEQ ID NO: 287742 - DNA, 293 bp, Zea mays
gaaaaacttgtcgaaaaatacacacacagggcacaatgtgcggaggcgccatcctcgcggagctgatcccgccgacgcggcgcgtggcgtcgaagccggtgacagaaggccacctctggtcggcgagctccaagaaagccggcagcggcagggacaagacgcaccagcacgggtacgccggcgatgacttcgacgccgccttcgaggacttcggcggcgacttggacgtgcgtgaagacgacgaagacggccagttcgtgttctcgtcgagatccggcttgtcgccaggcgtg

SEQ ID NO: 287743 - DNA, 1272 bp, Zea mays
ctcgagccgaatcggctcgagcggctcgaggaacgaggtcgtcacgccatcgccgccactcctatttaagagctgccggaggtgggggcagatccggcgagccgttcccgctgtccagattcaggaactagactcctccggtccggtcctccccctcccgccccgtctcgctccagcggctccacgccaccgtttgccattcactgccagaatggcgctcaacaaggagtacacgtacgcggagctggagaaggagccgtactggccgttcgagaagctgcgggtctccatcaccggagccggcgggttcatcgcctcccacatcgcgcgccgcctcaagggcgagggccactacgtcgtcgcctccgactggaagaggaacgagcacatgcccgaggacatgttctgccacgagttccacctcgtggacctgagggtcatggacaactgcctcaaggtcaccacgggggttgaccacgtgttcaacctcgcggctgacatgggtgggatggggttcatccagtccaaccactccgtcatcatgtacaacaacaccatgatcagctttaacatgcttgaggctgctagaattaacggcgtcaagaggttcttctatgcatcaagtgcctgcatctaccctgagttcaagcagctggaaactgtagttagcttgaaggagtccgatgcttggcctgccgagcctcaagatgcctatggcctggaaaaactcgcgactgaggagctgtgcaagcactatacaaaggattttggcatcgagtgccggattggtcgctttcacaacatatatggtcccttcggcacatggaaaggtggaagggagaaggcgcctgctgctttctgcaggaaggctctgacctccacagggcgctttgagatgtggggtgatggcctgcaaaccagatccttcacatttattgatgaatgtgttgaaggtgtccttaggttaacaaagtccgatttccgtgagcctgtaaacattggaagcgacgaaatggtgagcatgaacgagatggcagaaatagtcctgagctttgagaacaagcagctgcccatccaccacatccccgggccggagggcgtgcgtgggcgcaactcagacaacacgctcatcaaggagaagcttggctgggctccgactatgaggctgaaggacgggctgaggatcacgtactcctggatcaaggagcagcttgagaaggagaaggccgagggcatggatctgtctgtctacggatcatccaaggtcgtgca

SEQ ID NO: 287744 - DNA, 347 bp, Zea mays
cggacgcgtggggcaggattgcacatcttccccaagtaacacctgacaaagggcgaggagagcatagatttcttctttcccttgccgttgccgcttccgtttctcgcttccattcctctctgctcgtgggtttgtcgaagataaacctcgcataaagcttcgttcgtcggcttttggtatcaatcggcagggctcccccgtttcctctctccaagatcttccccccttttcttctgtctccaacccgcggaaatccttggaggagttgcggaaatttgtagcaagaggttttcctttccagctttcctgctgcggcggcctccgcacggtttttgatccggggagcg

SEQ ID NO: 287745 - DNA, 429 bp, Zea mays
gtcacagtctcacgctactatcgctatctggagctccggccgtcacagacacgagctagagctgcagggaagaaggaggaggagaatatgagggcgtccgtgctagttggcttcatggcggtgtcggcgtgcatagcatgcatcgcgcatggcggcaacttctaccaggacacggagatgacctgggggcaggggcgcggcaaggtggtggacgggggccgcgggctggacctgagcctggacagggcctccgggtccgggttccagtccaaggacgagtacctgttcggcaagatcgagatgcagatgaagctggtgcctggcaactcggcgggcaccgtgacgaccttgtacctgtcgtcgcagggcgacgcgcacgacgagatcgacctggagttcctgggcaacgtgtcgggcgagccctacacg

SEQ ID NO: 287746 - DNA, 290 bp, Zea mays
ggacctggtgcatattgagaatttgcgatacccgataccgatctaggagaagagaaaggcgtcatgtcgtcgttcggacgcaattcatggtgtatcctcgtgctggcctccgtgctcctcctgtcctgcctcgccgagacggccgtggccaaccgaacaggcgagctcaccgtcttctggggccggaacaaggaggagggcaccctgcgtgaggcctgcgacacaggactctacaacaccgtcatcatctccttctacagcgtcttcggccacggccgctacgccctcga

SEQ ID NO: 287747 - DNA, 345 bp, Zea mays
cttcctccaagtataaaggagcctcctttccctttgccgtgctgtgccgcgcctgccattctcctcccgagccttctcttccttcacgcctctttgccgcagcgcgggtgggtcgtcgtttgctgtttgttccgagatcaccggagccagccagccagccagaggcagagatgaggtggtcggcgttcctgtgggaggccgcgtccggccgccgcccgggggtttccaacctcctcctcgtcgtcgcagccgccagtagcggaggtctcgtcgcgtacgccgactccggatcagatgctgctgtcgagcagccgcagcttcctccgaggaagaaggtcgtggtgc

SEQ ID NO: 287748 - DNA, 367 bp, Zea mays
tcggagtcccccactcgctcgtgctcgtgagcgaacggagtccaaggcagacgctgcgattcacaagcgccgaggagcgagatgcagaacgtggtggaggtcgagccgggccgcccggctgccgatggccggccatccgtggggcccacctaccggagcgccttcgcccgcgacggattcccgccgcccgtccccgggatggacagctgctacgacatcttccgcatggccgtggagaagtatccaaacaacagaatgcttggccatcgtgagattgttgatgggaaggctggtgcatatacttggaagacatataaggaggtgtttgacattgcaaacaaaattggtaactctattaggagctgtg

SEQ ID NO: 287749 - DNA, 444 bp, Zea mays
ggattgttggcaagaaggtgtcagagaacgggagtacgaagagagatcgaggcagtagagataggatggaagagagcgattctagtgcccagaagaagagatataatgaggaaaggtctgagaaggagggccgtgaaaaggtgaggaatggccgtggtagccgagaaggcacaagtaatgcaagtgatactcatagcaatgtatggtggttgcagagccatatcagggttcggattgttagtcagaaactaagcaagaggctgtacttgatgaagggtaaggttgtcgatgtggtggggcctacaaaatgtgacatcatgatggatgatggatcagagttggtgcagggcgtggagcaggatatgcttgaaactgtacttccacggacgaacgggcgggtgcttgtgctttatgggaagcacaaggtttatatgggcactggta

SEQ ID NO: 287750 - DNA, 452 bp, Zea mays
ggtatcttcattgtataaggaaatgataagataccagcggaaggatggagttcaacttacagcaaacttatacctgcccccagggtatgattcatcaaaagatggacctttgccatgtctagtttggtcctaccctggtgaatttaaaagcaaagatgctgctggtcaagttcgtggttcccctaatgaatttccagggattggtgctacatctcctcttctttggttagctagagggtttgtgattctgtctggtccgacaatcccaattatcggtgaaggcgatgaagaggccaatgacagatatgtggaacaactagtaacaagtgcagaggctgcagttgaggaagttgtcaaaagaggggtggctcaccctgataaaattgctgtcggtggtcattcatatggtgcattcatgacagctaatctgctggctcacgctcctcatcttt

SEQ ID NO: 287751 - DNA, 247 bp, Zea mays
cagaggagcgagccatcggcgccccccgagccgtgccagccaagagccatccgcccaccaccaccaccccggccgcttccttgtccctgcccctccgttggtctcctttgcccatctcatcctctctctctctctccctctctgtctctctctggcggtcggcgtggctccgggggcgcgaacggggctcggcggggcgactcccggcgggacctgcaggtttgggtatgataggggtccccacgcg

SEQ ID NO: 287752 - DNA, 354 bp, Zea mays
ctgagcttgaagctttatgcgaagaacaaagagcaaagatccaggagctgagcagtttgattgaccaatataagaacaggtcagaagaactaactagtgaaggcaaggtttctgtctcactcagtgtgaatgagagggaggtacttcttgctgaaatccagagtctgagggagcaactcaaaaaccagactactgtatcaactactggtagccttcttgatcagttaaggaacggcagcacagaccaggagtatgaacttgacaaagaaaggcagaaatggatggagtctgagagcaagtggatttcacttaccgaagagttgagggtcgatctagaatcaaacaggatgcacg

SEQ ID NO: 287753 - DNA, 273 bp, Zea mays
ctagaaacgtcgatccagcaatggctgctaccccgaccatcgttctggtgcccgtctggggcattggccacttcgtaccaatgctcgaggtcggcaagcggctgctcgcacgcagcgcactgcccctcaccgtcaccgtgctcgtaatgccgttgcctgcagaggcgaatcgggcgtccgagatcaccgagcacatacgccagcaggaagcctccggcctcgccatccgcttccaccatctgccagcggtggaacccccaaccgaccactcgg

SEQ ID NO: 287754 - DNA, 339 bp, Zea mays
ctccggcactgcacactcacgagctgtggatagctgatactctcccccggcgccaagaaaccacgaaatcgcgcccccacacacaccttcccttcggtccatcccgatcttaccaagaatccgagatccgcctgcgacagctagcggtcctatcttgatccgatggtgtcaccggcgccgggatgtagggattcgggggaggatggcggcaaggcggagtggctgatctacgcctttgtcgcgcgcggcatcgcggtgctggcggagtacacggaattcaccggcaacttccccgccatcgccgcacagtgcctgcagcgtctagccgccgggtcgtct

SEQ ID NO: 287755 - DNA, 380 bp, Zea mays
gagagagtgtgtagtgtgtgtgtgtgagagagagggggattggaggcgaaggcagcgggctagcgctacggaggaggagagatccgctgaggtggaacgcccgatcggcggaccccatccaccaccactccacaagatgcggggcgggacgctgcagatcaactggcacgaccagcagccggtgctcagcctcgacttccaccccgtctcccgccgcctcgccacagccggagcggaccacgacgtcaagatctgggaggtagcgtcggacggcaagctccccaccgccaccttcaagaccggcctcgtccccaacaccaccgcccacagctccgcggtcaacgtcctccggttctccccttcaggggagtatctcgcct

SEQ ID NO: 287756 - DNA, 362 bp, Zea mays
tcgaatccgggtcaccaccgtcgcgagggacggacgcgtggggagattatagctgtctgcaagaaatacaagacttacacatatcagcatgaggcccatagcattggtgctgttggacagtctggccgcggtgtttgtgaactccttggggttgacccagctgatgtagatataatgatgggtactttcaccaagtcttttggatcatgtggtggatatattgccgcatcaaaggagataattaagcacctgaagcatagttgcccggcccatctgtacgctacttccatgtcgccaccagcagtccaacaagttatttctgctattaaagttatccttggggaggatggctctaacagagg

SEQ ID NO: 287757 - DNA, 322 bp, Zea mays
gcccgtctcggctctcaaaacaaaccccggctcgcctcgcggaatccacgagtccgccacgccagtgcgcctccaatttctccgcagtccgcagttccgcacccgtacctccccaaccccccaggccccagctcaccaccccgagatcccccccgaccggcctcgagatccctgcggccatcccgtcgtcggcagccatggaagcaatcgacgagctcgtccagctctccgagtccatgcggcaggccgcctcgctccttgcggacgatgacccgtccgacgagaccgcctcgcgccgcccctccacctttctcaacgccgt

SEQ ID NO: 287758 - DNA, 405 bp, Zea mays
cccacgcgtccgcccacgcgtccgacggtttgttgttatgatattgaatgcacgttttcctacggacgcagggtgctttctctcaactctcttggtgcacgtaggggactggtggtaaatttctctgatctaacagaattgctcaatggatgttctcagctagagaatctgagattggcacttgatttctcaacttttgatgaccctaactttggtcgtgtatgggcatctgcttctgaaaggctatcatctcttgagattggttatattcctatgacaatgttacttgaacttctggtagcagttacagaaggacaacaatgcatggattatgttaagacaccagttttctttcctagccttcaaaagttatgcctggctgtggatttcataaccgaccatcta

SEQ ID NO: 287759 - DNA, 301 bp, Zea mays
cttgcttgtgccaccaccgtaccgtaccaaacagatcaaatcagagatggcaagtcgtagtagctctgcagaaggtgcaggcaggacgttgcctgtcaatctcaagttgatcaccgtgctgagcatcgatggcggcggcatcagagggatcatcccggccaccatcctcgccttcctggaagcgaactccaggaactggacgggccagacgctcgtatcgcggactacttcgacgtcgtcgccggcacgagcaccggcggtctcctgacggcgatgctcacggccccggacacgaacgaac

SEQ ID NO: 287760 - DNA, 290 bp, Zea mays
gctccaagggccaagggaggctgcaggcaggttgtctccctccttcccacctgcaccacccctacccctgccccccatctcatccatcaatgggaaggtcaccttgctgcgatgagaatggcctcaagaagggcccctggacccctgaagaagaccagaagctcatggagtacatccagaagaacggccatgggagctggagggcgctgcctaggcttgccgggctcaacaggtgtggcaagagctgcaggctgagatggaccaactacttgaggcaaacatcaaggagg

SEQ ID NO: 287761 - DNA, 319 bp, Zea mays
gatttcgcaaaagcaacaaaacccacgtcgagggtagaagaggcctgcaaatttccgaagagctcgcggaaatggcgacggtgctgccgcttgccgccgcctcggcctcgcccacgccgaggacttgcatctccggcggcccagttcccgcgcgattccttgggactcgcatgcgtctccgcatccacatcccaccgcggggcgttgcctgcgccctccgaagagacccacctagtacaagactaaaatccagagtgaggaggatgtggtggctgcagaagatgtcatggatgatgatgacgacgaggatggtgcactg

SEQ ID NO: 287762 - DNA, 253 bp, Zea mays
atttaattatgatccttcttttcgtttgttcttatgccattgtttggccacaagcggtggggtatcgatctgaaatagttggacggcatccctgattccaccctgatcgatcccatggatgcccaagacgacgatgagaggccgctgatcatccatcgcctgccactactccaggatgaaagtacttccggattcactagcgacgggacggttgatcttcgcaatcagcctgctcggaagcagagatctggga

SEQ ID NO: 287763 - DNA, 224 bp, Zea mays
ccacaactcgcaaggaagccctggtgcccgcggcggcggcggcgggtggagagggagatgtaggaggaggcaacagcgcgggcgccctactgcgcatcttcgtgggcgggctggcggagagcgtgggcgcggccgacctggaggccctgttcgcctccgctgggcgcgtcgccggcgtcgagttcgtgcgcacaaacgggcgcacttcgcctatgtcgacttcc

SEQ ID NO: 287764 - DNA, 344 bp, Zea mays
aagagattgactacagcacccgtgttgattttgcctgatctaagcaagaactctatctattgtgatgcatctcgactgggtatatccgctaggtcttcgttggcaccttccctgacgacgagcacccacatggtgtgacttgaaggtggtgagcgatgcaaacgtcttcttccccaattgagactgtcctggcacacctcggcatgcatggctgcttctccgagatcaccaccaacctggcgagcgtcgacaccgatggtggtgtttagatctcaccgttctgtggccacgccccacagcaaaatatggagataatcaaactgccgactgaatttgatatcact

SEQ ID NO: 287765 - DNA, 322 bp, Zea mays
caatttacatacaccagcgggtaggttagttagtagtcatgaaccactgaatctaacatcggtttcttacaatgaaatttctattaaaatgttttaagaataaaataaattatttacatgggcaggtacattaatttgtgggtgcactccattgaaactaatatacctgcccatgtaaataatttattttattcttaaaacattttaatagaaatttcattgtaagaaaccgatgttagattcagcggttcatgactactaactaacctacccgctggtgtatgtaaattgttgtaatacattcgtaaggcatatgaagttt

SEQ ID NO: 287766 - DNA, 265 bp, Zea mays
ctcgctggctgaaacacggatccagaggcgagagcacaccagctgagctcgagcgagctctagtcgttttagcaccggctccggtgtcacccatggccatgaggggagcggcgcagcaggtggcacggttcgccatggggccacacgtccctcacgttatggcgcccgctgagaggggccttcatgcgtccgccgggagcaagaagatcgtgggcgtgttctacaagggcggcgagtacgccgactagaaccccagcttcgtcgg

SEQ ID NO: 287767 - DNA, 511 bp, Zea mays
gaacccacccatggcttcaatcaacacagtcctcggtgcaatcttcgttgcttccttctacttctgtggctcccttgccttcttccctcctggtcctggtcaccaccacgagggagcccaccaccctccaatcggaagtgctccaatcccaggtctttctacagactactacaggttgacatgcccgcaagctgacgagactgtggcgcccatactgaagaaggctatcgcgaaggaaccacgggtagctgcctcccttctcaggctcctgttccatgactgctttgtccagggctgcgatgcgtcggttcttttggatgacgatgaggaagtcgtgagcgagaaaaacgctatccccaacaaggattccattagggggtttgaggtcatagacgagatcaaagctgcactcgaggaagcatgtccgcagacagtgtcctgtgctgacactgtcgccctggcagccagaggttcgacagtgctgagtggtggaccgtactgggagcttcca

SEQ ID NO: 287768 - DNA, 413 bp, Zea mays
gaagaagggaaaaaggcactttctgctgcagctaagaaatttaaggttccttcctctgaaaatcttggggagattgctgaacactgtaatgaaagaaagtgggctggtcgccgtgcagaagaagctggacagaagctctacatgtgggctctgataaagaacaaagagactgtggtatgcaatgctagagttctgggacttggtcccaggttcatgtcagtttatgtgcccaagcttgcgatggaacgaaggatatattatgatgaagttgagggattatcagttgaatggttagaagtcactggaacgttagtgcttgatacatgcaggaacaagcctgctcaaaggagaggaactcagatgaagcgcaggccgattgaggaagtcgcggtggtggtgaacccttcagagtt

SEQ ID NO: 287769 - DNA, 560 bp, Zea mays
gtgataacacaataggtaaagcagaacaatcaaacaaaccatcaccaactggatcccaaaccacagctgcgacgtatgaagtaaaggagtccttcagtcaattccatgcatcatctaaagacgtgacaggatccacgcaaaaagaggcaggacatgtggtaactgtgcagcgaaacggagcacgccaagagcaaattcctctctcacggcctgctgttgatactaaaactgataccagtcatctaggccacaaagaagaattcacgcaaacagaagcaggacatgtggtaactgtgcagcgaaatggagcacgccaagagcaaattcctctctcgcagccttctggtgatactgcgaatgattcaatgcaccttggccacaaacaagatattctggaagatataatggcgccctctgataacagcacatttttcagcccatcgtttgttaaaccagtacttacaatcccaataaaagttttgcctggggaggacaaccagacggttgagaaaccaacttcagttattcgtcagccagctgagccagaagctccacctcat

SEQ ID NO: 287770 - DNA, 232 bp, Zea mays
cataagcagacctcagttttgcagacgtctcgtcctccgtcgttcaccaggtttgttttcagctgctggattcattgtcgataatcgtccacatacctgaacataaaaggcagaacagaccagtaatactttgtgtgcgcatgcatgtgccagaccttcattacaacctgatggtttgtacctaactgattgtgtgtgcagaacctgcggcctgacatccctcgctgctgcc

SEQ ID NO: 287771 - DNA, 346 bp, Zea mays
ctggttttctctgcgcggggaagaatggcgtcgtggttggagcagctgcagcgcgagctcgcacgcccgcggcctcacagtcgcctccatccccggcaagggaaggggtctcatcgctacttgcaccttcttcccaggggatgtcattctcaatcaggaaccttacgcttctacacctaacaagattttagttggatcgagctgtgaccactgtttcacctctggcaacctgaggaagtgctctatgtgtcgagttatgtggtactgcagcagcaactgtcagaaagaagaatggaaactacatcagcttgagtgtagagcaatggcagcacttacagaggataga

SEQ ID NO: 287772 - DNA, 327 bp, Zea mays
cggacgcggggggaaaggtatgatcgccaatacaatacagaagaggttgaaggtctcctcaacgcagcttctgtaccaatctgcgccttaccaggcaggaactctgtttgcaactgggcccttttgtggatcaacttcttactgaccggagtgtctttgcacacaaatactctgctccagttctgggtttcattgtcctatcttgcctgattgcggtgtctgtgaacttcagtacatttcttgtgatcggaacaacatccccagtgacataccaggtgcttggtcaccttaagacatgtctggttctatcatttggttacactctat

SEQ ID NO: 287773 - DNA, 417 bp, Zea mays
accttctgcaccctccatgtggcacatcgcttgcatttcttcgagcccaaggcgattgatggacagacggtgatactctttgggttgctgaatggcacgtcaattggccttctcaacctgagcttaggattcaactccattggattctaccagatgacaaaattggcgatcatacctttcactgtgctattggagactatcttcttgaacaaaagattcagcgagagtatcaaactctctcttctggtcttacttcttggagtaggaattgcttcagttactgatctcaagctaaacctgcttgggtccatcctttctggcctcgccattgccaccacctgtgttggccaaattctcacaaatacaatacagaagaggttgaaggtctcctcaacgcagcttctgtaccaatctgcg

SEQ ID NO: 287774 - DNA, 222 bp, Zea mays
cgacgtctgggtgaccgccgccgcggacccggctctactcctgggtgccgtgcctaggcattcgccggcgacgagcacccaactgcttaggctaccgctgtgggatcttctgtgaagcaagggatgctactagcacacaactgaaagttcagtagattttgaggatcaacctttcagtcatctgtattttagttaatatgatggccaatgatccagtattca

SEQ ID NO: 287775 - DNA, 263 bp, Zea mays
cccacgcgtccgcccacgcgtccgccacgcgcccgcatgatctttcacaacgatatggcaagataattgttgctgacttgactgataaacgaggtgatgaaggagatttgagcaatgcatttgctgctgaaatggacagaattcctggtgtcaggtatatacattttgatttccatcatgtttgtcgtggaggtaactttgacaatttgcaagctctctacaatcaaattgaggaagctattcataagcaaggatattttctt

SEQ ID NO: 287776 - DNA, 297 bp, Zea mays
tgcatgatctccatgcatccactaaaaaaggggcaacaactgcagtagctagctagtagtagtgcacacaacagaagcgtgcgtccatggtgtctgtcgtcgtctgcaaataagtggtgtggccttgttgcaaccgtaccgatgatgatgaaggatttttctcttttggccatgaccgtccgtccataatacgtgtatgcatagtagctgcagaaagtcgatcagtcagtgtatacatagtgtacctgagtcacactgacttagctctcaaccaataccaaaagcgcttgcaggtga

SEQ ID NO: 287777 - DNA, 255 bp, Zea mays
ctcgagccggtcgtctgtgagtgcatgcgaggcctccggttgatccggctctctctcggtgcagttcgtccgggagggggagataagcgaggtggagtggtgtggtcctaagccaagccaactagatcgagtcgtcaagaaggttggagaggagagagagatggggaagcaggcggcggtggtgctggccgtgaacggcaagcggtacgaggccgccggcgtggacccgtcgatgacgctgctagagtacctgcg

SEQ ID NO: 287778 - DNA, 412 bp, Zea mays
ggcttccattttgcaataagtaccaagtggagcccaggtcaccagctgcctactttggtacagaagctagccctccagatgcatgtgaccgtaaagagtggttttctttgaaggagatgcacaaagatttggcagctcgagtgaattcagttgttaatttagggaagatccctgaagtttcaaaatgcaagcttatgggcttctccaggtggagcgagaatgcaagttttagagatcacccttcaatagttcagattttaattgatggaaacaaaaggaaagcaactgatgttgatggaaaagtgttgcccacactggtttatatggctcgtgagaagagacctcaagaacatcatcacttcaaagctggatcactgaatgctttgataagggtatcatcagtgataagcaa

SEQ ID NO: 287779 - DNA, 158 bp, Zea mays
cccacgcgtccggctgtatttgaagaactcaagcaacgagaagatactgctgagaaggtgattatgcaatgtaacggaaatagacccaagggtcgcggctcaagagcccacacagccagtcctgaaacggacacgttcttggagaatcacccaaccag

SEQ ID NO: 287780 - DNA, 299 bp, Zea mays
cccacgcgtccgcccacgcgtccgggcggtgtgaacaatcagcctgcagcgatcgagcaaaagccagcatcagcgagcaactcggcgacgtcggcgtcgccaggggagcccgggcagagaagcacctgccctctgcatctggaaccccgcgcgggctccgccggccgcggcccgtgccgcgacgactcggcacgcgctagccagctataggtagctgtttcccttcccgccactatcctgccgcccgggctcgcgtggcggatgatgattcctagagagccacggcggccggagcaccc

SEQ ID NO: 287781 - DNA, 294 bp, Zea mays
caagctagcagatcgagcagtagatattgaaaacatatacacataaaagacgtacgtacaggcagtcttgaggagaggccaaagcaacaaaaaaaaatggcagctctcgccgtggtcttcgccatcaccgccatcagcggcgcggcggcggcggccgacgatgttgcgtcttctacggccgctagaaatttcacggtagcgtctcctcccgcctctccgacgacgacgaccagtggtccggtgacgtacgtgttcggcgactcgatgtcggacgtgggcaacaacaactacttc

SEQ ID NO: 287782 - DNA, 306 bp, Zea mays
cccactggcaaccgtgatgctgcgtccttggttaacaatgatgatccaacttgtattgagatatggaaccttgtattcattcagttcaatagggaggcagatggcacattgagacctttgccagcaaaacatgtggacactgggctgggctttgagcgtttaacttctattcttcagaataaaatgagcaattatgatacagatatattcatgccaatatttgatgccatccaccaattggctggcgatggaattcagccatactctggtaaattaggttctgatgatactggcaaagctgatatg

SEQ ID NO: 287783 - DNA, 305 bp, Zea mays
cccacgcgtccgcccacgcgtccgctcatttccagcctctccgcgccccaaccaccgccaccgcgcgcgagatcgcaagcctccacaccgtgaccaccggcgccgctgcggcgtccggagcaggcggcgagcgtcgtccacagggtaggctcggcttgccggggcggacgagatgagcgggcacgactccaagtacttctctaccaccaagaagggggagatcccgagctcaaggaggagctcaactcccagtataaggacaagagaaaagatgctgtcaagaaagtgattgctgctatgactgt

SEQ ID NO: 287784 - DNA, 390 bp, Zea mays
gtcgctggagccaagaaaagcaaggcaaactgcaaagccactccctttcctcctccgcctctggcttcctcccctcccgacttctcctccaaatcgctgcctttttgttcgtttttttttctattttgcttcctctcagttcttggaaggaaaggcggctgcaatgggaggtagcggaacgctgatctcggtgtaccccgaggagctcaccttcctgtttgagctggagaagccgtgctattgcaacctcaaggtggtgaacaacagcgagcaccacgtcgcattcaaggtcaaaacgacagcgccgtggaagtatttcgtccggccgaacgcgagcatcgtccagccatgggcttcttgcacaataacgatacgctgcaggcacagaaa

SEQ ID NO: 287785 - DNA, 330 bp, Zea mays
agcaatcaaatgatttctttgaagatataaggatacatgtgtctcagctcatgacacttatggagcagaatcaaatggaaaggtcctccaagcttgttaaatttgagaatgagtttaaggaaacttgtgttaaagacgagcaagctgctctgaataagattgctgcaattttatcagagttgaccgccaagaaaactacaatggtttcatcatatatgggacagcttaatgagaggtatagtgaagatcagaagaacctgaaactggagatatccaacctacaacaggtttcagataatggcaaaaatgagtctgtggcttgtgttggag

SEQ ID NO: 287786 - DNA, 227 bp, Zea mays
cccacgcgtccggcatcttgacaaccatctggtagaaattggcaccaagggcatcaccaaacccaaggagatcaggaagttcaaaggtgaaggcatgccactataccaaagcaacaagaaaggtgacctgtatgtgacattcgaggtgttattcccgaaaaccctaaccgctgaccagaaggccaagcttaaggatgttctcgtgtagaccattgtttctcacatct

SEQ ID NO: 287787 - DNA, 235 bp, Zea mays
tcacggtccgcgaccggcagctataatttaatccagacgaggaatcgcctcgcccgggatcactccccccccgcgaatccccaggcccgctcgccgacaggaccccgcgatcggctccagcgtgactatgacttgcgttgcggcggggacgtcgccgacgctcggcacggggctcgtcggttcggcggtcgctttaggctcgggccccgtcgaggccagcggtgccggggcaatg

SEQ ID NO: 287788 - DNA, 502 bp, Zea mays
cctggaactagggttgcttataggatgacagttcggcaattggaagcattgattcggctgtcagaagctattgctcgaagccatttagaaagagttgttctcccagctcatgtccgcctggcagttaaattgctcaagacatccatcatcagtgttgagtcaagtgaagttgatctctctgacttccaagatgctgaagatggaacaaatgtaccttctgagagtgacgccggacagccagctgaagaagatgctgctcctcagcagcagggtgcagaaaatgaccaagcagcggataacggtaagaagaaattggtaataactgaagaacacttccagagagttactcaagctttggttatgagactaaggcagcatgaagagtcagtcaagaaagatggagatggtatggctggcatgaagcaaggggatcttatcatttggtatgttgagcagcagaatgccaaaggcgcatatagttctaccgcggaggtgaaggaag

SEQ ID NO: 287789 - DNA, 395 bp, Zea mays
cccacgcgtccgggcatacacgaccgcgtcttcctgcacacagcagacgccgaggatttcattggcagcgacggcaacgagtatgacatcgtcttcatcgacgcctacgacggagacgacgtgttccctcgcaagctctgggacgtggacggggcgttcatgaagagcctagagaagagagtgcaccccgtccacggcaccgtggtcgtgaacctgcactccgactcagactccgaggccgcggaaggcaacgccgacttccagagcgcgcttcccatgggcaggcacgtctcccaggtctgcagggcttacatgcagcacttcggggtggccttcacggccgcggtcccgtggctctgcaacatcacgctcgtcgcctgccgcgccggcgggat

SEQ ID NO: 287790 - DNA, 258 bp, Zea mays
gcaggccgacgcgtcactcaaggctggtaaatggcagcgcaacaagtatgttggtgtatctcttgtgggaaaaactctcgctattctcggatttggaaaggtcggatctgaagttgctcgtcgtgctaaaggcttaggaatgcatgtgattgcacatgatccatatgcttctgctgaccgggctcgtgcaatcggggttgagcttgttagcatggaggaggccatgacaactgctgactttatctcgttacacatgcc

SEQ ID NO: 287791 - DNA, 300 bp, Zea mays
cattcttcttcctccgcacataaaccataacattcttctccacctgtgtttctttccaagccaccatggcctccaagctgagtttcaagagggcagacagcatcgcggaaagcatgcccgatgcgctgaggcggagccggtaccagatgaagaaatgcttccataggtatgtttccaagggaaggaggctcttgaagaaccagcagctcatagaggagctggacaaatcactggatgacaagtcgagagggaaaagttgttgaaggctcctgggttacattattgttccacgcagaagca

SEQ ID NO: 287792 - DNA, 558 bp, Zea mays
gcatcacatatggcgatggcgagcagatcctccacgaccggaacggcggtgctgtgctttcttgtggtggtctccctcttcctggccccgtcgttgttcgttgccggaactgaagcagcagcggcctacggtgcaggtgcaggtgcaggcaggaagatgaagcaggcagctgcgggagctgtggcgacgaagcaggatggctacggctaccctgcaaccagttcaccagcgggatacccggcggtgccttgttgccctcatccacctgagggcggtcggggttaagagagagcccagctgcagctagacttcatgtgcatgatattgcagaattaccgtctctgaatacagatacagaaactagcatttatatacgaatcatatattatctatatcctcatgccatgagagatgtgtatcactctcgctagataattagcagctacgacgcgcctgcctgtcacactgtgctactatactatattcctgctccctctctctatatatacatacacacatatgtgtgtgtgaaataaagattagcttggagcaccgcgc

SEQ ID NO: 287793 - DNA, 252 bp, Zea mays
acctgatggccgaagaagacactcaagcaagaggaatggtgcccatgacaatcatgaccagagagttgcccatgttgtaccacccttagaaggcatgggggtcgatgacgatatcaacaacgcgaggccttttcatcgagttcctagcgagcgaagaaagcacaaaagcaggcagaacggatcgacgagcggcagtgactacaattgggccagcgaaggccacgagtctgatggcgacgatgtgaacacatc

SEQ ID NO: 287794 - DNA, 311 bp, Zea mays
gtgaagggtggagtgcttctcattggttattcatcatttagaaatttatcccttggaaagcatgtgaaggacaaaaattctgcaaacgaaattacttatgctttgcagtgtgggccagatattcttgtatgtgatgaagcgcatatgataaaaaatagaagggctgacattacacaggctctgaaacaagtaagaacacaaagaagaattgcgttaactggatctccattgcagaataatctgatggaatattattgtatggttgattttgtcagggaaggttttcttgggagtactcatgaattccgaaa

SEQ ID NO: 287795 - DNA, 235 bp, Zea mays
ctcaggtcatgttgggggaccagcgcatgatactgggcttagactcggcaacctcatcaagcactgcccctgatttgacccgcgctgaagaggatccttctgtgagcaggagctgcgtgatcgaccgcctgcaggtgcggtgggcgcagaagggaggacaggtggagggtctggtgaattgttatagcaagaagaagaacaagaccggcagtggttcgaggaatcttgcagccag

SEQ ID NO: 287796 - DNA, 223 bp, Zea mays
ggatgtcaacgcgaggcaccggcctagggaggtcaccgtcctccggcatgccgagatggttgccttcggagggaccccctagctcgacgtggaaacattcgcggcttgggccgcagtcctcgtcgccgaggctgcgcctaccgtcggaacagtcggagaggcagtagtcgcatgcggtcatgaagtcccgcatggcactggggttgccaaatccagagaaatt

SEQ ID NO: 287797 - DNA, 454 bp, Zea mays
  unsure (1)..(454): unsure at all n locations
atccgcagaccgtggcgtcaccatccgaaacaacgcgaaaatgaacggaaccaccggcgaaccgaaaccgaccaccacggagactaacacgaagcagccgaccggcgaaccgacctccacagagactaacaagaagcagccggccggcgaaccgacctccacggagactaacaagaagcagccgaccggcgaaccgacctccacggagactaacaagaagcagccggccggcgaaccgacctccacggagactaacaagcagccgaccggcgaaccgacctccacggagactaagaagcagccgaccggcgaaacgaccaagctacgccccggaggcgtgtcgtcggcgccaccgtacgattcgatgctcaggtccacgatgtacgagcggttacgcgcgcagaccncggcggagttcgaacccgcgagcgtcttcttcacgcacgatgagcgg

SEQ ID NO: 287798 - DNA, 303 bp, Zea mays
ctcgagcgattcggctcgagaaagcctatccagaaaatcggcaccccagcacgatcctgtacttgttatagaaaattcaggtttacaagatgctggtatttcacaaattatgccaagtgatgagctaccacaggtttctggtgagactgaaccatctcagagcacaaatgaaggcaacacggatccatataaatctcagttcacaatactagaggagcactatgctgtttcggaagaaggaaatataaaatgtattctggaacaatttgacgtgacagaaattactagcagataggtggtgag

SEQ ID NO: 287799 - DNA, 281 bp, Zea mays
gttgaaaagtggaagacattccagttctgcacttgaagaggcaaacaacttggagggcaatgcatacaggtccgtcataaggtgcgtcgagtcctgccagctacaatcggtgtttcctttagaggtcctgaggaagaagttagggaagttggagaaagagaagtctgagaggaagaaggcagctggtccaagcagattcccgaacaagcgatcccgaggcgcactaggaccctatccctttcctgctgccaaggctgctaggggctcaagctttggtccgc

SEQ ID NO: 287800 - DNA, 293 bp, Zea mays
cggacgcgtggcggacgcgtgggaagacgagaaggccacagcccacaaagcatgcccggcgagttggaaaagcgcagaatctgcgagacaagaaagcactaggaaggccgaaacagggagagaggttgcgtcccagccccacctgccatcgcctcctcttccgctccctcggcggctttccaggattcagattcagattgggggccctttgctgctgcgcggcaattctcgtcgctccagtccccacttcgctgttcctgagcgtggaggcgccggccggactcgcgatgggg

SEQ ID NO: 287801 - DNA, 264 bp, Zea mays
ctgcaccagcgggggaggcggcggggctgatgaaccggtgcccgtcggaatggtacttccagaagttcctggaggaggcccggctcgacagcccggttcccgtagccggcgccagtaggggcagcgttggagctggagttgaggctgcggagagcaagacaccgggggccgcggcgccggcggctgcctcgagctcggttgttgaccccgtggagtacaacgcgatgctcaagcagaagctggagaaggacctcgctgccgttg

SEQ ID NO: 287802 - DNA, 362 bp, Zea mays
ctcgcgctggcgcactccaaattcctcgcccccacgccggttcgaccgtagccaatctccccgcgcgcaaggctctccatctcgcgatccccaccccgagccgcgagcactttcccgggcgggggcgtatggcctgcgccgcgacgatgccgatcgacttactccccgctccagccccggcggaggaggaggtgaaggcggttgacgaggacgaggagatggtggtggaggtggagggagaagggtgcggcggaggggccgtggtggtggccgtggcggacgcggaggcggagggtcacccctacgactgtaacgtgtccgggccgcgcaacctgccaccgcccaactggaaggacataatc

SEQ ID NO: 287803 - DNA, 380 bp, Zea mays
atttcacccagaaaagagtggagctaccggactttctattctaaaagaatttctcagacctaactctcttgggaccaaggtcccagcacgtaggaaagcatcaaaacttgcgaagagagtgatagcatgccttgatgttcgttcaaatgataaaggagatcttgtggtaacaaaaggcgatcaatatgatgtaagagatcatactagcagcaaagaggtaagaaaccttggcaagccagtcgatttagcaagccagtactacatagacggtgctgatgaggtcagcttcttgaatataactggtttccgtgactttccattccgtgatttgccaatgctagaggtactgcgttgtgcctctgaaaaggtttttgtgccac

SEQ ID NO: 287804 - DNA, 309 bp, Zea mays
gggtgatatatgaagaagacgttaatacggaccaggcttgtgaggtggttagctttccagatgactgtagcaccattgatttcacaaattcgtcaacgcaagacattgcaggtggagacgaacaggtaactctggatccagatgatgacagcgattggttgcataggaatgcgacattccaggcaaacaacattgtcacaagtaaagaccttctgacaccaggcatggttgaacaagtagtggaccatacacatacgaagccaaagttcatttccaatggtgatgatgatgagggtgtcatattcgaag

SEQ ID NO: 287805 - DNA, 276 bp, Zea mays
ccccgccggagtttcgtttcatttgaataggcgagcggggaagcatctcgtaaaccacctccgcactccccaaccgccccgaacactcgcctgccattccgcgccgccgtcacctcgcgtcgccgtccggatctcttgggctcgtgtgcggcagggatccattgatttctcctctgcgaggatacaaccatggatatcactcaggttctgctagccgctcaatctccagatgctaaccttcgaacagtagcagaaggcaacctcacacagttccag

SEQ ID NO: 287806 - DNA, 495 bp, Zea mays
aataattactctctcgagaacttgatgattgatccttatttaaacatattgggcattgctacttgcgtgagcgttgattcaatatgtttaaataattactctctcgagaacttgatgattgatccttatttcaatcggattacttctttgttgcacaattgcagtgaagatgttaatgaacttgatgttaaacctgatgggtcatggcgtgtgatgggtgatgccgctaccagagatttatctcagtggcatatgcctgatggtactctttgtgactcaaaggaagatacaaaccctggtgtcgcaagtgttaatgagttcaagagagagggtgcttctgatgaacatagaactttgaaacttggaattaaaaaaaaccctattggattatggcaggttagcagtaaagcagatgatatgaaacctgtggttagaaatcacatccaaaataacactgggttttcaacaccaaacattgtgcctatgatcagtagc

SEQ ID NO: 287807 - DNA, 313 bp, Zea mays
gccttttgttagtcttggcagagatctaggatcgtcgacacataactcatcaggcgccggacgcctgggtagaagcaggagctgtagatcacttatgggttctaccatgtttgatggcatggagatggatgatggcacccctctgcatagaagtttggttggtttccctggaaggcctgaagggaatcatagaaggggatcaacaccgaaccatgacgcagaaagtgaaactctttcaagagcaggatccgtagtttcaaccaagacaaatgctgcatgcgatgcagagtttactggtataggtgaatttgtt

SEQ ID NO: 287808 - DNA, 325 bp, Zea mays
gtccgcggcagaatgagaccgcctctcccgaaccgctgcttcggccacgcgttgatcaggctgggcgtcactggtgcggttcaggacattgcttcggaggctttggtatccgtcgccggccgcacgccaagacaccatcgatcggatggacgacgagctcgtgcgttctgcggtcgactactgtgagatggccgagatggacagtcggcctgtaaagggcaccttgctagagacggagctgatgcttattagctggctgggcatgccaatggtacgacacggattttggatgggggaagccagcggtgatgtcgcgggcggagtc

SEQ ID NO: 287809 - DNA, 352 bp, Zea mays
attggtttcaggaacacaaaacacttggggaatgcatcaggattggctattataaccgtcatgctggtcacaacgtgcctgatgtccctggtgatagtcttgtgctggcataagagcatattcctggcgattggcttcatcctgttctttgggaccattgaggcactgtacttctcagccgcactcatcaagttcagggagggggcctgggtcccaatcgtccttgcttttatcttcattttgataatgtgcatctggcactatggcaccatcaagaggtatgagtttgacgtccagagcaaggtttccatcaactggctccttggtctcagcccgaacctcggcatagttc

SEQ ID NO: 287810 - DNA, 371 bp, Zea mays
ggcgcggcacgggcaggcagtccatccccatgtgtttgtcactttgtgctcgtcctcatacccccaccccccagctcccgtctcctcgtgctctccactgctgcatccgcctcttgtcctgtccccctccccaccttgttcctcccatcccgcgccgtctctgcacgaagcagagcgccggtccaccgacaaggacagctacaactacgacgcgcaggcagagccatcgctcatctggggctgccctcggttactcctcccctccgccgctgcccctgccttgtccacagctgttgttaattccttcatgagttggcgtcggcgccagcttggcggaggggaaggaggcggggcttcagcttccccggcgc

SEQ ID NO: 287811 - DNA, 293 bp, Zea mays
tctatccaccacccccgcccacatcaccagagcacccgaggcttgtcttccttcctctcacatccgtacatagaaaaaaaaagaagaaatagggataccggagccgaactccggcggaccatctggtattctggtctggcactctggcgtgagaaaaggaaactgaattgaagcacagatcgatcgagagaggcgaacggcagtcggcaggcgagaaagaagtgctgacgcctcgtttccgtcgcacgcactactactcgcccagtccgcagctctcccgcggatccttcacc

SEQ ID NO: 287812 - DNA, 350 bp, Zea mays
ccgagcgaaaaatggtaattgttcttgcatggacgtctcatctggagagttgaccagggacacgggcttacctcaaggtgaaaatcagcgaataaatttggaaatgcagcaagaaaatgagaacggaagacttgaaggtcctactgaaggatcactgggtggttctaacaggcacttaagcagtactggttcctttgttcaactcaatgatgcagcagatgagttctttgacgtgccagacgaatcagaatatgatcagagagaagttatgtttccttctgatgagagcttgcatgctgcggaccagcgtcacgctaaactgtccactgctgctgtttttgtaaaaaggt

SEQ ID NO: 287813 - DNA, 482 bp, Zea mays
catcatccaggccgcaagaaacgcctcctccggccctccctccctctcgccgtccgccgtcctcctcgccatggctctggactcggttcctccttaccccagcgacctgggctccagcagggccgccgccgccgccaggacccagcagaggatcaggaaagaggagcgcacctggacctcggacacgtacgctccgtacgacgacgggcaccagtggaggaagtacggcgagaagaagctctccaactcccacttcccaaggttctactacagatgcacatacaagaacgacatgaagtgccccgcgacgaagcaagtgcagcagaaggacagcagcgacccgccactgttctccgtcacttacttcaaccagcacacctgcagcagctcaagcgccctcggcagcgccagagacgtcgcgtcccagtcgtcttcaaagaaggcggtgtcgatctgcttcacccgcacgcccccttcgagca

SEQ ID NO: 287814 - DNA, 357 bp, Zea mays
  unsure (1)..(357): unsure at all n locations
ctcgagtcgagtcttgccgacctggggcctgctgcgcctggatgaagagcgtngtgagagaatcattaaagcagcaccgggtccttgctttgcgcgttgctgttcgcataaacaagagatcctagttctactcccaagcaatgtatccgtcagcccctccggacgcgtataacaagttcagcgccggggctccgccaacgggccgccgccgccggcagcgtaccaccagcagcagcagcagcacggagcgaacatggacacttcacgccccggcggcgggctgaggaaatggtccaccggcctcttccactgcatggacgacccggggaactgtctcatcacatgcctgtgcccctg

SEQ ID NO: 287815 - DNA, 250 bp, Zea mays
catcactgtgctttgctttgacttgatctgcctgtctctccagggagatggaacaaactactgtttgtaccggcccgttttgttttgcagctatgaaaatcgccgtattgaaaataagtccgtcttctgcacgatggaactgtttgttctttccttctcttttttaggattgttgggatgtttgtccggggttaacatagcaaaagtgatctcatcgacgataaataaatgaactgatggtttgattcgg

SEQ ID NO: 287816 - DNA, 270 bp, Zea mays
cgacaggatatgggtgtccgaggtttcagaatcagtttccagcagtggcaacggtctggaagatctgagctccgccgccgtctctcggccggccacactgggcctgctcctgcacggcgtgtttgagaacaccagcgcggaggtggtcagagagaaggacggcgggcaggctgttctgggaaccccgacagagagggcgatcttggagtttggactgaagctagaagcacgacgtcgtgatgctggagacaggagctgcaccaaggtcaa

SEQ ID NO: 287817 - DNA, 275 bp, Zea mays
cgttagttggtgtggccctgtcggtactgaagtccgtcggccccactcgttggtggcggatggggatttttggggtgggggccaaggtgaaattcagacatgggctgtgtacagctgttgtttttggcctgttgggatattagttctatattctgtttattgtgttcttgttgtagattcttgaagaatctacctccatataatagacaatagtgcaggcacaggtttatcaccgtggaataaaattgggtatatttggaattagggtttatata

SEQ ID NO: 287818 - DNA, 334 bp, Zea mays
  unsure (1)..(334): unsure at all n locations
tgactttttgtcttacctgctgcaaataaatcccagaaacagaccaacggccagcgaagtntgcaacaccgatggctttcgttcaaatatagttcaacggccaatcagactcgttcctgacaagtaggcaacactttctgaagctactggctcctgaaacaacatgtttccttttgcagtaggatttggcttcgtggtttttttaggtcaacacttggcgttgaaaaacctgttttgcaaggtgaatcgatcgtgtatatgcgctggttcatgcatgtaaatatgagaaaagtggttcctttttttttctgtacagttgccatgtactacagtg

SEQ ID NO: 287819 - DNA, 421 bp, Zea mays
gttggttgctgcattacgcacgtcatctgagctggttgtttcagaggatgggaaacatgttaaacgcttacagccctttaatgccgaagaagttcagtctcgtattgttgttgctgaaaatttacctgaggatcaaaagcatcagactctgatgaagattttctcagctgttgggaatgtgaaatctatacgtacctgttatccacaagatatttctccagcagcagccaacagaacatcaaggattgagatgatttttgctaataagcttcattcttttgtggagtattcagctgttgaagatgctgaaaaagcagttgctgaattcggtggtgggggaaactggagagaggggattagagttcgttcactgcttggatgtctgaaacatgggttaggtcaaggaagaaaaggtggggat

SEQ ID NO: 287820 - DNA, 278 bp, Zea mays
cccacgcgtccgtgatttctccctcatcctccgcccgcctcgccgcggccaccgcttcctccatgtccgcgcccgtgggccggcttctactgctggtctccgctgtcgcggtaggcctggcgctccccgtggcggccgagatcaagaaggagtccttcagggaggacccgcgctcgtccatcatgttcgagaaattcggcttctccaggtccggcgaggtccggatcatcatctcgggcgcctccgtctcctcccccgtcgcgcgggccgacctcaag

SEQ ID NO: 287821 - DNA, 295 bp, Zea mays
ctgatgtttatgggtttggcattctcctgttggaactgattactggtcctaaaaccttgagcaatggacatggccagtctcagaaaggcatgattctagactgggttagagagctaaaggaggacaagagaccggataagctggtcgacagggatctcagagattcatttgatattcttgagctggagtgttcagttgacgtgatcatccaatgcacgcagacgaaccctatgctgcggcctaagatgtccgaaattctgcacgctcttgaagccaatgtcacgctggcggaaac

SEQ ID NO: 287822 - DNA, 304 bp, Zea mays
cagcctccaggcccatgtgaaacggtggatggcccgccctacgcgacccgggttctgcaccctgccgtttcttctccattattcccagcgggcgcgctcgctctctctttctccctcccctcctcgtggcgacgattgggggcagtcgctgccgccgtacgccaggtgcccagatcttcttcatgcccttctccagcgacgagtatcagaagctgtttgtgcttttaaggatgcataagcgtatggcggttttgatggtatccattgtttgaacgatgggaggatagaagaccattctctgcat

SEQ ID NO: 287823 - DNA, 337 bp, Zea mays
cggacgcgtgggcgagacgcgtgggcaaacacaaagcagcatcacactgactccactgctctgcctctataacaagcacagaagacccccaagaagcagcagcgcaggagcgagcgatcgctatggctcagggaagaggcagtgcgacgcgggggcttgccctcggcgccctactcgccgccgctttcctcctcctcctcggcgtcgccgacgcggccacccacagggtcgactggtccttcaacgcggacagctggtccaagggcaagagcttccgtgccggcgacgtcctcgagttcaactacgacccctccgtgcacaacgtggtggccgtgga

SEQ ID NO: 287824 - DNA, 519 bp, Zea mays
ccagcagctcctccagacctccacctctctatggcgcgcctgctcctcttcccatcccaagcgtgcgtcgatcctggccgccacctcctcctccacccgccggtctccaggccccgtgctgtccggtctgggcctcctcccgccgcgccacgccgcaccggggtcgtctctcttcccggccgttgcccaccgcccctttgctggaaccaccatccatttcttccttgcagatcatcaaagagaggatgggtcgtttttgcttcagaaaacgtacaagaaatttcttctcaccttcctcgcaaggatgaaaggagaagtgggaatttgcttctgcgcttcagtgcactcccatattgcactatggcttggttgagcactgctcaattagcacaatctagtgttggggaaaagctaaatatggtttatgaggtcggggagctgtttgagctgggaattcagctgtcttatctgctcatacttattggactgcttggaactggtacattttttgttatccgt

SEQ ID NO: 287825 - DNA, 308 bp, Zea mays
cgtcctgttcgtcgcccatcctccgcatcatcgccagcggcagcgggcaagtcaatgtggattcagactccatatttcaggccctatggataagcaggagccagtagccaatgttgaacaaaagataggtctctctaggaagccaaaggagctggtcattactcattaccgaattattgttttttgtccttgtttaccgtggttacgctgtttgtcgtattttgtcaaccatctaccttagcctattgccaataaggatgagaatgcaactgtgcccttgatttcagttggttcagatgctatcgatc

SEQ ID NO: 287826 - DNA, 362 bp, Zea mays
cccacgcgtccggtgacacagaaattcgtaagggggaagggatggagttggaccaactctttcagaactcatgttcaagtgagaagactgcttacattcagccatttgacatggaaacactaggacaagcatttcagctgcgagaaactgcaccagtagacttgccttctgctgaaaaaggtacaccaaccatatctgggaaatccaaggtcaagtccaaggataaagtgaagaaacataagaaacacaaagagaaagatagagacaaggagaaggagcagaagaaacacgtaacatcggcataaagatcggagtaaagataaagataaagataaggacaaagacaaagaaaagaaaaagga

SEQ ID NO: 287827 - DNA, 253 bp, Zea mays
cggacgcgtgggtcatttacagcttacaccaatttcagaacactctagattcagaactattccagacagcaaggctgtcgccatcatctttgagatactacggtattggactcgagaatggaaactacacagtcacacttcaatttgcagagtttgactttgaagattcacaaacttggaagagtgttgggagaagggttttcgatatctatctccagggcgagcgtaaggagaagaactttgacataaggag

SEQ ID NO: 287828 - DNA, 182 bp, Zea mays
tgtttttcttctcccgttcacctcgcgtgcgcgacaactagggcgaccgccgacgctctacgtccagctgcccatgtcttcgtcgggctctttgccggcgacaggtacccacaacaccaggtcaacaccattgcatgtaattcatattttgggaaacttcatgaggatttggtctgtttact

SEQ ID NO: 287829 - DNA, 288 bp, Zea mays
gttaattctccgctctccatttattcctttccagttccgccgctccattcccagctcccaccaccaagggcaatccctctccgacatccaatccaatacaatcacgcctgcgcacacgcaaccccagctcaagccccaagtccaaaccctaacccggcggcggaagatatggccgacacggggcgcgacgccttccctgacgaggcggacccgcgttcaccctcgacgagtacatggaggacatcgaggccgtggagctggaggcggatttggtgctgggcggggacg

SEQ ID NO: 287830 - DNA, 213 bp, Zea mays
gttgcttgtatgctttgcaggatagctaaggaaaaggacattcttgcactgggacgacaacaaaggaagcgcacggagctgggcaattctcagtttagatgctcaagttgggactttggtgggtttaggttatggtcgtcaaaatgcctcgtatttgctaggcagagctgttctttggatgttgttggctgtggtgattgagaaggaataaat

SEQ ID NO: 287831 - DNA, 329 bp, Zea mays
caccatggccgcttctgatgaccatgacccgaagcgctgctgcaggtaagggtgagcgatgaggatggtgcgctggtggacgcgctcaaccgtcgagctgctgtttctgccgccgcccccagcttcttcgaggggttcgcgctccacgggatccgcgtggagagcatccgcccaggccacatcctctgctccttcacggtccccgcacgcctcacctccggcagcgatcacatagcccccggcgccgtggtggccctggtggacgagatcggctccgcgcctccgtgtccgacggccacacctcaaggtctccgtcgacatgtccgtca

SEQ ID NO: 287832 - DNA, 266 bp, Zea mays
caagaagttattgggtgaggcaaaaggtctagacgatgttgtcaagattttaaatgaaatcactggtagtctggatgcaaaaaaggcatgcagagaagcattgcagattcacgagaaatatcttaaaacggtaaaagcatcataaggacatgtacagcttcacttggatgggctatttatttattttttggactagagaagatataccacagaacttttgttatcctttgtttgtgtattgtgtaattctgacacatttgtaacat

SEQ ID NO: 287833 - DNA, 245 bp, Zea mays
cgtccgtccaatccatccattcatctacacacgcagttgcagcacatacagctagctagctcgttactgtttttgcagctgatctgatcgaccgacgcgacccaccgatcacgatcatgagctaccaagcgggctacccaccgccgggccaacaggcctacggcgcgcctccgccggcgtacgtcgcgccaccgccggcgtacccgccaactggccaggacggcggcgcggcgtactacggccag

SEQ ID NO: 287834 - DNA, 353 bp, Zea mays
cccacgcgtccgcggcttcgtcgtcatggcggtccacatcgcatgcggctacaggtacggggcgctgctgttggcctatcttcttctcctcgtccaaggtaaccaagatcggggaggaccacaagcgccgcatcgaggagaacttcaaggagggcgggcagcgcaactggatccaagttctagcaaatagcacaattgccactgtactggttgtgatatttgcactaatgactggagggcaagatcagtgcatggactcaaatggttcaaagcttataactggcatcataggtggtatcattggccactactgttgctgcaatggagatacttggtcatctgaaatcggtgtg

SEQ ID NO: 287835 - DNA, 287 bp, Zea mays
tcactcgtcctcccacgcgtccggccatgcgtccgcccacgcgtccgcccacgcgtccgcccacgcgtccgctgatgtcttgagagaaaacactgaagcagttttcgcggcttgtgatgctgcccatggacgatgggctaagctactaggtgttcgtgctggattacatcccaggttaaggcttgcagaattcttgatcatctacagcataacagaagaatttatagctgctacagaaaagattggaggcaggttgggttacaacattcgtggaatcctacaacaac

SEQ ID NO: 287836 - DNA, 448 bp, Zea mays
cggacggtggcggacgcgtgggaagaaaatggcaaaacgattgtcaaacctacaagggctgggtcaagcattggcgtagttgttgcttatggtgtgaatgatgctgcccagaaagctgaggaaattatttcagagggaattgatgataaagttatcatagaggttttcattgaagggggcactgagtttacagccatcgtggttgatgttgggattgctaacaacagtgagcctgttgttctgcttccaacagaagttgagcttcagtactccaacaatagtgataccaaggaggacacaatatttaactaccgcaagaagtaccttccaagtcgacaggttgcttatcattctcctccacgttttccggcagagctgaaaatagtgacaaatttggaaataccaagtatggaagtgttcttttcacggatatcaatttgataagtgg

SEQ ID NO: 287837 - DNA, 278 bp, Zea mays
gcttcatcgcgctcatccttgccctcctgggcttcccgagggagaagcgttagatgggccttctaactgggcccagtacaagcgttttgttcgtgttcgatggatggcacagtatatacactgccatgtgctgccaaatagatccaaaccgtgcttgtgttacacggctgtgtaatgcattatattgttgcattgacatgtgggttaccgaattgtacgtaagggagttgcattaataagtgtggtctgcctgtcaattatcaagtgttcacaatgga

SEQ ID NO: 287838 - DNA, 316 bp, Zea mays
agcacaccgtgtggcggcacggcgcgccgccctcgtacgacgccgtgaacgcgctcttcgaggccgagcgcacgcaggagtggccggcggggtcgctggaggagatcgtgcagaacgcgatcaagacgtgggagatggagctgtcgcacaaggcgcggctgtcggacttcaagtccgtgagccccggcaggttcaggctgtccgtgaacggcgggcgggcccggagcggggaggagacgctggccgtgggcagctacaacgcgctgctggacagcccgctcctggcgcgcgcgggcgcgtacgacgcctccgccga

SEQ ID NO: 287839 - DNA, 380 bp, Zea mays
catcagtcatcacgcacgcaggcgttcagtcgataggattcaggctctgaataacccatgcagcctagcctgtcatgttcccagtatctgaactctacctgtctgaggaaatcatccacggacggtagaggactcagaagagagcatggggagagacggtggtgatggtgagctcaagctgctggggctgtgggcgagcccgttcgtagcgagagcgaactcgcgctccagatcaagggcctaagctacgagtacgtcgaggaggatctcggcaacaagagcgagctgctgctcagctccaacccggtgcacaagacggtgccggtgctgatccacaacgggacgccggtctgcgagtcgacggtcatcgtccagtacat

SEQ ID NO: 287840 - DNA, 371 bp, Zea mays
aaagcatccaggtacatgcaatagttcccatccctggtggaagtgttgttaaggatattgttttaagccgggatggtcaatatctgctgacaaattctaatgatcgggtcattagagtctaccgaaacattctacctgttaaaggttctagagaggagatcagaaacataagcagcaacagtaatgaatatggaagtcactacgataaattaaaagcaaatggtacaagctgccttattctttcctgtgaacttttggatgccatcacaaagatacagtggaaggcaccatgtttcagtggtaatggtgagtggatagttggtgcttctgcaaacaaaggagagcacaggttgcagatatggaaccaagca

SEQ ID NO: 287841 - DNA, 343 bp, Zea mays
gttcggcctggacggcgtccggggccctcccctctccggctccggcttctacgtcaggagagacgcgctttacggggccacaccgaccgcggacttcatgcccgatgccaccgccgtcgccgagctcaagacaaggttcggccactccgaccgtctcgtggcatccttacgcagccccggcgttccaccagaagcagaagcgatgatgtcccttgcggcgctggcctcctgcgcatactatgccggcaccgcctggtgcgccggcgtcggcttcatgtaccagtcggtggtggaggactacttcacggggttccatcgcttcttcgcccggtggtggacctcc

SEQ ID NO: 287842 - DNA, 500 bp, Zea mays
caagatatagaatgcagtgttagtttggatcgtgtgctttcagagcctactgctgctgataggaagtttggactcttatccgaatgtgatcatcctttctgtattgaatgcattagagattggcgtacaatgtctcctgcatctggtatggatgtgaactcagcattgagggcttgtccaatatgtcggaaactttcatactatgtcattccaagtgttctttggtacttctcaaaggaagagaaagaggagatcactgaaagctacaaatccaagctcaagtctattgattgcaagtacttcgactttgggactggctcatgccccttcggaacaagttgtttctataagcatgcctacagagatggccgcttggaagaggtaatactgcggcatcttgatgctgatgatggaagtacagtaattgcaaaaagtatcaggttatcagacttccttggtaggatggatctttagggaccagcagctgtattgatatcaaa

SEQ ID NO: 287843 - DNA, 411 bp, Zea mays
caagaaactgcgagattgatgtatgagcaggaaagtggcctgtttgattttagacgaacagaaaactcttctttgttgttggtgatcgacagaagggatgatcctgttacgcctttacttaaccagtggacataccaggctatggttcatgagcttattggaatcgagaacaacaaggtggaccttatgggatttgctaatattcctaaagaccagcaggaggttgttctatcatcggttcaagacgatttttttagagctaacatgtttgagaactttggggaccttggtatgaacctcaaaagaatggtagatgattttcaacatctttccaagagcagccttaatctccagagcataggtgacatggcaaagtttgtgagcaactatcctgaatatcgaaagacacat

SEQ ID NO: 287844 - DNA, 430 bp, Zea mays
aacaaacgacgtctgtgcgtctggcgttcggcgccatatttgcttgtctccgtagctacttttctttctggtgtgtcctctgctcgtgagcgcttgtgagttccaacatttggtatcagagccagtttatgcccaagatcctgcgctactacctcgagtccgagtccatggcgatggttccgcacggcgccggggggagttcggtctccatgtcatacccggtgctgtcgccggcgagctacacggcgtgggcgatcaaggtggagtcgatcctcgacgcgcaaggtctctgggaggccgtgtctccaccagataatggcgaggtgaacgcggtgaagaacaagacggcgcgggcacagcgtctccaagctctgcccgatgacatcttgatgcaggtctccacccagaaaacggcggcggaggtgtgggc

SEQ ID NO: 287845 - DNA, 375 bp, Zea mays
atggctacatatggtgttctacctgctgctaatattccaccgccttatgcactggcctctatatcatctgttcaatttgattgttatggacagcggtttgccactgctgcattagatggtaccatttgtacatggcaagttgaggtgggtggaagaagcaatgtccatcctacagagtcatctatatgctttgacagccacgcctcggatgttgcctatgtgtctgcaagtagatcagttattgcttctgctggatatagttcaaatggttcaaatgttgttatatgggacactctgtctccaccagctacatctcaaacatcaagcatgtgtcatgaaggaggagcccggtctaattctgggtttgatagtgat

SEQ ID NO: 287846 - DNA, 361 bp, Zea mays
gcaaggtcaacatcatcatggatggggaaggaaaaatgctcttacaagggaggcggtggcaaaagttgttgatgacacatacaggaaaatgcaagtatgtgctcctgaccttccctctagaagccacagtggatcagatttcagtcatttcaggcccaaagaggaagcgcctgacttctaccatgtggatactaaggtccgctgcctttgcaatagcacattgctaaatgacaatatgattaagtgcgaagatggcaaatgccaggtgtggcagcatattacctgcgtactcattccagataagcccacggatggtgctggccctgatattccacctcattttattgtgactgtgccgact

SEQ ID NO: 287847 - DNA, 312 bp, Zea mays
gaagcttgtggcacagcacggggaaatgcagaagctggttatagagaacggccggcttgctgcaagccacgcctcgctgaggaatgagctagccgcggcgcagcaggagctgcagaggctgcaggcgcagggggaggccgcgaaagccgctgaggaggaggagatgaggggcctccttgacaaggttgggaagatggaggccgacctgaaggcccgtgagtccgtgaaggtggagctgcagcaggctcatgctgaggcgcagagccttgtggccatgaggcagaacatggtggcagacgtgcagaagctgag

SEQ ID NO: 287848 - DNA, 447 bp, Zea mays
ggagagtgaagcaagacggggagcggccgggagcagtgcatggtgtggtggtggtggtaaaaggacggggattggacagcgacgctgatcatttatgccgccgtgtaaatacccaccacaagcagctagcttcgcaggtcggcttccacatctctctcattctcgtctccccccactgctagctgctgcagctctcaagctagctggcagctagggtttacaccgatccggggtccggtcgccgccggccggcggaagcgggcaatcgagctccgcgacgtcgagatctgcttaattgctaggtggtcgccgcgccggcagccccggcacagagaaagtcaattgctctttgcaggggttgctgctcgttttaaaagagatcctctagccagcagggacaccgcgagatggcgggcgccgtcgggctaacaagacgatgataagggg

SEQ ID NO: 287849 - DNA, 284 bp, Zea mays
gaaaagacccaaacaatgttcaagattatgttcagcgccatctattatcattgtcagtatgggaggagcttcgcttctgggatggctacttcgaatatttgatggaaaattgttcaaataagtcagcaaattatgtaacgttagttactgcacagctcattctcatggcaactcacatggctggattgggattacctgacattgactcttggaatatgattgagaaaatagccgagagaaacaacttgggttataaacagctgtatcaaacttagagcattgct

SEQ ID NO: 287850 - DNA, 257 bp, Zea mays
gctggtcgctggagtcggtctaaagaaagaatggaggggacgttgctgctgctgcttggcctgctcctcgtgctacccctgctcctcgtcaaactcgttgtcgtcaacaagtacttcccggccgcgccatggcagcccgggaagccgccgctgcgtctgcctccggggccacggcagctgccggtgatcggcagcctccaccacctcctcgcgtcgcgccacggcggcctccttcaccgcgccatgcggagctgtcc

SEQ ID NO: 287851 - DNA, 473 bp, Zea mays
ggttataaaagacgataaaatgctgtctcaagcacaacagaaagatgcatgctgcaaggtttggcactagaaaccttcataaccgttctccatcgctgtgtgacgtaagtctttctggtgactgaaggatgaaatattgaagttatcacctagcaggttgcatctgaattgtgtcgagacagacattgggcacttgagataaacttttaaggttataaaagacgataaaatgctgtagatgcttcattcggcattcaggtccatctgatctctcatttatttattccaattcagtcgatacgcggactattgatccatgaaggcaatcgtggtggaaccatgtgctgatgagacatggttcatggaccggttgagtttaggtttcaactagtgaagtagttggagtttgttagcagacaagcaattgtatgcatgtggaatgctatcttggatctgcaagctaactaatcata

SEQ ID NO: 287852 - DNA, 384 bp, Zea mays
ggctgcattgcaggcgaaaataatggcataggaaactcttagctcttttacatctgtaatgtccatgcatcacgaattggtcaatatgatgtcattagcagtccgccgatcttgtcaagttcaacgccagcatcatccctgaaaattaaggacaagagtcatgccccaggttccatcatttctgtggcacgggaggctgctagaaagagggttgaagaggcatctgcagctgcaaaacgtgctgaaaacttggatgccatattgaaagctgcagagcttgccgcggaagctgtgttcagggcaggaaccattattggaatgggagaaccactaccttttaccctaagagcgcttttggaagcagggccaaatggctattggaag

SEQ ID NO: 287853 - DNA, 328 bp, Zea mays
cccgaaatggacacttgaatgaaacccgattcacaaaaccctagcgacctcgattcctcaccagcatggccgtcggcccctactctctcggcctctctccgccgccgcggcttgataccatcctcttcccacagctgcggcctcacctacgccgccgcgtgcctgctcgggttgctgcagccggcactagctggtctcccgccgccggtgactccgaagacggggtcggcggctggtggtttcccgagtacgagaaatcgatgaaacaggcgagggggaggattgggtttaagagagctgtcgtggttgggttgggagcttctgcggc

SEQ ID NO: 287854 - DNA, 310 bp, Zea mays
gtctacaccgaatccatcccccatcgccgccgccgccgccgccgacgacgacgatggcaagcctactccggcgatctgccgtacccgcgcgccactcctcctcctcccgcgccatttcgccgccgccggctccgcccccgccttgtcccgctcgttctcccgcttcaacccccgagacgacagctctatgttcgatccaccggagccgccggtgaactgcggcgtgagcatagttccggagaagaaggcttacgttgtggagagattcgggaagtatctcaagaccctcggctccgggttccacctcctg

SEQ ID NO: 287855 - DNA, 388 bp, Zea mays
gtctagatcgccagctgccgccctttttttttttttttttttttgtgttttttctctgcaactcagatatttcatagtcgaaagtttcaaaaaatgtcaaaacttccgaaatccacagtaacaatcttttttaacgaatatggtttgaatcctgtcatgtcagacggccactcagtatagcagatgcttgtgtcacggccctggctactctgttgatctcatgctgtacaaacttccaggactccgaagtgttgctgctccgggcgctggctatggcattggctatacctggatagactgcagtatcccagtcattctggtgtatggaccttcagaccagaatgactgggatactgcagtctatccgggcgctggctatggcattgac

SEQ ID NO: 287856 - DNA, 369 bp, Zea mays
ggctcagcctgctgcacccggacgccaaaggcctcgtcgtctggatcatcgaagccaaggttctgtccaaggctgagctgcagttcctggccatgctcccggacatccgccccaaagtcagggtgatcgcagaatgcggcaactggagaagctttgtttggaagccactgaagcagatcgcaggcctcgagccggacccggacgcggaggaatgatcaagcaagcaggtctagctagttgtctaccagactggctactgctactgctacactctccaattgcttctggacatctctccctgccattcctgcagcttcgcactgaatgagagaggcaattaataaagatatacatacatttttttggcaa

SEQ ID NO: 287857 - DNA, 503 bp, Zea mays
gccagcaggaggagtagcttcaggacattggaggagggacacatgcttggcccggtgggtgtcaaactgaagccggccaacttgctgatgcagcttatcacgtgtgggttcgtgtctgtgaaagaacaccgaggcttcgggttcatcccgacgtacaggcctcggtttacgcaggtcgagttcccttctccggtgttctccactcccgtggcgttgcggcaccttgacagaatcccttgcaatacaaaagcaactgggtcgacgagagctccggagccggaatgtttcagcgggagcttggttgttgagacgaagcagcaggacgagcccgggagagggatcgcctcactcaaacgctcgtcatcttacgacgaggatagagtgtacagagcagcacatcccaaaagcgacacggaaagctcctgtgagccaggtagtttcaggtgcctcgcacagaccatcaggatcatatcgtgtaagcagtcgaggagtggaacagtact

SEQ ID NO: 287858 - DNA, 498 bp, Zea mays
caacagcagaaagcaaaagaggaatctgcagctcagaggctgaacaaaataaaattggatcaggagaatcgtgtgcatacattgtggaaggaagtggaccattgtgtcaaaatggcagaattaattgaatacaatttagaggatgtagatgcagcaattttggctgtgcgtgtttctcttgcaaatgaaatgagttgggaagctcttactcgcatgattaaagaggaaagaaaggctggaaacccagtagcaggacttatcgacaaactaaattttgaaagaaattgtatcactctactcttgagcaataatcttgatgacatggatgaggatgaaaaaatgcacctgtggagaaggtagaggttgatatagcactttctgcacatgcaaatgcaagacggtggtatgaaatgaagaagagacaggaaagtaaacaagagaagactatcacagctcatgataaggcgtttaaagcagctgagaagaagacacgccttc

SEQ ID NO: 287859 - DNA, 320 bp, Zea mays
gcattatggccagcttctccttgaaaccacagcacaatggcagcagcagcaggatctaccatactatctgtagtgctactgcctccgaatggaggtcgctcctgcggtcccgaagcagtgtttcatggagctggaagaagcacacaaggttgcgattgcgatgctgtcagggttccaatgggggtgatgacagccgtctgagccaaaacaccggcattttccacccatcgatatggggggatttcttccttggttgctctagcagccctgaagaagctgctgcttcgtcccaacaaaaggcttggatggaacgatgcgat

SEQ ID NO: 287860 - DNA, 278 bp, Zea mays
cccgcgtcagtccttccgcgccgcaatcctccgtccatgccaggtccaacgccgtcttccacgccgccggcggcagccgcaaaccccagccacaactcgaggcggaagcggaagcccaggccgaaaacagcgcccccctctgccctaaatcctaactgggcgctgctccagtccaagctcccccaccgccccgctgcgacccacctcggcaagcgcaagcaccgacggtgccactccggcgcccgcggagccgtctccaccacccacagcgcaggagg

SEQ ID NO: 287861 - DNA, 446 bp, Zea mays
acccaatcaagctgtctccatgttgaaacgcccaactctaacagactatcaaagtgcagagtctgagcaactaatgaagcgcttgacgcctggtggacatggcattgatgaggccacatatcctgctcccatccctcaacctgcatggtcagtggatgatcttccaaagacagttgcttgttcattgtcacatggatctaatgtaactagcatggattttcatccaactcggcatacactgcttctagtgggatctgctaatggtgaatttacactttatgagatcggtctgcgtgaaacattactttcaaagcccttcaaaattcgggatataaatgcatgttcaccacaatttcagaatgctgttgtcaaagattcctccatatccattaatcaagttacctggagccctgatggagatatgattggcgttgcattcacgaaac

SEQ ID NO: 287862 - DNA, 313 bp, Zea mays
ctcggcgagtccggccgcggacagcgcacacgagcggcgatccgagggcgatcggaggcgggcgggcgtagacgccggcgagatttgtgttggtgacaagccatgaacagcgcaaccaccagttgttaagtaaccctcctgtaaacttgaagcaaccgaagcggagagcagaaatggtgttccaaaagaggtcctcgtcagagttggaggcgtccggtggaggccaagtcgcggagatgccgcgcgttcccaagtctgcgaggggcaagagatcggtcaggaagaaggaggcccagaacccgccccagatgtc

SEQ ID NO: 287863 - DNA, 389 bp, Zea mays
ctgtagttctccgctctccgcaacttgggagttcaaacccccccgcgcgcgctcggacctgtgtctacaagcttctggatccgtccctggcgccgatggagcggttcgactccaagttccacgagaagtacactgttctcaagaagaggaagctgctagacgaggggctagagcgaaagcgaagaggcggagctcaaggagctttacgatgccatgaaagattgggtcagcgaactcaagaaagacaatgcggagctcaacgataagctaatggaaaagcaggatgagctcgagaaggcccgtcaggaattccttgaagatattcgtacaagggacgctgaaattctgaagctgaagcagctcttagatgagaaggctgaaaaaaacaa

SEQ ID NO: 287864 - DNA, 491 bp, Zea mays
aagctcaactcacagctcatcatgtacctcggaccagtacgtgcggtgtgccctttgcccctagataattgtattaatgtatccgactgactgacttactgactgctgagcagaacgagaggacggcgtacgaagtcgtcgtggaggaaggccggctcctgtacaggcagagcggggacccggtgagcacgaacgaggagtccaagtggatcttcgtgctgagcaccagcaggtcgctgtacgtggggcagaagcgcaagggcaagttccagcactcgagcttcctgtccggggccgccacctcggccgccgggaggctggtcgccaaggagggcgtcctcagggcgatatggccctacagcggccactacctcccgaccgaggagaacttcagggagttcatcgccttcctcgaggacaacaacgtcgacctcgccaacgtcaagcgatgctcggtggacgacgacgagttcccgtcgttcaagaagccg

SEQ ID NO: 287865 - DNA, 391 bp, Zea mays
gcttctttctgcttgggtgccctctgccctgaccacagggcccaaccatatcttcttcctcacacagagacactgagcgagcgagcttgagatcgatctcaggaggcggccggcggcggcagcagcagcagagcttgttggcgccgccatggcgataggtggcttcgtggaagcccctgccggcgccgactacggtggccgcgtgacgtccttcgtggtgctctcctgcatcgtagccggtagcggcggcatcctcttcggctacgacctcggcatctcaggtggggttacctccatggagtcgttccttagaaagttcttcccggacgtgtaccaccagatgaaaggagacaaggacgtgagcaactactgccgcttcgacagcgagctt

SEQ ID NO: 287866 - DNA, 337 bp, Zea mays
aaaatatccccaaccacacgcgaacgcgaagggcacgcgacggctatggatacaacattcttctctccggcgccgatctactccggtggccgcttctcaccgatctactatctttcacttatgttctaccacgacaacaacgattgctgcttgctgctggccatagtgcgcgaggcctggtcatgcataaacaatggtgcatgtcatgaactctttaaccgtagggcatttcagtgcattggatggattactagtcctgtaatgaaacctgtaataatggtgcttctatgggactgctgcaagacatcacttgtctgctctttcttgtgtaactgat

SEQ ID NO: 287867 - DNA, 353 bp, Zea mays
ctagttctagatcgcgcaccgccgcccttttttttttttttttttcttcctttttttttttttttattcggtcaatcaaaacaatcatataaaaaccattatagcactggtatacttgccaggtaatgtacatggaacaacattgatcaggctggccagtaaccggatatagcttgtgattcaggaattgctcacatccatcgagagtttgacaatctcgtggaatggacgagctcaaggagtgcttagaacacaaaaaggaattaaccaacttttgtgcattgtcttaatcggctgccatgaatgggtcaacatcaccaagatcagcaatcaggggctccaagtcttcaggc

SEQ ID NO: 287868 - DNA, 417 bp, Zea mays
gtcggccgtcgccaactcgtctgctcagcccatctgtatcacgattcccaagagcttgagctccaagtacccggcctgcgcccacggccgggcccaggaaccgccgttctgctgcaccggcggcggaagaagagacggatagcgtggggatccggctgatgcgccggcggcaatgggcatttgggattccattctccccggcggcggccggcgcttcatcaagcgcaaggacagcgacgccggcgaggcaggtcgggcactagaggaactgaggggctcactgtacaacgactttcatacttcagaaggggccaggcgccagccgcagaagctttgtggccctattgttgcactgacattcaactttgtggttgctgttgggattatcatggcaaacaaaatggtgatgggtgctgt

SEQ ID NO: 287869 - DNA, 394 bp, Zea mays
ggtggattcattagagaactgcgtggaaaaaccagctggattcaaatgtgaatgtcctagttgtgacgaggcacgtgatctaaacgaacaaagacggcatgaaaattggcaaatcaaggtctgcaaaagaatatctgctgagacagattttcctaacgaggagatcattaaattgtatctaagcgataacaatctggttgaaggtaacaaatagatgtatggtccaacacattagagaacaacattatgcttatttaagtgcttattgagttgtagtttttttctttggtcaaggttccaaattaccatttgtttatagtcaaaatctaaattcttgacctgtttgcagaacagggtgttcccatgcgtagttggagtaagcctgatgttgaag

SEQ ID NO: 287870 - DNA, 402 bp, Zea mays
gatggaatgctcccatgacgtgtaaggccttgagcagggtaaggggctctaccaccaccagcaacaggtggtggaaatgaggtaaatgaagaagtctttggtaaaacgataggttcacttgaccggtcccgcagtcgctgctgagggtagcaagatgttcgacttagtggtctggagttggaatccccttgctgcactgaacaattggatgaccaccatcttttactttcccgggattcctcattttcaaatacatcttgatctaccctctgcggccactccagcaccggtcaagtgaacctatcgttttaccaaagacttcgtcatttacctcatttccagcacctgttgctggtggtggtagagccccttaccctgctcaaggccttacacgtcatggga

SEQ ID NO: 287871 - DNA, 314 bp, Zea mays
gcaagcgtccgcgacctggcaacccaaaccagcggctggcacggacgccggcgagccgcgcggcccggaggaccactgcctcctgcatatagccggcttccgcggccatgtcatccgtacacttctttcctgcctcctcccagaccccggtccccgcctgccttctcaaaacctctccaaagtcacccctcccgtgcccccgcacccttgccaccaccgctctccagagtgttggcggcaattgcaatgcgtggcaccgcccgcacctacggctgcagcggagggtccgcacccctgcagcaccgtccgacgcg

SEQ ID NO: 287872 - DNA, 435 bp, Zea mays
aacagaagtcctgaattaaatatgctctccgttccagtgaatttacggcaggaactgcatggcttgcctgaagttgattctcgtgatagttcccctttgctgcataaggagaagactagtgaagaatgctgcttttctttaagcaacaacgttgttgatgtgtttcaagagctggaaatccgtgctgaccttgttccacattcttctattaatgaaaaagtagatggattagatgaggctgtaccggtggaaccagaggcccatcgccgtgccttggatgaatatgacaaccaagatgtcccacacatttcaactagtgagaagaatgaaacccttactttgggcaaacctgttttagtccaggggccagaagtttgtgcctttggtggatttgaatgtgatcctccaatcattccatcaccttcagttgatgag

SEQ ID NO: 287873 - DNA, 331 bp, Zea mays
agcggacttccgtgacgcggtgaggaggacaccattgtgttcagcctcatcgagagggccaagtacccgctcaaccggccggcctacgaccccctccactccgccgccggccgcacgcctcaatcgcctctttcgtcgagctcttcatccgcgagtccgaggccgttcagtccaaggccggaaggtaccatagcctacaggagattccattcttcgcttacagagttccttctgctctggcgcctccatacaacttcacaagcgatctgtatcccgccgccgcgtcagtcaacgttaacgacgccatatggagcatgtacttcgacgagct

SEQ ID NO: 287874 - DNA, 454 bp, Zea mays
tagttggttatacagttcctggtggtgattattgaaattgtatttaactattttacaatatttagaaagcctatttggtttcaatagagttcatgtatcttttcattcttgatgaaattctggtatagagtttgatgtttgaaccacccaaatgtaactatgtttatgaactagcgagtgatgttttagtcaaacatgaactagcgagtgataaatattcgagaacggaaatagtattatataattcagtaaaaccatttgtagtacaggaacaccatatttgtttgataaaccacataaactaagaactgaaacgaagggattttaccaaagataataaagagcacaaaatgatttaaagaataaggtgtaaaatcttaccaaagaaaaaaatgaaactttagaagattaaaaactatgcttctgttttatcagattgggtggggttactggt

SEQ ID NO: 287875 - DNA, 319 bp, Zea mays
atttcttttgcccgcgcgataggaaatattctagtgggttaaggactaatcgctcatctggagttcgatattggaaagctaccgggaaggacaggccggtggtatataattctaggactgttgggatgaagagaactttagtgtttcatcttggcaagccaccacgaggtgatagaactgactgggtaatgtatgaatataggctggaggacgaggaaatagctgcttctggtgttaaactggatgcctgcgttctatgcaaaatctttcagaaaagtggcccagggcccaagattggcgcacagtatggtgccccatt

SEQ ID NO: 287876 - DNA, 491 bp, Zea mays
agcagcgcagacccctaccctcgctcgcgtctccctatccattcccaaataatccccacctcccgctgctgctccgccgcccgccatggcctccctcacctcggcgtccacttcactcctcttcccgcagcctcctcatccaggagccgcatccgtctctccacccccctgggcttctccgcgcagctgcgcggctgcggagccagggggcggcagtgggcgcgcggcggcgcgggcgcctgctggtggtgcgcgcggcgaggggcaagttcgagcgcaccaaaccacacgtcaacataggcaccatcggccatgtcgaccacggaaagaccactctcaccgccgcgctcaccatggtgctcgcctccgtcggcggcacgcgcctaagaagtacgacgagatcgacgccgcccccgaggagcgcgcccgcggtatcaccatcatcaccgccaccgtcgagtacgagaccgagacccgccactacgcacacg

SEQ ID NO: 287877 - DNA, 356 bp, Zea mays
tcggaatcggtcgactcgagcgcaacttccaccagacccctaaccttttcgcagctccagcgcacagccgccgccgtttcttcatcttcttcgcagagccggcgctccatcttcggctccctcccttacttgcgctcggcacgcgggcggcgctgtggctcgggatctcagtgacggcatcaagggcttcccctcccgcctctcgccagtcgcctccggtcctccgcacaccggccggtgatctctctcctcccgcctccggtggatcgtcaacggcgcccggccccggcggctgcgtcgcgcgcgtcctgagggcagctgcaggcgctgctcgaccaaggcggtcgcgccgcttt

SEQ ID NO: 287878 - DNA, 300 bp, Zea mays
cagaagggcttcagtgaggtttttggacatggattcaacacaaaacttagcagtgctggacttcacgcgtccgacttcggcaaggagataattgctaaggagcttggggttaatgaggatcatgaagatgttcactgtttgtatctcgcgatatataaaagctttgttgaggcacttgatgcgattgacaatggaatcaatcaatatgacacagatcaaccgccaaagtatgtgaacaatacacacttgtcttcacgcgttggacgctttaatctggactggactgatccagaccagtca

SEQ ID NO: 287879 - DNA, 338 bp, Zea mays
gacagctcgctcttcccggcagtaacagctcaaggttctaggtctcggtcggcgatggagagggagtcgaggtcaagggtgctctcggagacggcgtcctgcgccggcacgccgaggtcggttcagtcgacttgcagtctccagcgccggtactcttcacggagcgattttctgcattgtttcagttcggcagcctattaacttcctgctgtacaattcaaccgtcctcttcacgccgcatcgaattcctttgggccacaagtacagtacccgctagctgtagtgtagtccactgcccggagaccatcctcatgaacaccggttgacaatggtgccag

SEQ ID NO: 287880 - DNA, 337 bp, Zea mays
gtatgacgcaatcactgtgaatggtgaccttgattggcaggataagctccacaagtacaataagccattctttgatgtatgtgatgggctattttctaactatacatggccggcaaatgacccacaagattcagctacagttgctggcgacagacaatatgatgtatacatgggtattgatgtttttggacgaaatacatttggtggtggtcaatggactacaaatgttgcccttgatctacttaagacagttgatatctcagctgccatatttgctcctggatgggtatatgacactaagcaaccacctgactttcagagagcgcagaatcattgg

SEQ ID NO: 287881 - DNA, 318 bp, Zea mays
cagctcccactagaaaagcacatccaccttctctctcttcaccagcctgtccccaacaatgcacaccaacatccactctctcgtcaggctcctctcccccaaatgagcgctgagttctgcgctgctgcgggtgtcgtggccatggagctcggggtcggagatgcgctggggctgcagcaaggcatcgcaatcaccgcgccatcgcccagggacagcgacctgggtcttctcaagcgagcaggcctcacccaggctgcggctgctgccccctacccctcccccttccttgacgaggagaagatgctcaggttctccaag

SEQ ID NO: 287882 - DNA, 305 bp, Zea mays
ggtgtatgaaattaattgtgcacggcataatagagaagctgactcgcctattacaattttcaaagagcagcttaatcaagccgtttcagggcagctctctcctgaagcaattgtggagctacgtctgcaagcatacaatgagattacaaaaaatattgttaatgataatattttctcccaatatatgcacaagattctgccaactggcaactacctgtggaccttcaagaaacaatttgcaatccaagtggctctctcctgcttcatgtcgtatatgctgcagattggcggcagggctcctaaca

SEQ ID NO: 287883 - DNA, 451 bp, Zea mays
gctgctggaagaacgacgggcgcgcctgcgacggcgacacggcgacggacgtgacgcggtacagcgagatgatcatcaacccggccacgccggcgtggtgctcgccgtcgcggatcgaccagtgaccgccgtggcacaccttccggaacggcagccgcgtgcacccccgcgacggggcccgcttcccctacggcgcctaccacgtgtactgctcccccgggaacgccgcgcgcgcggagccgcccaccacctactgcgacgcctacagcaacccgcagcgcaggagatcctgcagctgctgccgcaccccctgtggggcgagttcggctacccgacggccaggggccaggggtgggtcggcgaccccagggcgtgggacctcgacgtcggcgccatgtcccaggcgctctacttctatcaggatcccggcacgccgccggccaggaggcgg

SEQ ID NO: 287884 - DNA, 314 bp, Zea mays
cggacgcgtggcggacgcgtgggcagcagcagctgcttgagcgacgagctggtgctgggcgaggagaacaacttcctaggcatctgcacgcaggagctgctcgcgcgcggcaccgagctgctcaagcgcacccgcaaagggtcgttgcattggaaggtcgtctctgtgtacatcaaccgcgcgggtctggtgatgctgaagatgaagagtcggcacgtcggtggcaccatcacgaagaagaagaagagcgtggtggtggacgtgtgccgggacgtggcagcgtggcccgggcggcacctgctggacggcggcga

SEQ ID NO: 287885 - DNA, 482 bp, Zea mays
ttcactgaaccgccgtatggcccagttccaccatctgaatctgctcaagcttggcaacaaccgaacacgtacgatgctgctgttcaagctcagatggcagctgctggatatcaaggtgaccggtcaagctatgtgtatgcggaacagcagttgggttatccagaacagtatgtgcagcaaagcacccaggaatacgatgtgttagcggaccctagtatatcccaggatccgaggttcatgactcaggcggacaaggatcggggtttaggttctgttttcaaacgtgacgatcaaaggcttaatcagctgagggaaaaagatgcacgggagagagatccaaattttatttcagatagtgactcagagtgttatcctgcgtaccaggagtataataatgagattgcagcaagcgatgatgaagatgacttatcgaagatggatatgggaggacgggcaaagtggccgcttcacaggtgggactt

SEQ ID NO: 287886 - DNA, 306 bp, Zea mays
cccacacgtccgcccacgcgtccgaaacggtgcacacgtgcgaaccccatatggctgaacccgagtcaaataatggcggggcggacgcgacggcatcgatgatgctccacggccgcgtaccatgtgtcaccggtggtgccggcggcatcggctcggccgtgtcgaagcacctgtcgtcgctcggcgcgcgcgtcgtggtggggtacatcggcgacccggcacctgctctgacgctggtagccgccatcaactcctccgagcacccctgcgataccagcagccgcgagccatcgcgggcgaggcgga

SEQ ID NO: 287887 - DNA, 313 bp, Zea mays
ccaatggcatccaagcatcagatttattttttattttctggcaacattcaagatagaacttgctcgcggcggtgtttccctccgtcgctttaaataccttcgtcgcctccacaagtccacagcatctcaagccaccatcgaccttcaagtctcgctacgtagcagtgcaagaaaaaaagcagccgcaatggcgagcagcaccatggccctctcctccacggccttcgccggcaaggccgtgaacgtgccgtcgtcgtccgccttcggcgaggcccgcgtgacgatgcgcaagacggcggcgaaggccaagcca

SEQ ID NO: 287888 - DNA, 525 bp, Zea mays
  unsure (1)..(525): unsure at all n locations
cattgactgaattatgatcctggatggataaaaatcacagttattctatctgatgctaatgttcctggcgaaggggagctttnaataatgtcgtatattcgtggtcaacggaatctccctggatttaatccagacacacgccattgcttatatggcctggatgcagacctcataatgttagtttagcaactcatgaagtacacttctctatattgagagatgtagtctttacacctgggcagcaggacaaatgcttcttatgtggtcaggtggggcatctagccgctaattgtgaaggaaaggcaaagagaaaagctggggaatacgatgagaaaggtgaagctattgttccaaagaaaccataccagttcttgaataactggaaccttcgggagtacttaggatatgagttcagaatggccaatccggctttccagattgattttggacggattgttgatgatttcatcttcatgtgctttttcgttggcaacgattttcttccgcatatggcaacactaggga

SEQ ID NO: 287889 - DNA, 317 bp, Zea mays
gagctactagctagctagcagcactgcgggtacgtacccaactactacacattacgtacgtgagctagctagctagcagctagtgatagagaccagatcagctgcagcggcgacgatggctcctgagaagctgaagctgctcgtcggagtgctggccctgcagttccttctggcagggttccacatcgtctccagggcggcgctcaacatgggcatcagcgagatcgtgttcatggtgtacaggaacctcatctccctcgccttgctcgctccgttcgcctacttcctcgagaagaaagacaggccgccactcacct

SEQ ID NO: 287890 - DNA, 333 bp, Zea mays
gacgctgagatgaagaagttatgtgaatctagtgttcgcaaggctgctaagatggctgcagggttcaccactgccttgggtgggctttctccaaacgagattatgaaacgaaccactagtaggcttgagaccattcactcagagggtgttcatagattatcggagatgtgctgccttgcagtttctcagcttctggtgctaggaaagtcagtaatatcttctgccaataaatcaaagaatgaggacggtgaaaatgatgttaagattgattggcccgaagatgccatttcaaaagccaaaataatcagatggaaggcgcaatccatctctgtg

SEQ ID NO: 287891 - DNA, 337 bp, Zea mays
gtcacgtcacgaggagcggaacacacacactcggggttccgatggcggcggccgcaccaacacacgcgcccgtgtcctcctcagcgtgccgcgcgggattctcctctagcggtgtatccttccccaattttcgctcggcagcggcttcggcccctgggtggcggcgcagggagccgtacccggcagtctccgtagtgtcgagctccccgcagtctgtggcaggagctataaccgtcgacaccgaggttgacacattgctagacagtgtgaagtgggacagcaaagggttggctgttgccattgcacaaaatgtggatactggaagcattcttatgca

SEQ ID NO: 287892 - DNA, 351 bp, Zea mays
gtgcaggagaggaggacgaggatcagcgagaagctcaggaagctccaggacctcgtgcccaacatggacaaggtataactactacgtgagtagttcatctatggcgtcgcaatttgcaaaggttttcttgcgcgtaatgcatagattaattctaagagatcgaggcggcgtcgtcagaccactcagatgatacatatatagaatgatgatcactgtgcaaagcagcagttctcccttgtgtatagtttgtgcatctagctagctaatacctgcagtcctgcacgaggcacacagcaataatggagatgcatgggatcggagtatctaattaagtaactatcttactgaaca

SEQ ID NO: 287893 - DNA, 268 bp, Zea mays
ccttcccgcattcctcggaaaactccgggagctccggggcctcattctgtggcagaacttgttggagggcgagattccggcgtccctggaaaatttggtcaggctcgagcatctcatcctcgactacaacgggctcaccggtggcatcccgcgggaactctccaagtgcaaggagctgaactggatatcttggcgagcaacagctgtctggtccgtcccgagttggcttgggcagctcagcaacttggccatcttgaagctgagcaac

SEQ ID NO: 287894 - DNA, 306 bp, Zea mays
aaatgatcagaaatctgctaaagggattcaaccatctggggtttctcctagcaatgaacctgatgataatctgccatttcatggtgatatatgtggacctgttgcggccacgttgaatgaagacatgttcaatatagtcatttccaggtggcgtgagacgtatgaggctcttaaggaaactaacgactacaaaactctttcagcagctgggtctttaatgaagaacatgattgacatgatatatttggtgctaaaagtactccctgaagattcaagggaatctcaaacagctcgtgttttgctcta

SEQ ID NO: 287895 - DNA, 354 bp, Zea mays
ctagttctagatcgcgagcagccgccctttttttttttttttttagttgcaagggtgctatatctgtgtgatgaacttgttcagtacacataacgctagcagaggcagcagaaaggaaagcacaaagaggacaacaaagtgggggagctagggggagagatgagctacagagatccaattcaaagacgacgttcctgcatccattgtacagggctgactaaagctatgatggcacttgcagaaccatgtcagtagaaagagaaagcttcaaagcagctggcatgcagtgcaggacgctggggagcaacaaagctgaaaaaagagagagagagagagagagaccagaccaagcta

SEQ ID NO: 287896 - DNA, 319 bp, Zea mays
cccttcgccgcgaaaaccctagaaactacccaccccgaccacccgccgccatgtcatccacaacgccggccatcgcgtcccccgcctctgagcaagccaaatcgaagaaaaagaagcacagatcgaaggacgacccctccgctgctgccgccgacccaccgtcgctcgctgaggccgaggagaagactgatggctacctcatcaagccgcagtcccttgttccgtccctcgacacctccacctggccgctcctcctcaaaaactacgaccgccttaacgtccgcaccggccactacaccccgctaccctccggccactc

SEQ ID NO: 287897 - DNA, 324 bp, Zea mays
ggaccgtggtcgagagcccaccacccgcgacctaacccggtgacctctctcccctcccaggctctcccacccacctttctcctctccttcattcctccccgtcccgcgtcgcgtcccacgccgccgcacctccgcggcagcgctactcctcgccgtgacgtcggggaggcctcgctcgggggagggctgcctgcctgcctggctgggtgtcagtcggccgtagaggaggaggggggcggaggagcttgatctggggcacctgccccccctcccctgcgccgtcgggatgtacatgccgccgccgccgcccaccggcgggccggc

SEQ ID NO: 287898 - DNA, 336 bp, Zea mays
gaggtgaaaggagatccgtgaggaggcgcctcccccatggctgagaaggagggcaacctcgaggccgtcctcaaggaggccgtcgacctggagaacatccccctcgaggaagtgttcgagaatctgagatgcagccgcgagggtctctccaccgagcaggcgcacagcgcctcgaaatctttggcccaaacaagctcgaggagaaggaggagagcatattcctcaagtttctgggtttcatgtggaacccactgtcctgggtcatggaggctgcagcaatcatggccattgctcttgccaatggaggggggaagccaccagattggcaggactttg

SEQ ID NO: 287899 - DNA, 316 bp, Zea mays
agaacttggaagatttgtgatgcttgctaatgagtcagctgaagagatgtatacaagattgaaaaaaatcatcaagaaaattagaagctatggaagtaagagatggacagatcatgaagtggtgaaaataatgctaagggcttattttctaagaaactcggtattatgttttatgataagagatagtcctaattatgagaagatgacgccagaagtagtacttggtagatttatccgtcatgaaatgatggaaaatgaagggcttcttgaagctgaacttggaagatttgtgatgcttgctgatgagtcagctgaa

SEQ ID NO: 287900 - DNA, 290 bp, Zea mays
ggagcgggtgaaggttggaaaggccaaagtttggaaaaaaataagacctgaaaaggagcttgaacgagccaaggcagaaatcctccaatgcaagttaagaatccgtgaagcttttcgaaatatggactctcttttatccaaggggaagcttgaagaatctttgtttgattccgcaggagaaatttcaagcgaagatatattttgtgctgtatgtggctcaaaggatgttactttacaaaatgacatcattctttgtgatggagcctgtgacagaggattccaccagaact

SEQ ID NO: 287901 - DNA, 355 bp, Zea mays
ctcaacgacgccgcctctctcgagcacacgcctgcgtccatctcacgtacgacgacacgtctctttttcctagcgccgcaggcagtggcaccttcactgatacagcgacacgactctgctactcagcgttgcaaggcgatagttcgctcccgttggccgcgtctcccacacgcactacgcgtcccgagatgaagggacgcttcgacggccggatgctggcgtgcaagcaaggcaacgacgactgtagaggcccgcatgcgagcgaggctccgaccgcccgatgcgtgggagacaaggtcgcgactgtttttccgactgctcacacgcgtgggagatgaacactgcgacgaaggcc

SEQ ID NO: 287902 - DNA, 339 bp, Zea mays
cccacgcgtccgccatatgccagttgatgttcagaaacttggcgcggactttcttgtcgcatcctctcataagatgtgtggccctacaggagtcggatttttgcatggtaaatttgagattttgtcgtctatggagcctttcttaggtggtggtgaaatgattgcggatgtattcgaagacaaatccacatatgctgagcctccctctagatttgaggctggaactcctgcaattggagaagctataggactgggagcagccatcgactatttatcatgcattggcatggagcagatccacgaatatgagatagagctggggacatacctctacgaaag

SEQ ID NO: 287903 - DNA, 299 bp, Zea mays
gcctggctggttgccctctcctccagagacctctcctgtctccacccctttggcctttgctcgtcgtggcgctctcgtacgcgcccaacgaggggagttaccgcccggtttcgcttcgtacggacggttgatacttgatagcgagttaatactctaagacttaaaggaggcgcggcgggcgtgggggcgagcgagcttgcttccgggggttggttcttgcgggaagctactagaaggaggggggacgaggaggagtgtggagtgtgtcttgctttgcctcgcctgtcctggtttgttag

SEQ ID NO: 287904 - DNA, 310 bp, Zea mays
cctgaaactttcaaatttgtcgcttggccttagctcccgctcccaggtctcactattacttttgtgtgtgtgtgtgtgaattagtagtatctctagatacgctaattcgatttgagacagtttcttgcgacttcgcgacagaaacaactcactggtgagagacataagccgaatgcagcagcgcaactacgggagggaaggattctcgcatataactgtcacaggtgctcttgctcacgggacgaaggaggttgaagtgtggctacaaacatttggtccaggtcaaaggaccccaatccacaggcattct

SEQ ID NO: 287905 - DNA, 314 bp, Zea mays
cggacgcgtggcgcgggcaggacgggagctacctcacggagctgctcctgtccaagggatacgaggtgcaccgcctcatccgccgctcctccaacttcaacacgcagcggctggaccacatctaccacgacccgcacgcggtgccgtcggccccgcgtcccccgatgcggctccactacgccgacctctccgactcctcctccctccgccgcgcgctcgacgccatctcccccgacgacgtctacaacctcgccgcgcagtcgcacgtcgccgtctccttcgagatccccgactacatcgccgacgtcaccgcc

SEQ ID NO: 287906 - DNA, 359 bp, Zea mays
cccacgcgtccgccgccgctctctccatccatcgccttccccatctcccccagttcccctcgtcgtcgcttcttccaaaccctagcggcctagcctgcctcctacctcgcccgccgacctatctctgccagtcctattccccgcggcaggcgggtatctcctcgctcccgtcgctccctgcacctacggtacaaccgctccatccaaacgagatccagcggatggaacccccggcggcgaaggaggcgccgccacttcagcctgcggcggaggacgacgcgatgctctctgcgacggcggccatggcgaaggaagccgctgtagcgttccagggctgccgctacgccgactgtgccgca

SEQ ID NO: 287907 - DNA, 293 bp, Zea mays
attggggtaattttattaattaattcagacacatgagcacatcataaatagctttgatcgtcccattgagctatctatcctacactagacaaagattagcagcagcagttgcttagtcaactgcgttgtccagcttacagttgcaaatgcactccattccattccattctattctactacaatcagacgagtctctcttcctcttcctgcacaagtactccctggcatccatcacctttcaccaaataccgtttcaagaagggcctcctcctcctccactagagctgtacatt

SEQ ID NO: 287908 - DNA, 419 bp, Zea mays
cggacgcgtggcagtttttgtgtcatggtagtgtggtggtgcctggctgctgcctattgcgtgtagcatatgctgagtattgcctgaccatctgaatgagattgcatgggcatcatgttcagatgcgcatgctcctatgatctgattttctgtgtgggatggattcgtaagactgcattttgtgcttctgttaccttcctttctcggtggaatgttgttccatggttcagggaacgcaaatttctaggggaagtgtgtccttgtcttcttccgacttctgctgctttcatgtgtacatccgtctgcggtaactgtgacaaatggctattgttgtagtgttttttagtaatgcaagtgatgtaatgtgttctatcaacgagccaagtttgggcaaacaagctatcgggaaaatatcctat

SEQ ID NO: 287909 - DNA, 401 bp, Zea mays
gggctcaaaaaactttttgatattgacctaaggaacttaaagctagtagctgagtattttcaaagaagtgaaacatttggaggcccttcaagggactggattggtatttatgaggaatgttccaaaattttatatgaagaaattgattacatcaatgaaggaaagaatgcggacaagtttcggcgggatttcagaaatataaagtgggttcgcgtgccacttatcatgtgggactacacaactgaaaaggtgctaaccctggagtatgcccctggtattaaaataaacaatttggatgtgcttgacaaccggggttatagtcgctcactaattgcatcacgtgcaatagaatcttacctaattcagatactgaagattggattcttccatgctgatcctca

SEQ ID NO: 287910 - DNA, 314 bp, Zea mays
caccggcgtcatgaacatgaagctagcagcacggcccagcagcggccgccacagccgtggctgccgtcctgccgttgtcccctctgccggcaagcaaatgctgctggttcgacggcaccctccgggctcggcgagttggcctaccagggccactgggggtggtggtggcggcgtcccagctggtgccaccgccgcagattctagcgggcaggcaaaagaggaggaagaagaggatcgtgcgagcagaaacacctcgagttttgagccatccatctggggagatttcttccttacctactccagtcctctggcta

SEQ ID NO: 287911 - DNA, 296 bp, Zea mays
gaagcgtcatgcatgtcaccgtgacttgcaaagcagctagcatagggaacatcgagagagagatgagggtagcgatggtgggttccggcctaagcgggctagtggcggcgcatgagctagcgagaagtggcggcgtgcgtgtcaccgtgtacgagaaggaggaccatctcggcggcgccaagaccgttgccgtggacggcggagcagaagaaggccgtgtcctcgtcgacctcggccccgtggtcttcaacccggtgcctagcccaaacttgatggaatggtttgaaaggctaggg

SEQ ID NO: 287912 - DNA, 528 bp, Zea mays
ggcatctccctgccgctactccaggccatcgccaaagccatcaagttcccggttccttctatgctccctgacgaggctttcactgtcatccgcaagtcatttgacgcacgaaaggttttgaaagaacctcaattcacttatattgttgatatggatgttaagaagattcttaatattgagccaagggcatgggattttattgctcggttggagcccaaacttggagttgtggaatacatgaccgaagagaagttagcagttgatctggtcagcatgctaaatgttagtagcaaaggttccaataatgtactaggaattagagacactcatagtggcatgatttatcgtcaacaaaagaagcccagagtggcagttataggaagtggaccatctggcttgtttgcttcccttgtgctaggtgaacttggtgcagaagttaccttattggagcgtggtcagcctgttgaacagagaggtcgtgacattggtgcactagcagttagacgaattctacaaccagagagcaac

SEQ ID NO: 287913 - DNA, 454 bp, Zea mays
ctagatcgcgagctaccgccctttttttttttttttggcgctccgaaaaagcgtcaacaccatgtaattgtaactagataataatacagatccagtacataaatgttgctcttctgctgattaaggtgctaaatgatacattacagaaaatttacgaagcttcccaaggaaaaaaacatctctttttgttggctcgttttgatgactgcagctgcagacatagatatctgaatcgtgcctattgattgtcacaaatgtacatgtatagttatctgccgagtgagtagcggtaaagcctttcaaggatgatgtaccctatgtttccgagtatatacagccactgcatttgtgtaaacgaaaaacatctcactcaataatcctcaagcaatgcgttcaaatgcttcctcctcgcagcatgcttcagcttctccatcgcaacgagtcctacttgcct

SEQ ID NO: 287914 - DNA, 411 bp, Zea mays
ccggctccgacaatcccacgcccagcagtccagctccagcaccatcagcgccgccctgcccctgtccctaatcccacgcggccacacccaggacccagcggcctgcgggctgcggcagtgcggctagcacaccacccgtccagccgtccagccgatctaggtctctatgtgtcctttgagtcttctctccatataaattcatcataaaagctcaaaagacctagatcggcttttccccccttgttcggcaaaggcgtttcggggtgttcatcgtggattgatcgatcatggcggatttggagacatcggcggacgaaaagaagaggcggactgggccaccagatgcgcaggagttagaggagacaaagatgatgcggacggggccaccagacgcgcaggagttggaggagc

SEQ ID NO: 287915 - DNA, 367 bp, Zea mays
ggcgagcaccatggaccgccgcctcgcgccgggcctctccacgttcgagatccccgcggggtccatgaccgtcttcgggctgctggccatgctcttcaccctcttcgtctacgaccgcgcgctcatccgcgtggcgcgccgcttcacggggctggaccgcggcatctccttcctgcaccgcatgggcgtcggcttcgccatcagcgtgctcgccaccctggtcgctggattcgtggagcggcaccgcagcgacgcggcggcggcggccggcgccacggacgccggcacgtccccgctgtcggcctactggctggtgccgcagtacgcactgcacggcgtggccgaggcgttcacctccgtggggcac

SEQ ID NO: 287916 - DNA, 245 bp, Zea mays
gtcagaactcaaaagatcaaatttgatatagcgttctttttccacaagtagacacgtctttgtatgtttactgggcattcacgtgtgtttgagtattgagtagttaccactccatcactcagtacctggttgtagaggcgtagagcacatagccaatgcattgaacaagcatttccttcccccctctgccgtttcaacgctgtattgcccttacccaacgggcgtgctgaaagatgaattttggt

SEQ ID NO: 287917 - DNA, 332 bp, Zea mays
gtttagctgtgacacttggcttccgtgacataacagtgataggaaatgcttatggtctcgcgtgcatcactgtgatgtttgtcaccacctgtctgatgtcattggtcatcatcctcctgtgggcaaaagaatctcctcatctccttgctattcttcgtattctttggggcactcgaaggcgcctacctgtctgcagcagtgatgaaggttccccagggaggctgggctccgatcgcgctatccgccgtgttcatgttcatcatgtacgtgtggcactacggcacgcggcggaagtacctgttcgacctccagaacaaggtgtccatgagatg

SEQ ID NO: 287918 - DNA, 322 bp, Zea mays
ctgtagcattctcagggatcatgtgtgctcaccgagttgctgcagatattggactagagcagaagtctccagttctagatgctggtcttcttgggctactcagatggctgagaacacttgcataggacggtattagacaaagtgggaaaatggacctcatcttctttcagaaagctgatgtttaactagagttcggattccaaactctgtaattagggatgccagggcaatggcatgcatacgagacttaacttttacatgctagagcgataagattttgtctgttgcgtacctcagtaaacagagctgtacatttgggagc

SEQ ID NO: 287919 - DNA, 493 bp, Zea mays
tcaatatacactacagttgaggtgcaggaaggaatgaagatagacaagggatatatttctccatacttcatcacaaatcaagacaaatcaattgttgaattcgaaaatactagagtgcttttaactgatcagcgtgtgaatgatgttcaagagatacttcccttgctggagaagacaacacagttgagtgtccctttattaattattgccgaggatgtgtcgcatgaggtatattcaacactggttcttaacaaactgaatggattgctaaatgttgcggttgttaaatgtcctggtttgggagatgaaaagaaggccattctccaagacattgctattatgacaggtgcagatttctttgctagtgaccttggctggggtcttcatggcattacttctgatcagcttggtatggctcagaagatcacaataactagtgaatccacaactatcatagcacatccttcaatgagaccagagattgaggccagaa

SEQ ID NO: 287920 - DNA, 509 bp, Zea mays
atcaacatgaaggtggtttggatgcattttcacgcggttacgaaaagcttggatgtactcgcagcgctgaaggtatcacttacagagaatgggctcctggagcatactctgcagcattagtaggtgacttcaacaactggaacccaaatgctgatgctatggccagaaatgagtacggcgtttgggagattttcctgcctaacaatgctgatggttcccctgctattcctcatggctcacgtgtaaagatacggatggacacaccatctggtgttaaggattccattcctgcctggatcaagttttctgtgcaaggttccagttgaaataccatacaacggtatatattatgacccacctgaagaggagaaatatgtattcaaacaccctcaacctaagcggcccaagtcactgcggatatatgaatcacatgttggaatgagtagcccggaaccaaagataaatacatatgctaacttcagagatgaggtgcttccaagaattaaaaa

SEQ ID NO: 287921 - DNA, 195 bp, Zea mays
aggaaatctcccaaaattgttcctctcaatctggttcttaaaaaggctaagagatgcaatgctgttaaactccgtaagacagaaagcacccacttgtatgaggagaaaagctcagattgttctgtgaacagctcagattattctagtagaaaagtattccgtggatgatgaaaattgcagcccacaagctgaata

SEQ ID NO: 287922 - DNA, 300 bp, Zea mays
  unsure (1)..(300): unsure at all n locations
cgncctcctcccactccaccagctcctgcctgcctataaacccagggccgccctttgactctccttccctgtccagtggcggggccgcttcccttgcgttcgcggagagtctgtctgtctgtctagctagctagctagctgccgagagcgtgaggaggaagggggatccatggcggcggagaacgaggagaaggagacggcctgcgcggggtacaagcacgggccgccatgggtgttcaaaggcagcgcattgtaccagctgcatttggtgaaggcgtcgacggcgcgggccttcgtgcc

SEQ ID NO: 287923 - DNA, 322 bp, Zea mays
ctcatatggaataatgagtggtgctctgactgtgggtgatttggtcatggttaatggacttttattccagctttcattacctctgaacttccttgggagtgtgtatcgagaatctagacaaagcctcattgacatgaagtcgatgtttcagttgcttgaggaaaaacctgcaataaaggatgagcctcacgcacaacctttgcaggtccagggaggcggcattgaattcgagaatgttcattttgggtatgttccagaaaggaagattcttgatggtgccactttcaccgtacctgcaggaaagagtgtggccattgttgga

SEQ ID NO: 287924 - DNA, 537 bp, Zea mays
aggtagttactgacacatctaagaagaaaagcagcggtgaagaaatcgatctttctgaagatttttgcaacatgtttgggacatcacacagccttgatgaggtacaaatcattggggtgaaagcaaaaggccacgacttcaaaataagaatgctcaggaaggaataccagcacacctgcagatcaactggcttaatgctctgggaatctgctcaattcatgtgctgtcttttagcagagaacccttcgatcgttgcaagcaaaagggtcctggagttgggctgtggctcagctggcatctgctcgatggttgctgcaagtttcactccctttgttttagctacagatggggatgaagaatcactggacctccttagacaaaatatctcctcgaacatggagcctaatttgctgagcagaatcatggttaggaagttattctggggcaacgaagatgatatgaaggcaatccgagagcttcatggtaacggcgtgggttttgattgcataataggcaccgacgtgacatacaatcctg

SEQ ID NO: 287925 - DNA, 185 bp, Zea mays
gtgagctactcactcagtattccacgcttgacactccgtgacggacgcgcgcactttcccctcttctgcgactcattccggagcgcgctgcctccgatccgcggcaccgcgtcgcgtccgccgatgacgagggcgcacctgccggcggcgcgcagcgcggtccagcgtgggcgctgcttctgggc

SEQ ID NO: 287926 - DNA, 303 bp, Zea mays
tcggtttccggatctgctctgcgtcgccgccgaccaacctccaccgcgcgacgccatggacttcgacgagtacgagtatctggagaagacggtggaagcgttcgcagcgccggccaacggttcgtcgccgcccgggtcggggtacaaggacaaggagcgcacctcacgccgccgctcaacgggcggtgacgaagagcgcgacaacgtagaacgcagatcgaagcgttctcgccccgaggaaggctgcgaccgcgatagagagcggcacagggaccgcgacggcgaccggcaccgcagcagtcg

SEQ ID NO: 287927 - DNA, 510 bp, Zea mays
cccacgcgtccgcccacgcgtccgcccacgcgtccgcccacgcgtccggcaaaataaaagccaggcggcggcatatggcgctcagcaaggagcaaaaactcacaattcctgatcaacaacacacaacaagcagcgaacagcaggtggcgctggatgccgagctccagctgtggaaccacactttcggctacgtcaagtccatggcgctcaaggccgcgctcgacctcggcatacccgatgccatccaccagcacggcggctcggccaccatcccacagatagtcaccaggatcacgctccacccgtccaagacaccatgcctgcagcgcctcatgcgcgtgctcaccctcaccggcgtcttcggcgcgcaggagccgcacgatgacgacggcggctgtgacgacgagctcgtctacacgctcacgccggcgtcccgtctcctcgtcggctcaccggggcagaacgtgggccctttcctgaccctgatgctcggccccatcttcgtgtcgt

SEQ ID NO: 287928 - DNA, 347 bp, Zea mays
cccacgcgtccgcccacgcgtccggcttggccttcgtctccgcttctcttgcgctttcgactcctgctagctggcggggcggctcgcctctcgcgccacaatggaggtcgaggacgacgacaacacggcggcgcgagcgcgtggccgagttcatccaggcgtcgcacctcctccagttccttctccacgcctccatgaggctcgacctccggcccatcgtcaagtacgccgcgcttaccttcttcgctggacgcttcctcccggcactcccgaggaagatggggttctgcggcgcgcgaaccgccgaatagtcaggtccatggctctcgagcccctgagggacagca

SEQ ID NO: 287929 - DNA, 349 bp, Zea mays
ggcggaggtagcgaaggcgactccgcagtggatgacgccggcctcttcgttcaggtcgcggtgctggagatctataacgaggaggtctacgatttgctcgtgggcagcggggccgctgctaaaggaaacgcccccaaggcgagactggaagtaatggggaagaaagcgaagaacgcaacctatatatctggaaatgaacctgggaggatatcaagagaagtgtctaaggtggaaaagcgaagaactgtgaagagcacactttgcaatgagagaagttcacggagccattgcatgattatcctggatgtcccatctgtgggaggaagattaatgcttgtgacatggctgg

SEQ ID NO: 287930 - DNA, 495 bp, Zea mays
caagttgggcgcagttggcttttgcctcgtcccctccgccgccccgttgccgaaacaaaactcgctcttcggacaaaacgccaacgccagggcgagcgagtgaggtgaggtcacctaccagctcccacagtcgcactcccccctcgcgccgtcccgtcgtaggaatggaaggaggcccttgtgtctgctcaggaagagggcaaggattgccgggcagccttgttgcggtgcgaggaggagctggaacgcatccaggaacagaaaatgaacctgcagaaggaggttgataggctcaccgagctcgctgagaaggcccagttggatgcatccaaggccgaagaagatgtcaccaatataatggtgttggctgagcaggcggtggctcttgagatgaaagccacgcagcgtgtcaacgacgcggaggcggtgctgctgaaacggagaaggtcatatcctcggttgacaccgtggtggagctaacatcacttgctgaag

SEQ ID NO: 287931 - DNA, 391 bp, Zea mays
gttggccaatcctgacacattatcttctcatccaagccgagagcgtgaccagctcacccagacccgtgggcagacctcgtcagagagcattcccttgtgcatctcggcctctccttcctcccttcctcgcccgcccagtcctctaaccatcttctccaaacgcccggagatggtctcgctgcgatgcaccaccgcgcaccactccctcctcggctcgccgacctgcctcgcgcgcccgcagcggcggccgtgccccgtcgtgcgcgctgccgtcgccgtggaggccggcgctcaggccaaggtctcactcatccggattgggacgcgtgggagtcctctggctcttgcacaagcccatgaaactcgggaaaaactgaaagccgcacactct

SEQ ID NO: 287932 - DNA, 308 bp, Zea mays
gttttagcctcctgcgtccctcccctgttccctcaacgcttctctcctccacctcttctcgacagccgctgccacccggaaccttctcgcagcgacgctatgtgggctctccgccgagctggtaaccccctcaggttccatgcccaaaaagttgtgagtccccgtggttgtgcgagccttgaggtgctgctaactgctgatgcaaaaaatgttgaagaacaccatgaggcagactgtcagaaagtgtgctactgtcataagccaaagccaccatccttcttattgtcattttcatctggaccatttgc

SEQ ID NO: 287933 - DNA, 333 bp, Zea mays
cggacgcgtggtcgatccgttcccttgccctaagacccacccctgatttcatttccccaatcatggcggcggctctgtcggcgacggcggtgtccacggcagcgcttctagccccaatccgagctccaaccagcgcgtttatccggcgctcccagctcacctgtcatcgcctccactcactaaaatgccgccgcgctgggtccatcgtccccgccgccgctgctgccgcggcgggcagcagctcgccgtcgtcagccgttttccacggcgagtgcttcgtggtgggcgacaatatcgacaccgaccagatcatccccggcgagcacctcactc

SEQ ID NO: 287934 - DNA, 338 bp, Zea mays
cccacgcgtccgctccagtggttagggatacagctcatggagctcggcggtaccgcaatgtcgctgctgctgctgctgctcgtgctcgccgcgtcgccattgcagcaggccagggcggttggcggcggcaggccgcgggtgccggccatcctggtgttcggcgactccatcgtggacacgggcaacaacaacgccgtcctcacgctcaccaagtccaacttcaggccatacggcaaggacctcaacggcggcgtccccaccggacgcttctccaacggcaggattccgacggacttcgtagcttcacggctcggcttgaaagatctggttccggcgta

SEQ ID NO: 287935 - DNA, 330 bp, Zea mays
tggagttttgcggagtaaaatcttatttgtataattgtattaattgggtgaactgtgcatttgtacatgactacatgtcacctagataatgtcaggggctggtagtcagcgccccggctttagtaccacattggctagccaagggggccgtgagcagcttaaaagagagagtccccctcctcccatcagcctggcttttgggatgtgagtggtgggctctcttggctgggccggcccacgagcgcatgaacgcccgaagctgtcgagtgtgggctgggccgagggttggacgctgacatctggtatcagagcccggtttggcccatgcct

SEQ ID NO: 287936 - DNA, 310 bp, Zea mays
cccccgtctaaccctgctgccgtgccgcttgccactactccgcttcgttctccgccgcctccccggacgtccggaaacttctagattgaagggggatagccattggcgtcaacgtgtgtgatggaggtcaggggactggggcagctcctggcggcgctggccgcggcgttcttcgtccgcgccatcgcgggacccggccccgccctccttccgccggcggaggacacggaggccgacgaggccgacgcggaggctggccagggaggtggtggtggtgtgccgcccgtgaccatccggtgggcttccatca

SEQ ID NO: 287937 - DNA, 325 bp, Zea mays
cacgtcgtcatcctcgatccagacgagtgtgtgtgccatatccacaggtcttcgacagatttagggtgaggataagtagcaggctgctcggcctacctcctcattggccagaagctctcctcagttctccactttgcccagcatgagcctcctcgcctcctcgttggtttcctatgaggccagattgagccaaacaacgggcagtctgtgtttcccgaggaagttgcggaagaagtccctgatcagcagtttggtgaagatggctcgtcttagacacactgcacgtaagtcggtgattcctttcctgccgtctcgacttgcggag

SEQ ID NO: 287938 - DNA, 326 bp, Zea mays
gccaccacagcgagacgctgggaagctcgatctgcgagggcgccagggttcggcttgacccggcgctcatcgcgatgtcgcgcggcggggagccgctggagcaggtgatgggccgcgccgaggaggaggagctacccaagtacgagcccggcgcgctgcaggtggaggggccggcggcgggtatgccggtgcccctggtggacgcagggttcctcaacgactacgtacccaccggcgggatcgggatgcacactatgagggcgctgctcgagtcgacgcgcgttgtgccacccggtgagctgcactgctcccagtgggttgaagaa

SEQ ID NO: 287939 - DNA, 316 bp, Zea mays
aaccaagccaaccaactaaccgagcaagcaacccaactcccaaccacacgagcggacgtgcgaaacccaaagcgcgaaaaccctcctcgctcaaggatccctcccgcggcgcgcggaagcaaacccccccgaccggccgccgtcgggggccgcggcagggacagcggaagcagcatcactccggagcggcggggctcagccagccctcgaccggagcggggggttccgtaatactctccgaatctgcggaatccgtggcgggatttcgcggggccttctagtttcgggcgagacaatggtggggttcgcggggaag

SEQ ID NO: 287940 - DNA, 283 bp, Zea mays
cgcctcccggccaactgctccccttgtcccggctgcctcccggcctctccagccgctgcccgcctcccgctcatgcccaagccagagtgtcgcttctgcatccatgggcccaccgcctccatggccgcttcatgccttctcctcatctgttccggtctccagcctgcccccctcgtgctccaacgcctccagggctttcggccgccgctggaggcgaggctcaggcggctgcggtggcggagttcgtgacgtccgagaaggtcaatgttgccgcgatgctggg

SEQ ID NO: 287941 - DNA, 370 bp, Zea mays
ttttctcagtctttagcctagcatgagagcagccttcaagtgaacacgcccgcgtccgtcttcgtcggacccttctccggcgacgagcaccccccacgccagttgcagatatctggtcatcagtacagaacttgaagtgtagattgtgatgtcggtgccgatgtataacaaacagaactcattgggcaccccccctccccacaagacaaatcccttttctgattctgaagggccatcaagggcacagtctgtcccagtacgacgcaccaatcaatctgtgcaagagttggaagattatgctataaccaaagcaagagaaaccacacacaaagtaaatgattgtgtcagggctgctgaagccatcagggaa

SEQ ID NO: 287942 - DNA, 433 bp, Zea mays
gcatggcgagcaccacagacaaccgtggcctcctcctcgtcgtggccgccgccaccgtcgtcctcgccgtggccgcggccccggcgcatacaccggggggcaatactgctacccctccgccgccgttccggacggtgtacgcgttcggcgactcgttcacggacacggggaacacgcggtcgacgactgggccctactcgttcggctacgtgtccagcccgccctacggcgccacctgcttccaccgctccaccaaccgctacgccgacggccgcctggttgtcgacttcctgtccgaggcgctggcgctgccgtcctacctcccgccctacctcgccgtgtccgtctccaacgccaacgccacggcggccggagccggcgtcaacttcgcggtggccggcgccacggccatcgagcacgacttcttcgcgcg

SEQ ID NO: 287943 - DNA, 318 bp, Zea mays
gttctagatcgcgagcggccgccctttttgtctgctgttttaatcctgaatatttctttcgggtgtttaaaagtgtgcagcaaatttgcaatgctctagtccagtggaagttacagaacgggtgcgcagaggaaccaatagggccggagtcccctggcacggtcagatgatcgggggcggcggcgtctcccagacgtcgaacacgttctcctcgttgtgcagggcgaagagccggtcgccgccgatggagaagtcgcagatggcgccgccgtggctccggcggagcgtcgacgtcagcacgtactcgggcacgctgaa

SEQ ID NO: 287944 - DNA, 320 bp, Zea mays
ctcgtggatttatcagattacacgactctacaagaacaaggagcatgctgaagttgaatacacgattgggccaatccctgttgacgatgacgtaggaaaggaggttatcacacggctgacagcaaatatgggcacaaacagtacgttttatacagactccaatggaagggatttcctcaaaagggtgagaaactacagggaggactggaaccttcaagtgactcaaccagttgcaggaaattactacccggtgaacctcggagtgtatgtagcagatgaaaaatatgagctatctgtgcttgtggaccgtgctgtcggag

SEQ ID NO: 287945 - DNA, 596 bp, Zea mays
catggtcgcgctctctggtgctcacaccatcgggcaggcacgctgcaccaacttcagagcccacatctacaacgacaccgacatcgacgctgccttcgcgagaacgaggcagtcaggctgcccaagcacctcaggcgccggcggcgacaacaacctggcgccattggacctccagacccctaccgtcttcgagaacaactactacaggaacctcctcgccaagaaggggctcctgcactccgaccaggagctcttcaatggcggagcaccgacgcgctggtccagtcctacgtcgggagccagagcgcgttcttcgcggatttcgtggcgggcatgatcaagatgggcgacatcacaccgctgaccggctccaacaacggacagataaggaagaactgcagaagagacaattagcagatagctagctagggtcactaattaagacccatgcatggctgttgaactgcaagctaagtaaacactatgtgagatcgtcgcgttgatgtgctcacatgtcgtctttttatttgggtgaaggatggatgcatgtatcagatcacttgttgtttaattaatgccatttcagtctttgtcca

SEQ ID NO: 287946 - DNA, 340 bp, Zea mays
ctttatcgctactccaagagtacccaatcaccgagccatggccatctcagtcactgccgtggccgccttgtccgctttctcggctcaaagaagcctcccgcagccgtcccgccagagggtcgtagcgttcatcgtcgtccggccggtgcgcgcgcaccgccggtttgtgggcgtggcggccagctcgccgcccacgccgccggatctcgcaaagaaggtgtccgagagcatcaagcaggcccaggagacgtgcgcagatgacccggtgagcggcgagtgcgtggcggcgtgggacgaggtggaggagctcagcgcggccgccgactaatgtactcgtcga

SEQ ID NO: 287947 - DNA, 521 bp, Zea mays
ctcttttgattcccctctcttcttgcaagagggtgtaagaaaaccaagccgccgccgggatactacactacccagctcctctccagtctcaacccagcccgcctctcgaacttccagaaccgtcctctcgctgcctgcggctgctatctctgtcatcatagaggagagtgtaagggcactagatagagagtgatggcttctcctgatccatcggcggcagatgccggcaccgggggcgagtcgacgagccaggcggcggccgtggaaccgatccggatgccgacggtggaggagatcaaggggcaggacatctggaacaactgcgccgttcgcagcgtcgtcagtggcgtcatgggaggcggtcttggtgtgcttatgggactattctttggagctttggaaaatccgataatggcagagcaaatgacagcaaggcagcaaatagtatacacagcaaagcagatgggtagtagaagtataagtaatgccataacctttgcagtcatgggtctgattttctc

SEQ ID NO: 287948 - DNA, 340 bp, Zea mays
cggacgactggcggacgcgtgggcgcaaagagaccaaaaccctagccgtcaccccgtaacctcactggcggccatggcgttctccggcaggatcaagcagctcgtgaagaagtacggcaaggtggccgcgggcgtccatctatccgtctcctttgcctccatcttcggcctctacgctgccatcaacaacaacgtcgacgtcgaagccgtcttccggagatttggcatctcccccggcgttgccgtcgacggggaggcctcaccctcacccgcccctgtctcccgcgatgagcacctgcaacacgcctccctagcgccctgtcctagtgaggtactgcaa

SEQ ID NO: 287949 - DNA, 163 bp, Zea mays
gatgaatgaagactatctctgtgccaaactacacttagtagctcttgctggatcagaacgcgctaagagaactggttcagatggcctgcgcttcaaggaaggtgttcacatcaaccgaggacttctcgctctcggcaatgtcataagtgctcttggagatgag

SEQ ID NO: 287950 - DNA, 534 bp, Zea mays
acgaccgtgggtcgaccacgcgtccgcgacgcgtggtgcgcgcggtgccagcgcatgtcgcagctgctccgcctccactccgcgctctgcgaccgcaccgacccctgcaacaccccgctctgcatgaggtttaagcagcaggagcaggataaggcggctgccaagggcggcgatgatggcgacaaatgggggcttctggtgaagaaggtgaagactgccagggtcttctcttctctggccaacaggaagcagatgagcaccaccaccacccagtgctgaggagcagcttgggatgcttaggggtaaaagttagattagtgagagagaatgaagcgagcagtttttttttgggtctgttttcagatgtcagatctcttttgagatatgtacatgtacatgccctacacctactttgtcaccctacgttggtatagcgcttttatcgaggtgggagttggtcagccggaagtcgatgtaaaaactgcgcatgtatcattatataataatagggaaatatgagaagtattttagtct

SEQ ID NO: 287951 - DNA, 592 bp, Zea mays
ggcatacttgtacggacggaaagactaagaaccaaagatattacacaaaaggtgaaggcaaagaactactggcagggtggcgtttgccttgcctttgccgatgaagtcttatgttggttgtatgggactgtcaaagagaatgaagactatgttcttcaatttgtacatccatttaaccgcctcgaacttctgcgagcccagtccccctgtccggaagccataacgttgcatgtgcagcagctctcaggtgcagcggactagattctagcagtgacctcggcggagactacttgccttggagaaaaacccaattctagcagcagcactgaacaatggttgatctgccaacttactcaaccccaattaccaagcagatgtgctaatgcaccaaagaactgatgagatcgatcactggtctagctcacatccatggtttacactcttgagtggccaaagagattttgaatcccatcaaacatgtatttccattgtaacattattacataataaacaatacagacagagctactagtgctgtgctactgtaacattattgcatcaaatcttaaacatccgaattgtcagcctttat

SEQ ID NO: 287952 - DNA, 300 bp, Zea mays
ccgaggcataggacatcacgatgcgttccttgggtttgctcgcgtgagcaatgtaacattatttggttctttggttggttccgcacgaggtacatagagaatgcacagcttcttttggtgtttgcgttcgtgtaaaaactgtaataatcatgcatagcgtaggacggtaggagcgtgtctggtttggtgtcctgatccgcggctgctcaataagacaatgggctttgtcttgggttcctgcgaaggaacggatgagttcaacatgtaaacttgtttcagtgaagccttagaattcttaac

SEQ ID NO: 287953 - DNA, 341 bp, Zea mays
acgggttgcaatcttagagagctctgaagccgcgaacacgatcatgaaggagcttacagaaggctcctctagtggtaatgtctcaagagacttcaccaatagcatggatgggcagattatgcttgatgattctgaggatgatgatgatggggatgagaaggaatttgattctgctgccttggcggcccttctgaaagcggcaactggtggatcctcatatgggaatgtcacagttgcttcacaagatggttctagaatattcaccatggatcgacctgctggtcttggttcatcagccccttctctcaggccgactgcacctcgccaacctgccaggtcaa

SEQ ID NO: 287954 - DNA, 318 bp, Zea mays
ctggagcatcccggaggcgctgattaccgcggagctgggcaccatgttcccggagaacggcgggtacgtcgtgtgggtcgcctcggcgctcggcccctactggggattccagcaagggtgggtgaagtggctcagtggcgtcatcgacaatgccctgtaccccgtcctcttcctggactacctcaagtccgccgtgcctgccctgggcggcggcccgccgagggcgttcgcggtgctcggactcacggcggtgctgacgctgctcaactacagggggctcaccgtcgtcggctgggtcgccatatgcctcggggtgtt

SEQ ID NO: 287955 - DNA, 354 bp, Zea mays
cgttcgtgtgcacggtcggtggagccgccgccgaggccgaggccgcgccggcgcaggccggtgtcgccggcgacgacaatgcggacgcggaggcggccgtgcaggcacgggcaagaggcacgtcatgtcggccgtccacgcggagagcccactgcggacccggtacgccagcgccgtgaagagaccagagtgcccgccgaccctgagcagggcatgagtgccagtgcaaatttgcaagtgtacatagctcgctgacagattgctcatggattcttttgttttttcctcctgttttcttggtgatgctgtcaattcgttctctcaagaatttcaagggggagagttttttgtttc

SEQ ID NO: 287956 - DNA, 288 bp, Zea mays
gaagcaacatgaatccgccgcacccagagccgggccttccccgccgccaccaccacatggtccacctccacctcgacccgcgccaccaccaccacgtccacatccacctccgctgctgccatcatcaccaccacggcacccacctgctcgctcctgcgccgccggcccgcctcaacgacaaccagcagcggcacccggctcccgtactcttccccaacacctacccgaacccaagcgcggcgcctgggcagccagagccgccccgcgccgccgtaagggaggacgtgg

SEQ ID NO: 287957 - DNA, 651 bp, Zea mays
ccaaatgcaggaggatgtcatggcggcggcggcaagcgtcgtggtctgcctcggccatcgtcgccactgtcgcgagtgggtaccacatcctcaggatcgatggctactcccacaccatggggacccccacaggagagtacatcgcgtccctcccgttcaccgtgggcggccatcgctggcacattcgctactaccccaacggcaggagctcggagaccaaagagtacgtctcgctttctctcaatctccacgactgggtcgctaagacattgaaggcgcggttcaagttccgtttcgtcggtgacgtggcggacagccgttgatactgggaggactgcatagctttgataatattgacaacaattgggggcgccccgagttcatcaaaaggaaagatttggaagagtcgaagcatctcctagacgattctttttccattcggtgcgatgtggtcgtgcccaccaacgaagtccgcgtggtagccactgctgcggctgctatggtttccgtgcccccatctgacctgcaccagcatctcggcattctcctgctgaccgagaagggcgccgatgtggtgttcgacgtcgccggtgagacgttcgccgcacaccggtgcgtgctcgcagcccgttcgcctgtcttcagtgcaga

SEQ ID NO: 287958 - DNA, 310 bp, Zea mays
cccacgcgtccgcccacgcgtccgcccacgcgtccgcttcgaagaagtggaaactctgttgaactccttgatgtttctagcgagctacctgaattggttcggcgtcctgggcttagcacttggaaggtacaagatcgagaatcttggtttcagagtcacgatgaagttccacacaataggaagttcctagtacttccaagcatgtttcctgcaagtaatagcaccgaggaaagccataccgtgtgtggtgatgttgaagtgaacataaataatatgaacaacttctcaagaaatatcaacattgaagaaa

SEQ ID NO: 287959 - DNA, 375 bp, Zea mays
cccacgcgtccgaaatcgagccaggaaatgcgtctgctcttacacattgtgggatgatttacaaagatgaaggtcacttggttgaagcagctgaggcatatcaaaaagctaggatggctgatccttcctacaaacctgcttcggaatttcctgctattgtgttgactgatcttggaactagcttgaagcctgcgggtaatacagaggaggggattccaaaatattgtgaagctctggaagtagacaaccactatgcgccggcttactacaaccttggagttgtttattcggagatgatgcaatttgatatggctcttagttgttacgagaaagctgcactggagagaccattgtatgctgaggcctattgcaaca

SEQ ID NO: 287960 - DNA, 366 bp, Zea mays
ccgccgacaaataaccgccgacgcgttggcggaccgaagtgaggtgcgtggcgaccgagaagcacgacgagacggcggcggtcggggcggcagtgggcgtggatttcgcggacgaggaggactaccgcatgggcggcggcggcgagctgctctacgtgcaaatgcagtcaaccaagcccatggaaagccagtccaagatcgcttccaagctatcgcccatatctgatgaaaatacagtgcttgatttggttatcattggttgtggtccagctggtctttctctagcttcagagtcggctaagaaaggtctcactgtaggtctcattgggcctgaccttccattcacaaataactatggtgtgtggg

SEQ ID NO: 287961 - DNA, 284 bp, Zea mays
ctgaaaggagacatgattcttcaattggtttccgagcgcaggttcgttcaaatatgcgatctggtggtgtcataaatgctgagattacatcatcgctactgaaatcagttgaaagtggcgatctcattgcgtatggactaatcccagagtttgttggtagatttccaattcttgttggtctatcctccctcagcgaagatcagcttgttgaggttctcacagagccaaagaatgcccttggcaggcagtataccaagttgttcgaaatgaatgacgtcaaattg

SEQ ID NO: 287962 - DNA, 459 bp, Zea mays
aggaactagccgttgcccgcacctctccacgtcgcgcttcccatggactccgccaccgtggcgctcgccagccccgcctccgacgaccgacggttctgggaccgcctccgcacccgcgtcgacaccatcctcgaggaccgccgtggcctcccgccagccgccgccgccggtgcccccatgcgcggggtggaatctgagcgggggaagcggctccgggaggactccctgatgctcgtccgtggcctcgactctgtggcggagtctctggcacagctctccgacaccctcaccgccgcgcagaagggagtgagtgctctcgcgacctgctcttcgcaggcgaggggatgcgaaggcggcgcctgcccctgccccgaggaggtgaaggcagaggaggaggagcccatggcgaacggagtgtgtggcggctccacggaagattctccacggaacggcctggac

SEQ ID NO: 287963 - DNA, 310 bp, Zea mays
cccacgcgtccggctagctcaaacgaccactgatctggacacacctgacctggctacgggcggcggtgaatggttgtttactcctgtcctgacgacagggaataatcagcggcgtatcattcccggaaacttcggccttggttcagcccacatgaaccagacctggctagctaacaaccacggcctccgctgtctgctcaactcccattgagctaatccagtttgttaatgctgccaggttttatttacacgcttgctatggggagcagggaaggtgagcagtgcgttcctcgagcaaactcacgggtta

SEQ ID NO: 287964 - DNA, 422 bp, Zea mays
atcgacgtgcccacctcgttccgctctgacgtctgacatcgcgagatcgggaacccctgcccgtctgctccggaatctcgcccgcacgaaacttccccgacccatcgaccacaccagccccatcccctccgtcgctcccaagtcccaactgccgccacctctccgcgagccgacgccgacgcctacggtcaccaggacagagggacggctgctaccgcgggagtatgggggtggactactacaaggtgctgcaggtggggcgcggcgcctctgacgacgagctcaagaaggcttaccggaagctggccatgaagtggcacccggacaagaaccccagcaacaagaaagaagcggaggccaagttcaaacagatctcagaggcatatgaggtgctaagtgattcccaaaagcgggcaatctat

SEQ ID NO: 287965 - DNA, 308 bp, Zea mays
cgttgcctcgtgaccgcgcccagggtccgaactcccgaagcgtcgcgccgccgcccatcacggacatcggacaggagaagagaagcgggagcaccggagcaggcaccaccgccgaggcgtcgaggtcgccgtgctccccatccgctgaggtagctgctctccggcctccgcggctgccggctccctccaacgcccagtcccaaggcgagcaggcacccacggcagcacggctgtcgcggtagtatttaaggaaccgggaaacatctgctaccgcccaatctttccccttcccggactgctcgctggac

SEQ ID NO: 287966 - DNA, 348 bp, Zea mays
atctcctcagagtggccatcttccattcctggtaacaagtgaatgagagcacactggcaatttgtggtcgaagctttggttgtttccacgagacacattcttgtgtgttctcagcaatcgagttgtggacggctggtctggcaatttatgaatgccatgtctgccaatctgtatagcttccaataatggtctgaccctagactagttttgttttccacgttcatgtagatagctagttttgtgtgctcatgcaattttttactgggtggagcctagatcgatgtggttttgttgtatctcttgtgcacgcgtgtatgtaagtatgtggaaccttgtaatgcttgaggt

SEQ ID NO: 287967 - DNA, 432 bp, Zea mays
cccacgcgtccgcccacgcgtccgcccacgcgtccgacttgcagctcttggatcaatccagtttgtgtccaacattgcttttgcctactttgttttgaacaagactatttcagtgaaagtcatggtagccacaacgtttattgtctttggcaacatcttcttagtatccttcggcaaccatcaatcgcctgtttacacgccggagcagctgatcgcaaaatacagcaatttggtgtttgttctttattgcatgtcattggtctttgttgttgcgtttaaccattatctctacaggagtggagaaactattatttcaaatagttcaaaagatgctggcacatattggcgaacaatgttgccattttcatatgctgttgtatctggtgctattggatcttgctcagtcttgtttgcaaaatcattgtctaacat

SEQ ID NO: 287968 - DNA, 571 bp, Zea mays
agaatatgctccgccaatgctatgaattcattaagcacgatgattctctcctcaatgcgaatctcgcactcgtgagagcagatatttcgaggctcccttttgcttcttgttcagtagatgccattcatgctggagcggctatccattgttggccctcaccctctaatgcggtagctgaaataagccgcgtcctgaggcctggtggagtgtttgtgggaaccaccttcttatcctctcccaggaacaacccattctctgttgaagcactaaggccacttagacagattgttgggccagttaacaccagctacaactattttactgaaggagagctagaagacttgtgcaaatcctgtggccttgtcaactacagcagcaatgttcagaggtcatttatcatgttctccgggcaaaagccatactgaagaatcctgtcaaatccaagctctgtttagaagtatttgcatatatttgtgccatactgtgcataggttccttaaaaaaatgcatgttgcagactcttggaaaaggcctacgtttctgtgaatcaacacactgtttgttgtgctta

SEQ ID NO: 287969 - DNA, 327 bp, Zea mays
cccacgcgtccgtgcagaaatgtgtagtacatggacatcaaaagttcatgactccagaagactgtcagcacaatattgtctgcttttgccattgaattagagaaacatagtcttaaaaatttaagagcatctctggccgcagagggcgcgcctgtgccaacgacggaagcaaagaagctggcgtcctccatcgcgaggtccaagcaggagatcacagaggacttctcgtcgattggcaggacatggcccccgcggcggtctaagaagagaccaggtgcaacgacaactcaatgtaagaattgctggattttgtctcccctccaaatt

SEQ ID NO: 287970 - DNA, 327 bp, Zea mays
gtttcatcagtgcgatggcatccaacaagtccattgcgctcctcgtccttgccttggcactcatgttaacggtttcagtgcatggacagttatcgtcgccgacgcctgcaccaactcctgctgctgcagccccaacgcctacaccgacaccatcaccatcccctgcaccagcaccagcaccgacgacaacacctgctccggcaccatcccaaaaccgatgtccccctggcttccctaacctaatctccttaattgaaggcattaagacgttccttcaacagggcattactcttgtccccgttccattacctgtgacgaaccaacaag

SEQ ID NO: 287971 - DNA, 333 bp, Zea mays
  unsure (1)..(333): unsure at all n locations
ctttgcgccgctgttcaggcgcctcgcctctcctatccttgtcttgccctgtgtcccttcgtcgcctcggcgcgctcgcccttcgtccatcgggcttccgcgcgctcgcgtttttcattattccttctctgtaccccgtttcgatttcgagcggggtcagtttcttcttcaccggttgatttgttctgctgctttgcgtctccgtgctctcgcagatcccttgtagccgctttgcctccgcgcgacgccgggagcgagccgagtttggtttggccgggttgttcggtttgcggtttactctttctgcgatatacatacctanatcacttttgt

SEQ ID NO: 287972 - DNA, 461 bp, Zea mays
  unsure (1)..(461): unsure at all n locations
gagtgcacatctgacgaggggtggcaagcggctgttccaaaggggcgatccacagggagccgcagaactggtgcaggcacgaggaggccaaatctggcaaaaattaatactagttcactaaacagtgagaatggaagatacaaaggaagaggtatatctaacttctcttcccctcgagtttcacctagtgaggctgcagtttctattggttctactcctcttgcaaagaaattggctaagagttcaagcttcaattaccaaagcagttagcactgccgtctcatcgaatactggtgagaattctttcaatctcaactccaagccagcaagccctgccattgccacagctgctgccaaggtgataccatccacaacaccaagtgctagccaaacagtaaggaagtcactttcatacaaggaggtagcaatagctgcaccagggactcttgccanagcatcga

SEQ ID NO: 287973 - DNA, 521 bp, Zea mays
gagcagcgcggccatagtcccggccccggtcccgccggcggacggtgagatgagaaggaaggagagagtggaggagatcgggacggaggatgcctggttcaagcagagcagcgcagaggtttctgttgctcctggtggtcgctggaatcggtttaaaacctattcaacaattcaaagaacactggaaatatggggattcgtttttacatttatattcaaggcttggctcaacaatcaaaagttcacatacagaggggggatgactgaggagaaaaagataatgaggaggaaagttcttgccaagtggctaaaggagagtcttttgagattaggccccacattcatcaaaatagggcaacaattctcaaccagggtggatattctcccacaggaatatgtggatcaactatcggagttacaggatcaagttcctccatttccttctgagacagctgtaaaaattgttgaagaagagctgggggcatctgtaaatgagatatttgatcgatttgattttgaac

SEQ ID NO: 287974 - DNA, 329 bp, Zea mays
ctcgatctcacaggatggttacgctatgccatccgattcggatccgagcaagcgggagcaccgcgagctggcggaggagaaatgccgcggcggcggcgaaggtcctctgctccgtgcagcaaatgccgccgccgccgccggcgcacacggctgcccagagcacgatcaaggtcgttatcgttggggcaacgaaagagatcgggaggacggccgtcgttgcggtgagcaaggccaggggaatggagctcgcgggcgcgatcgactcgcagtgcactggcgaggacgcgggacagataaatggcatggacgagccgctggagatccctgtg

SEQ ID NO: 287975 - DNA, 428 bp, Zea mays
ctcaccacacacgtccaaccgcacccagacacccatccttatatacgcgcgcacttaacgtacgccgtgacgccgccagcagctcgctctcgcaccgaccgtcccagaaatatctcgtcggcggtcagttgagctgcgagcaaccatcaaccaatcaaggacgacgacgcacggatcgatggccacgctctcctcctgcagccgcctgagtagcggcaccggcgccgcggctatccgccggcagccgaagccgacccgtgcaggagtcctgttcaccagccggcggggctcctccgcgagcgttcgcacggccgccgccgctgccactgcggcgccggccgccgtagagcagcagaacacggcggtgtcggtgtcgctgccgacgtaggccgagttcgggctcaggcgggcgccggtctactgaagac

SEQ ID NO: 287976 - DNA, 345 bp, Zea mays
cttcatcgtcgagtactagctccctctctatccgtctccacggcggcggcggctgcattggcagtggcactacacagcacacgcgcggtaaagcagggaaaatatatatatactcttgaatgaaccaacggaattgagcagcacagagtgagtcagtgaattcaggtcatgtctgaatcaatccgccattacagggcaatgggactgggacggccaccacttccttttgccgtgacacactctggctggctggctggtggtgcttctcgaggtggatgccattcggtcgctgctggctttgctttccacaaagggaggggaggaaagaaaggttgaggaagaatc

SEQ ID NO: 287977 - DNA, 231 bp, Zea mays
caacacgctagagttcgccgacaaggacggcagggagcagtgcttctccgcgcacttcctctgccgccccgccgtgtatggcaagtccatgctcctcgtgcgcttcggctccaccctcaggtcgccgctcgccaaggtgctcccgtcctggtacttccaccagaacgcgtgcaaggtgttcgagcaggacatggggttcctgtcgtcgcagaacgaggtgctgctccggga

SEQ ID NO: 287978 - DNA, 312 bp, Zea mays
ccttgctgttgccgccgccgcaggcggctgccgcagcgtacggatgctgccactgtctcctgctcgcttctaccaccgtgccggcgaggagtgggtgcgtgggacgcgccagcagaatcacgctcgcgctccgctgcctcccgattaccgggcacaggctgaggagtcgaaaggttgcgtgccaagcgacgactgagaccgagcccgagggcaatggcgacgaggagaagaaagatgactttggagatgatgcttcatcaccttcagtttataatgttgcagaagcaaatgggccgggagaaaatgactcga

SEQ ID NO: 287979 - DNA, 309 bp, Zea mays
cgtgagtatccaattggaagaggaaaagccttgcagtttatctatggtagcaagcaagtggtaacaaaaggcggcatccttgccacaactgcaacaacaaacttgtaccggacggcacgatacaaggaggggatgacggatatccagtctcaatgctgcagccctgatgaagttgtttttggctctgacttccaccagtccttgtattgtcacttgctctgtggtctaatatactctgatgaggtccatcaggtgttctcgacattcgctcacagcttagtccatgcatttcaaacatttgaggaggtt

SEQ ID NO: 287980 - DNA, 559 bp, Zea mays
ggcgtatcaggctatcagctaacagatcggtgacggagttgcaccggtcataccaacataccactgcttgtgctagtttagattgctgcttgcttggatcggaagatactttgtggtttgtacgcttctagtaagcgtcaggcgtacgcagggttgatcctttgcttaccagaagatgcagttgaaggggggattttggatgcaacggagtttggaaacttcttgcgtggatacgcatggactgctcgagagctcattcgtcttgcagtagcgggcaggcaagtcgcatggaatggtggcggcagtagtcgggcggcacgtagctgcctaggttattagtagatctataggagttcgccggtggggttagcagcggctctagaccgtgtcttcttcctccgggccgatgatgtgcccatgggaggcgccgccggttctccttcgcgagccagccgtcgacgtgcttgacggggtcggatttctctatgcccggctcggcgaggtcacccgaaccattcatcttcctaacgcaccctggttgcgggatgttgccttggtg

SEQ ID NO: 287981 - DNA, 334 bp, Zea mays
cccacgcgtccgcccacgcgtccgcccacgcgtccgccacaccatggatagccaaactccactgcataacccgctgcgaagaaaccttctaaactgactaagtgatcgatctccttgtcctgaaaggctgaaacctaaggcgagagaggccacgggagagcgccatggttctcctgctcctgggctgctctcctgcatcgtcgcgcccagactgctctccaccttccaggagaagatgcagcaccgccggacagaaaatggtcaggtgctctctgaatgaagaaacgcagctgaacaaacatggactagtaccaagcagttaatttcatgcctt

SEQ ID NO: 287982 - DNA, 433 bp, Zea mays
attgcacagactcggagcaagataggcctagctggttacaagccaagaacaagtagagcggtagagggaaaatatatctggagagggaaacaatggcgggcgaggagggtcttaaggtcctcggcctgcaggtgagcccgttcgtgctccgcgtgtgcttggcgctgaacatgaaaggagtgagttacgagtacgtcgaggaggacgtatccaacaagagtgagctcctgctcaagtccaacccggtgcacaagaaggtgcccgtgctcatccacaacggtaagcccatctgcgagtcacccgtcatcatgcagtacgtcgacgagctgttcgccggccggccgatcctcccaaccgacccctacgagcgcgccactgctcgcttctgggctgcctacgccgacgacaagctgttcccagcgtggtacggcat

SEQ ID NO: 287983 - DNA, 318 bp, Zea mays
aactctcccggcctcacactccttgcgcccgccgcggcagatgccgctcgccggcattgccctcacgcccctcctcgtctcacctctcgcgccttccccgcgccgtagccgtgtagccacttccgccgcgagaaggccaagggctctccagcgagctcggtgctcggctacagccgcttccggtgaagccgctgagctgtcgcacgcgacactgctatggagggcggcgaactacccatctactccgtagcgctaataccactcacaaactggatacctagaagttgtttcggaattgggattgctatgactatacac

SEQ ID NO: 287984 - DNA, 346 bp, Zea mays
gatgcggaggaaaagagccaagttgacctcaagatggtgcaaggagtggtcttcttcgcacaacgatgacgtcagtcgaaccaacctgaagaaggttaaatcaagcaagtgcgcggccgagggatactcgtcaagcagacgtcgcctaacaaacactaacctagtgtttattctaggcaggccccggtgcacttgccacctccttgtgttttgaaatctttatcaccttgtttgatgcattaggtgataggagttgcgtgctaaaccgttgatgcattcccttccttggaaaattgattacccttccttgatacccgttttgaaaagaagttttgatgcttagcct

SEQ ID NO: 287985 - DNA, 648 bp, Zea mays
cccatattgcttgaggcaagagatgttttgggtggaaaggtagctgcttggaaggatgaagatggagattggtacgagactgggcttcatatcttttttggagcttatcccaacatacagaatctgtttggcgagcttaggattgaggatcgtttacagtggaaagaacactctatgatattcgccatgccaaacaagccaggagaattcagccggtttgatttcccagaaactttgccagcacctataaatgggatatgggccatattgagaaacaatgaaatgcttacctggcccgagaaggtgaagtttgcaatcggacttctgccagcaatggttggtggtcaaccttatgttgaagctcaagatggcttaaccgtttcagaatggatgaaaaagcagggtgttcctgatcgggtgaacgatgaggtttttattgcaatgtccaaggcactcaatttcataaatcctgatgagctatctatgcagtgcattttgattgctttgaaccgatttcttcaggagaagcatggttctaaaatggcattcttggatggtaatccgcctgaaagctatgcatgcctattgttgatcacattcggtctaggggtggagaggtccgcctgaattctcgtattaaaaagatag

SEQ ID NO: 287986 - DNA, 445 bp, Zea mays
ggaccgggtactggcagtgggagaaccaacagacggcccgcctcgccgcgtccggcgagaccaagtgcaccagcggcggcctcgccatctcgatcagcggctgcggcgacagcagacgtcgcaggacaccacggcgctctccgggtccgcctccaccggcgccatgacgtacagcttcatcaaggcggtggagtcggagccgggcaccacctacggccgcctgctgacggcgatgagagccaccatccgcgacaacggcggtgagttcggcataccgggccccatcggcaccttcttccgccgggtcatcacgttcagctgcgcgcaggagccccagctgtgcgcttcagagacgttcgacatctacaggaaaccttttctcttgtgaccagctcatttcatcatgtgctttgtattttgtgagatgtgcgtgatagagctagaa

SEQ ID NO: 287987 - DNA, 375 bp, Zea mays
atacacgcgtccgcggacgctggctgagacatctcaattaattagctaatgagcaagcggctgagctgcactcaagacaaactaccatggatcagtcaaacattagcaacaagcacatgacgatgacaaccctaatgctcctcctctgtgtcatagccattgcagattgcatttgccacgccgcagtggcagcccgggtggagccatccaccaccgtcggcagaactaacaggaggagacgaggcgatgatgatggcgaggtacaagaagtggatggcgcagtatcgccggaagtacaaggacgacgccgagaaagcacaccgtttccaggtattcaaggcgaacgcggagtttattgacaggtctaacgctgga

SEQ ID NO: 287988 - DNA, 331 bp, Zea mays
acaggccaagctcctcacgggtcctcacccgccgccatgctcctcacctgacgtctcctcatccacgcccaggctcctcaccgcgcccacgccagcagggggcttgcgccacagccagcgctctccggtccccacaccaccgactgcagccggtggttgttcgattgccgccccgaagctctccaccatcgccgccgtcgacgccctccacgttggctgctcctcctacaacaggttacataagaaaaggaaaaaggtagttatcggatggagtccatctcaattgatgatttccatggcattgatgatgagtctttagcaatagtagaag

SEQ ID NO: 287989 - DNA, 336 bp, Zea mays
gttcaggttagtgatatcgcctaaaaggaattaaagcatgatcaaagcaatttaaaattattttccacccccaaattattcagatcctgaatcatattgcagctagtgatggaggatctagatgagaacgaataggtagttatgctataaacagtgccagacatattgcagctagttatggtatttaagtgttccattgcttaatggtttagctgggaacgaataggcagtaatgtcagatatatctaaactgacattttagatgtacatgttaatagagaaaatatctacattttattccactgattcatttcaacagcaggcttgagcacctat

SEQ ID NO: 287990 - DNA, 456 bp, Zea mays
gccttacatccggggccaccggggcagcaccttcgtcgtcgtcatctccggggaggtcatcgccggcccgcacctcgacggcattctgcacggatatatccccttaccttcatggtactcgggatcaaaatttgttcttgttcctggaacacatgtccagattgataagctcttggctgagagagggaagaaggctaagtatgctggtcgctaccgcattactgattcagattcattagatgctgcaatggaggcagctggccgaatacggctaactatagaagcgaacgtgtctcctggaccaccaatgttaaatctccgtaggcatggtgttaatggccgttggcatgaaatctctgataatgttgcaagtggaaatttccttggtgctaagaggcgaggggttgttggtggcattgattatggattcaccggtgaagttaaaaaaatagatgt

SEQ ID NO: 287991 - DNA, 452 bp, Zea mays
aaagattgttcgtacaggagttgcactaagtcaaaagcaatgtctcaccattataaaacttgtgtcgatgagcaatgtcctgtgtgcagcgttgtaaggaagtttttgcgccaatcaactgaacaggcatctaagcaaaaaactcttgagtctagaaaacttgctcaacaaaatgtgcctcagagaatcatgaacgggatagaaggtgatagaatggatgttgatccaatgtcagctgaagcgttcgaggatcaaccatctgttccaaaacgtttaaagatgcatcttccatcactcagtggcccagaaaatgatatctctgtagtctccaatcatcatgtaaacccaggctttctattgcaggaagcacagcctgagcagcttgagcacaataataggacaacatatctgaaacgagaggtagatgcaaaggctgacattcgggctcctca

SEQ ID NO: 287992 - DNA, 221 bp, Zea mays
cggccactccgcgaccaggctctcgcagctatcccttcatcaacaaccgatcagcctcaagtgccccgagcctccaccgcgcgacacggctcgtcatggtctccgcctaggcgtctctcgaggccctcatctttgattgcgacggcgtcatactggagtcagagcacctccaccgccacgcccacaacgacgcgttcgagaacttcgtggtgcgctgcccc

SEQ ID NO: 287993 - DNA, 439 bp, Zea mays
ctcctcacggcccccaagccctccgccgcggcctccgacctccccgagggcgctcagtggcgctacagcgagttcctctccgccgtcaagcgcggcaaggtcgagcgcgtgcgcttttccaaggacggcggtctgctccagctcaccgccgtcgacggccgccgcgccaccgtcgtcgtccccaacgaccccgacctcatagacatcctcgccaccaacggcgtcgacatctccgtctccgagggcgagtcggcgggcccgggcggcttcgtcgccttcgtcggcaacctcctcatcgcttttatcgcgttcgctggcctcttcttcctcttccgccgcgcgcagggcgggcccggcgccgggcctggtggcctcggcgggcccatggacttcggccgctccaagagcaagttccaggaggtgcctgatacgggtgtca

SEQ ID NO: 287994 - DNA, 370 bp, Zea mays
cccacgacgtccgcccacgcgtccgcaaagttaataatttacctgagacagaaaaggcgtttcaggaactgaggaggcggcgttgctccctggacattaatgttcttaacgccatggtatccatatacgggaaaaataagatggttaagaaggtggaggaggtcctttcactcatgatggagaattctatcaaccacagtgctgcaacctataatagtttgatgcatatgtattctcgtttaggcgattgtgaaaagtgtgaatcaatcctcactgagatcaagtcaagtggcatgcgccctgatagatactcttataacactgtgatatatgcatatggaagaaaaggacagatgaaagaagcctcaag

SEQ ID NO: 287995 - DNA, 357 bp, Zea mays
gtcatcatgaacgacaacttcgacacggtggtgacggccacccggtggggccgctgcgtcttcaacaacatccagaagttcatccagttccagctcaccgtcaacgtcgccgcgctcatcatcaacttcgtgtcggcgatgacctctggcaagatgccgctcacgaccgtgcagctgctgtgggtgaacctgatcatggacaccatgggcgccctggcgctggcgacggacacgcctaccaaggcgctcatgcgcgcccgcccatcggccgcactgcaccgctcatcagcaacgccatgtggcgcaacctcgccgcgcaggcggcgttccaggtcgccgtccttctggcgctgcagt

SEQ ID NO: 287996 - DNA, 405 bp, Zea mays
gaggatgatgcatttgaggttaatgatggagaggacatgaattggagaattggggatggcaggggggatgagggaatgtcacattctttgcaacgctgtaacacatttggaggcatggagtttgagaacctgaatgaaggggagactgtaatgaaggatgagttgaggtttgatgatttccctgcgagggcatcttcagaaaggatgacaccatcagacctcctccaagccatgaactcaattccctcaacgtacaatgtagcagggaatgtgcatgatctgccttctggggatttcttggctatgggggctgatgcacataagaatggagtggatctgggaccagggagctcatatttatttgggaataatggtaagaggaatattgatgatattgatgggtac

SEQ ID NO: 287997 - DNA, 385 bp, Zea mays
aaaaaatctcctcatgtcttctaccacacaactctctagacttctcacacggcgctctttgctcctcgcctctcttctggctgcatggcccttgcgctcgctcagcttgctagtgaccagcacatggcgctcggcctcaatttcgccattactgtgtccctgcagcagcgccgtccggccatcagcagcatcggcgagctcgcttcgagctccgtccatggccgcgagtccacctccgctgagctgccagtttccagctcctctatcatttgctccggcgtgcgggcgtcactcgtccgtgatcccagccgtgctagttgacatggtcggccattttagccggcatcgccaccagccgtccgtcgccttcctgctccccacgccg

SEQ ID NO: 287998 - DNA, 476 bp, Zea mays
cggacgcgtggaagttggaatgaccacttttttctactcaaggttgagcatgatgcatattacattatcgatacctttggagaaaggctcacatgaagggtgcagccaggcatacattttgaagttcgacaagaatacgacaattcacaaggtacctggggaaaagaaatcttgtagccccgactcaagtggaccaatgaaggattcttcaggttctgagagctctacgactgaccaggacagtgggaatgatactgaagaggaggtgcttgtgtcgaagggcaaagaatcatgtaaagagtacatcaagagtttcttggcagccataccaatccgggaactacaggcggacatcaagaaaggactgatgggcatcaaccccattgcacaacggctccagattgagttccagtacacccagtcgtcgccaaagagactgcatcaagcactcagcttcttaccatggaggccccctt

SEQ ID NO: 287999 - DNA, 474 bp, Zea mays
ggcgaatttcttcaagggacacggggtcggagatttcaccttcagcaggggcaggctgtcccaatggcggtgccgagcaaagctagctgttcgtggaacaccagagaacccgttgattggtttataccaggacgggacgcattctgttatagatattccagagtgcagagctcatcacccaagcattaatgctgctgttaagttgttaaggcaaggtataactgagctaagtattcagccatttgatgaagatgctggagctggtgaactcagatatgttcagatggccgtgacaacatataacacatctattccggttgataaaagatacgagccagggaaagttcaagtttcattggtttggaattcaagagacgagcgctcccagaacgcagagaagctgacttcaataatagaatacttgtggacaaatggtgggccaaaaagtagtgtccatctcattcattctatatg

SEQ ID NO: 288000 - DNA, 411 bp, Zea mays
caaaaaggtacatgttgatgacataggtgaaactgaatttgagatatatccagaagaaatcactgaggctatcaaggcaggtcttgaggaacctatttacccagagcctgagcttgaggtgccaaaggaattgatcactcaatcaaagctcgatgaactgaaattgcaacacaatccatcatttgttcctttaaccacagaggagaatgcggtgaaagtgtttgacagtgaaactggtatatcacaacgccgtctttctaacggaatttccatcaactacaagattacacaaaatgaagctagggttggtgtcatgcggctcatagtagggggagggagagcgacagaagattctgaatcaaagggatctgtcattgttggtgttcgttccctgagtgaaggtggctgtgt

SEQ ID NO: 288001 - DNA, 528 bp, Zea mays
gaatcatatcgcaggtcatgttgggacaaaatcaaaagcacaatgtattcaccatttcattcgtctcccggtggcagatggtttgttagagaacattgaagtgccagaagcatcccttccatctggaatgcaaagcagtggatttttgcattcagattccaatggcagtacttcaggtagccaacctggaaaccagattccattcattaattctgctaatccagtcatgtcactggttgcatttttagctgctgaagtaggaccaagagttgcagcatcctgtgcaagtgcagcattatcggttttgacaagggaagattccaggatgaatgcagaaggcattgatgctatgggccatggtactcatctcaactatggaccctcatcatccatttcttctgaaactgtgaaaaatgctgcaagctgtggcttgtcagcagcagcaacaaagtccaagctttttgcagaccaggaggagcgtgaaattcagagattatctgccaccatcataaatcatcagttaaagag

SEQ ID NO: 288002 - DNA, 463 bp, Zea mays
agaagcgcagatccatggccatggccatggggcaccgccagtcgggcagctgcgcaaaggtgaggcccggcggcatcggcatcggcattggcatgggcatggtgtccaagcagcaccaaagaacaccgccgccgtccgcgccactgtctacacctcgtccacatcctctaccttagacctgtcgccagcagccaccacttgacgcgccactccgtcgacgtcaccaaagacgacaagccgcttgagccgctgccgccggcggctgcagagacagagagcacgcagcagcaggaggacgaggacggcgggccaaagctggacccgaggcggttcgaggagaagttcgcggtgctgaacacgggggtccacgagtgccagtcctgcgggtacgctacgaccaggcggcgggggacccgtcgtacccagtgccgccgggcctccccttcgcgcactgcccgatgac

SEQ ID NO: 288003 - DNA, 282 bp, Zea mays
gaagtccagcagtgtgctggtagacagaacatctgagatacaaaatgtgtctgagaagccgcatgatgctaaggtgatcaatcctcaggagccgcgtgcctctgataagcaggcgagtgaggctgagaaagagaatgaactacaggaaagtcattgcagcggcagtcagaaccaagaggatgcagcgaaaactgcaaccaaccatccaccaggtccaagcttgaaggcggcaggtgcggatgggaaacagcagtactggagaagtcgaaaatccaaagcagc

SEQ ID NO: 288004 - DNA, 299 bp, Zea mays
  unsure (1)..(299): unsure at all n locations
cccacgcgtccgcgcagttggcactcgtcgcggcagtcggcgctgtcccctcccctcccctcncctcccgccggtcgctgcagtcggcgcccaacccgtccatccgtccgccagagcacatctcacgctgcgggtcgaacagcccgtccgtcaatcaggtttcaggccgacggcggcacgatggcctgccccgccgccaccgccaccacggctcgcatcggggcgcggagaggaccgtgcctgtcgaggagcgagaggagggccagcttcctcgtccgttccacgtccctgctcccgga

SEQ ID NO: 288005 - DNA, 346 bp, Zea mays
agccaaaggtttcgaagcatcccagcgatcgagacgacaacggctatagctgttcgttgactgcggactccaaataagatgcaatactacaccaaacgaagggacaggatcaaccagaagatgaaaacgctgcagaagctcgtcccgaactcgaacaaggtgagacgatcgaacgcgactcatctgacaacggaaccgatatatatatatgtatgacctgtgagcgggaagatccgacaccgttgctgctcttgttgccgtgcccctgaacctgaagcagacagacaaggcgtcgatgctggacgaggtgatcgactacctgaagcagctgcaggcgcaggtgcag

SEQ ID NO: 288006 - DNA, 635 bp, Zea mays
cgaaaccacagccacacaggcagccggtgctgggcctcggcactcggcagccatggttcgccttgcgaagttctatctcgtctgctacaactccctccaatcgctcggatggttcgtctccctcctccgcctcctgccctgcctcgtccctcccttccctgtccactccgcgtacgtggtcgccggcgacctcatctgtttcctacagacatgtgcgatccttgaaacggtccacgctgccatcggattggtgccgaccgcgccacttcttgctttcttgcaatggggagggagggtccacttcatcctggctgttgtccggcaaattcccgaggttcagagcagtccatctgtgttcataacatttatagcttggagcatatctgaggtcatccgttactctcactatgctctgactaccttaaaagtttgtccagcatggctgacttatctcaggtacactgcttttatcccgctgtatccaatcggggttggcccaggagaaatgtggacaatgtaccaagccctcccgtttgtgaagaagagggacctttactcaggtttcttcgagaagttctccatgagctaccgttcctttctagtgggtgtgctggtgctctacccgttcctgtggc

SEQ ID NO: 288007 - DNA, 306 bp, Zea mays
ccaggcacaaaaaaaccaaaccaaaccaaaccgaaagctgtcgccaccgctcgccggagaaggagcaaacgttccccaacccaccggagctccctccaaaacccaccacaaggcttgcccaaggcttcccctcgcccatgccacgctcgcgcctccccccgactccacacccgcgggcatgatccgcggcgatggaggactcggcgccatcggccgccgcacctgacactcccctttcccctccaccttccacgcccccgcatccgcatccgcatccgcccgatgatgaggggggctgctgggtgc

SEQ ID NO: 288008 - DNA, 307 bp, Zea mays
caaaattgctatgcccatattaactcctaccttttgcatagggttctttgaggtcttgcggacacctctgttgtctctagattttatctcggttttcgcaatgaataaatttgcccttataatatgttattattcaagaaatcgaggtaggatcaagccattgagctacatttctggtgctgagatctgtttgtgtgtcacatcgacaattgagatgcgctagtgcagttgattaatggggaatatgcagcttgtcttgtgtgcattatgctatgtaatcaatctcttgttcagcgaacgataaaat

SEQ ID NO: 288009 - DNA, 280 bp, Zea mays
tgtctttcttgaagactgcgtctagagaggctccggaggccgcattagcgtctcttgacaagttgatcagccaatgcagccgcttctattgtgcaggcaacatgtggctgctgtttggatcgtccggataacgagtacagtcatgctgccgtccatccgtttcccatcatctgatgagttgaagctgttcagggagagcgacgagtacatggatatgtgggcgtccaagttccgcccgatcgtggagagatccctgcacctgcacttcaccgttgacccc

SEQ ID NO: 288010 - DNA, 425 bp, Zea mays
atcgtgcacgactaccgcccggcggtgctgccctctacgagaaatggaggaaagagtacggtcccatattcacttactccatggggaacgtcgtattccttcacgtgagccggcccgacgtggtccgggacatcaacctctgcgtgtcgctggacctcggcaagagctcctacctcaaggcaacgcacgagcccctcttcggcgggggcatcctcaagtccaacggcgaggcctggctgcaccagaggaaaatcatcgccccggagttcttcctggacaaggtcaagggcatggtggatctgatggtcgattctgcacagccactgcttatgtcatcggaagagagagttgatagaaatggtgggatcacagacattaagatcgacgatgacatcagggcttactctgcagatgtgatctctaga

SEQ ID NO: 288011 - DNA, 306 bp, Zea mays
gttttagttctactaaagataaagtgttgagtgttctaaatgttaaaagcatgataagtgtagaagttaaataagatctaagttagagttcttgctgtttggactgcatgtccaattttattacgtggctagttaagtaaagtaaaccgtgttttctgtagaaatgttatatataaaacttgtagataatctttttatcttgcttgtgtaaaaatttcatgaccataggttcagtagtttaggagttatgatttttccaagtccagtttcagaatctgtccagattctgtactgatttcgaaaatg

SEQ ID NO: 288012 - DNA, 388 bp, Zea mays
gaaaaagagaacgaaggtgaccccgatatgttagagatgatagcttctgagttggagactctatctaaccagctcgcagactctgaagaaaaaatgaagtttctactgcttcccagcgatcctctagattcacgcaacatcttacttgaagtaagagcaggtgctggtggtgatgaagctgggatttgggctggtgaccttgttcgcatgtaccagagatactgtgagcgcaacaattggaagtttaagccagtttcttgctcagaagcagaaatgggtgggtacaagacatacgtgatggaggtcaaggggaaacaagtctatagtaaactgaagtttgagtcaggtgtacaccgtgttcagcgtgttcccttgacagaagctatgg

SEQ ID NO: 288013 - DNA, 441 bp, Zea mays
cggctcgaggtcttgtttgcgcatttgattggaaatgtgcagacctacctgcaatctattactgtgagggttgaggaatggagattaaagcaaagagatactgaggaatggatgagacatcgtcagcttccttgtgaactgcgggaaagggtgagacgatttatccagtacaagtggcttgcaacaagaggagtgaacgaagagtcaatattgcatgctctgcctgcagaccttcgacgtgacattaagcgccacctttgcctgggtcttgttcgacgggttccttttttctcccagatggatgatcagcttcttgatgccatctgtgagcgtcttgtatcatcactgtgcacaaaaggcacatacattgtccgtgagggtgatccggtgacagagatgctcttcatcatccgtggaaaactggaaagctccacaacaaat

SEQ ID NO: 288014 - DNA, 244 bp, Zea mays
gagtctgattccgaggaatgaagcttcagttcgatcctaaaaagttaggacccttacataattttagtttaaaaatgaataggaataggatccgatcctaatccgattagatccttaaagtttgtagcgtaaaattgaaagctcattaccacccctatgtccatacatcttatcagtgcaagtttgtgatcatgtgatacattaagcatatacgtgtatgtatttcaccagagtacctgcaccg

SEQ ID NO: 288015 - DNA, 349 bp, Zea mays
gaaatgtcagacaagcatcgaaagcactgaacaatgggagaagcttaattcttgctggccttgctgaaccaaaaagagcaaatggagaagagttgttgaataagttggctgttggatttgaggagcttcaaagaattgtggaagacagaaatagggatgcagtagctccaaagcagaaagagcttctccagtatgttggaactgtagaagaagacatggtcgatggctttccctttgaaataccagaagagtacagcaacatgcctcttctcaaaggaagagctactgtggatatgaaggttaagattaaggacaatcccaacatggaagactgtgtatttaagatagt

SEQ ID NO: 288016 - DNA, 330 bp, Zea mays
  unsure (1)..(330): unsure at all n locations
catttcgtcgcagtagtcggcagtcgaaaccctagtcccctcgctttccttccactcgccgtcgcggcgccgatagagccagagctgaaaggcgtaggaaaagctggtggaggaggggatggaccggatcgtaggcagcaagtacaagctgggtcgcaagatcggaagcggttccttcggggagatctacctcgcgacgcacgtcgacacctacgagatcgtcgccgtcaagattgaaagcagcaaaaccaatcatccacagttgctatatgaggccanactgtacaatgctcttcaggagggactggtatcgcaaacataaaatggtgc

SEQ ID NO: 288017 - DNA, 302 bp, Zea mays
accacctccggccgcgtcaccatgtccgcggagtggatgcccgggcagccccgccccgcccacctcgacggctcctcgccaggtgacttcggcttcgaccccctggacctggccacggtgccggagaacttcgagcggttcaaggagtcggaggtgtaccactgccggtgggccatgctggccgtgccgggggtgctggtgccggaagcgcgtggggctgggcaactgggtgaaggcgcaggagtgggctgccgtccccggcgggcaggccacgtacctgtgcgccccggtgccgtggggca

SEQ ID NO: 288018 - DNA, 362 bp, Zea mays
aaatatgacataggcgaagggttcggccatttcggcatcgcagtcgaggacgtggccaagacggtagagctcataagagcaaaggctggaaaggtcatcagggaagccggtcctgtcaagggcggcgagaccgtcatcgccttcgtggaggaccccgacggctacaagtttgagatcatcgagaggcctggaactccggaacccttgtgccaggtgatgctccgcgtcggcgaccttgaccgtgccataagcttctatgagaaggcctgcggcatggaactgctccggaagcgagatagccctgagtcccagtacacagtggcaatgatgggttacggccctgaagacaaggacgcggtgct

SEQ ID NO: 288019 - DNA, 349 bp, Zea mays
attggaccaggacttagtctatgccttagagttggtgttcataaagctagacaggtagcaaaagcatttggcttgcctattgttggagttcatcatatggaagcacacgcattagtttccaggctagcgaataaggaccttgatttcccatttctggctcttctaatttccggaggacacaaccttcttgttctcgctcatggtcttgggcattacattcaactggggactactatagatgatgcgattggtgaggcatatgacaaatcagcaagatggttgggccttgatatgcggaaaggtggtggtcctgctcttgaagagcttgctctagaaggtgatccaaatg

SEQ ID NO: 288020 - DNA, 339 bp, Zea mays
caggcatctcgtccttccccttcctgccgccgttcttcacagggaacaagggggagaaggacgctgagaaggcgatgaggctcaaggaggagctcctcgacggccattgcaccgctggaccgtggcgccgaggccacgcccgaggacaaggagcgcgtcgagcagattgttcagcaactggaggcggtgaaccaggtgaaggagccgctcaagtccgatctcctaaacggcaaatgggagcttctctataccacctccacaagtatactgcagccacagaggccagagtatctgaggccgtttgggaagatttaccaatcaatcaacgccgacaatttg

SEQ ID NO: 288021 - DNA, 344 bp, Zea mays
cctggaactgctgttgatgtctggcaatttagtggttggtggccaccgcttggtgtcagtttggacaacattgtggcagatagccttcaagtatattttccaggagagaactttttccgtgcgtgccagctaaggaacattagaatctctaaagattgggtcaagtaccgatgggttgatattgaaacaaagtcagatgtgttgtcacagataccttcagatagtatccaagcaaagcaaactgataatcatgcactgtctgttggtgtgacgggctccagcagttctgcaatgcctgagcaagagcttgcagctacgcaggcgaactccaatggagatgcagc

SEQ ID NO: 288022 - DNA, 438 bp, Zea mays
ggtgcttgtacaagatgaccggcccgaggcttctgacggcggaacaagaagtcgaattctcagaaggcattcaggacctcctgaaactggaagccatccaaaaggaggttgcgcagtataatgctggtgaaccaacgttttcccagtgggcggcagcagccggaaccgatgagaacactctgcggagacgcctgaatcatggagtctactgcaagaacaggatggtgaaatctaacgtgcggcttgtaatctcgattgcaaaagaacacgaaggccccgggatggagttctctgatcttattcaggatggaatgcaaggcctgataagaggcgcggaaaagttcgacgcttccaagggttttagattctccacctactctcactggtggatcaaacaagcaatacgcaagtccgttttagaacaaacccagataatcc

SEQ ID NO: 288023 - DNA, 315 bp, Zea mays
cgactatgttgcaagccaaagctcctctccccagccgctaagtctgcctagtcctagagtttgcatgtgatggtctaccagtggtgaccgtagcaccagatttgcccacctcgccttggccagatcaacgcaaacaggtgtttgtccgggttgtgcctgttctatactctccattcaccagtgaaacacacagtgttgttatttccaattctactactttgtggtgcctggaccatgaccgagccaccgcgtaccggagccgtgggcagcttcaccaaggaccgaacaacctgtgttttctccaagcaacttcac

SEQ ID NO: 288024 - DNA, 275 bp, Zea mays
gaatgctcaactcacaaataaacaagagcaggaaggggccattggaggctctagtgaagcttcgtcttctttgagaccaagttctgtggtcaacccacacgacttgaggggctacataatgggattcgatccaaagaccttgcagctttgcgcgaactgcgctcatccgaagcttctaatctcatcgagaggcacagctgggctctttttgggggcgacatggaactctcccaggagattgatgaaccggtaaaacttgatccttcatccctgaa

SEQ ID NO: 288025 - DNA, 319 bp, Zea mays
tctgttttggccaagtacctcgcggcactatgcaagagtgggaacatggaggcggcatgcgaactgcctcatgtagcaagcagcaagagccatgtgggcttatatcgctatgagtcaacatacaagaacctgattcgagcattggtattgactaagagggtggacgcgctgccaaggcttatactgcaaatgcaagaaatggggcacatcccaagccggagcctctatgtgtcagttgtctgttctttgtgtgaaatgaataggtatgccgaggttcttgatctgttagacaaccagttaatgcggaatgagatccatc

SEQ ID NO: 288026 - DNA, 592 bp, Zea mays
tgctcccacagctcacttggcggcgagaagaacggacagaagcggttggcccgtgggaaggccaaggtgtatgaactgcttcttgtggtgctccgtctcagagtcaaggagggtcccgggggcgatgacggatgaagaattcttttcatcttgcaatgacaatgatatagagagtgaggggttcgatgatgttctgacagaggaggagaagaagcagttggaggctgcgctaaaaatggattctccggatgccggtggggaagaccaatctgactcatttgctggccctcgacatagttgctttgagccaagggagagggaggtacccattgaggacatgagtgtttttggaaatggggagggtaagcatgacaagaaaggttggttcagtaattggggaaagagagctcaggttagcaagccagagggggtgaagaagatggcacctccaaaggagctcgctctgtgtagatgacaaggtgagtgacctcctctttgaatcgccctcaaatgcacaaacaagaccaggaaggcattcagtagatgtagtcagagcagatgacaacagaaggatcagggaaagggatagtag

SEQ ID NO: 288027 - DNA, 428 bp, Zea mays
caggcttagcttattagcttcagagttctcctgcgtgttcctcttcctcccaagtcccaaccaaagaaaaacgcatatccttgtttggccatcgccatggcgtctgctggtcaccggagacacttcgccgacccacatgtgcttctgaagacgcagtacaacagcagttcccgccacgtatgcgacatctgccggtccaagatggccggcctcaccggctaccgctgcagcgcctgcgacttcgacatccacgaagcttgcgccgattacttcaagcagacaatctccttcttcgcgcacccctggcacaccctcacactaagccgcatgcccagttcctgcgacggatggtcctgcgacctctgcttggggggctgtcagccgggagacttggtgtatcgctgcaccgattgccgcttcgatgtgca

SEQ ID NO: 288028 - DNA, 356 bp, Zea mays
ctagttctagatcgcgagcggccgccctttttttttttttttaaatattcaccaaatgtttgcattagtagtacccccatccccaggtttccttgtttttatctacgtcgggctgttacaggaacaaactattcaagagggaaaaattgtacaagtaaaaaaaaaaactactctgtatgacgaatctttctaccatgctgtacatgatacctatgctcaacacaatatacagtggcatgctcggaacgggtgcatcgctcaactcatccataattccatatgcttcaaatcgtctctaccagagcaacatcacaaccaggcaatttaatatccgggatgttaaggttgatacttct

SEQ ID NO: 288029 - DNA, 428 bp, Zea mays
ggccactggactgctgtcgtgcggggtagttgcggccaaaggaacaagccaccttctccgagttggaattaggtgcggccctccgcatcaaaagggctcgtttggtgggaactttcgcttgcctactcgctgctgcctgcttcggtggtcctccgtgacggggattgctggaattggggttggaaggacattctgactgaattgctcgagtgaggggtggggtttcggcgcccgttgcttgaggatggaggagaggccatcgtccgaggcaggcgcgggcaactcgagggccgaggacgacttcaggagctgctgcggggatgaggaagagtgggaggacacggaggagtcgttcacggccggcgtcaccaagggggagcctggacgaggcctctgtgcgtctcttcttcaagggcgtgtcgagccct

SEQ ID NO: 288030 - DNA, 271 bp, Zea mays
tgtttatagagctccagacggtcgccgcagcgcgcgcggcggcgtagcctgtttgtactctgcaagctcactcagttccattccgtagcttgatgccttgattgattcccacgtagacttccatcgaaccaacacaattgcagggttttgagtttttgacccaaacgactacgacaaagagttcttatcatccaggggcctcgaccaccgtgctcgttttacaaaagctgtaattaaagactactttgcaagattatcctgattttctgtc

SEQ ID NO: 288031 - DNA, 596 bp, Zea mays
cgctcgagctcatgagccaggagtacaccagcaacgtcatcaagacgctcaaggagaacggcaaccagtacacctggggccccgtcaccgtgaagctcgcggaggcctacgggttctgctgcggcgtcgagcgcgccgtgcagatcgcgtacgaggcgcgcaagcagttccccgaggagcgcatctggctcaccaacgaaatcatccacaaccccaccgtcaacaagaggttggatgagatgggtgtagaaatcattcctgttgacgcgggtatcaaggatttcaatgtcgtcgagcaaggtgatgttgttgtgttgcctgcatttggagctgctgtggaggagatgtatacgctaaatgagaagaaggtgcagattgttgatacgacatgcccttgggtttcaaaggtctggaatatggtcgaaaaacacaagaagagtgaatatacttcaattattcatggaaagtattcccatgaagaaactgttgccactgcttcttttgcaggaaagtacatcattgtgaagaatatggcagaggcaacctatgtgtgtgattatatacttggtggccaacttgatgggtctagctcaaca

SEQ ID NO: 288032 - DNA, 438 bp, Zea mays
attatcattcttaaggttgacaagagaatcatcacaagcatttaatttctcaaccttagcaattaatttggcattttcaattctaaggtgagagatagtgtcatggaaaattcaagctcactagttaatttttcacatttctctacttcctgagcataagcatttttcgccttaacatgccttttgttttccttaataaggaattcctcttggctatccaagagttcatccttctcatgaatagctcctatcaattcatttaatttttctttttgttgcatatttaggttggcaaaaagagcaagcaaattgtcttcatcatcactagagctatcctcatcactagatgttgcatatttagtggaggctctagattttaccttcttcattttgccatcctttgccatgaggcacttgtggccgacgttggggaagagg

SEQ ID NO: 288033 - DNA, 425 bp, Zea mays
gtcaaggcttgtttctctacattcgcagttgccgcctaagagctttcgccctgccaggcttgagagctagtgctgccaaatccttccttggatgtctgatgcaatgcaatacctatgtttgatacttgtattcagcttgtgctgtttaatccttccttggatgtctgagacatacctgttcttgtccagctcatgatttttttccagtacattctgtatatcctgctgttttattagctgttgtgcattgcaagtgattacaaaatcaaggcttgtttctctacattcgcagttgccgcctaagagctttcgccctgccaggcttgagagctagtgctgccccatatccttccttggcatgtctgccacaatgcaatacctatgtctgatacttgttatttctgataatgggtgccctatgatga

SEQ ID NO: 288034 - DNA, 330 bp, Zea mays
cggacgcgtgggttttttttttttttttttttttttttttttgtagcaattagcaactgatgagaagatttcttcttcttttgcttggtttttttattctgaagtttgtgttcggcttcatgaggattactcaaaagccactcagctgtcatgactcaccaggagctcaactacacgatcttcatcagtacttcacacgttcactcagtattacccaaacagattaccctatcaattcacactctatatacgaatatacatacattttgcagctgctactgctagcagaaagatgtaaactccgtccggatatgtatattacctactgat

SEQ ID NO: 288035 - DNA, 357 bp, Zea mays
caattggattcacaattggttgtagaattgatcaaatgtttctcttcagttcaaggaagtcctatcatcctcgatgaaggtgtgaagttagataatgtgactaacacagttgtgacagcttcaaattggatcagttctaccctagggttgtctctgattgctggacctggacaaatctatatgttggagaaggttttcgatatgatttttgaaccttccattctgaagtatctcaaatcatctatacataaatttacctctgacatggaattactgaaaccttttgaatgggacttaaatgaagatgaatatatgctcttcagcagtgttctcaaatcacatttcagatccagatgg

SEQ ID NO: 288036 - DNA, 333 bp, Zea mays
cccacgcgtccgcccacgcgtccgcccacatccgccgacctgcctcgccattccgccgcgccttcgcatcgtccgcgcgcccggcccttttcgttctaccccggtacgactcgacggtggtcgtgggcgccgaagtgcggctccgaggcgccaggtggttcgtttgctgtttgcgcgatcgccggaggagtctgtgcaagctgtgctggctaagggtttgggggttcggattcagtggaggggctgcggcaggagggagctagagatgtacggatcgccgtcccgaagcggcgggggagctggcactgccggagagcagcctagggtttacca

SEQ ID NO: 288037 - DNA, 363 bp, Zea mays
gatcacctgaggaagatggtctgccagaacgcgtggggaagggacgtcaccgtgaggctggagatgagcaccaagatggtaggatggggccgtcttgcgagagagctaacaactctcgaggccgcctcatggcgggaagttcacggtcggagggcgtgtcgagccttcccggtgcaacttcagtgcctgcgctgttggcaaccggcttgtcctgttcggaggggaaggcgtgaacatgcagcctatggacgacacgttcgtgctcaacctggaggccgcaacgccggagtggcggcgcgtcaaggtttctgcctccccgcccggccggtgggggcacactctgtcgtggctgaacgggtcgtg

SEQ ID NO: 288038 - DNA, 201 bp, Zea mays
gatcggtcagatagataccgaaccgagaccgagagtgcaaaccttccttccaccttccaattccagcagtcccacgcgcaaactttccccagctgcctgcgcccgcctaactacctcgcgcgtggcagtcggcatcatgtcgtgccatggacgacgacgccacggtcggattgcggcagtccagcagcagccggtttcgcc

SEQ ID NO: 288039 - DNA, 305 bp, Zea mays
cccacgcgtccggaacgacttcccctttgttgctgtcggcgcgttacttctatatgtcggtgcttaccaggtctcatttggtccaattagttggctaatggtatctgagatctttccactccggacaagagggcgtgggatcagcctcgcagtactaacaaatttcggctcgaacgctctggtgacatttgcgttttcacccttgaaggagctcctcgggccagccaatatatttttcctgttcagcgtcatagcagtgctctccctcgtttttgtgaatctcgtcgttccagagaccaaagact

SEQ ID NO: 288040 - DNA, 407 bp, Zea mays
gagtaataaaatcataatataacacctcatcttaaaatattcctcaaaccaaatactctttcgtctacgagtcgccttatatataaacaccaacctagcccttatcccactccaccaaaaccacagcaccatcgtcttccttgtctctgccttcccgctagctcggttcttgctgtgctagcctctgttcatccacacccgcgcgcgtcaatgggggagtacaacggcggcgtgagcacatcgtggaccattgggtcggcgcacggggggatggcgccacccacgcggcccaaaagaaagttcatccacttcatcgcgccggagttcatcaagtccgacgtcgcgcacttccgggacctcgtgcagcggctcaccggcaagcctgcttcctgtgccgcagcagcacg

SEQ ID NO: 288041 - DNA, 342 bp, Zea mays
acgaacacagacacacatgtttggcccccagcatccaccacaaatgatgaataggtttgataattttgggatgcctgacttcagtgatccaagagcaagaccatcaatgcaccatggcaggcaaggtcaacattttcctctccatggctctgagtttggtattgtgaagatgggtaatgggaggtcaaggtttagatccaagtatatgtccactgaagaacttgacaacattttaagaatacagcatgccgccactcatataaatgatccatacatcgatgattattaccatcaagcttgtctggccagcagatatgtggatgcaaggtcgaagcaccgctt

SEQ ID NO: 288042 - DNA, 310 bp, Zea mays
cctgcctgcacactgatgttgccggcaaagacggtcttagggctgccagacgccccgcgagtagcggcgttctcttcgcgaggtccgagctcagtgacacctgagattctgaagccagatgttgctgctcctgggctgaacatcttggcggcgtggtctcctgccaagaacggtatgcgcttcaacgttctatctggaacttccatggcatgtccgcacgttacaggagtagcagctctcgtgaagagcgtgtatccgtcatggtctccttcaggcatcaaatcggcaatcatgacaacagcaaccgtac

SEQ ID NO: 288043 - DNA, 557 bp, Zea mays
ctctctcacactgcgtctttggctcctgctccatctcctttgctgcgaactccgagctctgctcggccggatttttcatggcgcccagccccttgcgtcggccagcccctgccatggagccttcggctgtgcagctctctccctctcgcgtgccttggatttgtgccgcgccctgcagagctcccttggtgagcgcccaggtcgtccctctccgactctctctgctggcggctgagttccctggaagccgtgctctgctcgccatggatgtcgtccaccatggtgctcggtctagacgtcgattccctcgtcgcagtgagctccagccgattccttgcctcttccccgtttaaatcatggggcgtcagccgctgctccctgtttccggcagccgagcccctgcgcgcgcatcctcccgcgcagtccccagcgccaccggccaacctcgccggccaagctccctcgccttcaatcctttagccgtcgcgctcctcagctcgctggccgtgacctcgccgaggtttttcccatggccggctcactgctcaacccaagcc

SEQ ID NO: 288044 - DNA, 283 bp, Zea mays
ctcctgcttccctctcccttctccggttctccccctccgccgcggagatggaggccaccgcgctcgcgtcccactcgtccccgttcgccgtccaccgctcgacagggaagccagccttcgcctacccccaccgtggagggccctcgatggtctcctctgtccacctccgcacgtcccggacccccgcccgctctgcggcatggagaaggcggaggacggggaccgggctggttgtgcgcgcggagatgttcggccagctcaccaccggcctcgagtccgcctg

SEQ ID NO: 288045 - DNA, 288 bp, Zea mays
gcaactacacccagttccggtactcggaagccgtgaacgtgatcggtttcctgtactcggtgttccagttcgtcgcgctcgtcgagctcatgaggaggaacaagcatttgatcccccatcgcaagcgtggtctcttcgacttcaccatggaccaggtgctagcataccttctgatatcgtcgtcgtcgtccgcaaccgctcgagtgagcgacctgatcgacaactgggggagcgaccctttcccgacgatggcgaacggctccatcgccatatccttcatggcgttcg

SEQ ID NO: 288046 - DNA, 421 bp, Zea mays
tcgtcgaggtcaaccagcttggcattgacaaggctgttccaaagaaaatattggatcttatgaatgttgagaacatcacaagggagaacgttgcaagtcatctgcagaagtatcggctgtatctgaaaagactcagcgcagatgcaagcaggcaggctaacctaactgctgcatttggacgaagaaaccctgcttatgtgaacatgggactagacgccttcaggcagtacaatgcatatcggagataccggccagttccaaccactaaccattcacagccaaacaacctccttgcaaggatgaactctcctgcatttggtatgcatggtctgctgccttcgcagccacttcagattggacacaaccagaacaatctgagcacttccctagggaatgtcggggggatgaacaacggcaacct

SEQ ID NO: 288047 - DNA, 330 bp, Zea mays
catagagctaggtcattcgaagatgtttctgggaatccccttgtgaaggatgcctatgatgctgctcatgagactgagaggaagcgtgcattatcagcacttctctcccaaacaaagcagcaagaacgaaaggacgccgagactttagcagaagcaaaacgtatcatggaatctcgtgctgctagcaaaaatgttgatgtagctgtaatgcctccgaactctgataatgctatggtacctgttgatggtgtatctccttcaagcagtactcatccatctttagcacatccaaatacatcagctaacatcttgatacctaattcactacga

SEQ ID NO: 288048 - DNA, 480 bp, Zea mays
tatgcctccacgtactggctctagaaattcttgtaggcattcctttatctcctccacctccacgtagaaaccctaggattatctaccagccacgtctttcatctcctcggcgttatctgaacacagctcatttgttttcttatgccatttcttctctgttcctgaagtcacggctccctggagatgttcagctcgtctgcgcttggtctttgccggtaaccgagctgctctctatgctcgagttcctagcgccctgctccctggtgccggagcttcttccttcccctgcgctcgccggcgttcggatctgcgcgactctgccccagctcggatctccctccccagccgaggcccttcttccctggtctccccatggccaccgttcttcagtcgagctcctcagcgccgaagctcgggtccctgccgagctcgtctcgagctcccgcccaccctctgcccagccccagcgcccagcccatg

SEQ ID NO: 288049 - DNA, 414 bp, Zea mays
cccacgcgtccgcggtcatatccgtcgcctccgcatcctccttcctcgccctcacctcccgggaggagcagctcaccaagctcgccggacgagcaggtatctctgtccttgctgctgtttttgtcattaggttggtggaagcagcactcggtcttgttgcacttttcacactgctggggttcttcagggcactgatgttatacaatgggcagaaggcactggccaaggccgacaaggttgtcttgtctgaacgccaactggggcttcttgggttaaagatggcaggttcagaaggaggtgggaaaggtgagcaaatcaaaaggcctcccaagaccaagccatcaacaccatcggaaccaattgtgcctatcaggaggtcttcgttcagccatacaccatctcggccttcggggc

SEQ ID NO: 288050 - DNA, 437 bp, Zea mays
ctcgtcgacgagcagacaatagcatactgggaagataggttgaggagttggggctatgatccactgtttctaagtgttgataagcaatcaggatttactgctcttgaagagatgttggaaggacaaacaactgtagttgttggtccaagcggcgttgggaagtccagcctgatcaatgcactgaggtgtaaccaggacatatcagaagaagatccaatacataaactagttgaacagaatagtaaatggtttggtgaacagcgtgttggaactgtgtccaagaaaagtggtaaaggaaagcacacaacgcgccatgtctcgttgcttcctatagctagcggaggcttccttgctgatactcctggatttaatcagcctagtttgatgaaagtgacaaaaaagagtcttgcagaaacatttcctgagataagaaaagc

SEQ ID NO: 288051 - DNA, 332 bp, Zea mays
atacaaaagacaaagcggccaacacaatagagcatgaggacattgaagatcttgatggatgtgtggttgagcatttttctgaagaccatgttcttcataatgatcaggaaaaggagctaataaagatatcagaagctaaaattcgcgaatggtctaggggaaaagaaggaaatattaggtcattgctttcaacactgcaatatgtcttatggcctgagagtggatggaaaccagttccacttgttgatataattgaaggagcagcagttaagaaggcttaccagaaagcattattgtgccttcatccagataagttgcagcaacgaggtgct

SEQ ID NO: 288052 - DNA, 510 bp, Zea mays
gctgctgcgagcctgcgacctccgaggcggactcaatggagttatccactcccgttgggagctcccttgctagaacagcgaccatggccctcgttagccccagcttcaagataaccaatcaaatgcgtggcaggggtatgccacttgaatgccaatttcctcataggctaccatctgtagcttgttcaatgttgttaaacacacaaccttcacaacgaaccaaccataaagattgtggtttgcttcaggtgcaatgtacagaaaacctgatgcagtcgccagtatctttcagtgacttctctgtttcagtgtgtactcaagaggatggtctgataaagctacaggtaaatgtatctggcacaatgacagattctatcttcgagaaagttttcacaaagaatgttgccgccgctcaaccccttcccggctttcgacgaatgaaaggaggtatatttctaaaacgtttacaaccccagatttctgtccatcatttgacaattttaaattgcc

SEQ ID NO: 288053 - DNA, 343 bp, Zea mays
gcgagaaatgctggaagaggaggaaaggaagcagcgagaggagatggctaagctagtagaggaaccgaggaagctgagggatgaaaaggcagaggctgaagagcgatcaaaaagcgctacccctgttggggagaaggatgctaggagggaggtagagaagcggtgtcaggagaggaagaagaaagaggacaagggatcaagtaaaagcaattcagattgtgaggacattgatagaagattgaaccaagaaggcgatagaaagcgagactttgacagaaagagcgacttggacaggcgtgagagttacaagcctcgttacttcgatgctaacagtcacaataat

SEQ ID NO: 288054 - DNA, 377 bp, Zea mays
cctggttctccaaggtattcaagacgtacggattcatgctaccggtgatgcttgcgtccatgcgtgctgtaacagggctacaacgcctttctaatggccatggcgatcccgctcggtcagtcggccatatcatttataattgacgctgtatggccaaggagaaaaggcaaccgtgacgacaggtggaggagaccagtccaagacgaggaggaggaggaggaagatttccctagggacgccactgactgtgcaacaggtggtcgaggcagatacagcagcagctattatgacgcgaggagagggaggcagagctaccagtcaagtgtctctaacgattttgctgatgctgcctcagctgctgttggagctgatgatag

SEQ ID NO: 288055 - DNA, 627 bp, Zea mays
tgaagagcatgctaaaggaagtgattattgtgatgttggttcccgtactctggcatttccatctatttctacagctgacttccaatttgatcttgacagagcatctgatattatagtggacacagctgctaatttcttgcagaagtttgataatataagactagttcttgtagacctgagtgagaaatcaagaattttgtcattggtcaaacagaaggctgctaagaagagcatcgactccaacagatttttcacatacgcgggagatatcactcagttgcacacaaaaggaggtcttcagtgcagcgtgattggtaatgctgccaattggaggctaaaacctggaggtggaggggttaatacagcaatatatagtgctgctggagaatctttacaacatgctactaaaaaatgtgctgatgcactgaggccaggaacctctgtagttgttccacttccatcaacttctcctctgcatcaacgggaaggtgtgacgcatgtcatacatgtgctcgggccaaatatgaatccaatgcgaccagactgtcttaagaatgactataccagagggtctaagattcttcgtgaagcatacacttcactttttgagaattttgcatctattgt

SEQ ID NO: 288056 - DNA, 446 bp, Zea mays
ggctgagcaggcggtggctcttgagatggaagcctcacagcgtgtcaacgatgcggaaatggtgctgctgaaagcggagaaggccatagcctcgattgataccatggtggagctaccgtcacctgctgaagagcagagaagcactgaagaagacagcgtttctgaagggtacgagtatagcagcgatggcactgatgatgttcctgtgagggatgaggtgtcaagtatcgagcgcctaatggtcggtgacttgactgttcagggctttgagcagcttgaaccatcccgtgaaatatatgatgaagcaagcagcgataagatgtccgttgagcctcagaaagaagctgagcctgattcagacaagttgaagcaagggaagaagcaggaaatggaacgaaaggagttcaccaaggaaccactgagtgctcaaaaatcactgaagaaga

SEQ ID NO: 288057 - DNA, 455 bp, Zea mays
gtagtcgtgttcttgtgcggccggtgctcccggtgctccccatcacaccaccaaacggaccaggcgaggcgtcctccaggccctagctctgtggtgtgcgcctctgcgatactgcgactgcggggcgccggtgcccgtcccatcggccgccgaactgtgcgccccggttgcccactaggccactactgcagtctgcactctgcagataacacagaggaaggcggaagccgactggccgccgtggcaagccccgccctccggctccgcccgagagccgcctctacgtcggcgacctcctcctccgcccctcctcgctgtcgcttcggctccttctctcactcctgtttcaagtttgggaggtcatttccagttcagagagtcaatggaagcacgatgcagcatttcggtactctaaaagctcaagtttttagcagcactggcgaccatgatggacg

SEQ ID NO: 288058 - DNA, 364 bp, Zea mays
gctcttgcagatcaggatctgatcactgtcgccaatgtggagaaggaaggcatggagtcaaatgacatcctccgcttcgaacagttaagacgtgagctgattgagttagaaaagagagtgcagaagagtgcggatgaagctcaaaaggaggaggagatggttgtcgcagaaaaaacaactgcaccatcgcctggctcatcagtttcttctcgtcagactaccaagaaagaaaatgtcataactaaatcagtggagaaggtcgaagagactacaacgactgtgttgcaggggacacaactattagcaattgatacaggagctgctatgggtttgctaaaaagagctcttattggggatgaactaa

SEQ ID NO: 288059 - DNA, 546 bp, Zea mays
gtgatgagagaaagaaggtgctggtgaagaactctcgtcatgattctgagtctgatacagatagtggctatggcaagaagaaaatggaacatgcaaaaaatgaacgtgatgagagaaggaaggtaccggtgaagagttctcgttatgattctgagtctgatactgatagtggctatggcaagaagaaaattgagcaaacaaagaatgtacgtgatgagagaaggaaggtaccgttgaagagttctcatcatgattctgagtctgatgcagatattgactataggaagaagaaaatagaacatacagagggtattcgtgatgagagaaagaagataccagcgagaagctctcgccatgattctgactctggtgcagataataatgggaaaaacaagagaccagtgcaaagctcttgtcatgatttggaggatgagaagcctagattgagaaattataattatggctctcgggcttccgagcatgagaaacatagtaagtacaaggaaagctttcgccatgactcagattcagatggttattcccgtg

SEQ ID NO: 288060 - DNA, 270 bp, Zea mays
cccacgcgtccgagcagatacaaaacataacaaagcatacctttagtatatcttgaaactatttagcgtataaatagaagtaccaattattcagaacatatatcaaagtttcattccagcatctggcttgaatatgtagacaaaatgatttaaagagactaaccaatgatcaatgttagtggttctacttcagcaattgtaaagggatgcttattttttggtcacgatgcggtgccgtgctttcagccgtggaattatgtttaatggagt

SEQ ID NO: 288061 - DNA, 315 bp, Zea mays
caaagccttccctgttcccaagcgcttcgcctccaatatctccacgccgttcgcggtgcttccgctcgcccactccgtgtggccgctgcgcgccgctgcagctcccggcaccgtcctacgaaccaacacggccccagatttcttccagctcctccaaccgattcgaccggaaccgccgcacgatccccccaaagctcgcatcctttcctgcgtttatttatttcggttcagattccggagtgttcgttctgtttttgccctaagttggtcacaatgggcggcaataatgacggcgtttccggtgccgcttgcttg

SEQ ID NO: 288062 - DNA, 397 bp, Zea mays
cggacgcgtggctgcgtcgtcgctcacgccactactccctcttgcgccgccaacccggccgtgcccgcgctcggccaacaatccgaagatgctcatcttcatccaccagcagaaccgggtgctgctgaaccttccgcagctagtgacgtcgtgccgtcgggcggagttcgcgccgcacgtgatgaacctgcggcggcagaccccgctggccgcgatccacgcggcgctggcgtcggcggacgccatggtggcggtgcacggcgccgccgtcacccacttcctcttcatgcgcccgggctccgtgctcctgcagatcgtgcccgtgggcctggactgggcggccgacgccttctacggcaagcccgcgcagagctcggcctcgactacctcgagtaca

SEQ ID NO: 288063 - DNA, 400 bp, Zea mays
ggactaactagagacgacggaggacctcgctcccccttttataccatccttgagtgaggccgggggctcacttcgtgctcgagctccagctcagcagcaaggcgccaaggtagcaagctctgggtcgccactactgcaatggaaggcctgattccgttggtgtaccggaccatcgtggagtacaggaaggcgaggcaccaggtcgccatcgcaagccgcctgctgtacggcgaccaccaccagcagccgtgtggttcgtcggcgctcttccgcgtcgttgaccctgcagcaagcagcagcagctggcacgccgcgtcgtcgtcgatgtccccggccacgtcgccggcggcagccagggccagcggcggcctggcgtcgccgctcctccgctcggcgtcgc

SEQ ID NO: 288064 - DNA, 348 bp, Zea mays
gaaagacgatccggctgttgttgctctccttcaccttcttgaagtacttgtgatgttctcccacttttccttgcacgcttcgcgttccggttgtaacccatccgcctcatgccggcggagatctcctcccagaggggccccttgggcccaacctcctggtaccgggtgtcaaggttgctccgcagctgtatcagcgcgtgaacctccgccttgggccaccgggaggacgccgcgccgccactggacccctcgtgcaccgggatgtcggcgtgcggcgtcgtctcggccggcaccatgacaatgtccatgctttgctgttgcggcattggcggcttctgctgtggcggc

SEQ ID NO: 288065 - DNA, 479 bp, Zea mays
gtaaacctgaaccttctatgacgccagttgggccccactctccaattaagaatgaggtctgggaaacatcagtgccttttgtaccttcttttagttttcctgatagcacaacagcttcagaaagtcaatatgatccatttgttgactatgttgaacccctaaagttgggaatacaaataatctcaagccctccactatatcctgcaacattacaagtcagcatacagatcagtactgcagttactgataaatccttgaattgcaatgacaaattgaccaggaatataactgccaaaggatcaaatgaacctgcttactttattgctcctgatagaggatgcagctctagcctggatgatactatcaaggtgaaagcttgtgacagaaaaaaggatgcagttgattacaatgagaaaacaagggatttccgttttcatttggcagaacatataaaggagttggtcaaaccattatggaaa

SEQ ID NO: 288066 - DNA, 370 bp, Zea mays
cccacgcgtccgcccacgcgtccgcccacgcgtccgcccacgcgtccgcaccgctgaaccagatcaggccacagcgcatagctagaaggtggccgagagagtatggacgccggcaaggtggccgagctgcgcagggtcgacctccgcggcctccgacccggcgggcctggctgggtgcaagcctgcgcggcggtggctgcgtcgatggaggagctcggctgcgtcgtggtcgcccacggcgcgctggacggcgagctccggcgggacctgttcggccgcgcgatgccggagctcttcgcgctccctctgccggcgaacaggtggacgctgtctggccatatcggcggctacatcgggcccgacccggaga

SEQ ID NO: 288067 - DNA, 357 bp, Zea mays
ccctcaggcagctaaatcaggaaatcgtgctgctgagtcagctgtcacatccaaacattgttcagtactatggcagtgatttgtgcaatgagacactctcggtctatctcgagtatgtttctgggggctctatccataagctgcttcaagaatatggtccgtttggggaggcagtgcttcggaattacacagcacaaatcctttctggccttgcatacttgcatgggcggaatacagtgcatagggatatcaaaggggcaaacatacttgtagatcctaatggtgacatcaagcttgctgattttggtatggcgaaacatcatatcagcatatacatctatcaaatccttcaaaggg

SEQ ID NO: 288068 - DNA, 466 bp, Zea mays
cggacgcgtggggttgctgttcccgagggattgccattagcagtcacgctgagtcttgcatttgccatgaagaaaatgatgaatgacaaggcacttgttcgccacatagctgcatgtgagactatgggttcggctactaccatctgcagtgacaagacaggaacactgacaactaatcatatggccgttgttaaggcctgcatctgtggaaacatcaaggaagttaatggttctcagaatgcatccaagttacgctctgagcttccagagattgtcattaaaactgctttggagtctatatttcacaatacaggtggtgaggttgtaattcaccaggatggtaaatatcagatcctgggtacccccacagagacagctttactagagtctgcattgtcactaggtggagatgttaaggcaaaacgtgatgacactaagattgtgacagtggagcctttcaattcaa

SEQ ID NO: 288069 - DNA, 343 bp, Zea mays
gcagcggctgcctcaagcctaacatcatcgcgcacggggccgaccagttccggcggggcagcggcacgacgccgcccgccggctgtcgagctacttcaatgcagcctacttgagcttctgcgtgggcgagctggtggcgctcaccgtgctcgtctgggtgcagacccgctccgggatggacgtcggatttggggtctcggccgccgccatggccgtcggcctgctcagcctcgtcgctggcgtcgccttctaccgcaacaagccgccacagggcagcatcttcactcccatagctaaggtatttgtcgccgcagtgagcaagaggaatcaagtgtgcccgtcg

SEQ ID NO: 288070 - DNA, 552 bp, Zea mays
cttagcttttccatctccttttctcctccaccgaaaatgattcgatttggcgatttttttctctctctctctcactctaaaaccgcccattttttcagctataaatggccccctcgtccatgcttcaattccctttccccctctccccgaactcccttgctaggttaccacgttcttctgcccttcaggccctccctcatctgatcatctctctcactctttcagtagcagcgcagttttgttactgacacacgccccctgtcctgcctgtctgtgttgtcctgatagtactagcaaagtttggagactccatccaacctcttgtctctgaaacttggacttgttgccgatcccaaggggaggttctgccaaaatttcggcttctgaacatccatttccagaggggatcgagggaggttctgccaaattttgctcctttgatcataagtttcccagggggaggttctgccgaaatttcatctcctgtgctgtgacgaccatcagctttccagggggagagggggagattctgccgaagttttgtgggctgac

SEQ ID NO: 288071 - DNA, 343 bp, Zea mays
cccacgcgtccggttgtcgaacacttgcctgctcttgagctcgatcaagctatcatcagctgcgtcttgcgcacagcaacagcttcccaactgcaaccgtagcagccacaacttccatggaggcacagaacgtggaggttgctgccctggtgcagaagatcgcgggcctccacgccgccatcgccaagctgccgtcgctgagcccgtcccccgacgtcaacgcgctgttcaccagcctcgtcatggcctgcgtcccgccgagccctgtcgacgtgaccaagctcagcccagacggccagaggatgcgggaggagctcatccgcctctgctccgatgccgaggg

SEQ ID NO: 288072 - DNA, 319 bp, Zea mays
cccacgcgtccggcaccaagttgtcgatcacttgcctgctcttgagctcgatcaagctatcatcagctacagcttccgatcccaactgcaactgtagcagcgacaactgccatggaggcccagaacgtggaggttgctgccctggtgcagaagatcacggccctccacgccgacatcgccaagctgccgtcgctgagcccgtcccccgacgccaacgcgctgttcaccagcctcgtcatggcctgcgtcccgccaaaccctgtcgacgtgaccaagctcagcccggacgtccaggggatgcgagaggagctcatccgcc

SEQ ID NO: 288073 - DNA, 351 bp, Zea mays
gttgtcgaacacttgcctgctcttgagctcaagctatcatcagctgcgtcttgtgcacagcaacagcttcccaaccgcgcgcaactgtaccagcgaaactaccaactgccatatggaggcccagaacgtggaggttgctgccctggtgaagaagatcgcggacctccacgccgacatcaccaagctgccgtcgctgagcccgtcccccgacgtcaacgcgctattcaccagcctcgtccatggcctgcgtcccgccgagtactgtcgacgtgaccaagctcagcccggactcccagaggatgcgggaggagctcattcgcctctgctccgacgccgagggccacctcgagg

SEQ ID NO: 288074 - DNA, 310 bp, Zea mays
tgggagtctgcagcaatgcccataccacaggtgagcgagaggaggagccctgcacaccgccagaatatgctaccaccaccttcgacgagaagaggagacatgagggcagcaggtgctctacagtctccatctgagagtggccggttgattgggaggatggaggaacttcggatagctgatccatatgtgacctcgtcacccagacataagggcaaggacactaaagatggatctggcagattctctgcactctcctcatgcgattcaccacggcaagatgatctggatgatgtggattaccatttcgacg

SEQ ID NO: 288075 - DNA, 273 bp, Zea mays
ccacgcgtccgcgaccgtgggtcgcgtgggtcaccttcagctccgcctatgacttcgcctacctcgtcaagctgcacatgggacgacaagctgccaagggcgctcccggacttcctgcgctacgtccgcgtctacttcggcgccgccgtctacgacgtcaagcacatggccagggtcgcatgcgcctcccacggcgaggtcgcgctgctgggcggcctcgagcgcgtcgccgccgcgctccgggtgcgccgcgcacggcgcaaggacaccagg

SEQ ID NO: 288076 - DNA, 357 bp, Zea mays
ccacggcggcggaggcgggcggcgaggttaagaggccgaatgggagcgggaaggggaggagggggaggcgcctgctgccactgccgagctcctcctgcttccgtggctccacgacgccgtgcgaaggcgacgctgccgcagcagcggtggacttcgagtgtaacaagggaggggagactgcaagcctgacttcactcactcacactgtaaagtctcatgaagatgttcttgcaatgcctaaatctcatcccagtgaaggggaagcaccaccttcatcagatagcgaaagagatcaagatgatgatgtgctacagaatgctgccactagcacatcaacagcggccaatcaattgccaa

SEQ ID NO: 288077 - DNA, 420 bp, Zea mays
gcctctgatgatcagataaacagcctgccactatcagtaatcgagggtgaaggtcgttccgatgaaccctgcaatatatgcttggactgccctgctgctggtgattcactccggcgtttgccatgcatgcacaagtttcacaaagagtgcattgacaggtggctcgggatgaagatatggtgtccggtttgcaagtcaaatgtgttctcccagtaggccgtgagcatctcttatactttttggagcagcatcgaagctagattatagttggctgatacgaggcattgttacggctgcagtgtgtacattgcgttcttgacttgtgctctcttctgctccgtggggagcatttgaatgctctttttccgcggagagtttttttggctgtgagagaaggcacggaaaacctcattctgctaa

SEQ ID NO: 288078 - DNA, 362 bp, Zea mays
  unsure (1)..(362): unsure at all n locations
cggacgcgtggggtttccgcatacgcccaaggcgaggcatttcatcgaacataacgaccccccgttccaaaccatgccgctcacgaagctccacccctccctcgccgncgcctccacgctgaccccgaagcatagcctgaacgcaaaccgcgttgtcgccctgaccccgtcggcgtcccaccgcagcggcggtctccgggtctccgccgcctcggtgccggcggcgcagcgcacaccggcgtcacccgcagcgggcgctgcggcggcactgagccgcgtggacgtgctgtcggaggcgctcccgttcatccagaggctcaagggcaagacggtggtggtcaagtacggtggcgcggcgatga

SEQ ID NO: 288079 - DNA, 480 bp, Zea mays
gccacagccgcggcccggctgccgagcggcctcctccaccacgtcgtggtcctcgccgttgtgtccctcgcgctagcaggggctctgtactgatggtgagccccactgcacagtgacgacgcgacgccacgcgggagacaatcgtgctcctacagatcgaagaacaaaaattgcaggacagatacgagaaatggacgcatcacctgcctgccggtgtggacggcggtggtcctcgcggtccagcgagactgcgagccccgacgacggtgtgattattcacccgtgccgaccgagagagacgtgtgtagtggcgatacaaatttgattgaagacattattgtgcgttttcttagatatttattaattacacgataatacacacatgtattattatagcagttgagctcttttgtttgtggtaaatgctagacatcctctttttcttcctttttccatatacaagtcagtggttacgataat

SEQ ID NO: 288080 - DNA, 339 bp, Zea mays
gacagccttcgctttcaacctcttgttccacatccccgtgtgggtgggggtcctcatcaccggctccagcactcttctgcgcctgggcctacagagatacggggtgcggaagctggagttcctgatctcgatgctggtgttcgtcatggcggcgtgcttcttcggggagctgagcttcgtgaagccgccggcggtggacgtggtcaaggggctcttcatccccaggctcaagggcgacggcgccaccgcggacgccattgcgctcctcggagctctcgtcatgccgtaagctagctagctagcattcagggatattagctaccagtaccactaccaggt

SEQ ID NO: 288081 - DNA, 271 bp, Zea mays
caatcaaatgaacaaattaccattacaaacaaacacaagctaaattcaaacaaaacctgcgcttgcatgtactctggggaacaaaactaccccaggttcattttgtctttttttttcaaaataaggaaaactatggtcatggtacccacgctcacgcacctcacagatcgctgaattgtttctggaatgtgggattgatgcacgcaaatattgattttttctttcgctttgttccaaacaggaagtttcgcaacggtacccttgtccgact

SEQ ID NO: 288082 - DNA, 391 bp, Zea mays
gtagaatattgttatttcaagtaagtaaacaccagtgatcctcatgggtcacgaggtccaactcaccataattcctccagttatttatcttagttcctatattttgttgcatgcctgaccggctgaccctattgtgaagggactgatattttacatctacttatggagcatgtctgatggttataatgttcaatactataagtacacctacatgcatattcactggttaggctgctgttatggactaagtctgatatgattgttttgagtggatcatgtgttttggctttatgtggaagtatctggaaaatctgaaaacaacgatcactggaactgattctgtgtgaaagtacctagaaaacatagtgatttatccaaaatgagacagctt

SEQ ID NO: 288083 - DNA, 346 bp, Zea mays
cggacgcgtggcgagacgcgtgggcggacgcgtgggcacagaatggcaaggcccttgctctgcctcgcactcttgtgcacttccctggcgttcaccacctgcgccggcatccgcctggagctcacccacgtcgacgccaaggagcactacaccgtggaggagcgcgtgcgccgcgccaccgagcgcacccaccgccggctggcgtccatgggcggagtgaccgcacccatccattgggggggccagtcgcagtacatcgccgactacctcatcggcgacccgccgcagcgtgccgaggccatcatcgacaccggcagcaacctcatctggacgcatgctcgcgatg

SEQ ID NO: 288084 - DNA, 404 bp, Zea mays
gcgagggcggacgcgcggttctgggcctacttcatcgaccaaaagttcgcgcggccgttctggatgtcgttctggacggacgacgaggagcgcagggaacctatggcgaacgaggccaaggagaacctggctctgctcgaggcgcactcagggggcagaggttcttcggcggcgaggccatcggcttcgtcgacatcgccgcctgtgcgctggcgcactgggtcggggtcatcgaggaggccgccggggtggtcctcgtcggcggcgaggagttcccagcgctccgcgagtgggccgacgcctacatcaacgacgccaccgtgaacgcgtgaatcagtgcttgaggagccgcgacgagctcgtcgattacttctcctccaggaaggagatgtacttgctgcgag

SEQ ID NO: 288085 - DNA, 451 bp, Zea mays
aaacgaaccaaggtcatttacaaaacactgtctccacagtggaaccagacattcgagttcctggaaaccggagaacccctgattttgcatgtgaaggaccacaacgccgtccttccaaccgccagtatcggccattgcaccgtcgagtacagcatgctgtctccaaaccaatccgctgagaaatggataccgctccaaggcgtaaaaagcggagagatccatgtaagggtggcactgaaggtatcagtaccaggttcggagaagaagaacatgctcggggcaggtccgttcggcaaggggcacaagatgtcgacacagatgagagacagcctgaagagattcacgggcttgatcgacgacggcggtgacccggaggcactggcactagccgtggcggagatggaaggcatccagggcgagcaggaagagtacgtcgaaaccctggagcggg

SEQ ID NO: 288086 - DNA, 498 bp, Zea mays
agattgtcaatcagctcctccacaatgaggagaaattgccctatgcattctacgttggagacgaggagctctctgtccacctgggtgcttacatgcggcagaagaacgccaatgttgaggttactctgcgcatagtatgccaaccacaagcacttttccggatcaggccggtcaaccgatgctctgccacgattgctggccacacggaagctgtaattgctgtttcttttagccctgaatggaagagtttggcgagcggttcaggtgacaccactgttcgcttttgggacctgagtacacagactccactgttcacatgcaacggagactcagcttcggttctctgtattgcatggtcacctgatggaaaacatcttgttagtggtagcaagtcgggagaacttatattatgggacccaaaaactgtgcctcaattgggcactccacttatgggacacaggaaatggattactgctgtatcatgggagccagttcatt

SEQ ID NO: 288087 - DNA, 328 bp, Zea mays
gcaaagcaaatcaaagcacaacgagaaggtgagaaagagagagagagagagagagagagccatggggcagtgttcgtcctcccagcacccagaagcagagcagcagaagcagcagcagccggctgcctgtgttgacatccagaaaagctgcaggcaggagcagctgcggaagaaggcggctgcgcacatgaaccagccataccaggcatctagcaatgacgagctggtcctcctggtgtcgctggattcaatcaccaagattgggtgaattgttcatctgcggataatcatctctagcttgctgctgaccattacggtgaacacccac

SEQ ID NO: 288088 - DNA, 305 bp, Zea mays
ggcttcttctccctaatagctaccttcttcctatcaggctggagttcatcaaggatttgaacctggaactggagcccacaagcacacagaggaggaagaacaccaagactggttcccaacctatccaaggtagaagcgagcaacgttagtgtggtagtaacatggtgactgtgagagaggagatgcgtaaggggccatggacagagcaggaggacattcagctggtatgcactgtgcgcctgtttggtgaccatcgttgggacttcattgctcaagtctcaggcctcaacaggacaggaaagagc

SEQ ID NO: 288089 - DNA, 341 bp, Zea mays
  unsure (1)..(341): unsure at all n locations
gcgcactccaaggcgcccttcgtcaccgtcgccggccagcagcagcgcttctgccagcagtgcagcaggtttcatctgctcgaggagttcgacgaggtgaagcgaacgtgcaggaagcgcctcgacggacacaaccggcgccgccgcaagccgcagccggatcctctcaaccctgctgccggcttgtttggcaatcaccaccatggaggagtgacaaggttcacatcgtacccacaccgcttcaccaaatccatcgcaaagcccgaatgggggntcgtcaagacggagaccgacgcgttccaagaccagtactaccctgccgtccacctcaacggcgccgg

SEQ ID NO: 288090 - DNA, 323 bp, Zea mays
ccggccgccccggtcagaatataatccagatcagtatctatgggagaaagagtttatccttgctggacgtaaatacaaacgactagacttggagcttacaaatgcaagaggctatatcttaaaatgcagccactatgttcctgcttttatcccagagaatactgccctcccatgtgtggtctattgccatggaaatagcggatgccgagcagatgcaaatgaagccgctgttatacttcttccttcaaatatcactgttttcacacttgacttttctgggtcaggtctatccggcgggggattatgtcagtttgggttggcat

SEQ ID NO: 288091 - DNA, 548 bp, Zea mays
gtgctccagtgccgctcgggcatgacaagaaagaggaggagatggtgctgccaagagaagccaagtgcagtgacatggctgctcttccaaggagcgggcaatgatggcaagaaagccgtgtctaaggagctcgcaaggctcgtattcggttcctacagcaagttcaccgccatctcactatccgagttcacccacgtccactccgattccagctccggcgagatcacgttgaagaggcaaagatcactggacactgggcgtactacgttcagagattgtatgatgcaatactcgaaaaccctcatcgggtgataatgatcgacggtgttgagcaactggactacgagtcagagatcggcatcaggaatgcgatcacaaatggaagaattaggggctgcaatggcgacgagatcagtctgggggatgccatcatagtactgaattgtgaagcactccattcaatgtctaacgcttcatcccctcggctcaagcaaagggtcatcgataaggatggaaaggaaggaaatgacatgaacatggagaatggg

SEQ ID NO: 288092 - DNA, 570 bp, Zea mays
ccgactatcaaaagtacctgtcgttccacaacttcaaccaggagatgttcctgaagttctttcatgagctgtccatgctcccattcgaactgcaagacaagtcaattaaagatttgaagaacgttctcgattatggaagtgagatttcatatgatatgatgtcaaatgggtttgttgaagcattccttgaattcttgagaaacgatactggcagctacagtgtgcaagatcaggaagctggatttcggttttttcttgcttttatttccaatagcagggctaaagttcaatctctgcacgaagaatcatttcacctgatcacatccttccttgactccgagttgaaagtcgaagctttgctgacgctgcttgagttgattaagcactcgagttgtccgaaatctcatgtgatggcctctgttgttactcctccactgttcaaaatactggcatctgaagataccgaaggcctcgaattgtctctgaagatcatctgcgagctttcatccgacgccgatataagatcttcgttagtttcaatgggaataatctcgaagcttgttcgcattt

SEQ ID NO: 288093 - DNA, 419 bp, Zea mays
ctcagagttgggctcttgaatttcaacagcaccgagtatggctcctggacgcagttgctcccagctgacagccacgttatctccaccgtagggctcgagcacgccaaggacagcgtcacctggcagacgctgtaccctgagtggatcgacgaggaggaagagacggagataccctcttgcccgtcgctgccggagcctaacgtgccaagaggtgcgcgctttgacgtcgtcgccgtgaagctcccatgcacccgtgtggcgggctggtcgagagacgtcgcgcggctccatctgcagctctcggcagccaaactggctgtggcgtcctcgaagcgcaaccacgacgtccatgttctcttcgtcactgactgcttcccgatcccgaacctcttcccttgcaagaaccttgtcacacgtga

SEQ ID NO: 288094 - DNA, 170 bp, Zea mays
cccacgcgtccgatattgatgatcatttgttccgcaaacaaattgttagggaacaaatttgtgatatcgatgctcagttgttgggttgtgctacatgtctgttgccagtcttgttggtcagtattacgtagacagtttctgctcaaaaaaaaaaaaaaaaaaagggcggc

SEQ ID NO: 288095 - DNA, 375 bp, Zea mays
cccacgcgtccgccaacccacagcacgcaaggaatcacggccatccatccctgtcgcgcagttatcgtccgtctccccaccaacgacattattcatccgtcccgtcccgtcccgtcgtcccatgtggcctgtccttgtgtggtgcgttgccttcttcatcctcgcacacggcaggcacgtgaccgacaaccccagcgcacgaactccaaaatagcgagccgaagggggccacgagtcctccacctccctctccgccgcgtcgctcgcgcttgacgcgcgccgagagccgaatcggagccacgaggcagccgccccgggcggatcgatcctagggccagggcatgggcggaggggacgccgacgccggcggcgagc

SEQ ID NO: 288096 - DNA, 314 bp, Zea mays
atccctcaggcactgataaaaattctggagaaacttggtttgaagttggacgctcacgaacatatacaccaactgctgatgatattggacatgcactaaagtttgagtgcgtactcgtggattcagaaaaaaaagtctccaattggaccctcaacctcaatcatgacatcacgtgtaattcccgcgccaactcctacccctcgccgccttatccaagtgaatggggatgttttaggtcacttggatttagacagccaaatttcgtccttagggacattcactgtgttatcctacaatattcttgctgatgcata

SEQ ID NO: 288097 - DNA, 388 bp, Zea mays
ctcgccagacctgtgccgttcgacggtggcaaaagggaattctggctggagaagaacgaaggtgggatctgcatggccttgtcgtcgaaagcgctggtcattactgggattgacgatagaagatactggattaacatgccaacatctgaatctaggttccactccactgcatacctgcagcaaatctggtggttcgaggtggtgggagaggtggacttctgcttcccggcggggacggcctacagcctctacttcaggctccacctcggcaagtcctccacgcgcttcggccgccgcgtctgcagctcggagcaggtccacggctgggacaagaagcccgtgcggttccagctctccacgtcggacggccagcacgccgtgtcccagt

SEQ ID NO: 288098 - DNA, 301 bp, Zea mays
gcacatccatccaggtcatccatcagctcttccctctgctcacaactcacaagcaacagttctgttggagcttatcaatctctcgattcccaggaggaacggaaccaaaggtctgctggtcgcgcgcgtgccactagtcaggagacgggatgggcaaccttgtctcgcagtgcgtcgggaacggtgccggcgcgcggcctctggtcatcggggcgacggacggcagccgaacgatggtcgaggagaacaccgcggtcgcggacgtgatgatcgacgcgccggggcacgtggttgctcgcgc

SEQ ID NO: 288099 - DNA, 234 bp, Zea mays
ctcgcacggaagccaccacaccagcccacaagccgcaaccgccatcgacatgtcggcagcggaggagcaccggtggcgctcgctggtcttcggcgaggccgtggccgcgcagcccgcgcgctgggtgctcgcgtcgtacccgctgctgctgctcctcgtgcgtcctggccgcgttcgtcaggtacctgtggatcgcgctctccatgtactgctcgctcctgttcgtgctctcgt

SEQ ID NO: 288100 - DNA, 297 bp, Zea mays
gttatcttcctggacggagagacaggggaaggccgaggcgaggcagcatccagcaatccgccacgctcgtcgctcgcccggtcgccgcctccgcccactgccgcttcaactctcgcgctccctgtcttctccaagaccctaaccgccgacggcgagtgctctcgacgggttcggtgccctccacctcgttcgccgcctctttcctctcctcccgggctcgccgccgacggcgcgccggcgtggctgcggtgcgtcgccggagccggcaggtccggagtggaggagcgagaggtggag

SEQ ID NO: 288101 - DNA, 446 bp, Zea mays
caagccagcagcacggagcaatcttataataacatccattatcatcatcatcttaggtagctcctggatcaggggagctcgtcatctttggaacggacgcgaagaagccattcctagtagttggagttgtctcagttgaaagctctgactgactgcagctgatggaaccaaactaaagcacagagctgacctcaagctggacaggtgcacactttgtcatgatataggagtcactccaaagcacaatgtaatcatggacataccacttaccatggacgtcggtagaatcgtcaaaggcggacagctgattcagttcgagaaggaaagctatgcgagaatcggggtgatgccccgctatggcgacgcagattcagctgtctggtttgatgtagaaccgttctgcatgttccatcttgtgaactgcttcgaagaaggcgacgaggtcg

SEQ ID NO: 288102 - DNA, 331 bp, Zea mays
agcaaaatcctccccgtactgagagccaaagaaacaacaaaggcaggaggccggcgaactacgcgaggaaaatttcgtttcccgggaggaagtcgggagtcgagacacgcgcgggtcaaaatcgcctccgtcgctgctgttgctgtcggaggcgagcaggaaggggaaagaacgagcttggagccttggacagctcaagaagaggggacggggaggcggcagcctgtgagaaggcacgtgacacgtgaaggagcccaagcgagggtagggaggaaccgaatcgagacatcgactcggagcactggatctcgcgcctggccgccgccaagcg

SEQ ID NO: 288103 - DNA, 326 bp, Zea mays
cgtgggccggcgcgtcgaacggcggcgtcctcgtcgggctcgctgcctgcggcgtgatgatgagcatcgtgtcgacggccgccgacctgatgcaggacctcaagaccgggtacctgacgctggcgtcgcccaggtccatgttcatcagccaggtgatcggcacggcgatgggctgcgtcatcgcgccctgcgtcttctggctcttctacaaggccttcgccgacatcggcctcagcggcagcgagtacccggcgccctacgccatcgtgtaccggaacatggccatcctcggcgtggacggcttctcgtcgctccccaagaactgc

SEQ ID NO: 288104 - DNA, 373 bp, Zea mays
  unsure (1)..(373): unsure at all n locations
caaggtccaccaactcgatctcatcacccgtttcatcccccactgcagaggatgcacggtctccgtctgcttctgtgttgatgatgacaaagtttgctgacttgcctagggttgcgacatcagagaagaaggaatacccagtggatccatcccttccggacatcaagaacagcatctatgcttctgatgagttccgcatgtactcgttcaaggttcgcccttgctcacgggcatactctcatgactggactgagtgcccctttgtccacccaggagagaatgctcggcgccgagacccccgcaagtaacattacagttgtgtgccatgcccagatttcaggaanggtgtgtggcgtcgcggagacatgtgtga

SEQ ID NO: 288105 - DNA, 364 bp, Zea mays
aacagcttcagtgatgccgtctcacaggactacaagtccgagagcttgaactgcttcagtgtgatcaaggcagcctgggacgtgctcgatgagaggggatccactgacacagggctcctggagctcagtaaactgttcagagcctgcaagagcgtcaagcacgctgattcgattgcaggctggctacagacggcattcacctacactgccatggtggactatccaacaccggccaacttcctgatggatttgcctgcctaccccgtcaaggagatgtgcaagatcatcgacgggttcccggcaggcgccgacatcctggaaaaggtgttcgcggcggcgaacctgtactacaactacacaggag

SEQ ID NO: 288106 - DNA, 392 bp, Zea mays
ccgtgttcttcctcttcgtggccgcgcccagcgtggcgtccatggcatgggccaagatcaacggccagttcgacaacggcgcccggatcgcctacttcatcgcgctcttcctctacatgtcactggcggtgcgcatcaacttcttccggggcttccgcttctcgctggcgtggtgggcgtacacgttcccgatgaccggcgcgtccgtggcggcgatcacgtacgcgacggaggtggccaacgtgctgacccgggcgctctgcatcgggctgtcgggcatctccaccgtcaccgtcgccgggctcctggtaaccacggtgttccacgccttcgtcctcagggatctcttccccaacgacgtgtccatcgccatcacgaggaagaagcccaag

SEQ ID NO: 288107 - DNA, 346 bp, Zea mays
tcaaatcagagagtgggagcaacaaggtgagttccattccatcccatccatcagccatgtcgcagctggcgcctctgcccaaggtggtgatgggttcgctggcgttcggcgtgttctggatgctggcggtgttcccctcggtgccgttcctgccgatcgggcgcacggcgggggcgctgctgggcgcggtgctgatgatcgtgttccacgtgatcagcgccgacgacgcgtacgcctccatcgacctcccgatcctgggcctgctgttcgccaccatggtggtgggcggctacctcaagggcgccggcatgttcaagcacctgggcaagctgctggcgtggcggac

SEQ ID NO: 288108 - DNA, 881 bp, Zea mays
gtttgctttcagaataatacacgccttctggacgatggtgataatttatctctagttctctaaaagtcatgttgatcttaggtacttctggatcgaatggttcagctgctcgatcagacggaggagatttgacaaacacaacggtatttgtgggtgggctcgacccaaatgttagcgaagaggaccttaggcaaaccttctcccagtacggagagatttcttctgtaaagattccaattgggaaacagtgcggcttcgtgcagtttgctcagaggaagaactcagaggacgcattgcaaggattaaatggcagcactattggcaaacaaaacgtgcgtctttcatggggccgcaacccagcaaacaagcagttcagaggcgacaacggcaaccagtggaacaacgggggcatgtactacgcggcgcccccgttctacaacggctacggttaccctgcggcggccccgttccctgatccaggcatgtacgctgctccagcctacggtgcctacccgttctatggtaatcagcagcaagtgagctgacctggactaccgcgacacgcacgcctcgctcggagctggagactggaggtgttaggcgcttaggtgtagctctcggtagaagaagaagaggaagaaggtagacgacgacggtttcttaggtgagctagataccgtgactagtctcgtatagtgcgatttgttatacgtgctatggtctagcgccgccgacgactgagagtccgagtgtccgacacacctattgactggccacggcatgtcgaattgaacgaccaaaagaatttctgatgtcctggagctgcatgcatgctaccttgaagcagaaccataagctaatggaatcctttggcctctgct

SEQ ID NO: 288109 - DNA, 518 bp, Zea mays
cggacggtgggtgtcgtgccactacatccagaaggggctcttcttcccggcacccgacctgcccatgtcctcggtcgtgtcgctgctcctgtcctcgctgtcgcgggcgctcgccgtcgtcccggccctcgccggccgcttcgtcacgctgcccgacgaccgcatcgtcatccgctgcaacgacgcgggcgtggacttcctccacgccgtcgcacccggcctgtcgcttgacgactttctcgtccctgacgccgacgtgccgaccaagcacacaaaggacctgttccccatggaccggaccgtgagctacgaggggcaccgtcgcccgctcacgtcgttccaggtcaccgcactcggagacggcaccgtctttatcggcatcgtcgccaaccacgccgtcgtggacggcacctccttttggcaattcttcaatacctgggcggccatctgccgcggcgagtcccccaaactgccggacttccgccgaaacttcttcggcgagtccactgccgtcctcc

SEQ ID NO: 288110 - DNA, 386 bp, Zea mays
gtagctcggaataggctcgagctcgagcgttttattttcatggatgctggatcagaagttcataacaacaaaagtgactgtacagtattattggaatggaggctaacttgttatcatggtgtgttctgttactggtctatatatgaccataatatgttaatatattttctttaaaaaaactagtcaaagttagagatatttgacttagggaaaagctattgtgaactatagtttggaatgtgtggagtactggttatgttgtggctggcatttgcggttacatgcaactttctattcaatttaatatatatattggcagtgacttgatttctgtcattgctgtcaggggactaacaatcagcttgctctgcttgagaagatgaatg

SEQ ID NO: 288111 - DNA, 304 bp, Zea mays
accacgcgtccgcggacgcgtgggtgtttgatgctttaccagaacattgtatcagtgaccatagtttctacactatccctgtccggtgctgttccaactgaaccattgacatggaatttaatcaaagtttggttgcctgtaaatatcatctttgttggaatgctgatcacaagcatgtttagtttgaagtacattaatgttgccatgctgactatattgaagaatgtcgccaatgtcctgactgcttctggggaaacttattttttcaagaagcagcatggtactcaagtttgggttgctctta

SEQ ID NO: 288112 - DNA, 302 bp, Zea mays
gtttgtcgactcgactggcattgctgaacgaggcaaatgcgccttcatctcctcaacgccgcacacatgtttggtttcgccactgatttggcgtaagcgtgattgtgctatgtaaagtggattcagatccaatccaatgcgcgcaacattccatgccactgcccacaggaatccaattgtaagtttcgtcatactaattttacgaagcccgttaatcgcgataccagcaatccaaaaagctccccaaccccacccttcttcttcctccgccatcgttgcctccgttcaaaagatttcagaaa

SEQ ID NO: 288113 - DNA, 458 bp, Zea mays
gccaaccgggtattgtgcataggagccaggtgtattgaccctgcagtgctggccccctgttagtttttcatcacagcgaggtaggcaagtccattggatctgtccttagctccactcctatacttaagtgctggtctctgctaattccgagctctagccaaaaacctctacaaagatgttggagacctggtgttcatgctgatgttaactctccccagcccctcccaagttggcactgtccaaagcttgcacgccgtgacctaccagtagtgaccatgccggtcagtttggccatctcgccgtggccaggacaactcagcaaagtacacgatcatgctatgtgtgtgctgtgatcaccttgtcatggccagaacggagtcacgtcatcgtggaactagcgctgcgggcagcctcaccgtggaccgatcgactggagtcatccctggtcaatctcgcgc

SEQ ID NO: 288114 - DNA, 327 bp, Zea mays
ctgggtttggtgtttataagtatagactgctgcggattgagggccaagaacccatgggtagtgtgaattatcgagtagctgaacagcttaaggtggatgtgtttgctataaggccaacagggtatttgagctttgatatctccatgggccgtgataccttgtcagttgcactcttcaatgatgttgatgatgatcaggacccactcttattcgaatatctggcacgtccaatatttcctacctctgctgtccaggggaagtttgctgaaggtggtggtggtggttgtgattgtgctgagatttgctcaattggatgtaactgtgcag

SEQ ID NO: 288115 - DNA, 624 bp, Zea mays
  unsure (1)..(624): unsure at all n locations
accaacgcagctagagcactcgaaagagaagactgaagcgaaccaaccttcaccatctcaagacgaacaggccgcaactaatggtgacgttgctgcctcgatgcataccccttccgacaacaaacagaagagctggtgcattcctgcacctccaagtcagtggctgattcctgttatgtccccgtctgagggacttgtctacaaaccttataccgggcactgccctccggtgggaagtcttttggcgcccccattttttgccagctaccccacctcctcctcctccacagctgggggggatttcatgagttcggcatgtggagctaggctgatgagtgcccctgtgtacttcccgtctttcagcatgcctgcagtgtcagggtctgcagttgagcaagtgagccatgttgcagcgtcgcagcataaacggaactcgtgtagtgaagcggtgttggcatcaagggacagcgaggtgcaaggcagtagtgctagcagtccggcatcttctgaaacagcagctcaacccagggtcattagggttgttccccacacggcacgcacggcttcagagtcggcagcaaggattttccgctcaatacagatggagagganacaaaacgaccc

SEQ ID NO: 288116 - DNA, 322 bp, Zea mays
cccacgcgtccgcccacgcgtccgcccacgcgtccgcccacgcgtccgcggacccgtccgaaaatctccaaaacttgatcctgtcactgattctgtagggagagctaccaggcaactgaataatgactgttgcaaagtcttcatcaactaaggctgttgatggagaatctgggaagaagcaacataaaaccagtatgaaatttcagaaagaagatgccgcctctgataaagacaccgatgatgatattagtttgaaggaaatggtgtccccaacaaggattgatagatcaaaaggccaacaagaagatagagggacgtcatc

SEQ ID NO: 288117 - DNA, 331 bp, Zea mays
gcggcggggagatcagggacctgcagagcaagcaggaggcgccgggcgggtgcgggagctacttccagatgccgctgcactacccgaggcacagccgggaggactacgaggccatgcccgagtggcagctcgaccgcctcctctccgagtacggcctgcccgtcgccggcacagtccaccagaagcgcaccttcgccatgggcaccttcctctggggcgccggcggcattatccactgagctccaggtcttgtttgctgtgcacgtgcttgacataacgagcttgtatcccaattcccaacagaacacggcaccgtccatgtgctctttct

SEQ ID NO: 288118 - DNA, 557 bp, Zea mays
cccacgcgtccgtttttttttttttttaaacgatgaaacttttcgattttattccatatatatctataagttttgccgcaaattattcaacccgatcgagctagagctagagctacggctcgatcaacacagacgccgcattgcgcctgctcactagctaggtgttggtgggtgtttggtacacctgaccattacaaccgaacttaatacgtatagccttcacttcacgtggcttaatgcttgaggactttgaggtactatatataagtatactttgtgtatgacggcctgatccgcgcgcgctgctgcacttgtgcagcatgctagctaggcggcgccgccgtggagccaccaccgtaccgatcagctacggccggggtagcccggaaagccgcgcccgggatagccacctcctccgggcaggccaccaccgctgccgggatagccacctcctccgggcaggccaccgccgccgccggccactggtgccgcgccgaacgcctgctggacccagtcgacggtggccttctcgagcatgaacgccctggcgaggatgt

SEQ ID NO: 288119 - DNA, 332 bp, Zea mays
ctcctcgttctcccattctctctctcctctcccgagtccctccccctatccccccccctctccgcctccgtcgctagggctccattcccctgcgcatccgccgccgccgcatcccgcctcgcctccgccgcagcttcggcatcagaatcaccggattcggtggtgtttctcggctgcctcagcttccgccggcggaaggccccaggcggcgctccctgcagccctccggccttcactgagtcctccagaagccaaacatcgttgatacttcgaaggcagctgagtatatggtatttgtgggccactgtgctgtccatgcgagcggagagcat

SEQ ID NO: 288120 - DNA, 522 bp, Zea mays
ctgacggtgggggcatgtatggctacttctggattacaggaatgcttctagttgctggaggttgtatgtgatctttgaaacatgctcgatatgtgacacctgttttgacgtcatatgctatttattgtgtggctgttcgtgttgggtggctcggagtcttcttgacattcaacctttctttcttgacaaatgatcttcttaataagttggcgcaaggatacgaaggaagcactgaagaaagccagtttgaagacatgaaggattctgatccagttatggatgagttctatcgtagttgtgaattcccatcagttcctgacagtgaacctgagaccgtgtcttgcgcgaaccatactgctcagcacccatccaagatgtattacatgtacaaaaagaggaacctcctagtaaagtagtgaaatctgattctacttcattggatgagattaagaggataatggatggttcaaaccattatgaagttttgggtgtacctcgtaatagaagcattgatcagaagac

SEQ ID NO: 288121 - DNA, 379 bp, Zea mays
ggccgcccttttttttttttttttttttttttttttttttttttttttaagaaaagaagttgagcctcactccttattccattccaaccaactctacaggtttcttgcaaaagagcgtgggacgatgcaccatcatcttactgttcctctcctctaccacttacttaccctcctctccatctctcgcctcaccgatggcatctgctgcagcattgcccacagctatcaacctatccttctcttccgcgaccgtcgccggcttatctgatttttgcgccccagtcaacctagcaagcagcacgaaggacaccccaccaagcacgttgttcaagcagcggagaacaacgacggacgccttgaacaccggcgccggtgcgac

SEQ ID NO: 288122 - DNA, 489 bp, Zea mays
ggacgctggggatcaattcttcttcccctttcctcgatcccctttgtgcactgttcactttcttgcctgagagatcagctcctgagccgaccccatccccatggctgcttcttcttccctctccctcccagcaacgccggccgcgctccggcacggggcgtgccacggacgaccagcgctaccgaggaggtcgccggtggcggcgacgacgacaacgcggtgcgccgcgttacgccgggacgcgagcggcggccgggaccagtacggaggcgcgctggtggacgagggcatgtccgtgctgaggcggcggatccgggaggcgcggatggcggagaccaactacgaggctcccgccgagtgggcgccgtgggagaagcgctactaccccgctcacgtctgcgacgtgtccagcctcgtcggcgcgctgcagctgatactcatgggcaccaggcccggcgtcgccgtggccgtcgtcgcgctggtgctcgc

SEQ ID NO: 288123 - DNA, 421 bp, Zea mays
agtgtacaaattattgcagcttcgaaacgaatttgtattgccaattgtcgtgaatgtatcttctacttgggagtaaatcaccaaccacttattgtaggggataaccataaattacaagttgccccatttaatacttattatccacaactcggggaacatttggcacaagttggtgtggatcctaatgtcaacaagtgggaccaaccttttgtgttgggagttgttgatctgcatgactcattatctcatcctgccggggtttctgatgtccaggctgagtccaccacttgtctagatcctgatctatttacgaactttttgattcctagttggtttgaagtagaaggacctaccaaataccatccatttaccctgcctgaacgttattgggcgtcccaagggaaaagcatgcatctctgga

SEQ ID NO: 288124 - DNA, 334 bp, Zea mays
ccaggtaggtggaggcccggctcatgccgctcctcgccggcgccgccgacgccgggcggtggtcgacctgcaggacgtgttccgacgcttcgccttcgacaccatctgcaagatctccttcggcctcgacccgggctgcctcgagcgggagatgcccatgtccaagctcgccgacgccttcgacaccgccacgcgcctctgcgccatgcgcggcgccgccgcgtcgccgttgctctggagggccaagcgcctgctcaacgtcggctcggagagggagctcagggaggccatccgtctggtcgacgagctcgcggctgccgtgatccgggagcgc

SEQ ID NO: 288125 - DNA, 496 bp, Zea mays
cccacgcgtccgcccacgcgtccggtgcgaaggtggagagctacttgacagaatactttccagaggcgggaagtactccgaggatgatgcaaaagctgtcctggtgcaaatattaaatgtcgtcgctttttgccacattcaaggagtggttcatcgagatctcaaaccagagaattttctttttacatcaaaagatgatgattcccatcttaaggccattgattttggcctatcagactttgtaaaaccagatgagaggctcaatgacatagttggaagtgcttattatgttgctccagaagttctgcatagatgctatagcacagaagctgatgtctggagcataggtgtaattgcatatatccttctttgtggcagtcgtccattttgggcacgcacggaatctggtatattccgctcggttctcaaagccgatcccagttaccatgaggcaccatggccttctctgactccggaagcaatggattttgtcaag

SEQ ID NO: 288126 - DNA, 368 bp, Zea mays
cccacgcgtccgggtggatgacatacactcaactgctgcagatttcataattgagtgccacggacaaaacagcttgccttgtgacttctctcattcacttgtttcaactcaatggatacgatcatgtttggaggagaactgcttacaagatgttggggagtcatcctatcttctctcctttgcgctgctcgcatcccattcccaggatttgaaagctttcgtttctgtatttcactttcacaatatggagagaaagaaagacatctgctgaagaacttgtgctttctacagggagctaagtttacagacaaagcatataagggagtaacccatctcatctgcaaatttgcaagtagtcttaaatatga

SEQ ID NO: 288127 - DNA, 413 bp, Zea mays
gtacgccaagtgcgtcctgttcagcgccacgccccggccttcggattccatgccggaccccgaggtcgacgaagaaggggagcccccggcgccgccgccggacttccgctgccccatcgccctcgacgtcatgcgcgaccccgttgtcgtcgccagcggccagacatacgaccgggactccatctcccggtggttcgactccggcaagtcaacgtgccccaagacagggcaggtccttaccgttttggagcttgtgcccaacacggcgctcaagaacctcatcgctaagtggtgccgggacaacggcgtcgccatggaaagcggcgcggcgagcaggagcgagccggcccaggcggtggccgcgaacaaggcggcgttggaggcggcgcgcatgacggcgtcgttcctcgtga

SEQ ID NO: 288128 - DNA, 429 bp, Zea mays
acacacgcgtccgcggacgcgtggggcaacctccgccccatgtgcgacccctcggaggtgtcctacaccctgatgcccaacatgtgctacttcgagttcctgccgatggactccgatagcggcgtccatcggcgacgcgagccagctggtggacctcgcccgcgtggaggtcgggcgcgagtacgagctggtgatcaccacgtacgcggggctgaaccggtaccgcgtcggcgacgtgctccaggtgaccggcttccacaactcggcgccgcagttccggttcgtgcgccgcaagaacgtgctgctgtccatcgagtcggacaagacggacgaggccgagctgcagcgcgccgtggagcgcgcgtccgcgtcgctccgcccgcacggcgccgccgtggtggagtacaccagccaggcctacaccaagag

SEQ ID NO: 288129 - DNA, 480 bp, Zea mays
ttgaccgcgaaaattatatagacttctactcggctgcatctttgctccggtcgatgcacgacaagaggagaatggggacggaggccgacgccgcagccgtggacctactccggtcgcagatcccgttccagaccgacggggagttcgttctcccgccgcgcggcgtcgggctcgtcctcgtcgacctctgcaacggcttctgcaccgtcggcgccgggaacctcgctcctgttgcgccaaataagcagataagtaaaatggtggaagaggccgctaggttctctaagctgttctgtgatagaaacctgccgatctttgcatacctggatacccattatccagataagccggagccaccgtatcctcctcattgtatcattggtactggggaggagaacttcgttccagacctggagtggttggaaaaggagcgaaatgtgactataaagaggaaaagttgtattgacggctacatcagct

SEQ ID NO: 288130 - DNA, 353 bp, Zea mays
cggacgctggtcgtcgcgttcgcggcccgtgacagcacctacctcgccggcggcctggactacaaggatcccgtcgggccgccgtgacggccgcgtgtccaaagaggaggaggtgctcgacaacaatgtccctgccccgactgacgaggtcgacgagctcatcgagagcttcaagcgcaaggggctcaacgccgacgacatggtcacgctctctggcgcgcacaccatcgggcgctcccactgctcctcgttcacggagcgcctctacaacttcagcgggcagctggggcggacggacccgtccctcgaccctgcctacgctgagcacctcaagatgcgctgcccatggccgt

SEQ ID NO: 288131 - DNA, 365 bp, Zea mays
aaggcctctaatgatgtctggaaaccaatactccaccagtgttgtcaacaaaatcgagcttccaaatcggcttcatcttacgtatgcaaacttcacacatccttgcgaaggtttctcagtccctcctcccctggttgataagaaacgcactggaccccgaccatgccctgtttgctatgtttctgtggatcaggcatttgccttgatgcccctacaagcttcaccatcacctgtcgtaaagaacttaaactatgtatcagaagatggtgttactgcaaatttatcaaatctaggatctggatttggagggcatccatctctggagcagagaaacaaatctttcaacattaatgagtcaatgactg

SEQ ID NO: 288132 - DNA, 318 bp, Zea mays
caacctttctttctctcctctcgcttctgcggcgaattttcttggcccgtgccggccgccgtgtctaccctgcgccaccgccccttccaacgcctgccgtgaagacaaaaggtcttggttaagtttgaagatgtcgtgcttggcatgctgtggcggcgaagatactcaaagaacacctgataatggaggtccataccctggtggctacccaccaagggatgatgcttatcgcacagctgatccaactccgaggggtgctcagcctttgagaatgcagccaatcactgtccccactattcctgtagaagacattaggga

SEQ ID NO: 288133 - DNA, 310 bp, Zea mays
atcctgtacgccctcgaagcttcgactgcttgcccatgacctaagccgctgccgcctacaccctcacatcccgcgccctcctctatcgcgccgccaccgaccacccccaaatcctgcttccccaccgctcgcttccgttgggatcgtccgtcctcccagaccgcgtgggcgcttcttcttcggaatctccgtgggccgagtggcgctgggctagggattcgggcccatggcgtggcggcgcgtcctcacccagattgcaaggcatcgaccaacaaaagcaatctacaatgaactagttgcttcctcccct

SEQ ID NO: 288134 - DNA, 382 bp, Zea mays
ctaaaagaaaagggtaaaatcggagttctccctcgtgccgtcttcctctccgccgcttgtactgtccaccctcgactgcttacgcgtgacctgagccgccgccgcctacatccgctcaaccccgtgcccgcctcaaccacgccgccaccgaccacgcataatcctgcctccccttcgcgcggtttcgaggctcgtttcctttgggatcgttcgtctgccccgaccgcgtgggcgcttcttcttcgggatctcgctggaccgagcggcccagggctagggattcaggcccatggcgtggcggcgcgtcctcacgcagattgcaaggcatcgatcagcaaaagcaatctacaatgaactagttgcttcctccctttgggtggtc

SEQ ID NO: 288135 - DNA, 279 bp, Zea mays
cccacgcgtccggctgccacagcgggtggtgcttcgcttggcggcctagcatagctgcgctgcgcatgctagtgaccaatggcgtccagcaaggtgccactgttcctcgtcctcaacctcctgctcttcgcggcagccaacgcctgcccttactgcccgggcaacaatggccacggtagcagtgggcaccatggcggcagtgggcatggcggcggtggcagcggcggttccggtggcggcagtgggcctggtggcggcacagcggcggagggtacggtc

SEQ ID NO: 288136 - DNA, 242 bp, Zea mays
ggacttgagaaatggcagtttgcagtcatttctcggtggatcatcctatgtatccaatcctcctgctgcagcaccagatccatttgtgtcatctttaatttgtactttgcctgtggctgaaccatccaaagatttacattccgactcatctgacaataactttttgctaaataaattcccagatgaaaagcctgtagagagggctgaaccatcattatcggagaaagatcagaagaaaaggg

SEQ ID NO: 288137 - DNA, 326 bp, Zea mays
cagcactcaattacttcagagaaatgatgtcatcaagattgtgcctgtcaccaaagttcctgttgacggcgttgtcataaaaggtcaaagccatgtcaatgaaagtatgataactggggaagcaaggcctattgcaaagaaaccaggcgacagggttattgggggtactgtaaatgataacggttgcataattgttaaggcgactcatgttgggtcagaaacagctttgtcgcaaatagtccagttggttgaagctgctcaacttgcaagagctccagtgcagaagttagcagacaagatttcacgtttttttgttccaactgtgg

SEQ ID NO: 288138 - DNA, 309 bp, Zea mays
ctgatctgatccacctctgagccatatagttgattcgtctgaaggaataaatatattgttttctgcagttttagtgcctgtatagaccgcaactgatctgagaactgcagtgcagtgttgtcacaatgtattcaggagacatggttgctaggttatagctcggcacctccatttgatcatagatcctaaggaggtgccgagctataacctagcgtgtggagccttgatttctgaataaaagatataccgggagcaatccacacgccagtggtgacaaggaaacggcttgctgaatagcgagctgctcgt

SEQ ID NO: 288139 - DNA, 325 bp, Zea mays
aagttctaccttcacaagtttccgctcctatccaagtgtgctcgcttccagaagttgattccaactactggcgatgcacatattgagatccacatccatgatattcctggtgctgcctcggcttttgagatctgtgccaagtttcgctatggcatgattgtcacactcaatgcctacaatctgattgctgcccgctgtgccgctgagtacctggagatgaacgagactgttgacaagggcaatctgatctacaagatcgatgtcttcctcagctcgcgcatacaccggagctggaaagactccataattgttcttggtacaacaa

SEQ ID NO: 288140 - DNA, 268 bp, Zea mays
agccaacccacacccacgtgaggagaggatatttccgccgccaggagagaaggtgatggccatcaccttggtgcttcacctgcgacgccgcatggtgctgacccacgcccccaccattgcatagcctagtagtgtggttctggagaatcttcagtgtgcacggatcctgtgttcagtcagatgagccccatagccaagatcaccgtcgttgtacgcgatgatgggttactgcggcaccgggcttattgggtggtcctggaaagtcacc

SEQ ID NO: 288141 - DNA, 630 bp, Zea mays
tcttgatgaaaatcctgcaattgagcttactgacattgatggaacaaatctagttcgcatgctgcgagcctctgcaaggaaggctgttggggaaagaatagttcctgcagtggacaacagaaagttgtattacaataaaggcgaaaaggaaatattggaaaataacaggcgtgaaataacaagtgccttattgacaaggtatccacatcttttaagaaaattcatatctgacaaagctaagatatcgcccatagttgatatgatgactcttttgaaacttgagttgtattcatacaaaaggcaagagaagcatttcatgacagccatagatctcatcgcagatgccttcttcaagcatggtgagaaggacccactgagatcttgcatcaaggcaattattttctgttgcactgagtgccaggctgatcttaaagattatgctgaaaataaacttaagaatcttgaagatgagttggtcttgaaagtcagaactgcaatcaaggaagtagaggcaggtgatgatgaatactccctcttggttaatttgaagcggctttatgaacttcagctgtcaaaacctgttaagaatgatagtttatttgaggatatgtaccgaatactagctcatct

SEQ ID NO: 288142 - DNA, 543 bp, Zea mays
tagtctaataaagaagctcaatattgcgcctaaacctaagatgagaggaaagcaatcaacatcaaatcatgaaatgcttatggctggaaggaacaccattgcttcaaagtcatcgtttcttggacgaacagccagtggttcactggcatcttctcacagatcagtctatagatcctatgtatttggtcgtgatgacagcaatagcagcagtaggagctgcatttctacttcagagagtaatttagatctggatcagaccaattcctctcaacccaagaaggccaagttcagttcacagccgaaaccagaggggacaagggcaactccagagtgtaacacgacgagttcaggtgtttccctcttcgacgtcctgcgcaggacttcagagcagagcagtcaggaaagctgtagcacaatcacagaaagtcaagctgtgcaccagttctcggcattcaagttatcaaggaggttttccaaggtgggttcaaaaaatcgacaatctctagatggctgttagtatcgagagggtgggttactgttgga

SEQ ID NO: 288143 - DNA, 444 bp, Zea mays
aagagaccatggatcttacgggcaagggaggctgcagttcatgttgataatacaacaactgaagagggcaatgaaacgtggcctgaaactctcatatacattagctgtggatgggaaagttttaagagggactgcaaaagcttgatatccagcaaggcctggcagttggaaaatgctcatgcttttaacttcttccctggcacagatagcattgaaattctggctatcttcaaacgggaatcagaagctggtcaaaagaaaaagaagaaagcaaaaaagaaggctaagtagattaacaaaaggctgatccaccttgcggattttgtatttttgtgaatcttaggcattgatccagaacttcagaatgagtgctcatgtctgttatgaggaattttgcatcgtccgaaccaatcaagtgaccaatatgacacaggtcactcaaaa

SEQ ID NO: 288144 - DNA, 353 bp, Zea mays
gaggagcatcagcagttccaaggtccaatcggagcccagcaacgtgaggattttcgcgcaggaggagctgaaagaagtcacgcacaattactcttgtctactcggtggaggtctttcaaggcaaagtctacagagggacactcgaggacaacgcagtggtcgcggtgagagtgttctctgaagtgctcgagggcttcgaggaagcgtttgtcaatggcgggatgatcctgtctcagatatcccacaggaacgtcgtcaaactcttgggatactgcttggacgccgattgcccggcgttcgtgtacgagtacgcagctagaggcagcctatccgatgttctggacaggcacgag

SEQ ID NO: 288145 - DNA, 329 bp, Zea mays
gagatttcttctgagacgaacatgaagttgttgttgttttttttttctgtctctctgtctctccctctgaacgccgattgagttgtgtgcagaagaggtgcatggggatagagtaccgggatccaagaagaggtgctggttttttttggcattgttctgttggtggcggtgttcagattcttttttccctcgtttaaaagctagctccttctgggctttgggcttgtgtctgaaagaatatcagagcctaaaaacggcatctgcacattctgttgcttaatagattggagattaccgactaaggccccattttattagtcactaaacta

SEQ ID NO: 288146 - DNA, 332 bp, Zea mays
ctgtctcgcagcgtcgtccgtgaagcaggccctcacggtcgctcccctctacggtcgctcccaagcctccatggctgtcccctcgaagaagcgcggcatgccggcactggggtggtggctcatggccgtcggcaccttgcgctcggccttcacctggtcgtgcttctccggctcctccgcgtcgctatgctcagccacctactccgagatacaggtgatcggcgtgcatgggcgcacggttgcggtgtggacgctgctgtcgtgcacgctctgcttcctgtgcgccttcaacctcgacagcaagccgctgtacgcggccaccttcctgtcct

SEQ ID NO: 288147 - DNA, 339 bp, Zea mays
tcgacttggtgggatgtgattctccaccacctccgagcttgcaagaggcggactccacctctttcttcctcgcatgcctccttctctttccaaacacaaagccgcagcaaagaaagtgcaaattataaaggaagatcagaattcaaagcagtcgaaaagctgactagctagaagagtaaagagagagaagtatatttcagcaggacctccatggtgttcccttcagtgccagtctacctagatccacatccacctgattggaataaccagcagcagcaaggtcagcagccgagggcgagtgggggagccgatgcaccgctgttgcccgtgggtccgatg

SEQ ID NO: 288148 - DNA, 343 bp, Zea mays
cggacgctgcggacgcgtgggtgtaaatcatgttgagaacttctatcgcatgtaccgtgctcttgctgagcgctatgacaacgtgactggggaattgcgcaaggatcttgcgctgcagtctcagggctctggtatatccgaaactgattccgagacacaatcaacttcatcgtgtccagagcctaacatggaacagaacacagcaaaaccgaagcgtgatgtgctccttggttctggtgggagctcagacatttccaagaaggagagtgatggatcatcttcttcttcttcagattctgattcagaggttgacgaggcaagtgaagaaaatggcaatgggatt

SEQ ID NO: 288149 - DNA, 419 bp, Zea mays
ttgcatttttgtcaattaaacagtcaatacataccgcataacgtatagttttatatttggagatgctatggaatttgatataaaattgcagatacatattactttattattcacataaatgattgacaacttccttgtccatgaatgttttttaattcaatgaagaatggctgagacgccagtttggtgtgatgcaaatgttacatatctcattaatatctgcaaaaaagagatagaagatgacaataggcccatgggagtcttcactaggacaggttggaaaaatttggttacaaagtataccgaaaaaacaggcctaaagctaacaaagaaacaattgaagaataagttggacaacatgaaaaaggagtatacatggttcatggagttcaagaatgcgaccactggtcttggatgga

SEQ ID NO: 288150 - DNA, 269 bp, Zea mays
cttcactgccgcgccgccctcctcccttctccctgctccttcccatggtgcgcagggcgtcctcccctcgatttcctccgtgcctccttccagtcagcgacgaacgaggttctaggcggccacgtcgttgtccggcacctcgtctgtgtttttctctgtgccacggtcgagctcgccgcgtcccgttgtttgagtccgtcaacctccatctcgccccgagctgcttccatggctgtcgtcgcctccaagcctggggtattgccgagctc

SEQ ID NO: 288151 - DNA, 290 bp, Zea mays
gcagagtaaacgagcttgcaagcgctgtggctgctggcctggtgtcagtcacctgagcaaggaagaaagatgaccacgctgcctcgcgggggcgccgcggcggcggactccgaacagcttttggtagaagcacatggctctacacgaacgctgattttgaataggccaaagcagctcaatgcactctcctctgaaatgattaaaggtctcctatggtatttcacagcttttgagaaagatgatggagtcagattgttgattatgaaggggaatagaagagtattttgctc

SEQ ID NO: 288152 - DNA, 328 bp, Zea mays
gtcaccaggagttggggaggggcggaccccatgacgccggggagtacaagcagatgcccgacgacacgggcttcttccggcgcgagggcacttggagcaccgagtacgggcatttcttcctggcgtggtattcaggcatgctgctggagcacggcgaccgcgtccttgccgcggccgaggccgtgttcggcggcacgggcgcaacgctctccgccaaggtcgccggcatccactggcactaccggactcggtcccatgcggcggactcacggccgggtactacaacacgcgggaccgcgacgggtacgcgccgatcgcgcgcatgctg

SEQ ID NO: 288153 - DNA, 290 bp, Zea mays
ggcggatgcgccggtggcgccgctggtggagaggcccgacgagctgggccccgtcgggagctacctggtgtcgcccgagttcaggacgtcggcgtccgtgctggtgatcaagaggtacgacccggccacgaaccccaagagcaagaggttcgaccccaaggcggggccgccggtggcgacggaggaggacgtgctggacgaggagatggggatggggcgcgccaccgtggtgcccgtgtgatgcaaaatttcgccgatgagcgacatggcgtgcatgagtaggtgcacgt

SEQ ID NO: 288154 - DNA, 313 bp, Zea mays
ggcgaaaataactttctttcgtgcgcgcctgtcatcgtccggctcagagccgccacagcctcgccgtcgcattctctcccctccccttcgtcctcacgagcgacgaacgtcacgaacccctcctccacctcctgctactatcggcgccggagccctcctctggtctcaccgtgcaaatccccaaccccgaggcagacgcaggccagcccctgtgatggcacagaccaacggcaacgaccccttcagtccccctgtttcccaagatagggttgtgataacaaacaagcatggtgagacgcgtgtggggctgctg

SEQ ID NO: 288155 - DNA, 344 bp, Zea mays
ggacgtggggtcaagaacgagatgaaccttcgggtcgtcgatgccaacacgatcactgtagcatttgatgagacctccgaccctggaggatgttgacaagctgttcaaggtgttcaacaacggcaaatcagccagtttcacagccgaatccatcgcaccagaggtctcaagctcaattcctagcagccttgctcgcgagagcccctacctaacgcatccagtcttcaacatgtaccacacagagcaatgagcttcttcgttacctgcataagttgcagtccaaggatctctcgctatgccacagtatgatccctctgggttcttgcacaatgaagctagacgct

SEQ ID NO: 288156 - DNA, 447 bp, Zea mays
aagaattttaacgagggcatcttcagatttgagcattctagacttcgacataccttactccatggcttttgtggcgacgggcggcattgaggttgttaccacagtactggtcatgggtactgtaacttggcaagtcctggttgtagcgatcccagttgctgtcaccatgatatatgttcagaggcactacgtttcctcagctagggagctagtaagactcaacggaacaacaaaggcacctgtaatgaactatgcatcagaatcaattctcggtgtggtgacgatcagggcatttgcagcaactgagaggtttatctacagcaacatgcagctcatcgacactgatgccacactgttcttccataccattgccgcacaagagtgggtactcataagagtagaggcactgcagtccttgacaataatcacagcagcattgttccttgt

SEQ ID NO: 288157 - DNA, 292 bp, Zea mays
caaaaatatcagaatatgtgccttccatgtttttaaggtatttgttgccaatccgaacaagcctcgatgtatcgttgtagctttgctagacaatcgtagagaagttctgaagctactccacaatcttccttcaagtaaaggcgacgatgaactcgatgaggagaaagacctaatcattcagggaatccagaagttggcataacacaagagcatcaagttatcgtttagcaatgcaagactctccttatagaggacatattgcacaggccagtaccatgtatgtcacattgca

SEQ ID NO: 288158 - DNA, 291 bp, Zea mays
gctttccaacttcttcatatggtccttgagcataatgtatggctagaagatgcatttaatagagcaactcagttgtatttgtcttactatcgctctatccccaaaagtttggagcgttctacagctcataagcttatgttagccatgctaaaccatgatgaaaggttcctagagccgtcgccacattcactgcagaagttgactcttcagtcagttaaagatgctgtcatgaaccagtttgtgggtagcaacatggaggtcagcattgttggtgatttcactgaagaagaa

SEQ ID NO: 288159 - DNA, 291 bp, Zea mays
aaaacttgtctatccatttgagagagctaaaagaaaaggctgaagctggaagaaaggagaaggaagggtcgctacataccatgcaagattctcttagaattgcatttattaaggagcagtatgaatcgaaggtccaagagctgaaaggtcaagtttttgtcagtaaaaaatatgccgaagagatgctgctgaaactgcaaagtgctttggatgatgttgaaactgggaagaaaaatgagattgctcttgccaagagaattgaggagttgtcgatgaaagtttctgaaatgg

SEQ ID NO: 288160 - DNA, 319 bp, Zea mays
cggacgcgtgggagggagccaaggacgcgggcgcgccagcggagaagaccatcctgaagcgcctcccgccaacggctctggcgtccctggtcggcactccccctccgccgcttcccttcccccacgccgttgccgcggccccgccgctcgcgctcgacgggtggggctacgacgactacgaggcccggctgcgggagctgcagcttcagcgcgattggtacatgttgagcaccgcgggagtgggagcgggtccggacccagcctacctccatctggcggctggcgggcatccggagcacgaggatccggcggcccgtgg

SEQ ID NO: 288161 - DNA, 278 bp, Zea mays
ctcacgcgtccgcccacgcgtccgctcacgcgtccgcggacggtgggggacgcgtcctcgccgtcgagggaggccacgcggaggccgtggagctgctgctcgacatgggcgccgacgccaacgcacggaccaggcgcggcgccacgccgctccagatggcggaggccatggggtacgaggccatcgctcagctcctgtgcgcgagaggtgcggaggtggccgccgcgtcggcgttgtgcgccgcgtcgtcgtcttcatcgtccatatcgtgcgcctga

SEQ ID NO: 288162 - DNA, 288 bp, Zea mays
aggacatacgaaatggccacttccttctattctcattctaagcagcagacgtccgtcgcccctattgccgaagaagcagatgctcatcgcctccgcaccagagaacagttcgcccgcggtgctgctcggagtcggaggatggacgaaatcccagctggtccaccggtcagtggtgcctccgagagggcgttgccggcacaagaaaggagcaagcaagaggcggcaggacaggaacatcacatccctgtcttctccaaccccgatcttggccagcaagaacaggaggag

SEQ ID NO: 288163 - DNA, 501 bp, Zea mays
cgctacaaggatacacatgcattggcattgttgggatcaaagatcctgttcgtccaggtgtcaggcagtccgtggcaacttgtcggtctgctggcattgcggttcgaatggttacaggagacaacataaatacagctaaggcaattgctcgtgaatgcggtatacttactgaggatggtattgccattgaaggcgctgagttcagagagagaaatccggaagaactcctcgagttgattccaaagatgcaggtcctggcccgatcatcaccacttgataagcatgcacttgtgaaatacttgcgtaccacgtttaatgaggtcgttgctgtgactggggatggtacaaatgatgcaccggcactacgtgaggcagatattggacttgccatgggaatttcagggactgaggttgctaaggagagcgctgatgttgttattcttgatgacaatttctccaccattgtaacagttgcgaaatggggacgctctgtttatgtca

SEQ ID NO: 288164 - DNA, 319 bp, Zea mays
cggacgcgtgggcggacgcgtgggtccgtccgggtacggcggcggtggcgactggtgcgatgcaaagggcggacgacgcggaggagcatcggacaactcagcgcaccacacaaggcactgtcagcagcggcggccggagactcccacgccagtgccagactcgattgggaggggagagatgaaggccacgctcaagggtcgctacgagggcgacaaggccacggccgccaccagcctcgccgcccccgccggcgacctccgcctcaaggcctccgccaccgaggccgtcttcgtcaacgggcctaccctccgaggcctc

SEQ ID NO: 288165 - DNA, 486 bp, Zea mays
agcagatctactgagcagacctgcttcagctggcgaagggagtcaaggcagcagtggcccttggagttacctggaaggtttcactccagtgaagtccattgggtcaatgtcagcgtcacactcgtaccttctagttccttcgccaagtatgagatacctctctcctgcaacattacagctcccgacatgcctctcatcggagtcaccgccgcttgcccatctactgcacagcaaagggactgcgattcctttagcgatgggctatgtcgtctcgaaagctgtcccacctgttaggagggactctgcacaactcaccaaggatgaacagctctctgttctctcagtcagcatcatcgatcactatggaggcagcagtgggactgttcaagagaagatgagccgaggcggcggcggcggcagcaaacaggcaaggaacttgagtcaggagacaacaggtcgtgagtgtgagatggagatgcatagtgt

SEQ ID NO: 288166 - DNA, 290 bp, Zea mays
cccatcccgaagtctccggtcacctgtcactctacgcaaccatgtcaaggaggaagaccagggagcctaaggaggagaatgtgacccttggccccactgtccgtgaaggagagtatgtctttggtgttgctcacatctttgcatccttcaacgacactttcattgtgcgatgaaggtcaaggctgatcgtgatgagtcgttaccttatgctgctatgcttgctgctcaagatgctgcacagcgttgcaaggagcttggtattactgcactgaacattaacttcgtgccat

SEQ ID NO: 288167 - DNA, 330 bp, Zea mays
tgttctgatatgtggagcaagcacgttcctgcttctagctttacagatctatggggttaggaaaatagagctcataggagttatttttatgctccttatcgccatttccttctttgttgaactgagtactgtcaatcctcctatgggtgaggcataatctcttcctgcattcatcactggtggtatcaagaaaaatatcacctatctccaaacggatttaaggacacttcaacgttcttcttgattgagaatgcatttgctatgcttcttgtgctacttgtaaatgtagcaattgtgtcaactacagggactatatgtgccaataatact

SEQ ID NO: 288168 - DNA, 296 bp, Zea mays
cttttgcttgcttgcggttgcgggcaaccgctgtgatagagcgagcgagcgacctgtagtacgggagagggttggaaggagcgaaaggagagagaggttggtggttgtttggtggaggagaatagttggttgtcttcagggagggagagagggaaagatggagcgcaaggcggtggtggtgtgcgcggtggtcggcttcctcggcgtcctctcggcggcgctcggcttcgcggcggaggccacccgcgtcaaggtttcggacgttcaaacaagcggcagtcctggtgaatgcatat

SEQ ID NO: 288169 - DNA, 535 bp, Zea mays
aggcgctcatcgtcatccaccgccgcccgcgaggtccccctccagccttcactgggcgaaggagaaggagaagaggcgagagttcaggtgaaggaggcgacggagcggctcgggggcgagtacagcgggagcttgcaccccaagtgcacgcacctcgtggttcagagctttgccggacgcaagttcgagcatgcactgaagcatggtccgaggaatgggctattcctcgttacgctgggttggtttgtggactgcgtgaggaggaacatgaggttggatgaatccttgtatgccatcaagagcattggggagaatggtgtgccgcccggggagttcagccgccttgttggagttcctgttaacgagaagtcttgccttccaccgttgatatttcaggacaaggcatgctcagatatgacccagaagcattcgctccagactcctgggaacggtggtggtcatgatgggttggtttttatgaatgacacaatctacattgaccctgggatatctgatgagatgaggaaaaagattt

SEQ ID NO: 288170 - DNA, 458 bp, Zea mays
gggtctgcttatgcagaatttgggaagacaaaggtcattgtatcggtttttggaccaagggaaagtaagaaagcaatgatgtacagtgacgttggtaggctcaattgcaatgtgagctatacaacctttgccactccagtgcgtggacagggagcagaccacaaagagtattcatcgatgcttcataaagctctggaaggcgcagtaatgctgcacactttcccaaagaccactgttgatgtttttgccttggttcttgagtctggtggcagtgatcttcccatcattatatcatgcgctagtcttgcattggcagatgctggaatcatatgtatgaccttgttacgtctgtatccgtcccctgtttcagaaagaacatcatcatcgatccaacctcagacaggaagcatggcaagacggaaccttgtggtggctttcatgccacgcgcaagagatca

SEQ ID NO: 288171 - DNA, 315 bp, Zea mays
aacaagaacagcaacggcggccagaaggaccaggggaagcaaggaggaggaggaggggctgggggcctcatgcagggcctcaaggcgttcaagaaccagcacggcaacaagcaccagctccctgagctcagctcggacgacgatgacctgtatggcgacgacgacgaggaggagtttgacgacgactacgaggaggagctccgcttcctcggggacaagatgagccagctcgggttccacggcaacaaccagaacaagaacgggaacaacgctgctgtcaacagtaaccacagcaacggaaatggcaagaggggt

SEQ ID NO: 288172 - DNA, 286 bp, Zea mays
gatgcagcagcaccatcgcgtcaagggctgccacggtcccgccgtcgctgaccatgccgcgcggcgaactcgctgacgccatcgtgggcggaggcggaggaggaggagcggacggggacccccgggccgccctcctccgtctgtctgctctcggggaccgcatggccgccgtccggggccgtatctccgcttctatctcgggcgaaccggcctatctcctacgccgacatccaatctgtctcctccgagatctccgccgctgtccagctcgtcgtcctcaacgccg

SEQ ID NO: 288173 - DNA, 447 bp, Zea mays
ctctcacaggtcacaggctcacagcacactgccactccgaaaccccaagcgccaccaggaccaggcagcctcctccgtcctatctcctccaagtccaacaagcacctatgggaggccatctccgcccggatgcgggaccaagggttcgaccgctccccgaccatgtgcaccgacaagtggcgcaacctgctcaaggagttcaagaaggcgcgcagcactctcggaacagcggcggcggctctggctctggagggaacggcaacgccaagatggcgtactacaaggagatcgacgacctgctcaagcgccgcggaaaggctacgggaagcggcaccgccggctgcgttggcagtagtgccgggaagagccccaaatcaaattgcaagattgattcctacctgcagttcaccacagataacggctttgaggacgctaacattccctttg

SEQ ID NO: 288174 - DNA, 245 bp, Zea mays
gcagcttcggctcgttgcaagtgctggcgcctgcaggctgcagttccagtgatatacaggactggcatcgtcatttgcagctgcagctcacgtcttggcgagtgtcaaaacccaggagagagagcccaagcaagcgatggcgcgtatcggcgcgagtcatctactcctcgtcgtcttgctgctctctgcggtcctgagctccggctcggctcgggttcccagagaacgaccggacgcgatgctgc

SEQ ID NO: 288175 - DNA, 204 bp, Zea mays
gctgctcagcgagcaaagagaacaaaaacagtaatgagggtgcgtttcccggatggctacatccttgaggctggctttattccatcagagaggatacatagtctagtggacctgctcttgaaagtacttgctagaccagatctgccattctatctttatacagtacctccaaagaagcgaatacaggacacatcacaggacttc

SEQ ID NO: 288176 - DNA, 308 bp, Zea mays
gttcccggagtaccgccccgcggcgagccccaccttcgtgccgtccatccactccaactcgcacaagagggtggtggagatgcgccagaaggctgtccggagcggcgacccgtcgtgcgaccttctccagttcatccgccgccgggattgacgtcccggcacggcgtcgccggactgtcggtcggtctcgtcccccatatagctatatatgtatgcatgcatggttgcttcatcagtcgtcgtcgcccatcatggtcatcatcaccgcttcaccggtcagcgccatggatcgtctcccgcccatcatc

SEQ ID NO: 288177 - DNA, 343 bp, Zea mays
cccacgcgtccgcgttgacttccgcgacgccgagccgtgcctcgacaaggtgtcctactcgctactggtcttcttctcggggatgttcgtgacggtgagtgggttcaacaagacggggctgccaggggccatctggaacttcatggcgccctacgcaaagatcaaccacgtcagcggcgtcaccgtgctctccctcatcatcctgctcctctccaatctcgcgtccaacgtgccaactgtgctgctgatgggggacgaggtggcggcctctgcggcgacgatctctgcgtcggcggtgacgcggtcgtggctgctgctggcgtgggtgagtacggtggcgggc

SEQ ID NO: 288178 - DNA, 291 bp, Zea mays
atatttctttccctttgcttctcaatctgtccccgtttacgggaggcgcgtcgagtgctggacctttagcaatgaatgcgcaaagagatggccagcaagctctccatctataccggcaactgaatatgcaggctaatgctgacgtgtccagtagttcatcatcaccaccgcagctatcaaggagcaagttatacggtctcgcggccgtcgtggagcactacgggaagtgtggaggagggcactacgcagtctacaggagagtcgcgtcgaatcctgaccctgatgatccag

SEQ ID NO: 288179 - DNA, 282 bp, Zea mays
actccgtatttccgttgatcacttctcccattcccagtcatctccactctccagcagtcctcacgttccctctctctctctctctttctctctctcccgctttaggtttgcctgtgttgggtagagtcgtatagcgtggagaagaggcttggtgccaagaaactggcatttcgatttggggagtggctaaattcgtcgctgtggaatcatggttctgaagtcgcacacaaatctgctagatatgtgttgtgaagatgtgtttgacttccaacaacctttaag

SEQ ID NO: 288180 - DNA, 280 bp, Zea mays
cctttacgcgcccgcgccgccgccccctcaattcacacttcataaagccgatggctatgcaccgcgccgccgcgctcgcactgcgccgcctctccgccgcagcggcggcagtggctccaagccccgtctcccttgcccatctccggccggtggtggtggcggcgaccgctaccaatgctaggtttgttatgcagcctacgaccgaggctgctgctttgcgcctccggcgcggttacgcggcaggcggtggtgcgggccggaaggcggtgatcgaggacga

SEQ ID NO: 288181 - DNA, 272 bp, Zea mays
cccacgcgtccgggacaaatgataggttgaggcgggcagacagagaggacagcgttaggcgaactgtttatgtctctgaacttgaccatactgtgacagaggagagacttgctgatatctttgccacctgtgggcatgttgttgattgccgaatttgtggtgatccccactcagttcttaggtttgcatttattgagttctctgatgaagagggcgccagaactgcgcttaacctgggaggcacaatttttggtttctaccctgttagagtt

SEQ ID NO: 288182 - DNA, 416 bp, Zea mays
gctgtaatacagatcaattacattgaattttaccatggcagctgaggaagatgtcaagcagaggcagatcattgaaaatcgtgccagaaatataagccacaatgttaggtgcactgagtgtggtagccaatcgattgaagattcacaggctgatgttgctattctcctaaggaagctcattcgtgatgaaataaaagcaggaaagagtgataaagagatctacaagaaactagaggatgattatggggagacagtactatatgcccctaaatttgatcttcagactgctgggatttggctttcgcctgtcattgttggtggtatagcagctggaatctgggcttaccaaaggcataggcaaaggacaaatgttcacattatggctctgaacctggtccgaggggtaccactgactc

SEQ ID NO: 288183 - DNA, 276 bp, Zea mays
cccacgcgtccgcccacgcgtccgggacgcgtggtttttttttttttttttttgcctcccgttcccctgaatatttatctatcaaataaaatcgaccagtagtaacataagccataaggacgtccagtttaaagcacgacagccaaatgtccagttcagaggatcggcaagcactgatacatcgtgtccgcaagtcgagcagagaatcacacgattgattaagcagcgacatcctcgggagggcactgcgcaagttgggcatcagaagacaggtct

SEQ ID NO: 288184 - DNA, 285 bp, Zea mays
cccacgcgtccggcacattgccattttggacatgccgaaacacgcctaccacacagttatgacccatgggagttcaattcatattaccagtcctcgtatgctgaaagcacaattctggaccaagaatcacttaggtcaagctacaaggagcagaaacgggtggtgagaaagcatatcttgcggcctctgtcaggtgcttccccattcactatctgcaacggctgtttcaacctggttcaaatgccatcggatgtctacatatcaaaagcaatggtcggcaaaatg

SEQ ID NO: 288185 - DNA, 356 bp, Zea mays
  unsure (1)..(356): unsure at all n locations
atgtgaggtcagggaatcgcaagtggatggaaaggagagagaggaacgtggtctacatacccaaatgcagatttctggaagcaccactgtgtcggaatgtgcacgaactctgcaaaatgcgcatgcagagggttcatgcagggattcacttgggcacggctgtctacatgtctcgcaattntgaggacatgagnctgcgagatgatgctttggacagcaaccacctgaagatgatccagcactgaagcagccctgcttccggacaaaatgcatcgcaaagcagaatcatctaagtgatctgctctatttgatttgagaggaagtggatatgtagattactatactactatcagtgg

SEQ ID NO: 288186 - DNA, 267 bp, Zea mays
ggaattgaacccggctgcgtccggcgaaccgacggtgtgtcgtcgtgtaaccaccgtacctgctacctccataaactttgagagcggatccgagcgccgggagcggtgctcaactcattcccaccaccgtgctctaacatatccacgcgccgaacgctttcaggtgccaagttcattccgacgttagagtagcccctacatcagacttgaaggacgatagcaaatctgaaactaggaggatcaagatgctatatgacggtgattgcc

SEQ ID NO: 288187 - DNA, 267 bp, Zea mays
gtgaaaatggttactacaatggtcttatcttccatcggagcatcaaaaacttcatgatccaaggcggcgatccaactggcacaggaagtggaggagagtccatatggggtaaaccgttcaaggacgagccaaactcaaagctgctacattctggaagaggtgtagtcagcatggcaaattcaggccctcataccaacggatcccaattttttatcttgtacaagtctgcaccacacttaaattacaagcacacggtatttggcatgg

SEQ ID NO: 288188 - DNA, 298 bp, Zea mays
cgcgacggccgacgctggcgacgggaaggtgaaggcggtgctgatcgcgtcgctctactcggggtactacgagaagatccgcggcatgtactacgagagccccaccaagagtggggagatcgtggcggtgttccagcccagccacgaggagcagcagcagtacacgtccaacgaccacaaccagaaggcgctggccgagatctacctgctcagctactgcgacaagatcacgatgagcgcctggtccaccttcggctacgtcgcgtacagcttcgccggcgtgaagccgtggatcctg

SEQ ID NO: 288189 - DNA, 365 bp, Zea mays
cggacgcgtgggcgctgccgcctgccgtagtgctgctcccggccctccctctaattgctcttgccgctttatgtatttgccgcgcgcggcgacagagaatatacacgagtatatacagtagccgccgccggtggagtctctatctggcagccggccggtcggtcggtactctgctctagaagctagagagatactactctgcaggctagctagctagctagaggtaggtagaagaggccggcccggcccgattgaagaataacatagagctgtctgctgctgagcgacgacggcgatggtgctctacttcaaggcgcgtccggacgccggcgactacaccatctacatgggcgccgacaagaacg

SEQ ID NO: 288190 - DNA, 314 bp, Zea mays
cccacgcgtccgagaaggcgttcgacctccaagggtctgagcaggacaggagtctctccatgaggttcttgtacgcgatgaaggagaacaggcttgaggacatcctagacgatcagatcaagaacagtgagagcatcgagtaccttgaggagatcgcagagctggcgagacagtgcttagagatgagtggtgtgaataggccgacgatgaaggaggttgcagataagcttggtaggttgaggaagatcatgaagcatccatgggcacatgagggtcctgaagaattggacaggttgcttggagagccgtctact

SEQ ID NO: 288191 - DNA, 293 bp, Zea mays
atcgcaactagtccaaagtgcccttgatgggtacaaggtatgcatatttgcatatggtcaaactggatctggtaaaacttatacaatgatgggtaaaccaggaaatgatcaaaaagggataatacctcgttctttggagcaaattttcaagaccagtcggtttctagaatctcaaggatggaattattccatgcaagcatcaatgttggaaatatacaatgagaccattcgtgatttgttagcacctggtcggtctaacagttttgagtctagtaaacaatgcactataaagc

SEQ ID NO: 288192 - DNA, 361 bp, Zea mays
aatgaattgaatgttagtagacaacaattagtctaatttatattagttatgtgtcaactggatccatatttaaagagcttgctaatggttatgaattagtgactattcaacaaaaatattataggaaaattttattgtcaatgttccacttcgcacagacaaactatgctcctatagaaataaatggagggggagtggtactcattttatttatctgccagtgctatattaaagatggttcttagataattttctttgtacagtgatatctggtatcttattttcatgcaggttgaagaggtggttgacatttcaaattgggagaaaaaagaagtttatggcaagaaacggaagttacgtg

SEQ ID NO: 288193 - DNA, 322 bp, Zea mays
cccacgcgtccacacacgcgtccgcggacggtgcgaccgagcagcgatggtgtcggacttggagctggtggagcggctgcaggaggtgctgcggtcgtcggacctcaacaccacgaccaccgctgccttgcgccgccgcctcgaggaggacttcggcgcagacctctcccacaagaaggctttcatccgggagcaggttgacctcttcctcgccgaggtcgccgccaaggccgagccagaggagcccaaggaggacgaggagctcgaggacgcgccggtgcctaaagccgaggatcgcggaggagcgcgagggggtggagga

SEQ ID NO: 288194 - DNA, 351 bp, Zea mays
agcgacgaaggatggcgctttgattcgacgtatgatcacaaggacgaggccggcgatcccatgccgtttgtcttcacccttgggtccggcaaggttatacctggcatggaagcagcagtgaagtccatgagagtcggcggtcttcgccgagtgatcattccaccatcgcagggataccaaaacacgtcacaagaaccggttcctcctaatttctttgatcggcagaggctgttcaccactatattcaacccgacgcgcctcacaaatggcgagggttccactctcggcacacttatcttcgacatcgagctaatcaacattaggcaacgtccataactgttctgctccata

SEQ ID NO: 288195 - DNA, 485 bp, Zea mays
ccagtcctggtggggactgttcacatctttggcctcagttgccagcttgggagatactggaggctgttccttttgtggttgatgctgctcttactgcttgttcccatggcagactatttccacgtgaactggccacagccctgaaggatctggctgattgcctccctgcatctcttgctacaatagcaagctacttttccgctgacgtgacgcggggtgtctggaagcctgcatccatgaatggatcagattggcctagcccctctgtgaacctatccatggttgatgagcacatcaagaaaatcgtagctgctaccggtgttgatgttccaaagctagttacaggaggaagctcttcaggtacacttccgttaccattggctgctttcgtgagcctcacaatcacatacaagcttgacaaggcatcagagtgtttcctcaaccttgctggtccagctctagagaacctggctgcaagctgccct

SEQ ID NO: 288196 - DNA, 307 bp, Zea mays
ccttcgtcgggtcaggccccttgccgttcagctcgctcgtgctcgccgcccgccacctgcccaacacgacgttcgacaactacgaccgctgcgccgccgccaacgaccgtgcgcggaagctggtccgcgcggccaaggacctgaacgcgcgcatgtccttccacacggtggacgtagccaacctgacggatgacctcggcaagtacgacgtcgtcttccttgccgcgctcgtcggcatggcggccgaggacaaggccaaggtggtcgagcaccttggtatgcacatggcggacggagcggctctcgt

SEQ ID NO: 288197 - DNA, 270 bp, Zea mays
gaaaggcaccgaagaaactcgtagtgcacagaacacaggagatttagggcttattagttcttcatcaagtccagtaacaagcgcacaacggccactcccaagctccagcgtaggctcgaactcaagagaatcaaaaaagagggataccgctttgcatccactgattttcaaggaagctggccttccagataatactttgttgacttacaagttgaagaacggagaggcactactgcaagggtataagcagggagcaggtattgtctgcaa

SEQ ID NO: 288198 - DNA, 206 bp, Zea mays
attaatgaaggcggcttcaaatctatcgcccttgtatagcgtgaaagcagtaggttgtgtttcccctttttcttcagttggaatattcttggttttctgactgtaattgaactatgcacttacatggtggcaataccaatgacgcctcttaataaaagaaatacaatgattaaaagaaatatggttaggttgatgtgtgaaaaagt

SEQ ID NO: 288199 - DNA, 326 bp, Zea mays
ctcgttcagccaccttagggtttggttttgtgaagtttttcccctactcttgagctccaaatttgtggtcatcgtgtgagtgatgtcgcagtgttcaggcctgggtaacctccctttcaaacccccaaatctgatttgctcttgtgctgtgtgccagctccctagttggtgaccacgcccactaaattccccacctcgccgtggccaggctttctcgtggagtttttcacccgtgtggtgaatgttccgtgctctgcaaaggttagtgaagctcacccggttggaatctctagctctattgttgtgatgtgcttggatacgggtcg

SEQ ID NO: 288200 - DNA, 372 bp, Zea mays
gaaggatggcggcctcttggaagtttacataaaatgggagtctggcaacctgatcaaagggctgaagctactgcacaactcgtgcctttcagatctgaggaagtttatagaggctcacttcgaagaagcaggcagcaaacagaagcatcagttcaccttccttctcctcggggatccgtccggtgctccggtgtcccgggacacggaagcttcggtgcagataagcaggctgcctcactggaacaaccagccggacagctacctggcgtgcctgcgcgcggccaagaagccggctgcggaccacgcgcccttcagcccgctggacagcaagctgaacacggttgtgaaggacgcgcacctagccggtgcaat

SEQ ID NO: 288201 - DNA, 386 bp, Zea mays
ggagcaccgcccctccgtctggaccatcggcttcgacatgaacctcctcgccgacgcatacgccggcattgtcacgtcgagcatagcgtactacgtgcaaggcctggtgatccagaagaccgggcccgtgttcgcgtcggcgttcagcccgctgatgatgatcatcgtggccgtcatgggctccttcatcctcgccgagaagatattcctcggcggcgtcctcggcgccgtcctcatcgtcatcgggctctactcggtgctctggggcaagcacaaggagacgcaggacaaggaggacgatgagacgacagagctgcccgtcgtggcaataatggcatccaaaaccaatggagtcgtctacgacgacgacgatgacgtcgtcttcg

SEQ ID NO: 288202 - DNA, 335 bp, Zea mays
gaagtggctgtgaagaggctaccaaagggtttagatcaggggctagaggaactaaaaaatgagctaggtttgatggcaaaacttcatcacagaaatcttgttcgactggagggtttctgcttagaagagggagagaggttgctcgtctatgagtacatgcccaacaaaagccttgacaatattctttttgatcatgagaagaaaagacaactagattggaggaaacgattcaacataattgaaggagttgcacgtggattgcaatatcttcatgaagactctcaaaataagatagttcaccgtgacctaaaagcaagcaatattctgttggattc

SEQ ID NO: 288203 - DNA, 329 bp, Zea mays
cttcatggctgaggtgaaagattatgcctgcgaccgtgctggagtgcccacttcaagtagtgggagtgctgcatcctcagccggtaattccgagggtaagaaggcgcgggttctaaagcgagagccatgccagtcaaagaggtgtggttgtgggttccgtattcgggcaattgtgccgatagctaactacaatgaaaaagacaagacttttgtgtacttggaggagggcactgcagtgttcaagctttacgctgtgcattcagggcatgagccagggccacttgatggcaatgcacgaattgttcacaggttggttggtcataagggag

SEQ ID NO: 288204 - DNA, 333 bp, Zea mays
gacgctggaggccagcctcgccgacagcctccagagcctctgcgcgggcggcaacggcgacggcaacgagaccgccgcgctcgacgtcagctccccctacgtgttcgacaacgactactacaagaacctgctgacggagcggggcctcctgtcctccgacctgggcctcttctccagccccgaaggcgtcgccgccagcaccaaggatctggtggaggcctacagcagcgacggcgaccagttcttctacgatttcgtctggtccatgatcaggatggggaacatcccgctcgccgccggctccgacggggaggtccgcaagaactgcagagt

SEQ ID NO: 288205 - DNA, 277 bp, Zea mays
tgttcagagtgctgagtctcctcgcctcttcttgtggcttcttggagattctcctcgccctcgccctcctttgctccttggcataaaggcctggatggatgaggtccagccatccagggggccgcgtcgttttcttccattgtatataggccatatatgacgtgatcagtcgggtgctcgcctaattgcaggttctcagacacgggcgaatatgataccgatttcctccgcattatatcgcccaaaaaatagatatttccacggctttgagatacac

SEQ ID NO: 288206 - DNA, 278 bp, Zea mays
cttcttctgtgcatatatacacgttggaatcaaatatataccgtcggactggagacaagaaaaaccatatatataccgccccaagatgcaaagatgatacagattatgtaagcttgtagacatgtagtagttggattatggcttttagtgactcgtgtgtgtggtgtggtgtgaattcctgtgtgtattgaagataaagttccgttgccattcacgtacggaaccagcgatatgctatgaacgggatcaacttgaaataacattcgtctctcctttat

SEQ ID NO: 288207 - DNA, 343 bp, Zea mays
cccacgcgtccggtttatgccatatatttgggtcatgctggtttcgtttggtcaaacatggaccaaaataaatgactccatgtattctctctccgaaaatcacgccataaagactctcctctccgacgactgaccgttccccgactctctctccacatcagttttggtcccaaattcagcctgagagctgcagcagcgaagagccgaagaaagccagcctcgccttccccctctccccatactaatcatcatcaagggcctgcgattccaagttgcgtttcctgtctggggattcagggtggaaggagatgaaatcgccattgcggcagttccggggcttcgc

SEQ ID NO: 288208 - DNA, 398 bp, Zea mays
tggctgtgatgttttccttgtgcaaccgtcgtgtcctccagcaaatgaaaatcttatggagcttctgatcatgattgatgcctgtaggagagcatctgctaagaatatcactgcagttatcccttattttggttatgcaagggctgacaggaagtcccagggcagggaatctatagctgcaaaacttgtagctaatatgattaccgaagctggtgccaaccgtgtccttgtttgtgatcttcattctagtcaagcaatgggatactttgacatcccagtagatcacgtttatggccagcctgttattcttgattatctcgccagcaagacaatatgttcagatgacttggtagttgtatctcctgatgttggaggtgttgccagggcacgtgcctttg

SEQ ID NO: 288209 - DNA, 341 bp, Zea mays
gtgcttttgatgttgttataattgatgaagctgcacaagcggtggaacctgcaactcttattcctttgatccatggctgcagacaaatttttcttgttggtgacccagttcagttgcctgcaactgtcatttcacagactgcacagaagttgggatatggaacgagcttgttcaaaagatttcaagctgccggttttccagtgcaaatgcttaaaatccaatatcgcatgcatccagagattagtacattcccttcaaaagaattttatgaaggggtactacaagatggggagggcctgagcaggaaacgtccatggcattcctacagctgcttcggaccg

SEQ ID NO: 288210 - DNA, 493 bp, Zea mays
gcagggagtcgcagatgatccacgggacgctccagcaccgcgtctccccgcggcggtccgggtggtacgtcacgtggtaccacgccgacgcgatgctcgacgcgtcgtcctccttgcacgcgctgagccacaccctcacctccgcgtgcacgcctcgacggcggcgatgatgcggtccttcatctcgaagtagcgcttgttgtcccgccgcaggtacaccagcttgttccggatgttgcctgtcagaatctcgtcctcgcgtccgccgagtagtaggtcatcagggcgcccagcctctcgcgtacgcctcgtaccgctcctccgctgcgtccaggaactcgtcgaaaccggcgacctcgaggtccgggtcgtacacgcagctcggtgggcccgcaggcaggagcgcttcagcgtcctcctcgtgccgcagggcagcgcggtagagctagccgaggacgccgttggagacgtacattggcctctcggaccgttc

SEQ ID NO: 288211 - DNA, 320 bp, Zea mays
cggacgcgtgggtttagcattactggaggacagtggatggtatcaagctaattacagcatggctgaacaactagattggggtcagaatcagggaacagagtttgttatatctccttgcaactcatggcaagcggcataccggggcaatacaactcaactatcaggatgcgcatctcatcgggaggcagaaggttactgccctatagtaaactatagtggggacttgcccaagtgggctcaatattttccccaagccaataaaggtggtcaatcttcattacgcgactagtgcacatactatgttgcttattctgatggtt

SEQ ID NO: 288212 - DNA, 370 bp, Zea mays
agatgggaaggatgtctgcaccggctccgcatcatagacggaccaagtcgaagagcgggccccttggccatccagctggcattccgggggcttatgccgctgtctcaccgcttgttccttgctttgatggtgtgctggcagcagctaatttcgcagcgcattcacctttctctgctggggttctcataccagagcacgggcgcattggcgacttcagcagtggaagaggcagatgtggtgacgacggtagcagcagatcctactccgctgacgaggagccctatatattaagatctgcaagcatacatgcatggacagaaacacttatggaggcatctgcttttgctaatatctcagaagaaaccgtaca

SEQ ID NO: 288213 - DNA, 288 bp, Zea mays
cttggggtggacggttctgaatatgaaggcaatgggaataaatgaccttttgtcatttgacttcatggaccctccagcatctcaagcactcatatcggctatggaacaactgtacagtcttggtgccttagatgaagagggtcttcttactaggcttgggagaaaaatggctgaatttccccaagaaccacctctttctaagatgctccttgctagtgtagaccttggatgcagtgatgaaatactgacaatcattgcaatgattcaaactgggaacatattctatcg

SEQ ID NO: 288214 - DNA, 313 bp, Zea mays
catttttctcctcccactgattttgcattttagcccctcaggaagctccgatttcggccccgctccggcggaccgcttccgttcgtgctctgctccgaccgagcgcgccgcgccgtggggggcagctgcgaggactctcgttcggcggctctggttctcggcctggtcccgtttcttccccaacaaatctcgtgatttttcgtccagatttggcttctcgccgcccgtctgggtctttctcgtgcgtttcgcctttggtttcgccgatttggtgccggattcggtgggttgcggccgagtagcctggatctcg

SEQ ID NO: 288215 - DNA, 418 bp, Zea mays
cagtctttctggggagactgctctaagggatgcaagacctcctagtgaaagaagacgagtggagagcagttgctggttctgcttgtcgagtccagatgtcgagtcacatcttgtcattagcatcggtgaaggttactactgcacacttgcaaaggggccacttgttccaaatcacgttctaatgattcccgtggaacactgccccagtacattgatgatgcctccggaagcagaggcagaacttgggagatataagattgctctgagtaagtactttgagaagcaaggaaaaactgcagtctactttgagtgggtttcaccacgctctcaccatgcaaacctgcaggctgttcctgtaccattgtctaaagcagacgctgttaacaagatatttcatctagcagccaaaaaactggga

SEQ ID NO: 288216 - DNA, 306 bp, Zea mays
cccacgcgtccgcccacgcgtccgaggtgaggcagtcagcacgctcggccacacccacagagacgcggcacgcctccactcctcctccgactccgaggccagcacgccgcacgctccgcctcgcagtcgcagccccgtagcctctcgcgcgtgcttcttcttcttcttcctcctcctcctcgctccggaggctcgatctggtaactctggtgggggacaatcaagaactgaacactcgacactggcacagagctctggcagcatgcggtggctcggtctatctgtcgatgtgttccgagggggatc

SEQ ID NO: 288217 - DNA, 262 bp, Zea mays
catcagctcaaccctacccagcgctaccctacgaaccgcagctgagtattcaactagctcggtcgaccagcagtgctgctgcgtgcgtacgttgctgttatagctagccactgccccctgcaagatgcgcgcaaggcataacataaccaaccattcatggccggatcgacggcgcaccgagcctcgagttgagcgttcatggtcgtcagggtggacggcctagaccaagagcagctggagcgcggcgggaccctcttcctga

SEQ ID NO: 288218 - DNA, 349 bp, Zea mays
gaccaccggccggtgagagcggttttccacgccgaatgcgacgcgttatcggaggcggtgtcgcacaagtaaaaacattgccaggctgctaccccgccgcacagagcgcccagcagcaagcaaagcgatctgatgtgatgagacgtctattcaaccagagagtgatggatatggacgacggcgcgcgagtgccgccaacaaatcgagagagaactggacgcaagattggaccaagcgagtagagccaagaagagatttcttctgagacgaacatgaagttgttgttttttttttctgtctctctgtctgactgtctctccctctgaacgccgattgagttgtgtgcaga

SEQ ID NO: 288219 - DNA, 296 bp, Zea mays
cccacgcgtccgcgtcgagcaaagcagctagctagctagctacagagccagagggatcggaacgttagttgttttgagcagctatctagctagctaggtaagtaatggcacggcgacaacagtggaacaggggcggcctcgcggccgtggcggtgctcgccgtgctgtgcgtgctctgctcgggccacccggtgccgggcgggcacggcagcggcgggttcgtcacgctgcagccgcacttctatgaccacgcgtgcccgcagatgcaggccatcgtgggctccgtcgttgcgaag

SEQ ID NO: 288220 - DNA, 310 bp, Zea mays
ctagtgaacatctcttacgtctcgttccgtgaagcgaccaaagacgtctttgtgaatggctacctgataccgaagggctggaacgttcagctgtggtacagaagtgtgcacatgggtcctgaagtttatcgtgactccaaagagtttaacccatcaagatgggagggttatacaccgagagccggcacattccttccttctggacttggtaccagattctgccctgggaacgatcttgcaaagctggagatctccgtcttcctccaccatttcctccttggttacaagctcacgaggacaaatcctaact

SEQ ID NO: 288221 - DNA, 328 bp, Zea mays
cacgtgcaaggtccgcggacgcgtgggcgacctgtgtgtccttcgcctacttaacccgcgaggacacgccgcattccgcaggacgcgatcgagaccaccaagcgcggatattggcccgtcagcagaacaagtgcgctgcacgcgacgcgatcgaccggccggccgggcagacagacattatctcaattcccactagctagctagctgctgcaggaggcaagagacgacgacagacagccagccgccaccgtgcggtgccaaggcgagctccggtccgcgacctgttgtgcgccgccgctgctggcttctcttccgcctcgacgcgcga

SEQ ID NO: 288222 - DNA, 380 bp, Zea mays
  unsure (1)..(380): unsure at all n locations
gcaccttcagacagaacttgctagactagaatcagagctgaggacccctgaccgtggctcctcttctgatatcctcataatggaaaaggacaggaagattagacagatggaaattgaaatagaggaactcaggaaacagcgagataatgcacagtcagagctcgaagaactgaggaagaagaaggttgatcaccagccagggtggaatccctttgactcgccacaaaaggcgcgaaagtgccttacattttcaggatcgctagagccaagtaacaaaaataagatgatgatgagctcgattaggcaatcanctactgctccatttatgttaaagcatgaaatccgcaagctggagcagctacaacaacagcttgaggttg

SEQ ID NO: 288223 - DNA, 535 bp, Zea mays
  unsure (1)..(535): unsure at all n locations
cggagctggtcttcaggggtagcttgaactggcgaccggattggtttggagaccggtttgtccctgatttggtgccccaagtgcaagatggcccgagtgcttgaactgagggtgaagagggagaatgagaacctaggccaagtgtttatcaagtgccctaggagtgttgacgctttgattgccattactttgtgtttttcgaaatctgattttggattatttgatttgcttttgtatgtgtagatgccaggaaggtgcccatactacagctggcagagggagtattttgagaaattggtgaaggagaggttgattgccttgttattcgatgattgggaggacgatgatggagaggtggattccaagaaggtttctgaagtaggaaatagtgaagacattgcaacttctgtttgtaatggttgtagtacctgtggtagtagtggtgatgtacatgttttaatgatctgtctgtaatgatgtatatgaacaattgaagaagttggcagggaatgttngaacttgtcaatacattcac

SEQ ID NO: 288224 - DNA, 420 bp, Zea mays
gaacgcagcctgcaccaggcgctgaaagccgacaacgccgaggccgaggacggcagcagcggcagcggcaccggcgccggcgccggcgggctgtcgtggcccgcgcggctccgcgtggcggtgggagtagcggcgggtctggagtacctccacgtctcccaccagccgcagatcatgcaccgcgacctcaagcccgccaacatcctgctggacgacgacctggaggcccgcatcgcggacttcgggctcgccaaggcgatgccggactcgcacacgcacgtcacggcgtccaacgtggccggcacgctgggctacatcgcgccggagtactaccagacggtcaagttcacggccaagtgcgaactgtaccacctccggggtcatcctgccgttcctggcaacggggaaggacccgtccga

SEQ ID NO: 288225 - DNA, 288 bp, Zea mays
ggacgtgggacagcagcctgtggcacttactcttgctggccttccgaggagagacgatgctgaggcctgtgccttctacatgaggtctggcacgtgcgggttcggtgcgcgctgcaagttcgaccaccctcctcgccaggacgatgtctaatacggtgtactccctccgtttcgttttagttgtcgctggatagtacaaaattgaactatccagcgacagctgtaaaaaacggtggaagtatcctagtatcaggatgtggtaccatgcgaatcgcactgttaatgctt

SEQ ID NO: 288226 - DNA, 322 bp, Zea mays
cccacgcgtccggtgatggtggtttcggaactgtttacaaagggaaactccgggacgggagagtcgttgcggtgaaacgcctgtacaagaacaactacaaacgggtggagcagttcataaacgaggtagacattttgtcccgcctcctccaccagaacctggtcatcctctatggctgcacatcccgtagcagccgcgacctcatgctcgtgtacgagttcatccccaacggaacagtcgcggaccatgtccacggatcccgtgcgtcggagcgcggcctcacgtggcctcgaaggatgagcatcgccatagaaacagctga

SEQ ID NO: 288227 - DNA, 457 bp, Zea mays
ttgggtcaggctgcacaatttatcttctctggggcaagcatgctttgcaagaacgataactgcagcaagcaagcacacgagaactcaatccactgtaagttgcatagcagcggcgttaacaaggcctgcatggcacggggctgtacaagaggtgcgcatggaggcacacctttgtgcattgggcacggaggtggaaggcggtgtgtggtccctggatgcccaaatgcagcatgtggccaaggccgtagcgaccgctgcgtgaggcacggtggcggcaagagatgtaaattcgaagggtgcgcgaagggcgcgcaagggaacaccgatcactgcataaggcacggtgggggaaggcggtgcaggttccaaggatgtacaaagagtgcgcagggacgcacagatttctgcatcaagcatggtgggggcagccggtgcaggttccaagggtgtggcgcga

SEQ ID NO: 288228 - DNA, 302 bp, Zea mays
ggccggcgcgcgcaacactgcgatccgcaccccccacttcgatcggttaccaaggcggcgaggtgcctgtgcgagacgaaggaggacgatgcaggagacggcgacgtcttcgtctccgctgccgtcgctgagcaacggctaccagccgctcccgccgctgtacctggggttcctggccatatgggcggcgtctggcttctcctgggccttcaccacgtggaggaaccgccattaccaccaggcgaactaccttgcagtggatcctgtccctggtgccgctgatcaaggcgctccagatggcg

SEQ ID NO: 288229 - DNA, 353 bp, Zea mays
atcaaacccatctccttccttgtgtcgtataaaaagcccgggctctctggtgatcgatcgattgatcgcgacgcacggacaaggagagggatcgccagctccgcccgtttccgtggacgcagcaaggaagcgcggatggacggatcggtctcagtacctccgctcccgctgcgcgatgcgtccgtcgcctaattgccgtccacagcaaacggaggagacgtgccggtgccgccgccgcgccggtgcggcccgcccggcatataacaaccacctgcttctcagcagccgctagctccagcctactcaccatgatggctttcttcgtcgtccagcgaggctccagccaactcacg

SEQ ID NO: 288230 - DNA, 279 bp, Zea mays
cccagttctgttccgtggagtcaaccgaactattttccgttgaaaataccgtcaccacagtctgctatcttcagttttagtttcactttagtttacctttagtttcagttgcaggttatcttcagtttcagttttagtttctcttcaatttcattttacgtgtgtactcagtttcagtttaccggtgtactcagtttcagtttcagtttacctgtgtactctttgacgttgtttttccattaaaaaaaaaaaaaaaaaaaaaaaaaaaaagggcggccg

SEQ ID NO: 288231 - DNA, 333 bp, Zea mays
gtaccgtactcttccctgagcccgctcgacatccccacgaccatcccgccatcgacagtcccggagtccgagatcctcgagcgcgtgtccaagttcttcagcgacattggggaggtgaacccgtcagaaggtccgatgaggcaaggcgagcccgatgactacgacgactacgagagggagcttcctgcgcggaagggaggcgcctgcatccctcccccgccgaatctgcttctgaaccctgagacagggatgcacgccgatggcagcgtcgacagtaagccagggtccagcggccggttgggtctcggagcatccgccgatccgaacgaggtg

SEQ ID NO: 288232 - DNA, 280 bp, Zea mays
cgctgcttcgccaggtacccgctcaagctcatcgccccgtccagggtgggcccctcctcctgtgacgccgtctggctctacgccctcacctacggcggcggcatcgtctccggggacaccgtgtcgtgcacggtcagcgtcggcgacggctgtacggcggcgatcaccacgcaggcctcgaccaaggtgtacaaggctgtgggttcaaaatgttctgaacagttgctagaggccagagttggggaagacgccctgctggctgttattccagaccctgtaa

SEQ ID NO: 288233 - DNA, 289 bp, Zea mays
cccacgcgtccgcaaaatccaccggaaagggaaaggaaagcacccaaaacacaggcggcgctcagcctccagctgtccgcctcccccacccggccacaccgttcgccacgcaccggaccaaccgaagctccaccaagctgcgcacgcaacgcaagcagaggaaatttccatagcctccttcctcgcatgagcttccgtccgggcacgtgccacatgagatgacatgttcttaacacctgttttcattaggcatttacaacagcagtgagatatctgcaaatgctgatta

SEQ ID NO: 288234 - DNA, 372 bp, Zea mays
ggagaagcctgacatccacacgaagctgatggagaggtacagcgaaatcccagcatggtggttctactcgttgatggcgctatcaattgtagtgtcccttctcctctgtaccgtgctgaagcgtgaggtacagctcccatggtggggcctcatcttcgcatgtggcatggcattcgtcttcacacttcccatcagcatcatcactgcgacgaccaaccagacgccaggtctgaatgtgatcactgagtatgctatgggtctaattatgccgggctctcctatcgccgtcgtctgcttcaaagtctatggctacatgagcatggcacaggctgttgccttcctctcggacttcaaacttggccactacatgaa

SEQ ID NO: 288235 - DNA, 659 bp, Zea mays
cgtaacacgctgcagaagaagtctgaggcgcatgctgcgaacagaatgaaagtggagaagcaggtgaaggtggaggagacgggggtggacccgaaggtgctgaagagcgcctttcttaagatggtgaaactgatgaatgagaatgaagcggataagaagaattactgggccaatgggaagctttcccagctgaagtgccctgtatgtcaaagggattctgtagatttgcatgcactcctcaatcatgcatactatgcaaagaatcaggagcatcgtgctgatcacttagggtttcacaaagccttatgtgttcttatgggttggaattattccgtagcccctgttcacaaaaccgcttaccaagcattatcaactgtcgacgctgaagccaatcaaggagaccttatcttatggccaccaacagttataattgagaacacatacaagtcaaagaatgatggagaaaaggatgtcatgagtgataaagaggtggagagcaagcttagagaaatgggctttgccggtgtcaatgtgcagccgctccctgggaaggacgggcagaggtcggtgcaagctaagttctccgccagcctcgatggtctgaacaacgcgtcacggctcgccgagttgttcgagcgccaaggccacgggcgagcagc

SEQ ID NO: 288236 - DNA, 520 bp, Zea mays
cagcctgccgtcgctcagcgccacctgcactggacgtaccacgcggagaacggcacggccgacgtggcgttccgcgcgccgtcggaccccagcggctgggtcgcctggggcatcaaccccgacagcggcggcagcatggccgggagcagcgtcttcgtcgcctcgcaggacggcagcggcgccgtgtccatcctcatgtccaacctggagagcaccagccccagcctcaccaacaccaccgccctcaagttcaaggtgcccgccggccccgccgccgagtactccgaccgcgcgtacaccatctacgccacggtggagcttccccggaactccacgcagcagttcacggtgtggcaggccggcccggcgaccagcaacggtggcatctcccctcacccgacggcgccggccaacttggccagcacccagcggctggacttcctctccggctccagcaccgccgcgtcaaactccaagcttcaccgccgtaacatccacgggatgctgaacgcgattgcgt

SEQ ID NO: 288237 - DNA, 274 bp, Zea mays
cccgcttgaccatctcggtcgcttcccttacttcaacaactacgtcaacctgagcaagttggagtacgacctcctggtccgctatgtcccgggcatcgcaccttccagaatcgccttcgtcgggtccggccccctgccgttcagctcgctcgtgctcgcctcccgccacctgccgaacgtgatgttcgacaactacgaccggtgcgccgctgccaacgaccgtgcatcgaaacctggtccgcgcggacgagggcctgcgcaacaaatgttcttc

SEQ ID NO: 288238 - DNA, 307 bp, Zea mays
ggacctgggcggacgcgtgggttctagatcgcgatctagaactagtccgaaggtgatgcaaaaacttccgcaggacagttctgctataaaattcagcattgcagaacgcatcaagcagtggtcccagaatgataagagctgccaagcatcgaaaaaggaatcccttcttgatagggcatggattgaagctgcagaagcacgaagcccgacacgtaggcactcactcggtggaccaaagggatgtgcacaagacttcaacatcattaaaaggaggcaatccgatacctttatcagcctcccggatgcg

SEQ ID NO: 288239 - DNA, 287 bp, Zea mays
ctcacgttggttccctctacctcccttctcccctgccggcgacggcgaggagtacatcctacgcctcgagcccttcccttgtccccccatcgagcacaggaccggtgccaaaccccttgcccttgtcgtcgcctccaccccaggacaaggctcttccggctccactgcggcggcagtcacctccatcgccgagcagtttcttcccgatctccttgccgccgcggagagggtcaaggcagaaggcgcgcctaaggatgagttggtgaaactgagtctcgttgcaagac

SEQ ID NO: 288240 - DNA, 462 bp, Zea mays
gttgacttcgagtgttctagtggaatactgctgcatatcgaaacaagacttgaggttcaggcgccagagctggaaaaggacattatgaagactgatattagaggcaatcctaatggggacgcgagttcagatttccttgatagtattgagcaatatggtaaccaattcgggccttcagaagtttcggattttgcagcagaggtcaacgatgaagcagataccttaaggaaatcaaagagcgctgggtgggcatcaacatatatgtcaaggtggagaagtatcttgaattcaatagcggaccaggtttcacaggtgccgctatcattggcgattaaaatttcttcagttcgtggaacgatgcggatacatctaaagcctcctccgggtgatcgagtttggtatgggtttacgtccatgccggagatagagtgggagttggaatcatcggttggggataagaag

SEQ ID NO: 288241 - DNA, 450 bp, Zea mays
cttgtattttgggcttggatcgttactttctatatatggatgctatcagtatgtttacaatactggtggggatagatatgatccggtaagatctggtgcagatcatggcacatatatgatagctccaactgcggaaagtgtatatgaccctgcaatcaaaatttctcatgacactaaaacaaacaatggtggagaaatagcaggagtttggggttatatgttccagatcatgtttcagacaaatgcaggtgctgtgatgattacagatttggtgttctggtttattctgtaccctttccttgcccacaatcagtacaagatggattttattctgattgggacacattcaatcaacgttgtcttcatagttggagatgcagctctaaacagactgcatttcccgtggtttaggatagcatacttcctactgtggacgggcatttttgttaa

SEQ ID NO: 288242 - DNA, 473 bp, Zea mays
  unsure (1)..(473): unsure at all n locations
agatgaacagcgaagtggtcgttccagcgcaaggccttccatggcaggtanaaataattcatcgggcaagcttcttggaatcatattgccaataatgtttgttgttgtagtaactgccatagtcctctttgtttgtaaaaagataagatatcgaggaataaagctgccacacggaactcatatggccgaggactttgaaagcatcaagtcaactttattatcattgtcatcactacaagttgcaacaacgtaactttgatgaaaacaataaacttggcgaagggggattcggtgtagtttataagggagatctttctggacaacaagtggctgtgaagatgttgtcaaaaggttcgggtcaggggctagaagaactaaaaaatgagttagttctggtcgccaaacttcaccataagaaccttgtccgcctagaaggtttttgcttagaagatggagaaagattgcttggctat

SEQ ID NO: 288243 - DNA, 336 bp, Zea mays
cggacgctgggcgcgagcggccgccttttttttttgtttttttttttttttttggcacgctcattgtcaacattcctattaatgcaggctgcaataatccgtctttggcaagcaatttcggtgatgtacatgttctacaatctcgtttttattaccgagcaagaaaaaggagagttctggactagcttgaacaaattgcctcgttgaacatgctacaaaaatagtgatttgcctcacagatctagttaaaaacataacctatgatatgtatgcttatccaaccaataaagggcagtagtcatagatatacgtgcagccagcaacctccgtttgatt

SEQ ID NO: 288244 - DNA, 376 bp, Zea mays
ggcgccgcggcgctctacggcggcgccgtcgagggaggccctggtccgcgacgtcagggcggcgggcggggtcatgacgatggacgacctcagagggtacagggtggacgtgggcgccgccttgcgagccgacgccatggggttcaccttcctcggcatgccgccgccgtccagcggcaccctcgggatggcgctgatcctgaacatcctgcaagggtacagctcgctcgagttcttgaaggagctccttggcatccaccgggtcatcgagtccatcaagcacatgctagccatccgtatggacctcggcgaccccgacttcgtggacgtgaccggcgacgtcgccgagatgctgtccacgacattcgccgacaaa

SEQ ID NO: 288245 - DNA, 311 bp, Zea mays
cctggctcctctccttcctgcttggtttttgctttcagctcttgaaccgaatccactgccgcggcgcttagcattggggactagggggccgacatggctgccttaggggcgaagatggagcgtctgtcgtcgatcgacgcgcacgtgcggatgctggtgccggggaaggtttcggaggacgataagctcatcgagtacgacgctctcctcctcgatcggttcctcgacatccttcaggacctccatggcgacgacctcaaggagatggttcaagaatgctatgaggtagctgctgagtatgaaacaaaaca

SEQ ID NO: 288246 - DNA, 363 bp, Zea mays
cgtctcctgaagtcgtccgcgaccgccgccatgctcccctcgccccgtgccgcatccgtcgtgatagggatccgagaacaccccatggatgtgtccgggattcgaggcctcccccctcccttcccctcccccgcccccatccgcgatgcccggatccgcgaccgccgccgtccaaccccggcctccgtctgtgaccgctccgtggtggcgcaacgctggaggcatccacagggggctaccgacggctgggacggcctccgggggaccttcccggcgtggatggtgtcttcgcaaggaaacgacagctcgctggtgctgctggacacccgtccgggtccggctgtggacggcgcaggcatggcg

SEQ ID NO: 288247 - DNA, 281 bp, Zea mays
ggacgtgggttcagttaaggaaatatggaacatggcgacacaacctgctttcttgttatatgttgcgtctgccattgtgattgtctttgtcctggtgttctatttctcccctctctatgggcagtccaatgtgttgatctacactgccatttgctctttgatgggctctctttcggttatgagtgttaaagctcttggtacatcactaaagcttacttttgacggaacaaaccaattaatatatccagagacttggttctttatgcttgtcgtggctactt

SEQ ID NO: 288248 - DNA, 330 bp, Zea mays
cgagcctccaacagacaaccttatgaagagaaatcctgttggtcgaagggaacctcttgttacaaatatcatgtggagaaacttgtttgttcaggccctttaccaagtagcaattcttctgattttcgattttgatggagtaaggattctgcgtctgcagaatgaaagccgatctgatgctgagaagataacaaatactttcatcttcaacacatttgtattttgccagatcttcaatgagttcaatgcacgaaaacccgaggaaaagaatgtcttcaaaggggtcacgaagaatcacctgttcatgggaataatcggtataacgacagt

SEQ ID NO: 288249 - DNA, 293 bp, Zea mays
cagacctggtaacgtcgccgccaatgaccttggcatgctcatcctcggccgcgtcctcctcggagctcggcgtcggcttcgccaaccagtccgtgcccgtctacctctcggagatggcgccggcgcgcctccgcgggatgctcaacatcggcttccagctcatggtcaccatcggcatcctctgcgccaacctcatcaactacggcaccgccaagatcacgggcggctggggctggcgcgtcacctcgcgctcgcggccgtgccggcggccatcatcgccgtgggcgcgctct

SEQ ID NO: 288250 - DNA, 191 bp, Zea mays
gatcaatgcgattcgttaatgaggaatttacaactgttttacattatctcaacctacaacatttgacaaccaatcatcacagctctgcttcaaaatgttgagcacagctgaacccgacagatctgacgaagaaccgggttacatctctagacgaatcctctcaaaatgacaactaaatcgttacatcgcaa

SEQ ID NO: 288251 - DNA, 266 bp, Zea mays
cccacgcgtccgaccactgccccccctaagcaacagactcgctggatatcaccaaagagtaggttaagaagcagctcgagccgcccttccttcgagtcccatggccgcgcccgcttcttcggttacctccagaggcttggcactctgtagtgcctccgtgggttttcatcgcccccgcgggaataatccggtgatcagccccgcgtcttctcgtcgccgacgaagccttactggtggatcaacgatgaactcctcgggcatgaacg

SEQ ID NO: 288252 - DNA, 799 bp, Zea mays
atcgaaacagaaagaacttcaggagctcaaagccgacattgagaaggcaaaggctgaggccaacgtgctaagatttgctgccatgacactcagatcagatctggacaacgagaacgcttcacttgtcgcgttgcagcagggagaggctatggcatccgttgctgtttcttcactagaagctgagctcaaccggacgaaacaagagatagaatctgtcaggtccaaggaggcagaggcccaagaaaagatggtggagcttcccatggttttacagcaagcgactcaggaggccgaggacgccagggtagcagctcacgcggcccacgaggagctgaggaaggcgaaggaggcattcgagcaaaccaaggctgccgcagctgcagcagaggccaggttatctgctgttgtgaaagaaacagacgcatccgtagcatcagagaggctagcacgcgaggcgcttcaagctttgcaagaaagcgaacaggcaagagaaactaaggattctcagcgaggagtggtgcttcctataagcgagtactacgaacttagcaagagggcacatgaagccgaagaacaggcgagcgagaaggtagcagaagcactggcacaggtagtgtcggcaaaggaatcagaagcaatgagcctggagagcctaaaggaagcgtccgatgaaatggacgagaagaaggaagctcttgagatcgccttggagagagccgggagggcgaacgaagggaagcttggcgcggacaggagcttaggaaatggagagccgaccacgagcagcgccgcagagctc

SEQ ID NO: 288253 - DNA, 502 bp, Zea mays
cccacgcgtccgagttcatgtcgtgggtgctgtccacgcctttcggccttgggaactgcctctcgcggtatgtgcgggacaaattccggtccctggctgctgactctgtggaggagagctctgtttcaactgttagcacaacctttgacacttctgatgtttatctgctaacacgggggagagcatgggcaattgccctcagcctaagaaacaagttgagtgaaaagctgctgtcagcttctgttattggaatggacacagaagacctcctttataggtcatctgttcatggaaaaggactgagccggttctggtcttgtgttgaggggtacaaagggccaatgctgattactactttcagcattctcaaaaggtggtggtgagaatgttgattctgatcgaagatgggtgattggtgtattgaccgaggagggatttgagaacaaagataccttttatggtagctctgggttcctttgtgccgcacatccaatattccgca

SEQ ID NO: 288254 - DNA, 265 bp, Zea mays
cgggtccttctgcgtgcatcggtttcttcgtcgactccggctccatctacgagtccggggagaccagcggcgtatcgcacctgctggagaggatggccttcaaggacaccaagcaccggagccacctcaacatagtgagcgagctcgagcttgccgggggcaacgtcggcgcttcagcctccagggagcagatggtctacagctatgacacgctcaagggatacatgccagaggctctcgagatcctcatcgactgcatgcgcaa

SEQ ID NO: 288255 - DNA, 381 bp, Zea mays
ggaccgtggctgcttctgattcactttgcattgaagagcatcctcaagacgttgcgcatcattggccgtgcgtccggagagaatgcaacacaagagagagcaatgttcaggaccgacagcatctggctatgaacagcaattgaagttcctgagaccctggtgtcaaggatctgctccctttcatcaggcctgcctgaaagactgagagcccacttggctaactcagtgccattactgaccgatttttttcctgtcagcagctcaagcaaaatgactccaaagctatagacgttgccagccatcgtcagcctcatagtgtatgcatattctggtggaatataaccaactgttccagcaatggttgaaaagcggacgcgtggg

SEQ ID NO: 288256 - DNA, 331 bp, Zea mays
gggcaaatgcagggttactggaatctgatgttgggaggcacaatttcccaagccaagctactagattatcggttgatggttcaccgtttaatcttgaagataggttttcaactgcaagtcatgttgacatgtccacaaggagatatccaagcaattttggtgttcagaatggagctcttttggagttccagaattctgaacatgccctaaatcatgggagaattgctaccatgccagctccaccttggcaacagcctattggtcttccattgcgaatacaaggacctgaacatccttcagtacttggtagaataccacagcctgtcgacgg

SEQ ID NO: 288257 - DNA, 367 bp, Zea mays
gtcagatccttctccagttaaggtagtcagtgtgaataatgacgcgaagaattcagtgagacggtgtcttctaaactcttattcagataaagtagcacaatccaatgaagttattggaaaatttgagcaagataaatttcctatcgtgtcgattcacaaggagactattctgagttctgaaaggtcttcacagctaaagctaaaggcggctagtgagaatttaacagtaagtccaccaccaagtgtggcgaagttcaatccacttatagattcaccggtgaagcctgctgacgagagttcagcgaaaaggacagaagattgttccagtggtgaaaattctccagtgttttatacagctagggctggt

SEQ ID NO: 288258 - DNA, 269 bp, Zea mays
cccacgcgtccgggtgcagctcctcgtcaccaactacaagccgtggtgggtgcgcaagttcacgcccctgctcaggaagctctccaactacgacgtcatcgacttcggcaaggacgacgaggtgcactgcttccgggcaggccacctcgggatgtaccgcgaccgcgatctcatcatctcccctcaccccacgcgcaacccgcgcaactactccatggttgactacaaccgcttcctccgccgcgccttcaacctgccgcgcgacgcgc

SEQ ID NO: 288259 - DNA, 257 bp, Zea mays
ggacgctgggcggacgcgtacgcgaccgtgggccgagatgcccggccgggctcctcgaaatttgacgacaaggtaagatatatatttttaggtgtcagcagtcagcaagtgtggcacatccggggccatgttcgtttaggctgttcccggccgggaacagcgaccaaacctcgtggatcccttcccatggaaataaacccggcccacagaaatacaagcgttcggttaagtccgatgtggcctgtatccatatcgtt

SEQ ID NO: 288260 - DNA, 574 bp, Zea mays
ccggcgtgagcgtttccgcgtgtgctatggaaaatttccagtgcttctacctctgctcttacggtgacagatccatcacggcgggccatatcttcaaggacaccttcaccttcatgtcgcccaacggcgtgccggtagccgtgtcggagctcgccttcggctgtggcgactataacaccggcttgtttgtttcgaacgagtccggcatcgctggcttcggccgcgggccacagtcgttgccgtcgcagctcaaggtcggcaggttctcgtactgcctcacgccagtgcaccgagagcaagagcagcgtggtgatcctcggcacgccgccggacccggatggtctccgagcgcacactacgggcccgttccaatccactccgatcgtatacaaccctttgatccctactttttactacctctctctggagggcatcaccgtgggcaagacgcggctgccggtcgactcgtcggtgttcgcgctcaagaaggacggctcgggcgggacggtgatcgactccggcacgggcgtcaccacctttccggcggccgtgtttgagcaactcaagaacgagt

SEQ ID NO: 288261 - DNA, 281 bp, Zea mays
cccacgcgtccgcacacggccccaatctccttcgctcctctccatggcgtgccctgcgctcgccggatctccttctgctcgcgcccagctgctccctgcgtgctcctcccgtgcagctcgccgagcgccctctgcctgctagcgccacagccacgccgctgcttgctccccttccttctcccttctctgcttcccctgctcgccatggaactccctgcgtcgagctcggctcctgctccagattgctcggctgcttcgggcagatgctggggcgctcgatt

SEQ ID NO: 288262 - DNA, 316 bp, Zea mays
cccacgcgtccgcccacgcgtccggcgactgcgccatgtaccggcatgccgacggcgacctcgtcgtcctcccgcacgacgcggcgttgcccgtctccctcaaggtcctggaacatgacatcctcaccgtgtcacccatcaaggagttggcgcctggtttcaggttcgccccgatcgggctggtggacatgttcaatcagcggcggggcggtggaaggcctgacctatcacctcctcggcggcgacggttccaccttgggctccgaggctgtcgcattggcgtgcatggaggtgaagggctgtggaaggttcggtg

SEQ ID NO: 288263 - DNA, 262 bp, Zea mays
aatcttgctccagaaccagaagacgtgtattggtccaatctttggctaccctataagcaactttgggctcgccgtattgctacactcctaggctctatctttttcatgttcatatttctgctaccggtgacatttatacaaggactatctcagctagagcagttgcagcagaggcttcctttcctaagaggaatattgaagaagaaatactacatgactcagctagtaactgggctacttcccagtgtcatactgcaaatct

SEQ ID NO: 288264 - DNA, 358 bp, Zea mays
ggatcgcctgcctcttccttgtcaagggcctgccgcaccctgtgtggaccatccaccacgccgtctggtacattctcatggtgcccatcttcctcctggacctcaagatctacggccagtggatgtccggcggcgaccgccggctgtccaaggtggccaccccgaccaaccaccttgccgtggtcggcaacttcgtgggagcgctgctgggcgccaagatggggctccgcgaggtgcccatcttcttcttcgccgtcggggtggtgcactacctggtgctgttcgtgacgctgtaccagaggctccccaccaacgcgcactccccagggagctccacccggtcttcttcctcttcatc

SEQ ID NO: 288265 - DNA, 307 bp, Zea mays
ctcctccccacgctcgagcccacaacagcgctcagtctcctgcgcatggcacgcgcgcccacccagcccttccccttccagcagttgagcacaccgtccctccccagccgtgagctcgcgacgcccattttcctggtgccgagtttcctctgcgtctctcccacggccgtctccctcccttcagctcgccctgtccctgccatggacgccggtgtcctctgctcgccgcggagcttcctgctcggaccgtgcctccatggtgtgtcgacatggtgctcgggccgcgtccttggtcgcctgtttctct

SEQ ID NO: 288266 - DNA, 663 bp, Zea mays
attgaatatggagatgatgattgtggattgtctgatgaacgcacactttcacttgtttcccttagaaacccgaaatctggacacggtgattcacattctgctgctgttcgtattcaaaacaagttcagaggatggaaaggaagaaaagagtttatgcttatccggcagaaaattgtgaagatacaggcccatgtacgtggacatcaggtaaggaaaaactatcggaaggtagtctggtctgttggcatcgtggagaaagtcatactgaggtggaggagaaagggaaggggtctgcgaggtttccaacctgagaaacaacttgaaggtccatcatggcagatccaacctgcaaaggctgaggctgaggatgaatatgacttcttgaaggatggcaggaaacaggctacaggcaggttggatagagcactggctcgtgtgcgttccatgaatcagtatcctgaagcaagagatcagtaccgcagctgcaagcctgtgttaacagtctacgagagtcccaggcgatgcaggacaggatgctggctgattcagctggcaccgatgggggtgatttcatgactgaattggaggagctatgccgggatgatggcgatgccccgatgtcgactatttcttgacatggagcttactatagatcagttaggc

SEQ ID NO: 288267 - DNA, 276 bp, Zea mays
gatagtacacaatctctatcgtagctagctgctagtgctagctccagcctccggggttgagttgacagcaagagttactgatggccgtcgtcgtcaacatggcaccgacgccgccggcctcgacggccatacctggacgtctgctgctgctgctgctgcttgtctcagtcacagcatccttctctgaaggactgagtgatgagtgcgtgtacttcgtaggagcgaactgccgcgctcccccatggatcgaaggagtccagcacgcaggtgattaat

SEQ ID NO: 288268 - DNA, 617 bp, Zea mays
gtacaatcaaagacatctcttaccaatagtcaccaaagtaggccgagcgaaagatctcttttggaaggtcaaacaactagaacttcgcggtctgtcgcagctgcagacaatggattcggtaggacgatatcgtggaagtcacttgacatggctatcaggcatatggacattcgacaaaatttgggtggcatccgtggtgcatctctattccctcatagcattcgctctactactaccaagagccggccagctagagcctcagatcgaggccattccatctcaaatggtgaccgatgcttcacagataacagcagtagcaacgggcacttctctggagattctaatggcactctttcacacaacggcggcagctcaattggttcccctgatagtggaaaaaaagaggttctgagtgaactggatatatatgccaattcacgatacgatgcgatgttgctgaaggaggactccaagaacatgagttggttgcacagcgtggacgacaagtctgaccagagcccagtgtttgatcataggttcgagccgctccctgagccattcggtccgctatgagctgtttatactagtcataaagattccactcgctttgttcgtca

SEQ ID NO: 288269 - DNA, 273 bp, Zea mays
aagatgtgccaaggaagctcttgaggtggtccgcagaaaatagctcaaggaatgcatgtgaaaggtctgggttgaatgaaaataatcaggacattggtgattcttcagaaaagcaggagcatctcctggctgtgccaggtgtgattctcttatgctgtggccttatgttaccatgctttcatgctgaaaggaaagaagtcagcaggcatgacaatgcaaccattcagcgcaacgcacttgaatcagtttcatcctatgaaggaagcatgtcat

SEQ ID NO: 288270 - DNA, 298 bp, Zea mays
cggacgcgtggcaggttctcgtaacaacgatgcaacttggaacggtagcagtcactctaccaagaaattttgtgacaggaagaatgattctgcatgcttgaattaccctggtaaggaaactataaggtggcctgtgcctgtggaaggtggcgcttctcctgtcaggtcgtccgagcgcggtcctatgctcgatatgaggcagccccatggaaatggtggaagacatcctgttcaggtgccatcacaggtggcacggcttgaaaaggagtatgagaaccagcagaagttgaggaaagca

SEQ ID NO: 288271 - DNA, 280 bp, Zea mays
gtggcggcgccagtggttatactggtagtgctggtcctgaaccagctggaaaagtcaagcaatgtgatgaaaattgtgacgagacatgtgacaatgcaaggatttacatatcaaatttgcctcctgatgtcactgttgaggaattacaggagctatttggaggaatcggccaggtcgggaggatcaagcaaaagcgtggttacaaagatcagtggccctggaacataaaaatctacgctgatgactctggaaaagccaaaggagatgcttgccttgccta

SEQ ID NO: 288272 - DNA, 291 bp, Zea mays
cttggagaaagaaataactttggaagagagtcatgatcaagaagtggaagaagatagtatgtctagagaaacaccacgatgggcttcagataggaacttacttgattctacttcatcaacctctaagagaaggaagcgagacaaaggaaatgaagttcgcaagtcaagtgacccatttttggatatgttaggtgaatttcgtgatgatcttaagaacgcttcaaatcactttggaaaaatgactgaaatcatggagcgtgaagctaagctccaagaggaggctgcacataa

SEQ ID NO: 288273 - DNA, 327 bp, Zea mays
cggacgcgtgtgagagaacttgctgaagagaaggaaagaagaagattagaagaggcggaaagggagagggagcgtaaaaaggatagacttgctgttgaaagagcgacaagagaagcacatgagagagcatttgccgaagctcgtgaaaaggcagaaaaaatggctttggaaagaattaatgctgcacggcagcgggcatctgcagaggcccgagagaaagaagatagagcaagtgtcgaaccagctgctgaaagggcttctagagaagctaggataaaagcagaactgtgcggcagtcgagcgagcgactgctgaagctcgggagcg

SEQ ID NO: 288274 - DNA, 481 bp, Zea mays
cacaactatggatgcagtgaacttcatagaatcatgtgaagaaggtcatgttgctgcaacagtgactccccagcatctcctcctcaataggaatgctttatttcagggtggcttgcagccacacaattattgcgtgccagtactgacaagagagactcgtcgacaagctattgtgtctgctgtaacaaatgggagtagacggtacttccttggtactgacagcgctccccatgataaacggaacaaagagtgttcctgtggatgtgctgggatatatagcgctcctgttgccttgtctctttatgtgaaggtatttgaagaggctggtgcccttgataaactagaagcatttacaagcttcaatggccctgatttttatggcctcccaaggaacacttcaaagattatcttgagaaagaatgcctggaaagttcctgctacttataaacacagttcaggggagattgtgcctatgtttaat

SEQ ID NO: 288275 - DNA, 310 bp, Zea mays
ctgcagtgagggactgaggggatcccaagttccaaacaaaactcaccgaggaaaatcattttccgacatggtgaggacgagaaggaggttggtgctgctgctgctcctcctcggcctcacggtgctttccccgctcgcgctctacactagccgcctctccgtggcgcttaactctatacaagcgcgggttttccctggagagatcacgaatcagggccgtggcgtcaaggcagataagctgaatgcgcttcctctgcaaacagtgagctccttgaaagaacctgtcgacattgtcttctcagaggagctg

SEQ ID NO: 288276 - DNA, 505 bp, Zea mays
agctgacctgaccggctgacccgcccaacccaacaacctctccgctggccatcttcctcccgggatccctctccctccttcgatccagctcagctctcttcctcccgccccgtactcttcttgatccgttcactcatacttctcgagagaaaaggaagaggattcgatctgttgctaccgctagctgcggtactaacagcagcagcagcaacaggaggtaccgtagaagaagggaagggaatccatgaagagatggggcagcagcggacaggccgccgattccttctaccaggtccgccccgattgcagccaaaacgtccccaacaccaagttcaagatcaaggcggggaagacactgagcgttaggaaatggcatgctgcgttcacgcgtgatggatgcctggatatcgcctctgttctgagccgcatacagagagggggtgtgcaccccacgatcaggggagaggtttgggagttcttgctcggctgctttgaccctgggagc

SEQ ID NO: 288277 - DNA, 320 bp, Zea mays
aatgattggttcaactttgcttatgtgcggatgtatttctatgggaatattatggttcaggaacaacacacccactcaaagtactcgacaggagcaagctcggatagacaaggcatagaggccccgtccgaagcttagcacgtcgctcttcggtgaaccttctgtcccagacgtcgacccaaaagatgctcgtcagtggcaaatgtcaggctcggattcagactaatgactcgcttcttacatttggacctgacgcactgcaaagacgctttagaattacgtacactacatagtagtgcggtggcctcagttttgggaaa

SEQ ID NO: 288278 - DNA, 324 bp, Zea mays
ctcattttatggctcttgcgtacttatgtcgaaatgattaccttgctggagggtatcgaatgttttcttttgctgatcctaccggtagaagaactgcatgggtgtcgctaagaaattgtctgtacatgctacctttggggtttatttgcgtacaactggggcctcacatccgagtggttcagttttgaagcttcactcctaacattaggccttaccatcggagctctatcattcgtcctggaaccaagcccgaagaccgcgaggagaatgttctatggtagcctgctgtatctccctgccttcatgtccggacttctgttacat

SEQ ID NO: 288279 - DNA, 316 bp, Zea mays
tgatgacgaaaccgaggaaccgaggacccgcatcagccccctccagcaggaccctccgccgctgcagcagattctgatgacgacgatgaagaggaagaagcggaagtgactctcggtgtccttagcaaaccgaaacacccaggcctccttctccgccacttgttccccagcaaggccggcggcatcccggcgtggctagaccccgtgaacttgccgtcggagaagtccagctgctgcggtttttgtggcgagcctttgcagttcgttcttcagatttatgcagcagttgaagacaatgtagcagccttccatcgaa

SEQ ID NO: 288280 - DNA, 323 bp, Zea mays
ggcttcagtagtttaattctggataatacacatttatgcagcaaaagaagctagcatagttttgctttgtttattttttgcaatggtagctaaataactaatgaacatgtgtacagtacagttcacatgccacgtcttgtttttcttgtctggtacaattacggaggtcaaatctccatgttttcctttttcccacatataaacaactatatatatatgacaaaacacattgcaaacgcaaacctttaccactaaagtgttgtgattgtatttcccctttgcaggacactatgtcgtaatatgtgggtatgatgcggatgatt

SEQ ID NO: 288281 - DNA, 376 bp, Zea mays
cccacgcgtccggcggccgccatcctcctcatgctcgcgcgaggcggcgaggccgtcagtctctggctccagccgccgaccgccggaggagggggcttcctcggcggcgcggaccgttacctgactcgggaggagcactggatgaaccaaaccctggatcacttcaacccgacggaccatcggcaattcaaacagcggtactacgaatttctcgactactaccgagctccaaatggcccgatcttcctatacatctgtggagaatctacgtgcaatgggattggcaataactacttagctgtggtggcaaagaaatttggtgctgcattggtttctcctgagcatcgatactatggaaagagttccccctttaaca

SEQ ID NO: 288282 - DNA, 615 bp, Zea mays
ggacgcgcggacgctggcggacgcgtggatcaatacagccaaagctatagccaaagagtgtaggatactaactagtggtgacctagcaatagaagggccagaattccgcagcaagagcccagaagagatgagggacataatacctaagattcgggtcatggctcgttctttaccgttggacaagcatacccttgtgacgaacttgcgaggtatgtttcgcgaggtggttgctgtcacaggtgacggcacgaatgatgctccagcgttgcatgaagcagatatcgggcttgctatgggcatagcacgaacagaggttgccaaggagagtgctgatgtgatagtgcttgatgacaatttcacaactataataaatgtcgcgaggtggggtcgtgcggtttacataaacatccacaagttcgtgcagttccagctgactgtcaacattgttgctgtggtcatcaacttcgcctcagcatgcattacagggagcgctccgctcacagcggtgcaactcgttgtgggtgaatatgattatggacacattatgggctctatctctagcaacggagcctccatacgatgacatgatgaagagaccacctgtcgggcgagggg

SEQ ID NO: 288283 - DNA, 278 bp, Zea mays
aacaagagcagtctgatggagatggaacatttagcccatatctggagagtcagcttaagagaaagtacatttccgatggagatggtcatgtggatcttcgcaaatctgtaaaaagggcttcagtaagcccacctggtgtgggaaccccacctcatcttggaaatagtgtcagtaacgttgtttgtgacagtccagtcaaattcgtttcaagtgtcgtttgcagcggaggcaggcttcctcatcacatgatgatataaatatagaacaagcacaattaa

SEQ ID NO: 288284 - DNA, 422 bp, Zea mays
atcaaagtggtttaactgattatgataagacttcaatggctaccacactgtttacaaccgaaaataagagagggttccccttcatgcattgttggactaaactcaagaacgaacccaaatggcaagctattgttcaaggcacttcactacgaggggcagcagggatgtcaccggttggcagtgccacaccaactgcaagtgtaaacgatttggatagcgattctctaggtttaactgggaaaaggccattaggccgagactccacaaaggcatcaaggaagaaggccatgtccacgtcgtcccagtccatgaagtatttgaccagaattcatgacctgcaaatggcccggttgaaacaaagtgaagacaaagtggagaagaaagaagcacattatgaggttttcaaggatctcgaatataag

SEQ ID NO: 288285 - DNA, 331 bp, Zea mays
cggacggtgggcgtacgcgtggggacgacaccaacatcagcgccgggttcgcggcgaacggcaggcagatctgccaggcgcaggccggggccagcgacggcaacctggcgccgctggacgccatgagctccgtcaggttcgacaacggctacttccgcaacctcgtggcccagttcggcctgctccactccgaccaggagctcttcggcagcggcgccgtcgactccatcacggcgcagtacgcgcgcaacggcgccgccttctcgcgggacttcgtcacggccgtcctcaagatgggcagcatcggcccgctcaccggctccagcggcga

SEQ ID NO: 288286 - DNA, 375 bp, Zea mays
cacacactacgacccagtcagcaactcagccatggggcaggctagtagggctcatcagctcctagcctccctggcggctatctacgtcaccctagccatcagtatcacccagcaccatgtcgccggcaacatgaccgacgacctcgagataatgtggggcaacgcgaaggtcgtcaccgacggcagcggccagcaggccatcgcgctggctcttgaccgctcgacgagctccgcgttccgctccaagaagacgtgccagttctgcagggttgacatcgagatcaagctcgtccctgggaactcggccggcaccgttaccacgttctatatgataaccgagaacccgtggcagttccacgacgaatcgacatcgag

SEQ ID NO: 288287 - DNA, 334 bp, Zea mays
caattccgaagaatagttttggtgtcgtgcttccaaagtttttaaattcgttgacagatgaccagtaactaaggatgttagagcttaactcatggcaaatcttaagattgctgcaagcacaagtgtctgctttctgccttgaagattgtattaatgtggagagcagtattgaacttgacatccttcctgaatctattgagcaaaagttatgttttttactttctaaagccatttcttctcatcagtcttcacgtcttcatcgaggttctgatttcaagtctgttgaagccgggtactatgggactgctgcagataactaccacgccttcttaag

SEQ ID NO: 288288 - DNA, 322 bp, Zea mays
acgcaccaaacgagcgggacctgcgagcggcggacgcgtggcgctcccctacctctccagcatcctcccgtctccgtcgtctcgtctccgctcctcacctcgccagccatgggcaagatcaagatcggaatcaacggtttcggaaggatcggcaggctcgtggccagggtcgccctgcagagcgaggatgtcgagctcgtcgccgtcaacgaccccttcatcaccacggattacatgacgtacatgttcaagtacgacaccgtgcacggccaatggaagcacagcgacatcacctctcaggactccaagacgcttctcttcg

SEQ ID NO: 288289 - DNA, 330 bp, Zea mays
gttttgcttggtgaaaatcacctatataagaacccagtctacaaaaggacaaaggaatgcagtattaattctcctgattatggaccacttcctccgaatgcaccagattggtgcctggctccatttgatcctgagggtttattaagtacgctgatggctgtggttacttgttttgttggtttgttctttggacatgttttaattcattgcaagaatcattcacagcgaatgctaatatggccgctagcttctgtggtgctgacaatctctgcgtatttagtgctattattaggcagccttttagcaagccttgtatacagtgactacatg

SEQ ID NO: 288290 - DNA, 282 bp, Zea mays
tctcgtcgtttgccgtcaagtcgtcgaacctgtcatcctctgctcaaaccccacctcaccagctcgcttcaaacacgatctcgtcgtcgagcttcgccttagccttagctcgtcggtcacgctcgccagatgttcgatcaaggacttcagctgaaggccgtcgtcgttcaggcaactaccaaatcgagttgtgatgtggcacgctgattgtcgagggctccgggagtgcgctatccacgctgctcgtccaccagccgccgcgaggaaacttccgcgtcctcc

SEQ ID NO: 288291 - DNA, 338 bp, Zea mays
acccacgcgtccgcggacgcgtggagatacgcacgtacgctccggcggtttcgatcgagcgaggcgggcggaaggcagaacgcatggcgaggctcctggtgatgatcttgctcgctctgtttctcctcgccgtcgcgcccgctcaagcggctcgcttcacaagtaattatctaccgatcacgcagggggcttgagagcgaggatcggcgaggctccggcgctagaggctgcgcaagtttcagcagaggagaactggagaagcaacgcggtggttgaagagatgtttggaaggatggctctacaggtaactgactacccgggctctggcccgaacgatc

SEQ ID NO: 288292 - DNA, 444 bp, Zea mays
cccacgcgtccgcacacagcaactatcaacgacataagttttgacgcggatggtgaatatataggcagctgctcggatgatggcacggtggcaataaacagcctcttcaccgatgaaaagctaaagtttgagtaccatcgccccatgaaggcaattgctctagaccctaattatgcccggaactatagaagatttgctactggtggtttagcaggccaagtacttgtgctgacaaagaagtcttggggaggttaccacaacaaggttttgcgtgatggtgaaaggccaatccattcgatgaagtggagggcggatcttcttgcttgggctaatgatgcaggggtcaaagtgcatgatatgagaacagacaaagggatcgcattcatagagagaccaaaaggcattcctcgaccagagttcttgcttccccacctagtctggcag

SEQ ID NO: 288293 - DNA, 319 bp, Zea mays
gcgcgtgtatgcttcgattcgttctgtgcatctttctgcagtggattctgcatgattgggatgatgcgaagtgcattaagataatggaacggtgcaaggaagcaatcggtggcaaagaaaggggagggaaagtcattataatcgacaccgtgattggatctaggccaaatgaggaagatatgatacgcagggaggctcaagtcctgtgtgatctaggtatgatgacaacgtcgaacggagctgagcgagaggagcacgagtggagaaggatcttcctagcagctggatttcgtgactacaaaatcacagacacacgagg

SEQ ID NO: 288294 - DNA, 469 bp, Zea mays
cccacgcgcgcgcatacgtgtcgttgtctcgagcttcttcgtcaaggtgctccagctgccatggcgctgggggatgaagtacttctgggacaccttgctggatgctgaccttgagagcgacgcactaggctggcagtacatttctgggtctctccctgatggccgtgagcttgaccgcatcgacaaccctcagtttgaagggtacaagtttgatccgcacggggagtacgtccggcgatggctaccggagctggcaaggctgccaacggaatggatacaccatccctgggatgcacccgagtctgtgcttcaggctgcaggggttgagctaggatctaactacccacgccccattgtcgagttagatgcagccaattccaggttgcaggatgccctgtccgacctgtgggagcttgagtgcagcctctcgtgctgccatggagaacggaatggacaaaggcctcggcga

SEQ ID NO: 288295 - DNA, 361 bp, Zea mays
agcggcaggaggccgagacccatcggaagacgtcgaccaggagtcggcggcggcggtggccggggagcagcagcagcagcaggcggccgaggccgatgaggaggaggagcggcaggcgcccgtgccgcgggagaagatcctgcagcggatcaactccaagaagggggccaagtcgtaccagctgggcaagcagctgtccttcaagtggaccacgggggccgggccccgcatcggctgcgtgcgcgactacccgtccgagctccagcagcatgcgctggagcaggtcaacctctcgccgaggtgcgccgccgcccgtgtcgcctcgccactcgcgcgaagttcaacatacactcagcgcccg

SEQ ID NO: 288296 - DNA, 322 bp, Zea mays
cattagtataaatgtgtggttctgcacttcagtttggttcatctcactcatcagctagcaccaccaggaagtaggaacacacctcccaccagtccactgttccatcgctcatcactaggctgcaatggctgcaaaggcacctgtgcttgcagcactggtactgctcctgagctccgcccagctgtccacgggggcaaggaggcgcatggagctgtaccagcccgatccggcggacatgctctcctaccacaacggatccgtgctccactccgacatcttcgtgtccgtgctctggtacggcagcttcacgcaggtgcagaag

SEQ ID NO: 288297 - DNA, 418 bp, Zea mays
gatggaagctatatgtcgccatactatctacatagtgatacattgctatcaaatcttcttggccagtatgtatctactgcgatctggaatagattagtcgctggtttgaatgctcaattaaggacagtaagacaaggaagtgtccgttctactttgggccctgttgtttcttggatcaacagtcatgggaatccccaacttgagagacatggtgttcgagtggagctagggtggttccagtccactgcttctgcatattaccagcttggtattatcgtagctgtggatgagaacttctacaagaatctccgccaccatgagcatgccacagaattttgtgaacgctcaaggaagaacgttgcagttccacttcaggatttcaatcaggcaaatctggatcagccttgcacaagctatg

SEQ ID NO: 288298 - DNA, 304 bp, Zea mays
ctagttcctagatcgcgagcggccgcccgcgatctagaactagaatgaggtaaaaatgccctttctcacatatataaatgctatattgtctatatgaagccattatataggcaaaacagccactatattggcaagtcgacaactagtcgactgacttatcgactagtcaacaagtcggtaccttgtcgactcgacttatcgacttgaaaacattgcattctactatgattggtgaccttaccaatggacccatcaaactaaagtttaaccatcctgcataagcattttttttaacgaaaccatt

SEQ ID NO: 288299 - DNA, 294 bp, Zea mays
aagcagcagcaaggatgttttaaaggacgaacatggaatattgatactgaacgacacctctggaaacaaagaatctggtacctccacacagataccaaatgaaaagcaaggtgcattacttggaagaaaaaataatgacttaactgaggtcgaactgggtccatgcttagagaaaggagtaccttcacatggccattgttttgttcagggtgataatggtgtagatggggtaggttcagttgaaaatagcttcaacacttcaaattgctctcatggacaaccttttttcaactt

SEQ ID NO: 288300 - DNA, 431 bp, Zea mays
agctccagctagactgtcctgctctgcttcggcgctactgtgcagtgtgcacagccagccagctctgcagcagagcagagtccggctgtgagccctgaccagagaggattcagtgccatggagagacctgcgcaggcgcccacgcagctgccgccggggttccggttccaccccaccgacgaggagctggtagtgctgtacctccgccggaaggccctggctcgcccgctgccggcagccgtcatccccgtcgtccacgacgtcgccgggctcgatccatgggacctccctggggcaagcgaaggggagggttacttctttagcctgcggcgagcgccggcgaccggccgtggcagccgcaggaggagagctgggagcgggtactggaaggccacgggcaaggaggagccggtgttcctacagtgcggcgg

SEQ ID NO: 288301 - DNA, 385 bp, Zea mays
gagaaagaatacggttattatctgtgggttccatttttttttcctcacaagcaaacatttagagattcctttgtttaaaagtaacaaacataaagagaccagaccatgtacacacaggtttggttgcttgattcgctcatcttcggcatcctattatgttttacaggcgtcattcaccacgatttttttgcgaactgacatcgacgtacatataaatttatcgatgctaacagtatactagtagtaatcattagtcactgctcgatcgccatgcgcgcgccagcgatggatgcaggctgatcatttttttgggggcagcagcagagccactcttccccccggctccctcgccgtccttcttcttggccttggtggacagcttgag

SEQ ID NO: 288302 - DNA, 343 bp, Zea mays
agcacgagcacgctcctcctcgggccgtcggcgtcgctcaacggcaccgccggcgtcagcaccacgcctttcgtcgccagcccttccactgcgcccatgaacaccttctactatctcaacctgaccggcatatccctcggcacgacggcactgtccatcccgcccgacgccttctcgctcaacgcggacggcaccggcgggctcatcatcgactctggcaccaccatcacattactgggcaacacggcgtaccagcaggtccgggcagcggtcgtctccctggtgacgctgcccaccacagacgggtcggcagccacggggctcgacctgtgcttcatgctgc

SEQ ID NO: 288303 - DNA, 338 bp, Zea mays
tccatcactcggcggtgcttctcgagaagatcattatacagctcatgcagctcaacataatgctcatccatccggacgtggccgtacatcgctcgttgaagagcgtcatctagctctgctgtgcacttcttctcgttgcagagctccatctcggtcttctctgcgtgcatcctgtttgattctagatcgaccctcaactcttcgaatgaacaaaggttgtttccttggtcctgaacagctgaactgatttttgctactgactgacgagcgaaatggtcaaatgaaagaccaataaatgattttcttggggctggattctgttgatggtactctataat

SEQ ID NO: 288304 - DNA, 316 bp, Zea mays
acggcgcgcggcgaggaaggcggagtccggcggctgacggagggcgagtggatcgacacgatgcccagctggtccccggacgggagtctgatcgcgttctcgtcgaaccgtcacgacccggcgaacccggccgtgttcagcatctacctggtgcggcccgacggctccgggctgcgccgcgtgtacgtggccggggcggagggcagcgcggaggcggacaaggagcggatcaaccacgtgtgcttcagcccggactctcagtgggctgctgttcacggccaacctgggcagcttcttggcggacccatctcggggc

SEQ ID NO: 288305 - DNA, 410 bp, Zea mays
gcgagtccgccgccgacgtcttcgaccgcgtcgccagtacgatcatccgatccgagccgagccgattcagtccatcgtctccctcttctcttctcctccccacaccattatttattgacacaccaatcaacgaacccatgccgcggcgccggcttccttgagtcgctgtggcgggacatcgacatggggcggctggaccaggaccccagctgcgagacgaacctggtgatcgtctcccacggcctcacctcgcgggtgttcctgatgaagtggttcaagtggacggtggcccagttcgagcgcctcaacaacttcgacaactgcgagttcagggtcatgcagctgggccccggcggggagtactcccttctcgtccaccacacccaggaggtactccagcagtggggcat

SEQ ID NO: 288306 - DNA, 500 bp, Zea mays
cccacgcgtccgattaggaaattttgtattgatgcattatcaagcaccatgcaacattgctcctcctgttaaagggttctatcagttgtccatggtttctgaaaatgaaggtgcttttctatttaagctgacattgatggagggttacaagtctcccttcattatggacttttgcatgattacaatgccattccctcgaagaagagttgcatcatatgacggaaatccatcaattgggacagtttcaatgacagagcattcaattgaatggagaattgtctcaagtggacggggacttagtggtaggagcattgacgctaccttccctggtactgttaaatttcagcctagaacgacacagagaataaattcatcatctcgattcatttcaagcactggatatactgaagatagtgacagtgaacaagataacgttaagaatggagctagcttggatgactacataatggaaaaaatcaataaggatcttcaggcagttg

SEQ ID NO: 288307 - DNA, 289 bp, Zea mays
gtcgcggcttgacggacgctgctgcatggggttagtgcgtacgattcgtcccgccgccaccgccgcagggttgatgtttgtaggcttcgttttccttcatctaattgtcgtcgtagtcgtcgtcgtcgcgcaattaattaatggagtaagtaggaggatttgatgtgctgtgttcggttcagttcagctcacggtgctgtcttgttcgtatgtgctggatggatctgtctgttgtaagctaaactagggaggctgagtgctgtgttggtcggttcattattaagctgct

SEQ ID NO: 288308 - DNA, 279 bp, Zea mays
cccacgcgtccgggttaccccattccatcgtcctcttcggcggcgctggcgcccacaccaccgaaccctcttccagcttccttccacccgagcacgccggtcacccatcatcgccgaagccctccccctcctgcttcagctgtgctggtattagattagatcaaagtggaccgcgtcgggctgggtccagtcctttcgctgattgcggttgcagattcctctcctgcgaggcacgtgctgagtcctatccctatccgcccttgttgcagcggtgcggaa

SEQ ID NO: 288309 - DNA, 401 bp, Zea mays
gtacccctctccaatggcgccgtctaccagtcggtgcctgagtcctacgtgctcccggagcaccagaggcctacgaagctcgccgccgtcttccgcggcggcgatacctgtagttgacctcggcggcgatgatcccgacaggacggcggaacagatcgtcgccgcggggaaagagttcggtttctttcaggtgatcaaccacggcgtggcggaggacgtgatggcctccatgatgagcgccgcggaggagttcttcaggctcccgacggacgagaagatggcgcactactccaccgacagcacgaagctgccgcggttccacacgagcgtcgggaaggagcaggagaaggtgctgtactggagagattgcctgaagatcggctgctacccgttcgaagagt

SEQ ID NO: 288310 - DNA, 471 bp, Zea mays
aaaaaaaagaagattaatgaccacatgatgatctgtcatgtaatgacatcattaaaacctatctactgtagctatgtagcatctacctacagaacaaacccacggcccattcgaattcaaggtccttgccaattaatcttagctttggaccacaccatctgcacgaccgtgaccactgacgccagcaagccaaggatgatcagtcggtgctctgccgtccatggggcagcagcttgagcgcctggagcaaggtgttcctgagcctgcccaggtgcggccgcgcgtcctgattgtccaggtacacggccttgagcgcgtcccaccctttcctgtggacggcggcggggtccctgatgaccgggtcgtcctcgccgtactcctcgctcagcgtcgtctcgcccgcccgcaccacgtactcgaggtagtgcacctgcatcccggccgcggggtcccggaacatgccgcgcgcca

SEQ ID NO: 288311 - DNA, 307 bp, Zea mays
cctcatcgtcgaacttcatgctgtactggggaacaggtggtctcagattgcaacaaggttgcctggaagaactgacaacgagatcaagaatctctggaactcgagcatcaagaagaagctccggcagaaaggcattgaccccaacacccacaagccgctccttgtcgaggttgaacgcagcaaagcagctccaacgaccagtaccgagagaacctctgagtccaatgatgttgacccttcaagtggcgccgcacttggcaactcgagccatcttcttctcagcgagacagcacaatcaccacagttg

SEQ ID NO: 288312 - DNA, 307 bp, Zea mays
cccacgcgtccgcccacgcgtccgcccacgcgtccgcccacgcgtccgcgtcgttgctggcgagttcatactccgcttgccataaagctgtcatgcgccacctctcctctagtaaccctaaccatccgaatcctctaacctacgaagaaccaagagcctcaccccagctggaggccgccgccattgacttccccgtacaccgccgtagaaacctattggccgtggtctgggcttccccagagacatcgtgtgactacccgtgggaattctagggctggattgccgatccagccgcggcaatttcttg

SEQ ID NO: 288313 - DNA, 313 bp, Zea mays
cggctcgagatcagttggtgttgaatgtacattccacaccatatcacccaagggacaggactatgtggagggtgaaaatgcttccaaagcatccacatctgaatcgaaccaaaaggaaattctcgaggttgtcgtcacggaagttcttggttatgggaagttttatgttagactgtgggtgcgacggtcgagtgattttaagggatgatgctttacagattggttcaaaaaaaagcatatgctctttcaggttcttcagtccagtgtggatgactgcaggggttgtgctattcagatttggccttttcaaaag

SEQ ID NO: 288314 - DNA, 350 bp, Zea mays
gcacgcgtacggcagctaatcgtatcggctcgaggatgagcagtctaaggcacgggagagcgtggccatcagtctctcgcccaccgttggaggtgggggatacaatgctgcctccgccaacggagtgatggtgcagaagccgtccaactggaagacaaggatctgtaacaagtgggagatgactggatactgcccatttgggagcaaatgccactttgctcatggttctaccgaacttcacaagtacggagggggcctcgtggacatcgacggcagggacatcttgtccactcctgattcgaagcaagccggtggctctgctaaagctcctctagagtctgctgctgcgt

SEQ ID NO: 288315 - DNA, 406 bp, Zea mays
cccacgcgtccggttctacaacaactgcccgcgcacgcggggactgcgtcggccgcggcttcctccgccgcttctccttccagccgctcaaggagaaccccctcctcggccccacggccgccacgctgcagagatacggagccctcgactggtacaaggtcgtgcacgggaaccaggcctggcggctggagtcgtgcacctggctgcacgccggcctcatccacctcctcgccaacatgatcagcctcatcttcatcggcgtccgcctggagcagcagtttggattctggaaggtgggcctggtgtacctcgtctctggcttcggagggagcgtgctctccgtcttcttcatcaggaagggcgtctccgtgggcgcctccggcgcgctcttcggcctcctgggagc

SEQ ID NO: 288316 - DNA, 332 bp, Zea mays
ggacttccccttcacttcacctcgctcttcatcttcgtttctgctcgcaacctagctgcccctccggtcctccacctcccgtccccgtgcgcagaccatgcctcgcgcaccaccgaggccgtcgtccacggcgagggaggcacgatcaaagtaggcacaacgggcaccatcggctccctcatgacaagagaactggacgccgtcaaggtcgcgccgccgccaccggcagccgcgggcaacccgcgcctgaggcgccaccaaggctgtcctgtctcggtgccgtgcggagccgctactcctcggaagaccgtgctgaggaaaagctcctcgga

SEQ ID NO: 288317 - DNA, 274 bp, Zea mays
ggacgcgtgggtgtatactctgattgtatggacgaggttgtttctgaacattgatccttctaaatagatctttcttcctccctattttaaacagatgtattttgatggatttccctacgtgattacagacattatgctgtatattttatgtgctgacatttgggaattgatgtttaaatatactagtcctaactctaaaaatatggtgacaaatgcatcattactgaatgataaggtggaaatggagacagaaaatgttcaagcaattcctgaa

SEQ ID NO: 288318 - DNA, 460 bp, Zea mays
ctttgtcactcttctctgtgtaacgacttcctccctttcctgccgcaccacgcaatcaccggggcggaggcggctgccggcgagcacttgggcgtctccggccaccgcctgcctcgttgtggttagtttccctcaccttccccttacctcactgccatattccttctcccgatccgtcagtttcgccagctgaagacgatcccaatctcagatccaactaggaactcacccagcgctatctcccggcagcctccccgttgactcccgcgatttgttacccgctggcgctgccgcacacagctcaaaaggagtagcagcgcccctggttgccggttggagcgtcaaggatgagcgggaggaagaatgcgggcaaggtttccccctggttgctcgtcctcatctgtttagggtgcttctttgtgacctacaacctcctgacgatgcccagccggggacggga

SEQ ID NO: 288319 - DNA, 430 bp, Zea mays
cggaccgtgggcggacgcgtggggtcgaggacgtgcgccgggaggtggagatcatgcgccacctccccaagcaccccaacgtcgtcacgctcagggacacgtacgaggacgacaatgccgtgcacctcgtcatggagctctgcgagggcggtgagctcttcgaccgcatcgtggcgcggggacactacactgagcgtgctgccgccttggtcttacgcactatcgttgaggtcgtgcagatgtgccataagcatggagtgatgcacagggatctcaaaccagaaaatttcttgtttgcaaacaagaaagaatcagcggcacttaaggccattgattttggcctgtctgtatttttcacaccaggcgaacggttttctgagattgttggaagtccttattacatggctccagaggtgctaaagagaaacta

SEQ ID NO: 288320 - DNA, 270 bp, Zea mays
atcccgccgcataccgctggccgagtcctcgtcggcgccggacggggtgaagtgaaggccgactgggagaattttgtggatcttatctggtctccatcatggaacatgacggcacgacgaacctggctgtcactgaggctgtgcgctcggtgcagctgctcaagatcgacggctactgcgccaccgctaccatgggggcatcggagttcatcaaattccgatggcacatcgatggccacgagtgggaggtccgtttctatcctgattact

SEQ ID NO: 288321 - DNA, 375 bp, Zea mays
ggcaccacgagccccgcacctcacacagatttagcctacctctcccaccgcggctacattcctcaccccaccctgtcggctgcataaacttttaaaaaaatgaaggcaaatatgggcacaaaagctcgtccactatctgttgacgcagacaaaggagagattggcgaaatagatacaagggctccttttgaatctgttaaagctgcagtgagtttatttggtgaagtcaaggtttcatctgacatatcagctgcaagaaagcctaaggttcctcaagcagagagggttttagccaaggagacagagctgcacttagcccagaaagagttgaataaatacaaggaacagctgaataatgctgagacaacgaaagtg

SEQ ID NO: 288322 - DNA, 352 bp, Zea mays
gctggcagccaggtttggctgagttttatggatgctaagatatggttcccctcaagtgacagcattgtattgtggtatgtctgacatcttgtacactaatgccatcagcaatcattttgggcttcatgtctgatgttagttgttgacatcataactcatggaatgttgcaaaggaatgatgctgtagctgtagctgtaatgtgaacggactgtaattcacaaatttcttgatttgttttacataggatgtccatatgctctttaatagacctttaccagttgtttactacaggttctttcaatccctgcattatacagtcttttgtgatacatgttacatcctgtgtagttc

SEQ ID NO: 288323 - DNA, 300 bp, Zea mays
cattctgcggcctgttggagggcagcaccaagtatcacagtctagctagctagctactgcctggcaccagcaagcttctgccctgccccgccccgccccgccccgcggccagaatccgaaaccacagcggcaacaaccttgcggcgcccgcgtggaggcaggcggcgcataaagccagccggcgctgctcctgctgcttcttcgatcggtccatggctgtcgtcacgagggacgcggcgtgcctgcccctcgtcctcctgctccttgtcttctccgcggccccgtctccggctgacggct

SEQ ID NO: 288324 - DNA, 273 bp, Zea mays
cggctcgagcgacggcgagaagtttgcgctgcccaacctcaactccgtcagagggtacgaggtcatcgacgccataaaggctgacctcgagagcgcgtgccccgaggtggtgtcgtgcgcggacgtcgtagccctcgcggccagctacggagtactcttcagcggagggccttattacgatgttcttctcgggaggttggacgggccggtggccaatcagtccggagccgacaacggcttgccgtcgccgttcgaacccgtcgactcgatcat

SEQ ID NO: 288325 - DNA, 271 bp, Zea mays
cgaagatctccacgtgcttgttgaggcagagacgcaggaggcactcgatgcggctgctggtatggtggagaagctgctcaccccggtggatgacgtgctcaatgagcacaagcggcagcagctccgggagcttgccgctcttaatggaacaattagggacgacgagttttgtagaacatgtggtgaggctggtcacaggcagtatgcttgccctaacaagatgaacacgtttaagagtgatgtgcagtgcaagatctgtggggatggtggg

SEQ ID NO: 288326 - DNA, 377 bp, Zea mays
ctcgtatgggctggcgcctcactgctgctgcagctcgcgctcatctccgcggcaatctttgccgccgctgtcaagtactcgtttgtcgccgcgctcctgttattcgtccttatcgcgctgctgtgatcgatccgccttaaggaaaaaagctgtaaattcgcacgaagcattcggatggaagatcagttttgattggcctcgcagatttaatttgcagaggtggcactcgtggcaaacagacactgactttgctttcctctgaagccgaatacacatgcattgacatggcctgcttttatatagcaatccaccttgtaagaaatatgacctttgggttacttgcatagctgtgggccgccccacatgaaactatgaaa

SEQ ID NO: 288327 - DNA, 313 bp, Zea mays
caaataccaattcactgagaccccgtctagctctcgtcttccttctgtcttcccagctccaatctcggatctcctttcttctaccttctgtggtgctaacaatatggtatcagaaggaccgatcctcgtggagaatgattttgccacgttgcttgcggacttgcggcgtgtgagaagcgtctcactgctagcatcgaaggtgcgcttgccaggtgttcggcacaatgcccgaacgccttcggcggcttcacggcaactgcaactccggttccagcacttgccaacgacgaagcggtcttcgatgcgtggccta

SEQ ID NO: 288328 - DNA, 220 bp, Zea mays
cccacgcgtccgaggcactaaataaaaagcccaacgctgggctccgctcccggtctctggagtctggactcgcctccggcgcgcctccaccatgtatcccaaggcggcagacgaaggtgcgcaccgctggccacgggcatccccttcagcggcggcggcggctactactaggcggtctgcgcgatggctgcggcgttcgcggtgcaggcgcaggcgcccg

SEQ ID NO: 288329 - DNA, 414 bp, Zea mays
agatcgagatcagctccggctccttcaacccgatgatggcgttgttcggccctcgaagctccgcccggctcgcggatatgatatctcccagacacgaggaccgcgtcctcgactgcgccctcctcgtcagtagggtccggagcaacgagaaggtcgtggtgctgtcaaacagcgtcacgctcaagatcaaagccatggcagaggttagtacggtaaccacccaatcccaaccctgcctgcttgctgtgtgcgttcgaactgaacctggttgtgttgcgttgcccgcggcgcagggcctgccatgcgagggagccaaggagttccgcgagtccctcgtggacccgtcctccaggcggttcatgtgggcggccatcgccccacgggggtcggcctggtcctgcctggacgcgtccg

SEQ ID NO: 288330 - DNA, 434 bp, Zea mays
cggacggtgggcggacgcgtgggtgtcgcggaggaggcggtggtgccggcgcccgcgagggaggtcgtggtagggtacgcgctaacgagtaagaaggccaagagcttcctccaacccaagctccgggggctcgccaggaaaaagggaatcttgtttgtcgctattgatcagaaacgcccattgtctgatcaaggtccatttgacatcgttcttcataagttgactggaagggggtggcagcaattgctggaggaatatagggaggcgcacccagaagttactgttcttgatccacctggcgcaatagcaaacttgcttgatcgccagtctatgcttcaagaagtatctgaattggacctcacagactgtcatgttctcttctgcaggtaaagtacgtgtgcctaagcagctatttgttaatactgatccctcat

SEQ ID NO: 288331 - DNA, 427 bp, Zea mays
gctttcaatcctcacgccgttgcgcgtggcgaggtgtccatgttgtacatatacgcgctcgttccacgttgttgatcgatgtgcataaggacccagcgatcaggagctgactgttttgtcctccagcaatcggccatgtcgtccctggtcaggtcgttcgggtctctctactcccagaagctccgctccaccacccgtctcggatccgcgacggcggcgccaccgcgtttccaggcgttggtccgatcgggattctcgggctccagccacgggggagacgtgagacgtccgccggctcggccgagccagcatcagtctcaggacaaggagcggacgcctttcaccatcttggcaaggctggccgtcggttctattcttgctgctgcagcgccaatgctgcattccagatgggcgtcgttcctgctga

SEQ ID NO: 288332 - DNA, 347 bp, Zea mays
gccacgcgtccgcggacgctgggcgacgctggacgcgacgcgtgggccacaatccccttcaacaaacgcaccgcactccacggcagccagaaaacacaatccacacagtctccgtgaggtctgagcgaggtaggactagctctgagcgagttcttccgtcttccaggtataatccttgcaactctcactatcctcttcgcatcgctcgtctctttttgagactagttggatttctcttctttttccttggatcctactacctactagaacagagctccggagccttttagtttctggtctctgatctactcattttcttttcttccccttttggtgacataggtagg

SEQ ID NO: 288333 - DNA, 288 bp, Zea mays
caggcatcgcaacttatcaggctgacgtggaggtgagcttcgagctggagctggaggcggggacgagcctgctggagaaggcggaggcgttcgacccggcgtacgacgacgacgcgcagaagctgtgcggagtcaagggcgcggacgccaggggcggcgtggggccattcggcctctgggtgctggcctccgccgacctgcaggagcggacggccgtcttcttcagggtgttcagggacggacacggcaagcccaaggtgctcatgtgcaccgaccccaccaagtcgt

SEQ ID NO: 288334 - DNA, 612 bp, Zea mays
ggacgggggcggacgcgtgggctggcggcaggccgacggctacggagacggaagtggcgaccggttccagcgaggcgcaggcgacagataggggacagggcgaccatttctagcgaggcaggagcggggaagatccggaagctgcgatgtcgaagcggctgctgtcgcggctgctcggcatgttccaatcgcggacgcaggtgggcgtcgacaaggccggcaaccgctacttcacccgcgttgaggaggtcgacggcacaatgaaggagaggcgctgggtggagttcaagggcgcagaccaggactcgaccaccgttccagtcgagtggatttgctggctgaatggccacaggaagaaagctccaacaccagaggaattggctgagctggaggcaagacgtgaacgtgtcaagcaaaacattcagcttctcaaaaagagagaagaagaggaaagaaaaactggtatccaaccagtcaagaaaattgggaaagctgaatctccaaatctccaaagtttcgtgaagcagcagttctcgggtactcctccagatcagcagaaaggacctgaggataggcctaatgacacaactcatacagaagatgctacgacag

SEQ ID NO: 288335 - DNA, 347 bp, Zea mays
ccaacatccactccctgacctgtgcggcgttcccgtgcccggccggagtattgatcgcatggcctgcgccggcgccgcacggaaggtctcagcggtgctctaccactacccgtgcccggacggcgcgttcgcagcgctcgccgctcacctctatttttccggcgccgcccatccggtccgattcttccccaataccgtctacgaccccatcaggagtgattcacttccactggaagacctaagagatgtttaccttcttgactttgtgggacctcctggttttgttgaagatatcgcccctaaagtcgaaagaataacaatcctggaccatcataagaccgcttttg

SEQ ID NO: 288336 - DNA, 267 bp, Zea mays
actggattcattccaaattctgtttttttccttgagtctaattatgtattcactatttccacaaccaggacgctgctgatggttgtgggagcaggccgggggcctctagtacgagcatcgttgcaggctgctgaagaaactggtcgcaagttaaaagtatatgctgttgaaaaaaatcctaacgctgctattactcttcatgtaagttattgagtggttgttctgtctcatatttcttcaatcatgcatgtccattagtttggtact

SEQ ID NO: 288337 - DNA, 362 bp, Zea mays
atttggaagctcagacttacgagacttttgagaaggatgttgtgaagtatactcagtatcgtagagcagttgctaaggccttggttgatagggttgcagatgatgcagtctccacaactaggacggttctgatggttatgggagcaggccgaggacctctagtaagagcatcattgcaggctgctgaagaaactggtcgcaaggtgtcagtatctgcgggtgagcaaaatcctaacgctgttattactcttcatagtttgatcaaattggagggttgggaaagcctggttactgtaatttctagtgacatgcggtgttgggatgcccctgaaaaggcagatattttggtcagcgaattgctt

SEQ ID NO: 288338 - DNA, 404 bp, Zea mays
ggtttatgactcaactgaaaaaggctttaggagaatgtcctttacttgctatttgcacagatgcttgtaaaggtcttgagattgctgttgggcaagtgtttccacaagctgaacaaagggaatgttttagacatctaatgcagaattttatagagagatatagtggtgaaagtgggtgacatatgtggcctgctgcaagagcatatgacaaagaagcttatgagaaacatttggatattatttataggggtattcctgatgctaagttgtggtttgtggtatgggataattgtaaccatcggtttgtggtgaaggcacaattgcatgagtgttcatgtcttgagtggcagcacactgggaagccatgtcaacatgctttggccttgataacagctcaaaaggct

SEQ ID NO: 288339 - DNA, 393 bp, Zea mays
cagcaaaatgctacaaacaaattgcgtagtggcaacggattgggtctggccctttccagaagatttgttgcccttatgcaagggaacatctggctggaaagcgaaggcgtagggaagggctgtaccgcaacgttctttgtgaagctaggactatctgatgcaaatctccggaggatggtgcctcctgtccagccaaaacatggaaatgcagatccagatgtatcatcaataatcaacggcgacatggcgattcttccgcgttgttaccagtcgatgatatgacaaggaactgcaggaggagcctgatcttgtgatatcatgatttgaaggtggattcacggggttaaggatgctgtgtgtagagattgctctccccggtttttttttttttgc

SEQ ID NO: 288340 - DNA, 271 bp, Zea mays
gttctggtactggatgtgcagttttgggaggcattgctacagagataggacttctagctgaaattgttgcccattgatcacgctttatcctattcctaagttatttgatgaatgttcatgctgtttgtgttctcagttgtcactatcaaataggtagttatccgagggtggtctcattgactgcagatctctaggtgatagctgggcatgaaggaactagtttgcatctattcagacctacaaccttcaacttgcattgtgtttgttcagt

SEQ ID NO: 288341 - DNA, 387 bp, Zea mays
atttcctgcattttgatggcctgtgcacatctggcagctcttcgtatgggtaagcagattcacgcttatgtcacccgtcaccatgaatatgaaccatctgtgtactttgtggcaaattgccttattgatatgtactcgaagtgtggtgatgttgatactgctagaaatgtatttgatagcatgcctaaaaggaatgaagtatcttggacttcaatgatgtcagggtatggaatgcatggtcgtggtaaggaggctttagacatatttgacacgatgcagaaggcaggctttgttcctgatgatatttccttcctggttcttctttacgcttgtagccattctggcatggtggatcaaggtctgaattactttgatatcatgcgcagg

SEQ ID NO: 288342 - DNA, 404 bp, Zea mays
gcactctgcggttcaggcttaccttcttggcgcagaagtaggattcgatgctttctatttcttccggattgattaccaagaccgtgatacacggaaaggaacaaaagaactcgaggttgtatggaggggctccaagaccttgggctcatcggctgatatctttgctggcatctttccaaaaaactatgaaccacctcctggtgatttttattttgaagttgatgataattcccctgttgtccaggatgatccccttcttttcgattataatgttgaagaacgagtaaatgattttgttgctgcagctgtagcacaggcaaatatcacgaggacaaatcatatcatgtttacaatgggaacagacttcaaataccaatacgcagagagttggttcagaaatatgg

SEQ ID NO: 288343 - DNA, 272 bp, Zea mays
  unsure (1)..(272): unsure at all n locations
cggacggtggngggcgacggccgggttctacggcaactgcttctacacggtgaaggcgacgcgggcgagcgcgaatgtggcggcggccgacgtggtggacgtggtgcgcgccatccgcgacgccaaggcgaggctgggcgccgacttcgcgcgctgggccgcgggcggcttcgaccgcgacccctacgagctcaccttcacctacgactcgctcttcgtctccgactggacgcgcctcggcttcctcgaggcggactacggctggggcaccc

SEQ ID NO: 288344 - DNA, 442 bp, Zea mays
ggcgtgcccattgcgttcttgaacgtgcagaccgaggcccttctcaccaagatctccggcgagaccgcatcttcgacagtcaactcgggctcactggccgacctcccgaacctcgccaacgccagcctctatggcttcgaggactatcacggcgtcgacatcggcgtggtgaaggcggtgcgcgttttctacacggccgctgctggagaaatgcctgtggagatcatcctcgaggagggcgacgccaggctcggctttgccattagccgcactcaagagggtttcatctacgtctcgtccgtagtggagaacgacgtcgagcgccaggcaccgtcgacgcgttcggggctccgcgacctctatcgggaggcgaacgcgcgtccaagctgctggtcatctcgagggtgtcaggccaaaaggtgctgcagtggatggtgtcgac

SEQ ID NO: 288345 - DNA, 385 bp, Zea mays
gtcggctcttgctgatcttgttggctttctgcctctcactaagatcaaggtccttgcgagcagtgcggtaagtcagctaaatgccttgacgccaaatgccacaggattcagggactcccctcatgatggttaatttcgagttggggccaggtgttctacaccccgttcttgagacagatttggacatggcttggcttggtacctgcgacaaggaagaatttctactgctaccttggagctggttatagttgtatcgtagtccctggtggtgtacgggaaatgcttcatatgaacaatgattcagaggttgcttttcttaaatcaagagaagggtttgtcaagatagctatacagtctggatgtcctttagtcccagttttctgct

SEQ ID NO: 288346 - DNA, 432 bp, Zea mays
gcactcataagttaagttgtatagctagagatagatcgagcgagcagctatctatctatctatctatcttagcggcatatatcgcgaaacatagctagctggagtgagttttgtaatcatggacgtcgccaacaaagtaggcaagcagcttaagttcgacgtctcgtcgaaggcggaccggcaacgcttcaatacgactttcatccaggagattcgccgtgagctcggtgacacaagcgtgatgcaggaggcgttccagctcccgcctcagacggacaccccgagctttcaggacctcgtgctgatcgccggcgagagcaccgccaccctgcggctgcgtaccgacaacctctacgtcgtcggcttccgcaaccaagccggccggtggttcgagttccggcacgaggatggcggacttcctccgaccatacc

SEQ ID NO: 288347 - DNA, 330 bp, Zea mays
gttgaagaagctcttgcttttcggtcttcagcaactgttactttgatgaagtccctgcaagagactatttcttcgcagcaagctagaagtgagtctttgtctttagctttgaatggacaaaagtcaaatgaagatgttattgttgcccttcgaaatcataatgattgcttgaaagaggtggcagagaatgcgagtcaagccatctctattatcaacgagaagcacaaaaggtatcttgatgagattgaggcttttaaaagcaaccattcaagggagctacaggaaatcaagcgtatttcaggtgagctagaggaaagcattgcagagctt

SEQ ID NO: 288348 - DNA, 292 bp, Zea mays
cccacgctgccacaatatttaaatgacgggagcatcatgagaggaatggcgatgcttagtcaagttgagttgccagtgtccaagcaaaatactgtcgttgttggtgggaatttgattgtaaatggctcagctggatctggagcagcaaccactgtgctgcgacaccagttgtctcctgtttcctctattgagtttatggccacagctggactacgttctgttattggtgggcagatgtttcgtcaaatttcaccacattctacagcaacttctggactgctgtttctttgag

SEQ ID NO: 288349 - DNA, 415 bp, Zea mays
ccggcagcgacgtgtcacgctcgtcggcgaccggggcggtggacctagagtccgtggcggtgcacgagatcggccacctcctggggctcggccactcctcggtgccggacgccatcatgtacccgacgatccggacggggacgaggaaggtggagctggaggccgacgacgtccaggggatacagagcctgtacgggagcaaccccaacttcaagggcgcgaccccgacttcgccggcgacgagcagccgcgagatggacagtagcgccggcgccggatgccgaccagatagagtcttcgtcggagtagttgcggttgcggcagttggcctgctcctgatatccctctagtgccgtagacctctagtgttcgccattttttttttttttttttagggccacgtccttccttgaat

SEQ ID NO: 288350 - DNA, 339 bp, Zea mays
tcggaatcggctcgaggcctgctgcctgcacctggctagcttgatttgctagctagggccggatcaggccctatacgactatggtctccaattggtgtgtgtttgatcgtcgatcaagatggtctgatggtgcagagctcatcttgttttgactctgcatgatgctcccatggtgcaaagctcggtcagattagccttttccaagagagtcaggaggccggttatatattaggcctagcaggcacctgtccgctttagcttggttctgtactttcacaggcagccagagtgcagttagacaaggaccagtcctactaatcactcgtagttctatctctg

SEQ ID NO: 288351 - DNA, 271 bp, Zea mays
gtgtaaatgagggaacggatcaacaagtgcaaggagtgctgaatcttatagatctagcaggcagtgagcgcctgaacaaaagtggtgccacgggtgatcggttgaaagagacagtggctatcaacaaaagcttgtcatgtttaagtgatgtcatcttctcgattgcaaagaaagaggaacacgttccatttcggaactcaaagctgacatatctgctccagccgtgtctcggaggggactcgaagacactgatgtttgtgaatctgtctcc

SEQ ID NO: 288352 - DNA, 296 bp, Zea mays
cggacgcgtggcgtgacgcgtgggccggcggcgtcacaacagcagcaggcacaaggatacggagcatcagcatcaggtagaagaaaggattaacgatggaggctggcagaccgtcggtgagaaaaagcgccatggaagaccacagcagtctgaagcatggaatggatacagaaagccaccatcagaacaaaagtactctgaggatgtcggtcatatccaccaaggactcaatttcgagcccaccagggaggagctgaatagcttatcgaaagcgtgtagccgactttgggagctcg

SEQ ID NO: 288353 - DNA, 441 bp, Zea mays
cggacggtgggctggctcaggcttcatttctggctttacatccatctcaggccgatcattgatagacaaaaactcatcaactcgtggttccccttttggcccaagctcatatttatcagcacaggcaagagtagtcgatgattataccatgtcccagacaataatgaaagaaattggtaatggagatccttcaggaatgctcgttgttgtaactggtgcgagtcatgtaatgtatgggccacgaggaattggcgttcctgctaggatatctaaaaagatgcaaaagaaaaatcaagttgtgatacttcttgatcctgagaggcaagtataaggagagaaggtgaaatccctgtagctgatttcttatggtactctgctgccaagccatgcagtcggaattgctttgatcgtgctgaaattgctagagttatgaatgctgct

SEQ ID NO: 288354 - DNA, 448 bp, Zea mays
accactcgaaagggctgttcttgatggtcgtcaacttgcactgaaaataagtgcaaactcagtttatggtttcactggagcaactgttggtcagttaccttgcttagagatttcttcaagtgtgaccagctatggacgacagacgattgaacatacaaaaaagcttgttgaagataaattcacaacagtaggaggttatgagcatactgcagaggtaatttatggggacactgattctgtgatggtacagtttggtgtttctacagttgaagatgcaatgaagttaggaagagaagctgcagattatattagtggaacctttaccaagcccatcaaactggagtttgagaaggtctattttccttaccttctaatcagcaagaagagatatgctggtttgtactggacgaatcctgagaaatctgacaaaatggatgcaaaagtaatg

SEQ ID NO: 288355 - DNA, 328 bp, Zea mays
cggacggtgggcggacgcgtgggcggacgcgtggggtggctaaactgcagagcaaagtgcatcaagagcaaccaggaaagctcaagaaaactaccaaccctaggccattcaggctaaggactgatgaaagaggagtgcttaaagaagcaaaaccagagaaaaggcagccgttcactgagaataattccacggcagtactcaaggatgcaaacagaggagtgacgaagaaacgaagcacccagattgtaacggctcagcagctcgatgagtccagctccaggccggccgtcaacagcatccaatgcagagctgtgaaaccggagagggt

SEQ ID NO: 288356 - DNA, 302 bp, Zea mays
gcgacgaaaacccaccagtcctttcaggatgaccaagtatacgaggaacaaaaaaagttcatcttctcacagtagttccagattcacaaagagtttccagaaaggagatgtcatttgcagtggagaaatacgcatggacaaatgcaacttgtccaggatgcatggaattcccacacagcgctgttcttcttctctgttcgtcacatggcaatggctgccgtccatatatttgtgcgtccagctaccagcactcaaattgtcttgatcagcttgtaatgtcatgcagaaaagaagcctctgag

SEQ ID NO: 288357 - DNA, 360 bp, Zea mays
ggaggtggtgtcgaactgtgcaaaaaggctggtgttaaggtacgaatggtaactggagataatactgaagacagctaaagcaatagctcttgagtgtggaatactcgatgactcagaggcatctgcacaagctataatagagggaagagttttccgtgcttacgatgatactgaaagggagaatgttgctgacaagatttctgtgatggcacgatcttctcctaatgacaaacttctcctagtaaaagctcttaagaaaataggccatgttgtagctgttactggtgatggaacgaatgatgctcctgcattgcatgaggcagatattggtctttctatgggcatccaaggaacagaagt

SEQ ID NO: 288358 - DNA, 338 bp, Zea mays
ctcgagccgtttcaatacacctaccctggatatattggagatgaatgtcttattggtaactggtttgggaagaagagtgtccaggaggaaagaagtgcagccatttcactagctgacaagatgattgagtctttaaaatttcaggctgttctggttcgcatttatgaaggaaaggaacccactgaatttttcccaatatttcaaaacttggttatatacaagggagggacaagtactgggtataagaaatttgtctcagaaaatggcattgaagatgatacttattcagaaaatggggttgcactttttcgagttcagggctcagggccagagaatat

SEQ ID NO: 288359 - DNA, 545 bp, Zea mays
ctctcaggcttgacattatcgatccctcgttccgaggtacaagaatgcagatatcgttatcttcaatactggccactggtggacgcatgacaaaacttctctagggaaagattactaccaggagggcaaccgcgtatacagtgagctggatgttcatgacgcctttcggagagctctcaacacctgggctaagtgggttgattccaatgtgaaccccaagaaaaccactgtgtttttcagaggctactctgcatcccatttcagtgggggtcaatggaattcgggcggcagttgtgacagggaaacagagccaataacggatgaccagtacctcacgccatacccaacaaagatgagcattttggaggaggtgctccgggggatgaaaactcccgttgtgtacctgaacataacaaggatgactgactacaggaaggaggcccacccttcagtctaccgcaagcagaagttgaccgaagaggagaggaaatcgcctgagctataccaggactgcagccactggtgccttcctggagtaccggact

SEQ ID NO: 288360 - DNA, 268 bp, Zea mays
cggacgcgtggggtgcccacggatagaaggcaaatgtggccttccgaatagagctccaacggctcctagatgcattagggctataaaagggacccctaggcaaatggaacagcacaccaagcacccattgaacatcctatgatgccgatacttcgcatacacgcatctggttcattgtgataaagattcgagcacttctttgagttgtaaacccgatgtgcttctttcctgtgctcgttcttgtcttgtgtgcatgttgttgctgcaa

SEQ ID NO: 288361 - DNA, 294 bp, Zea mays
ctggtgggtgtcccatcttatcatgtgcttgctttgtcgggatggatgccgtagcaacaaaggatttctttgattggacttctagcgtacccaaaatggtgcgcgcactttctataattctgagactagcagacgatctccactcgtatgagcgggagcagctaatccctcatgtagcttccacaatcgacacctacatgaaaaagcacaatgtctcaattgaagtggcgcaggaaaacatacacaaactaaaagaagagtcatggaaagatttaaatagcgagtggctaaatc

SEQ ID NO: 288362 - DNA, 361 bp, Zea mays
ggacctggtccggctccatggactccaccctgctgctgccgcgtcttcctcctcctcccctcccagtcgtcgcttcgtcgccgtcaccggcagccgcactgtcttcctccgcaccgccgacccaaaaccgtcccgagacatggcaggatgccgccggcggcgcgagaaggacgcgccgacgccggcacgaagttccgcgcccgagggctgttcggcggcggcggaggaggagacgggctccgggccgtgatgaggatggtgaagctcaactcggccatccagaaccggagcgtcagggagctgctggagctgctcggcgacgagtgcctctacttcctcgggaacctccggtccgtcgacg

SEQ ID NO: 288363 - DNA, 377 bp, Zea mays
gtttcgtctcctgttgaacatctcacacttcattatcaggttaggcaccttgatacttctgagaagagtgaattgcacaagctacaacaactgaaagatgaacaaggtgaattgtccagcagtgatgagaagaaatacaaggcactaaagcgtgccactgaaagagagatactgcagagtgccgatgtcatttgttgcacctgtgtcggtgctggagatcctcgtctttcaaacttccgtttccgacaagttcttattgatgagtccacacaggcaacagagtctgaatgtcttattcctttcgtgcttggtgtcaagcaggttgtccttgtcggagatcattgccaattgggccgtgatcacgtgcaaaaaagcag

SEQ ID NO: 288364 - DNA, 332 bp, Zea mays
cccacgcgtccgagtggcttcgtctttagcttgggcctcgcttccacttcgtagctgcctgcacgctcgcgactcgcctcgtcgcttccggttgaagggtcaggccgcaatggacgaagaggttggcgccgccgggcgacaacaggttggctgtccttagctcagataggagagtttgcttttgtgcttttgagtcgtgcctcccatctccatcttgttggggggaaaatgtatctactattactgggaacaattgcccttagcttggtaacaactcctcttattttcaaactaattcctatggtaatgcaccttcggcaccttatgtgttg

SEQ ID NO: 288365 - DNA, 457 bp, Zea mays
cccagatgttccgcgtgctccatgcttatccattttgctgctgagaccaaacgtagatctaccgcgtgcgtgaaaccaaaaccaaaaaattagcgtagtatttttcagaattgaacgcagatctgtcgcatgctccatgctcatccgtttcgctgctatcttttcccctctctcgattgatcgcttactccaccgaggcgaggaagcgcagcccagatcgccggaggtgagcggcgatctcaccagctccgagcaacagcaggtaacgaatcaccactgcacttcctctctgtcccaccctgattggtaatttcttctgtcggtctcatccatttcaatgttctcttttctcctctctcaatcgttcgcttcctccaccgaggcggggaattgccacccagatcgctagaggcaagtggcgatctcaccagctccaggcagcagcagggtttcccgt

SEQ ID NO: 288366 - DNA, 292 bp, Zea mays
gaaccatgggaaagttaagattggagacttcggtttggcaatggtaatgcagcagaggaaaacacagagtatacaaggcaccttagagttcatggcaccagagctgtttggtgaaaactacaacgagttggtggatatatactctttcggcatgtgcatgcttgagatggtgactggtgagtgcccttacagtgaatgtcagggctttgttcagatatacaagaagatatctgaaggtgtaaaaccagttgctctctccaaggtcaaagatgcagaagtaaggagtttcata

SEQ ID NO: 288367 - DNA, 272 bp, Zea mays
cccacgcgtccgcccacgcgtccgcccacgcgtccgcggacgcgtggcttgctcatcatcatcatggaagctcctccaaacaacccaccgagccacagaacagcgaactaggcaggaaggagaagcctgcctgcaagaagaaccctctcgtaaaaatcaacatggacgggatccccatcggaaggccagtagaccttgcagcctacgacagctacgagaggctatcactgggcgtcaaagagcttttccacggttttcttcaagctcaaaag

SEQ ID NO: 288368 - DNA, 280 bp, Zea mays
agatctcagttcggctcgatgcctgcagcattccgacgagacgagtcacgaatccggatagagcgccgccccccaacctgctgcgccgaccctgctcgccgccggcccgagtagagagagagagagaggagagaaggaagcatgacgacaatccgtcggttctgctgcgacgacctcctccgcttcgcctccgtcaacctggaccacctcaccgagacgttcaacatgtcgttctacatgacgtacctggcgcgctggcccgactacttccacgccgccg

SEQ ID NO: 288369 - DNA, 323 bp, Zea mays
agaaaaacaaaacaataatcgtctatctggcagttctgatggtcgccatgcaggtagagataggcatagggagagcacaaggaagggcagaggttctgagcttggtgagcatgatctccacagatcaagcaaaaggcgacgtgaagaccatgaaagccatcacagtgggaaggttgaaacaaaagaagtgaatgaacaagagagcagtagaggtcatgcaacattatccaagacgagccagaatcctcagccagataattcattggtgaatcaagtggaagaagacgcctcagatgatgaaaatcacgaggattctagaaggg

SEQ ID NO: 288370 - DNA, 387 bp, Zea mays
caaccatttgctctcagatggagataactttgacttacgggaaaggctcaacttcttcacatccttagatcgtactttgaatgagagaattgacctgtacgactcgtcagatggtttggatgaggggtttgacttcttggcatccctgtttacccatggcaggagaatctctactggaggctcattgagcagggcttatagaagacacagggacaggcctagacgttcaacgaattctgctgatgcttctgacattcagcatgagtcagctagcactcaaaggggacagcgtgctgttcgggctacaggcaggacttcacggcgccaccaccacctacgcgaggcagctgagagatgaaatcatttttagaggcggggtgctttttc

SEQ ID NO: 288371 - DNA, 314 bp, Zea mays
gcgctgccggtgatttcggcgtcttcgccaacacacagacaagatcatgctcacttgaaggttcagtgaagttgaagaacctgtttggttactgtgagacctgggatgcatcaggtgctcttgaattagataagacagcagaactaagtgctggagttcaaatgcctaggatcggagcaataccaactcccctgatggctagaatatcgtttctgtctggcgactggttaaagtcctcactcaaagaacacctgatgggcgtttctgtctggcttgctctctaccatgaaccacaacattgcttacaatttgac

SEQ ID NO: 288372 - DNA, 363 bp, Zea mays
gcaagccagcggcatcccgcttcctcggcaggcttccaagacccccccggtaagcttccaagcggagtccggcggcgtcgagtcgaatggcgggcaagtcgcacacgcgcaaggcgttcctcctgtgcaactacgtcctcatgggcgccgcctccagctgcatcttcctcacgctgtcgctgcgcctgctgccgtccccgtgcggcctcctcctgctcttcctccacgccctcaccgccgtcttctccgcggccggctgctcgggctccttcacggcgcccgccacgcccgcgcagtggcacaacgcgcacaccgcgggggccgcgctcaccgccatcttcctaggggccgtcgcgctgctcg

SEQ ID NO: 288373 - DNA, 295 bp, Zea mays
gataattatgtcttcggtgggcaaatctagaataccatgatttgtatgtagtctaaagggaaagcaaaatgctattgtacttttatttggccttgtatcctcggtctatttgtcgaaagttgaaacaaatgagaaaaggggaaattagtacctctaagggctagtttggaaactcaaatccccttcgggattgaaggggattggagaggaaattaatttatttccacctcaatcttctccaatatcgaaggggatatgaggttcccaaagtagccctgagggttgatttggtgac

SEQ ID NO: 288374 - DNA, 613 bp, Zea mays
ctgaaatggagtactgcgatagactggagagctcgcttgatttcctggttggtataactgcgcttctgtttctgggactggaaggcctcgctctggagggtcagattaacagctccagcggtcgtcttaccacgccgatcggcacaagcttcgttgtctgtgtttttgctgcgagcttaatgctcgtggagacgatgcctccacgcagactcgtgaggtatctgacagagaccattgatatcctcacgggttttgccgtctccctggctatgttcttcatcatgtatccactcatgggactacgagcattgcttctgctagcagctccgttcctgatcctcatggcgtatgtcttctacgtcgctatcggcctcgatgatggcaacaacaaccaccaggttgctagcgcgaacggcgatgacgcatcgtcaggtgttagcagcagccgcaggagtggtgcggcggcggacggtgataataaaccagcgtcgcttgaactgacaaaagtaacattcgcagggttcctggcggtgtcgataccaagcatcagcaaaggttcagtcaccatttattccgaatgtttcttgcaccttgcagcagcgctgttgtctca

SEQ ID NO: 288375 - DNA, 385 bp, Zea mays
gtgaaacagagcttcaactacaacggaggagaatccaagaacgccgtgtgagcttgttagctcaaattgaagatgtacgccgcactagagcgatacaacgttcaagtcggaaaagacatggtggctcgtttggtcaagagcttgtaactgttgcagtcgtcggatatacaaatgctgggaaatctacgcttgtgagtgcactttctgaagctgatttatacagtgatgacaggctgtttgcaacagtagatccccggttacgaagtgtgattcttccatcagggagaaaagcacttcttagtgataccgttggcttcatctcagatttaccagtacagcttgtggaagcatttcatgcgaccctagaagaagttgttgaagcaga

SEQ ID NO: 288376 - DNA, 623 bp, Zea mays
gagatcttaagaaaaaacaagttcaacaaaagatcactacagcttttatctgcatcgagctaaattaacagcctacggattccaccgcgcatcgattaccagatttacattggatctaacaaataccaaacaaacatgcaaaaaacattcacatattccgagaggtggaaacaccccaatttgaggtccacatgggagtagggtcgaatcgtctactctttcattcacatagtcaagcatccgcatctctagaacagaagttagctctgaaccactgctttcatccaggctccaatcttgcaaaaagcaatatccgccgtggttcccaattattagtagagagaagaatctagcgctagtgcttctcctccatgatgatcttggcttctatatacactttacttaagaccgcacacgacgccatacgctcggctgctgtgtgaacggaggtggggggatgggtggagcagcagattcgaaagggctgggggagggtacctctaattacctaggcgatctttgcgaagcagcctcctcccctgcgtatcatgaccttgaactcgtcgaaggagatgaggccgtcgccgttctggtcgacgccctcgatcatgcggcggcactgc

SEQ ID NO: 288377 - DNA, 333 bp, Zea mays
accacgcgtccgggaccgtgggaaaagtagcggcagcaacccgcggcggcgacgagtaaccaaccaggccacgccattgccaatcgcccgagccgccgagcaccaaggagccctgccttgcccagccacagagccctcctccttccccgtctcccgctgcgggctctctgaattcggcggtggttcatttgtccgcttcttctgagctccttctcggcgccgcgctatggaggagatgggaaagcgggcggtgcggacggtgcgggtgcggaacatctcagatctggcgacggagcgggaggtgcgcgagttcttctccttttccggcgaaat

SEQ ID NO: 288378 - DNA, 291 bp, Zea mays
tgatgtttggagtgaagctgaggagacatctaaaaaggttactgcaaatatcaaagaaaaaatgtttgctgctaaagaagaggtaaaggaaagttttggagttggaaaagaagagagtacaagttgcagggatggtttgcctgaaggttcaaaacatgagaaaactgaggcatcctcacattcagatggcacgactgaagatgccacagacagccatacattgtttactaaattgaagtcaacaatctcatctgcttcaccagtagtatccggtgcgtttgcaaagttgaa

SEQ ID NO: 288379 - DNA, 366 bp, Zea mays
cacaaaacgagcaatttgctgctgtattcaacctagaggattacaaagctgcccgtgagagatgttacaagcaaatcgctgctgctgttgtgaaataccaggagtttaagaagaacatcaacgagggcctaaacttttacgtgactctgcaggaagcaattggcaaaataaaacagcagtgcagcgacttcataatgacccgaaacattcagtgccgtgaaatgatcgaagatgtgcagaggaagctacccggtttcagcttctcgtcctccagccactcctctatgcagaggaatgcttctgtaccacctgatcagagcagcccgtcaccaccaccgcatgctcaggctccctatgcctctccac

SEQ ID NO: 288380 - DNA, 501 bp, Zea mays
agttgatcttagtactgctggaacttatctaaacaaaaacttttctgatataagcacagagcaaggttggagaacaacacacaaccacacaagtaaattacccatttcgtttatgggtaatataactagcagttccggatgggaatctggatcttctaccacacgatctaatcaaaaccatggatctgctggaggcaatcatagctctgtcagtggagcaaacataatagttcctgataagatagggaataaaacaataatgcttggtagagaaaggagaaaacaaacctcaacttcttcccatattggtgaaagctctagtgctgctgacgaacctagaggtgatcttcaatcgtcaaaaatatcagctggcccaaaccatagcagtcatcagcataatattcctgtaataaacattgatgacatatcccctgaagctaggcctagttcgagtggattcactaatagaactgttgatcctaccatagaagcacaattgga

SEQ ID NO: 288381 - DNA, 288 bp, Zea mays
ctcgagccgatgtggttcatggtgggcacttggctctttgcaccattcctgttcaatccttctggatttgagtggcagaagattgtggatgactggactgattggcacaagtggatcagcaatcgtggaggtattggtgtggcaccagagaaaagctgggagtcatggtgggaaaaagagcaggagccccttcgttactctgggaagcgtggtactattgttgaaatactgcttgcattgcgtttctttatctatcaatatggactcgtgtatcatctgaatataacg

SEQ ID NO: 288382 - DNA, 273 bp, Zea mays
cggacgcgtgggcggacgcgtgggtgccccagggtcctctgctcatgtccacgtccatgtccgctccgactccgacccccgatcccgctgacctccttcgccgtgctgcggcaacaccactcgcagctcatccgtctcggcgtcgcctcccacgccgcccacgcgcgccgccttctctccttccttgcccgggaccccgactcccacttcccgtacgcgagccgcctcctggcgcaccacccggactcgcacccggcgctcttcaacccgctc

SEQ ID NO: 288383 - DNA, 281 bp, Zea mays
tgacatgcgcaatctcgggagttctcgtggcgaaacatgagactccctaagcgtcaatgcggagccagattgccaatgtctggaaagcgagatcactgagatagaagccaaggagctgaatgaggagatagacgtagaataccgagtgaacatgatcctggacgacctcccgctagttgttcctgttactaggcaagataagaacagtattgcttatcaaggtgggtatcatgttggtcccaaaggcgtggattctggtactacgaatgtgaaatacttca

SEQ ID NO: 288384 - DNA, 249 bp, Zea mays
tgaacattgatccgaggacagaaacaactgtattattgttagagaagcttgtgcagctagcagttacccctactcagaagcaaatagcttttcatcaacttgcatgcattagacttttgagaaaggaatatagtgaagctgaacaccaatttgaggttgccttctctgccggtcatgtgtattcaattgctggtattgctagagtcgctggcattcaaggccaaaaggctttggcttatgagaagctca

SEQ ID NO: 288385 - DNA, 400 bp, Zea mays
aggagagagagaattgcagaaaggatgagggcattgcaggaattggtccccaacacaaacaagacggatagggcagccatgctagatgagatccttgattatgtgaagtttcttaggcttcaagtaaaggttctgagtatgagcagactgggcggtgctggcgcggttgcgcagctggttgctgatattccactctcagttaagggcgaggcaggcgacggcgggggggcgccgcagcagcagcagcagcagcacgtgtgggagaagtggtcgacggacggcacggagaagcaggtggcgaactgatggaggaggacatcgggcaggaaatgcagttcctccagtccaaggcgctgtgcatgatgccggtctcgctcgcgatggcgatctacgacaccca

SEQ ID NO: 288386 - DNA, 316 bp, Zea mays
cccacgcgtccgcaaagatggttttccaattggtaatgaagttatttatgtgggtagtttgaatgttcaagttgatcctattgagcaagatcgagtttctcagaagctcttcaaggaacacagatgcgtacctacctttctcccagctgaactccagcatcaattctatcacatattctgcaaacagcacttatggccacttttccattatatgcttcctgtttgtcatgacaaagatgagctctttgaccgttccctttttcaagcctacgtgcgggccaacaaaatttttgctgacaaaattgtggaggcagtc

SEQ ID NO: 288387 - DNA, 413 bp, Zea mays
caaaattggagaagtgccatcaaagttgctgttcatgaggtgcgaaggctgaaagaatttggtgttacaatgggagaaatgacccgttacatggatgcactgataaaagatagtgaacagcttgctatgatgattgacagtgttccctcagttgacaacttggacttcatcatggagagtgatgcacttggccacactgtcatggatcagttgcagggacatgaaagtttgcttgcagttgctgagactgtcacccttgaagaggtcaacactgttggcgcggaagtattggagttcatttcagattttggaaaactcaatgctccccttcctgctgctattgtggcatgtgtcccccaaaaggtgcatgttgatggcgcaggtgaaactgaattcgagatatatccagaaga

SEQ ID NO: 288388 - DNA, 384 bp, Zea mays
cccacacgtccgcccacgcgtccgacaaaatcgcatctcctcgcctcctcccctcctcccgagatccgggcaaagcgcgccgcgcgagaaccaggatatcgatttaggtatatggacaaggtgtctgaaggtactaagtgagatggataagaagaaagcgaccgatggcaccgaaccaggaccagctccttctcgtgccgtcgacagatttggttttataaagccagaacaaggcaattcacctgatggaattccaaaaggcaagtctatacatgagcgtgaaagggaggaaagaaggataagaaaatggacggagatgataggtgttggtggaaatgactggaagcattatgttagaaggacccctcatgtggttaaaaggcg

SEQ ID NO: 288389 - DNA, 333 bp, Zea mays
ccgcctaataatcagtctggcaccaaggaaaccggggacgggacagcagaggacctccagccgaagcatccaaaatatgacatccgggtagcaaacgctatgatcaaggcgtacattaccgagggcatgcttgacaaagctgtcgccatgaagaagcgtgccaagatgcgcggcggaaggctgaacgccaagacatgggagatcttcatggagcattacctcaagacgggggatctcaagatggcccattggtgcgcggaccgcgcgatgaagaaggggcacagcagcggcaggatttgggtgccgccgcccgccgtgacggagaccctgatg

SEQ ID NO: 288390 - DNA, 315 bp, Zea mays
gacgaggaggtggccatcacaatagatgggggaagggcccaggagggggcagcgggattgcgagccacaagccgcctgagaggccctgcaagtactttctcgccggtaccgaatgtagctatggcgagacgtgccgctatccgcacagctactgcataagcgatagtatcgcgatgcttaccttgctcaagggacacgagcagggtgtcacgggcattgcactgcccgctgggtcagacaagctttattccgggagtaaggatggaactgttcgcatgtgggattgccaaactgggcagtgtgctggtgtcatca

SEQ ID NO: 288391 - DNA, 311 bp, Zea mays
cccacgcgtccgcggacgcgtggatgcttcagtcagcagatgagcaggtccggagcttgaagaagcagagcaacttacttagcaagctagcagctaagacaatcccaaatggcatccattgtctttccatgcgcttaacgattgattattatcttctctctccagagaaaagaaagttccccaatagtgagaacctggaaaatcctgatctttaccattatgctcttttctcggacaatgttttggcagcatcagttgtggtcaactcaaccatcatgaatgctaaggagcctgaaaaacatgtatttcat

SEQ ID NO: 288392 - DNA, 417 bp, Zea mays
aagctagcgagatctgttcttgcctcctggtctgtctcgccgctccacgctttaggcccaggattagctgttgtatcgcttcttagcttccatttgttcaggatttccttgctacatgtgttcttctctagatctgtttcccgtgtgtactgcgtagtctaatcttatttctcttgcctcctgcgctgttccgtcggcgttccgatgatgccgtaggcgacctgagcctgtggttccctttccgactgggacatttggggagcaagaagaagaagaagaagttgttgaagaagggataccacccacctctgatcctcaggcagacaattgcttttattttgatatctgcggatccgagcaagacacctctgataacaaagggaggtatcaatttttcaactgtatgcactcaaatct

SEQ ID NO: 288393 - DNA, 365 bp, Zea mays
agcggccgccctttttttttctttttaacagctgaccaaatgtccaccgcagcattaatgtatgaagggtaactgcatgatcatcatcgtcgtcgttgtcgtcggcattcttacatcatgcatgcgtgcgtgcatgcaggcatgatcgatcctattatcacgcatgcatcatagacatatatactaaatatgtaaatcacggcgtgccctccggccaatactattacacaggaaacggtggcgctgctacgaacgaattcaccggaccatcagcagctaggagcagcggctctgtttcatctttgccgccgatagatagatagatagatagaggaaacagagaagagtaaaaaaaatcgaattaa

SEQ ID NO: 288394 - DNA, 639 bp, Zea mays
cccacgcgtccgctttcgcaagtggacatctgattccaatttttttaaagggatctggttccaaattcgtgcttggacctgccaggattctattgtttttggtgtatcctcttgctttggtacatgtagatcagcaagcaaatgtttttttatttcattgaatttcaatgagtgcaggttacgttctgtttgtactttattgaagttcattatactattttcttttggtaaagttgttcgcatcaagtgcatgttgcattctttttagtttttaacggttctgctttcagcttgctcttgggtgcgtttattttttagctgtgtttccattcctccaactgtgttttcattcttcctttgttgaccatttcgattttgtggacaactaatttcctttgggtgagatgatcttgacgaagttgagatttcgctttattttgtttatggacgcatcaagattctaacacgccgttatttttcttcgctggtttagtaatgaggaaatcccttttatggccctaattttagggtttagagttttaactgattttttttaaaaaagttgttcctctccggtcccaactccatactgtgtgtaaatttgtcgcatcgcttttttgttctggaaagctctaaaaa

SEQ ID NO: 288395 - DNA, 448 bp, Zea mays
cattcggcagcgaggagaccaaggccggggggacttccgatctggtgtagggtacactggtttggcgcgagaccatggagggatccctggaggcgcggcccggtgtcctactcgtcggcgccccgggcgtcggcaagcggaccatcctctcccagtttcttggagcagaaatacctgacgtgcatgacttatcatccggtgtgctttgtcaggggtggacaattgaaacaaagtattattcagctgatctttccatctggacagcaaatcctggtgaagaattttctcttgaatccctccctcatttagaccgggtggctgccctcgttatggtcttcgatatgagtgatgaatccaccttgcctactctgcaaagctgggctgccagtgttgatatccagaggtttgagatcttgttatgcgttggaaataaagcagatcttgtacc

SEQ ID NO: 288396 - DNA, 347 bp, Zea mays
gttaaagctcttaaccgacttgttgtctgatacacatcttaaggcattggccgcctggacgggtcttggtggtgggaagaggggagttcgggtgcgcggacgcgcgggcgttgatatcttggcatttccatttgttgcagtgcagagttctccaaacatgccgtcagcatctgcatccatcaatagtggtttcctgcttaatgttgcatcacccggtgggcgcattggtactgagaataaggaaatgctcaaaactatagagcaaaacatgcctcagtacattcaagttctactagaggttggaattcctggatgtatgctgcgttgtcttgactatgttgacatgg

SEQ ID NO: 288397 - DNA, 612 bp, Zea mays
ctctctctcgctcgctctcagccttccttccctggcggcaacgcctgggcggacgagcgccgtcgccctgccagttcttcgtctgtcccttcgcctgtgattggcgccgcgatcttctttggatttcggccctctcgcgccggggactagcgcccaccaggagcaagattgatgccttgaagggctatatagggttgggcacggttgacctgatcgactgaaactgaaatggcattggtggtgaagcggtaccgatgtacgcactccgtgagctgtgcttgcctcaagggccatgtcagggaggatgcaatgtatctcgtgtttaaacacatgaactggaacccgaagatgattgctatcttatccagtgtatgtaagtggttcgatgaatttgccaagagggtgctctggaagggaattctgccatgccagggcaccaaagatgatgaaggatttgcactctgacggaagtcatatcgttgatggcaactggaaggccctagggaagcttcttatctattgcgcagggtgccctagtggagacctgttcagtaatatccatgacccagtcccggggcactttgtctacagaacccgtttttctaggacatt

SEQ ID NO: 288398 - DNA, 289 bp, Zea mays
gcagaagcagaagctagcagctagtagacgagcgacgagtagctagctagctagctatctagagagctcatcatatcgctgctcgctctcatccaccattatagtatacagaagagcagatcgagctgcagctggcagaggccgagttgttgctagctagctcctgcttgctaaatttgcatcgtatccgatccattccatgaagaagtcgtcgatgatggcgcccatgacgatcatggcgagcgttgccgctgtgctcgtcctctcgtcggctagcatggcttccgcc

SEQ ID NO: 288399 - DNA, 323 bp, Zea mays
gatcaatgaaaaccatctttggtcggaaaaaaataaagaaggatgggtcagaagggaagattactgcaattgagcctgttgaaattttacaaagagaagacagagaattgtggatctgctattcttcgttagattccatgagtaccttgaggctttatgagagcttgaaaagcaagcttgaaaggaagccctggacttttgacggttaccccagacccggaggttcattgtacgatttctacgaggagtattggcgtcctttcggtgctattcttgtaaaaatggaaacagctggaatgcttgttgaccgtgcttacctttcg

SEQ ID NO: 288400 - DNA, 362 bp, Zea mays
cggacggtgggcgtacgcgtgggcgccgcagcccgcagcccgcagccaaacgccgccagccggggaaggggaacggtggaagagaagtggagcaccagcgaaccgcatatgctccgggttcttcgtcgcgcagcctgcgccgcagcgtcatcgccggcggcggacctccgacagtttcagtgtgcttaccatagaagcagtgagagattatcacctatccgagaccaagaagtttcatatggtcttaattgggctattgctggaaaaggtgtcattgtgaaagataaggtcctccataacttggaaacatctgagcttcagaaaggtggcgctacttaccctgactttttgtctggtataca

SEQ ID NO: 288401 - DNA, 294 bp, Zea mays
gttgctgggtccttgaacatgaagcaagatggcagagtagccttgtcatgcttgcagaatggaagaaggcgtcctatcctaaggatattagagaaccgtggggatagcatgataacctgtatataacatctcaacagtgttcataagatgagtacgtataatatatcattagcataaacgagatgatgtgatgatcgatatacttccttgttaacatcattagctggcaactgaaaaatgttgccatgaaactatattatccagcagcggctggctttgtgtacaaaaaacaaa

SEQ ID NO: 288402 - DNA, 358 bp, Zea mays
cccacgcgtccgcccacgcgtccggcaagagatgctatcccgcctcttctcccactacggagccacatccgtccgcccctgttccggtggaaagttgagaaattgcgcatttgtagattttagggacgaggcggcagctaatcacgcacattcgctcttgaacaggttgaggtttctgggaaaagtgttgactgtcgagcgagctaactgtccaaatgcaaatgagtctcacctgaagcatcaggaccaattagggcatggggcgtcccaggtaccaagtattagttcccaaactcagaaggaccacacatcgattgccgaaccaattgcccccaagcttagtgtggactacccattt

SEQ ID NO: 288403 - DNA, 490 bp, Zea mays
ctcgagcgaataggggtgctggttcagtccaacagggactacaaagtctagccaagagcacacttgcagcaagacttcaacaacgtagcaagggccctgtgaaggtacttaatactgctcggccacgtccccctgaaaatgttgaagccctctctagttccacccagacatggcctacacctgatcagggcctagtcctgtctggatattctcagcttcgatctggaactcaaccaacaagggaaaatgccatgccaactatctccagtaacacagtgtggaatcctgttgctccaaacaagatgaagcactctgtttctacgcctaatcttgtgtctggtggatcctctgcccaagtatcattgagtacagcttatggtagcaacaaaagtcaggatcctcctcaaggtaaccaaactttgcctgttccagaggatttccgtgctgcaaacaaaactctggttgaaagaatgcgttctgctctgggaat

SEQ ID NO: 288404 - DNA, 434 bp, Zea mays
atggcccgctaaagattagagcaacatgtactggaccatcatcaacaatagctaagatagtccgcatggttgacgatgcccaagcacgtgaagctcctgttcaaaggctcgcagattccatcgcaggaccatttgtgtatactgttatgacgttggctgcaacaaccttttccttctggtattacattgggcacacacttatttcctgaggttcttctgaatgatattgctggtccggatggggattcattacttttgagtataaagcttgctgtggatgtattagttgtttcctgtccttgtgcacttggattagctacacctacagctatcttaataggaacttccctaggtgctaaaagagggttactggttagaggaggtgatgttttagagcgtttggctggaatagatactcttgtgcttgataaaac

SEQ ID NO: 288405 - DNA, 436 bp, Zea mays
gccaaagaaggtgctgatcctcatgagcgacacgggcggcggtcaccgcgcgtctgccgaggccatcaaggctgccttcacccaggagttcggcgacgactaccaggtatttgtcactgatctgtggactgaccacactccatggccattcaatcaactgcctaggagctatagttttttggtgaaacatggacccttgtggaagatgacatactatggtactgcaccgcgtgtagtccatcagcctcattttgctgcaacatccacattcatagcaagagaagtggcaaaaggtctaatgaagtaccaaccagatgtaattatcagtgtacaccctttaatgccacatgtccccctccgaattctaagatcgaaaggtctcttggataagatcccattcgcaactgttatcacggatctcagcacttgtcaccca

SEQ ID NO: 288406 - DNA, 382 bp, Zea mays
  unsure (1)..(382): unsure at all n locations
gagcactagcattattgtcatgccacttttgaagttaaaaggctatgttagcttatttgtgcagtctggagaggcagctccatatgtgatacctcagggtggacacactaagattttctcagtgtgtcccgcactatttgatgggcggaactgaaaaagaaggcattccagaaggatctcttgaacttgatcctgcagcgcttccctccaacttggaagaggcgtttccttctgctaacccagaatgcagttctgtaagaagtaaggagcataactccaaacatgctggtttgtccagtgaagattgcaaagaaaccatgaatgtggggcagcggcaacagacaaaatctgtgaatgcagggatcgctacaanaacaccaaa

SEQ ID NO: 288407 - DNA, 576 bp, Zea mays
cggacgcgtgggtgaaaagcttcttgagtttcgtcaaaagcaagatggatttatcgagacaagcttcgacacactaagtggttatggtgcaaatggtgctataatacactacagaccaaccccagagagctgcagctctgtaggaagtgacaatctgtttttgttagatagtggtgctcaatacattgatggaactactgacataaccagaacagtgcattttggtgaggcttccccaaggcaaaaggaatgcttcaccagagttttgcagggccatatagctctcgatcaagcagtgttccctgagagaactccaggctttgtgctagatgttctggcacggtcatctctgtggaagattggactggattatagacatggcacaggccatggagttggagctgcgctaaatgtccacgagggacctcagagcattagctatcgatatgggaatttgacagccttacagaagggcatgattgtcagcaacgagcctggttattatgaggacaactcatttggcattcgtatcgagaatttacttctggtaaaggagcttaatctggcaaattcgtt

SEQ ID NO: 288408 - DNA, 310 bp, Zea mays
ctggtttgcagaattatgaagaataccaagtgtgttccatctctgttggggtggttggtgatatttgccgtgccttggaagataaaattttgcccttctgtgatcgcattatgactgttcttcttaaggacctatcaagctctatgctcaatcggtctgtgaagcctccgattttctcatgctttggagatattgctcttgctattggtgagaattttgagaaatacctaccatatgccatgccgatgcttcaaggagctgctgaacttcttggtactcttgatcagagtgatgatgatatggttgatta

SEQ ID NO: 288409 - DNA, 308 bp, Zea mays
cgttcccgggtttctcggagactactgctacggttcgccgctgaccgtagcgccaggccgtgccatcggcgtcggcgacctcgtgttcgagcccccgatgtcgggcccgacggtgtgggagattggcgtccccgaccggacggcggcggagttctacgtcccggatccggaccccaggtacgtcaacaggctcttcgtcgtccgagacaggtaccggcagtacggtctgtgggagaggtacgccgacctgtacccggacaaggatctcgtcttcaccgtcggcgaaagcgacgaatccaaggactggt

SEQ ID NO: 288410 - DNA, 450 bp, Zea mays
atagctcagcagttggttcaggctggaaatcagcaaacttgctataaaatctacagagattaccgtgcttcagcactagaggtgagccttcggaagttaggagtggaaaaacttactaaagatgatgtacaaaaaatgcaatgggaggctttggaggctaaaattggaaactggatacattttatgcgaatcgcggtcaaattattactagcaggggaaagaaaaatctgtgatcagatttttgatggtgtgaattttaacaagggccattgttttgctgaactcacagcaaatagtattataactcttttcagctttggagacgctgttgctaaaagcaaaaggtctcctgaaaagctgtttgtgttgcttgacatgtatgaagtaatgcgtgaacttcaaccagagatcgatgaaatatttgaaggcaaaccttgcactgagatgcgg

SEQ ID NO: 288411 - DNA, 370 bp, Zea mays
gctactgggtcagaccagattcagatttcaatgtatttgaagttctggccatttccctgtgcagcttagcttccgccttttcctatggagtcgcatctatggcaatggttttcgtgaacaaagcggttcttatgcagtatgttcactccatgaccctcctcactttacagcaaatagcaacagcacttctgatacattttggtcaagttctaggaatgtctaaacgaaaagactttagctggataaccgcgaagaaacttcttccagtgtcaattttctacaatgcaaatgtgggatttgctctagcaagcttgacaggggttaacatcccaatgtatattgcaatcaaaaggatcactccccttgctgt

SEQ ID NO: 288412 - DNA, 524 bp, Zea mays
gagaagcaatgaagacataattgttgcatctgataaagctcgggcgaaatacacgcaaatccttggaattttgcatccctttgctggctcttttctgattcagagaacccaatgggggatgtgtccttgaatcgacccgttaaggccgagccaactgccggtggcattgccaagggaaaccgagttctcgacacgatgtccgccgggtggacggacgagagacacatgctgtatataagctccatggaggcttctttcgtcgaccagctatacaaccatggaaaccatccgcacgacgcaaatggcgccggcttcaaggttctccgcagggggtgtgggagtacatcaagtatgagaagaccagtgcccctgtgcgaagtggggctaaatgctgcgtctctgcaaatccttggatccggcatttcaggccacgtgactgcggtagtaacgcacagagtgacgcggtcgaggcttcggtgggcgaccatgagtcgggtactcaggcaagccgcaagagcccttca

SEQ ID NO: 288413 - DNA, 288 bp, Zea mays
ttccggtaatacggtggtggatgcggaggatagcgcggtgacctcggaagacatctatcattttctcaaggacgagaacagggtgaagaatgcgtgcctcaaatttgggcgagaccgcttcgatctcctcagcttgcttcccaagcaggatattcaagctattgttatgtctggctgtcctaataacaatcggaagcccgtctattctgcaaaaaggttgagagagtacgtgcaggtcaaagaagaagatgcatgcagcatttgcaaatttaaggcatcttgtgatag

SEQ ID NO: 288414 - DNA, 356 bp, Zea mays
aaagcttcagctggacccaacagtggaggaagttaagaagctttgcaatacttgccgcaaatatgccagatcagagagagttcttttccattataatggccatggcgtaccaaagcctacatctaatggtgagatttgggtgcttaacaagagttacacacagtatattccacttccaattactgatcttgattcatggctgaagacaccttcaatttacgtttttgattgctcagcgtctggaattattgtgaaagcttttctagagcgcctagattggagttctagctcctctgcatcttcacggaaggactgcattcttcttgctgcctgtgaagcacatcaaactcttcctc

SEQ ID NO: 288415 - DNA, 593 bp, Zea mays
gatccagcgaataagaatgatggtgcttatccaccaacagaccctgatatgaagaaagctaataaggctagaggagctaggaagttttctgagcaaccaagacctgggaatttaactcaagtggatcttgcacgtccatctcattttgatgaagcaagtagccatgtgccagaactcaagaaaagccgatccagcaagttaactagtcaaaaagatttggttgcagaaagaaaacgacaacgcgaggatattgacactctgctttcgtcatctcttatatcatctacgaaaccttcctcaagtcgtaatactaagaaacagaaatgagaagactccagcaaagcttttgtgaagcaattttggtagcaatggtgcttggatcacgagtttccatcttccgaagcaagtagaggaaagctaactgcctgtaatctgggagctgtatgtgcagcaactgacaaacatccagtggacccaaggagccctccctccatacggttgcaaaagtgctggaattttttggacggctgttaatggtttattacgtcattttatttcccattttcatccgtttggatgcgagcaaaatgaga

SEQ ID NO: 288416 - DNA, 297 bp, Zea mays
cggacgcgtggctaggaaattcgtaacttgacattgttaacaccaagaagtggaaatgttcttattactggcctcactatggaactaaaagacaagaaccacctactggtgatgggacctagtggaagcgggaagacgtcgctgttacgtgctttggccggcctctggactagtggcactggggagatcatataccacgtgagaggttctacgcagcttcaaaaaccaaatccaagttctgataaaccatccagcatgaatttaaagggcgaagaagaatcgttgcaaagttccaag

SEQ ID NO: 288417 - DNA, 422 bp, Zea mays
gtacggtccgaatccgggtcaccacgcgtccgggacctggcggacgcgtgggggcgcacagaatctggtgtctcttgctccgaccccgttggcgactgagacgcgatccccttctcctgcactgccgtcctccgtcgctgcgatgcctcggtattactgtgactactgcgacacctacctgacccatgactcgccatctgtccggaaacaacataatgctggatacaaacacaaggcgaatgttcgaacctactatcagcaatttgaggagcagcaaactcaaagtttaattgatcaaagaatcaaggagcatcttggacaagctgcagctttccaagcaggtgcccctttcaaccaacatctgcttgcattcccaggagctatggcccgccctcgtcttccagttctgccaacccctggca

SEQ ID NO: 288418 - DNA, 297 bp, Zea mays
atggagggtaagaaatcgtcaccttcgggaattatttgcctctgccccaggtgtggtatcagctgaagttatcttccataccaccactccgagacgatctgctggctacgcgtttgtttctttttcttcgaaagagagcgcaggggccgccatatctgctttcaacggaaagatattgatgggacggcccattaacgtgatgttcaaagatgaaaatggtgaaaagaatgaaccttcttctgtcccaaagaaggccgacgtggaaccatctgatgaccagagtgataagctaagcat

SEQ ID NO: 288419 - DNA, 299 bp, Zea mays
ggagccacatctggctggcacgatgcagcacgctttccccgttcttccacaggctgctccaaccattcacggctgctgattatcctgcacaaccggtgactgcagcaatcggtgctgctagcaatggatgacctgtaaactgcatcactgcgtacagccactgggcaaagctcaagtgaaataggcgtatccacatgtgccccccgcctgctgtctgtactgcctcacaaatttcagtacttgtcggtggagactggagatggagagcagcctgtagtggtagtactgaacaaactgaa

SEQ ID NO: 288420 - DNA, 456 bp, Zea mays
tcaggcgctggttccctttaccagagatggtcggccgattatggggcgccgtcattaaccttttaaaactcggatctagacctcatttactcgaatcccttactgtgtgtgaatgaatgtatgagatggatatcttgtaatgggatcgagttttggaggtaaaaaaaaatcgtagatccgggccccgcgatatttctgttattttctgtgatgattttagtgcatccatgcacattcacgcggtttaaaaaaattagggttctaaccctaattgtattctgtgactttttcttatctgttcttgaccgtggttcataatcacgagtctcttttgtctctgttgacagatgtagcgattagggttaggtcataaaccctaaccctagacagttatgtgagagctctctggtttgaggccgagacacattgtgtcttttacagtggccagacctaaaa

SEQ ID NO: 288421 - DNA, 493 bp, Zea mays
cagaagatagggataaaagctcttctacttgatcaggtgaccagcatccaacctacaagctttgcctgtgcaattttttccctgcactgtacatacttgacttgttgcagttttttatagaaatgagcagagcttcatatcaggcattggcaattggattgcagacgaggtgctttaccagtcaaggatccatccattacagattgcttcaaatctacctagggagagttgtgaagcactgcaccagagtatcgaagaggttgtcaaatatgctgtcgaagttgatgctgacatggaccgctttccgaaggaatggttatttcatcaccgttggggcaagaagcctggcaaagtcgatggaaagaaaatcgagttcataacagctggtggcagggtaaccactgcctacgtgccgcaactgcaaaaactggttggaacccagtccagcaaaacgatatccgtggccgagaacggtgatgccaaggatccaggg

SEQ ID NO: 288422 - DNA, 437 bp, Zea mays
cccacgcgtccgcccacgcgtccggacctgtctacagtgtagatccaatatcaatcttgaaaggtttattctccttgatagaagtctctaattcagtagcagtagcaaaggattggagagttctatcaaggagaagtgccctttcaagattgatattggacctgtctacagcgtagatccttcgaagcgtcacgcttacgcccaatctggcaataatgtctttgtaccagtcgagagggaactaatttttgacattgatatatctgattatgatgatgttcgctactgctgctctggagctgatgtctgcagagactgctggcccttgatgacaattgctatcaaaattttggatacttctcttagagatgattttggtttcagtcacatactatgggtatacagtggacgtcgtggtgtccattgctgggtctgtg

SEQ ID NO: 288423 - DNA, 326 bp, Zea mays
  unsure (1)..(326): unsure at all n locations
cgttgggaaagatttttgtcggaggcgttgcttgggagacaactgaagaatcattctccaagcattttgagaagtatggggcaataactgattctgtaattatgaaggacaagcatactaagatgcctcgtggatttggatttgttacattttctgatccatctgttatagacaaggttttggaggatgatcacgttatagatggcagaacggttgaagttaagaggactgtcccgagggaagagatgatcaccaaagacggccctaagacaagaaagatcttcatcggtgggctaccaccatctcttactngagatgaattgaag

SEQ ID NO: 288424 - DNA, 329 bp, Zea mays
cagaacaacaaccaccaccaccaccagaaccagaagaacgtaaacgtgatcaacatggcagcagcaaatgccaagatgggcggcggcggcggaggaggagtccagaaccaccagaagaacgctgctgcgatcaacatggccgcggcggcggcggcaaacgccaagatggctaacggcgcccagaggaacgctggtgccatgggcggcatgctgggcctgagccatggcctgggagccgccgccggtgctgctcctcctgggttccaaggctacgctgcaggcttcaaccacccgtcctcctacgctgctgccggctacggaggaggtct

SEQ ID NO: 288425 - DNA, 314 bp, Zea mays
gacaacaatttctcagaatcttaaggactcggccggacgcgtgcgctgttttctttagtgtccgtaagattgatgatccaataggattgctacctggaaaaattattctgggtatcaacaaacgaggggttcactttttccgtccagttcccaaggaatatcttcattctgcagaattaagagacatcatgcaatttggtagcagcaatactgctgttttctttaaaatgcgagttgctggtgtccttcatatctttcaatttgaaacaaagcagggcgaggaaatatgtgtagcacttcaaacacatataaat

SEQ ID NO: 288426 - DNA, 396 bp, Zea mays
caagctcaagtctggcgccgagataaaggccgcgctgaaaaggtgcatcctggaactgctgacgagcaagggcggcaactcggagctcaatctcggattcaggaagccggctgtcatcatgatcgtgggagtgaatggcggggggaagacgacctcgctagggaagcttgcttacaggtttaagaacgaaggtgtcaaggtattgatggcagcaggtgataccttcagagcagcagctcgtgaccagctagaagtttgggctgagagaactggttcagagattgtcattgacaatgacaagaaggcacagcctccagcagtactttcgcaggcagtaaagcgcgggaagcgtgaacggtttgatgtggttctatgtgctacatcaggtagacttca

SEQ ID NO: 288427 - DNA, 444 bp, Zea mays
cagcaccagattgtctaccaacaagctcaacagttccaccaacagctccagcagcagcaacagcagcagcttcagcagttctgggtcgaacgcatgactgaaatcgaggcaacagctgatttcaggaaccacaacttgccacttgcgaggataaagaagatcatgaaggccgacgaagatgtccgcatgatctcagccgaagctcccgtggtcttcgcaaaagcttgcgagatattcatactggagctgacgctgaggtcgtggatgcacaccgaggagaacaagcgccgcaccttgcatgaagaacgacattgccgcagccatcaccaggaccgacatttacgacttcttggtcgacattgttcccagggatgagatgaaggacgacggaatggggattcctacgcccgggctgccacccatgggagccccagctgacgcata

SEQ ID NO: 288428 - DNA, 519 bp, Zea mays
ctaaaatcttattgcacatttcataatattcttcattgtttgtgagattcctaccatccgtgatccttttatctatatgctatttctagaagatgatttttttcgtgatcccatagtaccagctgttcatctgactttagttgtgttattcaatgtatactttcaagggctcatgcaaggtgtaaatcttactgcgagaatggtagccaagcttgaggagatcctgtggaggatgatggggttcatcgggtctgccagaggcctgacctgagctagaccatcgtgtattatttggttttatacaatgtttgcatcctctgcatctcatgctcttttctgttttcagcatgccttttgacattttttacattatttgctttaaaaaactatagccataccatgaataaatctgctgactttgtgactgtcagagcaataaaagaggagctatgctatatagggagttgagaccacaatccttatgaaaagttacactgtgagccttcttcacatattgag

SEQ ID NO: 288429 - DNA, 439 bp, Zea mays
ggtttggaagactgattcgtggcgttgcatccagactataacttcggagaagagggtcagtgcagttgttattagcaacgatgacctgtatgtatcttttgcagataaatttggtgttgtttggttagtcactttgcgggaagatagtgcagagcaggtttcagttgataacaaacctgtgtcaattcttggtcactattgcagtatcatcactagcatgaagttttcgccagatcgacggttcattgctactgctgatagggacttcaaaatacgagtcacattattcccaaagaatcctctaaaaggggcccatgaaatacagagcttttgccttgggcatacagactttgtatcatgcatcaccttcactagcatatctgaaaaccagagtttccttatatcaggaggaggtgattcaactgttcgcctgtgggac

SEQ ID NO: 288430 - DNA, 298 bp, Zea mays
tttcagcattgcccatccgtatcttcttgctgacaatagacactataccttctatatttggaggaaggttatccaagtaaactggatgatgaagtacatgttgattccactttatgtgtactcatggctctcaatcatcaacatcttagggaaatcacagacaaggatttgggtgttatcatttgtgctgtcagttgcactggtccttgtacctgccccgctggttgaattcagatactacacaattccatgcgtgatactggttcttcactctccatcaattggcaatggcaaattg

SEQ ID NO: 288431 - DNA, 317 bp, Zea mays
cgccacaccaacacaagctagaacacttcacgaacggttttggtgctgcctgaaggagcagcttttcagaacttttgcttcttttattctgagcaggaatgctcggtgcttagccgcacatcacgctacgaacgtgttcatccctacgttcatgatgcagctaattcactggtcattgtgtgcgagctaatctcgccacaccctcctacagcatggccatcgcagaactgaaaacaggtaaacatgcaactactaacacatgcgcaaggattactagcggcgtgtcagggtataacaggttctggtagttatttgga

SEQ ID NO: 288432 - DNA, 283 bp, Zea mays
ggaacgcaaggagacaagcatatacattgttcagctcagtgattcctggatctgtaactgatgctttggatccagctaatcatcatgttattcacaatgttgtcactgcagacatcaagagttgtctagcagtacacagtgttgaaaattcccaaaattcttccaaatttccctcgctgaagactgttatttacattgtaacacacaatggatacttccgagagtatctgatcggcacaaccaagtcaaatgaatcttcatggttgttggagcgtgaatttaa

SEQ ID NO: 288433 - DNA, 504 bp, Zea mays
cagaaacgtcgaaaccagcacccggaaacccagacaaagcacgagccacgcacgccccgctgtctccctcccgccgtcccgccgccaccgctactgccggagtctctcgccaccgtcgttgctctcccgccttcaccgtgccaactcccctccttgcctcccccgcgcttcagtcgctccactccccatcgctttcgcctggtcagaattccagatccaggtgtcctttgacccagaccgcgcctgcctttccctccgctcggattcttcgccgtcttcgttcctactgggcgccgccggggtggagcggagatcggatccgccaggagctgattccttctctcgtagtctagtttgatgcggattcattcgctgaccggcatagcatgatcctgcggtgattgcggtcgcggatagcttgtgcaagctgttggcttgggagttatctttctaatctggcctaaagaaatcctgaggcggtagcgtcacatggatgcaagtacg

SEQ ID NO: 288434 - DNA, 539 bp, Zea mays
aaaaaggtggatgggcttgtggctatgggtgacactgcttttaaaccgagcttggagcatgctgtgaagctcctggacgaccgagccgataagaagcgtgcaggcttcatcgttctcatttcggatggtctagacggccagtccaaatggggagatgagagtatcacccccacggatcctatccgaggcctcctccgaaagtacccagtccacaccttcggtttgggcaaggctcacgacccaaaggcgcttcactatatcgctgatatatcctatggaatctattcctccatcgtcaccgacaaccttgacaagatcatcgaggcattcgccgtctgcttagctgggttcaagaccgtagtagccgtcgacgcttgcgttgacatctggtcaaatagtttgctgataacaaggatcgaccctgggggttacatactccgggggagttccggaggcatcttggttggcacgctctatgctggggaggtgaaggacttcattgtctacttttcttatcgtaccgggagttggtcgagtgg

SEQ ID NO: 288435 - DNA, 288 bp, Zea mays
ctacccgcgagaaggaacttcttcagttacgcaaggggggacggagaaatgagtatgaacgccacaagcttcaggcacttaatcagcggcagaaattggttttgcaaaggaagaccgaagaggctgctatggctacaaaaaggctgaaagagatattagaagctaggaaatcttccgcccgtgacagttccgctggcagcaatggtacatctcaaggctataatatgggtgagagatcgctgcaaaaatggtttgatcaagagcttgaagttatggtgcatgtgcatg

SEQ ID NO: 288436 - DNA, 574 bp, Zea mays
aaaaacagcattaacatttcaaagcaattctcagggctctgaaataacggagttgtttgaccatgatcattttgaaccctactccagagaagatacaacaatttccttaggacagacaaacaagtttaacattcgtgaggtctctccagaatgggcattttcctatgagatcaccaaggtcatcattacgggagattttctgtgtgatccatcgaatttgtgttgggctgtgatgtttggtgacaatgaggtacccgttgaaatagttcagccaggtgttctccgctgtcacacaccactgcacagcaatgggaatctcagaatctgcattacttcgggaaacagagaagtttgtagtgaattcaaagactttgagttccgctcaaaaccaacctcttctagtttcacagacattgcaccatcttctagacatctgaaatccagtgaagagttattacttcttgcaaaatttgctagaatgcttttgtctgggaatggaaaccgtgaagttccagatggtgatccccaatctggacagtgtccaaaacttaagacgaacgaagagctctgggat

SEQ ID NO: 288437 - DNA, 403 bp, Zea mays
gtggtggcgtatcaggacaagttggagctatccgcttagggataagcagggccttggagaattgggaaccaggatggcgtccatatctcaaagcagctggatatttgacgagagattcacgtgtggtcgaaaggaaaaagcctggaaaagcgaaagcaagatagagcttccagtgggtcaagcggtaacagagctatctgcatggctacgtattttgttgtggcgggtctctgccctttgactttgatgtgggttttctactcaacacagatcacttgatctgctgttattttttccgaacgtcctgtccttttcagcttctccaacctgtgtcgatacgaggaccatgctacactttggattccgtttccgaaacgttgtgacagcaaaattgatgtagaaa

SEQ ID NO: 288438 - DNA, 419 bp, Zea mays
cccacgcgtccgcccacgcgtccgcccacgcgtccgcggacggtgggcaggaattgctgatagcttctcggaatctggagtttttcaccaatggttatcgatatttgattcagattctgccagctgcagttgttgctccaatgtacttctcagggaaaattgagtttggagtaataaaccaatcggtgtctgctttcaatcatattcttagtgatttctctctcattgttttccaatttcagtcaattagtgcattctcagcagttatcgatcgtctaggtgagtttgatgatctattggatggaaacgagtcctctctatcatctcaacgtgatagcattgatgggatcaacattgttttcaaaagcagcggtccttgtgttcctagttctaatggatcgctaacacagtctgatcca

SEQ ID NO: 288439 - DNA, 399 bp, Zea mays
cccacgcgtccgccgagaaggagtgtagccggtccaagacaaggtccatgctgccttgctgcagccccaagtgcgagcagcgcgccactgcgggtgccgacgaagcgagctcaaggccgaagccgagaaggagaccaagtgcacgtacgctatcatatacggcggcaacgcgaacgacagtactgcaggcgtcctgtacgaggacaagctcaccattgtcgccgtggcaagcaaggcggtgcctggctcccaaagctttgaggaagtcgccatcggctgctccacctccgccacgctcaagttcaaagaccccagcatcaagggggtcttcgggcttggccgtagcgccacgtcgttgccgaggcagctcaacttcagcaagttctcctactgcctcag

SEQ ID NO: 288440 - DNA, 448 bp, Zea mays
cggacgcgtgggagcagatgcagtacctttatgtaagagttgtaaaagcaaaggaacttccaaacatggacatcactgggagctgtgacccgtatgttgaggtgaagcattccctgaagcatggcattctgacgcagcctcggtccctggtgatggccttgcaagcattagatcgaaagtgtatcttactccaaagctttggtatctccgtgtcaatgtcattgaagcccaggatcttataccaaatgacagggccaggttccctgaagtttatgtcaaagcaatgctaggcaatcaagtcctcagaaccagggcaccgagccggaccttgaatccaatgtggaatgaagacttgatgtttgtcgcagctgagccatttgaagaacacctaattttgagtgtagaggacagggtggccccaggaaaggatgaagtaattggaaggaca

SEQ ID NO: 288441 - DNA, 609 bp, Zea mays
atacgacaagagtcgggacggtgggcgaggtggcgaagaatgaaaaggagtcgaaagaaaaggggaaggggtcatttgctcttgcatggaccatggatgagagcagtgaagaaagggaacggggtgtgacaatgactgtggctgtggcttatttggagaccaagaaattccgtgtggttttgcttgactcacctggtcacaaagattttgtgccaaatatgatatctggtgcaacacaagctgatgcagctattcttgtcgttgatgcttcaactggttcttttgaagctggcatggatggcgaaggaggaaaaagtgttggccagactaaagagcatgctcagcttgttagaagctttggtgttgaacagcttgttgtcgcagtcaacaagatggatgctgttgattatgcaaaagaaaggtttgatttcatcaagctacaacttggtagtttcctgcggtcatgcaacttcaaggactcagctattaactggattcctcctagtgctgtagaaaaccaaaatttgatccaagctccttcagatgctcgtttgaactcctggtatcaagggttttgcctcctggatgctatagattttctgcagcttc

SEQ ID NO: 288442 - DNA, 301 bp, Zea mays
agacaacattgaccctgacaatatgacatatgaggaactcttggatttgggtgaggcagttggaacccagagccgtggtctctcccaagaatgcatttcgttgcttcccatcactaagtataagtgtggattcttttcaaggaagaaaacacgccgtgcacggcgtgcgcggtccctgctggagtacaggagaggaaatttgcagattacgcttccatgcaagcatgtataccatgccagctgcgtgacaagatggcttagcataaacaaggtatgccctgtttgctttgctgaagttcct

SEQ ID NO: 288443 - DNA, 446 bp, Zea mays
gatcaaaaggttggagccaaggagggtgtgccgccgaagcatgcacagtcagaggcggacaacaagcgtgctaaacagcaatatgctcagaggtctcgtgtccggaagctgcagtatattgcagagcttgagagtagggtccgggccttgcagtcagaaggggtagaagtgtctgctgaaatggagttccttagccagcagaatatcatgctagaccatggtataacaaagccctgaagccaagagtggagagtctagcacagggacaacctattaagcgttttcaacaggagatgtttgagcgggaaattggtcgtctcagaacaatatatcagcaacagcagcaacaacaggctcctgctcttgttcgtagtaacagcagggaccttgatgtgcagttcgccaacttgtctctgaaacacaaagaccccaacacgggccgggat

SEQ ID NO: 288444 - DNA, 308 bp, Zea mays
ggtttaaggctacagttaatttcaacggggagatgttcgagagcccagtgttttgttccactctgcggcaggcggagcatgcggcagctgaggtagcactcaatgagttatcaaagagggggccttcgtcgacgctggctgccaaagttctggatgaaaccgggatatacaagaatcttcttcaagaaactgctcatcgagctggtctaaaactccccatctatactactattagatctgggccaggtcatacgcctgtgttcgcatgcacagtggagttggcaggaaaggcatttactggcaatcct

SEQ ID NO: 288445 - DNA, 314 bp, Zea mays
gaaggagaaactctcccagttttgccatgttccggcagcaaatattatcactttgtatgatgtttccaatatctggcgcattcctttgttgctacatgaacaaaaggctcatgaggctattcttaaagttctgaatctggaaaggatggacagcatcgctcgagagccaaagttagacgaatggattgcaagagctactatatctgatacccttcatgacactgtgaggattgctatggttgggcagtacactggcttatcagattcatacctctctgtgttgaaagccctcttgcatgcatctgttgattgcc

SEQ ID NO: 288446 - DNA, 392 bp, Zea mays
tgtcgacggacaacatcaagggcctgctgctcgcgctctcctccagcctcttcatcggtgccagcttcatcgtgaagaagaaggggctcaagaaggccggcgcgtccggcgtccgagcaggcgttggtggctactcatacttgcttgagccactgtggtgggcaggaatggtaacaatgattgttggcgaaatcgctaactttgcagcttatgcttttgctcctgctatcctggtcactccacttggtgcacttagcataattatcagtgctgttcttgcccatattatgttgcgggagaaacttcatacatttggtatacttggctgtattctttgtgtggtgggttcaacaacaattgtgcttcatgcccctccagagcgtcaaattgag

SEQ ID NO: 288447 - DNA, 378 bp, Zea mays
gcccaacttctcgtcgtgctgttcccatctttcctttcctcttcccttccccgtcgatctcgtcggcgacgccactacctcgccgtccggtcccaccacccgcctccgactcctgcgacccagccacggatcccgaggatacgggccgagtccggcgatgggggtggtggtagagcgggaggagtgggcactcagccccttcgcctacccgctcctctccgccgccgccctcgccgcggtgctcctcctcccttacctttccccgaggactgcggcgcacgccaccggaccctcgtcccccttcgacgtgggagccgcacccttcctccggttccgccgcgccatcctcgtcctcttctccctcgcgtccgtggttga

SEQ ID NO: 288448 - DNA, 455 bp, Zea mays
cccgcgtccgggacctggccagcagcagccacccctgctaggtcgtctcctttgcggcggctccttcacggcgagaaggcgacgacgaggccggccggcgccgccgccgccaccaccaccaccaccaggagccacgacgtcaagaggttcatatgctcgcctttcgcggctgtcttccgggcgatgtcgtgcgcgcgtgattctgcggtcagtacatgcgacggacagcgtacacgcaacgccacggccggggtggccgagcgccttcgggaggcgaggaagaggcgaccaagcctcgagcagctcctcaggatggaagcgccgccaccagcatccgcccgccgcccagatcatcgtcgcaagctgggtaaaccacgagaagcggttgctccgtacgaggttataatctcctccggcgccgtgaaggggaaagagcaggagccgctattcccctc

SEQ ID NO: 288449 - DNA, 441 bp, Zea mays
cattagtccgccttctcccccgagacccccgagagtcccctcgctgccgacgccacacaaacgcctccaccctcatgttcaccggcgctgcgggcggcattggcaacctgccacggccgcgcaggccgcggctcggcggaataggacacgggggcgtcatggtgtctccacagggacaggtggctctgggggcacatccgcacctagccgccccgccgtgcaccgactacgacgtggcctacttcaaggcctactcacacatcggcgtccacgaggagatgctcaaggatcatgtgagaactagtacttacagaaatgccataatgcatcacaaagatcttatttcaagcaaggtagttttggatgtgggttgcggcactggtgttctttcgatattctgtgcttttgctggtgccactcgtgtttatgcagttgatgcag

SEQ ID NO: 288450 - DNA, 331 bp, Zea mays
tcggctcgagagacatatcatgctagtgagacagtttcggtaccgagggcctcgtcactcccaagtccaccctatagagcaaccggcatgtatgggactttccagatatgttacagatcagtcagtgctactgcaaaagagtgaagcactccatcaccgaggttttaccagacccgaagatggcgaaaacatgaaccatgttggcaaaggaaacgtggacaggtggctccatatgctcatggataaccaacaagaagatcatgccgcgtaccattcttcagacgaacacgataatgacgagaagaacgcttcggatgagcagcgaacgcag

SEQ ID NO: 288451 - DNA, 433 bp, Zea mays
attggagggcttcttccgttaaatcaggaacttggcaatgcagacgaaggaataagaactacttcagcatgggtgctgggcaaagccagtcaggacaatgttcttgttcaaaaccagatcaatggatatggagctttggacagattagtgaagatgggttattccagttctggaccagaagccgctgaggcatcgtacactatatcctctttgattagggacaacgaacatggtcaggagttgttcctttcagaaaatggttatgcaatgttgcaggtagaaaaaggaaatcatatattgaacatcaaggcaaaagcgaggttgaaatgtaccaacgcgttgtttgtttgcagcacatattgtcaaccacaaacactagtgttcggcttcagaaaaaggttgtgtctttactggcatatatagctgactttca

SEQ ID NO: 288452 - DNA, 358 bp, Zea mays
ctttgcaagcatgtcatcttcgactgccaatgagaatatgtctactgaaactggcaccctgcctcccatgcctcccccatcatcatacattggttcgcctgttttctggattggagttggtgtagcattgtctgtggcgtttaccacggtttcttccatgctaaagaaatatgccatggaacaagcatttaagtcaatgatgacccaagcaccaccaaactcatttggctccaactcgcctttcccatttggcatgccaccacaggcatctcctactgcaccaagcagtttttcgtacttggaaccaaggaaaggtacctccccacaggtgtcaactgttgatgtctcagctaccgaa

SEQ ID NO: 288453 - DNA, 570 bp, Zea mays
cctataggctatagcggcagggagaaagtgaccacccacctcaacccgcccgccgccatggcgctccgccgcatcacaccgcggaggagacccgttctccccgtcccccgtgccttctcctcgagtccgccgtttcctccacccccgcctccggcgaacgaccccgaccccgacgccgcccaacccccatcctcttctccgccccctaattccggcgcgccgcggaacccggagtcctcgttcttccaggacatcaaagatcgcctccgttcgtctcccacgtctccgtctccgcgccggatcccgacgaccctgccccgccccgaccctgcgcgcggcgctccttcttcgggaccgcccattggagacatccgccggatgctccagaacttccgcttaaccggctcaaccagcgacgcgccctccacctccgctcccggatccaacccctccttcatggacctgctcaagaaccacttggaccagggtgccaacgcccggcaggcggagctcggcttcaatgccatcggagagagcctcaagcgcccccgtccgccgaagccttttata

SEQ ID NO: 288454 - DNA, 389 bp, Zea mays
tgcagtagtacgccatctgcgtgcggtcgtgtggaactgtagtgctggacatcctcgccttccagccttctcgaaaatcgaaaccctagaccgcgcgccccctcgccctccggccttccacgtccgatccgatccaaaatgcataagctaggcagaggaagccgggacaaggtgcaacagttcatggcaattaccggcgcaagtgagaaagctgcccttcaggctcttaaagctagtgattggcacttggaaggagcttttgatgttttctacagccagccacaaattgctgttgctaatactcgacatctggaagagctctacaacagatataaagaaccagatgctgatatgataatggtggaaggcatatcacagatctgcaatga

SEQ ID NO: 288455 - DNA, 368 bp, Zea mays
cggatacagacacctttgtcttgggcatccagacagattggcagctacagcaaatgattcagtttggcagccatagtttaatggcttctgattcaaagtttggaacaaacaagctaaagtatcctgtacatagcatccttgttttcgatcagcacaaaaatgcaattcctgttgcgtggattataacccccaattttgcacatggtgaaatatataaatgggtgggtgctctttatgatcgagcgcatacaaaagatcctacttggcaattgggtggcttcattattgatggtcccttgactgacgttcgcacaataagagaagtattccattgccctgtgctgatcagtttatggcgtatccggcat

SEQ ID NO: 288456 - DNA, 338 bp, Zea mays
cactagatggcagtcatgttagagagcgtcttcaacatataataaaatctgaggggctcagtgtagatgacggtggcttgacagccctagtgcggttaagcaatggtgatatgaggaaggctttgaatatattgcagtcaacgcacatggcatcccaacaaatcacagaagaagctgtctatctttgcacaggaaaccccatgccaaaagatattgagcagatagctttttggctattaaatgaaccattttcaaccagcttcaaatatatatctgacatgaagatgagaaaagggctggccttggttgatatcatacgggaggttactatgtttgtg

SEQ ID NO: 288457 - DNA, 302 bp, Zea mays
cccacgcgtccgggaagctcaggaacatggtcttggaagcaacaaggaagcagcgtttcgagcgcgtgacgcgtgacctgaaggtgacgcgggtgttctcgacgctggtggaggagatgaaggcgatcggcatcatagcggcgggcggcggcggcggcgaggcgtcgcagtgcacggacgtgatggcccccgtggcgcagtcggagcgcacccggtgctgctgctgatgggcggcgggatgggcgccggcaagagcacggtgctcgaggagctcaagcaggaggcattctggaccaacgcgg

SEQ ID NO: 288458 - DNA, 433 bp, Zea mays
acggcggcttccgcgactcgcccgtctcgaccgactcctccgaccgctggtcccgtgccgcgccgagcaatgacgagcgtgagaagcctcgcatcgtgcttgatccgcccaaacgtgacgcctcggccacccctacccctcctgctgaggcaggacgcagccggccgagcccatttggagccgcgaggccagcgggaggacgtgctggccgataaggggctggactggaaaaagatggaaactgagattgatcagaagaggactagccgacccactagctcgcagtcgagtaggacagagagtgctcaaccatcacgtcctgggagccccgggtcacagatatcagccaccggtagtgaagccgcacccacggcgcggccgaatgttaatccttttggtgaagcaaagccaagggaggtgattctgcaagaga

SEQ ID NO: 288459 - DNA, 335 bp, Zea mays
cggtccggggttcccggggtcggcccgcgcgtccggtgcgcagttcgcttggtccccggagccccgggggcggcggtgggccggagcccggggacgacggcgcggcgcgactcccccctgagcgacactgccggcgtcggcgtgagcggctgcgtggcgccaccgacggaggctacgagcggttgtggaggcagatgtgagaggtggaggtggctacaacgggtcggcggctgtgagatactgaaatccgcgctgcagttctcttcttcccccagtcagtaccacctctccaagtggcaatcaccatgggagatcaatctggctctagaaatgga

SEQ ID NO: 288460 - DNA, 458 bp, Zea mays
cttccctcctacctctctctctctctccctccgttcgtttcttgactcttctcttctccccatcagccagcagtctctctctctcacacacacacaagcagcgacttgctcacagtagtgctccccggacagaatgaccaaagacgaggagttcaagctggtcaagatccagaaccatgcgctgaaggtgaacatacactgcgacgggtgcaagcacaaggtcaagaagcttcttcagaagatcgaaggcgtgtactcggtggccattgatgtggacaaccacaaggtctcggtgacgggcgatgtggactcggagaccctgatcaggaagctcaccaggggcggcaagcacgcggacatgtggtcgcagcccaagggcggcggcaaccagggccacaagggcaataatggccagcagcagaaacagcagcagccgcagaaccagaaccagaaccacc

SEQ ID NO: 288461 - DNA, 259 bp, Zea mays
  unsure (1)..(259): unsure at all n locations
gtcgcggttacgaggccggccgagaggaaagggcggacctgctgccgccgctgcgggacgagcaagtgggcgcgcaaggagtcgtgcatcgtctgcgacgcgcgctactgcggccactgcctgttccgcgccatgggctccatgcccgagggccgcaagtgtgtcacctgcatgggccagcccatcgacgaggccaagcgttncaggctcgggaagggctccaggatactgtcgcgcttgctcagccccctggaggtca

SEQ ID NO: 288462 - DNA, 327 bp, Zea mays
ggtgcagacaactccaagtcgctgctctccagggagaacctacttggagtcctacaatcaaatgagatctgaggcattttctgatatgtattttttgcgtgcactgtagttctcgtttaaattttcgctgatgttatgttcagctctttcttatctttcactgttacatttgaaagattgtgaaacttggacgccttcaattgtcaccatcacagtagccaatgacgagttgtcccaacatgtgaggtgtaggtaactccaagccctgtttcagggagaacctacttggggcctacattcaaatgagatacctggcatttactgatg

SEQ ID NO: 288463 - DNA, 278 bp, Zea mays
agggtcgccgtcggccagcagctctggatccccgtgccctgcagctgcgaccccgtgggcggccaacccgtcgtgcacttcacctacgtcgtgccggccgggggctccgtgtccggcatcgcggaggagttcggcaccacggaggagacgattctcacgctgaacaagatgcccgacgccaagtcccttctcgccggccaggttcttgacgtgccactccgagcttgtagttctgccattagcagcacagccattgaccgcaaccttctcgtgccaaa

SEQ ID NO: 288464 - DNA, 330 bp, Zea mays
ggtcgagcttataatggaggagtcacatccccaactttgtagggtacttcaagcttggtccgatgcatcaaagatgatatctgcacttgattgtttggctgtcatcacatttgttggagcatctgatctggctgaaacagagttatctttgaaagccatgtgggatgtgattcatccaaagtctggttcaaatgtgggaactgttcggaaacctaggcctcctgtgttagcagctgctgtatctgcatggacttttctcctgactactattggttcatggaggataaatccaatatctggaaagaccattgcatttctgtctactctttt

SEQ ID NO: 288465 - DNA, 444 bp, Zea mays
ggagcaatctgaggagctccgaagctggctcttgctgggcttcattatttccaaacatatgattggttcatgttaatgactacaattacccttggatatattggatggatggtgaacctcattatacatgtgctacagtcttatacatcatatcctgtaattcttctcaagagggctcaattgtatcctaacaatacctccatgaaagtttacatttgtggatgcttctttatgggtttgtcatccattttgctacttctagagaaatcaccacttctttaccatgcttatgtattgtgcacaatattcctttggacaagaattgtacaaaaaattgattttttgaagtccgtatggagagaactagctaatatgcccttcaagtatatttttaatctcctgaccagttcagttgttgcactgcttgtattggagtttctggtt

SEQ ID NO: 288466 - DNA, 361 bp, Zea mays
cccacgcgtccggaaagtacttcgcaactcaaaaatccatgaatttaacataaagctagcaacccacaaaagactcattccagctcatatcaagggaaggccgccgtcatattacattgttgctggctttgtttttatggctgtgtctgttccatatcttcgatctgagtatggaaaagaatatgaatacgatgcccccgtgaagttgttggacaagcatttgcatgcaatggcacaatcatctgatgagcagcttgtggtggtgtcacaggtgcttgtggctgatataaacattggttacgaagatatagtcgacatgcagggtcgtgccttcaatagcacaccggttaaaaatttgaag

SEQ ID NO: 288467 - DNA, 418 bp, Zea mays
cccacgcgtccgcccacgcgtccgcccacgcgtccgcccacgcgtccgagccctccaacgtggctgatggacaagctgagcttggaaccgagaagaagaaaaagaaaaagaagcacaagctagaggaggcacaggaggagaacggtgcagcacatgctaatggcgacgctgaagagacccagactcccaagaagaagaaaaagaagagccgtgaaatttcggaggaagctgaacctaagacagccactgaggggaagaagaagaaaaatgaagaagctgaacctaagacagccaccgaggggaagaagaagaaaaagaaggcagtcaaggctgatgaatgacaagctatttgttgtatgtcagtacaaatcctagtatttgttgaaaaccgagataagcacctagcttctagttcatg

SEQ ID NO: 288468 - DNA, 333 bp, Zea mays
cgatgataaccttgaacagggcagaagcaaggggaatgttactgtcaccaattcctatgaacatttccactgccaggatgtgacagttgccgttgcaccgccatctaacggctcagcagtggtatccagagcaaactccgcgaagcacgatgagcgggattctgtatcggagcatcctccgctgcatgctgtccctgaaaaactgcaagactcctccgatctccagcctcaaagtggctatatcctaagcaccagttcaaatcacagcggtgatagagcaacttggcctgaagaactgatgacgccaacaaagcagagccctcagtctagtgc

SEQ ID NO: 288469 - DNA, 291 bp, Zea mays
gccctttttttttttttttttttttttttttttttttgataccacaacacatgtcatatcgccattcgtttctgaaatcaacaccacccatgttttccactcgtctcatccaaactatttgttgaagacaaattcgtaaccgatcccaaaactagactagatagattttgcatcccacaggttctacagtttttcccccacgcctactcctccctcggtgcagacaaggttccagggggaatttttttcttccagacaacgtatcaaagctctcacatgtgggacttggac

SEQ ID NO: 288470 - DNA, 301 bp, Zea mays
cggaccgtgggcgggacgcgtggggagaaaatgatgatacatcaaatcgacaggctcataacctctctgcaagggaaaattggaaatttaccactgatgaagatagcacaggaggggcattttcaatgtccaatttatcaacgaagcttcagaaccttgttcaaatcctcactaattctgtagaggtttcagcttcagagctctgtgcaaagtcagctcttgatgttcagtcaagtgaagcattgctatcagcccttcagtgtctggatctaatctgtaggatatttgttcatgaggtgaa

SEQ ID NO: 288471 - DNA, 310 bp, Zea mays
ggatttgagtggcgggacctcgtgcaggtcgagggccctgattcacctctgtttgcgcttgagataaatcctgaaaaggcccgggaggagtttcggacagtaagtcaaaaaaacggaggaacgggagtaaaagatttcatggatagcatgggccttggggtgcttgttgagcagcttggagagttaaaattgggggaattgttggacacaccaccacctggcttggatgaagcaattgcaatttctaaggttatgcaattccttgaagcacaagaatacagcatgtttagtcgcattgtatttgacactg

SEQ ID NO: 288472 - DNA, 291 bp, Zea mays
atcaactggctccaaattgaatgggtatagcacggtgatgttgtcttcaagtccgttctcctcaacttctgaacaccttttggaaatgttgatgttcgaatcaccaccatcagcattactacttgagacaaatgtactgttgatagacctagagtccagctgtgctattgaatcataaataatataactatagagaaaagaagtagatttcaaaatgtaagacaagtgtaaatcctttttgttcataagccaaaacatgtccagctgtgatgaatctacatcttgtttaga

SEQ ID NO: 288473 - DNA, 431 bp, Zea mays
cgaggagaccttcgcggtgaccggcgtcatgagcgtcggggacttctacccggcgctgcggtgggtggaccgtctgcgcggggtcgacgcggccctgctccgtctccaggcgagacgcgacgcattcgtcgccggcctcgttcacgacggacgccgaagccgcaatcgcaaagctgtcggtggtggtggcggtggcccaacagacacggagaagaggagcaccattgacgagctcctgtcgctgcaggaaactgatcctggctactacaccgacactgtcatcaaaggcattgtctcgatactgctcagtgcgggcacagacacgacggcgctgacaatggagtgggcaatggcgcactgctgacgcaccgggacgcaatgcagaaggcgagagcgagatagacgccaacgtcggcacatcccggctggta

SEQ ID NO: 288474 - DNA, 323 bp, Zea mays
ggaaaatgttgatacagatgatatttctaaagtttctgaaaaagatggcgtgcatcacgtgtctcttaacccagagatgccaagggtatccagaagcgaacaacgaatgacaaactttgcaagggctttattgactgtattaagacaatataagcacaaacttttggagtccgagaatgctgttgaaagcatgaaagaattgattagagataaagatatcgaaatcatggagttgaaaaaggagctgaaggctgtaaggtattgttcatgcaagagttctccaataaatgaagatgactctgtggaccatgatgattcttatc

SEQ ID NO: 288475 - DNA, 325 bp, Zea mays
aatggtcatagaatgtgcatcattcaggacagagcaggatttgttgttaaattggggcgtatacgtgacgaattgatggacagtggaacctggcattggaagtatgcagttgatggtgtccatgtaaagttgaacatggtagaactataaggggtatcaactatagattcttgattcattgatttgtggccagcttaattttattgaggacacacttgacgttggttgactttagtctagattgtaggcgatgacatgttgtaaagataagggagctttgttttcgtacattaggtctgaactgttcccttcattgaagaggtga

SEQ ID NO: 288476 - DNA, 428 bp, Zea mays
ccccggatgtacaagtattacatacagacgaaagacgtggctgcgaacggctcgcgaactgtagggttctcacgttaacccttgggactctctgctggctagttgatcgcatcttctgcaagaagctttcgcattggtacgtcaacccgcaggggcacgcatggtggcatgtgcttatgggcctcaactcatactatgcaaacacattcctaatgttctgtcgggctcagcagcgcgggtgggaggcgagaatcacctaccttcttggatttttgccttatgtcaaggtccagaaaccagagaagagggaatgatttgtctctgctgaacactgatgctactcagtccaccgccagtaagctaatgtctatccccaccccaccccccacccaatgtgcgcagacaagttgtggcatttttgtatatgg

SEQ ID NO: 288477 - DNA, 412 bp, Zea mays
gttattggcatgagggttgctgtgatgattctggagatactcaatggcagtctagagagaggaccagaaataacactagaaattataactctgtatttaatacaaataaccgtacaagagacaggtacaacccctgcagctgtagccatcaagaagactacagatattttaccacagcaactagatcaagtagggagacaaagatgcccaggaaaacagtggctgagaagcccaggttgcaataccgcaggtgctatcctccggatagctttgctgtgtcaaatggaggacgtgttggtggtacacaaacaaaaacccaggtccaaaacaagtatgggagccaatggatgcaagacagaagacagggaatgggaatagtgctactggggctgctgatggttcagatcaagta

SEQ ID NO: 288478 - DNA, 339 bp, Zea mays
gttttctcaggataagtcaatatatgaggcagtagagagtgcattcattactttatacacaaggaaaagtcccctagaaacagcaaaaagtttgttagaccttgccattgattgcagcattggtgaccttgctgctctcgagagcttaattagttccttagtttccaaagcagacatttcatccagcatggtgcccgcaccgggggactatttttgctttaacataaatggagtgagaccagtgcaaagccgtggagctctatctattctttgtatggctgcaaagtcgtctcccagcattttgggtaatcacttgcaagatattattgacattgggtt

SEQ ID NO: 288479 - DNA, 300 bp, Zea mays
caagaatggtgacataattgaagctcgcaggcggggggatccaccgtatcgaagtggtttctatcccacttggtacactatgagggtatacaacaatttgttgttgcgagcacaagacaagaagatcatttctttgtatgagtaacgatatctatttcatattcgactggtggtctgctctctgccttgatcctattatgcagctgacacagcttattgcaggcattctcttggaagatcaaatatactcttcgtagacatgtactccaagatttaacacttctttttaaggaagcgcat

SEQ ID NO: 288480 - DNA, 756 bp, Zea mays
gagaggtctttgtattctgaaggtgatagaaagctggcagaccttgacaaagcaagcgagctggatcctactctcacttacccttacatgtatcgagctgcatccttgatgagaaaaaaagatgctaaacatgccttagaggaaattaaccgactcttgggtttcaagttagcattggagtgcctggagctacggatctgtctatacctggctcttgaagactataagtctgctatctgtgatatccatgcgattcttactctttcacctgattatcggatgttggaaggacgtgtagctgcttccaaaataggcactcttcttggtgcacatgtcgagcagtggaatacggctgagtgttggctacaactttatgagcgctggtcatcagttgatgatattggctccctttcagtgatctatcggatgcttgagtcagatgcagcaaaaggtgtcctctactttaggcaatctttgctgctccttaggttgaactgtcccgaggcagcgatgcgcagtttgcaattggcaaggcatcatgcagcaactgagcatgaacgactagtatatgaggggtggctcttatatgacacggggcactatggggaggccctacaaaaagcggaagaatctatttccattcaaagatcatttgaagctttctttctgaaagcctatgttttggctgattcaggagttgatccttcttattctgcgacagttatctcacttcttgaagatgcattgaaatgcctt

SEQ ID NO: 288481 - DNA, 307 bp, Zea mays
tccaccttccctcccctccactcccgcaatctcgtctccgccgtccgccgccgcgccgtagcaaggtaacagagatcacaacaagttaaagcctcaaggaatgctgaaagatgtgctttcctagaagatatttctgttgcgacatcaaggaccttgctgctccccgagggctgctgatctgctcaactcttgatgacctgatctgcatcgattctacaacgttcagactgcgccacgaccaagccataagagtactgttcaccgtcatggatcatgacatcggggaggaaggctaactctttgccca

SEQ ID NO: 288482 - DNA, 392 bp, Zea mays
ataggatcatgtggttgttggtcgagttggaccaattatgctggctcatttgttggatgttttgacaagtcgattctagcttccttatgatctatgttagatttggtaatgcataccagttagtaaagcatttatgatgtacattgttatacatagagctttacatcacaaaaattatcagtttccctcagttacgatatgcatttagtatttatcgtattttgaaaattaataacctattatactatgataggcttgacttcatgtttatctaaataacttagtgcgatgatgcttgaaaacttatcttccattttgccagatcaatgaataaaaggattattcatatcaatgtccatgcaccttctcagaaaatccttttgtgatgttgg

SEQ ID NO: 288483 - DNA, 391 bp, Zea mays
acggcaaggccctcaagctggctttccagcactggatcgaagccatcgacccgcggcataggtatgggcacaacctgcacttctactacgatgaatggtgcaaaagccaagcaggccagccattcttctactggcttgatatcggcgagggaaaggatctggaccttcctgaatccccaagagctttgctgaagcagcaatgcattaggtatcttggtccgcaagagcgtgagcactacgaatacatcattagcgagggaaaggttatccacaaacagtctggggaaccacttgatacaaggcgtcctaaggggactaaatggatatttgttatgagtacagcaaaaaagctttatgctggcaagaaacagagaggcgtgttccagcactc

SEQ ID NO: 288484 - DNA, 331 bp, Zea mays
gtcgtcgcctgtccgctggacgaggtcctcgtgcagtacgtgctagaccacttcgtcacgctgaggttcgtcagccccacgttcaccgtgctccctggccttatccctgcaagatcctaagcggaggtatatattaatttacctgcgaggatgtggtgtctgcaatcacctctctctctttctttctgctgaccataataagctactcccaggatggagtcactttgcgcaatttacaatagctcttattaataaagacccttcgtcatctaagtattctgatacactgcatcggttttggaagaaagagcatgattgggggtggaaaaag

SEQ ID NO: 288485 - DNA, 333 bp, Zea mays
cccacgcgtccggcgagctgcgggaggcgtacgagcccggcaggacgcggacctagcgtggcggcaggcgcactgcgtgggcctcctccggctcctcgaggagaaggaggtggaggcgttccaggcgctccacaaggacctcggcaagcaccacgccgaggcgtacagggacgaggtcggggtgctcatcgagtccgccaacggcgcgctgcagcagctcggcaaatggatggccccggagaaggtgcgggtcccgctgatcgcttggccggcgaccgcgcaggtggtgccggagccgctcgaggtcgtcctcgtcttctcctgctggaacgt

SEQ ID NO: 288486 - DNA, 318 bp, Zea mays
  unsure (1)..(318): unsure at all n locations
ctttctctatccacctttccaccgtcaccatggccaccgccactacgtccgcctatcattgcaacgccgtcctccaccttcccagacctccgcagttccgccggctcctgccccctctcccctccctcgtcacccgcagagccgcgagcgtcgggctgggggccgcccgtctcggttcgagggcgacggcaagggcaagttccgtaccgccaccgccaccattttttgaaaccgtgggttttnttnatntagatnatgatgaggaagatcgtgggttgtcggatgctgatgcgggcttcagtgacgaggcagatgatg

SEQ ID NO: 288487 - DNA, 385 bp, Zea mays
agcagctaacatgtttaattatgaattgtatcgagggatgtctgatttgtatttgttcacaagatagctacttttgataaagcagctggtttccaggtaacgtgttctcctgccaatttgcttacacactattctattctacattgagcttaacagtcagacttttgacaggcacttatccaccccagctgctcttgaaggtaaaaactcattgaatggaaaaggcatccccgttttttcttcttaagccagtgatactaagcacattatgttggttttgtttgcttgacgtgttgatctcggggattgaaggttgaaaactctacacggtattcttagattggaaaccatgtttttaatccatcataaagttattagtcttaca

SEQ ID NO: 288488 - DNA, 323 bp, Zea mays
gacactgctgttcttctctcgggggcaacaatcgtggatcgtgctgtcattataactcccgctgagaactatcagctgcctccggaagcacacaaacaattatcgggagcaaacgtctctactgaatcagcagtcaggaaggcagaagatgttgtcagcagcatgctggccaagggcttcgtcctcagcaaagacgctctcaacttggcgagatccttcgacgagcgtcacaacatcctatccaacgccactgccactgttgcatctctagaccgccagtatggcctgagtgaaaagatcaatctgggaagggccattgttgg

SEQ ID NO: 288489 - DNA, 351 bp, Zea mays
caactccttactaaccggagtgtctttgcacacaactactcagttttagttctgggtttcgttgtcctctcttgcttgattgcggtgtctccgaacttcagtccatttcttgtgattggaacaacatccccagtgacgtaccaggtgcttggccaccttaagacatgtctggttctatcatttggctacactctattacatgatcctttcactctaaggaacatattgggcattctaattgccatatttgggatggcactatactcctatttctctgtaagagagggcaagaagaagtcagcaaatgatgccctgccagtttcacagatgccagataaggaggttgaaccg

SEQ ID NO: 288490 - DNA, 332 bp, Zea mays
gatctgtttgccgcattccgtggcttactcctccatctatggaccctctgggagctcatggtggttggtgagcccattctggttgttgcgccgtccccagctcagtgctcagaggctgtgtctgcgcttgttagccttgttgctccgcttttgtatagtgtcgacttcaggccatacttcaccatccatgatcccgattttgctcgcttgaatgtgcttgcggaaggcgaggtgttcccgccaatggtacttggagtgaccaacttgtttttcttgaagagtcttaagagcattcccaatgtcgtatccgtgggaagcccaaatccatattc

SEQ ID NO: 288491 - DNA, 385 bp, Zea mays
acgctgtgcatttccgtcgcacctttgctccattgtggtattgatgttctgcagaagcgagtccctgtatcaaataactgtgtccattgcgacgcatggcgctatgccactagcatgtcagcttgctgtagtattgcatactcacgggccggtgcatcggcattgtagcagctattgtttgaaacgtacaggaactctccactgtggaagcacaaagccacaatggagtgaggtgcgacgcaatgaacaatatggtggcaaagtgaaagtctgtggaactaccgggggcaaagtggattttgtccaactatttgtgtgtcgttttccggttgataccattgagaaaatacgaataagttacaggatcagtcatagtgcatgtaat

SEQ ID NO: 288492 - DNA, 460 bp, Zea mays
ttcttaaatttcatccatcaattggagtacagcttgtaataggcggcactagaatggcacttgaacagaagcgcatgcacactaacccttgccagattctagtagctactcctggaaggcttagggatcacatggagaacactccagggtttgctacaaggttgttgggtgtcaaagttctaattcttgatgaagctgaccgcttgttagatatgggattccgatcagatattgaaaaaattgtggctgcactaccaaaacagcgtcaaacacttctattttctgcgacagttccagatgaggttcgtcaagtatgtcatattgccatgaaaagagatcttgaattcgtcaacactgttcaagaaggaagtgaggaaacacactctcaggtgaagcaaatgcatttaattgcaccactggacaaacaattctccaacctatatggtcttctaactgatca

SEQ ID NO: 288493 - DNA, 444 bp, Zea mays
  unsure (1)..(444): unsure at all n locations
actcgggtagaacactcgcctctaccgacaccgccataccaccaatagatccagctatggcggtgtagtcgaattcaatcctgagcgcgaacacacgaaatcaccgcaggctcgatatacgncagggctttcaccgcccaacagcatcttgcagcgactgtgctccagttcggggggaaaaaggaaccgtatctgctgaatccctgcgctccggggcggggatggatcttgacctggacgactacgtggacccctacgaggaggccgaggccgaggctgccgcggcggaggacggctccgacgaccccgacgaggacgactcggatgcggagagcgactacgaggaggagtcgtttggcctcctcaagtccggcaagcaccgggtgcgcaacccggacggcaccttccgctgccccttctgccccggcaagaagaagcaggggt

SEQ ID NO: 288494 - DNA, 292 bp, Zea mays
cgattttgtgcacgaatgtggataaacacagcaacactcatttccttgtatgtacaacatattgtattcatctgtcttcgtcgactaaataggatacataaatgtagggttgtgaacagcttgatgtttgcgattatactgtctttgttcgtgtcactggcatgttcaacaacacatgcatattgcattgttgcgtaaaggaattagcctttgacactcaagcactgccttttcctggcatgcttttttgcaggttgcagagagagccttgttcctatggaacaacgagcac

SEQ ID NO: 288495 - DNA, 289 bp, Zea mays
cttccgcctatacgcgtgcggccggaggaccgcccgtcggacgcccgcatcatgcaacctaccgccgtcgaggaccacttcgcgcagatgggaatctccgagcagcagctgcccatgtatatacaagctcaacagcaggtgccgatccctgctatgaccggcatgtcgccatctgaggcgtccagccgaatgttctctgacgatgataagtccgatcacggtggtggcggaggtcggaaaccacaacctcccaagcaggacgttccgccggttgttgatccaccaatag

SEQ ID NO: 288496 - DNA, 359 bp, Zea mays
cccacgcgtccgaacaaaacggcagctagagatgatggcatcctccctcctctttgttgtcgtcctcctcgcagcgctgtcatcgccgccgccgtcagccgtcctggcggcggacgacgacggcaccacgcacctgcacttcttcatgcacgacgtggcgaccgggagcaacccgacggcggtgcaggtgatcaagggcgcggggtcgtcggtcgtcccggggctggcgttcggcgacaccacggtgatcgacgacgcgctgacggagacgtcgtcgcccacgtccgccgccgtgggacgcgcgcatggcttctacatgatgtcgtcgcagtcgggcatcgtgctcatggtgtgcgcca

SEQ ID NO: 288497 - DNA, 366 bp, Zea mays
ctttcttctcatgcccgtcctccttatttagccaacggaattgaactcttcagaaaagggaagctagagataggcactaaggttgcagagttttgttcacatgctttgcttgctttggatgtccttgtccaccctcgagccctttctctggaaagaacagttcctgcaagctctgggttcaactacactgcacagaaaagaacagtttttggtgctggaacacaccagatctcaccatttggggaccagcctcaagcaatggaggtcgaatacatgaacgatgactggctaatatccaacaacaatgaaccaccagaggttccagtgaacggtaatgctgctgtggtaagtaaagatgtcgtgctg

SEQ ID NO: 288498 - DNA, 449 bp, Zea mays
gaaatctaagagaacttgaccttcaggagaatgagattgaggattgctctattcattggctcagtctatttccagtatctttcacttctttggtaactctaaatttttcatgcctagagggggatgtcaatatcactgtacttgaacaattagtaaccagatgcagcaacctcaagactctcaagctcaacaatgctatacctcttgacaagcttgctaacctccttcgcaaggctcctcagattgtagaactcggaacaggaagattctctgcagattaccatccggatctcttttcggagctatgacgcagcatttgctggctgtagaagcttaagaacgctctctggggcttgggatgccgttccagaatacctgccagcattttattgtgtatgcgaaggcctcacatcactaaatccgagctatgctactgtaccagggcccta

SEQ ID NO: 288499 - DNA, 298 bp, Zea mays
gatttccacaaatacatgactcgcgctgttgaatatgagtttaaaagagttgttggtatcagctggtatctgtggctttttgtaatcttattcctgctgctgaatataaatggatggcacacatacttctggttggctttcttgcctctatttctgttacttattgttggtgccaaactagagcacattatcactcggttggctcaagaggcagcgatatcattatcaaataatacagaggaagttccgaaaataaagccatgcaaggaccatttctggtttcacaagcctgagctag

SEQ ID NO: 288500 - DNA, 608 bp, Zea mays
ggcccatctactggtagaactgttgaagagcaaatcactgggtgcttgaatcaagaagccaagtcaatacctatggccagagaaggtgaacttcccaaagagaagccttttcgatgttcttgccaggagaacatttccagagagtctcatcaaagtgttgttgccagaccaacgctgaattttactggaaagcaggttccgcaattgcacattggttcgagggcatcatcatctttcagcatgtaccaaagaaccagcgcaaagcccaacccctgcttagattcacatgaacatctttcagcggctaaggttgcagcggaatctgctgtcagcctcccttcttactcaacagattgcataagcccctcattacaaactcagcttccttcgccatcaaatcctatcttgaggctgatgggtaaggatttgatggtgatgaacaacgaagagagtgtgcatcctcaagcaccaagttcagactacatcttgagagggaattatgaggcacctgttggttttatgcctccaagctaccaacatctcggtaattctggatttatcagcatgccaccaaccgcagccagtcaccagattcctctaccaagtgt

SEQ ID NO: 288501 - DNA, 358 bp, Zea mays
cggacgcgtggcgagacgcgtgggtgccgagtggcataagctgcaggaggtggaggtccatctgggaagatgcacagatgcaaggaaaattggggattggaaacgcgctctgagggaggctgatgccgccattgctgctggcgccgactcctctcagttgcttcttgccttgaggtcagaagcacttctccgccttcacaagctggaggaggccgagtcgactcttgcaagcttgctgaaactggacagtgcattgccctcatcattgacagcagcaaaactctcggggatgcttgctgagtcatacatacatattgttcaagcgcaggttgacatggcatttgggaggtttgatact

SEQ ID NO: 288502 - DNA, 485 bp, Zea mays
aagtcagatgacaggcggttctacctaattactccagccaagacgctgcagctgagaacagactctgctaatgaacgagcggcttggattgaagcccttgtttctgctcgagctgaatcttctcctgatgggggtttattgactaaccagaatgatgcatcattttctacggagaggcttagaaatcgcatgcacgaggaaggccttggtgaggaaataattaaagactgtgaacagattgtccattcagaattctcacagtatcacacacagatgaaacaacgctgtgaagaatatgtaagctttctcagcaggcttccacagcagtttgaggtacttagcgcagatgataatgctaatatgattgagctccactcgcacttgatgaaacctgactattccagctctggacagggaaaatgtagtgagagcagcaatacagaatcttctgatgatgttgggcaacaggagttggatgaactttt

SEQ ID NO: 288503 - DNA, 331 bp, Zea mays
agcaactagtggctatcttggggcagattatcaagaatcaatggacaggaatttaaatcagctggcgtcatctgaatcatctagttctggtacgaggaattatgttccaggaagcagtgatcctcatagcagtggtttgcggccatattatcctgttgaaagaatatgggcgcttggacttcagtctcgggcccaccctcgtgaaataatggttgaggtcttaagagcacttcaagaattaaacgtcagatggaagaagaatgggcactacaacgtgaaatgcagatggtgcccagggtttcctgaagttaatgacacgttagatgccagc

SEQ ID NO: 288504 - DNA, 328 bp, Zea mays
ctatattttatggtagagaatagcctacttagacaaacataaataggtcgtctgttccacgagcaatcgagcatgcatgggttttactccctccaactagaaaagactcaattctataatagtgctcaaccgaagtatcttaagatgaactagatttatacgacaagacatcagtgtcttttatactaaggccgtgttcgaaacctcacagtaacggttagcagctagaattagctgagtggttcagaacaggccagccaataaaccatataattgttagttatacctcttaaatagctttataacagttgttagctgctctaaccca

SEQ ID NO: 288505 - DNA, 286 bp, Zea mays
cccacgcgtccgaagacacagcaatataatgcttcagttgcaaataaatttccaccccatgttcctcaaggtgctgctgcaaggcctggtaaagcagttggttcggtgctgcagtacaacctctctcaagcatctgctgctgagcaatatgagcagcgaagggctgctaggcacccagcagttgccccaaacaacatcccttctggaagctcataccccagaagaaatcagacctgcaagagcgagacaggcgacactgagaggatggacgtgaaccaagctgggc

SEQ ID NO: 288506 - DNA, 370 bp, Zea mays
cggacgcgtggcggacgcgtgggcggacgcgtgggcgccgcagtgcgcagaacaaccatctgctcgctggcctctctgatccaaggcacgaagccacggtcaaggacacggctgtctctctctgcaacggtgctatcgaaaccttcctcaggacgtcgcggcagcttgccaaggaggcctccagtgctcgcattgaggtaacatcaatggagcgtgtggtggaagattcagacagcaactgcgtgatccacaaggtttcaagcacgctggccgctccgagcaacaggagatttgtactggacgtcacaggcagggtcaccgcggagacggtgcggtcattcctcgacttcctagcacagcggatgtctga

SEQ ID NO: 288507 - DNA, 525 bp, Zea mays
tgctgattctgtgaagctgtcaattttgaatcatccaaagcttaagttaaaatctgagcatgtccgagtcattgatagagccaagttgcgaatatatccagctggaactgacaagctcaaacttcagcttgaactgcataacctcaaatccatccttccaaaagtgattgtgaagggcattccaactgttgaaagggttgttattgatgaagttaaagtcaacaacgcgacagaaagataccaattgttggttgaaggaacaaacctcctggcagtcatgggtaccccaggagttgatgctaggaagacgaaaagtaatcacatcatggaaacgaaccaaacacttggaattgaagctgctaggagatctattattgatgagattcaatacacaatgaaaagtcatggcatgaacattgatcggagacatatgatgctcttggcagatttaatgacatacaagggtgaaattctcggcattactagatacggcattgcaaagatgaaagcagtgtgctgatgctt

SEQ ID NO: 288508 - DNA, 288 bp, Zea mays
cggacgcgtggcaaaaagtaaatattctggggatgaatgtgtaaactgctcgtgcaatgatgactctgatatgggtggagctatgttcagcagcaaagctgcaacaattgtggacgagtacaatcgtctcctggcaagccaacttgaaactcagagagagtattatgagggcctgttgtctgaggctaaaagaaacaaggagcaccagatttctgaagctgctgataaagctgtaagtgataagcttgaagagatgcaacttaagctcgagaagcttattgtggagaa

SEQ ID NO: 288509 - DNA, 429 bp, Zea mays
cggacgcgtggcggacgcgtgggtagttctaagatcgcgagctgccgcccttttttttttttttttttttttttttttttttttttttttttttacatttttttgaaccaacccagatgcatggattttactgctacgcgaaacgcatcgcacacttcttcttttttttttttacacagggacacagacccatcaacgtcaacacaaagatacacactagaagtactagcaaaaaacaaacggcagagcacatcaacctcgtacatctaagctagatagctacaggctcggacatctatgccgacggggtcggatcatacaaaacgtggcgccagtgggcccatggactcatgctgctctcgtcaaggacaaggagtcacgggcacttggtcttgttgccgtgcgtggtccagtcggtgtagcacttgc

SEQ ID NO: 288510 - DNA, 476 bp, Zea mays
ctagaactagggatcgcaaatgatgttaaggtggtcattttcaactttggaggacagcctgccggatgggaactgaagaaagagtggttgcctgacggttggctatgtttggtatgtggtgcatctgatactcaagagctccctactaaatttacattaagcttgcacaaggatgcctacacacctgatttgatggcggcatctgactgcatgcttgggaaaatcggatatggcactgtgagtgaggctttggcttacaatctgccatttgtatttgttcgaagagattatttcaatgaggaaccatttttgcggaatatgcttgagcattatcaatgtggcattgagatgatacggagggatttacttactggccattggaaaccttatcttcaacgtgctatcacacttcaaccctgctatgatggtcccataaatggtggcaaggtagctgcacatatcctccaagatactgc

SEQ ID NO: 288511 - DNA, 604 bp, Zea mays
ttcggctcgagctcatccaggaccttcgccttctcggatgcccctacaaggtcacgcgctccgcactcaaggcccccggcaccccgcactcgtggccggtactgctctccgtactccactggctcaccctcctctgccactcccaaggagacgacctggatgccccgagtggcccatccgacgatctcttgctctacatcacccagtcgtactcccacttcttgtcgggggacgacgccgccgtcgaaaccgtcgacgaggagtacgcctccaaagcccggatgaccggtgaggcgtacgttgcaacggctcgtgccctggagaaggaggctgaggaactggagacccaggtgaataagctcatctcgggtccctcgcggcgggaagcactggagtcagagaaggaggccttcaatgctgatattcacaagttcgacgcagtggtgaatgcttggaaaactaagttcaatgaaagggaacaatcgttgggggatttggagaaagagttggaggccaaagtgtcggacacccagcgcgctgctgctgaaattcaggatctattgaaacaagtggatgctcagccggtgaatgtgaaggatgtgga

SEQ ID NO: 288512 - DNA, 297 bp, Zea mays
gactcaaaagatgtaaaaatgaaagacaaggtagggaaagagtccaaagacgcccacgtgaaagagaaagcagggaaggactcaaaagatttagaaatgcaagggaaggcaggaaaggagtccaaggttgtggaaaagctggatgaccatactttgagcaacaaggaggaatcagacagcgaaactctcagcgtctggaaaaaacgtacagcgaaagccacatagtcttgctttctcagctgacctttcatattaggatgcagatttcacaggcaggcagtcgttcgcgaatgtgga

SEQ ID NO: 288513 - DNA, 455 bp, Zea mays
cgtttcaggatctcaaatgtgcgctcccagttcaaaacgtctgaaaccatgcctcccccaagttaatccggagattgtagttccaaatggaagtgcgtcttcagattgcgggatctgccagattccacaaggtcttgcaaggtcaagaattgttgggtttcaaaacccatgatggtcctgctatttctgcttctcaggcaactgaagcaagaaatttgcagtacagtgatgaacggagtaacaataacttagggatcccaagacttggtgttaggtctccaactggaatccctgggtttccctaccattgctcaggctttggggaatctcaaagattccaaaaggtcttgcaaggtcaagaagtgtttcatcctttccgaggaggatgtttggctgatggccatataagaactgctggcatgtatcaacctgacggtaggcatgtatctggtgca

SEQ ID NO: 288514 - DNA, 542 bp, Zea mays
tgcatttctcttcttagaatcaatgctgcaagcaactcatcccagaacgtggagctcatgctgcaggagagcagcacccaccccgacggcgggagctcgtggtgtttgcgtaccgtggacgtggacgccatccaagtgacaatgagcggcgaggacccttcctacatccctctcctcccgctgggcttcgccatcttcccggccgccaacccttcggctgcagcaaccagcgccgcaggctccggcgacggccaaagcagcccagcaggtaacgccgacgagcccgccagcggctgcctcctcaccgtgggcatgcaggtgctcgctagcgctgtgccctcggctaagctgaacctctcgagcgtgaccgcgatcaacagccacgtctgcaacgccgtccaccagatcacagccgcgctcaagggcgctggggcgagcggggccgctgaaccggcggctgctgcctccgagtagtagcaagagcgggagcagaggagagcagatccatacaccacaacaaaagccaaattgccttccaggtc

SEQ ID NO: 288515 - DNA, 335 bp, Zea mays
agaaagtgttgccccggaggctcaaaggggccaacctgcacaaattggtcttccctatgatgatttggataagatgatacgaaaggaccgggagcccccgtccaaggctgtattctgggcaatatttggagctatatatttgtgctttggaatgcctgaagtctatcgtgtcctttttgaggcatttgggatggatccagatgatgagagctgtcagccaaaattccgccgtcaactagaggatgttgattatgtttcagtggagttcgaaaagaggcagctcacttggcaggatgttgctgcctacaggccgccaccggatgctctttttgctc

SEQ ID NO: 288516 - DNA, 406 bp, Zea mays
cccacgcgtccggcgtgtgtcactttcccacctcccgtcgtcgctccaccgccgtccccttgagcgctcgccccaacctggggacgctcgccccagccgatccgatccgtctcaactccattaaaaaaaatctctcctttccccctccctatccaggaaaaggagaagcacctcggtcgatcttccctccatttactcatccgggcgtcccgattcgatcgaaggcggcggagagagatgaggaagcgtgagcgagagaacccgtgcgggatctgcgggcactaccacaagtacgaggagggggaggtgtgcggcgtctgcggtcaccgcccacctgcagcgtcaccagtaggggccaggcagcaagactcggcgttcccgtccgagatcctcaaggagttcctct

SEQ ID NO: 288517 - DNA, 312 bp, Zea mays
cccgcccgccatcgccaactgctcgcgcctcgccggcttcgacttctcctacaaccgcctctccggcgagctcccggaccgggcctgcgcgccgccggagatgagctacatctccgtccgcggcaacgcgctctccggcgacatagccgccaagctcgcctcctgcggcggcattgacctcttcgacgtcggcagcaacagcttctccggagctgcgccctttgcgctccttgcctcggtaaacatcacctacttcaatgtctcctccaacgcctttgacggtgaaatccccagcattgcgactatcggcac

SEQ ID NO: 288518 - DNA, 307 bp, Zea mays
catgtgatatttaagatgaattcatgagcctaaagaacctccatagttgatgcggttttctgttctgggaccagcagacatcaaaggacttgaacatctattttgatccaacaaggcatccagcttgtgtgtgtgaccaacattatttggagtgttggccaacattctagcgcaactcagcatatacattactggcgattcaatgttttaaagttgtgttctccttgaaaagattgtggcttttggaatttatcatgatgagatcttctcaacaattttcctggacagggaatattcatgctggtct

SEQ ID NO: 288519 - DNA, 370 bp, Zea mays
cggaaacgctaccttgattatctaatcatgtcactatgcagtgagggagaaggtttcagggagatggagccactgcttctacagatattgagaattggctttttcgaaattctcaagcttgatgtacctgcttatgctgccgttgatgagaatgtaaggcttgctaaagtagctttaaggcctggtgctgggaatatggtgaatgcaattctgcgtaaacttgtattgctaaaggagacagactctcttcctcttccaaagatagaaggtgatgatcgtgcccaagctcgtgctctttctataatttattctcatcctgtttggatggtgagacgatggatacggtttcatggaaaagatgaagctctaa

SEQ ID NO: 288520 - DNA, 340 bp, Zea mays
agactatcgatgcatatatttcagatgagagagtaggattagctgagcctgcagaaggaatagagctgtacctgtgccctcctcatgggaaaaccgtggaaatcctctcacggcacttgccaaaggagcaccaggagagccttgctgtggcgggatcatccttcatcggagtcgtcgtatggcggaggcccggcattcccagggcacccacctcccgccacaacaacaggcatgatggttccaagaggcagtcgatcctagggaagccaccggttacaaatccagcagccgcaaggccctccctacctctcaactcttatggtgcgccaccaggctttcc

SEQ ID NO: 288521 - DNA, 277 bp, Zea mays
cccacgcgtccggcctcgccagctccaaagccaccctcctctccacctgcaacggcgccggctccaaaaccatccccgtccgtggcgccggcgccaaggccatctcctccacctgtcacaccggcaccaccagctccaaagccgccgccaccgccgccgccgccaccggctccgctgcagcctccgtcgaactccacgccgacgacgtcctccgcattgggccagctctcgcccagcttctacgcgcagtcctgcccggacgttgagctggcagtga

SEQ ID NO: 288522 - DNA, 471 bp, Zea mays
tagaccccccgcccgctgctaacccaacccaactggctcgcgtccgtctttaactcgcgccctggctcgggctctctctctctccctactctatctctcttcgtctacaagagggacaccgccgcgccacctttcagtccccgtgcgccacgccacctgccagtactagctcgcccgctcgatcgcgcccatcaatcaatcaattctcgacctcactactcgatctcgtctcatcagtgtgagtgtccgagcacggcagcacgcgcaatggacgctctgctcgtgactacgaccttcctcgtccccgtggtggcgctcctcctcgggtccgggtccgggtccgctgcggcgctgccgcgcgccttcttcgtggtcggtgactccctcgtggacaacggcaacaacaactacctgatgacgacggcgcgcgccgacgcgcgcccgtacgggatcgacttccccacgcacatg

SEQ ID NO: 288523 - DNA, 610 bp, Zea mays
gtcggagcaagcgtccgcccacgcgtccgcccacgcgtccgccgcgtcctcgtaccccgcaaggctggtgagcgggttcctctccaatgcggcttcggcggtggtgaagcggctgtggtcgctcaaatccaccaccaagatagcgagcgggggcaagtcgatggtgaagtacgagggcggctacaccgtggagacggtcttcgacggcagcaagctggggatcgagccctactccgtggaggtcacccagggtggcgagctactcgtaatggactccatgaacagcaacatctacaggatggcgctgccgctgtcccgatatagcaggccaaagcttgttgctggttctccagaaggatttcctggtcatgttgatgggaagctgcgagaggcgaggatgaaccatccaaagggatttacagtggatgacaggggtaacatctatgtggctgatgccatgaacatggctattagaaagatcagtgatacaggggttacaactattgctgggggaaaatcaggcagaggagggcatgttgacgggccaagtgacgaggcaaaattttctactgattttgaagttcgttacattggcagtagctgctcgctt

SEQ ID NO: 288524 - DNA, 477 bp, Zea mays
cacatatggcattgaaccagccatggagcactatgcagcctttgtttatgtccttggctgctggggccgttttgacgaggcagagcagcttataggtggtatgccattgcagcctggtgcattagtttggcggtctttgctagacagctgcagcaagcactccaacatggctgtgcggaggcgggccatgaagcatctgctggcattggaaccacaagacccgtccacggacgtgcgggcttcaaacctactatctgaatcagcaaggtggcgctcctctgagaacacaaggctagagatgtttgaaaagggtatgcgcaagatcccggccaggagctggacgtttcatggcaacatggtccactcatttttcgcacgggataaatcacacccacagtccagggacatatacgctggcctggatgtgctaatcctcgagtgcatcaaggccgggtacgagccagacaccacatttgt

SEQ ID NO: 288525 - DNA, 444 bp, Zea mays
cggaccgtgggcccaaccccagcaccgatccccgcccctccgacgcgccggcggccatggacatgtcgtcgatcgccgcgaacctcggtctctcggggccccgccccgtcatccgcaaggccggcgagctccgccgcctctgcgacgtcaacttcgattcttctgtcctcggcatcggcgatgtctgcaaggccatcatctgcctggagatcgccgcgtccaagttacaggtgatatttgaccgggcggaggctgtgcgtatgagcgggatgtctgagaaggcgtacatcagatcattcaattcgctccaaaatggtcttggtgtcaagacgactttggatgtgcgtgaattgggcatccagtttggctgtgtcaggctgatacctttcgttcagaagggattgtcactctataaggagcgcttccttgctgcattgccacctt

SEQ ID NO: 288526 - DNA, 420 bp, Zea mays
cacacgcgtccgcgaggacaagaggaattaagccagcgatcgaagtcgtgtagtgtagcttccgagcgagtcctaccgttgcagccggccggccggagatatgtcgtcgggcggccgacgtggcaggatcagcgacgacgagatcaacgagctgatctccaagctccaggcgctcctcccggagtcctcacgccgccggaacgcgagccggtcgtcggcgtcgaagcttctcaaggagacgtgcgcctacgtcaagagcctgcaccgggaggtggacgacctctcggaacggctgtcggggctcatgtcgaccatggacaacgacagcccccaggccgagatcatccggagcctcctccggtgacccggccatgccgcccaggcgcgcgcgcgcggggctggcggtcttcgattctgcct

SEQ ID NO: 288527 - DNA, 457 bp, Zea mays
atcatatgtatcgaatgtaaactggatgatgaaccgtgcattatttacaagccattgctatctgtcatgggggtttgtctggccatacattatggctttggtccatgttttagctgctcttcgggcaccgtacagcaaagttgtaaaggaagcatccgattcatcttggggtttgttcctggtgggcctcttgttcacatgcactctgatcgagctcgtttcaatgtggaatttgactaaggtggaaattcaactgtgcaatatgctgtctcctgaaggaccgaaagtatctcttgattcatacaactgggggctcgtgttcatcgctgtgttggtagacaacttcctctatccagtatccgcaatccggtcgcatttctcccaatcaatcaactggtctggcatccggtactacttgagggacgggaaaataagcaagctcgagagagagaacagt

SEQ ID NO: 288528 - DNA, 370 bp, Zea mays
cggacgcgtgggtaattaaactactggcatccctccctcgtccctctagggtggggaccttcctggagttcttgccatcagccgaccaccggttccgaattccgacacgacatcgccaaattcctggaggccaaaacgcgatggaactcccagatgaaagagtacaagtagatgcactggagagacacttactagctggtttatcttcaaacgactataatggaagttttgaggatgaggtcctctatgatgcatcatttgcagaaatggaagataattttgtcaagtatcaaattgctcagtggactttattatctctattactaatcgtagcttggggagtaggtgtgctcatgctactttacttacc

SEQ ID NO: 288529 - DNA, 376 bp, Zea mays
cggaccgtgggcgcgcttccaaacgccgccgcgattcggcatcctgctcgcgtgagaagcgctcatccggcattccggctccaaccgtccattctccgccccgcttcgcctttatttcccgtcgcttccttctccgctgctcccgccgcccttctccggcaggattcgacggcggcggcggtctctgcgagcctcctctcacttcacggctgcctggagggcttcccgagccgcggcgatctctcacagctcgccttcctcgtcatcctgcaccgctgcggcctcccgcgccgtcgagagtgagcgacttcggcagcgctaccgctaccaaacatggcatgtagctggagcgggagcccgtgtgagtcggttggga

SEQ ID NO: 288530 - DNA, 313 bp, Zea mays
gtcaattagcggctgcttataagcttgtctgtgagatgattgaaaatggctgcacacctagccttgttacttacaatattatgattgcgctccaggccaaagcaagaaattatgagaatgttgttacgctgtacaaagacatgcaggttgctgggtttcgtcctgacaaaataacttacagcatcgttatggaagttcttggtcattgcggccatctggatgaggctgaggcggtttttattgagatgaggcgtgattgggctcctgatgagccagtatatggacttttggtcgatctctggggcaaagctgg

SEQ ID NO: 288531 - DNA, 371 bp, Zea mays
tgtgtatatgattccgttggcattgcttgtggcacctctcccaatagttgctgctgcccttgctgttggcagtagaagcatggaaaaaacagcggataagttgataggcgacggtaaaacagatggcattgctgatatttcgcagaacaagggtggatcatggaaatggcttcgagctgcaaaagtattgcttgttagtccaattatgggcagtactggtttcacatacttccatattacattactcagatacctgatgccacacctacgcaaagcacactcatttgggttgtgctctccatcgtcgtactgatctccctatctgtcttgtttggctcaccatactcaactggtgttgaatggaaacttct

SEQ ID NO: 288532 - DNA, 293 bp, Zea mays
taacacgcgtccgcggacggtgggcgacgcgtggcagaacctgaaaggaggtctcgtccacctgtctcaccaaaatctccaagcaagaagtcgaatgaagccgtctccccaaaaggaagaacaagatcgaagccttctcaggtgaaatgccaccgtgatgaggtcttgcagatcacagggaacagaataagcttggcaaaacaggttgatgtcagcattatggattgcccaaagcttttgggtggtaactcaaccttcgttccagaaggcaatactgctgcaacagcaagcca

SEQ ID NO: 288533 - DNA, 469 bp, Zea mays
caaatggatcatgaaagagaacaattggagacatacaaattggagcttgaaaagatcaaatcagcattagaagctgagaaggaaaaaatatcagaagagcagaataatctgaaactcacagcgcaagagaggcaggagcatagcttgttgatagcaaaactgaagaaggagattgaggaatacagaatgcgaagaactccctatctgaggaaatggaggatttaaggaagcaacggcagaaatttgaagaagagtgggaacaactagacgaaaagagagccctccttgtagaggaggacaaaaggttgaacattgagaggatgaatttagaacggtggcgtgacaacgaagaaaaaaggttaaatggtaggagcctacagcagtggatgaagactacaagcagcagctggagagtcttgagcgcaaggacaaggctttgagtgatgatatgaagcacaagctaatggaa

SEQ ID NO: 288534 - DNA, 332 bp, Zea mays
ggacctgggcgtcccggccccccgctgcataagtgcctcctctcgcggcccattcccacctccccctcctcgccgctccgggctgaccaagggctcgccacctcccgtgtcctccgactccgacacggaaaggcgaaaccttgggtcggctcgctagtggagtgcagggtacgttgatgacggagctgtggatggaggtgctgccgccgccctacttcgcggggcatgcggcgggcgggtggttcctgccggaccggcgggccgggcccggggcgtggacgctggaggagaacaagatgttcgagcgcgcgctggcgagggtcgactgggac

SEQ ID NO: 288535 - DNA, 332 bp, Zea mays
gagctgttagaactgaaacctgccgacatcttgaaggcttcagaaaatagaggcaaacagagttgcagggtcctgaaaccgagacgtcctatcaatttatgttgataggcctagggtggtattatatagtgatgggtatttttcaccgactccaccggtggagtttactagcagcaacttgaggcaaaaatatctcttgtttacatggttttatctcttgtaaaataagaagtcggatgattttgcgcgaaatgagacggaacgtgctgacggtcgtctgttctgatgaccaacctagcaaatggcaggacagggacaactcagtcccaaaa

SEQ ID NO: 288536 - DNA, 516 bp, Zea mays
gctaaataaagatacttcagaacttatatggagggctaacattgtaaaactacttgatattgtcagagatgatgaatcaaagacacctagtctgatctttgaacatgtcaacaacactgacttcaaagtactctaccctgcgttatctgattatgatgtcagatactatatttttgaattattgaaggcactagattactgtcattcacgtggtataatgcaccgagatgtcaaaccccacaatgtcatgattgaccatgaaaaacgtcagcttcgtcttattgattggggtcttgcagagttctatcatcccaagatggaatacaatgctagagttgcttcaagatgctacaagggtcctgaactacttgtggatttgttagattatgattactcattggatttgtggagtcttggttgcatgttcgcagcaatgatattccgagtggaccctttctttagtggccaggatatttatgatcaattagtgaaaatagctgaggttcttggcacagg

SEQ ID NO: 288537 - DNA, 342 bp, Zea mays
tgtgacttcaaaaatttcgagaagctggtgcttctagtgggtactgaacttcagcacgtcattgctcagttggctttggaagtcgctgaggcaacagcgccttatgttggctcacaacttaaactgcgtgatgatctattttggtttggaaagcctcgggtactctggtggcttatacagttcatttcatttcagaatgcttttgagctggcgacattcttatggtctctgtgggaactcagtgcacatacatgtttcatgaagcactactacatggttgccattcggttgatttctgggctcctagttcagttttggtgcagctacagcacactgccgctg

SEQ ID NO: 288538 - DNA, 352 bp, Zea mays
gcaaagcaaaccgaagccggtttcatatcgcaccccgcaccccgctcctccctcctcctgctccggctcccttcctccacagctcgaataaagtcccctcctcttccagtcttcctcctccgcgctccaatcttcccagcggcacggtttcggttcttgcagggtagcacggaggttccctcgttgggggttcttggtctgccctgagcgatttggtgcgccgcggattgctgtggggttgtgagttgtgactgcagagacaagggccgtgtggacagtcgagccatcgacgtcgacgatgacggaagggaaaaagggggcgcatgggcggccagttgctgggggaagggac

SEQ ID NO: 288539 - DNA, 441 bp, Zea mays
  unsure (1)..(441): unsure at all n locations
agcttccaacgtacgcagcctgctcgtcttccacctccggccatcttcctccctctaccgagcttccctccccacagcagcagaccaccggcgctccctgttcttcttccccgtgggcgcccccccttcatccaggcagcagacgacacacgcacgccaggaacgcccgagctctccatctctaatccagcgcgcagggcatttctcagggtccgagctcgagcaggtgagctcgtccccttggcttgggctccttgtttgctttctgcacgtacgctccctctcccatctggcttcctgcccttctcaagtccggctatccccgncttgctgtggattccatcgagcaaccccacctggccgtcatcctccccagaccgacgcccccattccactcctcccatgttcagcgcctggagcgaacccctgccgcgcctgaga

SEQ ID NO: 288540 - DNA, 414 bp, Zea mays
actagttctagaatcactcccaactataggggcaatctttctggtttgaagtataattacacaaaggtggacgaggctatgaaatactacgagaaatctggattgaacaagaacaggaaagggaagttcccagatagcaattcataccaggacttggtgttccgttttttcgtgaagagagggggcggctctggatatgcctcacctgtcacaattgggtcaatgttgtttgatggtaactctttggtggttcaagatcccttttctcgccatgtcacagccgagatgaagcaaaggctgcttaatgtcagctatgatatctactatgttgggaattggtctctagaatcattccatcgtcgacatatctctgccgagggtctttatgatactaagacaggttccctttgcatg

SEQ ID NO: 288541 - DNA, 324 bp, Zea mays
cccacgcgtccgaattactgaggtcgttgcagttagttctcaagctcgacgcacgggtagcagatgcgtattgtgagaacatcacacaggaggttgcacggctcgtcaaagcaaatgcggcacatataaagtcacagatgggctggagaacagtaatattgctgctctccattacagcacgccatccagatgcttccgaagtcggttttgaggctatcgtgttcatcatgacagagggggctcacctttcactagcgaactatggcttctgcatcgatgcggcacggcagtttgccgagtctagagttggtttagctgataggt

SEQ ID NO: 288542 - DNA, 365 bp, Zea mays
ggcacaatgattctcgcagtctccttatgggtttttggggatgctattggtgtgtctagtgttgtggctgcaatgcttgggctctccattcttctcgttctcggtgtgctagactgggacgattgcttgaatgagaaatcagcatgggatacattggcttggtttgcagttctggttggaatggcaggacaactcactaacctgggaattgtttcctggatgtcaaactgtgttgccaagctgcttcagtcgttctcactgagttggccagtggcattttgtgttctggaggcctcctacattctgatccactacctatatgcaagccagactggacatgttggagccttatacactgcatatct

SEQ ID NO: 288543 - DNA, 483 bp, Zea mays
tgctagaagaatttgacatgcagaaagtaagttggaatccatacaagcattgcttagcattcgtgtctgggaagaaccaggttactgtccaagactttgaggactcagatgctaaagaaccatgcattttaacaaatgatcatcaaacggatgttaaggctgttgagtggagaccaaatagtgggaagatgattgcagttgcctgcaaaggagggatatgcctctggtcggcatcatatcctggcaatgtcccattcatgaaatctggggtcacttcttcctttagtgccttccctagaggttctggtggtcagtggatacttgtggatgttcttcgtggctcttctgctgagctcgttagtgcactttgttggaaacctgatggaagatacttggcatctgcctcatgtaatagttcatctttcacaatttgggctgtgtctcaacggttgggaactcctatacggcgtggattaagcaata

SEQ ID NO: 288544 - DNA, 440 bp, Zea mays
gtaagatggggagagaagcagcgttataagacacgagtagttgagaaatcacctggtgaagaggccggtataaaatcagcaactgttgaactagagggaagatatgcttatggctatctctctggcgagaaagggacacacaggattgtccgtcaatcaccatttaatgctaaagggcttcggcagacaagctttgctggtgttgaggttatgcctcttctaccagaggaatccatggctgtggacatacctgaagaggacctggagataagcttcacaagagctggaggtaaaggaggccagaacgtgaacaaggtggaaacggctgttcgcatggttcatattccaactggaattgcagttcgttgctcagaggagaggagccagctggccaacaaaataaaggccctcagccggctcaaagcgaactgctcggtgat

SEQ ID NO: 288545 - DNA, 314 bp, Zea mays
gagaaacaggggaaatatttggattctgcagattctctaataaggctgacaacagtcatgtcctatttataactgtgatggaaggcgattatggaaaaatagtgtcttggaatactacctcatggacgagaaccggatcaaagaaaataactcgtgaggcaatttcagcttttgctgtgtcacccaacggtgctcttcttgcaattggaacaatagaaggaagcatcatcgtagttggctcaaaagacatgcggacacttgtaacagttaaaaaggctcatcttggtattgttactacgctgaccttctctcag

SEQ ID NO: 288546 - DNA, 363 bp, Zea mays
cggacggtgggccggtgatgaacttcggcatcttgatagttgggtgaaggagaacaagctggaccagctacaatttgctcggcagaaactgacatattgcctatctgtctgctgctgctaccgtattttcttctgaattgtctgacgctcgcatttcatgggccaaaaatggtgtcctcacaactgtggttgatgacttcttcgatgttggtggatcaaaagaagaattagaaaacctgatagcactagttgagaaatggcatgcgcaccatgcagttgagttctattcggaacaggtgaaaatagtattttctgctatttatacaacagtgaaccatcttggagcaatggcttctgcagcac

SEQ ID NO: 288547 - DNA, 454 bp, Zea mays
acgaaccaaaaccctcctctccctcagtccctctcgagcctcgatccgcctccgccccacgcacccgacatcgctcgctacgcccacttcatcgccgcgggcgcaatgagcgcgggctggaggacgctgttgctgcgcatcggcgatagatgcgccgagtatgggggctccgccgaccacaaggaacacatcgaaacttgttatggtgtactatcccgagaatatgaacactccagagatgcaatatttgagtttctccttcaatgcacagaacaattgcctcacaagattcctttctttggagttttgattggtttgataaacttagaaaatgaagacttcagtaaggctattgtagataccacacaggctaacctagaggatgccttgcacaatgaaaatcgtgataggattaggatattgctgcgatttctcagtggtctgatgtgcagca

SEQ ID NO: 288548 - DNA, 241 bp, Zea mays
gtggctgacgctgaagtgtgctccgctccgcctccgcccgcagccgtacgctcccgagctccacccgtcgcgccccgaccgagatcgtccccggcgatggcttccgcggtggccgcttcgaccgctacgcgggtcctgccgcggcttccggacccgtggtggacgcgtcgtgcgcgataagcgctcccgccgccgccgctcacgtggcgggctctcccgttcacggtgtcagccgcgtcgt

SEQ ID NO: 288549 - DNA, 301 bp, Zea mays
gcaagacgaccaaggcggccataccgaggagaagacgatgagcgcccctacaagtacaacacaagcagccaacaaccagctgtccacaagaacgtcgattgagagggtcttctgggcaagctttgaagaccttcccaacgccctcaagtcatgcttcctctacttggctgctttccccaagggcaccttcctgtctaccggcagtatagtgcgggtgtggatggccgagggattcattaggccacagaagggcaagaccatcgaggagatgggccacgactatttcaaggagctggccttg

SEQ ID NO: 288550 - DNA, 415 bp, Zea mays
cggacgctgggtcaggtacaggatgccttccccgctgatgaacttcttccgaagcttccttccagggctgatatcctgctctgatccttcctactgctggctggccggctggcagtggataagtcagtttggccctctgattcagttaggcggttttggcaggaagggagtgagtctaggaagaaacaaattagtctgctgatgtggtggttgttagcttgatgtcgtttaccctgttggtgttaggtattgcagtactgtgtgctatgtgatgcgtttggtagtagttagttgtaggctttgcagtaccagcagctgttcttgtgcttcggcttaagttgtgcaatggctagctgagtagaagtaggtgatgttttcggcaaactggtgagatcatgagtttcagtttactaga

SEQ ID NO: 288551 - DNA, 223 bp, Zea mays
ggtagtagttagttgtaggctttgcagtaccagcagctgttcttgtgcttcggcttaagttgtgcaatggctagctgagtagaagtagtttgggtagtaggttgtgatgttttcggcaaactggtgatggtgagatcatgagtttcagtttaactagagaactgatttgatctttatgccctgtgctttatttaaaaactgtctgccggatgccggttgccca

SEQ ID NO: 288552 - DNA, 336 bp, Zea mays
cccacgcgtccggcagaggtggaggtgcacgccgtggtggcgcaggaaccggaggtaaaggatgtgttggtggccgaggaatccgtggttcaggagccagtgtctgacgcaccggtggcagaggcttcagaggtgaaggagttggccaaggtgcattcggtgcttgaatctgagccgagggttgatgaagggcgtgatgaagtggtggtggtcgacgaaacacctgtagtgcctgaggtacaggaaccagaggtgaaaggcgttgatgctaccgttgtgttgaaggaacaagagaagaatagtggcaatgtggtggccaagactctgctgaagttt

SEQ ID NO: 288553 - DNA, 347 bp, Zea mays
cctttcgatccgccgacggacccagccgcgcgcgccaagtacgacgactccgttcaaaccagcctgtgcaccatatacctgcagcaaggccgtgacggcaagggcccccgtgctttccgcggcgagaagctgtgcagcgagtcgagcttccgggtgaaggagatcaacgagcggtccaagcggtggcaggcggacgggcagagcagcaaggtgagcccaagcaagtcgcagagccagggcacgctggagcggatggcgcacacgacggtgcacgtgtggacggggcgggcgaacccggcgacgtgcagcgcggagcaaggcggcgtggtggggcacgacggcaagcc

SEQ ID NO: 288554 - DNA, 440 bp, Zea mays
caagcagagaacacacggtgacacggaggcagtccgcttgaaagctaagctaaactgctctagcacgcatataaacccttgacaaatcaagagtggagaaaaaaaaacacgaacccactagccctctctgcttcctctccgtttctcctccactcaccactcccgattgctgtcgagtctcgatctgccagcgcgcggcgcgatggccgacaaggcggcgtccccggagaagaagtcatgggccgacgtcgaagaggaggaggaggccaaggccaaggcgaccgcggcgtcctcttcctcctccatcaccgagccggcggtggaggagcaggccaagcagatcgaggcgctctccctcgccccgtcggtggacgacgccgcaggaatgtagggcccgcccctcctcgatgactccgacgactcgcaaatccaagccgtga

SEQ ID NO: 288555 - DNA, 494 bp, Zea mays
ggaggttgcgataaagagaatgatggccactaaaacaaaagaattcatagtggaaatgaaagttctttgcaaggttcatcatgctagtctgaattgattggctatgcagcaggcaaggatgagcttttcctggtttatgagtactctcaaaatggttcactcaaaaatcatctacatgatcctgaaagaaaggggtgttcatcactttcatggatctttcgggtccaaattgcacttgatgctgccagaggactagaatacattcatgagcacaccaaagatcattatgttcatagagacattaaatcaagtaatatcttgcttgatggttccttcagagcgaagatttcagattttggccttgcaaaacttgtagtgaaatccaatgacgcagaggcttctgtcactaaggttgttggaacttttggttatttagcccctgaatacctgcgggatggcctggctgctacgaagagtgatgtctatgcttttgg

SEQ ID NO: 288556 - DNA, 419 bp, Zea mays
ccactctccgtcctgctccggcaagacgcggcacaccgcgcaaggatgccacctagggctgctccggcgctgcgggtgctcccgctcgcgctcgcagcggccatcttctcggggctcaccgccatcctcttctacctctccggcgtctcctcctcacatagcggctctcggctctcggaggcggacctggcggcgctcgccgcgctgcggggtggcttcagcaagtgcgtggatgcaaatgggctaggactgaaagccgtgaccggggaggactactgtcgtgttgtgatacaatacccaagtgacacagtttctaagtggagagatccaatcacccataaggctgaaggtctgtcgtttgagttcgatctgtgtgaagctgtggcctcatgggagcacgtccggaacagtacaacagt

SEQ ID NO: 288557 - DNA, 403 bp, Zea mays
agttcaattggtcttggaggcagtaaaccatatctctgatgaccttgtatctctcgttccacacaaagctggagagagtagggctgtgcgtgtgatctttactaattcgaaagaggataagaatcttctcctgatggatatccagaaattagaagatgaacaacactttaaattccgtgggtttcgagaagttattgatctactatcatcttcacagaagccaatcatatcgtacagttgcttgaatgatctgacaatgctgcgcaccaaattcattgcacctcctccgccaaacatgcatgcatttatgtgttctctagaaatgggcttccctaatgctgttgatatcagccacctgtggaggcgaattggccctttgagagaagcgacgtatatacaagcc

SEQ ID NO: 288558 - DNA, 557 bp, Zea mays
attttgcagagaagagctgccaaattttctttgccaaatagtgatatccgtatacggagtaatatatcttgtcactgtatctccatgtggaagtcctcttctaagatcaagatctccacagcatcaaaatggtagaatgtcaccttctccaattgctagccccaggactacttcgggtgcttcaactcctctgactggtggtagtggagctgttcctttaaaccacctgaggcaaccagcttacagaaacgagggcttcacagtcacatcaaggggttttgatgaccacatacctagccggcttgttgatccagtacatggacgttttattcgggtgcagcaactttctgcgggtcgtcaggagagggtggtctctgaagctgacattctgagctctcaatttggaaagatgagacatgcaaacgtgtgggatccgcatgatagaccgttgccttctgagagatcctctcagcagtgttttggggatcatgcgaactaaaaccttcgctggacttgaggtctggccctctgcaccctgggcgcaaccatggccattg

SEQ ID NO: 288559 - DNA, 520 bp, Zea mays
attcttgaaataggggttattctgggaccagaagtgactctgagaactttgaaattcctagtgtagttataaaagaactcagtgaggctgtgtctgcagctgtgaggttactctcaaagttattgaactttgatcttttcatccgcagcataaacggtgaaaaaatcacttctttgctaagaagaacgctcaaatcaaatttcccccttcagtcaaaggattgtcttgcggcatgcctcattaagctagaatccagagctggcttatcaggagatcatggtgttagtagtatagatatggagataactatctatgagactattccaaggctaattgagcaaatgatgatatcactttcgtttgaaaataaaagaagtgctgtaatagagctcaacaagataatatctggtggtgtgctggaatatacaagagcagtggcagattctggaggcatatttccactggtgaaaatgcttgaagaggcggatggagatgcactggaggctatcttatctatctt

SEQ ID NO: 288560 - DNA, 405 bp, Zea mays
catcggtcagcctcatccatccgcagggcgccggcggcgggagtcttgccggccacatcgtcgccgatttcaccgatccgagctccggcctcttagccatggaatctccacgaactctggaagccctcaccaacgacctcgtggtggagatattcctccggatcggctcccctgccgacctcgttcgcgcctccgccgcctgcgtcgccttctgccgtctcatcgccaacccctccttcttgcgccggtaccgctccgtccacccgccgctacttctcggcctcctcgacccctatggcgatatcgaacccaccgagacaccccatccctccgctgctctcgctggcgccgtcgctcgcgccgctgacctccgcttcggcgagtattttcctagcagcaagttat

SEQ ID NO: 288561 - DNA, 352 bp, Zea mays
agtctacatatgaatcctggtacagcttattaaggaaaaacccaggggcgtctcccccctgtggtccagcttttttatgatgattgtaccagaatatatttatatagcctatatggatgcaaccactaagagtaattaattgctaattttctgcatccatgaagctgtcatctgaattgttctaagccaggtcatattcagagaaatatcaaacccatatgctgttgtttcaaacattaatagtgtaactttcttttttaaagaaaaaacagacactattacgtcatttgttgaacacattataatccagtagggtatttgacactggaccaagattgtttgaggaactgat

SEQ ID NO: 288562 - DNA, 320 bp, Zea mays
gctgctgatcgtcggcgcgccgggctcatgatcggaaggaaattcggaaccagatcccctcactttttatcccatctttggctccggcgagctatgcgagcatgcggcaccaccaagcctgcagccgcgctcaccacgtgggcgctctggtcctcgtctctgccaccttcctcctcacccgcctcttcgaccgcttcctcctcgacacatattcctccgcccccataaaccccggccggcccttctcttccgctgacctccgcatctacgtctacgctgaggacgagatccagggcctccgcgccctgctccggggacgc

SEQ ID NO: 288563 - DNA, 300 bp, Zea mays
ggaagctaaatgaatgtttggacttcatttcttccaaacaactacatcgtggtggaattgattcaccttcaaggcgctctggggctcagtctgatgacattgtaattaaggcaacaggtggtggagcattcaagtatgcagatgtcttcaaggaaagattgggagtcagccttgaaaaggaagatgaaatggactgtcttgtggctggagcaaactttttgcttaaggctatacgtcatgaagcttttacacacatggatggccagaagcaatatgttcagattgatcagaatgacttgt

SEQ ID NO: 288564 - DNA, 468 bp, Zea mays
ctttgagccactgacagttgaggatgtatcaaatgtccttgatttagagcgcccagatggtataatcgtgcaatttggagggcaaactcctctaaagcttgcgctacctattcaacagtacatagaggagaacgaaatggtgtctgcttcaggcactgggaatgttaagatatggggaacatcaccagattccattgatgcttctgaggacagaaaaagatttaatgcaattctcgaggagcttcaaattgaacagccaaagggagggattgcaagaagtgagtctgatgccttggcaatcgcctcagaagtaggttaccctgttgtggtccgtccatcatatgttcttggtggacgggcaatggagattgtgtacaacgacgaaaaactgatcaagtacctcgcaaccgcggtgcaagtagatccagaaaggcctgttttagtggacaaatatctaattgatgcagt

SEQ ID NO: 288565 - DNA, 549 bp, Zea mays
gtgaggatgatgatcccgctggttctgaggatgcatcaacaggacaggaagctgatggggactctgaggcaaatgatcatgctttgagtgatgatgaacatgatgagcctgctgcaaagaaaaagtcttcagatgttaaacaaaagaaagaaacaggttctgatgcaaaggaaaaggatgcaccaggaaaaaaaggttctacgaaacgtgcatcaaagccttctcaaaacagtaaaaatgagcctgaggtagagataaaaaaggttggcaagagagaaaagagttcaaaagaaactgacgtgtcaccagattcaaataagtcaaacaagaaggtttctaaatccaagaaggataatggaaaagaagcccaaaacaacaaagctgccaggaataagaataaaggaaaaggcaagggtggcccaggtgctgggactgccccaaccaatgaacagcttcatgctgttgttagcagcattttgaaggaagttgacttcaacacagcaactttggctgatattctcagacaattagggacgcatttcgaaatgg

SEQ ID NO: 288566 - DNA, 588 bp, Zea mays
  unsure (1)..(588): unsure at all n locations
tgcccactgaggatgagtggacatttgctaaggatgttgtggagaggcttagattgtttaatgacattactacactatttattagtactgattatgtcactgctaacgtctacttcactagaattgctaagattagaaatcagattaggttgtggtcatcatgtggcaatccgttggtagaagaaatgttagtgaatatggtagccaaatttgacaagtactggactgacattcaagggctcatgggcattgcaactattcttgaccctcgattcaaaactgcagtcctattgatatgttatgaggacttacttgttgtgtccggtagtgaatgtgaagatagagttgctaatgtgaagaacttgctagctgatttgatgaatgagtaccatataactgagaatattgagaacaatgagtcatcaacaccatcagttggaaacagtgatgacttcttatctgacattagtgcccgtattgcaagtagaaggccaacaagcatggggctcaaatctgagctagaccggtacttggatgaagaaatggtgaacatgcaaaccanaaacttcaatgttttagattggtaga

SEQ ID NO: 288567 - DNA, 355 bp, Zea mays
ggacaccttcacgggctacggcgtggaggggaacgtccctgagaacaggttccggagctacggcgccggcggcaacgctggcgtcgacaccttcaagaattaccgcgacgacggcaacgtcggcgacgacaggttcacctcctacgccaagggcgcaaacggcggcgcggcggagttccagagctacggcaactcggccaacccgggcagcaccatcttcaagggctacggcgagggcaccaaccccaaccaccacattgggttcaaggagtacgccggcgagaacaacaccttcaacggctatgctaagagcggtgtggacttcaaggggtacacaacaccaccgtcctcagct

SEQ ID NO: 288568 - DNA, 330 bp, Zea mays
ggcacacgaaggtggacgggcgcgggccgcgcatccggatgccggcaatctgcgcggctacgggtgttccagctgacgagggagccggggcacaggacggacggcgagacgatcgagtggctgctgcagcaggcggagccgcggtggtcgcggccacgggcaccggcaccatcccggccaacttcacctcgctcaacatctctctccgctcctcgggctcctccttctccatcccagcgcacctccgtgcggccggcccacgcttcggcagcgcgcagggggacccgtgggagcgcgtcgtgggagtgggactcgggttcggcgccgcgc

SEQ ID NO: 288569 - DNA, 355 bp, Zea mays
ctattaatgaatcgtgtggacttgtctcttcttgttataacaaagggtttgacaaaaacgggagaagattatgcggtaaaagctgctcatgtggagcttgctgagaggatgcgaaagagagatccagctactgcacctactgttggtgaccgtgttccttatgtaataattagagcagcaaaaggggcaaaggcatatgagaaatcagaagatccgatttatgttttggacaataatatacccattgatcctcaatactaccttgagaaccaaattagcaagccacttttgaggatctttgagccaattctgaagaatgccagcaaagagttgcttcatggaagccacaccagat

SEQ ID NO: 288570 - DNA, 270 bp, Zea mays
ggacgctccgcccacgcgtccgggaggaagtcgctctcagctgaggacagatggccagagctgcccgaccacagcgcgttcgacgaggccctcgtcgcggatatcctgggcccggtgttcgacgacaaaccaacagctgctggaactaacggccacggcaagctgccggcgagctgcgacacgagcccagcagcgaaggagaagatcagcaagaggctgaggatcttccaggacatcacaaagacagtgaacaatttctgattcggtttc

SEQ ID NO: 288571 - DNA, 334 bp, Zea mays
aacaacctttattttatgtgcatagttgaataatctatgaatgtgtaatgctgcaaatgaactcacatatgacataaccatttaaagaggtggttattacgtgtgcttgcctccattaatcagagagcattgtctcctaaatcatttttattgtagtgttaatagttgactaacagttcatccaccaaactataatgttttaggttgtagctacgttacctacaagtatcctgagcctccgtacttgagcattgtgcagctcctcatgctctttctccaaaaagtccatttacatattcaccaagaactgagtatatagaacaataataacaga

SEQ ID NO: 288572 - DNA, 506 bp, Zea mays
ggatatgttttaccttgagcaagaacctgggcacctgggcgaccatgaaggtgctgctccggtagcagatagcagattcggcgttattgtgcaggagcagggtgttattgtgcatgagcagggtgaggccgtgggtactctcccaaatgggaacaatggaattggcaatgagatgaatgtggagtgtaaaatggtggtgccgtgcagcaacgagcatcgaatggcgaatgctgtcctagatgtgtttgaggaatgcctgagggaggcaaagagtaatggggttatcaatggtggcaatgtggacgggagtggtgaggaaagcgagctctccaagcggtggagagcgcagaggatggatgagcttgatgtcttaagccggagctgaggttgctggttgagtatgctgcggcggctgggcagtgaagcagagattttggtggttttggtgatgttcctgccacccttttccccttttgtatagaagctaggttcctgtgctatgcttt

SEQ ID NO: 288573 - DNA, 378 bp, Zea mays
atgggcttatcagcatgcagcatattatctcagtctgatgcctttaaaagcttcttggagaagtctacaaaattatctgaagaatgtagtcttagcaaagaaattgttgaaggaaagactgttgcctcggtacctgctactggatatgatacaggggcaattaatattaacatgaatgagttgctagtacaaagatctacttactcaatggcccctgttatgcctacaccaacgaagagtacctggagccctgctgatccttccgtggatccacttttttggagcaactttgttttgccatcgagtcaacctgttacaatggcgacaataacaacaacaacaacgtttgcaaagaatgaggtaagttcaagtgatcca

SEQ ID NO: 288574 - DNA, 306 bp, Zea mays
cgcggccctgagccaccacgactatgcccacgcacaggcacggttccaggctatcgacgcgctgggcggcgccggcgccgccgccgccgttgcagcgggtcaggagcttctccagctcccgcgtccgccgtccccgtacgacgacggctcctcgtcccgctacgacctgatgcgctgatccttctccctttgggcttctggtggagcgcggggttttgatttttgaacgaactctggatggaactcggagttttgaacgaactgctgtatgcttgctatcaaggtctgctggctcgggctcggacg

SEQ ID NO: 288575 - DNA, 150 bp, Zea mays
ctacggttcatggagctatttgatgtatcgagcataaagcatttagcatttgagtcgtctgtatgatagtaacattggtgcatgataacaactcaatactggttcccttaccggtgtcatctttttcatttaggaagaaaaatcatttct

SEQ ID NO: 288576 - DNA, 296 bp, Zea mays
cccacgcgtccgacgcgccggcgctctccgcaccgcacccacccatcgaaattccacttcgcctaattccaaatcgccaaggccgagcagcagcaagcaaagccgcgccggtgaggctggctgttggagaggcatgccgcctaaatccgatagcgttgaaggaatcgtcctgggtttcgtcaatgagcaaaacaggccattgaattcacagaatgcagctgatgcactgcagaagtttaatcttaagaagactgcggtgcaaaaggcactggatgcattggctgacagtggacaga

SEQ ID NO: 288577 - DNA, 457 bp, Zea mays
cccacgcgtccggcttacaagcagtggaaaaaagttcatgtccattgtcaatgatgttttggatcagatcctcccaatgaccatagttcactttggtggagcaattctgaataaatttatccagctttttgatagatatgtagaaacactgatcccgccctcgcctccgccttctgaagatgataatctactggagtcaaaagagcctattgaacttaaagctgaaagtgatgcgcaacaacttacactaattggaacagcatacactgtagcagatgagttattgccagctgctgtatccaagttctttgacatacaagctgagaagaaaggagctggtggatcaagcgaaggccttggccctgggtccatatatgccatggaatacaaagagtggaaacgtaattcgcagcattcattggacaaactgagggatcacttctgccgagagtatgtc

SEQ ID NO: 288578 - DNA, 367 bp, Zea mays
gttgactactacgtaccccttttcttcttggaggtctccatggttacccctgagaagttctgcgagtcgatgcatctctgcaagaaggggatgaagattagcctacccacccggggagggtacttgtggttggtgccaccatgttgttgttgagatgcttatcatgcttgaagaccccaacatgcagctggaagtaatcgacctactcaccagaacatgcagcaaggcgcagaactatgaacagcagtgcaagcggctggtcctcaagtatattccactgattctggtgaagggccagaaattccttgagacaacggatgtctgctctgtgatacatgcatgcaaagcaggcacacaagcatcaatg

SEQ ID NO: 288579 - DNA, 297 bp, Zea mays
ctcggccgcaagttctccgaccccgagctccagagtgatctcgcgtccttcccgttccgtgtcacggagggccccgatggatttcccttggtacatgtgcggttcctgggcgaggagcggacgtttacccccacccagctgcttgccatggtgctgtccaatctgaagggcattgctgaggggaaccttaagactgcggttgttgattgctgcattggcatccctgtgtacttcagtgatttgcagcgcagggctgttcttgatgctgctactattgcaggcctcacgccgttgcag

SEQ ID NO: 288580 - DNA, 296 bp, Zea mays
cccacgcgtccggtacttggaagggagaaacgcaatgaagttcttgccgccatttatatggttcgttctgatgtcagcttgactgtccggcaggctgcgttacatgtctggaagacgattgtagcaaatactccaagaactctgaaagagataatgccagtacttatggacacacttattgcgtctcttgcatcatcttcctccgaaaggcgtcaggttgctggaagatcacttggtgagcttgtaaggaagcttggtgaaagagttttgccctcaattattccaatcctgtcaca

SEQ ID NO: 288581 - DNA, 361 bp, Zea mays
gatgttgatagttgttcggttgaaatcaagaacaatgtctatttgttctcaaccggtgataatttagcattagagagtacagttgctgaattgaagctgattatgattcagatccgaatgtcattgctgaacatctctaatgagactaacgctgaagaagagaaagaagaattatcaggaatacattgtgagaagctagcaattgcttttgcaatttcaaattcccctcctttcagaagcatacggatactaaagaccttaaggatgtgtagccattgtcacatctttgccaagctagtttcagaaaaatacgagcggcagatactaatcaaggagttaatattgtttgcacaagttgagg

SEQ ID NO: 288582 - DNA, 570 bp, Zea mays
cccacgcgtccgagctaatacagaaagtaaccctgaacttcttccagatgctgttacctacacaacattactcaagggtttaggaaatagccgtgacctttattcagtcgtgaagattgttgtggagatgaaatcttcactaatttcaatcgacaggactgcatacactgctatggtagatgctttgctagcttgtgggtccatcgatggggccctttgcatttttggtgatataataaagcatgctggcaagaacaatgatttgagacctaaacctcatctttatctttcaatcatgagagcttgtgctaccagaggtgatgttgatatggtcatgagatttaacaagcgcatgtggctggattcagttggatcaattagccgttccgccaaagaagagacacatgagctattaatggaagctgccataaataataatcagatagatttggctagagggcttctaagaagaatagtaaatgagaaagaatgtttctcttggacaagtagagtaggcctggtcgcagttaaagttgaaagcttatctggattcaccaactctcttctaag

SEQ ID NO: 288583 - DNA, 505 bp, Zea mays
caaatttattgagaagtgcaatagtggagcttcgaaaatgttggcaaagatcaaggtagcgaagaagattagagccacactagctgtgcaaaatgagctgtctgaccctgacaatacaacgcaagatgtgccttttcgaataaatgaggactatggggaaactgtccctacaagttctcagcaacacatgaaacatggcacatataatgattgtcaggcaggtgattttggtactatgcttgttcatactgaagatggggacgaagtgacagaatcacccattttcccaagaacagaattcatacccggccttggtagcatcaattctttcacacatgatccaaagagagcagaacttatttcaagtttttgggcggagaacataggtgatagtgatgccaataaagaccgaggatacagattatggtcctgacatgcaggaatcaaaagtggtctcacctttaactggaacagtgaagaagaatattggtgcagaagggactat

SEQ ID NO: 288584 - DNA, 325 bp, Zea mays
cggacgcgtgggcgtgacgcgtgggcggacgcgtgggttcctcccctcactccatcactcccatgtcaagctccaggaaacccaagactcccatcctcctcgtcttcctcttccttctcgccagggctcgccttctcccaagagttcacctacaagggcttcagcgccagttgccgcggcgggagcccgaacctgaacctgaacggcacgtcggcaaccgagatcttgcccagcggcatcctccgcctcaccaacgagacgtcccggctcttcggacacgccttctacccgaccccgctgcgcttcctcgaccagaagaacggca

SEQ ID NO: 288585 - DNA, 499 bp, Zea mays
ggtggctgtttagaggttactcttgtgctgcatgcatggaatcatttaccaacaaaaaagtccttgaaagacatgtacaggatgtacatggggctcaatacctccagtattcaattctcattcgatgtatgtcatgtaacagcaattttttgaacactgatctgctataccctcacattgtttccgaccatgcccaacagttcaggcttcttgatgtccctcagcgaccaagtggtcaatctgctcaacaaacagaagcgatgagtggtctgcccctttatgatagccacaacgttgaggatgaaaatggctcacagaagtttgtctgcagattatgtgggctcaaatttgatcttctgccagatcttggccgccaccataaagtcgctcatatggtctcaggtgctgttggccacattccactgggccgtgggaagtaccagcttaaccgcggccgacactactattccgctttcaagaaaagtttgcgaccaacaag

SEQ ID NO: 288586 - DNA, 294 bp, Zea mays
cggacgcgtgggtggagagcaggtggtgtaagaaagggttccgaccggtcagattctacgtcgaggatgtccgagtgcacagcttagcagactggtgacgatgaggcgccggaactggggcctagtgagcccccaactccacctcccccgccaccaccacagaaagaggacgacggtgatgattctggttgggaatcagactcgtctgtagcatcctgcccagccacattgtcatcagaggagaggagacggcctgctggatcgctcccacggccagtaagtctaaatgcattt

SEQ ID NO: 288587 - DNA, 321 bp, Zea mays
ggggaagtaaaaaaactagtccccgttccattcccgtggtcgctctcggcctctcatctcgtccgtcactcccacagtccagtagcacctatggcggctagggtttgcgtcggcggttgagaactcacgcgcccacgctacatcgcctccatccccactcgcccaagctccattgcctccatccccactcgctcacagctcgctgggacgtgtcggcagtggatccggagccggtgacgcgatctgcagctacgaaggagagaggtaagaggaagagggacgcctccatcgtctgctttgacgcggtgccgcggacgtggg

SEQ ID NO: 288588 - DNA, 408 bp, Zea mays
cccacgcgtccggggaaggattggactcatggaggattcttctatagaaacacatacagtgattttttcgatacaccagtacaggctgccaatatcttgcagaattttttgaagtacaatgaaacacgtttacaacagttaccatgccaaatttttgagcctattcccctgggagaaggtgctggtgttggaatgatgaaaggggttgacacaatggaaatgcctgaagggtccacattatatgatctcattcaaactgggataactcaaacacatgcttcagttggtgttatggttcgcttaaggaaggagctgtcccttgttaaagacgtgcctgtactatttgccattgatcagtacaatagctggttcacattcagtgacttccaggaacctgtaactgtccga

SEQ ID NO: 288589 - DNA, 305 bp, Zea mays
cccacgcgtccggcggcgccgtcgacgggccgatgatgcacacacctatggcggcatgtccaataccttcaagctgctaatcgtcctcggcttacttgtctgctccattgcgtttgctgccatggcgatcttgaaggcccggtcactgaagaaagccagcgaggcacgcgcttggaggctcactgcgttccagcgcctcgagttcacctgcgacgacgtgctagacagtctgaaggaggagaacatcatcggcaaaggtggagccgggatcgtgtacaaggggacgatgccggacggtgagcatg

SEQ ID NO: 288590 - DNA, 302 bp, Zea mays
ggaccgtgggaccgagagccgccgccacttctagagctcaatcgatcagcgactcagattttcatctgaggatgggtagggactatgaccctatggagattgacgaccagaagcagcaacagctagaagtcaccgctgcggtgccagaagggttcaacactgactatctccgtgtctactacggaaagctcttcccatatggtgatttcttcaaatggctttgctatggagatgatggaaagcaccctggatgtgatcaatcatatgttggacgtcgagagttttcgtttacactggagaat

SEQ ID NO: 288591 - DNA, 325 bp, Zea mays
aacgccactgccactgttgcatccctagaccgccagtatggcctgagcgaaaagatcagtctcggaagggccattgtcggcagcaaggtcaaggaggtggacgagcggtaccaggtctcagaactcaccaagtccgccttggctgccgccgagcagaaagccagcgtcgcgggctccgctatactgagcaaccagtatgtctcggctggtgcctcgtggctaacaagcgcgttcgatatggtaacgaaggcagcgggcgacatgacctcgatggccaaagataaggtggagagggccgaggaggagaggaaagccatcatgtggg

SEQ ID NO: 288592 - DNA, 304 bp, Zea mays
ccaccatttgttatagttctgccacctccaaatgtgactggagctcttcacatcggtcatgcacttacagtggctatagaggatgctatgatacgatggcgtcggatgtcaggctacaatgctctgtgggtccctggagtggaccatgctggcattgctacacaggttgttgtagagaagaagcttatgcgtgaaaggaagttgacaaggcatgacatagggcgtgaaaaatttgtttctgaagtactcaaatggaaagatcaatatggtggtaccatattgaatcaattgcgccggcttgggg

SEQ ID NO: 288593 - DNA, 452 bp, Zea mays
caccaccacggtcactgacgttcacaaaaaaaatcgcacacaaaattcctagaccacgttttttttagtcgcacaaatcctacaaaccaaacagcaagagcggaagaagaaacgaaaaaggttcactggaatcgaccaagaaatccgccttgccatctccgtttcgtatatgccctgagaatttccaaacgaaatttccgagcttttccctcgccgcgcgaccttcgatctcgcttgaaagagatgccccagatcacgggaccggtgtgaggactgagacgccgacctccgacctcaccgaagcattcgattcgtcgcaatcctcgccctcactcgcgtgttcacgtttgtcgggctgccccgggataggaatgcttctgtcgacatgctaagccgcggagccgtgcggttgctgctgtatcgtctccaacctccgcctctacgtttgaatt

SEQ ID NO: 288594 - DNA, 303 bp, Zea mays
ctccacttgctcctgctcctccagacctccactccacccctccaaaaggtctagtaaaatagaaggaagccgcccccaatcgttcggtcgttcctagcccggcgcacggcgcacgaaggggttcgatcggatcggcgccggcggaggcgagatgtgggagtcggtggcgctgacgctggcgggcaccgccggcaataacatcggcaaggtcctgcagaagaagggcaccctcatcctccctccactctccctcaagctcaaggtggtcaaggcgtacgcgtcgaaccagctctggatcagcgg

SEQ ID NO: 288595 - DNA, 446 bp, Zea mays
accgcttgtccgtttcttcctctcccgaagtagcaacgtgaatcgggccaggcttgcggatgccggggtgcggagtagcggggagagggggcgtgggggtgtcgtcggccgcacgccccactccgcgccgcccctgcctctggatgcctatcgctcgcggctacgagaggccacctgagctgaaatattgcacatcatcacaaagcaagtctgtgttactaggagcaggatttggtcgacatgttgctatgagcaatccttatctgctccaaaattccagtagcactacaatggcaagactgcaaaagtctgggcagtttcagcaacttgtcttggacccttcaaggaactatttgactatggcattctacaatgcaaacatgaagaggagaattctgtcgcgggttgagtgtattgtatcttcagaatccataaacaatggttgg

SEQ ID NO: 288596 - DNA, 381 bp, Zea mays
atcgagccctcctcaccccgacgcagatccccagcatttaatcaaacaggcgcacgctatcccccttctctctccgaaatcaaccctcccagctcattttatcccccgctattctagtcgccagacccagatcgctaccctccatcgtttaggagccagacaggagcggctgcggcggcatttctagggttttgttgaaggtctgagctgtgcaaagagagatggattccaaaaagaagaggaacaagaagaagaagggaaaccaagggaagaatgccgctgatgtcacatccattgcatggggaagctgcttctcagaatcacaatcatgagttagccccaatagatcatcataaaggttctgatgcagatgatgtcatg

SEQ ID NO: 288597 - DNA, 245 bp, Zea mays
agccgatccatcctgtcgctggtgcaagccaatctgtccccaccgcacagtttccatcaaaccaacttacagccggtgtctatcctcctgtaggccaaaatgcatttgcaggatctttgccagtgcaaccgtcgtcaacagttcccgctgtggctcctcaaagcactgccgccgcaaacgattcaactccacctccttatccgctcttcccgcctggcctcatccctggaatggttcggaagatg

SEQ ID NO: 288598 - DNA, 287 bp, Zea mays
aagtcttgttcggatctcactgatgccagccttgctgccataggccgtgggtgcgggaggcttgcgaagttcgccatccacggctgtgatctggtcacgccagctggggtcaggaggctagcaactgcgcttcggcccacaatcaaacaagtcagtatcttgcactgccggcgtctgcacacggcagcatgcctcactgctctaagtccgatccgtgatcgcgttgagagtcttgagatcagctgcgtctgggaggaagttgaacagccagagagtgtggccaacgg

SEQ ID NO: 288599 - DNA, 339 bp, Zea mays
cctttttcacccggcgacgtcgagcgagaacggccgggccccaaaagaggccgcattcttggtgctttctgaaccttctttactttgtcctcaaatggcctcctcgctctcttcacatctcccttcaccataggcacaggcacctctccccccctgcaagctcctccctttctcgcctcctgattcttgctctgtcagcccagaggcagagcaagcaagcatcggcggccatggcggcgccaggtcgagcggcgctcctggccgccgcgctcctgttcggcactttcttcccatccgcgtcctctgcgtcctcgtaccccgcaaggattgcgggcaggc

SEQ ID NO: 288600 - DNA, 243 bp, Zea mays
gattcaccacactgaaactgtgacttactcatcagaattggttgacattgcagatgcttctgaatgagatcaggggtaaggcagtcatgttcacgggccactccctcggtggcgccattgccaccctcgcggcgctacactacctctgcatctcatcttcaagctcaccatggtcacctgctgctcctgtcctgtgcgtcacctttggaagcccgctactaggcaatgaggcactgtccatgg

SEQ ID NO: 288601 - DNA, 363 bp, Zea mays
cccacgcgtccggtggacgacggcccttgcatttgctattattgggtttgattaatcaaatgattttaatctgtaattagtgttccaatgttgccaggatcctgcaagtagaggcaccacagttagcatgagacccactgaacggatagcacggattttaatctgtgacagttcaaactaatgagtttgtagggcctgtcggtaaggggttctatctagcttcaagaaactgttgttttcagatttttctaccaagtagttttttttcccgaaaccgtgtctcactaaacactattttttattcagctcatctcacgacaaaaagccttttccctgctatcttctctgagaagacaaacagtt

SEQ ID NO: 288602 - DNA, 386 bp, Zea mays
ggacgctgggcctgggagacgccggaggcgattggcgaagaagctagggaagaaggcgcgcaagttcgcgcgcaagaacctgcagtctgcacccaagcgcaaccgcaagatccgcaaccagttcaagcaccgccgaggaccccgcggaggtgggagcgccggccgggaggatggggacgagcacgtgctgcagcgggtcctcgatcccaccatggttaccgacgatgctgctgctactttgatccacggtttggagtttccagaggacgatgctgaactagatgctgatctgtctgacagtgatggttatctttctgaggatcctggatgtccatactattctgacagtgaggatgagaaaactgccaaagattgtatcatggaag

SEQ ID NO: 288603 - DNA, 319 bp, Zea mays
cccacacccttcaatccgggaaaaaaaagcaacagctcgattgcccgggtcctccaaaaccctcgagatctcggttggtggtgtggtggggtgctcttccctctcgcctccgctccgaagcatcgatccgaactcctcggttactcgcggcacggcgtgtcgagatgcgccccaacattatcacagaggctgggattccaactaggttgaatcagtggtggagcagcattccgttcgttacttctggtgttatcttgatatgtggagtaatttatctgctctgcttgttgattggctatgattcctatgtggagatatg

SEQ ID NO: 288604 - DNA, 600 bp, Zea mays
gcggacaatatggttatgctgattggatttgttttgatgcatcagtggtccgtggccttgcatactacacaggaattgtatttgaggcatttgatagagaaggaaaactgagagcaatttgcggtggtggaaggtatgatagattgctttcaacatttggaagtgaagatataccggcttgtggctttggatttggagatgctgttatagtggaactgctgaaagaaaagggtctcttgcctgatatgtcacgccaaattgatgacatcgtcttccctttggacgaagaacttgaaggaccagcatccagtattgcttcctctctgaggaagaaaggccgatctgttgaccttgtagaagacaaacgtctcaaatgggtatttaagcatgcggagaggatcaatgcgagccggctgatattggttggaaattctgagtgggagcgaggcatggtacgcgtaaaggtgctatcaaccagggaagagtttgaggtaaagacaagtgaactagagtgattgtagaaatgttacgttatgctagcctcggctaatgcttgtgagatgatacaatcaaacagtagctagctatttctggagagtg

SEQ ID NO: 288605 - DNA, 320 bp, Zea mays
ctaaaatcagtcccattccgcgctcctagtggagagtggattcgaacggaaacacctttttgtgccccaagatgcctgtttccgcttcgtttccacgccacaccttttgaatcctttgccgtcacctcgccttttgcagcactagttgtctgtcagccttcttggagtgtggaggggcagagagcgccgtcctgttgattcaggaaaacagtccgagccgatgggcaggaagagcgacggcgcgcggttgcaatgcgctgaggccaaactggcgacggattggacctgctgcttcctggccctgccaccggcagcaccat

SEQ ID NO: 288606 - DNA, 256 bp, Zea mays
ggcatatgttccgtcgtgaaggcaccaattaccttaatatgaactttaatgcgacgattgaaatagtgacatcaaaggaggtgaagatttgtggtgcccttggtccctgcatttcccgttccccgggcccaaggggaacaacgagggcgtgagctcagttagtgataaggaaattggtgaaggtgggacaaattattggaaaactagttcactgagcagcaaaaccagcattgctttccttttccgagttgattgc

SEQ ID NO: 288607 - DNA, 341 bp, Zea mays
tttgacccctctcccttctcctcgaggacgcgcgcccatcactcagccaccgccgccgccggagtgatggattcccgcggattcgattccgccggccgcatcttctccagcgccacagagatctggacggaagagctcggttccagcatcacggcttccaccgcgggggaagctgaagccgccccggcccccgccgccgccgccgaagccagcgaggaagtgggcggagacggaaaacgcaaggagtggtactccaaggctatcgcctactggcaaggcgtggaggcgtcgaccgagggggtcctgggaggttatgggtgtgtgaacgacgcggatgtcaa

SEQ ID NO: 288608 - DNA, 339 bp, Zea mays
ccttactccagctagtgcgagcattgctgtagggcgcgccccgtaagcagtagtgagatgcggcggtggtggtcgccggcgttggcggctgtggagccgcggtccgtgcagctcctgctcctgggcgtcgctctcgtcgcagcttctttctacgccggcaccctcttcggctcctccgcgtcccctgcgctcgtactgcccccttcgcgcccccgatcgcccgattccttcagggccaaagttacagatgttccagtgtttaccaacagagtttctcgtacgtaccgggcaaaatcagtgacagttccagatcacggagttgatgtgtgtcctttggaa

SEQ ID NO: 288609 - DNA, 325 bp, Zea mays
cttgtttttgttgggttttaactctagcccatcgaaatttgcttgggagtaaaaggctctggtgttgttgccgtcaaggttttaaagtcgtccgactaatcgcgattagtcgcgattagtcggccttatcgctagtccgagctcgattagggtctccgactcgactagagcgactaggtagcgattagtcgtcctagtcgccgactaatcgcgattagtcgtccgactaggggttgtcgtcgactagttttgcctgttttgggccactaatccagtctctgttacatgggcccgcccaccaactgtacatcacaaacattgtttt

SEQ ID NO: 288610 - DNA, 351 bp, Zea mays
cccacgcgtccgtttgatttgaagattgggtctatagaaggacgagttggtgttcatcatgtggaagagtctcagcaaggaaaaaactttacattcaagtgtccaccgcgatggcaaatgatatatacgctattagctcgttgaactttcatcctgtgcatggtacattcgctactacaggctctgatggaagtttcaacttttgggataaggacagtaagcaaaggctgaaggcttataataggtgtccatcccccatcacatgcagcgcattcaatcatgatggctctatatttgcttacgcggtatgttatgattggagcaaaggtgctgagaagcataatccttcta

SEQ ID NO: 288611 - DNA, 314 bp, Zea mays
cggacgcgtgggctcaagttgaccttgcaagggaagctgctcatctgagccggtttatctacaacttccgaagtggaaggatgtatctttcccaagacctctctatccacttgttcatcctgctgttttagttgagacttacgagcatggggagagtgtttcacactatgttgatgaccttgaaggacatgatcgaattaaaagtgctctggcccatattggtactcacgcgctcttgaaaatgctactggttgataatttcgtccatgcagatatgcacccatgaaatattttagttcgtgttgcacaaccaa

SEQ ID NO: 288612 - DNA, 541 bp, Zea mays
gtgaaacaagtgatgttgtagattgggaatcagttgtaaacgctccattttctgaggttgcaaaatgcattgcaatcaggggacagctcaacattttggctgtgcggatactggcttttctcgaccatgtaaagaaagctcaagatggaagctttgacctagattggcttagatttgtatcacgtgaaaaagccaaaaaatttctgcttagtatacatgggattggagtgaaaagtgctgactgcatttgccttttgtcattgaggcatagagcatttccagttgatgtcaatgtagctcgcatagtgacaaggctaggatgggtcaaacttcagcccttaaacggtgctgatttccacctaattgacctttatccgatcttggatgatgtacaaaggtatttatggcctcgattgtgcaccattgataaggaaaagttgtatgaactgcactgtcttatgataacttttggaaaggtagtttgcaggaaaaaaaatccaaactgcggagcttgtcctttcagtgcaagttgtaaatatta

SEQ ID NO: 288613 - DNA, 324 bp, Zea mays
catgaacaccgagtacctcagggtgaagaagctccagcaggaggccgcccggtgcctgagcttgcacaagacaatggagctgcagccggagctgtcgctcggccctgtgtggccgggcttcgccgccggtgacctggccgccaagagctcctcgtccgagtctgacggaacctcccggaagaagaggaagcactacaccgccagctgggaggagcctcagcagccgcccgcgagcctggagctccagctcaacgacccactgcctctcgactgggagcagtgcctcgacctccaatctgagaggatgtattacctcaaccggaa

SEQ ID NO: 288614 - DNA, 425 bp, Zea mays
tgcgcttacgctcttgatccctggctgcggtttgccattccgacataataaccactgcaccagccgcttcggttcgcctcttcctactctccatatatctcatcctgatcttcactcatcacctaaccatacgagatctgcatatatagctccatcagatcttgagcgcaaattcctctcagtgcatcccatgtctgcaatctacatgagccagctctccactgccctccctctcatggagggagatcaccaagatcatcatcaccaccaccaaggccacttccaggccttcaccctgccaaaggaaacaccgatccttttcccctttgtgatcagcaatagtagcgccacgcaaggcagtttgagctatggaccggctgcagaccatcacttgttgaggcagcgtcatcaagctatgctggagc

SEQ ID NO: 288615 - DNA, 382 bp, Zea mays
gcctcatcaacaatttgattttgtgtcatgatgcctttgccctttccaggttgtgaaaattgttaggtagtaaacctacaatgaatctaaaggtttgaaaattatactgtcagcagcaaaaacatatagagggatactttgagttcccaaactgctatcctatttttggaggacagaattcccctgttaattttgcatacggtgttcagggctgcctcgttggaaatccattcacagatcaatcaaactttgatgggccatcgaaaattccatttgctcataggatggctctcatatctgaccaaatgtacaagtcatacaagaagagttgccgtggaggagacaacaggcaccaaagcatccagtgcagaaatagtcttga

SEQ ID NO: 288616 - DNA, 467 bp, Zea mays
agtacggtcggaattccgggcgaccagcgtccgcgcttttggagaaggacgaagacgacgacgagggggcgcgccgcgacggtgagggtggaggacgccggcgatgggaggagcctgccgccgccgtcgccgcgacaggtccctacgccggcggtcggcgcgggccgcggcggcagggcgacatcatagccaagggccacaataactacgagctcatgctgaaccagcatctcggcatcaggcacgaagtaggaaagcaaggcccaattacagttgatctcaagtcatcagcattcgacgccaaggagaaagtatggacaaggttccctccggaaggctcgaaatacactcctccacacagttcgtgcggacttcagatggaaggactactgcccgcaagtattccggacgttgcgcaactgttcaaggtcgatgccgcggactacatgctgtctctctgtggagac

SEQ ID NO: 288617 - DNA, 417 bp, Zea mays
ctggtggatcaagaattccgtccctggtaataattgatccagttgaacaaaaacattatatatttcctgaggaaagcgagtatagctatgcttctttacaaaattatcttgacagttttaggaatcgaagtcttccttcatattaccgtggtacctcatcagctataagttcaaaggagtttccaagaccaccttttgttaatcatgatttccatgaggcaaattcgatccctcagttgacagcatttagtttttgtccgttagtatttggacccagaggttgtgattcaaaaagtgaagtatcattttcaaacactgaaaatattgtatctggttggaacaaggatgtaatggtgcttttcagcaactcttggtgtgggttttgtcagcgagcagagctggtggtccgtgagttac

SEQ ID NO: 288618 - DNA, 481 bp, Zea mays
gggagagagagggacgagcggcgcggtctgctggtccgtcggcggcgaccgcgtacgcctcgctgcggcggccgacgcatccgccgcgggcgtggagctcgccctctcctggctcgcaggagctcgcgagttgtttcgggtgcgagttgcttcttagtgctagctgtcgaaggcaacgaggaaaagactgccatggggatttcagctaagtggatcaaatcacttgttgggataaaaaagcacgaaaaagggcgaaatgctgaatgcagcgatgcgaggagctctgctgtccagttgctacgcaaacgggaacattctgttgatacagaaagtgttcctgcggctgaagaactcagagtacaggccgaaccattggcaggtgacacaaatacagaaacaatatcaaattctgcctcctcaccgagcacatctcttcaagcttcccggacctgagcaaaccaaaaggaaaagctcccgtttt

SEQ ID NO: 288619 - DNA, 349 bp, Zea mays
cggcaacctgctcgcctccgtctccgacgacgccttcgacaagctgctgctccagctcctgctgaaggcgtcccaggacaagcggttcgtgtgcgaggaggccgagaaggcgacgcgcgcgatggcggcgtcgattccgccgctgccgctgctgaagaagctcaaggcgtacgtccaccacgccaacctcagggtcagggctaaggccgccgtcgccatctcccactgcgccgcccggcatggacatcggcgcgatgaaggagttcgggatgtcggcgctgctgcagctggcggtggagctgctgaacgaccggctgccggatgcgagggaggccgcccgcagcgtggt

SEQ ID NO: 288620 - DNA, 303 bp, Zea mays
cggacatttagtcagaggctgagtagaggctttaatgatgctataagtggtttcaatgatgatggttggtccgttatgtgtggagatggcatggaagatgttatcattgcttgcaactcgaagaagatcaggagcagtagcaatcctgctactggttttggagcccctggacctggaggtatcatatgcgctaaagcatcaatgttgctgcagagtgttccaccagcagtccttgttaggttcctgagggaacatcgatctgagtgggcagattataactttgatgcgtattcagcttcagca

SEQ ID NO: 288621 - DNA, 499 bp, Zea mays
gcacggtatatctgcccgtctccgttctcacacaaaactgaagcaagtgaagcttttgaagagtaccaggaggtaaataatatcaacgtgacggaatactgggacgccatattgttcttcagatctttgaagctggcacagcttgatatcagaggaaatgcagttgccagcaaggacggcttcagaactcttgtcgtgacgctcattccttgtctaaaatggtttgatggtgaaggtgtcagttaatcggtggagttccacttaggagttgggcaatcttggtagtgtcaaggctcactatgtgaactattttttgctagaagccattgatttgcttcatatgcagtgctgtatttgtttatgcgaatctgagacatgatcatgatgttacagagttctgaattttcaggattgaactgtcataggtcatacaagaaagaagatgttatctatttgcaggttgttctactttcagaattctttaataagtttatttatt

SEQ ID NO: 288622 - DNA, 416 bp, Zea mays
cgggactgccgtggtggtgaagaggatcactttgcgcgtggctcggaaggatgcctatctggcagagttagatttgtttgccaaaggattgcatgaaaggctggttcctttcctgggtcactgccttgagcggctcgaggaaaaggttcttgtgtataggtttgtccgaaatggtgacttgtcaagtgcactgcacaacaagtcaagggaggaagatgaaggcttgcaatctttggactggataaagaggttgaagattgcaacgggagtagctgaggctctttgctatctgcatcatgagtgttctccaccgatggttcatagggatgtgcaagccagcagcatccttcttgatgataaatttgatgtacgccttggtagcttgaacgaggtgtgtcctcaagaaggggaaggtc

SEQ ID NO: 288623 - DNA, 338 bp, Zea mays
  unsure (1)..(338): unsure at all n locations
agcggaaccgnagaacagcgtcgaggagtgaagactgaagaatgcaatgcaactctcccaagcggcggcgggcttgctttgaagcattttgcgagccagcagcatgccagatctagagaagggcctgagcctcctgtactggggcctggggcgctgctaaggctggaagaagtatgttctacagacgaggcgccttctgtcttcttctttttttttttaaaaaaaagaaagttcttccccatggcaattgtgactgtaattaatttctgggtcctgacagcaagggtcagtagggtagcgagtgagtagtgactgagctcgggcttgcttgctagcgc

SEQ ID NO: 288624 - DNA, 629 bp, Zea mays
caaagatgcaatcgcggccttagacgtcatggaccgctacggcctcaagcacgacgccgtcgcgctcaactcgctgctccggcgatttgccgcgtcgagggtcgcgcgcaggatgcgcaggacgtcttcgagcgtaccaaggcaaccatcccacccgacggcgacacgttcgcgatactgctcgaggcatgggagaaggaggggaacgcggtgcgcgccaagagcgtctttggcgagatggtcgtccgcatcggctgggacgcagccaacgtatccgcgtacgactccttcctctccactctcgttcggagcggcctgttggacgaggccttcaaatttctgcaggtgatgcggagcaagggctgcttgccggggatcaattttttttctacagctgtggatctggtcgtccgcaagggtgactacctcaacgccgtagccatctggcacatgatggtctctgaagccggcctcgttcccaatttctcaatgtacagcgccatgattggtctccactgcaatgctggtagcatagacgatgctcttgggttgcttgatgaaatgcccctcaacggcgtctttgcaaattctgtcacatacaacaccatactggaaggattcatcaagca

SEQ ID NO: 288625 - DNA, 342 bp, Zea mays
cggaccgtgggcaggacgcgtgggtttttttttagctggttttcttctaaatatataagaggttcctgtgagtccacatggtagtaaaaactggaatagggacaccccaagttctctgccgtgaaatacaccaatcagaacggctagaggtcatggcaacaatcctgttttgtgcctgagaaggaacccaagttactcgtctgattgcatccattgcagcatcacgataaccatccacagatgcaaaccactgctcagttgctcggaatatagttggttctttagatctccagtcataggggtacttgtgtttgtatggttcctctacaatgagtgaatact

SEQ ID NO: 288626 - DNA, 378 bp, Zea mays
acgagtttggtggattgtgtcgagagagtcagagagggacaccaaagccggctacggccagtccccagtcagcctagcttcgctcgctgttcgttcgtcctgatagcttgaaaccgccatggccatggggctccccggccaccgctgctgccgccttcccgctctcgggtcggtcactccactctgtcccgccctcgctcgcaggcccctcccgcggacctcggctctccgctactcctccctcgaagcccaaggtcctgcgcatgttccttgaggagaggcaactgcacggcgatttcgtcaccaagatctctgacatggtctggaggaggaatggcggcaatgttgatgcggttgaggcgaccacagaccaaggca

SEQ ID NO: 288627 - DNA, 223 bp, Zea mays
ctgatagcttgaaaccgtcatggccatggggctccccggcctccgctgctgccgccttcccgctcgcgggtcgctcactccactctgtcccgccctcgctcgcaggcccctcccgcggacctcggctctccgctactcctccctcgaagcccaagctggggacactgttggggaggaggtcctgcgcatgttccttgaggagaggcaactgcacggcgatttc

SEQ ID NO: 288628 - DNA, 443 bp, Zea mays
gcgtcaaccaaccaaaccctagaaggctctcgccctcgtccccaatccctcgccgccccgcgatccccgccgcccgtaggccaaaaccctacgcgtattgctcgacgccgggtatagacagtgtaatcactttgtcagaaatgccttctgcatccaagtccaagtcaaaagatagatcagctgcaaaagttgcaaaagagcaacccaaggtttctgcaaagccactgggaaatggtacgcttgcaagttcttataacaacctctctggaaagttccatgttctggaaccatcagcttctttgttgggtagccaaggcatcaataaattcaggaataccgatgagatagatgaacattctcgcagctcccatggtacaggggatttcgattgtccctccaacaacggtagctgctctgacgagtcagaagatccaaaggcaaaa

SEQ ID NO: 288629 - DNA, 345 bp, Zea mays
gtttccaaatctggacaaatattataaggttgaggagctaatgttccaattggtctgtgacccgtctggggcggttgtggaagttgcactcaaggaacttgttcctgctgtagtaagatggggagataaattggatcagatatcaagagtactattggctcatatcctggcatctgctcagcgatgtccacctatttcaggtgttgaaggtacaatagactctcatcttcgtgttttaggagaacaagagcgctggaatattggtgtccttcttcggatgttgactgagttgcttccatttattcatcagaaagctatacaaacttgcccctttgcatcagctga

SEQ ID NO: 288630 - DNA, 604 bp, Zea mays
gcgccacatcagtgaacctggcgtgactgaatctgggctggatttgagcattgttgccaacattgttccctgtcatcttgctgtcggtatgtttccctgaaggaagtgatggagatggcacagtttatgctgagggcgatctgatctccttaacattttgcacaactgatgtaactgtaggcctgatttttgtctctgggttactgaacttggtggtagcagtaacatctgcatgttttcttggtgtctttggtccactggagctgtcaactgctgtatgagtagatgtcagatgcgatgttcttccagttttctgacttgagcctgtctctcgtcatactcaatgtggccctctgatttagtcccaagcaaggggtgctcgtgcttcttagaggcctttacagtcagagtcctgatatctgaacttgcacactcattttctggtcgatcaggcacaggatccacaggtgaccgttcctcaacttcgcatggactgtcagcaggcgcagtggtatcctcttcaatgtgttcgtcagattcatcaatgtcctggatagctaatggcagcattctgcatcaattggcggagttccagccacaagtt

SEQ ID NO: 288631 - DNA, 332 bp, Zea mays
gcaggagagaagagagagaaggaaaagtatgacaaggaaatgagagaaatgggagaacagccttcttagcctctccctccatgcatcctctctccaccaactgctatctctcagtagcaagagcaaagcaagaggagagcgagctagcggtaccagggagagtgagcgatgaaggggaaggacgaagaacactgccgaccctattcctagcaacgggccaaagcgaccagcctgcaggaaggagaagcagtgttggcgtgttcgagctggtggtgccaggataaatcgggaggaagtgatggcatcgaattcatcggcggcgttctttggtg

SEQ ID NO: 288632 - DNA, 532 bp, Zea mays
aaccgtcataaatcgagcgggactccatgggccaaggagctgccaaggcgaacgaagcggcggcggcggttgaggaggcagtgcagaaaagccccgagaagaagaatgacgggaagaaggcgctcaaatccagcgacgcagacgcgctcattgagttcatgaggaagaactacgacagcaaggtgaaggatgtgaaggagttcgatgacttctaccacgccatttacgagctcatcgagaaattttgcgaggaacgtgggcagctgcagtacaggataccacccaaggacgagctcaaggaaaagtacgagaggttccacacgggaaaggggcggaacgtgacggcgcaggagttcgagaacatcgccagggccatcctcaagatagacagcttcacgttcggcaaggcgaccattgacaccctcgtcatcctcttcggcgtgcccgtgtgcgcgctcctcaccaagaggatcgtcccgggcctcaacgccatatccgacgacatcgtcatcccggcagccacctccggcgt

SEQ ID NO: 288633 - DNA, 360 bp, Zea mays
atcaggacaggcatgggacttatgacgaatagagcagaaattcgaattcagtttcgccatgtccctggtaatatctaccgtgaacgctttggccatgacatagatctcgacacaaacgagctggttctacgcgatcaacctgaagaagcaatcctgttgaaagtcaacaacaaggtcccagggcttgggctccagctggatgcttcagaactgaacctgctttaccgggataggtacagcaccgaggtaccagattcgtatgaacatcttctactggatgtgctagatggagatagtcatttattcatgcgcaacgacgagctggctgccgcatggaacgtgctgactccgataatccat

SEQ ID NO: 288634 - DNA, 332 bp, Zea mays
cggacggtgggcggcgctgctgaggacactaggcccgaccgcccgaggaaggaagagaaacccgcagagggcgagagaggtcagcgcgattcggagatgggcatgggcgacgaactgtgggacgactcggcgctggtcgtcgccttcgaccgcgccatttccacgttcaatgaaatgcattgcaagagcagtgcgaagaaggaacacgctgctgctcctgcagcagaagaggagcccattactgcaggagcagtggatgcgtgcggagaggaagatgccaactgtgacaacgcacagacagttgagcaacagcagctctctgacgacaggca

SEQ ID NO: 288635 - DNA, 274 bp, Zea mays
tgttgatggaggctcttcgtttgatggcccagatgataatagcttagacatgagcgaaagtgatggacacactcgaaaggattcgaaaagtttttctcgtgaaatcccaatttttctttcctatgctacaccagatgagtttcttgaatcaatgataaaggcagatgctccccttaatgtgaagtacctgagaacattggtacaatgcttatccatgcttggaaaggttgcagctgcaggagctgtgatatgccaacgagtacgccctacaatc

SEQ ID NO: 288636 - DNA, 347 bp, Zea mays
attgaaaggatactcaagacaaaccgtttctctgaactctctgctgatggtgctgggttatcgatggaaagggtgctcaatatgagtgtgcaggctaatgtgaacctgataccgaagcatacaaatgacacagaatccctggagcagttttgcaaggacactgtgatcaccatctggcattatcatggtgggtgccatgtagggaaggtggttgaccagcattaccgggtgcttggagtttcaggtctccgggtggttgacggctcaatattttctaaatcgccagggaccaaccctcaagctacagttatgatgatgggcagatatatgggagtgaagatcctaag

SEQ ID NO: 288637 - DNA, 289 bp, Zea mays
ctgattctccaccacctccgagcttgccagaggaccccacctctttcttctcgcatgcttccttttctttccaaacacaaatgcgcagcaagaaagtgcaaatcagcaagaaaagagcagaattcaaagcagccggaaagctgactagctagaaggcctgaagagagagaagtatatctcggcaacgcctccatggtcttccccccaccttcagtgcaggtctacctagatccacatccacctaattggaataaccatcagcaaggtcagcaaccgagggccaatgggg

SEQ ID NO: 288638 - DNA, 356 bp, Zea mays
gagattgaattcggtgacgaacctgggtacagtttgcaaatcttgctcttgtgggttctctgcaatgttggtagagctgtctaattgctcgatcgaaggaccttcaggcagcgccagatctctcaattccaaccacattgatgagaagtcacagaatcaggctctaatagagtggcgtccccgtgaagcctcagatgatgaaggtgggtaggaaggtagatgcctgtacattcatgtgtgcaattggccaactgttgtagataattctttgtattcaccattgttgcctgtaagactgtaaatgcatatgcatttgttgccttagctaacaatgggagttaagctccccaggaagt

SEQ ID NO: 288639 - DNA, 257 bp, Zea mays
cttaagctccgtatctcgaaaaatccatcccatttgcatgagcattgcttcaattgcctggctgcacagcaggatcttgcgatgcggctcatcttgttgtggctctcgatctgggccgtgtgctccgctgcctcggcgggggctggttcagacatggaggcactgctggagttctcccgaggcatccggcaagacccgtcccgccgccaggccattccctggaaccccaccagcgcgctggactccgacgactgccc

SEQ ID NO: 288640 - DNA, 405 bp, Zea mays
gcccccacgatcttgcgcgcgcgctggactcgcagcctcgcatcgcaagctagttctttgggggcggattccccgattgcctgccattattctggcttggttcttgcctctgtttgggtactccggcgaatcgtctgagttggggactggtcctcctcctcctcccgatggggggctggaaccggtcgcggcatgtgagatggcagcgtgaccgcccgcggcgccctccgctccctccgcctgattacggaccggagcactgctcagtcccattatgggaaagggaattctgcagctacgtcggcaacatttcttggcaaaggttctgtgaaaacaagcggtatgcttcagtagacaataccctcgagcactgggacgattcaggagctcttgagaatttccaga

SEQ ID NO: 288641 - DNA, 294 bp, Zea mays
aggtaatgcccctgctctcttctatttgtctgctcagtgacttttatttttcaatgaactttcctgggtacttttgcttttgtaggaccaggatatccggtttaccactccttatatgatgactacgtatggatggcgaaattcggagatcctgcgttccgtaggcatgtggcagctgctagcatatggggaatgatggctttgaggttggcaaatgaagacatcctacccttcaattacatgtcctatgcaattgagcttgaggcatacacaaaaacgtagagaatgaagtga

SEQ ID NO: 288642 - DNA, 309 bp, Zea mays
aaaaaaccatcaccgccttcccggcgctcgccgctgccacccgtcgccgcgcgcctttccgccacccgccgccgctgttggcgcccaaacatcgcatctgctgttgctttatcccttttattccacagccgctctaagtggtgggtgtccctctatattcgccgcttataggaatcgagggttcgatcggctgtggtgcgtggtgactgtgaacgaggaggagcgcaaagatggctgatttccggacctccacccaacgggagaggtggatcttccagtcgcacgatttgatggagaggtgggcggcgg

SEQ ID NO: 288643 - DNA, 427 bp, Zea mays
gcccagccgcgcgcgcagtccgccgtctcctccccagccgcgcgcgcagtccgccgtattgcacatcacagcccacaggtctacaacaacctgcagctccaccgcggcgtgttctccgtcgatcagaacctctacagggacggctctacgcgctggatggtcgaccagctggccaaggttctcgttaagctcagcgaggtcaacatgctcaccggcgtgtagggggagattcgaaagtatactggcttcctaaaggatcaatgtcggctatctctgatcagaagaaacgcaccttggaagcccttcaacaacagtatactgctgcaaaggctaagaaattgcaagatgaacaggttaagagtcagaagaagagcaattttaatacccctaagcctaaatgtgatgcaccaaggagaagcaaaggtcc

SEQ ID NO: 288644 - DNA, 314 bp, Zea mays
tgagcttgttgagcattttgatccttgccaccccattcttgttggggggattggccttggtgaggagaacacaggattcatgcaggctagtttgaagcgccataggtggcacaggaaagttctgaagacaaaggatccaatcatagtttcaattggttggaggcgatttcaaacatcccctgtgtatgcaatagaggatcggaatggtcgacaccgcatgctgaagtatacacctgagcatatgcattgctttgctatgttttggggacacttgctccaccgaagagtggtgtattagcagtccagaatctttc

SEQ ID NO: 288645 - DNA, 298 bp, Zea mays
gctttccagggcagtggaaagcatctaaagactgcaccagttggcaatggcctcatcgagtaaacagtggtaaaagtgcttaagatgctttccacggccctggaaagtgttttatgatgatccaaataggccaaatcggtatttgcttgcccgagaactcacaagtaggcccgatgcaactgatattgagagaatatttggtggtgccgatgagcaatctgaagaggcaccatcgttgatgaacaatgtcatgggcgtgttcagttccgtgagtcggtttatgagggtcatctccaag

SEQ ID NO: 288646 - DNA, 299 bp, Zea mays
tgttggactgcagcaacaaatcctcacaatatttaaaaagtacgagagctatattgatgttgaaatacaacagagagcagttgagtattttgaactaagcaggaaaggccctgctttggcagatgtgttggctgaaatgccaaaattccctgagcgtgagtctgcacttctgaagaaggctgaagacgctgagattgacacagcagagcaaagtgctatagagctacgcagtcagcaacaaacatccagtgctcttgttgtagctgatcactcccctgcaaatggatctgcaccaccag

SEQ ID NO: 288647 - DNA, 442 bp, Zea mays
gactagttctagcccacgcgtccggggccaacctccatggtcggcgacatctttggccggagctggtcctccgccgcgccctcctctgggttcggcatcccccaggccaacaaccccggccgcgtcagcgatctcctcggctccgcgctcggctcctcccgctcccagtccaacgcgccgctcagatccgccgccgcgccacaggcatccaggccagccggtgagaagcccaatgtcaacgctagcagctctcccttctcgatgggcggcatggcgggcgcgctcccgaaaactacgggagcaccgatgggctccggtggatacggcgttggtggccggccgatgaaacccgtgggcatggccgcgacggctgctgcgcaccgatggggcagcagagggatccatttggctcaatagacccctttgccgcaaagcctgggtc

SEQ ID NO: 288648 - DNA, 305 bp, Zea mays
ggacctgggatcgccatggctatcctcgccgttgcctctccactcaaaaccctaaaccctagccccggggaccacagccgctgccgcctctcctcttccctcctccaccttccgctaccagtgccacgatggcgccgcctccggtgctccgctcagtacagtgaggcggcggcgcagccacgtcgacaacgacggcgcgtccagcggacatacgcctggagcaaggagctctgcaactcggtgcggctcattgggactgtaggcaccgacgtagagctgcggcactgctcacggctccgcgttgc

SEQ ID NO: 288649 - DNA, 316 bp, Zea mays
ctaagtatctgaaggcagcacaggagttgcttgatgagattgtcagtgtttggaagagtgttaaacagaaaacagataaaggcccttctgaagcaggaaagtcagatggaaaagagactgatggggggactaaaagtgagggagtatcttttgatccacaagagtctggtgccaatacagcagctgagctttcaactgctgagaaacaagagctccagaataagatggcgatgacttatgaccaatgtggatgaggtggatcggaagtacaacactattatcatcggatgcaacttgtaatgtcatcgtttgatat

SEQ ID NO: 288650 - DNA, 310 bp, Zea mays
cagacgcgtgggagacccaaaattttttaatccgcatcctattagttctctgtctccgaaaagtaaaatttccgctgccacttgtgttcctgaagaaacaaagaatgttggatccaatagtataaacacctgctgtacaggtgatgaatcaaaacatgtagtgttggagaaccgacaatatgctgttgacaacctaaaaagtggtgacatgggagaaaagatgtctggggaggaaatacccgcagtttcagggaacattgatcaaatgatagagatgatcatgaagaaaaggctgccaatgctactggta

SEQ ID NO: 288651 - DNA, 444 bp, Zea mays
cggacgcgtgggcggacgcgtgggctgttcgtgacggggataaacacgctgctgcagtccctcttcgggacaccggctgccgacggtcatcggcggctcctacgcgttcgtcatcccgataatggccatcatccaggacccgtcgctttctgggatacccgacggtcatgagaggttcctcgagaccatgaaggccatacagggggcactgatagtgtcctccagcattcagatcattctgggctacagccagctgtggggtattttctccagattcttcagcccagtggggatgactccagtggttgcgctgctcggatttggcctcttccgaagaggtttccctgtggttgggagatgcgttgagattggcctgcctatgctgatcctctttgtcgtgctgtctcagtatctgaagaacatacagataaaagaaatccccat

SEQ ID NO: 288652 - DNA, 295 bp, Zea mays
ggaaaactgaggatgagccaaatgattaccctcaagctaacgattctctaccatctgctagcaataattctgttaatgacgacaagttgaaggctgctgaccttgtatttcctgggaaaaagttgacagccatgaagtccagaccaaaagtagttaagttggatgctgaggatttcctcagttctatgatgcctagtgcaaatgttccgaaagaagaccccttgtctggtgttctgcgtgatgtgctcttcggtagtgatgctaaggcattgtcttcacaaaggacttcagatat

SEQ ID NO: 288653 - DNA, 357 bp, Zea mays
gttttatacaccttttctgcgccatcatcaccacagtaaaatagatcacaatttaaagtttgcaacacttcctcctcaaataacttgaatattgctggtgtatacacttttgctgtttgctttaatatttccagtgctgccttcggctttggtgtactttgcgtcgctctaaaatcacaggctttcatttctttgagtggacaccatatcagcagagaatgtgtttctgccatatactaatgcccacaaatatcgtttatcaaaaagtcgttgaagccatttattcccttgaaggttgaatgtggttctctccatattctccagatattcccatcctaccaggaggatcagccgtga

SEQ ID NO: 288654 - DNA, 253 bp, Zea mays
cacaggacagacaaggaacagcgccgggctcgcctttggaagcgagatgtcaggcggcatatcggacgtccgagcggagggggtccggatcgtcaactcggtgcacgggatccgcatcaagacggccccggggcgcggagggtacgtgaagaacgtgtatgtagctgtcgtcagcttcgacaacgtttccatagccatcaggatcactggaaactatggtgaacaccctgacgatggctacgacaggaacgcg

SEQ ID NO: 288655 - DNA, 403 bp, Zea mays
caaaggcagacacaatcaagaaactctggaatgcagacccgaagctcagcaaaatccacagtgactaagggaaaccaccagttatgacccaacgactcccacttcaaatagagagatgcctccagctgcatttcatcaaaggagagaacttctgagctacgagcaactttgttgcctcgatgatgtcaattttgccaatgctgtcatctttggcaacaaaagctttaggcccctgcagtacgaagcttgcagggctgcaatggataaccaagactgtttcgtacttatgccaactggtggtgggaagagtttgtgttatcagctccctgcaacattgcacccaggtgtcactgttgtcgtaagtccgctgctgtcgctgatccaggatcagattgtggcatta

SEQ ID NO: 288656 - DNA, 349 bp, Zea mays
ggcattaaagtacaaaacggctatggccttactgagacttctcctgttgttgctgctagacgaccattctgtaatgttcttgggacagttggtcacccaataaagcatactgaaatcaagatttttgacattgagactggtgaggtccttccagatggttcaaaggggattgtgaaaattaaaggaccacaagtaatgaagggatactataagaacccatcggctacaaatgaagcttttgatcaagagggttggttcagcactggagatgtaggttggatagtacctcatcatgccatggggccaagtcgccagtgtggagggatgattgttcttgaagggcgtgcaa

SEQ ID NO: 288657 - DNA, 363 bp, Zea mays
cggatccaccagggccacgccttcaatggcaagcggaccaaaacggctcgctctcagggccgcaagttccaggtcactctcgaacaagaagccaccaggctccttggcaatctgggatgggcgctgatgcagaaggagaactacacagaggcggagggggcgtaccgtcgggcgctgctcatcgggccggacaacaacaagatgtgcaatctgggcatctgcctcatgaagcaggcccgcgtgctcgaggccaaggatgtgctcaagcaggtacgccccgcggcggttgatggtctgcgcggcgccgactctcacctcaaggcctacgagcgagcgcaggagatgctgcgggacctcgagacc

SEQ ID NO: 288658 - DNA, 287 bp, Zea mays
gggaacactatcctgattcttcagctgatcaatcttcaagcaaggatactgatgaacgaagcaatgagcatgaatgcagtgcaacagcagaatttgttccctcagattgtgatggctcattcttatgcgatgagtctaattcatcaagaaacttgagatttagatgggacttcccagaaaaagatgtcagttattggtatgaagattgtcgtgttgattctggagatactcaattgcagtctagggagaggatcagaaataacactagaagttacaacactgtattt

SEQ ID NO: 288659 - DNA, 280 bp, Zea mays
gtgtgatcccctctcctctccagatcgatgtctgccccggccgtaacccccgcggctcaccgcaccgcacgaaaccgccgcgagatcttggagctcggcctctgacgatggctacgactacctcgccgacctccgccagctccgcacccccccccattaggtgccagaagaagctcgagatcgatgacgataagcagccgcaaagaaagatcccattaatgagccttacaatgtcggtgatgattataatagtgacactgatgaagattcacagtatgac

SEQ ID NO: 288660 - DNA, 378 bp, Zea mays
tagcttctgtttttccttatgaggaggcagccatattatgcggaggttctttgcctagctacatttcaaaggatagcaatcctcgcattgttaagtttggggataaccctggtggtccttgcggtggcactcatgttgccgacatttcaatcatcaacagcctaaaggtgattgttttttttttgccaagctagttttctcacagctggatttcccaggcctgtcaagtttcatacagaactatccactggtcttaaaaactaaggccctgactgtttaccctctagattatataatctagcttaattaagttgagatgtaattatgtaaacaaacaatatatattattaagttatataatataaatatctagattat

SEQ ID NO: 288661 - DNA, 417 bp, Zea mays
tcgaagccggcggctgtttcaggcccataccttcgttgacaccgaggtacatcggtgtgaatgggatgcgcccacttgcagatgcaatgctgcctgagactgatatgattaaagttttgaggccttgttggataagcaaacttgagccgttcaatggtttgtggcgcttgtttgagaatgaaaagcctcgcggtgaatacgatgcagttgtgatagctcataatgggaaatgtgccaaccgtctgctctctacatcaggattgccattactaacaaaacaaatgaagagactagagctcagttctgtctgggctctccttgcagcatttgaagatcctcttccgattccacttcttgattccaatgcagcatttgaaggagcatttgtgagagatgtggattctctctcttggatgg

SEQ ID NO: 288662 - DNA, 311 bp, Zea mays
ggcaatagggtggaagaggcagtggcgttgttcgctgagatggctgagaaaggattgaggctgagtgagaagacatttgctgcgttgatgccagggctttgcgatgaccagggcagggtggcagaggcccggaaggcagtggatgacatggcagagcggaggctcacgccaaaggacaagtcagtgtttctgaggcttgtcacaacgctgtgcaaggctggtgacttggatggggcgctcgaggtgcaccggaagagcgggcagttcaagcatgtgctggtggatttaagacagtatggagtgctgatgga

SEQ ID NO: 288663 - DNA, 410 bp, Zea mays
gctcctcgtcgtcctcctcatcgccgcccacgtcctcgctctcggttactggatctacaggctcgccacggacgggtccaggcagcccgcgcggagcaagatgcactaaggggacggcgcccgcggccggatgtaaggcttgaaaccagtgtgttatttcagtcctgcatccttggcttgttgatctccaagccttccaacgtcagatgatggcgtggaaagttcctgatagaactagaacagggaaccgatcttatccaatggtttgttcagatgttcgtgtcataagtgacgatagctgaatagctgatatgtggaaggaggcccttttgagcataaatagttttcggttgctggataggtttgacatctctcgacctctccgtgtaaagaacagtagctagacagat

SEQ ID NO: 288664 - DNA, 339 bp, Zea mays
caacaaccgcttcgttgctctccacagtctccacgccgccgactcctgccgcgcacagaccatggccggccgccgccgccgccgccgctgtgcgcatccccgtcaagcatggttgttgccgctgccttccccaggagagccctcgcctctggaacccaacactctcagggaagttgctgttgcagaaagcccctccaaaaagatttgccacgccttaagctctaccccctcttcggcacctggccctgatgtttgggtggatctcttggacagcctgcttctccaaataattgtcctcgttagctcattccatgatctccttgctttcattggcacctg

SEQ ID NO: 288665 - DNA, 450 bp, Zea mays
gtggtggccgtggcaccggaggtggtgcctcctctcaaggccgtggtgaaggactcgtgcgtcgatgctgacagcgacgagattggggctgtgaagccgcccaaggagcacgcagcagtcgccgcgcaccagttccggtggctggtgtctcaggtaagctaccctaagctcggggatttgtgttcgttagtcattccatgtgccctgacaaccttagatcattggtcaccagaagttaaggtacagggaatggtaagctttgtacacatagcgaagaatgtgaaagcaacggaattaagtttgtatgaagatgccatacttgatgcgtgctgtcagaacattcctgcagatgatgagttatggtaccaggttattgaggtatctgtgatgttgctgacattcacccagcggagcaatcctcgtagcccctggtatgatcgaatgcttagt

SEQ ID NO: 288666 - DNA, 376 bp, Zea mays
ccggacgccgagggaggagcggcggccggaccgccggaactgtcaccgaggagcagatcattgagtacatggcgaagaaggcgcagaagcaggcagagaaggtggcgaagaagctgaaagcgaattcggtttcaggctactccaacgattcaaacccctttggtgatcccaacctgacagagaagtttgtgtggcgaaagaagatagagcatgatgtatctcagggacagaaggtggacttttctgtcaaatccgagaagaagaaacagctagaaagaatggctgaaatagagaaggttaagaaaagaagggaagaaagagctattgaaaaggcacagcacgaagaggaaatggcgttaatagctagagaaagagc

SEQ ID NO: 288667 - DNA, 281 bp, Zea mays
ctcgaccgttcctccacaccgatcactcgctgctcccctctctcgccggagctccgggccggatggcggcggcagcagcagctcctcccgcctccgtgatcgcgtgatggacgcacacaccgccgcgctccgccgatggacgacgccggaaggccaccaccacacgctcccgtggcggtgaccgcttccgcctccgcctccgccaccgccgcggccacgcctccccaaccctcagccactgctgccgtcgacaggtcctcccccgaccccgacgcgctcta

SEQ ID NO: 288668 - DNA, 290 bp, Zea mays
  unsure (1)..(290): unsure at all n locations
cccacacgtcctcccactactcacgctactacccctggcctaggccacgtccaacagcctcccccaatccgtcctttggcttcgctggcgacggcggaggctggtgaaggcaggaattggtgagcgctccaattcggggattggcggaggctggtgcgcaccaaggcaggaattggcggtggctggtgcgcgccagttcggggaatcggctgcagctcacagaggacacacgacgtgtgtttccttgccgtcggttcggacatggctaccacagatggnaagtgcatcat

SEQ ID NO: 288669 - DNA, 311 bp, Zea mays
agcttttataaccctgtatgtgggccccttcaagatctgcatcgccggcctcgagtgaagagtcgccgtcccgctccggcgacaacaccggcaagacagcccagcgatccccgacaaccagctagccgctgcagcagtagtggccttcttatcgtcgtggttataccgccatggatgagacaactgatgcaagcacttcgttgaaactccatacaagattgagactctgggagtttcctgactgttatatatttgaaccaattgatggcctggctgacttgtacttgtcagttagccgggccagcggaaca

SEQ ID NO: 288670 - DNA, 369 bp, Zea mays
  unsure (1)..(369): unsure at all n locations
agcgcggcatcactgtcctacatccataactgcacctaccagtaatttacctaacctctgctgctttccataagcaagcaccacacagttccatatggggtgccagtttcactttaactgntgnaacaccactccccctcctcttcctcactttgccccccacttctctctctcactacgcgcagtagtatctctctccccacccttcggcacgctgagcacgaacaaggggcaattggtaaggcgcacaaggcctgggctctgatgggagcggaatgaggcgctgcacgggattctctgctcctgggtggtagaggtacggcgagacagcagagaaatcaagtgacgggtgacaagattgttgccatc

SEQ ID NO: 288671 - DNA, 274 bp, Zea mays
gacatgtgaagagtccagtggatcatccgtctcgtcaaccttctccctccaggagagcagcaccggcagctacgtggacaagtcatcatcacctgaggacgccagctcctctgcctggtccattcaggtccatgccacctctgagaagggcgacgaagaagagctgggcgtggaggagctggcagcagagtacactgacgaagaggaggaggaggaggactgggacgaagacagcgatgacgactgctacgatgatctgtgcgaggagataagc

SEQ ID NO: 288672 - DNA, 317 bp, Zea mays
agctaattcaacaactggcggtgttcaaaggatattcagctgcattctgtgctctaaagcttgctggaaagaagttcccatcctcaacaagtttacacatccagcttctaggaatgcagattctacatgagcgcgcacttcatcgagggcatctaaaagtcgcgcaacaaatctgtgatgagtttggggtgttatcatctgctgtttctggagtagacattgagctaaagacagaatttagtgtacggcgtgctcgcactctccttgccgcaaaacagtttagccaggccgcagctgtggccaattctcttttctct

SEQ ID NO: 288673 - DNA, 471 bp, Zea mays
gtctggttacagtcttgccgccagagctttgtcaacatgcttgctgagaagcaatttagggagactgaggagatgaaggccaaggcacagataacttatgcccaaccagacgatcttattgatttctatcacctaaagagcaggaagggaatgagtcagcttgagctggaagatgcagttcaagatgatttgaaggctgcaaccggccaatttactaaggatgcagatgatactgacaagctaaaccgtattcttcagttgacaggattcagtgatcctgtgtatgccgaagcatttgtagctgttcatgcattatgatattgtactttgatgttacagtcgtaaaccgaacgatagaaacactccagaacttatgcttggaattagcaacaatgggtgacctaaaacttgttgaccgtcctcaaaactatacattggctcctgagtcaagcaagcaaattcgagccaata

SEQ ID NO: 288674 - DNA, 392 bp, Zea mays
atggaatttggtgaattggccaaacatgttgaaagcagcataactgggaatgattttacgttccctgttgggggaagttgtgaagatgatgatgtacttacagagtcaaaaataaaggcatttcttgaggagaaggctcttgacctgaaaaagctacaaacacctttgtatgaggagttctacaacactgtgcatggagggagttttcagggagctgatcaaacttccaagggaaaactcccaattagtccaaaattgccccctcgaggaaagtcgcctccatgcaagacacgtgtaggtgcatgtgatacttcgaatgacacagctcctgaaagctgcagcaagcaatttccaagaagcagtgtggtggatagcagccgaattgtgagaga

SEQ ID NO: 288675 - DNA, 264 bp, Zea mays
gtcttacattacccgattgccgcccataagtgaggagaatgaggctgagggtccctatgccgttgtgatggcacctactcgtgagcttgctcaacaaattgaggaggagactgtgaaatttgcaacctatctaggcctcaaagttgtctcaattgttggtggccagtcaattgaggagcagggtttcaagattaggcagggctgtgagattgtaattgccacacctggtcggcttcttgattgcttggaaaggaggtatgctgt

SEQ ID NO: 288676 - DNA, 424 bp, Zea mays
gccggcaagatgggaatggttcgccacttcctagtaccactggtcgcacagcgaggctgcctcctcgaggccacccgtcatctgggtcttctctgcttactgcaaaagaggtctccaaggctgcccggacaacaaccttgaacaccaagcaagcatgcccagcctcagcatcaatctcaagttcacaagaaggtgtaagggtcaagggaaagaaaaaacctgaggagaaaacgacaatggagaaaaagccgaggaaaccaccgatattacttagtcctgccagagaagtggtcagataaataccgccgcctgccgctggatcagcctggtgcccccaccacgctccccccaataagctattgcaggagaagtatgcttctgaccctggaaggtcatcgtaatatgcatgctcctcaacttaaca

SEQ ID NO: 288677 - DNA, 321 bp, Zea mays
ggtagagctgtagtatatattttggcgagtaatcctgcttcttgctccgttcccgtgctagtgctggcgtgagacgcgtgacagtggaaaggcttactgtggccatggtattggtgtgacgaacccgtcaaggttttgcgcaagatgtggaagcagctcctcagcaagctgccccggaagtcgccggcctgcggggattcgggccagtgcagcaatggcaccggtatacagcgcacgagcagctgcgggagcatcccgcccggccgcccggcctccgccatccggcgcatgtcatccgccgtcttcccctcgagtgtcgtg

SEQ ID NO: 288678 - DNA, 397 bp, Zea mays
cacgagtcatggaaggagaaaacgaagagtggaatattttgttttaagtacaagctgctgcgagagccaggacaacctgatggggttgcaatctggaagatgtcccagaaatgggtacaaaatccactgactagaggcagtgttttaaatcctgatctatcatctggtgcagaaaatcttccagtgtgtcttgttaatgacattgacagtgatgaagtgccacaccatttcacatataccactcaggtcgaacacttgaaaccactcagttctgtgaagcctttacagggttgcagatgccttagtgtttgtctgcctggtgatgccaactgctgctgtgcacagcgtaatggaggcagcttaccttacagctcatcaggactgcttgtatgccgca

SEQ ID NO: 288679 - DNA, 456 bp, Zea mays
gttgtgccagaactaagtgcctttatttgcctcataaaggggctaatcaaagtaaataagtggaatgaagccctgcagttgtgttacagcatgtgtgatgagggtgtgaactggcagagcaacaactcttttgatggaggctagagctttgttttcttacatggttactccagatgaaagcattgtcccataagagcttattttgattggggtgatttggttcaaattcaaaccaaagttattttaatgattcctgttccgaacatcgctctagggagtcattcatttctgacatcttactggaagattacagtatgaagtggttaccaaggagatacggattaaaatgtgcttttgtgcaactcattgatggattgggaaaacagcactatgttttgattaaaactgtatatgttcatatataacctttctgggtgctgaaggataaagtgaaga

SEQ ID NO: 288680 - DNA, 267 bp, Zea mays
atccttttcaagtgatgtttctaggcagacttgcagccctgtcgaacagctttcattgggtaccatgcttgggatagctttcatcactctacagaaagttgcagacatgtctagctggccacacatgttttgtcttgtatggattgatggggtattaagatatcttgaagtcttaggaagtgcatttacattgtctgagctcaatatttcaatagaactgtatactcagattataaatgctttattgagggctgttggtaaatgcat

SEQ ID NO: 288681 - DNA, 332 bp, Zea mays
gacgaggaacccagccagatgctcagtcctcaggctgctcacagttcgtgctatccgctcgcgctcccggtagtctgcctgctcggcaattcggcatggcgctccaggccgcgacgtccttcctcccctcaggccctctgcggcgcgcaaggtaggggtcgtcggtgaaggactcggcgttcttgggtgtccatctcgcggacgatggcctcaagctggagaccgctgctctgggcctacgcaccaagagggtgatcacgtcggtggccatccgcgcgcaggcggcagcggtgtcctcaccatcagtataccccgcgtcgccgtccggcaag

SEQ ID NO: 288682 - DNA, 329 bp, Zea mays
ggcagttttacccacgtccgtcaccttggtgctcatgtattttgtggatgtccacaatccacatgaacggtatgagaagaaattcctagacgctttctccctcattgctgttactgttgctggatacttgatgattctcataatctatggtcaagttttcccaataagctcagctgtgcagagcgtttggttttcgtgtgtactcctggctagctatgtgatgtctgccaatagctgtgtgctgcaaaggcccaggacgccagaatcaatagctcatcaaggatcaatctcagaacaaagggctggactgctccgcaaagaggtcacag

SEQ ID NO: 288683 - DNA, 480 bp, Zea mays
aagcaaacccacaaattccaacacccctgcctctaccgccgctgcagcttcggccagcatttctcagcagcagcagcagcaccttcagatgcaagcgcaacaaaagcaccagcagcatcagcagctaattcagcatcaccatctgaatcggcccagatctgctgcaccaagtacacagaacagcgcaggtgggtaccaagaccgtataaacatggctaattttcagaatatgatgtacccatcaagtgctgcccaagggagagttcaatccccccagttgaaggcatcctcagggagagggacaccttcatctactgctaccactccccctgctgctagcaccccctaatttgattgtgatgaagacaagtagtctccacccgcaacaagcaaagattcctatgcaggctctctccactcctggtcaccaatcccagagttctctaagcatgagttcatcaaaaatggctcctgtaacta

SEQ ID NO: 288684 - DNA, 315 bp, Zea mays
gttccgaggaagatgaaagtgatgcactggcttttctttcagccatcaacaagcctgacacagagttaatagaaaccgtgatgtgccacttcagggagaagttcgaaaatttaccagagaaggttaacgggatagaagagcaacttcttcaagagttttccctggatgattcgtttcctcttggtgctccactattcatggagatgccacactcttgttcaatgtatgcagaaaaggatgaagaatgttttgacgaggacactgttccttctgagctagacgatgacgacatcatctttgagcatagtgggtctc

SEQ ID NO: 288685 - DNA, 445 bp, Zea mays
cccacgcgtccgatcagcacatcgatgccatcgagcggctctgccatgagcgcgccctcactgccttcggtctcgaccctgcctgctggggcgtcaacgtgcagccgtactcgtgcacgtctgccaatttggctgtctacactggtcttcttcaacccaaggaccgcatcatggggctggagccaccgtcgggcggccatgttagccatggttactacacgcccagtggcaagaaggtgtcaggtgcctctattttcttcgagagcatgtcgtacaaggtgaacccacagactgggtatattcattacgacaagctcgaggagagagcaatggatttccacccgaaaattctcatatgtggtgggagctcttaccccagagagtgggactttgctcggatgagattggttgctgataagtgtggtgcagtgcttctttgcgatat

SEQ ID NO: 288686 - DNA, 330 bp, Zea mays
cttcgccacgtggtgggcgctgaacgtgatcttcaacatctacaacaagaaggtcctcaacgcgttcccgtacccgtggctcacgtcgacgctctccctcgccgccggctccgccatcatgctcgcgtcctgggccaccaggatcgccgaggcgccccacacggacctcgacttctggaaggcgctcactcccgttgcgatcgcgcacacgatcgggcacgtcgcggcgacggtgagcatggccaaggtggccgtgtcgttcacgcacatcatcaagagcggggagccggcattcagcgtgctcgtctccaggttcttcctcggcgagca

SEQ ID NO: 288687 - DNA, 265 bp, Zea mays
cccacgcgtccggggccacaaccgagtccaggtgatggcacagcagatgcagtgatatcagaatatgaaagctaatggctgattactaactgtaactccacacctagttcctgtttacggctcctttcttctctttggtcgtttttcttaggcctgcgcatgtataaaggctgtagtgttgtcaacgataacgaccacttgaatcatccctttcggcggctattctgattttctgaatgctagcaataatatcagatgaccatca

SEQ ID NO: 288688 - DNA, 332 bp, Zea mays
catcggcgagcctgcagtcagacttaccaccaagtggacgcagcagctttaaccccccaaagcctcgacgccgcgagcacagctccgccgccaccgcccccttctcatccgcggtctcctccgcctgctgcatctctatcgatctagcgggactggctccttcccgtgctgggtccttcgtcaatcgtcagcgcgcaagatcggcacttgtgtacatctgagcagtttccggtgccctaattcaggcgcgggcgttgttgggttttcgataattttgggggttcacctgaaccctcatgacccaggtgaagcccgcccctgggggaaggatg

SEQ ID NO: 288689 - DNA, 288 bp, Zea mays
aagatatcaaccttgtcaagatgctcatacttatcattcagcatttccggaggcatatagcgtgaatctccatcttcaattgctagactccggttaacaagtgtagcacagccaaaatccccgagcttataaataccatttctgacatatatgttatcaggcttcacatcaaggtgtgctatgccacgttcgtgcatgaaatccaagcctttgcagatctgatacaacagttctagggcttccccacgcttcactggctggttccgattcatagatagagagcggtcg

SEQ ID NO: 288690 - DNA, 370 bp, Zea mays
ggaaaattctttcatgttagatgtgcaaatcatatattgaatctagttgctagagatggattatcatgccttggaaatgtcattggaaacattagacaatttgtaacaattatcaaaaggtcacctttgcagttggaggcatttgagaaatgtgctaaagaatgtggtctagaccctaaaaagaccctttccttggatgttgctactagatggaactctacatatatcatgattagagatgccatttactataagaatgcttttgatcgtctggctaaaaaagataaggacaaatatggtcacatcaatccttcaagcactgattggttgaatgcaacaaatattagccagtggtttgaaaaactctatg

SEQ ID NO: 288691 - DNA, 351 bp, Zea mays
cggacgcgtgggccagaattgcagccacctttagagaagaaatagaaaggattatcataaaagagttcaagagtgaaataaacatagaattgcatggttatgagattgagggtggtatgaagcaggaagtttgctcaataattcacaatgaggctattgctagagcaatgtcaaacattgattctttgttgttgaagtacgaggagaaaaagggtcatgctgaagaggaatctctacataagcaaaagattgaaaaactgaaacttgttgtggattccttcactgaagtattgagtgaaaaggagaaatttgtatcacagattggattggaagcgatgcagactcgcgtgg

SEQ ID NO: 288692 - DNA, 377 bp, Zea mays
cccacgcgtccgcgcttgtttagatagaaaggtctacatgttcattcaactggtaatcaactgtcttcctactagattcaacggcaccctctaataccttggatgctctttttcacttgtcttcctactagattagattctgggacctgagtcaatgtttgtgagactaatatgtcaggctgctatgggaaccaaactggaggcctctcttctctcctaggaatgaagttggagcaagaggcttcgtgcggaactgaaaatttgttagcctttaaatcattagaagtattatttccttacctgtaggcttaaccgctctacagttaatctaataatttgtaggaacaaaatgaagtacaatgcttgctggcgggatt

SEQ ID NO: 288693 - DNA, 327 bp, Zea mays
gcggcgtggtggggcacgacggcaagccgcactgccaggtggacatggggttcctgggcacggcggggcgtgacccgctcttctactcgcaccacgcgaacgtggaccggatgtggcacatctggtccactaggctgggcggtaagggcttcgacgacccggagtggctggacaccagcttcgtgttctacgacgactaccggagcccgcggctggtgcggatgaagttccgcgacgtcctggacgcgaccaggctcgggtacacgtacgacaaggagtcggaggcggcgctgccgtggctgaacagcaagccgacacggttctccg

SEQ ID NO: 288694 - DNA, 638 bp, Zea mays
gtctggtttacttctcatttcattatatttttggaccagcttctctctgatgcagagactgtcaggtggcttaattacgctgtggaaaagatttggccagtttgcatggagagggttgcatcccagcagttcctgttacccatattcccgtggttcctagagaagttcaaaccgtggacagcaaggaaagcagtaatccaaagcctttacttgggtaggaacccaccgatgtttacagatattagggtagttaaccaatcaaccgatgatgaccacttggttctagagatagggatgaattttctttcagctgacgatatggatgcaagaatggctgtgcaactaaggaagagattaggatttggcattacaacagacatgcatataactgggatgcatgttgaaggaaagggtttgtgtgcaggttctggtaggggtgagatttctgcggcagtggccatttattgggcgtgtaagagtatgctttgttgagcctccatacttccaaatgacagtgaaaccgctgtttggtcatggacttgatgtaactgaactcccaggaatttctggatggcttgacaggatgctggatgttgccttcggacagacacttgtggagcccaacatgctagtaattg

SEQ ID NO: 288695 - DNA, 425 bp, Zea mays
ggactgattattcaaaagtcagtatcaccctcagagcttatatgagttgtctggatcatggacagactttgaaaggtttgataactatggaactgcaaaggaggtggtttcagaatggtcccaaatggaggaaatgaatgagaggctaaggttctttgttgaagaatgtgaccatatccagggtatccagtttcttgtggatgattctggaggctttgccaatgtagctgcacagtttttggagagtattgttgatgattacacaaatacccctgtaatgctgtattgtgtgcggaatccagactcctatgggtcttccagaaatcagcgtgaaaccatcataagatctttgcatgatgctgtatcgttgtcaaaactttcatactactgcaatctgatggtaccaataggactgccttctctaa

SEQ ID NO: 288696 - DNA, 371 bp, Zea mays
gtaactatcatgttctatagttgttgattgagtaaatatcataaatggagattggtcgcttaaattaatcatcttgaataaatgttcctcattatccttattagttggaagcatatagcatcaataggtttattccagttgtaatccgagagctatatagtgggaagtgcatttaggcgcttaaagtatcttgcttctaggttatagtcaaatgagattatgtaatatttgatgatgctctacttgctaggtcaaatagtgtgatgtgttagctatgctagttaatccgatgaaatggattgtttggctaagttaaaatgagaatcaatcattagcaattataggagaattgtagtactttccttaagatt

SEQ ID NO: 288697 - DNA, 340 bp, Zea mays
caacgaggtggctgtgacccatgttagtagtgattattttcaaaaaggatcaatgtttggggaggaaaatgtgaaccaggcaaacttgagtgctgctgcagactggatgctgcctgagcaggtcccatcaataccaaatggtatgtcaacatcgtcagtagatgagagcaccatagttttaggttctcagccatcaaccaatcagagcttagactggggtggtactacatggagtattggccagaatgccagcgtgtatagcaatgaaaaagcagagccctcgagtaaaagctattgtgaagaaccaaggaagcaagaacacgccaaatccagtgtttct

SEQ ID NO: 288698 - DNA, 264 bp, Zea mays
cggacgccccagcaccagcctgcagtggtggcgtgctcctcgcctgtgcctgagcactcatctgtggagcgcggtggttgtgcttgtgcatgcctgtgcacttgccttcaaggcagcggtccagtggaggttgcgacggtggcggtgctgttgtggcgcggcgtttcaggttcacaacggaggttggcaaggcgccaaggcctcacgctggaggtacgacgagcggtggtcaaggctagcacgaagctaattctaacctttatc

SEQ ID NO: 288699 - DNA, 315 bp, Zea mays
acaagatcttgaaggcaaagaatatgagaatatagataatatacaagcagaaaatcaagttgaatttgacgaaagaaatcaacatggtggcagcgatgtttacatgcgcgatcagagaacagaggaagctactggttttattcccaatattgatgagtatgatcagaacagtgctgttaggtctaatggattgggttctcgccgaagcgcattgcctgctagtggaggtaaagagtcattagtactggggtacgtaagaggagcttctgaagtaagaagcagaagattgatagcccgagggccacatgctggttc

SEQ ID NO: 288700 - DNA, 203 bp, Zea mays
gtgtcggcgcactcgcccgatcacaagcgcccctctcagcagccgggtgtagtccccaatcgccgggttggcgacaatggttccagcgccgtggacagcctcttcgaggaagcgggcgcggcgaggccaccgcgtcaccccagcgacgcgctgaacaaagggaaggagtcggtcgtcgatgtggagagcgtggagtctccaaa

SEQ ID NO: 288701 - DNA, 721 bp, Zea mays
caaaatgtcgctttatccttcttgatgtcattccagtgggggccattgtccttgcagtaacaacactccttgattggtggatgtatggttcctgggtcatagtgccgcttaattttttgaaattcaacttattgtcttccggaggagactactatggaacacatgtcttccattggtactttacacagggttttccatccatgatttggacattcttaccatttgcattgtgcggtattgtaaagtctcaggaatggaggctttcaggtctaattgcttgggtattaggggtttacagcattcttggacataaagaattcaggtttgttcttccagtgctacctttagcattgatgttctcaggttactgcttagcttccatgtcacggtccaagggcaaaaatcagcataggaaagatagtctttcaaggatgcaaccttttgttattcttctcgtcataaccaacgttcccatggctttatatatgtccttattccatcaaaggggaacagaagacgctatgtattatttgtcaaaagaagcccatgatggaagagtgaggagtgttctctttctcatgccttgtcattcaacaccttactactcaaccttacattacaatctacctatgcgttttttggactgcactcctagtgatagcaaagggaccttggatgagtcagatcgtttccttacaagtccatctgagtttgtcggcga

SEQ ID NO: 288702 - DNA, 266 bp, Zea mays
tatccttcccttcctcgcgcgcggtcctccgatcgaactgccggacccgagcggaggagagcagggccctcccgagggccctcccgcgcggcgaccccgtggcgttcctgcgaggctgctgctcgttcgggtcggcggggcggaagcggcccaaggcctcgcccttgccctccccaccgcgcctgtccgccgctgcagcggcagcgtacgacggggccaagatgaagggcctcttcaagaccaagccgcggacgcccgtcgacatc

SEQ ID NO: 288703 - DNA, 309 bp, Zea mays
ttgctggaccagcgcttgtcgaccgtgcctcagcaccagtggatcagcaagctctttggctacgacttccccgtcatgtaccgtccaggacgcctcaacgtcgtagcggacgcgttgtcccgccgcgacactgaggagggcagcaccagcttcgggtcggccttatgcgtgcgctcggggccgtctttcaccttcatcgacgacatacgccgcgcgacgtcgcacgcggacgatgctaaggatgtgcgtcggcgcttcgaggcgggcgagctgcagggcccatggcgcatcgacgacgggctactactc

SEQ ID NO: 288704 - DNA, 295 bp, Zea mays
ccctgttcgagatagaatcgatctctatcttaccagatttgaagatatattcggacttcggagattagagctgcgcagatagccatggaagacttttgtgcggtgtgcgcagatacgctggagtgggtggcctatgggtcgtgcgggcaccgcgacgtgtgctccacatgcatcgtccgcctccgtttcgtgatgggcgacaacaagtgttgcatctgcaagaccgtctgccccttcgtctttgtcactaaggccatgggtaaatacactagagtgatcactgatttctctgtgg

SEQ ID NO: 288705 - DNA, 276 bp, Zea mays
cccacgcgtccgcttgaagaagctcgtcagcttgggcataattatataggatctgaacacttactccttgggctacttcgtgagggtgaaggtgttgctgctcgtgtgcttgaaagccttggtgctgatccaaacaacatccgtacccaggtcataagaatggttggggaaagcacagaagctgttggggctggagttggtggaggaagcagtggccagaagatgcccacacttgaagaatacggtacttttttgacgaaattagcggaagatggc

SEQ ID NO: 288706 - DNA, 434 bp, Zea mays
cggacgcgtggcggacgcgtgggcggacgcgtgggctctagggaatggcggcttgggtaggcttgcatcttgctttttggattcaatggcaacattgaatttgcctgcttggggctatggcctgcgttaccgatatggactgttcaaacaacacattgccaaggagggccaggaagaagttgcagaagattggcttgataaattcagcccttgggagattcccaggcatgatgtggtgttccctgtcagattttttggccatgttgagattttgcctgatggctctcggaaattggtcggaggagaagtcctgaaggctttagcatatgatgtgccaatccctggatacaagacaaaaaatgcaatcagtcttcgtctttgggaagcaaaagctactgctgaagatttcaacttatttcaattcaatgatggtc

SEQ ID NO: 288707 - DNA, 289 bp, Zea mays
cccacgcgtccgcccacgcgtccggcaaaacaagcgagttacttacaaccaaacagaagggtagaaaccacctgaagccatgtgcattgctgcatggatttggcaggctcaccctgtgcaccaactcctcctgcttctcaacagagatgagttccacagcaggcctacaaaagcagtaggatggtggggtgaaggctcacagtagatccttggtggcagggatgtgcttggtggaggaacatggatggggtgcaccaaggatggaaggcttgccttcctgaccaatgtg

SEQ ID NO: 288708 - DNA, 361 bp, Zea mays
tgtcaagagacggactacaagtacacaacaatgaactgtggtgtgtaacggaatgctgaaacagaggtggcaacctttctacaccaccaccaaaactgagtacaatccaggtatcagaaactcaaacaaaggcagcaagccatctcatctctgcaccatttccattggataagtagtatatcttttcccatttctcttctgaaaaattctcgcgccgaatgatcttttgcctcatataatagtgatatacagtctcaagctgcatctaaggtgtaacgtggacagatcaaacgagcatcagaaggaacatctggcagctcctgccgtcgtttgccaactgctgttgagtgtgaataagccc

SEQ ID NO: 288709 - DNA, 393 bp, Zea mays
ataatctcaaaatgggcactggtggtgccagcaaaaacaaactacaagaggacctttttcttcttgacaaggattggaggatcaacatcgatgcccatgttagcggcggtgccagcgatgatcctcatagcagagtcgatgctcttgcagttcaagtccggcaacttctcttgagctattgcacgcacttgatccactgttacctttcccaccttctgccgttgtggctcttttgaacctttttcgacacctgcagccttgagtagcaggactgaagccggaggggtcttcaagacgaagataaagctcttatcatcaaacacggtgatctcgacggggatgatgtagccgggcttgtcggccgtcttggcattgtactccttgcagaacgcc

SEQ ID NO: 288710 - DNA, 437 bp, Zea mays
cggcatgtgaacacagatggcaggattgagttacctgctgaccaagtacagcataaccaggtaatgtcatctgcctcacttgcaagaagtacagattcaggcagcccaggaatctcatctataagccagcggaaacaagagtcatctcatgacccaagtgcaattacctcaacctcgcagctagctagctcacctcaagtcccctttgttggaagtgatagggtgttgccatcatccagccaaagcatgccgcaaaggcaaatgtccggtggtgtgcctgtacatggatatggcattggtggccaggtgcagctacaacagtctcggcagcaactccagtctcagcagcagcagcagcagcagcagaggcctgttgtccaaggtggtgtatatgctcacccctcaaattcaggacaaggatgatgctgaaccatact

SEQ ID NO: 288711 - DNA, 287 bp, Zea mays
agctcgtgctcgacggagtcagaaaagtattctggagaggaaagctcctccaacattccctttccttatcgagatgagggagcggcattactgggtaacacatcggacagaaaggagcgtagatatgctactgcatggtaagaagccgctggttgaggttaggaaaagggatagcgagtttcaggttgtaattgaaagatgggcaacatatgatggcgatggactctgaacttgaaaccctggcgtcataattgcttctatcaaagttcttaatttagtacttgatg

SEQ ID NO: 288712 - DNA, 592 bp, Zea mays
cttcctctttcactgtggcaatgtgagcctcaatttgttccagcaccagcgaaggatcaacagctcctgcctcaatagctcatcgctaaattcagctgcatagccttcctcgccaatcaaatgagcacgtctcctatgattggcgaggaaggctatgcagctgaatttagcgatgaggctattgaggcgggcccggttgttccttcgctggtgctggaacaaattgaggctcacattgccacagtgaaagaggaagcctttagcaggaaggatattctcgagaaggttgaaagatggttgaatgcatgtgaggaggaagcttggctggaagattacaacaaagatgacaatcgttataatgccgcgacgggggcccacttgacactcaaacagggctgagaaagctcgtattttggttaacaagatcccaggactggtagatgttttaaccacaaaaattgtagcctgggaggcagaaagaggaaaggaattcacatacgacggtgtccgccttatgtcaatgcttgaagagtacatgatcgttcgccaggagaaagagctacagaagaagaggcaaagggatcagaagaaa

SEQ ID NO: 288713 - DNA, 292 bp, Zea mays
cccacgcgtccgcccacgcgtccggccttggtaaagaacaagtccgatgataaatggatcacgagcccatccagatcttgggagttggttcaactggatgctgaattttccccacagatagtttcccttcttgctagttatcaagatggcactactgtccttcagaggacaattgatagaactctgagtgtgaagctgaagaagcatctattggcactgggttggagtattaagttgcagaaaggacgaaattcaagaaaatggccatcataaacacactacaagataccgg

SEQ ID NO: 288714 - DNA, 280 bp, Zea mays
  unsure (1)..(280): unsure at all n locations
gcctctcgcacgctctcctccagtgtcgcggagggaagcgtggccgacggggaagaagagtatggaggcggcgtggacctccgcggtgaatcgggccaccggcacggccgactccgccaagagcttcctcctctccttccgccgcccgcctccgccggcaccgccgccgccgtgtccggaccccgaccccaaccccgtacagatcttgaaacgtttgcagcgacaagcgttttacgacattatgcagctgagggagangcaagagaaagttgaaagagtg
